United States Patent Application Publication US 2026/0022371 A1 - sequence listing, part 2

SEQ ID NO: 15228 - DNA, 80 bp, synthetic construct
  source 1..80: mol_type = other DNA
agaatgagtttgcgtgcatcccacatgcatctgggaggtcattaacaactttattgagaacagtttctgtagagtagtgg

SEQ ID NO: 15229 - DNA, 80 bp, synthetic construct
  source 1..80: mol_type = other DNA
ctacaggcagaccaaccaaagtctttgttccaccttttaaaactaaatcacattttcacagagttgaacagtgtgttagg

SEQ ID NO: 15230 - DNA, 80 bp, synthetic construct
  source 1..80: mol_type = other DNA
ggggtaccctttttagagaaaaggagagcatgtaaacttcgaggaaattgatatgtataattttataaaacagggcttgc

SEQ ID NO: 15231 - DNA, 80 bp, synthetic construct
  source 1..80: mol_type = other DNA
tttgcaaatgagagaactgaagcatagagagggttaagtaactgccccaaagtcacttaactagtaagtggaagtgctat

SEQ ID NO: 15232 - DNA, 80 bp, synthetic construct
  source 1..80: mol_type = other DNA
attgttttaagtgcattatggttaagcattctgtagaagtcttttgaaaagtgctgtttgtcctggggtttaatgaactg

SEQ ID NO: 15233 - DNA, 80 bp, synthetic construct
  source 1..80: mol_type = other DNA
aagttaaatttgaaatggccttatggtagattcctcccccgacacacacttacttcatgttttctttcattatatatttt

SEQ ID NO: 15234 - DNA, 80 bp, synthetic construct
  source 1..80: mol_type = other DNA
actataaagatagataaagttggaaaggtggcagagaaagttgggcaaggagatgcgatttttaatctaataagtagtta

SEQ ID NO: 15235 - DNA, 80 bp, synthetic construct
  source 1..80: mol_type = other DNA
ctgtgtccagcctgatctgacttatttttgaaaaaataattctggctgtttgttgaggagaggggcaaagatggacacac

SEQ ID NO: 15236 - DNA, 80 bp, synthetic construct
  source 1..80: mol_type = other DNA
aggtagaaaaaaaccgtttcttatgctgattcacattgttcagtagagagggaaaaaattgatgatgcaggagagagagg

SEQ ID NO: 15237 - DNA, 80 bp, synthetic construct
  source 1..80: mol_type = other DNA
tggtttttatgataatattctacttttatttgttcagggctctgtgtgacactccaggtgtggatccaaagcttatttct

SEQ ID NO: 15238 - DNA, 80 bp, synthetic construct
  source 1..80: mol_type = other DNA
cctgatgcctgtacacctcttgaagccccagaatctcttatgttaaaggtaaattaatttgcactcttggtaaaaatcag

SEQ ID NO: 15239 - DNA, 80 bp, synthetic construct
  source 1..80: mol_type = other DNA
gtttccagtctgtttgactattttttagcttgtactgctgtcttctttctctcttcagtttagacagcaaccgttaactt

SEQ ID NO: 15240 - DNA, 80 bp, synthetic construct
  source 1..80: mol_type = other DNA
accactgtacctggcctgcggtgctgtttttatcttcagtcattcattatgtgctctggttttaagaagttaagattgtt

SEQ ID NO: 15241 - DNA, 80 bp, synthetic construct
  source 1..80: mol_type = other DNA
gtccctagtggtatataccccaagaacaacaatagcaacaacaactataaaatgaaacaaaatcttaagctattgttagt

SEQ ID NO: 15242 - DNA, 80 bp, synthetic construct
  source 1..80: mol_type = other DNA
agtgtaatagaatagattcttactgatcacagataaaataatttgagcatcagaaaggataataacaggctgggcacact

SEQ ID NO: 15243 - DNA, 80 bp, synthetic construct
  source 1..80: mol_type = other DNA
ctgggattacaggcttgagcctgtaaatccagaaaaggattacagcccttttcttctagttcttaaagtgaatttgtgtc

SEQ ID NO: 15244 - DNA, 80 bp, synthetic construct
  source 1..80: mol_type = other DNA
ccagagtccacgatatgtatggttcagccctccagaaaataaagtctcctgcatttttttttttaatgctgcagcaagaa

SEQ ID NO: 15245 - DNA, 80 bp, synthetic construct
  source 1..80: mol_type = other DNA
attcttagcttccaaaattttggtgatacctcatttcctattctctctagttgcctttgtccatgtagattttttgagga

SEQ ID NO: 15246 - DNA, 80 bp, synthetic construct
  source 1..80: mol_type = other DNA
agacatcatctggattatacatatttcgcaatgaaagagaggaagaaaaggaagcagcaaaatatgtggaggcccaacaa

SEQ ID NO: 15247 - DNA, 80 bp, synthetic construct
  source 1..80: mol_type = other DNA
aacttacagttctatagttatctgcagaaatattgctccttatgctttatttgcttaaaattatcactagatcatactat

SEQ ID NO: 15248 - DNA, 80 bp, synthetic construct
  source 1..80: mol_type = other DNA
ttcatctgagacaagacaaatctcttccacctatgagcctgtaaaatcaaaagcaaattctttacttccaagatacaatg

SEQ ID NO: 15249 - DNA, 80 bp, synthetic construct
  source 1..80: mol_type = other DNA
ataataaaaataactcctagcctcaagtgagccactgcacccaggccagtcattaaagctctaaaatctcctttgactcc

SEQ ID NO: 15250 - DNA, 80 bp, synthetic construct
  source 1..80: mol_type = other DNA
tgaacactctgctgcttagaaatttcttccacaggataccctaaatcatctctctgaagttcaacattccacggatctct

SEQ ID NO: 15251 - DNA, 80 bp, synthetic construct
  source 1..80: mol_type = other DNA
cactagtgttcttaatggtatttagaatggtgaatcctttctggaaggttttcaattcactttacccatatctatcagag

SEQ ID NO: 15252 - DNA, 80 bp, synthetic construct
  source 1..80: mol_type = other DNA
ttaataatccttttgttttcttagaaaacacaacaaaaccatatttaccatcacgtgcactaacaagacagcaagttcgt

SEQ ID NO: 15253 - DNA, 80 bp, synthetic construct
  source 1..80: mol_type = other DNA
agcataggctttagaatcgtggcactctcattttattagcaaagtaaatgacaataaaatagctggccaggcgcggtggc

SEQ ID NO: 15254 - DNA, 80 bp, synthetic construct
  source 1..80: mol_type = other DNA
ataagagttggagtagggccttgcccagccactctgtaactggacaagtgatgtatttatttcttaggacctcatttcca

SEQ ID NO: 15255 - DNA, 80 bp, synthetic construct
  source 1..80: mol_type = other DNA
tgttgaatgataagaaacaagctcagatccagttggaaattaggaaggccatggaatctgctgaacaaaaggaacaaggt

SEQ ID NO: 15256 - DNA, 80 bp, synthetic construct
  source 1..80: mol_type = other DNA
ggtttcagatgaaattttatttcagatttaccagccacgggagccccttcacttcagcaaatttttagatccagactttc

SEQ ID NO: 15257 - DNA, 80 bp, synthetic construct
  source 1..80: mol_type = other DNA
tagacagtgttttaagtgctgggtacatagcgattaacaaaacagataagaatccctaccctcatagagcttacattatg

SEQ ID NO: 15258 - DNA, 80 bp, synthetic construct
  source 1..80: mol_type = other DNA
tttcaagcacttaggcaaaagatgatgaaccaaacaaaagcaatggaagtggtgagaagcagtcagattcttgttgtatt

SEQ ID NO: 15259 - DNA, 80 bp, synthetic construct
  source 1..80: mol_type = other DNA
aatcagtagccagaaggggaatcaggatcaagagaacatttgctttttcagttgaaagtgctaatagcatactgatgaga

SEQ ID NO: 15260 - DNA, 80 bp, synthetic construct
  source 1..80: mol_type = other DNA
attgcagtgagttaccagtggaaaatagaggacatgatcatttaggaagaaaacaaggaacttgggagcaacagagtatt

SEQ ID NO: 15261 - DNA, 80 bp, synthetic construct
  source 1..80: mol_type = other DNA
aaaacagagtcttggaccagattgggtttctagactaaatacagtgtgggaatacacaatacacaacctactagcctatg

SEQ ID NO: 15262 - DNA, 80 bp, synthetic construct
  source 1..80: mol_type = other DNA
ctcttcttactgaagagaagactttgtggatgaagctcttgagctcttaaaaacctccttgcaggcaactcccacttctg

SEQ ID NO: 15263 - DNA, 80 bp, synthetic construct
  source 1..80: mol_type = other DNA
gcattcaataattaatgaatcaatgtgtgtgtgcatgtaagaaaaaccatttgtatgaagcagaaaaaaaatgttaggta

SEQ ID NO: 15264 - DNA, 80 bp, synthetic construct
  source 1..80: mol_type = other DNA
tcattataaaccttaatcattagcttttagtattattctttgctgcattactaatataacctaggaataactggcgggta

SEQ ID NO: 15265 - DNA, 80 bp, synthetic construct
  source 1..80: mol_type = other DNA
ttcacttccagtacagtatgcaataaattacatgagatattcaacacttttttttttaaaaacaggccttgcgttagatg

SEQ ID NO: 15266 - DNA, 80 bp, synthetic construct
  source 1..80: mol_type = other DNA
cctctggcctctggttttagatgagaaatctgtcatcattccaattgatgtgtccctatttaaatgcattttcaactaac

SEQ ID NO: 15267 - DNA, 80 bp, synthetic construct
  source 1..80: mol_type = other DNA
caaaaccattcaacttcctgccttaaaccaccaccatacacacgtcagctaaactctaattttaggctgggcgcagtagc

SEQ ID NO: 15268 - DNA, 80 bp, synthetic construct
  source 1..80: mol_type = other DNA
tggggaaagcctgtttccctgggaaacagacttacagatttcatgtaggagattagaaaatgcccttaggaacagcactt

SEQ ID NO: 15269 - DNA, 80 bp, synthetic construct
  source 1..80: mol_type = other DNA
ctcagttctatcctggtttatcccaggatagaatggatagcacctacccatctttcactttagaattttataactcttgg

SEQ ID NO: 15270 - DNA, 80 bp, synthetic construct
  source 1..80: mol_type = other DNA
gaccattaggagctttctcatatggactcgtgtgttctttcaaccagctttcttcactttttgaacacttccttattttt

SEQ ID NO: 15271 - DNA, 80 bp, synthetic construct
  source 1..80: mol_type = other DNA
caacactgtcctggagatcagttcatagaaatcgtcctcactctttttttacagctacgtggtacaccattgtttggatg

SEQ ID NO: 15272 - DNA, 80 bp, synthetic construct
  source 1..80: mol_type = other DNA
atgggggaatggggaaatgacagcaactagaaagagaagaatgacttgaagggaaatgagttaggagaaattgtgagaag

SEQ ID NO: 15273 - DNA, 80 bp, synthetic construct
  source 1..80: mol_type = other DNA
gctgtgttgacattttacctagagactctatgcataatgaataacactctgctatatctagtttctaaattaggggtggg

SEQ ID NO: 15274 - DNA, 80 bp, synthetic construct
  source 1..80: mol_type = other DNA
gttcccctctccctatcagctagattcccctaaatcactgatactggttttgtaattttgcatcggcatgtttgacaatt

SEQ ID NO: 15275 - DNA, 80 bp, synthetic construct
  source 1..80: mol_type = other DNA
ctaataaggtcacaaagctagaaaagtaggtattagaacccagatagtgtgtgttctcaagatggctttaaaatatttat

SEQ ID NO: 15276 - DNA, 80 bp, synthetic construct
  source 1..80: mol_type = other DNA
ttcagccaccaaggagttgtggcaccaaatacgaaacacccataaagaaaaaagaactgaattctcctcagatgactcca

SEQ ID NO: 15277 - DNA, 80 bp, synthetic construct
  source 1..80: mol_type = other DNA
tgcaaatatgttggttctgctatagttccatcctgttcaaaagtcaggatgaatatgaagagtggtgtttccttttgagc

SEQ ID NO: 15278 - DNA, 80 bp, synthetic construct
  source 1..80: mol_type = other DNA
agcttccgtaggagcctttcattccaggaaggtccatcgtacttgcgttttcagggcctgagcgatgactttagcaccag

SEQ ID NO: 15279 - DNA, 80 bp, synthetic construct
  source 1..80: mol_type = other DNA
caccttgaaggtagtatagagcactgttttctccagcccttgctactaatccatattactctccgctaatatctttccaa

SEQ ID NO: 15280 - DNA, 80 bp, synthetic construct
  source 1..80: mol_type = other DNA
tatgggagctataattcaagatgagatttggatgaggacacagccaaactgttctgcccctggcccctcccaaatatcat

SEQ ID NO: 15281 - DNA, 80 bp, synthetic construct
  source 1..80: mol_type = other DNA
agggcagtcaaatattaaagctccaaaatgatctttggatcattttgacttcgtatctcacagccagatcatgctgatgc

SEQ ID NO: 15282 - DNA, 80 bp, synthetic construct
  source 1..80: mol_type = other DNA
agtctctttgcatagcaagagtgacctttactccaactctgaataagttcctcatctccatcagaaaccacttcagcctg

SEQ ID NO: 15283 - DNA, 80 bp, synthetic construct
  source 1..80: mol_type = other DNA
aatgacattttaaactgcttacctgtcaagtaaaattgacattccagaaagatgtgaaacgggctgggcacaatggctca

SEQ ID NO: 15284 - DNA, 80 bp, synthetic construct
  source 1..80: mol_type = other DNA
atcattgggattgtttaaacttgctttcacctttgcacctttcagttcaggatgcagtgttcaattgttaacttgggctt

SEQ ID NO: 15285 - DNA, 80 bp, synthetic construct
  source 1..80: mol_type = other DNA
gaaacaacaaaaaaaggagtctatgtagaacactattttttatagcaatgcaaaaactgtacagccggaaatgtgttgta

SEQ ID NO: 15286 - DNA, 80 bp, synthetic construct
  source 1..80: mol_type = other DNA
acaactgtatgttgtgctatgaggatgtaagagatttatctcaaatggcttagaaatcaaaatataggtcagtgcggtgg

SEQ ID NO: 15287 - DNA, 80 bp, synthetic construct
  source 1..80: mol_type = other DNA
agattaatatacacccatgtacccagcccctggcttaagaaatacatcacaaatataatgaaacccccgtgtgtcctttc

SEQ ID NO: 15288 - DNA, 80 bp, synthetic construct
  source 1..80: mol_type = other DNA
gcaagcctctatgtgcggtgtttgctaacatctcattagccaaagcaagttatgtggctgggctcagactctaagttaaa

SEQ ID NO: 15289 - DNA, 80 bp, synthetic construct
  source 1..80: mol_type = other DNA
actcttcctctgtacaacatgataattggagttgtagaagtcattttggaaccacaagatgactctgaaaatggaagcta

SEQ ID NO: 15290 - DNA, 80 bp, synthetic construct
  source 1..80: mol_type = other DNA
tcttgccagtttttccattcacctcttaattggccgaagattaccctctatgcattttttcaaagaaggctgatgagact

SEQ ID NO: 15291 - DNA, 80 bp, synthetic construct
  source 1..80: mol_type = other DNA
tctattggctagtaacagagtacaatttccacctgcactcaagaaaagaggattatacaaggagtcaccttagggtgtgt

SEQ ID NO: 15292 - DNA, 80 bp, synthetic construct
  source 1..80: mol_type = other DNA
tattgttactcttgaaaagtctgctgttttcaaatcaccatatctttgaaggcaatctctcttccctctggttgcgtcta

SEQ ID NO: 15293 - DNA, 80 bp, synthetic construct
  source 1..80: mol_type = other DNA
ctagtaatccttccatctgaagttgttgggggcctgattttgctgtattctttaactttcttgcataatatttgcttcct

SEQ ID NO: 15294 - DNA, 80 bp, synthetic construct
  source 1..80: mol_type = other DNA
catatactccctgtcctgatacatgcatagccttccctgttatcaatatcccagactagaatggtatgtttgttataatc

SEQ ID NO: 15295 - DNA, 80 bp, synthetic construct
  source 1..80: mol_type = other DNA
actccagcataggggacaagagcgagacttcatcttcaaaaaaaaaaagttttgtttttttcctttcaccaaactaagca

SEQ ID NO: 15296 - DNA, 80 bp, synthetic construct
  source 1..80: mol_type = other DNA
tcacattgcctttgctcctttgtcaaagatgagttaactatagcctggtgtgcagtggtacacacttgtagtcccagctg

SEQ ID NO: 15297 - DNA, 80 bp, synthetic construct
  source 1..80: mol_type = other DNA
cagagttttgtagttttttcatgcagaccttaaacatttttaaaagatttatacctaaatatttcatatgtagggtacga

SEQ ID NO: 15298 - DNA, 80 bp, synthetic construct
  source 1..80: mol_type = other DNA
agtcattgtggtttttgccattgaaagtaatggcaaatgacttttgcaccaacctaaggattttgctaaggattattgca

SEQ ID NO: 15299 - DNA, 80 bp, synthetic construct
  source 1..80: mol_type = other DNA
agggtccctgacttcccataacagggagacagtgccaatgggatatatatagagagatatacgaaagagatttattagag

SEQ ID NO: 15300 - DNA, 80 bp, synthetic construct
  source 1..80: mol_type = other DNA
tgtccatgggatctgtagttatgtgccctctttcattgctcatgtcagtaatatgtgtcttctctatttttttttcttag

SEQ ID NO: 15301 - DNA, 80 bp, synthetic construct
  source 1..80: mol_type = other DNA
ctttccttggtctaaagtcagctctgtctgaaatttatgtagctattcttgctttctcttaatgactatgttagtctgtt

SEQ ID NO: 15302 - DNA, 80 bp, synthetic construct
  source 1..80: mol_type = other DNA
tcacatgattttgtctgaaagtatcttatttctctgcttttgaaggttaattttgtaggatgtttatatggtttggctct

SEQ ID NO: 15303 - DNA, 80 bp, synthetic construct
  source 1..80: mol_type = other DNA
ttattgcctcagatattgcttctattctttctccttctggtattcccattgtacatatttataacttttgtagtccactg

SEQ ID NO: 15304 - DNA, 80 bp, synthetic construct
  source 1..80: mol_type = other DNA
aagttggactcgatgtactaagtaaaggaacagcagtaaaaaggcatttaattgaaatgtggtgggagggaatgtgttct

SEQ ID NO: 15305 - DNA, 80 bp, synthetic construct
  source 1..80: mol_type = other DNA
gttcattgcctgtttataagtgttgtcttgatgtttattttttgcatgtacattttaatttgtcaatctgtttcttcttt

SEQ ID NO: 15306 - DNA, 80 bp, synthetic construct
  source 1..80: mol_type = other DNA
ggacataggggagctagtcatatgtctgtcctactgagactctagatggcacaaggcaatggcacttgtgttagaaccag

SEQ ID NO: 15307 - DNA, 80 bp, synthetic construct
  source 1..80: mol_type = other DNA
ttgactatgccactcctaaatatatgcctcttggcctctgcatgagagaaggtggcctttgatgtgttatttccagcact

SEQ ID NO: 15308 - DNA, 80 bp, synthetic construct
  source 1..80: mol_type = other DNA
tctggatgtcaagccctcaggtccacattatctagaaggtgttctttaaggtagtccaagaaggaaatgggtaagaaatt

SEQ ID NO: 15309 - DNA, 80 bp, synthetic construct
  source 1..80: mol_type = other DNA
ttgggagagctaccttgaaatttctgcttatttcccctgcagcgtattgaagactccacggtggttgttttgttttgttt

SEQ ID NO: 15310 - DNA, 80 bp, synthetic construct
  source 1..80: mol_type = other DNA
agtagcaactgtctgagaatcagtctcagccggggttccttctgtctatagaaagtgaaagacagactgttattcaaatt

SEQ ID NO: 15311 - DNA, 80 bp, synthetic construct
  source 1..80: mol_type = other DNA
ttttcttggcattcagtcactacacatagaaatgtatactatgccggttcctaatgacttagcagttccctcaggctttg

SEQ ID NO: 15312 - DNA, 80 bp, synthetic construct
  source 1..80: mol_type = other DNA
gtccactgttggacccctgacacctaacccctggggctggcccacagttgggaattgcatggctgtctgaagccagcacc

SEQ ID NO: 15313 - DNA, 80 bp, synthetic construct
  source 1..80: mol_type = other DNA
aaacaatggatactgagggccggctgactagacctatttttattgtaattactcattctcttctacctcattaagcttgg

SEQ ID NO: 15314 - DNA, 80 bp, synthetic construct
  source 1..80: mol_type = other DNA
tccttgttcttatcttaaaacattgtttacagtgtcccagatgaatggcaacaaatcctggggtttggtgtttggatggt

SEQ ID NO: 15315 - DNA, 80 bp, synthetic construct
  source 1..80: mol_type = other DNA
actaaccaaagaaatgcagggagaattgtaattcattaggttttgatggccaggaaagccaagctgtgttattagggtca

SEQ ID NO: 15316 - DNA, 80 bp, synthetic construct
  source 1..80: mol_type = other DNA
caagtatgagaagcccaggactagatccccagttctcaagtgtggttgtacataagaatcacgaggtaagtggtaaacac

SEQ ID NO: 15317 - DNA, 80 bp, synthetic construct
  source 1..80: mol_type = other DNA
aaacagtccctgccttagagcagggtggtcgggatggcctggacagccacagcaattaaaaaattgcaacattttaaaat

SEQ ID NO: 15318 - DNA, 80 bp, synthetic construct
  source 1..80: mol_type = other DNA
gagacatttggcaaatgacacactgaaacccagactgtggctgtagaattctcctgcattcacctttcaataatctgccc

SEQ ID NO: 15319 - DNA, 80 bp, synthetic construct
  source 1..80: mol_type = other DNA
cacaaacctacatggtacggcctactatgcgcctaggctatatggtatggcccattgttcctaggctataaacctttaca

SEQ ID NO: 15320 - DNA, 80 bp, synthetic construct
  source 1..80: mol_type = other DNA
tggtaaagctggttcaaaggaaaattcaaggaatggaaatgtgtatatcagtcagtccagtgattgttgaaatgaatttc

SEQ ID NO: 15321 - DNA, 80 bp, synthetic construct
  source 1..80: mol_type = other DNA
aaagttttttttttttccttttttttttgtggtggagtttcactttgtcacccaggctggagtgcaatggtgcgatctca

SEQ ID NO: 15322 - DNA, 80 bp, synthetic construct
  source 1..80: mol_type = other DNA
atcctttctagctattcgcttgtcaaactcctgagcttactttcaatggagcttacacattccctccttccctcacatga

SEQ ID NO: 15323 - DNA, 80 bp, synthetic construct
  source 1..80: mol_type = other DNA
aagattgataggagaccttaacatccccaaaatccaacccaaactcccaaagatccatgtgccacatgttcattccatta

SEQ ID NO: 15324 - DNA, 80 bp, synthetic construct
  source 1..80: mol_type = other DNA
taaagagtaccaaatttcccgcttaaaaaactttgatttcactttacagccccagtcatacagtatgagtgcctcttttt

SEQ ID NO: 15325 - DNA, 80 bp, synthetic construct
  source 1..80: mol_type = other DNA
ctttttttcctctaggtgctccagcgcctgagttgtatggccatcaggggagatatgttcttggtggccaatcttgggac

SEQ ID NO: 15326 - DNA, 80 bp, synthetic construct
  source 1..80: mol_type = other DNA
aatgctcctcccacatttcactctgagatgatgtatgacaatttcaccctggtccctgtctggggaaaggaaggctatct

SEQ ID NO: 15327 - DNA, 80 bp, synthetic construct
  source 1..80: mol_type = other DNA
tgatcaagtgacacccaggacatgtaaatatttcataagccttaaacatttcctgaggtaagaaacaagctctcaaagca

SEQ ID NO: 15328 - DNA, 80 bp, synthetic construct
  source 1..80: mol_type = other DNA
attttataaagcaagaaaaatgaaatgatctccctattcccccacggtgtaggcctccagatccttttctggcttttagg

SEQ ID NO: 15329 - DNA, 80 bp, synthetic construct
  source 1..80: mol_type = other DNA
caaatggcaatcttgaccacaacatggagacaggaaatcaaatgcatttttggctaaaccagacttgggggaagtggctt

SEQ ID NO: 15330 - DNA, 80 bp, synthetic construct
  source 1..80: mol_type = other DNA
tgaaggcctcactggatttggagaatattattgattaaattgcgtcttccccaaaaaagatacgttgtagtcctaacccc

SEQ ID NO: 15331 - DNA, 80 bp, synthetic construct
  source 1..80: mol_type = other DNA
gaacactcatccatccttcaaggtctactctctcatcacagcttgtgactcttccactttttgaactggtgtttcccatt

SEQ ID NO: 15332 - DNA, 80 bp, synthetic construct
  source 1..80: mol_type = other DNA
ttctaggcttcatctgcccctctcagcagctctagagaagaagctcctctttttacacagtccctaattaaagtctcaga

SEQ ID NO: 15333 - DNA, 80 bp, synthetic construct
  source 1..80: mol_type = other DNA
caaatcttgattgaggagatcttaagaacagagtgatttacacagctgtgggcaggatgtaggggaacccagaaaggata

SEQ ID NO: 15334 - DNA, 80 bp, synthetic construct
  source 1..80: mol_type = other DNA
tagctgcatgagcgagccatgttggaagtgggtcctccagctgcagtcaagcttccagatgaccactgccctgggaaacg

SEQ ID NO: 15335 - DNA, 80 bp, synthetic construct
  source 1..80: mol_type = other DNA
aggcaagtgtgtccattttacagaagaaggaactaaggcctggaaggcaagtccttgcctgagactaaacagaatcccag

SEQ ID NO: 15336 - DNA, 80 bp, synthetic construct
  source 1..80: mol_type = other DNA
aggcaggggaataacatggtcatttaaaatgattcttctggctgatgacaggttttcagatgcttcacctcctcctaagt

SEQ ID NO: 15337 - DNA, 80 bp, synthetic construct
  source 1..80: mol_type = other DNA
cgtcaaagccacaggaggaaaagcccctacattcatgcacaacagaaaggctttgttttcagtaaacacgcacatcttca

SEQ ID NO: 15338 - DNA, 80 bp, synthetic construct
  source 1..80: mol_type = other DNA
tctctgagtttctctttaaagatttagcctgctaacttccttgacctttgttttcaaacctcaacttttctgttcctcct

SEQ ID NO: 15339 - DNA, 80 bp, synthetic construct
  source 1..80: mol_type = other DNA
gtggtctttcagcatgctggtctgaggatagtcagacttctaacaagacatctcaggtttcccagacagggtattataag

SEQ ID NO: 15340 - DNA, 80 bp, synthetic construct
  source 1..80: mol_type = other DNA
ttcgagggcaccttccacaggaatctttgtcagtttctctaggcatgaatcttgcaaacaatataaaagtcttcaagcaa

SEQ ID NO: 15341 - DNA, 80 bp, synthetic construct
  source 1..80: mol_type = other DNA
ttcacatttgacagagtcgatgaaaactcaggaaggttatgtaacttgccaaaaatcatacaggttgtcctgtctgcctc

SEQ ID NO: 15342 - DNA, 80 bp, synthetic construct
  source 1..80: mol_type = other DNA
atatgcagtcttcccttcaatctccaacagtgctgtgagatcagtaggatgactttccttttatcctatgataggtcatc

SEQ ID NO: 15343 - DNA, 80 bp, synthetic construct
  source 1..80: mol_type = other DNA
tttgaatccatgttaaaacacaatagcctacatatccaatgtcttacaattgaacactaagaagccaccaaggatcacat

SEQ ID NO: 15344 - DNA, 80 bp, synthetic construct
  source 1..80: mol_type = other DNA
tcagtgttctgaatttccaccattctaattggtgtgttgtggcatctcattttgtttccctgatgagatgtgtggaacat

SEQ ID NO: 15345 - DNA, 80 bp, synthetic construct
  source 1..80: mol_type = other DNA
atacctaagtactttgtatgttgggtacaaatgtaaatagtattgtgttttaaatgtcaaattcactgttcactgctggc

SEQ ID NO: 15346 - DNA, 80 bp, synthetic construct
  source 1..80: mol_type = other DNA
ctaatagatataggtccattcagatataggcctatttcttcttgtgtacattttggcaaattgtcttttaagatccatcc

SEQ ID NO: 15347 - DNA, 80 bp, synthetic construct
  source 1..80: mol_type = other DNA
tctgcctgctggttctgtccattagtgatagaggggtgttgaagtctccaactatgatagtggattcatctatttctcat

SEQ ID NO: 15348 - DNA, 80 bp, synthetic construct
  source 1..80: mol_type = other DNA
agtaagagtcataggggaaaggggaatgagacaaccacaaggaaatgagaagtaacacaaaaagaggaatgaagcagaga

SEQ ID NO: 15349 - DNA, 80 bp, synthetic construct
  source 1..80: mol_type = other DNA
caacagcaactgaaatgtaagaagacatcattcttttaggatccactcctgagggcaaactatgttacctccccctttac

SEQ ID NO: 15350 - DNA, 80 bp, synthetic construct
  source 1..80: mol_type = other DNA
gttttctgcccattcccactcccaagtatacagcaggcaagcagtatttgttgaataaatatatttgaaaatcccatata

SEQ ID NO: 15351 - DNA, 80 bp, synthetic construct
  source 1..80: mol_type = other DNA
tggaaagatcacccttgtagaagggactcctgcatttgttaagaggttagagactggatgaacctcaggtctctttcaat

SEQ ID NO: 15352 - DNA, 80 bp, synthetic construct
  source 1..80: mol_type = other DNA
cccatacctgtaagaccctcaatgtatatgaaatcattttcactgggaaagtgacagttacagtaaaagcagaaccacac

SEQ ID NO: 15353 - DNA, 80 bp, synthetic construct
  source 1..80: mol_type = other DNA
tcagtcaggtctatttcaagattctagaagttccttttgtaaaacttgcctttaaaactcttcctcctaatgccatcaga

SEQ ID NO: 15354 - DNA, 80 bp, synthetic construct
  source 1..80: mol_type = other DNA
atgtaaggaaactttttgatgctaagaaatcttaaatgtgtacagcttcatgaatcagccacagggcaggtgctcaaaag

SEQ ID NO: 15355 - DNA, 80 bp, synthetic construct
  source 1..80: mol_type = other DNA
tatacagtatttcattgtgtgattatactatggtttagttatacatttcaactactgggcatctggttgcttccagttct

SEQ ID NO: 15356 - DNA, 80 bp, synthetic construct
  source 1..80: mol_type = other DNA
cgggagtggggaaagaagcttgtttcaggtgtgttttctagtcagaatatgactaaaaacaggctcctctcctctgcatg

SEQ ID NO: 15357 - DNA, 80 bp, synthetic construct
  source 1..80: mol_type = other DNA
gagcaggttaacaaggactgagaatgctatggtaggggtatctagcaagttgtagtaaagaatagttagaatatgcttca

SEQ ID NO: 15358 - DNA, 80 bp, synthetic construct
  source 1..80: mol_type = other DNA
tgggctggagatataaatctgggaatcctcagcattataggtagtatttaaaaccaaaggaactgatgagagcactaggg

SEQ ID NO: 15359 - DNA, 80 bp, synthetic construct
  source 1..80: mol_type = other DNA
aatggaagaatgagaggaataactgcggacagcaagagagtagttttgctgcaaaaggggacagagaaatatggcagtag

SEQ ID NO: 15360 - DNA, 80 bp, synthetic construct
  source 1..80: mol_type = other DNA
ttcctccgttgttaaggaatgaggctggtaaagatacagactatacattaaaaactgtaaactgcagtagcataaattct

SEQ ID NO: 15361 - DNA, 80 bp, synthetic construct
  source 1..80: mol_type = other DNA
ggcagtatttttactgttatcttgtaaagtcagttctgcactagcactgctaaccagcatctctgggaggaaaaagtgca

SEQ ID NO: 15362 - DNA, 80 bp, synthetic construct
  source 1..80: mol_type = other DNA
tttgtccattttctgcagccatcataagaggtgttttccctgtagagtccacagaattgacttgagcattatggctgagc

SEQ ID NO: 15363 - DNA, 80 bp, synthetic construct
  source 1..80: mol_type = other DNA
ttttttttggtagagatgcaggtcttgctatgttgaccaggctggtcttaaactcctggcttcaagtcatcctcccactt

SEQ ID NO: 15364 - DNA, 80 bp, synthetic construct
  source 1..80: mol_type = other DNA
ctggaaaccaatcctcaacagcaaacgagaaatgactgtgctatttttttatttttttcttaatggcaatgggatgttta

SEQ ID NO: 15365 - DNA, 80 bp, synthetic construct
  source 1..80: mol_type = other DNA
aaaaaaagtctgtacatgttcagcctaactatatttctgatggacattcagttgaattcaccgatgggggacccatggat

SEQ ID NO: 15366 - DNA, 80 bp, synthetic construct
  source 1..80: mol_type = other DNA
ccctcattctccaggtatatgggttcttaaggtgtggcctagggaaccctggggtgacgcaaaaaaaatatgaataaaaa

SEQ ID NO: 15367 - DNA, 80 bp, synthetic construct
  source 1..80: mol_type = other DNA
ctacaggctgaaaatcagacacatttgttatgatctttaaatggcaaccaggcatgcagttcttgcaaaattctgtctct

SEQ ID NO: 15368 - DNA, 80 bp, synthetic construct
  source 1..80: mol_type = other DNA
cagaacagctcccagtgaaagaactatgaaacagcatattatagaaagataggaaatctcaacttcctggtaaggcagtc

SEQ ID NO: 15369 - DNA, 80 bp, synthetic construct
  source 1..80: mol_type = other DNA
aagaaaaacctcaaaaatacttcatggcttatctcagaacacctttgacaactagtgtcttggctttagcatgacaaagg

SEQ ID NO: 15370 - DNA, 80 bp, synthetic construct
  source 1..80: mol_type = other DNA
agttctaggtaatatgaggtcataaaagctttttgaaaggaaagagcatatttctgcttacccctctatgcaacgctgtc

SEQ ID NO: 15371 - DNA, 80 bp, synthetic construct
  source 1..80: mol_type = other DNA
ctccagcaaagggatgataccatgattagaccaagtcaatcacaagaaccccattctcctctgacagtgatcagttttaa

SEQ ID NO: 15372 - DNA, 80 bp, synthetic construct
  source 1..80: mol_type = other DNA
aatcagttcatttacactcagttcacagtcgctactgatgaatgtttgtgtcatctaagttcaatacccaaacagcaagc

SEQ ID NO: 15373 - DNA, 80 bp, synthetic construct
  source 1..80: mol_type = other DNA
tattattaaaatatttttctcagccccacttgaacatctgatagctttgaagggcggctctgggagtaacagtgggtgtt

SEQ ID NO: 15374 - DNA, 80 bp, synthetic construct
  source 1..80: mol_type = other DNA
tgccttcaaagagtaaccagtaggtgtgacatagaattggccaatgttagcatctgcagccatcatcaaaagatgaatcc

SEQ ID NO: 15375 - DNA, 80 bp, synthetic construct
  source 1..80: mol_type = other DNA
ttttcatgagtatacaatgcttggctcacggcagacattcaatggatgtgtgacacggattcatttaaagtcttgatttc

SEQ ID NO: 15376 - DNA, 80 bp, synthetic construct
  source 1..80: mol_type = other DNA
ccccgagttgccttcttcatacagtctaataaaagggctttccagaaaagtcttttcaaaatccaacatggcaactgaac

SEQ ID NO: 15377 - DNA, 80 bp, synthetic construct
  source 1..80: mol_type = other DNA
gtctaggaggtacaggctgcagtgagctgggaatgcaccactgcaacccagcctgggtgacagaatgagattgtatctct

SEQ ID NO: 15378 - DNA, 80 bp, synthetic construct
  source 1..80: mol_type = other DNA
attccacttaaatgaggtgtctagattagtcaaattcataggaacagaaggtaggctagtattaccagggactggggaaa

SEQ ID NO: 15379 - DNA, 80 bp, synthetic construct
  source 1..80: mol_type = other DNA
agcattttactaaaaatcatggatctcacaaacacctggtgagagtaccctggtctcctgattctcaaagtacccccttc

SEQ ID NO: 15380 - DNA, 80 bp, synthetic construct
  source 1..80: mol_type = other DNA
ttatgaaagtatactaaggaccacagactaagagctttgaagacaggcataagagtttgggggaaatgctacttaattgc

SEQ ID NO: 15381 - DNA, 80 bp, synthetic construct
  source 1..80: mol_type = other DNA
attaggtctttcacaagaattcaggaatcttaccagctgaagacatagacggtgaccataagcagctgaataatgaactg

SEQ ID NO: 15382 - DNA, 80 bp, synthetic construct
  source 1..80: mol_type = other DNA
aaccaaggtcagaactcaatgaatctgaattagaggactaagaagaggtatataaacagagtaaagtggtaagaaggtat

SEQ ID NO: 15383 - DNA, 80 bp, synthetic construct
  source 1..80: mol_type = other DNA
tattgaggattttcgcattgatgttcatcagggatattggcctaaaattctcaaggctttggtatcaggatgatgctggc

SEQ ID NO: 15384 - DNA, 80 bp, synthetic construct
  source 1..80: mol_type = other DNA
tctgattatctcaatagatgcagaaaaggccttcgacaaaattcaacagcacttcatgctaaaaactctcaataaactag

SEQ ID NO: 15385 - DNA, 80 bp, synthetic construct
  source 1..80: mol_type = other DNA
gagtgaactcccattcacaactgctacaaagagagtaaaatacctaggaatccaacttacaggggatgtgaaggacctct

SEQ ID NO: 15386 - DNA, 80 bp, synthetic construct
  source 1..80: mol_type = other DNA
gacatacaaaaaaatgctcatcatcactggtcatcagagaaatgcaaataaaaaccacaatgagacactatctcacgcca

SEQ ID NO: 15387 - DNA, 80 bp, synthetic construct
  source 1..80: mol_type = other DNA
atgtaaataatgtaaatgatgagttgatgggtgcagcaaaccaacatggcacatgtatacctatctaacaaacctgcacg

SEQ ID NO: 15388 - DNA, 80 bp, synthetic construct
  source 1..80: mol_type = other DNA
aaaagtttccaaaatcacactgaagtcatataaaaacaaatgaaaagaaattctaaagcaatgtaactgatctttcagta

SEQ ID NO: 15389 - DNA, 80 bp, synthetic construct
  source 1..80: mol_type = other DNA
taagactggtgttttgttttgtttcacaaactaattctgaggacatgtcaggaaaaggaagtgtttcagtcagtgtgtaa

SEQ ID NO: 15390 - DNA, 80 bp, synthetic construct
  source 1..80: mol_type = other DNA
tcattagagggtgggggcagaagagtctgtatactcttttttctgtttgcacattaacacatgttcattttatgaaacgc

SEQ ID NO: 15391 - DNA, 80 bp, synthetic construct
  source 1..80: mol_type = other DNA
tgggattagtgtccttataaataaggcccaaaagagctctcattccttctaccatgtgaggatatggcaagaatatgccc

SEQ ID NO: 15392 - DNA, 80 bp, synthetic construct
  source 1..80: mol_type = other DNA
ttgctggattcttacatgatgtaaaataaagacacttcagaggacttgctgaatgactgtctaccaagaacgcaggcatc

SEQ ID NO: 15393 - DNA, 80 bp, synthetic construct
  source 1..80: mol_type = other DNA
cttagcaattacttgctcatactcaaatgggtacagtatggaaactccaagatttaaattgggtctttcggatcccaagt

SEQ ID NO: 15394 - DNA, 80 bp, synthetic construct
  source 1..80: mol_type = other DNA
cagtaaactgagactgcagcactgcactccaccctgggcgacaaagcaagattccatctcaaaacgaaacaaaacaacaa

SEQ ID NO: 15395 - DNA, 80 bp, synthetic construct
  source 1..80: mol_type = other DNA
gaaaccattacttatttctgccaatggtatttttacttttcactgacccacaccatagggaattaccagacactgaaaat

SEQ ID NO: 15396 - DNA, 80 bp, synthetic construct
  source 1..80: mol_type = other DNA
ccatatggaagatgccagtttatagaaatattgatcctccactctcactcctatggtacttacttgccatctgtgtctga

SEQ ID NO: 15397 - DNA, 80 bp, synthetic construct
  source 1..80: mol_type = other DNA
tctgtgtcaattcctactctaagtaacttaacagtagttttaaatactgctaccacaaatactcaacaatgaggcctgct

SEQ ID NO: 15398 - DNA, 80 bp, synthetic construct
  source 1..80: mol_type = other DNA
ccagtattcagcagaaggtttaggcactccaaattcctattgagagaaaatacagttagaaaacttaattgacagtgatt

SEQ ID NO: 15399 - DNA, 80 bp, synthetic construct
  source 1..80: mol_type = other DNA
ttgctcgtatgaaccaactgcctaatttttccctggtggtactatttaaaacttagtccaaaatcttccaatctcaaact

SEQ ID NO: 15400 - DNA, 80 bp, synthetic construct
  source 1..80: mol_type = other DNA
ctgagggaagaaagaaatggagattaactgctaatggtctttctttaacaggggatgaagaggttttctgtatttttttt

SEQ ID NO: 15401 - DNA, 80 bp, synthetic construct
  source 1..80: mol_type = other DNA
tatctggacatttgcttagggagcaaaattcactaccctgtcaccccaccattgaaacatttccataatgcaacatgttc

SEQ ID NO: 15402 - DNA, 80 bp, synthetic construct
  source 1..80: mol_type = other DNA
ttatcaacacctcggtaagtacttactttgcagtgtcagcaccacttgtaataagagtgttgatcagcagctcatggcca

SEQ ID NO: 15403 - DNA, 80 bp, synthetic construct
  source 1..80: mol_type = other DNA
ggggggaagaaaaaaattactcactctactatatccataatgtgtaaaccttagttttactttgaataccctcttgcatc

SEQ ID NO: 15404 - DNA, 80 bp, synthetic construct
  source 1..80: mol_type = other DNA
agtcagaataacctaagcatgaatctcagatctcctacttaccacaagcaagatttttggacaagttgcctaacttcttt

SEQ ID NO: 15405 - DNA, 80 bp, synthetic construct
  source 1..80: mol_type = other DNA
gaatgcagtggtgtaatcatagttcactgcaaccttgaactctagggttcaagtgatcttctaacaacagcctctggagt

SEQ ID NO: 15406 - DNA, 80 bp, synthetic construct
  source 1..80: mol_type = other DNA
cggggagaaggcacagttatttctttctgaactggagaaacaatgtggagttttctttttcttaatcacctcaaatcact

SEQ ID NO: 15407 - DNA, 80 bp, synthetic construct
  source 1..80: mol_type = other DNA
aaactcacagctatcaacatattgtgtgtaagagctggaagggatctgagaaatcaacatgggaaatgtgtttcaacaaa

SEQ ID NO: 15408 - DNA, 80 bp, synthetic construct
  source 1..80: mol_type = other DNA
atttttactaatcctaaatggctcaattttgtgtctggttttcttcataccaccagatacagtttggcaagtgctcaaag

SEQ ID NO: 15409 - DNA, 80 bp, synthetic construct
  source 1..80: mol_type = other DNA
ggtaggagccactatgccagcccagaattttcacataattctaaaatccaaatgcttactcttgaaagtgattctaacaa

SEQ ID NO: 15410 - DNA, 80 bp, synthetic construct
  source 1..80: mol_type = other DNA
caacatcttgtccattatagcaggctacatgaagaggtgtatttccataggcatttggttcattcatctattagaaggga

SEQ ID NO: 15411 - DNA, 80 bp, synthetic construct
  source 1..80: mol_type = other DNA
aataaataagggaatagtttatatgattagtgtgtagtaaagaatctgacctctcccaaagagaggtctgtcctttgccc

SEQ ID NO: 15412 - DNA, 80 bp, synthetic construct
  source 1..80: mol_type = other DNA
ttgccagtgtcacaggcctggagattttaatgtcctgcaggtgggagtggccctaggccagacaggcactgaccaggcct

SEQ ID NO: 15413 - DNA, 80 bp, synthetic construct
  source 1..80: mol_type = other DNA
gcaaaattccagatcatctgagggcaactcaaccaagatccacagaaaggggaggatggagggatcccgtcccttctgta

SEQ ID NO: 15414 - DNA, 80 bp, synthetic construct
  source 1..80: mol_type = other DNA
gggctcctactgtcacacagcagtctaggacatactagactacaagatcatttgcagaagggccccagagtcaagacgtc

SEQ ID NO: 15415 - DNA, 80 bp, synthetic construct
  source 1..80: mol_type = other DNA
gagaaccattctaggtctttccagcccatggtgatccataccccctctgcactctcaggacactaaatatctgttattat

SEQ ID NO: 15416 - DNA, 80 bp, synthetic construct
  source 1..80: mol_type = other DNA
acctaaatccagtgatggaatcttattgtccacagtcttttgtggtatgtgctaccaccgaagatcctctcctaacctat

SEQ ID NO: 15417 - DNA, 80 bp, synthetic construct
  source 1..80: mol_type = other DNA
catctcacatgatctctgtgggccactatttcctcatgaataacccaaaaagacctaactaggtgtcattaaagaccttc

SEQ ID NO: 15418 - DNA, 80 bp, synthetic construct
  source 1..80: mol_type = other DNA
gtttcttatcactgtacccagggctctcccaaagccccagcctaggccccactctccctcttgggttattgaatatctca

SEQ ID NO: 15419 - DNA, 80 bp, synthetic construct
  source 1..80: mol_type = other DNA
aaaaaaagcatcagtgttaatttcctgattttgtggttatgttgtggttacatagaagaattatgcaggataacgccctt

SEQ ID NO: 15420 - DNA, 80 bp, synthetic construct
  source 1..80: mol_type = other DNA
cacctggacccatacccagtggaacattttaagagcccttcatggatcacctttctttagagagaactgttctttttttt

SEQ ID NO: 15421 - DNA, 80 bp, synthetic construct
  source 1..80: mol_type = other DNA
gcaggagaaaggcaaaagttacccagatcacaccaactgcacttgacaaggccacccagttctttctgaacctttcagac

SEQ ID NO: 15422 - DNA, 80 bp, synthetic construct
  source 1..80: mol_type = other DNA
gagggggctcacattggaaggcactctcaccttccgtcttgatcttgagtgccgtgcggaccagggcaaagagtgtggca

SEQ ID NO: 15423 - DNA, 80 bp, synthetic construct
  source 1..80: mol_type = other DNA
gttaggattaactgttgtctacaaaatgggtaccccaaaataggctctctcctttggcgcattccctcagatatgggata

SEQ ID NO: 15424 - DNA, 80 bp, synthetic construct
  source 1..80: mol_type = other DNA
ctggagatactctgattctctgatctgagacctcagataaatgaagggggaaggagaagcccactcatactgaataaact

SEQ ID NO: 15425 - DNA, 80 bp, synthetic construct
  source 1..80: mol_type = other DNA
caagcaggagctaaactttagagaagagggcaaaatcaatctgattcaagttactagagggatgcactgttctgaccaaa

SEQ ID NO: 15426 - DNA, 80 bp, synthetic construct
  source 1..80: mol_type = other DNA
ttcactcagtggaggagcccagtgcaaaataaagctgtgggaccacttgttcaaaatgatgaatatcttcaaggcagtga

SEQ ID NO: 15427 - DNA, 80 bp, synthetic construct
  source 1..80: mol_type = other DNA
tcagcagcttgatcagcctcatgacacggaacaggcggaagaaggcgctggagatgcgggcactctcatctgggtcctgc

SEQ ID NO: 15428 - DNA, 80 bp, synthetic construct
  source 1..80: mol_type = other DNA
aactgtcactaaggtcctttgccagcgatcacagttctctctggactgtgtttccatctgcatagagggtgccagagaga

SEQ ID NO: 15429 - DNA, 80 bp, synthetic construct
  source 1..80: mol_type = other DNA
tcacctgaagaactcgaaaaacacatatacctttgctgggtctgcacttaggtcaattaagtcagcttctaggggatggg

SEQ ID NO: 15430 - DNA, 80 bp, synthetic construct
  source 1..80: mol_type = other DNA
cctcagagactccagacttttcctcagccattcctctcacccacaccccacctcaggcatccccagtgctgatccttcca

SEQ ID NO: 15431 - DNA, 80 bp, synthetic construct
  source 1..80: mol_type = other DNA
ctacagtttagtttgttcgcaacacagcagccacagtgattgttttagaactaaagtctgttcacacttaaaccctccaa

SEQ ID NO: 15432 - DNA, 80 bp, synthetic construct
  source 1..80: mol_type = other DNA
cgactttcctttccgttacagctcttgcctttgatagtgtagtaggtacacccattgtgtccccctggtatctgagttac

SEQ ID NO: 15433 - DNA, 80 bp, synthetic construct
  source 1..80: mol_type = other DNA
tgagaacgaaagagacaaggcaagattttcccccagccctgggactgttcttcagaaacttcagagcaggcgagaatgta

SEQ ID NO: 15434 - DNA, 80 bp, synthetic construct
  source 1..80: mol_type = other DNA
ccagggatctcttacccttttattagaaagtggatgaaattctacctcttccacaaaaccttccaggtagtttgggagga

SEQ ID NO: 15435 - DNA, 80 bp, synthetic construct
  source 1..80: mol_type = other DNA
acatttttctcctggggagcccttacctgcatgccgaggcagatggtgttgagcatgatgagggcaaacatcaggtattc

SEQ ID NO: 15436 - DNA, 80 bp, synthetic construct
  source 1..80: mol_type = other DNA
ctggctgtggagagccaagagagccttctcaacaatcaagttacgggacaggagttaggtcggcgccaggaaagaccaga

SEQ ID NO: 15437 - DNA, 80 bp, synthetic construct
  source 1..80: mol_type = other DNA
cccctgcagccaggaagagggagggagggagggaggcatgttgtcatggaaacaggatagaaaagtgggctctgggagtg

SEQ ID NO: 15438 - DNA, 80 bp, synthetic construct
  source 1..80: mol_type = other DNA
cggattctggtgcagttccttcaaagacccagatagggaaactgcctcggccaaggacacagcactagttgaagacacag

SEQ ID NO: 15439 - DNA, 80 bp, synthetic construct
  source 1..80: mol_type = other DNA
tgattgtaagatgatgccatttcatgtctaagactgactggggttatgtaattatgactttgaaagatcgtgctttggtg

SEQ ID NO: 15440 - DNA, 80 bp, synthetic construct
  source 1..80: mol_type = other DNA
tctaagtgcatgacaatagctttaagagatggggcttgaattgtatttaaatttcaactcagtagacacatgaccctctg

SEQ ID NO: 15441 - DNA, 80 bp, synthetic construct
  source 1..80: mol_type = other DNA
atatcctgccctccacaccagctgcctttctgcctgaaaacactcccaccttccccttccctttcctccagccgtgagag

SEQ ID NO: 15442 - DNA, 80 bp, synthetic construct
  source 1..80: mol_type = other DNA
aaatctctatatttcactcaactccttgcagtggcctaaatgcatttcctatctctgctcgcagttgttgaaatgtgagg

SEQ ID NO: 15443 - DNA, 80 bp, synthetic construct
  source 1..80: mol_type = other DNA
ctcttggaggaaaaggcctttccagtcactgttaacagaggtctagggatgacaaatcacacagctccccggctctgctc

SEQ ID NO: 15444 - DNA, 80 bp, synthetic construct
  source 1..80: mol_type = other DNA
aaagaaaaaataaaaagaaaaatgcctgaggcttcaagacatgggctgtactctgtggatgggggagccacaggctggct

SEQ ID NO: 15445 - DNA, 80 bp, synthetic construct
  source 1..80: mol_type = other DNA
aggcagacagatgaaactccacagagactatggcctgtgtatagtttaaaggtgtaaaattatgaagccgataaaaacta

SEQ ID NO: 15446 - DNA, 80 bp, synthetic construct
  source 1..80: mol_type = other DNA
gttgaaataaaaggaccctgtgatcctctcctgggctaggattttaaaaatagtaacttcacagagaagcttcttccagc

SEQ ID NO: 15447 - DNA, 80 bp, synthetic construct
  source 1..80: mol_type = other DNA
gcacatatcttttgctgtaagccatttcaaactatttttagaaagaagcaggatataaacacattcagtccccttggtaa

SEQ ID NO: 15448 - DNA, 80 bp, synthetic construct
  source 1..80: mol_type = other DNA
agacactggatagtgagtaatctgcctcatcacgacatatatgggcgtgtcctcatttatgatccattctgcatgactgg

SEQ ID NO: 15449 - DNA, 80 bp, synthetic construct
  source 1..80: mol_type = other DNA
actttttgaactccacttcctcagttttcaggaatggtgagcagagtcagatgggaatgagcagggcagggctagcaatg

SEQ ID NO: 15450 - DNA, 80 bp, synthetic construct
  source 1..80: mol_type = other DNA
ccccatgtgcaggttacagaagtttgcccactgaggtgggtgtcaccatgtcagggaccctgatcattgggttacaggga

SEQ ID NO: 15451 - DNA, 80 bp, synthetic construct
  source 1..80: mol_type = other DNA
agccaaacaaccctgtgagtctctaatctttttggcacaaagaattatcctacagctgtacctgcatttgctatgtccta

SEQ ID NO: 15452 - DNA, 80 bp, synthetic construct
  source 1..80: mol_type = other DNA
aacaaaacaaaacccctatcccagtgatctagaagcttattgctgctctctatggacaagaaattggactgtgggctcac

SEQ ID NO: 15453 - DNA, 80 bp, synthetic construct
  source 1..80: mol_type = other DNA
tggctgcatgcccactctctccttcctgcagagcacttgtctgtttgtaatttcacgctggttaatatgactattgatta

SEQ ID NO: 15454 - DNA, 80 bp, synthetic construct
  source 1..80: mol_type = other DNA
ctgactcccagccttggctgtggctgggcctcaacccaggacgccccttcccttgtttccaaggcaccatggatgttttt

SEQ ID NO: 15455 - DNA, 80 bp, synthetic construct
  source 1..80: mol_type = other DNA
ccctgtccgtgattctttttctttcctatatatttaacttctttctttcaaatggaccctcactttgccattcttaaagc

SEQ ID NO: 15456 - DNA, 80 bp, synthetic construct
  source 1..80: mol_type = other DNA
tcatgagaattgctgcaacattctgtatagtaagtttccccaacaaaagctttggactgatcaccctggcatttagtgct

SEQ ID NO: 15457 - DNA, 80 bp, synthetic construct
  source 1..80: mol_type = other DNA
agtgttttgacaacgattggcacattcacggtgctctcgagaagattggttgagatgaatgaatgaatgaattcatctga

SEQ ID NO: 15458 - DNA, 80 bp, synthetic construct
  source 1..80: mol_type = other DNA
cctaaagtgtaaagtccaacactttattcacatataaggcctgatatcgtttggatagacagccctgcccaaatctcatg

SEQ ID NO: 15459 - DNA, 80 bp, synthetic construct
  source 1..80: mol_type = other DNA
gtttcagcatctcttctgtgattctcctcttgctgctaccttgtatttacctctatcattgccctccttctattgacttg

SEQ ID NO: 15460 - DNA, 80 bp, synthetic construct
  source 1..80: mol_type = other DNA
agccagactgagtaaaatcctccatctttcacagaagagcgataatgacacaaacctccgaggcaatggaatgagaggat

SEQ ID NO: 15461 - DNA, 80 bp, synthetic construct
  source 1..80: mol_type = other DNA
ctgcacatctgttaccatggttacctctttgaagggcactggagaccttcatcttttctttgatgtatagctctattgtt

SEQ ID NO: 15462 - DNA, 80 bp, synthetic construct
  source 1..80: mol_type = other DNA
gaactggatgattttgttcaagcctgcaatttcatacaggctctctgtgtcagagccaccttcatccaaagacagttttc

SEQ ID NO: 15463 - DNA, 80 bp, synthetic construct
  source 1..80: mol_type = other DNA
aactgaatcagccacggagcctcaaattggccatactgccccaacccttcaaactaccttagaaatttagttttgtacag

SEQ ID NO: 15464 - DNA, 80 bp, synthetic construct
  source 1..80: mol_type = other DNA
acaactgtaatgtgacatgatttctattaggacaagtcataggccctgctaatagcactgtggtttgttgcctatgttca

SEQ ID NO: 15465 - DNA, 80 bp, synthetic construct
  source 1..80: mol_type = other DNA
tcttttctcccctggctacctttgaatttcttacccactcaggacacccagcaccaggttgaggatgaagaaggatccca

SEQ ID NO: 15466 - DNA, 80 bp, synthetic construct
  source 1..80: mol_type = other DNA
atagttatatgggaaagcagtcttgcagaggcaaggaaaaagactcaaagggcccttcgttcctcaaaaagtgtgaaatt

SEQ ID NO: 15467 - DNA, 80 bp, synthetic construct
  source 1..80: mol_type = other DNA
gattaattgtcctaagcagtgcaacccatgaaagaggagtaatctgagtgtcatttgtccccacagaactttaaaaaaga

SEQ ID NO: 15468 - DNA, 80 bp, synthetic construct
  source 1..80: mol_type = other DNA
acagaagttgatgtgagagtccagcagcctctatcaagccaggcagtgaagagatttacaaaaagtgtaaaatagcgtca

SEQ ID NO: 15469 - DNA, 80 bp, synthetic construct
  source 1..80: mol_type = other DNA
gagcatggccttgaagatggagttcaggaccacctgcaggcctgcagaggcaggcagggaagggaaaagaggagtcgcct

SEQ ID NO: 15470 - DNA, 80 bp, synthetic construct
  source 1..80: mol_type = other DNA
cccagagaagaaactccacagcaagttctccctctgtgcttttcctcctggctgcactttttgataatgccctttatttt

SEQ ID NO: 15471 - DNA, 80 bp, synthetic construct
  source 1..80: mol_type = other DNA
tcaatacaggtctgtggaataaactaataaatgacagaggctgagaaacttatgaacatccagaaactgctggccagtgg

SEQ ID NO: 15472 - DNA, 80 bp, synthetic construct
  source 1..80: mol_type = other DNA
attagaatgggttgaataaatgaaggatctgaggtacccaaaatgaaagtccccaggtggtttctggctttggcaccttt

SEQ ID NO: 15473 - DNA, 80 bp, synthetic construct
  source 1..80: mol_type = other DNA
gaagataatttatttttacttccaagtgagtaggtatgggaggcaagggaagaggtccccaaatggctcactattgtgga

SEQ ID NO: 15474 - DNA, 80 bp, synthetic construct
  source 1..80: mol_type = other DNA
gttggctgacagcctctgcagcctgggctcagtcttccatggaaaaatgagggatagtcattccacagatatttattaag

SEQ ID NO: 15475 - DNA, 80 bp, synthetic construct
  source 1..80: mol_type = other DNA
aatggctccacaacacctaccagaaaaatccaaatgcgtttccgtggcatgcaagatcctccataacatgacccttgctg

SEQ ID NO: 15476 - DNA, 80 bp, synthetic construct
  source 1..80: mol_type = other DNA
ctgcctgcaatgttcttccccagatatcctcatgactcacttttttctttctttcagggcccaacttgaaggtcacttta

SEQ ID NO: 15477 - DNA, 80 bp, synthetic construct
  source 1..80: mol_type = other DNA
aacttcgtgaggtgagagctcccttacctcaccccccaacaagggcctttattattaaatgtccccttcaaggaaattct

SEQ ID NO: 15478 - DNA, 80 bp, synthetic construct
  source 1..80: mol_type = other DNA
aggcttggcaggtgctactattagaagacagttttacaatattcctgattgctttcctcccggattccctcactttcttg

SEQ ID NO: 15479 - DNA, 80 bp, synthetic construct
  source 1..80: mol_type = other DNA
agaaaaataatcatcacagattacaaagggctaacgcagtaatagaagaatgaatgaatctctttagcctagaaagcgga

SEQ ID NO: 15480 - DNA, 80 bp, synthetic construct
  source 1..80: mol_type = other DNA
ggagagggtgagagagactcgcacctttcagggccgaggcacacacaccttctggtgtctgatgcccaaagtttgtgctg

SEQ ID NO: 15481 - DNA, 80 bp, synthetic construct
  source 1..80: mol_type = other DNA
cacatagctaccaagaggcagagccatgatatgtatagacagtttgattccagactccatggtctcaaccactatgccag

SEQ ID NO: 15482 - DNA, 80 bp, synthetic construct
  source 1..80: mol_type = other DNA
ctaaaatccaggctttcattcatttccacagacccttttggagcaccatcacttctctgtacagtggcccaggctcaaac

SEQ ID NO: 15483 - DNA, 80 bp, synthetic construct
  source 1..80: mol_type = other DNA
tatctaacctagcaatcctattccatcattctctctccggtgtcataacttctgctgctctaattccctttaactcagct

SEQ ID NO: 15484 - DNA, 80 bp, synthetic construct
  source 1..80: mol_type = other DNA
tacctgaaataatcctttggcataactgttgggggttagaccctttgaatctagaacaacctgggggtctctgtgactat

SEQ ID NO: 15485 - DNA, 80 bp, synthetic construct
  source 1..80: mol_type = other DNA
attccacctggcaggtctttcttaaggccacctcacagccatctttaccatcaccagtgccttggcccagcctcccctgt

SEQ ID NO: 15486 - DNA, 80 bp, synthetic construct
  source 1..80: mol_type = other DNA
aacatcccatacttggggaagccttcctgatctcaagactagcttaggttctctgtcaatatgctaccataatatcccca

SEQ ID NO: 15487 - DNA, 80 bp, synthetic construct
  source 1..80: mol_type = other DNA
actcataatactgtctctatgaactctaggcctaacccaaggttttgcaactccagcccacaaactaaagaaaaacatac

SEQ ID NO: 15488 - DNA, 80 bp, synthetic construct
  source 1..80: mol_type = other DNA
cctgttgaaaaggtggttccattgttctgtcccctagggagcctgaggccactgtttataagagggcttcccctagaagt

SEQ ID NO: 15489 - DNA, 80 bp, synthetic construct
  source 1..80: mol_type = other DNA
acacaagtttcttatgaattacatttggggaagagaaattagcattcaacctctgtggctcactagctgaccttactaag

SEQ ID NO: 15490 - DNA, 80 bp, synthetic construct
  source 1..80: mol_type = other DNA
ttgtttgggggtggatggggaggcatattacgtagttgggcttgacagaaaaatcccattctcttcccagtaacctccag

SEQ ID NO: 15491 - DNA, 80 bp, synthetic construct
  source 1..80: mol_type = other DNA
caagggagagttttctcaaagaggccatcgcatctttttttggtccctatcctattctaaaatgaggctggtgcttcaaa

SEQ ID NO: 15492 - DNA, 80 bp, synthetic construct
  source 1..80: mol_type = other DNA
tattttcaaaatatgagtttaatgacagaattagttagctagtattccacaaaaagtattgctctattttcaaaaaattt

SEQ ID NO: 15493 - DNA, 80 bp, synthetic construct
  source 1..80: mol_type = other DNA
gctgtctgtatggtagtgggtgctgtgattttgttttcatcagaattgtttggagttgggctattcatcatcatcgtcat

SEQ ID NO: 15494 - DNA, 80 bp, synthetic construct
  source 1..80: mol_type = other DNA
ggtggagttgtatgagatgtatggactgagatctaagatttcctcgcattctgccagtgtacctcactagcctgtcccac

SEQ ID NO: 15495 - DNA, 80 bp, synthetic construct
  source 1..80: mol_type = other DNA
ccctccacctctttttaatgtcccagttttaaaaataccttatcttgtgctacatgagatagctgggaaagccatgatgg

SEQ ID NO: 15496 - DNA, 80 bp, synthetic construct
  source 1..80: mol_type = other DNA
aacaaagctgtactgtatgcagtcttatatggccatgactttgttataattacccagtgctatgacattggtctcaagtg

SEQ ID NO: 15497 - DNA, 80 bp, synthetic construct
  source 1..80: mol_type = other DNA
cctggactccagggagtaagccgaatcctttcagggtcagcaccaggccccaagttcaatactgccccaagggccaagac

SEQ ID NO: 15498 - DNA, 80 bp, synthetic construct
  source 1..80: mol_type = other DNA
aggagcatacaatttttgccataaacaaaaattttaggagaacgtttagtaagagatagcatactctcaaccctcagcac

SEQ ID NO: 15499 - DNA, 80 bp, synthetic construct
  source 1..80: mol_type = other DNA
ctattcttagcaactctactttgagtttttgagttggtgtagtcactgttgctagctcacactgaagattcaggctgagc

SEQ ID NO: 15500 - DNA, 80 bp, synthetic construct
  source 1..80: mol_type = other DNA
tcaaatgaaagtagaaagtaaacttgtggtgcaagagactgattcacataaaggaaaggagagtctaggcaggcacaagt

SEQ ID NO: 15501 - DNA, 80 bp, synthetic construct
  source 1..80: mol_type = other DNA
ctctcccctcttcagacaccagccttgagtgcagacctgttaaaatggattgtcaatctgtgaaagtgagttaaggcagc

SEQ ID NO: 15502 - DNA, 80 bp, synthetic construct
  source 1..80: mol_type = other DNA
tctcctttttttcacatgacgtttactccccaatttcttcctttatggacactggacattgttcttttttgttttgtttt

SEQ ID NO: 15503 - DNA, 80 bp, synthetic construct
  source 1..80: mol_type = other DNA
agcgactggcctctgggaatcacatctttgtgggaggagaaactggtgattatcctcttctgtttccctggcagggactg

SEQ ID NO: 15504 - DNA, 80 bp, synthetic construct
  source 1..80: mol_type = other DNA
ccttgttggtctctagaccagagctcactcagtaaatatggaattctcaaaaagcagcccagcatctgaactggatcctt

SEQ ID NO: 15505 - DNA, 80 bp, synthetic construct
  source 1..80: mol_type = other DNA
tggtcctacttgagacaattggtctcaaaaagatttttacaagaacctgaagcagtggaagcttggatggaacagagctt

SEQ ID NO: 15506 - DNA, 80 bp, synthetic construct
  source 1..80: mol_type = other DNA
caaatgttggaggtggaggagatggtgaagggcaatagagaggcaggaaggaggatcgaatgatcacttagcataaggcc

SEQ ID NO: 15507 - DNA, 80 bp, synthetic construct
  source 1..80: mol_type = other DNA
ttgccccaggttacacatcagtgctctgcaggtaaatcactgattaaccacaaattcagagtcagggactttcacagaca

SEQ ID NO: 15508 - DNA, 80 bp, synthetic construct
  source 1..80: mol_type = other DNA
tctgtaagaaactatggaggctattagtgtattgccaaaaaagggaaggaaaagctggtctgccagtgaagattttgggg

SEQ ID NO: 15509 - DNA, 80 bp, synthetic construct
  source 1..80: mol_type = other DNA
gtatgttttaatatctcccccagtgcccagtgtacctttctatgtttgggcagcaaagcagaatgtttgaggttcttgaa

SEQ ID NO: 15510 - DNA, 80 bp, synthetic construct
  source 1..80: mol_type = other DNA
tgaccccaattttccaggccctcaccttccatgatcctcttaaaaacccttgcccagaaccccttgaagaattggatttg

SEQ ID NO: 15511 - DNA, 80 bp, synthetic construct
  source 1..80: mol_type = other DNA
agatagagtcagtgatacaccagattatggaggcttctgaatgctgtggacagatcctgaaactatatccaaatggatgg

SEQ ID NO: 15512 - DNA, 80 bp, synthetic construct
  source 1..80: mol_type = other DNA
gcttattacacaaatcgacagcaaccagaaggggagtctgaggtttcactgttttacatttgctattatcgccagacaga

SEQ ID NO: 15513 - DNA, 80 bp, synthetic construct
  source 1..80: mol_type = other DNA
tacccagatctctcatttggtctttaggttgtcttggaaattctgtttttaattgcatgaatcttccctcctcaactaga

SEQ ID NO: 15514 - DNA, 80 bp, synthetic construct
  source 1..80: mol_type = other DNA
gtctacttaatctgagctcttaaggacaggacagcaatgttagcttttataacctcattgtttagcacagaggttctttt

SEQ ID NO: 15515 - DNA, 80 bp, synthetic construct
  source 1..80: mol_type = other DNA
ttgcctggccaaaaagactttgaagttcattaactggtcactttccacaaccacatctgtggtttaagttgctgtggcca

SEQ ID NO: 15516 - DNA, 80 bp, synthetic construct
  source 1..80: mol_type = other DNA
acaataaaaagaaaaaaactgaagataaagccacagcagaagagaacatcaataatgactctcaatttaaagtgatattt

SEQ ID NO: 15517 - DNA, 80 bp, synthetic construct
  source 1..80: mol_type = other DNA
aggctggagtgcagtggtgcaatcacagctaactgcaacttctgcctcccagatgaaagtgattctcttatatcagcctc

SEQ ID NO: 15518 - DNA, 80 bp, synthetic construct
  source 1..80: mol_type = other DNA
acacaaacctagaagacaagttggctcagctgcttgccagtgccttcagttgatatttttaaaaaacagctaccatatag

SEQ ID NO: 15519 - DNA, 80 bp, synthetic construct
  source 1..80: mol_type = other DNA
atactcatctagacatccacctcagccaaataaacttggtttgagtttggggacttaatctaagaagcactcctctttgg

SEQ ID NO: 15520 - DNA, 80 bp, synthetic construct
  source 1..80: mol_type = other DNA
ctcaagagcaggggtcaaaaaactacagctggtgggacaaatccagccagggcctcctgttttcctaaataaacttttac

SEQ ID NO: 15521 - DNA, 80 bp, synthetic construct
  source 1..80: mol_type = other DNA
tgacaggaacttatcacccaaggcctggctagactaatcttcttttgtgatcaaagaaggaaagataggaaggaaaaaga

SEQ ID NO: 15522 - DNA, 80 bp, synthetic construct
  source 1..80: mol_type = other DNA
aggagctgggtattgcataagctcttacacaaggagatccattctgaggaaacattgatatccatatggtttttgtcatc

SEQ ID NO: 15523 - DNA, 80 bp, synthetic construct
  source 1..80: mol_type = other DNA
ctgcgcccgaccccctctttcattcttattattcctatcttggatggtaaggactgaagggatttgattggttgaagctt

SEQ ID NO: 15524 - DNA, 80 bp, synthetic construct
  source 1..80: mol_type = other DNA
tcttgttctaactgcttcttcagagaggttgggccttcgtgtggcttgatttaggattagtattaatagatcagtactgg

SEQ ID NO: 15525 - DNA, 80 bp, synthetic construct
  source 1..80: mol_type = other DNA
gagtcctctcagtgctctcccctctgtgtacctttgtctctttaaatattctgaaatccaacaaggctacatgaacactg

SEQ ID NO: 15526 - DNA, 80 bp, synthetic construct
  source 1..80: mol_type = other DNA
aattcctcccttatgggagtgttgaaaggatgaagtgagaaaatccatgttaacttcttagcacacactctggcacaaag

SEQ ID NO: 15527 - DNA, 80 bp, synthetic construct
  source 1..80: mol_type = other DNA
gggcccacacgtttcccatctcagtgtataagaagataatggtgggtcatcacttttccttggatgttttcataaatatc

SEQ ID NO: 15528 - DNA, 80 bp, synthetic construct
  source 1..80: mol_type = other DNA
atttcttaaacttaatcaagctcttgattgactatggtctcaaacttgagtccatactggccgaggcagtatgagatcag

SEQ ID NO: 15529 - DNA, 80 bp, synthetic construct
  source 1..80: mol_type = other DNA
gactcttttggcttctggaataggctcctgaacattgagttcccagcctccagcttactaaaaacttatcttagcatttt

SEQ ID NO: 15530 - DNA, 80 bp, synthetic construct
  source 1..80: mol_type = other DNA
tatagcttttggtgaagaaatgggttcaggagacctctccctgctctttcatcctaaagtgggttaactgcgcaagaatt

SEQ ID NO: 15531 - DNA, 80 bp, synthetic construct
  source 1..80: mol_type = other DNA
tccacatatacaagtgaagtctcttgtccaaggtgaccatcaagaatttgaagagatcatcatttaaaatcttgataagg

SEQ ID NO: 15532 - DNA, 80 bp, synthetic construct
  source 1..80: mol_type = other DNA
tctgccatcctgagctacatggatgaagaggatagaggaacataaagatggaaacaaattgagacagacgaactgaaaag

SEQ ID NO: 15533 - DNA, 80 bp, synthetic construct
  source 1..80: mol_type = other DNA
tacattctgagtcctcactcttgaaaaagccaatgagtttgatgtagtcttcaatgcgttcgaaggcttggacttccagt

SEQ ID NO: 15534 - DNA, 80 bp, synthetic construct
  source 1..80: mol_type = other DNA
cttttggcaactactctctgcttctctgagttctcgtgttctagattccacatataataagtgagaacatgttgtattag

SEQ ID NO: 15535 - DNA, 80 bp, synthetic construct
  source 1..80: mol_type = other DNA
ggcagtgtctggattcgatcaagtctaaagtctcctctaactagagccttctacttaggtaagtcaatcacattgtttat

SEQ ID NO: 15536 - DNA, 80 bp, synthetic construct
  source 1..80: mol_type = other DNA
gcagggtcactgtgtataaatacttacatccaagaggaactccaccaagacatcagctgcaaactcgccatcaaactcta

SEQ ID NO: 15537 - DNA, 80 bp, synthetic construct
  source 1..80: mol_type = other DNA
acatcagcaacccattaatgtatgtggccaggatggacagcttgctttcctgttccagctgaatcccacacatcttcttt

SEQ ID NO: 15538 - DNA, 80 bp, synthetic construct
  source 1..80: mol_type = other DNA
ttgctagtctatttttatgtatacttgcccagcttgtccacccaaaatttttagatcactgggacactagtatttttctc

SEQ ID NO: 15539 - DNA, 80 bp, synthetic construct
  source 1..80: mol_type = other DNA
caaagatcctgttttataacccgctattttttttaatagccattcttcactggtcatgcagaaaaagccaaatgggcagt

SEQ ID NO: 15540 - DNA, 80 bp, synthetic construct
  source 1..80: mol_type = other DNA
aaagaagagaatttttaactctctcagagagatcaccacagtggtgagataagagaagctggacttttagcttgctttag

SEQ ID NO: 15541 - DNA, 80 bp, synthetic construct
  source 1..80: mol_type = other DNA
gagcaagtaggcaatacttgcttacttcaggactgagacctaattcttgccatctgtttgaacagggacttgaaacagaa

SEQ ID NO: 15542 - DNA, 80 bp, synthetic construct
  source 1..80: mol_type = other DNA
tagctgtattgtcttaccttcccatgagcaaggtatgaataatccagtttttccacgtctttgtcaggacttcgtagcat

SEQ ID NO: 15543 - DNA, 80 bp, synthetic construct
  source 1..80: mol_type = other DNA
cctctgccaacaccacatagtcttgattgcagtagctaggatcaagtatatctgaaagcaggtagactatctcttttcac

SEQ ID NO: 15544 - DNA, 80 bp, synthetic construct
  source 1..80: mol_type = other DNA
ctattgtttggtccagacacatttaggatttattgtcttcttgatggtttgaccctggatctgtttggctctacaactca

SEQ ID NO: 15545 - DNA, 80 bp, synthetic construct
  source 1..80: mol_type = other DNA
accatgttttatttggttttaggtagatccaaatgtgtgcctctcgtaggcatgtaaagcatggccttctggttatctta

SEQ ID NO: 15546 - DNA, 80 bp, synthetic construct
  source 1..80: mol_type = other DNA
tcacaagggcacagtactctggcacttattgtgtaatcattagagttgtgtatagtctctacattgtgactctttcctcc

SEQ ID NO: 15547 - DNA, 80 bp, synthetic construct
  source 1..80: mol_type = other DNA
tattattgacttgtccacaagcctgtgctgtgactccagtgtaaaaagtggacaataccaatatctattcaatgggactg

SEQ ID NO: 15548 - DNA, 80 bp, synthetic construct
  source 1..80: mol_type = other DNA
cactctatttcttacttaatacaattgtcttcagctccgcaaaacatcaagcttattcctggctcaggtgtttgcacagg

SEQ ID NO: 15549 - DNA, 80 bp, synthetic construct
  source 1..80: mol_type = other DNA
tcgtctgagtagaagagtaatatgactaagttgtgtttggcaagagtggatctgagtgcgtagagcagacagaaaggaga

SEQ ID NO: 15550 - DNA, 80 bp, synthetic construct
  source 1..80: mol_type = other DNA
ctaacccagggaaagacaggaagaaagttatatttgtaccatttcccaagaactgtctttgtagaggagaaagactaatt

SEQ ID NO: 15551 - DNA, 80 bp, synthetic construct
  source 1..80: mol_type = other DNA
aactttcatctgttaccttttgttcctatacctgggcctctgagggacctgggcccaaatcctggctttgcaacttatca

SEQ ID NO: 15552 - DNA, 80 bp, synthetic construct
  source 1..80: mol_type = other DNA
tccctcaaactctccttgggaaaaagtttcacatgatactcagtgctttctggagccagagagatcatccctttttaaac

SEQ ID NO: 15553 - DNA, 80 bp, synthetic construct
  source 1..80: mol_type = other DNA
gcaaaaatactctgcaccaacctgtaaagctcaaactgccgcagagtagggctgctgagtaaagaaaaatcttgtgattt

SEQ ID NO: 15554 - DNA, 80 bp, synthetic construct
  source 1..80: mol_type = other DNA
taatcaactcaatccatgcttttacaactagcatttctgttcttttaccgtctcactccaaggatcccctgtattaccga

SEQ ID NO: 15555 - DNA, 80 bp, synthetic construct
  source 1..80: mol_type = other DNA
agccccatattggcatggtttatggtaagttcataatatgtgcttctcccttctcctccttcctcttctcttcattcaac

SEQ ID NO: 15556 - DNA, 80 bp, synthetic construct
  source 1..80: mol_type = other DNA
gaagtgagttcttatcatcaataaaagagggacatttccctagacactggggccattccatctgcatctttgtaagtgct

SEQ ID NO: 15557 - DNA, 80 bp, synthetic construct
  source 1..80: mol_type = other DNA
gacctgaggatagttagaaggccaccttctgagttggtctttaaaagccaggcaattcaactagaaagatctcaaatagg

SEQ ID NO: 15558 - DNA, 80 bp, synthetic construct
  source 1..80: mol_type = other DNA
aggtcagtgtaaagaggtgaatctgtgtgacttactcaggatagtgggtaaatagaagagaagttcaggtgctcggctct

SEQ ID NO: 15559 - DNA, 80 bp, synthetic construct
  source 1..80: mol_type = other DNA
atcctgtcatagatgatgaaaccagcatccctctccgctacagggcttaatagataatctgcatgagtcatcctctaaat

SEQ ID NO: 15560 - DNA, 80 bp, synthetic construct
  source 1..80: mol_type = other DNA
catgtgaccagtgcatttatttagttgtgtttttgagtcgcaagcagtttcttgatccttgcccaatgtgaacttggctc

SEQ ID NO: 15561 - DNA, 80 bp, synthetic construct
  source 1..80: mol_type = other DNA
catgccatctctcaagcacttcaacctgagggaaatggtgacatttctcaactcaggttgagaaatgaaggactttctct

SEQ ID NO: 15562 - DNA, 80 bp, synthetic construct
  source 1..80: mol_type = other DNA
ggaaagcaaagtttgagtttgctgcctcctggtgtcatattacttgcctttttcttgctaagctgtatagaccttatctt

SEQ ID NO: 15563 - DNA, 80 bp, synthetic construct
  source 1..80: mol_type = other DNA
tctagaggattaagaggacaaaatagatgttttgaccatgaagaaagtttaaaggcatgttcgctctttccactcatgga

SEQ ID NO: 15564 - DNA, 80 bp, synthetic construct
  source 1..80: mol_type = other DNA
gtgcctagtagagacaaagccagaacttaaatccagatatcctgacttcaaggtctgtgttctttttctcctaatgatgc

SEQ ID NO: 15565 - DNA, 80 bp, synthetic construct
  source 1..80: mol_type = other DNA
aacctgagttctctgattgtgctggttaataaactgtaattctcaaatatccctttcacaggtttgcgcctgggctaggc

SEQ ID NO: 15566 - DNA, 80 bp, synthetic construct
  source 1..80: mol_type = other DNA
aggcaaagcaagtcatatttctttaaaacctgcttgaagttcttctcggaaagacttaccactcggtccttcccatcata

SEQ ID NO: 15567 - DNA, 80 bp, synthetic construct
  source 1..80: mol_type = other DNA
ggctgagttttatgacgggcccggtgctgaagggcagggaacaacttgatggtgctactttgaactgcttttcttttctc

SEQ ID NO: 15568 - DNA, 80 bp, synthetic construct
  source 1..80: mol_type = other DNA
tttccctcctggattgttaacatcttggaatacttccccaggcagtctggaagttattggtctcttgcaataattttatg

SEQ ID NO: 15569 - DNA, 80 bp, synthetic construct
  source 1..80: mol_type = other DNA
agcccatggacacaaaagaaaagaaacacccattttccttgttcccttaatttcctctcctccttacccctcctctcctt

SEQ ID NO: 15570 - DNA, 80 bp, synthetic construct
  source 1..80: mol_type = other DNA
gcacagctctaatgaacactcacttctagttcactcacaggcattttctggatacaaacaagtcctcaaaaagaattttg

SEQ ID NO: 15571 - DNA, 80 bp, synthetic construct
  source 1..80: mol_type = other DNA
tacatacatttaggaacaattgcacttttaaagggagagaatgcatagttgctcacatatctcagtgtcagtcacctaac

SEQ ID NO: 15572 - DNA, 80 bp, synthetic construct
  source 1..80: mol_type = other DNA
ttctttggtgcagagttccaaaaattatgtagcccagctctttaattttgtaacatctaatgatatcaccgccttgaagt

SEQ ID NO: 15573 - DNA, 80 bp, synthetic construct
  source 1..80: mol_type = other DNA
aagtaaattaaaatcacagaaatactctttggagttgcatagcatgttcacaacgttccagtttcattcagtgaaaactt

SEQ ID NO: 15574 - DNA, 80 bp, synthetic construct
  source 1..80: mol_type = other DNA
ttgacactaagaagattttattatatatgcaattgctggtggttagatatatgatacttaaaattttctaattatctaat

SEQ ID NO: 15575 - DNA, 80 bp, synthetic construct
  source 1..80: mol_type = other DNA
agctttatgcacatctaaaaatataaaattatgttatttggctttatttttctctaaaattccaaaatagaaaactagga

SEQ ID NO: 15576 - DNA, 80 bp, synthetic construct
  source 1..80: mol_type = other DNA
ggaaagtactgtatttctaatgatgtgaggacacccttaatgagacataaacataggaggatgaatacacaggagggaaa

SEQ ID NO: 15577 - DNA, 80 bp, synthetic construct
  source 1..80: mol_type = other DNA
cccagatggaaaaatcttaggaccactaaaaggcctcttgaccactaggcggcaaaaactaattttgaactacttgccta

SEQ ID NO: 15578 - DNA, 80 bp, synthetic construct
  source 1..80: mol_type = other DNA
gaaaatctggtagagttttatgctgccaagattagctcagttttcccctgaatttctcaactaggttgataaaatccaga

SEQ ID NO: 15579 - DNA, 80 bp, synthetic construct
  source 1..80: mol_type = other DNA
caaacaacagactgagaatccataattgtacgtgtaaagatttcaatttcccaaacttcatattatgtcttcacccccat

SEQ ID NO: 15580 - DNA, 80 bp, synthetic construct
  source 1..80: mol_type = other DNA
atttctgcctatgaaactgctcttgctaatacttcagagcacaccttgcttctcctgaagcatggcagccaaataaatct

SEQ ID NO: 15581 - DNA, 80 bp, synthetic construct
  source 1..80: mol_type = other DNA
ttctaggaattcagtatttttatggaattgtacaaaatagcttacccctactaaggttggaaaagaaaatggtagcatta

SEQ ID NO: 15582 - DNA, 80 bp, synthetic construct
  source 1..80: mol_type = other DNA
ctgtaagtatagccattggtggtgttttcttcctcatttttagaaaaatcaaattaatatatattctgctataattcagc

SEQ ID NO: 15583 - DNA, 80 bp, synthetic construct
  source 1..80: mol_type = other DNA
aggatatgctctgtaaataagcaagtaaaatagtttaaatacaacatttcatgacatttagaaatacctttatatttaga

SEQ ID NO: 15584 - DNA, 80 bp, synthetic construct
  source 1..80: mol_type = other DNA
tctcatacatgagcacctacgtattctttatttctctacctagggagaatcaggtagacccggacgacctggagagcgag

SEQ ID NO: 15585 - DNA, 80 bp, synthetic construct
  source 1..80: mol_type = other DNA
taacgcttccatgaaaaatgacaacttgaagagtctagattagaaatagttgagcatcttagtataacttatcaattact

SEQ ID NO: 15586 - DNA, 80 bp, synthetic construct
  source 1..80: mol_type = other DNA
tctctttttagggtgctcggggtaatgacggtgctcgaggcagtgatggtcaaccagtaagtaactttctatctcttatg

SEQ ID NO: 15587 - DNA, 80 bp, synthetic construct
  source 1..80: mol_type = other DNA
gtgctaaggtaaacatgtgtttctatagaagggtataaaaatatcttggaggcaagagaaaagcattagattgcttcttg

SEQ ID NO: 15588 - DNA, 80 bp, synthetic construct
  source 1..80: mol_type = other DNA
cccactcctcagccttatctcatccacacattactggcttcttttgcattttgcatgacaatagatttgtgatatttaag

SEQ ID NO: 15589 - DNA, 80 bp, synthetic construct
  source 1..80: mol_type = other DNA
aggagctgcaggagaaagggtacgttttccatggggcatctaaaagaaaagcagcatcactgtcatctaaataaaactac

SEQ ID NO: 15590 - DNA, 80 bp, synthetic construct
  source 1..80: mol_type = other DNA
ggaggtccaggaatgagggtacagagaaacatttgtttgaatgacactttaatttagacagaagaaaggcaagacaaatg

SEQ ID NO: 15591 - DNA, 80 bp, synthetic construct
  source 1..80: mol_type = other DNA
gaaaatcaaattgcatgtaggaagggagctaaatatataattggttatggttgtatgtgtgtgtatggagcaggcagata

SEQ ID NO: 15592 - DNA, 80 bp, synthetic construct
  source 1..80: mol_type = other DNA
taaatgctagcattgagtttagagtgtacatgtgtgctttgggtccaggtcctcccttttcttcacatcactacttttat

SEQ ID NO: 15593 - DNA, 80 bp, synthetic construct
  source 1..80: mol_type = other DNA
gtgcacctggagctccaggaggcaaggtagtatttcaatttattctctaccttcttcagcaggttatagagcaattgatt

SEQ ID NO: 15594 - DNA, 80 bp, synthetic construct
  source 1..80: mol_type = other DNA
ggagaaagaggaggtcttggaagtcctggtccaaagggtgacaaggtgttgacttgttttctcttaattgttcaataaat

SEQ ID NO: 15595 - DNA, 80 bp, synthetic construct
  source 1..80: mol_type = other DNA
tatggagacatgacacaagggagtcttatggtgattgcacatttgagtatcttgattgaggtggtagtcaggcacatcta

SEQ ID NO: 15596 - DNA, 80 bp, synthetic construct
  source 1..80: mol_type = other DNA
catactttttaaccccatacagacagtagctacttatgcttccctttttggcagttttgccctcagttccctgagcctca

SEQ ID NO: 15597 - DNA, 80 bp, synthetic construct
  source 1..80: mol_type = other DNA
aagataagatgataagatgacatttcctgcctaaaggagatgacgcacacttcactgtgactaaggaggatatttttctc

SEQ ID NO: 15598 - DNA, 80 bp, synthetic construct
  source 1..80: mol_type = other DNA
attttatactgagatagcatgtcatagtgtcaagaatataatctttatatgaatatagtccaagtatgaatctcagcacc

SEQ ID NO: 15599 - DNA, 80 bp, synthetic construct
  source 1..80: mol_type = other DNA
agtcattttccactacactcttccttcctttggtagccttcagagatcacttaaccatatcaaggatgaaaagtttttct

SEQ ID NO: 15600 - DNA, 80 bp, synthetic construct
  source 1..80: mol_type = other DNA
tacaatgtacagtattctgaattagataatcaatgtaactattcagccctttgccatccagagtcactgagcaagttaga

SEQ ID NO: 15601 - DNA, 80 bp, synthetic construct
  source 1..80: mol_type = other DNA
ctggatcagatggtcttccaggccgagatggatctcctggtggcaaggtataataaacacatgtgcaattgatttgtgtt

SEQ ID NO: 15602 - DNA, 80 bp, synthetic construct
  source 1..80: mol_type = other DNA
ggttcccgaggtgctcctgtaagttttgtcattttttggttttattttgttttgttctttttttaactcattctacagtg

SEQ ID NO: 15603 - DNA, 80 bp, synthetic construct
  source 1..80: mol_type = other DNA
cccagagtaagtagcacagaaagatattacaggtccacatgtttcagatgtctgcatttcagaaagatattctggcattg

SEQ ID NO: 15604 - DNA, 80 bp, synthetic construct
  source 1..80: mol_type = other DNA
gactagcaatgtattcttagagtggcgactgaatgtgcatacctcaatgatccatgttttactcattctagggctcccca

SEQ ID NO: 15605 - DNA, 80 bp, synthetic construct
  source 1..80: mol_type = other DNA
tggaacactgcctttgctaggagtcatttctagaaattacttaaaataggagacaagcatcaatcatagggatttcagct

SEQ ID NO: 15606 - DNA, 80 bp, synthetic construct
  source 1..80: mol_type = other DNA
atggggtcaaatgaaggtgaattcaaggctgaaggaaatagcaaattcacctacacagttctggaggatggttgcacggt

SEQ ID NO: 15607 - DNA, 80 bp, synthetic construct
  source 1..80: mol_type = other DNA
tattgtagatattgcaccctatgacattggtggtcctgatcaagaatttggtgtggacgttggccctgtttgctttttat

SEQ ID NO: 15608 - DNA, 80 bp, synthetic construct
  source 1..80: mol_type = other DNA
tgcttgtaaaggtgctcctcttttttcttgtcattgctggtcaagattactaatatttgggaaggctttaaagacgcatg

SEQ ID NO: 15609 - DNA, 80 bp, synthetic construct
  source 1..80: mol_type = other DNA
gtctcccctcgccgcatccactctccggccggccgcctgcccgccgcctcctccgtgcgcccgccagcctcgcccgcgcc

SEQ ID NO: 15610 - DNA, 80 bp, synthetic construct
  source 1..80: mol_type = other DNA
ccccgttaaaaagcattttaagatgctggggcgatatttatggggtcaggtagttgatgggcagaggaagggctgcagga

SEQ ID NO: 15611 - DNA, 80 bp, synthetic construct
  source 1..80: mol_type = other DNA
cattgacctggagcgcagaattgaatctctcaacgaggagatcgcgttccttaagaaagtgcatgaagaggtataccttg

SEQ ID NO: 15612 - DNA, 80 bp, synthetic construct
  source 1..80: mol_type = other DNA
gcagttcacaccctcactttgtgaccttgggcccatcatagatcctctctgggccttcatctacttaaatctacaatagg

SEQ ID NO: 15613 - DNA, 80 bp, synthetic construct
  source 1..80: mol_type = other DNA
tggtccatttctgtccccaggaggctcgagattactgattacctcaacaagacctggaaacaattttttttttttttgag

SEQ ID NO: 15614 - DNA, 80 bp, synthetic construct
  source 1..80: mol_type = other DNA
tgcctggcctagaaatgttctatatcttgatttggactggtagttacacagacgtggacattgatcaaaactcattgaat

SEQ ID NO: 15615 - DNA, 80 bp, synthetic construct
  source 1..80: mol_type = other DNA
tggtgcaatctccgctcactgcaagctccacctcctgggttcgcaccattctcctgcctcaccctcctgagtatctggaa

SEQ ID NO: 15616 - DNA, 80 bp, synthetic construct
  source 1..80: mol_type = other DNA
catagtacaaaaaactccacccacattgcacagtgcttttccaaatcaatagctttgtggccatgataaggttggtacca

SEQ ID NO: 15617 - DNA, 80 bp, synthetic construct
  source 1..80: mol_type = other DNA
ctgagaccatctaaactatgggacaggcgctggggactgcagaaccacctgctgggtgctgggctgaaggaaaggtgtta

SEQ ID NO: 15618 - DNA, 80 bp, synthetic construct
  source 1..80: mol_type = other DNA
ccctagcccaggagagagaaagccaggcaggtagccagggggactagcccctgtggagactggggggcttgaaattgtcc

SEQ ID NO: 15619 - DNA, 80 bp, synthetic construct
  source 1..80: mol_type = other DNA
ttttttgtggcactttttaatagtacgtctccgtgaacatattatatcacttctgggactacatatttttgagagcagag

SEQ ID NO: 15620 - DNA, 80 bp, synthetic construct
  source 1..80: mol_type = other DNA
atgatattccatcatcatatcacaatagtgatagctgctggttattgatatactgatgagccaagcagtaagctaggatc

SEQ ID NO: 15621 - DNA, 80 bp, synthetic construct
  source 1..80: mol_type = other DNA
tagaaagtagaaaccacagggaacaatgtacattctgaaatgcttaatttgcagacattgtgaaattttactcatcaatg

SEQ ID NO: 15622 - DNA, 80 bp, synthetic construct
  source 1..80: mol_type = other DNA
acatttaagcaaaagtaataggttctgcttcttagctattgatgggataaagaacacaaggacaggtggggagagaagag

SEQ ID NO: 15623 - DNA, 80 bp, synthetic construct
  source 1..80: mol_type = other DNA
aagaagacagaggagaacccttgggggttacatttcaatatggggcaattattggtggctacaagtaggttcgtgcaatt

SEQ ID NO: 15624 - DNA, 80 bp, synthetic construct
  source 1..80: mol_type = other DNA
aaaatgaaggatacaaggagattggggaaattagtacagaaggtcctcaacttaagatggctcgatctgatatttcaact

SEQ ID NO: 15625 - DNA, 80 bp, synthetic construct
  source 1..80: mol_type = other DNA
aggattctctgtttcaagcctaagtaagtggaagaagggcaccattgtgtaaataactcaggagaacctgatttgatgtg

SEQ ID NO: 15626 - DNA, 80 bp, synthetic construct
  source 1..80: mol_type = other DNA
agaaagcttaagtgacttctcaaatcccacagctagtaaggatagagccggaatttgcatcaagacactcttacttggaa

SEQ ID NO: 15627 - DNA, 80 bp, synthetic construct
  source 1..80: mol_type = other DNA
taagataagctggttatcaaataattccctagtgttaatctggcaaataattgttataacccaatcttgtgaattgaaga

SEQ ID NO: 15628 - DNA, 80 bp, synthetic construct
  source 1..80: mol_type = other DNA
aataaaacctaaaactaaactccaccaaaatgaaattgtaatagtcaatgcctggctagaaatctccctttgcacagtga

SEQ ID NO: 15629 - DNA, 80 bp, synthetic construct
  source 1..80: mol_type = other DNA
gcacatgattggtctgtttcatacatcacactataaattcagtatagcatgtttctaaaagtcacgcatgtggcagcaag

SEQ ID NO: 15630 - DNA, 80 bp, synthetic construct
  source 1..80: mol_type = other DNA
aaccccataatttaacgtagtagccacacaagcaaactgtcaagtggttggtacctggagataaattaggaagcttgatg

SEQ ID NO: 15631 - DNA, 80 bp, synthetic construct
  source 1..80: mol_type = other DNA
tgctagcattgctatttcatatatttggcctcaggctgtttcctaacccatattagagccagaaagaatctattaaagtt

SEQ ID NO: 15632 - DNA, 80 bp, synthetic construct
  source 1..80: mol_type = other DNA
tacagctacatgcaaatgatcagctataggaaatagcactgattcttagaatgtgtcttgaaagttgccaggtgtgttga

SEQ ID NO: 15633 - DNA, 80 bp, synthetic construct
  source 1..80: mol_type = other DNA
ctaaaggacaaagggaccaactgcacgtgtcttagttttgatgtagttttcttagataaaggctagaaaatatctagaac

SEQ ID NO: 15634 - DNA, 80 bp, synthetic construct
  source 1..80: mol_type = other DNA
agggaagaaccagcgtttttgacactaagcttaactgacttcaaagcctctttagggtatattcttcttaaaacttgggt

SEQ ID NO: 15635 - DNA, 80 bp, synthetic construct
  source 1..80: mol_type = other DNA
ggcagcccacatacactgatggaacaataagagagaataggggatcgattcaggaccactctgaaggcccatttagctca

SEQ ID NO: 15636 - DNA, 80 bp, synthetic construct
  source 1..80: mol_type = other DNA
cacttctggtatatttaaaagcacaaggaaattcaaggagatggaaacgcacgttatacacacccgtgatctggagacaa

SEQ ID NO: 15637 - DNA, 80 bp, synthetic construct
  source 1..80: mol_type = other DNA
aaagaaagaaagaaacttacaggatgacgactttatataaagcactgcactggaaaatctgggggattcaaagatgaaac

SEQ ID NO: 15638 - DNA, 80 bp, synthetic construct
  source 1..80: mol_type = other DNA
taaaggatgtacttcagcaagaagaaaaaagagctaggagagaaaacaatgagaagcaggaaacaacgcaactaccttcc

SEQ ID NO: 15639 - DNA, 80 bp, synthetic construct
  source 1..80: mol_type = other DNA
aagcatgcaggaatgtgtgggcaagtttagacatagaagccttgagagagagttttaaaaagaggaagcaattgctgcgg

SEQ ID NO: 15640 - DNA, 80 bp, synthetic construct
  source 1..80: mol_type = other DNA
tcagcaatttaacaaactgagtcatttctcattaatttacagagaactggaatacataaatcatcttccaaaatcacttc

SEQ ID NO: 15641 - DNA, 80 bp, synthetic construct
  source 1..80: mol_type = other DNA
ttcttaccttggtctgatgcaaggactgtaatattatatatgccatttttgatggtctctgcctctctatccaggcttct

SEQ ID NO: 15642 - DNA, 80 bp, synthetic construct
  source 1..80: mol_type = other DNA
cagtggtggtggagacagaggagttctcccactgattcagtacttgggtaaagctggaaaaaaaaaaggacagaaaattg

SEQ ID NO: 15643 - DNA, 80 bp, synthetic construct
  source 1..80: mol_type = other DNA
gaataacctctccatggggctgaccaagagtaactcttgatttgggaaattcagtaagtaaataaaggctccttgaccca

SEQ ID NO: 15644 - DNA, 80 bp, synthetic construct
  source 1..80: mol_type = other DNA
ttaatgtcactggggcacttcatttgaaatcatgaggggtggatggggatgtgcatttttttcttttccttcactgcaac

SEQ ID NO: 15645 - DNA, 80 bp, synthetic construct
  source 1..80: mol_type = other DNA
ataaaggtctggggctatgtaggtttttttctttctgtggaaaatagaatctggctcttaaggctttcaatttatcagat

SEQ ID NO: 15646 - DNA, 80 bp, synthetic construct
  source 1..80: mol_type = other DNA
ctatcttcagatggaagagaaattctgatgtttaaagggactaaaaggttgtaggcaactgaagaaaaccggaatcctga

SEQ ID NO: 15647 - DNA, 80 bp, synthetic construct
  source 1..80: mol_type = other DNA
ttgagaccaaagcttttgagaacctctaccctaatccatgagggatagaggaaggaagagaaaattaatctgaagattta

SEQ ID NO: 15648 - DNA, 80 bp, synthetic construct
  source 1..80: mol_type = other DNA
ttaatgtttatgttacctctctgtctagctgagatgatgttgtggtgatcacgcctgtagttggatgcatagaaaatagg

SEQ ID NO: 15649 - DNA, 80 bp, synthetic construct
  source 1..80: mol_type = other DNA
gaaattaggcttgccaagattaggaaatttgccaagcatcacacagctagtgaaacacagagtaaaattccacccagagt

SEQ ID NO: 15650 - DNA, 80 bp, synthetic construct
  source 1..80: mol_type = other DNA
taatatgaatttcaataccaattttctcataacagctatcatagaaaggccagaacatcctaggtactcagaaggccagg

SEQ ID NO: 15651 - DNA, 80 bp, synthetic construct
  source 1..80: mol_type = other DNA
ccgaggttcttggtcaactccaggacctcttatggaatagtatatggtatagttttgggccgtgtcagattgaacctaga

SEQ ID NO: 15652 - DNA, 80 bp, synthetic construct
  source 1..80: mol_type = other DNA
gtagtagccaccagtaatggaagaaggcaagaaggcttgctggggtttctactgaaagttaaaacaagacagagaaaaag

SEQ ID NO: 15653 - DNA, 80 bp, synthetic construct
  source 1..80: mol_type = other DNA
ttagctgggtaggggtgagaccatgggagtgcttgaaaaccaaactaatcatcaacactgcaaaaagataatgaagaagt

SEQ ID NO: 15654 - DNA, 80 bp, synthetic construct
  source 1..80: mol_type = other DNA
cccaatttctccttttacgtcccaaatgaaaaggaatgacaacccgaatgaaccatgtgacacagcccttttccttctaa

SEQ ID NO: 15655 - DNA, 80 bp, synthetic construct
  source 1..80: mol_type = other DNA
ctttaaactaaaaaaaacagtttcagtactatttctcaattttttagaggcatgttaaatgtctttatcttttctctaaa

SEQ ID NO: 15656 - DNA, 80 bp, synthetic construct
  source 1..80: mol_type = other DNA
tgtttactatattgtaaaacgtatgtaataacttcactgattaactcagtgggtacagtgacgatccaacaacagcctag

SEQ ID NO: 15657 - DNA, 80 bp, synthetic construct
  source 1..80: mol_type = other DNA
aagaaatacacaaatgcacaaatgtcacataatgccaaggcagcgagagataaatgtcacgacaaaaataaagcagggag

SEQ ID NO: 15658 - DNA, 80 bp, synthetic construct
  source 1..80: mol_type = other DNA
atgggctcaaagaagtgggtgtgggccagattttgaacggcattagcaaagcacatggatcttttttcctaacgagaatg

SEQ ID NO: 15659 - DNA, 80 bp, synthetic construct
  source 1..80: mol_type = other DNA
ttgatatgactgtttacctggaaaacccaagcaaatcaaccattacattactataaaacaagaagagacttaagtaagga

SEQ ID NO: 15660 - DNA, 80 bp, synthetic construct
  source 1..80: mol_type = other DNA
ataatttatgagtcaaccacatacttgcctacatcgcacgttgttgaacttttgggtgtctgccaagtgtgaaatggcat

SEQ ID NO: 15661 - DNA, 80 bp, synthetic construct
  source 1..80: mol_type = other DNA
tgagaaagaaaaaacaaacagctttcagacttcctacttgaggaacaggcatatggtactgacatatattgaaatacagg

SEQ ID NO: 15662 - DNA, 80 bp, synthetic construct
  source 1..80: mol_type = other DNA
tctgaagaaacattaagaagtgaggaaaagctgatttgtggaatggtgaaggattacttgggtatatgggaaggaaggaa

SEQ ID NO: 15663 - DNA, 80 bp, synthetic construct
  source 1..80: mol_type = other DNA
tgtccttcaagattgattggcgcccaacgccttctgcttaagacaaggagcacttttccacacctgtcgatttttttcct

SEQ ID NO: 15664 - DNA, 80 bp, synthetic construct
  source 1..80: mol_type = other DNA
tcaggtcgcgatcctcttcctatctgccctcccccacccccgccaactccattttctagccacccagaggccccttcacc

SEQ ID NO: 15665 - DNA, 80 bp, synthetic construct
  source 1..80: mol_type = other DNA
gcggtgcggcggcgggaggcggaggcgagggtgcgatggcgcggagcccgggacgcgcgtacgccctgctgcttctcctg

SEQ ID NO: 15666 - DNA, 80 bp, synthetic construct
  source 1..80: mol_type = other DNA
ggtgtgagttcaccttccagagagttcacaaatatgtgtttacagagattagatgcaaaatcatactcagttttcttacg

SEQ ID NO: 15667 - DNA, 80 bp, synthetic construct
  source 1..80: mol_type = other DNA
ctgactacctaagtgtaggaaggattgagaagactgccatttgagctgtcagtaatgacttcaaagccacacagcagagc

SEQ ID NO: 15668 - DNA, 80 bp, synthetic construct
  source 1..80: mol_type = other DNA
ataatcccctgtattttattttatacatttgaaatcattaatctgagaaggggttcataggcctcgccagattgccaagg

SEQ ID NO: 15669 - DNA, 80 bp, synthetic construct
  source 1..80: mol_type = other DNA
tccaaggattttagaaacatggatttcttactggtttttgtttctaaaagttagtaggtaatgggaaaatggcagctctt

SEQ ID NO: 15670 - DNA, 80 bp, synthetic construct
  source 1..80: mol_type = other DNA
tgttttttattaagtttttgtcatatgcaaagcttggtgattagagtgaagaagctggaacaacagaattcctaccgtgg

SEQ ID NO: 15671 - DNA, 80 bp, synthetic construct
  source 1..80: mol_type = other DNA
aagtataattgcgcccagttaaaaagagaggcaacaggcattgaggacttggtaagctgagatcaaagccaggcagaaaa

SEQ ID NO: 15672 - DNA, 80 bp, synthetic construct
  source 1..80: mol_type = other DNA
ggacctaagcttaacatgtctacaatctgtcttctggaaattgcatctttctagccactcagactgaaaacgttggcacc

SEQ ID NO: 15673 - DNA, 80 bp, synthetic construct
  source 1..80: mol_type = other DNA
ctttcaccaggctggagtgcagtggtgcagtctcggctcactgcagcttccgcctcccaggttccagcgattctcctgcc

SEQ ID NO: 15674 - DNA, 80 bp, synthetic construct
  source 1..80: mol_type = other DNA
tgctgcacccatcaactcgtcatctgtattaggtatttctcctagtactatccctcccctacccccacagcctcaacagg

SEQ ID NO: 15675 - DNA, 80 bp, synthetic construct
  source 1..80: mol_type = other DNA
aactagaagaagaggtataaaccaggggaaaacactacctaaagtgttttcctacagttcaattgtagttgatgaatact

SEQ ID NO: 15676 - DNA, 80 bp, synthetic construct
  source 1..80: mol_type = other DNA
cttcaatatgactcacctaaaatcatatttgttacattcagattagcccaaacatccgaagaacaggtgaaagattttgg

SEQ ID NO: 15677 - DNA, 80 bp, synthetic construct
  source 1..80: mol_type = other DNA
gttctaaagatagtccgttgagcacactgcttaccttctagtaatttctcgctgaatggacattagaagccattatagtg

SEQ ID NO: 15678 - DNA, 80 bp, synthetic construct
  source 1..80: mol_type = other DNA
agtgggaatggaggactaaggcagagagtttctgcttgttccagtcatgttacttgcagtatactacccactagagatgt

SEQ ID NO: 15679 - DNA, 80 bp, synthetic construct
  source 1..80: mol_type = other DNA
gatgactcccaaatttttatctccgggcataacttcttttctgagctactaactcctatatccaaaaggccattcacaca

SEQ ID NO: 15680 - DNA, 80 bp, synthetic construct
  source 1..80: mol_type = other DNA
ccaagtcactctctactatcctgaccctgctttaattttttttattgctcttatcaaaacctggtctgtctttgtctccc

SEQ ID NO: 15681 - DNA, 80 bp, synthetic construct
  source 1..80: mol_type = other DNA
cacagtatgtattactctcctgttacagataaggaaattcagactaaagcatcttgtctggcaggatctcctccccgctt

SEQ ID NO: 15682 - DNA, 80 bp, synthetic construct
  source 1..80: mol_type = other DNA
gatatttcatgtcacattctacaatcttgctcctcaaaatttggtctgagaacccacaacattgctatcatctgaaacct

SEQ ID NO: 15683 - DNA, 80 bp, synthetic construct
  source 1..80: mol_type = other DNA
cccaaggaacatgcagagagaagtgatctatctcagcattgctttcccttgcttttcataccatgccacctttgaaaata

SEQ ID NO: 15684 - DNA, 80 bp, synthetic construct
  source 1..80: mol_type = other DNA
taaggcaatgacaaagtgacgatataatttatagtgtgagcacacttttgaggatgaaagggttgttaacagatggaatg

SEQ ID NO: 15685 - DNA, 80 bp, synthetic construct
  source 1..80: mol_type = other DNA
ataactgtatttagaacagtactaggtcatgatgaagtcccaagtgtgacagtgcctatgaagaaccaaagaaaagagtt

SEQ ID NO: 15686 - DNA, 80 bp, synthetic construct
  source 1..80: mol_type = other DNA
agtggacttcacttacaggtgaggaaacaaagggattatttctgccttctgactcaggagggttaattccatggcaaaca

SEQ ID NO: 15687 - DNA, 80 bp, synthetic construct
  source 1..80: mol_type = other DNA
ttactttgccaatttgtaaggctactaaatgattctttaaacttttcaaactctcactctgggaaatcatttcttacagt

SEQ ID NO: 15688 - DNA, 80 bp, synthetic construct
  source 1..80: mol_type = other DNA
caaggggtccaatttttttgataaattatgtgatagtgttgctactctatatttcaaagttggcatgcacaaacataaac

SEQ ID NO: 15689 - DNA, 80 bp, synthetic construct
  source 1..80: mol_type = other DNA
agctaacaggttacgctttggatgcaagaggaaacaatgtagagaaacccttagagctacgcattaaggttcttgatatc

SEQ ID NO: 15690 - DNA, 80 bp, synthetic construct
  source 1..80: mol_type = other DNA
ttagacatctttatttctaatgccagatactcttgtgatgaaaatcaatgcaacagatgcagatgagcccaataccctga

SEQ ID NO: 15691 - DNA, 80 bp, synthetic construct
  source 1..80: mol_type = other DNA
ttgtcatcagatataaatcatcatccaagtgcactacgttcagtatttcttagagaaatgattggccgggcgtggtggct

SEQ ID NO: 15692 - DNA, 80 bp, synthetic construct
  source 1..80: mol_type = other DNA
acatctgagaagccgttctctaggacacatactataagaatcaaatctctggggaattctggacaaagttcacccagttt

SEQ ID NO: 15693 - DNA, 80 bp, synthetic construct
  source 1..80: mol_type = other DNA
ttgcagcttgaagggatggttgaagaaaatcaagtcaacgtagaagttacgcgcataaaagtgttcgatgcagatgaaat

SEQ ID NO: 15694 - DNA, 80 bp, synthetic construct
  source 1..80: mol_type = other DNA
ctggtctcatcaacaaaaagtttcattgggcaggtttcaggaacttgtctttttagcaaaaatccacttgtgattctaat

SEQ ID NO: 15695 - DNA, 80 bp, synthetic construct
  source 1..80: mol_type = other DNA
agatacctgagatagaaaagccaattatacacgcaaggagaaacagtcagatattgatgaatgacagaggtgctagcata

SEQ ID NO: 15696 - DNA, 80 bp, synthetic construct
  source 1..80: mol_type = other DNA
ttccatcgaaaggaatttagacaaaaaagatatacaagtagcaaatacccacgtgaaaaggtgccaacatcattactcat

SEQ ID NO: 15697 - DNA, 80 bp, synthetic construct
  source 1..80: mol_type = other DNA
ccctgactctactaaaacaaaaaattagccaggtttggtagtgcatgcctataattccagctgcttgggaggctgaagca

SEQ ID NO: 15698 - DNA, 80 bp, synthetic construct
  source 1..80: mol_type = other DNA
tcatagtgatccatatttttaaagggtgcagaagttgtgatccatccagagcccaatagagaggaaaactgactgactta

SEQ ID NO: 15699 - DNA, 80 bp, synthetic construct
  source 1..80: mol_type = other DNA
agggacagagctcacagagctaccactacttattttcactaaaataaacccatagaacacattttaaggaatactgattt

SEQ ID NO: 15700 - DNA, 80 bp, synthetic construct
  source 1..80: mol_type = other DNA
ctgtgtgtgaggaggaagttagtttactcaccactgaaacagttctggctagagatggctaaaaagcaacaaaggaaaag

SEQ ID NO: 15701 - DNA, 80 bp, synthetic construct
  source 1..80: mol_type = other DNA
aagaatttccgagggttacaaacatgaaaatcatagcagtccctgtgtaccagtgcttcctaaaacattgtatttaagtg

SEQ ID NO: 15702 - DNA, 80 bp, synthetic construct
  source 1..80: mol_type = other DNA
aaatgtttacctaactaattagtggttgttattttgaaacactgataaggggctgggtgtggtgggttcatgcctggcat

SEQ ID NO: 15703 - DNA, 80 bp, synthetic construct
  source 1..80: mol_type = other DNA
cagcattggctccttccacactaattctccttgctttgagggaagaaacccagaaacgattttatcggcattgtttccac

SEQ ID NO: 15704 - DNA, 80 bp, synthetic construct
  source 1..80: mol_type = other DNA
gttgcaggaataagaaaggtccaatttaagtgtgacatgcagtaaagagaggggcttttaggatggttttgcaaaattaa

SEQ ID NO: 15705 - DNA, 80 bp, synthetic construct
  source 1..80: mol_type = other DNA
ggtccaaatttgaaacatatctaggatagaaaatgtcctaagtggttagtaccttctccactccaaattggcaagggaat

SEQ ID NO: 15706 - DNA, 80 bp, synthetic construct
  source 1..80: mol_type = other DNA
cctgattaaagctgaggataccttggtttaactgggggtaagtaaagctcaaacctagaacatgatagaaacaacataac

SEQ ID NO: 15707 - DNA, 80 bp, synthetic construct
  source 1..80: mol_type = other DNA
agtgtaagagtgctaatgttccttgatcttagaaggtgcatgctgaagaatgtcgtgctatctgtaacttaccttgaaat

SEQ ID NO: 15708 - DNA, 80 bp, synthetic construct
  source 1..80: mol_type = other DNA
atgtaagtctttaaaagccactctgttgtgcttttgggaatctgagtgcactcctggagatgtgttactatggtagtcat

SEQ ID NO: 15709 - DNA, 80 bp, synthetic construct
  source 1..80: mol_type = other DNA
ctcgggtttccttttataaaagaacaagggactgcatcctgaggtcacatgaaatatcactctacttgaccactgaatat

SEQ ID NO: 15710 - DNA, 80 bp, synthetic construct
  source 1..80: mol_type = other DNA
cattgatcaaggggtcagccttggtctttgcttcctcctaggggtaaaataaaatctaagaagagggctctgaaattgtt

SEQ ID NO: 15711 - DNA, 80 bp, synthetic construct
  source 1..80: mol_type = other DNA
tgacttgtcttcttcttgggttttaaaggggcctagggaagtgtttcttacatgtttggttgagtgagtaaagtgatcac

SEQ ID NO: 15712 - DNA, 80 bp, synthetic construct
  source 1..80: mol_type = other DNA
ttggtcgcatagagtaaaggagctgagactgtttgggctttgttttctctttgggttctatccacctataaaacaagaag

SEQ ID NO: 15713 - DNA, 80 bp, synthetic construct
  source 1..80: mol_type = other DNA
cttacagttatgtttttgccagtcagtcagctctgctttccttcatgatgtcttcatatcaagatgcacactgagagagc

SEQ ID NO: 15714 - DNA, 80 bp, synthetic construct
  source 1..80: mol_type = other DNA
atgagggatagttcataatgaaaaatgagtcagttcatcaggaggcctgaaactcctaaatatgtcagaacctaataaca

SEQ ID NO: 15715 - DNA, 80 bp, synthetic construct
  source 1..80: mol_type = other DNA
cgtcctgtttgttttcttttggtaagttttccctctctccactctaatcctgctccagtcattcttggttatgtatgtgt

SEQ ID NO: 15716 - DNA, 80 bp, synthetic construct
  source 1..80: mol_type = other DNA
ttcagagaatacctactcctctggcagtagcttcccagttccaaaatctttgcaagaagccaatgcagagaaagtaactc

SEQ ID NO: 15717 - DNA, 80 bp, synthetic construct
  source 1..80: mol_type = other DNA
ctcctaaacagcagtcagccacaaactgacccagagtttaattagcagtgactaatttcatgtttccaatgtacctgatt

SEQ ID NO: 15718 - DNA, 80 bp, synthetic construct
  source 1..80: mol_type = other DNA
gtagcctcagtgcctaacatgggtgccaaataaatattcgtagaattacactgaattgtaaaaaccattcgtttttgttt

SEQ ID NO: 15719 - DNA, 80 bp, synthetic construct
  source 1..80: mol_type = other DNA
aaagttggtcttaagcttccaccttgagcagccttggaaacctaacctgcctcttttagcataatcacattttctaaatg

SEQ ID NO: 15720 - DNA, 80 bp, synthetic construct
  source 1..80: mol_type = other DNA
ggaggagactcgctccgccgccgaccaacaccaacacccagctccgacgcagctcctctgcgcccttgccgccctccgag

SEQ ID NO: 15721 - DNA, 80 bp, synthetic construct
  source 1..80: mol_type = other DNA
ccctgcctctgagccttttgtttcctcctttttaaaaacaccggatgaaagaccccagtgtgccttggatcgcagagcgc

SEQ ID NO: 15722 - DNA, 80 bp, synthetic construct
  source 1..80: mol_type = other DNA
tccaacttaaagcctacttacaaacttgtcaagtctcacatctctctgggaaggggaaagagacccaagtgaaaaattac

SEQ ID NO: 15723 - DNA, 80 bp, synthetic construct
  source 1..80: mol_type = other DNA
aattccctctttttcccccgaccacctgcctgttctttgtgtctttgttttagattgaatggaatctgcaactacttaat

SEQ ID NO: 15724 - DNA, 80 bp, synthetic construct
  source 1..80: mol_type = other DNA
tgtcgtgggggcactgggaagactttataaaggaagtggtgtcgaactagactttggagtatttcagctgtgtcaggatg

SEQ ID NO: 15725 - DNA, 80 bp, synthetic construct
  source 1..80: mol_type = other DNA
gccttgtataggatgtttgttatctcaagcctcataacaaacttcccagtttacagatgggaagctgaggttaaaatatt

SEQ ID NO: 15726 - DNA, 80 bp, synthetic construct
  source 1..80: mol_type = other DNA
cgccaccatacacaactaattaaaattttttttttttttttgtagagacaaggtctcgctatcttgcccaggctggtctt

SEQ ID NO: 15727 - DNA, 80 bp, synthetic construct
  source 1..80: mol_type = other DNA
taagtgaggtctccgcctctgcagtgcccctctgagcctcacctcagccccaggaggggggtgttctacctgtcacagag

SEQ ID NO: 15728 - DNA, 80 bp, synthetic construct
  source 1..80: mol_type = other DNA
acaaaatagtatatgtgaaaaatgctttgaaaattataaagagctaagcaaataggcctcacggtcaatattaaagcatt

SEQ ID NO: 15729 - DNA, 80 bp, synthetic construct
  source 1..80: mol_type = other DNA
ctttttttcctttatctttctgaatatttttatttttttaagacaaggtcttgttctttcgcccaggttggagtgcagtg

SEQ ID NO: 15730 - DNA, 80 bp, synthetic construct
  source 1..80: mol_type = other DNA
tgtgtatacgcttgtaagtacatcattttaaaattatttctttatccattatagaattttgcattttcccaaactgcact

SEQ ID NO: 15731 - DNA, 80 bp, synthetic construct
  source 1..80: mol_type = other DNA
cggtctgtttccaaagggaattcttggccacacctaagactgaagttggattcttacagatgaaagatagaagtagacct

SEQ ID NO: 15732 - DNA, 80 bp, synthetic construct
  source 1..80: mol_type = other DNA
gtttgtgtataccctcacccagtttcccatgcctccatcattttatttttttttaacagcggggttttatgctgtgttgc

SEQ ID NO: 15733 - DNA, 80 bp, synthetic construct
  source 1..80: mol_type = other DNA
tgcttcgggagaattcccacattactgtgatcttatcccatctatgcataatgcaaccattgtttgtcaaacattttttt

SEQ ID NO: 15734 - DNA, 80 bp, synthetic construct
  source 1..80: mol_type = other DNA
gaaccactgtgtccggccaatatttttgtagagtaagcttttttctcctctcctacctttccttcagcccgacttgccag

SEQ ID NO: 15735 - DNA, 80 bp, synthetic construct
  source 1..80: mol_type = other DNA
aattatttcagaattgaaataggttatttgatgtctggtttctctgtgtttgcctccttagtcaaaccggcacgatgtcc

SEQ ID NO: 15736 - DNA, 80 bp, synthetic construct
  source 1..80: mol_type = other DNA
tctgatttgaaacatactccttgaaatgttcctcgcagtggcccgattcctttacacaaaacaaaatagcagacaccagt

SEQ ID NO: 15737 - DNA, 80 bp, synthetic construct
  source 1..80: mol_type = other DNA
gtaccataatggtacagtgtccttgtcacaatgagattcccattatatgagacttgtgtgtaaatatgaaagatcagcat

SEQ ID NO: 15738 - DNA, 80 bp, synthetic construct
  source 1..80: mol_type = other DNA
atgtatctctaatacaaagtgaccatttcattataggtgttaactgtacctccctttagaggacagaaagccctttggca

SEQ ID NO: 15739 - DNA, 80 bp, synthetic construct
  source 1..80: mol_type = other DNA
aatgagatttcagtgtggcttggggaatcagcctcattgctttatagtcatcctttatcacacaggtcatatttaacatg

SEQ ID NO: 15740 - DNA, 80 bp, synthetic construct
  source 1..80: mol_type = other DNA
cgagcacatttcttgaggattttatatgtagtgccacccaagggtacaaagattatggtccctagtcctgaaaatgaatg

SEQ ID NO: 15741 - DNA, 80 bp, synthetic construct
  source 1..80: mol_type = other DNA
tatgtcgttttctaacagaagcaattgataagcgatgctttccgggttaggcacgcagccctcatggttgcaaacaaact

SEQ ID NO: 15742 - DNA, 80 bp, synthetic construct
  source 1..80: mol_type = other DNA
tgaatccttgagtagatatagtgacttccctttgaagtggcccatagggagttttgcatcctaaaagggaatggtatatc

SEQ ID NO: 15743 - DNA, 80 bp, synthetic construct
  source 1..80: mol_type = other DNA
gcagtttgtgaataagtctctttaggggtggcagtttgtttctgcggtaagcagaacatctttttgaataggggaaatgc

SEQ ID NO: 15744 - DNA, 80 bp, synthetic construct
  source 1..80: mol_type = other DNA
ctaaaagttgttttcagaagtcagtccctactgctgttctgttttcaagttgtgtcacataaatggcacttgttaagtac

SEQ ID NO: 15745 - DNA, 80 bp, synthetic construct
  source 1..80: mol_type = other DNA
cagaaaagataaatgttcgaggtgatggatatcccacttatcctgatttgatcattatacattgtatacatgtgtccaga

SEQ ID NO: 15746 - DNA, 80 bp, synthetic construct
  source 1..80: mol_type = other DNA
cggctgtagatgcttgtcttgagcctgttgccttgaagagctggggtctcggggaatgattggtctattaataatttaat

SEQ ID NO: 15747 - DNA, 80 bp, synthetic construct
  source 1..80: mol_type = other DNA
ataagctgaaacaagaaagtgaccaacttgtcctcaatcagcatccagcttcagacaaaattgaggtaggcttcatgagg

SEQ ID NO: 15748 - DNA, 80 bp, synthetic construct
  source 1..80: mol_type = other DNA
gttcatgcatctgtacaactgagctaggctaagacagctgacattttcttgtttcaggcctatatggacactctgcagac

SEQ ID NO: 15749 - DNA, 80 bp, synthetic construct
  source 1..80: mol_type = other DNA
aagaagattgtacagctgaagcctcgtaacccagactacagaagcaataaacccattattctcagagctctctgtgacta

SEQ ID NO: 15750 - DNA, 80 bp, synthetic construct
  source 1..80: mol_type = other DNA
aacacatacttatgaataaagccaaaccctggggttgcttgccttacagaaaatcgtgcataagggggatgagtgtatcc

SEQ ID NO: 15751 - DNA, 80 bp, synthetic construct
  source 1..80: mol_type = other DNA
caggttgtccatggcagattcctttaaaccatttagtatcgaaatcttcaaccacacactgaatagggagagtagtgtag

SEQ ID NO: 15752 - DNA, 80 bp, synthetic construct
  source 1..80: mol_type = other DNA
gttggagcagctttgctgggctctgctttacatttagggcttctgaataatatttcgttgaagaaaaatattctgtaggc

SEQ ID NO: 15753 - DNA, 80 bp, synthetic construct
  source 1..80: mol_type = other DNA
agcagaccagggatcttctcaccacatcacagtgaaaattaacgagcttaaggtaggtatctgctagtattttgcctggt

SEQ ID NO: 15754 - DNA, 80 bp, synthetic construct
  source 1..80: mol_type = other DNA
acctctgtgtgatcagtatgccaaaattggaatgtagttgtgttgcttaatgaccggggcacattctaagaaatgcatgg

SEQ ID NO: 15755 - DNA, 80 bp, synthetic construct
  source 1..80: mol_type = other DNA
aaattctaagaaaaaagttgaatgcagggaaacagagagtaggatggtgattaccggggtggggagggaggaggaaatgg

SEQ ID NO: 15756 - DNA, 80 bp, synthetic construct
  source 1..80: mol_type = other DNA
gtggcccaacttacaggaactaattcagatctgagctcccaattataaagcctcactgggttttcatgagttttgaggat

SEQ ID NO: 15757 - DNA, 80 bp, synthetic construct
  source 1..80: mol_type = other DNA
gttcacaagataatgtcacttgaagggaaccactgaagaaaacagaggttttgttttttgtgtaagttaggcgtaacaga

SEQ ID NO: 15758 - DNA, 80 bp, synthetic construct
  source 1..80: mol_type = other DNA
agaaagtaacctcttacagatagtaagttaaagggcttgcttctcttctctgaatggaaaaaatgctcatctcctaagct

SEQ ID NO: 15759 - DNA, 80 bp, synthetic construct
  source 1..80: mol_type = other DNA
agtctatgaaggacacttttcttaaacttcattatgctgcaggattatgagctccagctggcctcatacacctcaggact

SEQ ID NO: 15760 - DNA, 80 bp, synthetic construct
  source 1..80: mol_type = other DNA
ctccaaggctgcagatgttcatgctcggtacattgaactacttacaagatctggagactattacaggttcttaagtgaga

SEQ ID NO: 15761 - DNA, 80 bp, synthetic construct
  source 1..80: mol_type = other DNA
tgggaagtcggctaagcaaaatctagacaagtgctacggccaaataaaagaactcaatgagaagatcacccgactgactt

SEQ ID NO: 15762 - DNA, 80 bp, synthetic construct
  source 1..80: mol_type = other DNA
acaatctcacccgagaaaacaggagcttatctgaagaaataaagaggctgaagaacactctaacccagaccacagagaat

SEQ ID NO: 15763 - DNA, 80 bp, synthetic construct
  source 1..80: mol_type = other DNA
agaagataaaagcagaagcttaaatgaaagcaaaatagaaattgagaggctgcagtctctcacagagaacctgaccaagg

SEQ ID NO: 15764 - DNA, 80 bp, synthetic construct
  source 1..80: mol_type = other DNA
ttgtattgcttcattaagtatgttcatctagctgtaacaggtgagatgtaggtgtagcaggtatgataacctgaaacaaa

SEQ ID NO: 15765 - DNA, 80 bp, synthetic construct
  source 1..80: mol_type = other DNA
taaggaaaaatactctttggtagaggccaagagaaagaaattaatcagcccagaatccacagtcatgcttctggaggccc

SEQ ID NO: 15766 - DNA, 80 bp, synthetic construct
  source 1..80: mol_type = other DNA
tggtatattgagaccgtccactgtcaatgaactggaatctggtcagatttcttatgacgaggttggtgagagaattaagg

SEQ ID NO: 15767 - DNA, 80 bp, synthetic construct
  source 1..80: mol_type = other DNA
ccctggaagaatcgagccccattgcagccatctttgacacagaaaacctggagaaaatctccattacagaaggtatagag

SEQ ID NO: 15768 - DNA, 80 bp, synthetic construct
  source 1..80: mol_type = other DNA
ccacagggaattcttcctactcttattcctactcatttagcagtagttctattgggcactagtagtcagttgggagtggt

SEQ ID NO: 15769 - DNA, 80 bp, synthetic construct
  source 1..80: mol_type = other DNA
cactggtttcatggtctgatttattggtggtgaatacacaggggcaggcccaggacaagcagcttggctactccccctct

SEQ ID NO: 15770 - DNA, 80 bp, synthetic construct
  source 1..80: mol_type = other DNA
cctagagagggccgacgccatcagcactgccactctgcccctgccccatcccctaccctgttgtgctggcccatgtgggc

SEQ ID NO: 15771 - DNA, 80 bp, synthetic construct
  source 1..80: mol_type = other DNA
caggtttactccctggctccgtgaccccagcccaccctagagccttggctttgaatcccatctccaccgcttcgtagctg

SEQ ID NO: 15772 - DNA, 80 bp, synthetic construct
  source 1..80: mol_type = other DNA
cagccagactgccaggccacatgcctgattaaggctccgcccctcaccagctggccccacatccctgtgggctgccatgt

SEQ ID NO: 15773 - DNA, 80 bp, synthetic construct
  source 1..80: mol_type = other DNA
ggggtgacaggcatgccaggtacctgcacaaagctctgctgccccggctcgatggtgttggaggcctggaggaagtgtgg

SEQ ID NO: 15774 - DNA, 80 bp, synthetic construct
  source 1..80: mol_type = other DNA
gtatgtgctaagccctctgacttgagagaccaagagcgtcaccctcagcagtcctgctccggtcatacagaaggggagac

SEQ ID NO: 15775 - DNA, 80 bp, synthetic construct
  source 1..80: mol_type = other DNA
aagtcacagccattcccctgccctgctccctcttcatttttgttagatgtcatcatcctacaccacttaaaagttctttt

SEQ ID NO: 15776 - DNA, 80 bp, synthetic construct
  source 1..80: mol_type = other DNA
tattccttcaagttccacatataatcatcactcacagccccaagggcatgcaaaccctgcaagcataatccagtctcagg

SEQ ID NO: 15777 - DNA, 80 bp, synthetic construct
  source 1..80: mol_type = other DNA
tagtgaaaccccgtctctgctaaaaaaaaaaatacaaaaaataagccaagagtggtggtgggcacctgtaatcccagcta

SEQ ID NO: 15778 - DNA, 80 bp, synthetic construct
  source 1..80: mol_type = other DNA
aacaagggaagaggagttaattatagcatgtcaatatgatggaataatatgtgcttattaaacatgatattaggtacagc

SEQ ID NO: 15779 - DNA, 80 bp, synthetic construct
  source 1..80: mol_type = other DNA
gtttagtggtgtgatctcggctcactgcagcctctgcctcctgggttcaagcgattcttgttcctcagcctcccaagtag

SEQ ID NO: 15780 - DNA, 80 bp, synthetic construct
  source 1..80: mol_type = other DNA
ggtagcagaggcaggccaggcggctggtcactgtgtgatcactgtgtgcccgcaccaggctttttttttttttttttttt

SEQ ID NO: 15781 - DNA, 80 bp, synthetic construct
  source 1..80: mol_type = other DNA
cgcggatggaacactgaagcggacaggccaggcggggagcgaggcctggcgtcgggtgggcggcggctgcactcttacct

SEQ ID NO: 15782 - DNA, 80 bp, synthetic construct
  source 1..80: mol_type = other DNA
tttaggtcagaacctggcatattccacatgcttcaatctgatatttggtggaggagccatcactgtcccaaggcagcact

SEQ ID NO: 15783 - DNA, 80 bp, synthetic construct
  source 1..80: mol_type = other DNA
gacagatatcagtggtccctgccctaggggatattaccattcagaaactagacatgcatcaagtcatttgaaacaataga

SEQ ID NO: 15784 - DNA, 80 bp, synthetic construct
  source 1..80: mol_type = other DNA
tcctgcctcggcttaccaaagtgttgggattacagacataagccaggtcgcctggcccaagctagatattgaggactgcc

SEQ ID NO: 15785 - DNA, 80 bp, synthetic construct
  source 1..80: mol_type = other DNA
cccagccataaccactgttaacacgttaggttttctcctggcccttttcctctgtctttaaatattttcaaatatatgtc

SEQ ID NO: 15786 - DNA, 80 bp, synthetic construct
  source 1..80: mol_type = other DNA
gcctgtccctctggccatcctcagggaattcacaataaacaaatgaaggaggtaagcccggcaaatctgaagagagaaaa

SEQ ID NO: 15787 - DNA, 80 bp, synthetic construct
  source 1..80: mol_type = other DNA
gctctcccagtttgcaatattcctgcttgtcttaccgttttaaagtactaaaatcctggggggttgttttggtataatgc

SEQ ID NO: 15788 - DNA, 80 bp, synthetic construct
  source 1..80: mol_type = other DNA
atgttggccaggctggcttttctttgtttgttttttgagacagggtcttactctcttttccaggctagagtgcagtggtg

SEQ ID NO: 15789 - DNA, 80 bp, synthetic construct
  source 1..80: mol_type = other DNA
tcctagctcactgtttcttttttttaggctcgtcaagtgaagcaatgagagtggagaaggaacaaagcaatctgtaacta

SEQ ID NO: 15790 - DNA, 80 bp, synthetic construct
  source 1..80: mol_type = other DNA
gacgtcacaaagccagagacagtgtttcagccactggaaaaatctgcccagaaatatttctgttactcaataatgatacc

SEQ ID NO: 15791 - DNA, 80 bp, synthetic construct
  source 1..80: mol_type = other DNA
ggtgtgagccactgcgcccagttaggttggttatttttaaataattattttatgctaatttatgggataagatatgtttc

SEQ ID NO: 15792 - DNA, 80 bp, synthetic construct
  source 1..80: mol_type = other DNA
tgaaaaaaaagggaagtgcaggtcacagcctggtcatgctgtctgtgaggggtgacgaggaggctggaacttcggaatgt

SEQ ID NO: 15793 - DNA, 80 bp, synthetic construct
  source 1..80: mol_type = other DNA
tggaaaatggtattcccacttcattgacttatgaggtttcagtgcaattctgcctgcaaagtaggttgtccagtgcccag

SEQ ID NO: 15794 - DNA, 80 bp, synthetic construct
  source 1..80: mol_type = other DNA
tcagcccacttgggaatagccaatcaccaaatgcttataagaatgtacagtttttccttcctttcttttattctctctcc

SEQ ID NO: 15795 - DNA, 80 bp, synthetic construct
  source 1..80: mol_type = other DNA
tgtactgccttccatggcctcccactgcctcccaggacagtctgggggagctaaggtccctcccggctctctctctctgc

SEQ ID NO: 15796 - DNA, 80 bp, synthetic construct
  source 1..80: mol_type = other DNA
ctcccagggaaaccacagggtcctcagtggtcacagcagtaggggctggcagcatcatgggctcaaccctcagagcaggg

SEQ ID NO: 15797 - DNA, 80 bp, synthetic construct
  source 1..80: mol_type = other DNA
ggttctgctactctgtgttctcaggtgagctcctgagtccgagaaaggtgtgtctaccagcaagtggggagaaggaccac

SEQ ID NO: 15798 - DNA, 80 bp, synthetic construct
  source 1..80: mol_type = other DNA
ggcacagggacctgaacattaaaacaaacaatgcgaactaacagaggcagtcgtattttgaatatcattaccaaatttga

SEQ ID NO: 15799 - DNA, 80 bp, synthetic construct
  source 1..80: mol_type = other DNA
tctagcacatagcgcttaacaaaggtgttgttattattcaggacagacgtatcagacaaactgatggtgggctgggagtg

SEQ ID NO: 15800 - DNA, 80 bp, synthetic construct
  source 1..80: mol_type = other DNA
gctgaaggtcacaatggactgtttctgcaagacctgttggagaaacatccggaaagaggccaggtgagaataaggtgatg

SEQ ID NO: 15801 - DNA, 80 bp, synthetic construct
  source 1..80: mol_type = other DNA
tatttatttttaaaaattattttttattatttattttattttatttttttgagacggagttttgctcttgttgcccaggc

SEQ ID NO: 15802 - DNA, 80 bp, synthetic construct
  source 1..80: mol_type = other DNA
aggacagaaggggagactgtttggaagtttgtgtctccatcttgtcgcgctcacttcctgttttcttggagatcaaagat

SEQ ID NO: 15803 - DNA, 80 bp, synthetic construct
  source 1..80: mol_type = other DNA
tgcctggccggcagctttctcttaattacaattatttgactgacttcagtcactgtagaattgactgttctaaggggtgg

SEQ ID NO: 15804 - DNA, 80 bp, synthetic construct
  source 1..80: mol_type = other DNA
gagccagatggcctggatcaaatcccagctctgcctcttaaaatgctggtcaccttgagcagaagcctaacctctctgag

SEQ ID NO: 15805 - DNA, 80 bp, synthetic construct
  source 1..80: mol_type = other DNA
gcagcctacagtagaggtgaaaagcacagcgatttgacagatgccaaaggttcaggtcctgattcttccacctgccagct

SEQ ID NO: 15806 - DNA, 80 bp, synthetic construct
  source 1..80: mol_type = other DNA
ttaggtgcatccgtccttgggtgtccttggagaaccagaccatacatgcccaggtgtgctgttttgatttgtcagtgtgt

SEQ ID NO: 15807 - DNA, 80 bp, synthetic construct
  source 1..80: mol_type = other DNA
taggacatattctaagttctactaggggtctgacagtctgagatttcacctaaggatgaaggcaggaggaagacagagca

SEQ ID NO: 15808 - DNA, 80 bp, synthetic construct
  source 1..80: mol_type = other DNA
tagcaaatgggaacgcagcctctaagagacaggtgtttgtggtctcgctcttgcgccactgacccttctccagcaagtcc

SEQ ID NO: 15809 - DNA, 80 bp, synthetic construct
  source 1..80: mol_type = other DNA
ggattagaggcgtgagccactgcacccggcctgcttgtccctaaaacaaaagaaaacaaaaaaacccaacatgacaggaa

SEQ ID NO: 15810 - DNA, 80 bp, synthetic construct
  source 1..80: mol_type = other DNA
cttcttggtgcctgctgcatgacattccgtcgtgtggtaatttattaacagtctttgctcatggacacttagatgatttc

SEQ ID NO: 15811 - DNA, 80 bp, synthetic construct
  source 1..80: mol_type = other DNA
atgtctgagactcagtttcctgtcaatcaggtggtgggcagagctttagagacccagaatcagggactctaaaatgccat

SEQ ID NO: 15812 - DNA, 80 bp, synthetic construct
  source 1..80: mol_type = other DNA
aggctttctttcaacactgaaagtcctgcataaccatttagttccagcaaactgggagggttggtgaccctccagagccc

SEQ ID NO: 15813 - DNA, 80 bp, synthetic construct
  source 1..80: mol_type = other DNA
tcaacccaattgtcctttattttggctcatctaatttacagacatgatttctgaagtttaacagtatttgtaatggcaat

SEQ ID NO: 15814 - DNA, 80 bp, synthetic construct
  source 1..80: mol_type = other DNA
atctttgtccaatggttgccattaagcctagactgaaactcttctatcttgtgacagggagctcaccacaatgcaaggaa

SEQ ID NO: 15815 - DNA, 80 bp, synthetic construct
  source 1..80: mol_type = other DNA
ccacttggtgtatacatttaacaagtctttggtcttaataagcaccattacaaaccctcacattaagggcattattattc

SEQ ID NO: 15816 - DNA, 80 bp, synthetic construct
  source 1..80: mol_type = other DNA
cacattggcttctgtctcagactgatcctggaaagacacatggcaatatgttaaatacaatgtacatatgccacttagct

SEQ ID NO: 15817 - DNA, 80 bp, synthetic construct
  source 1..80: mol_type = other DNA
atttgacttttttttggcgagacagaggaaatgagcaagtatgtgaaaaccttcaaatggccactcccgaaaagcagcaa

SEQ ID NO: 15818 - DNA, 80 bp, synthetic construct
  source 1..80: mol_type = other DNA
attcccaaacctaacatggaaagcattttgcagtacttatactggggaggagacacagagtggaaacaagagaatagtag

SEQ ID NO: 15819 - DNA, 80 bp, synthetic construct
  source 1..80: mol_type = other DNA
aggtaaactgcaaatttgcaggctttggttcctttctcagaactcctttccagtattttcatatcccgggagcaccactt

SEQ ID NO: 15820 - DNA, 80 bp, synthetic construct
  source 1..80: mol_type = other DNA
aaatacagtaagtgtttcaatgcacctttggtaaaatttaatgtaaattcaagtctgaaatgtaaaatataatttaaaac

SEQ ID NO: 15821 - DNA, 80 bp, synthetic construct
  source 1..80: mol_type = other DNA
tgctatgttgtgagtaaacatggaagatgaaacatggaagatgaagtcaaatgcaccaggcagagggcattagaggatgg

SEQ ID NO: 15822 - DNA, 80 bp, synthetic construct
  source 1..80: mol_type = other DNA
gccttctcttcacttagcgaataaccacttcctatggaagagaggaaggggaagggaatgaatgtttattagatacctat

SEQ ID NO: 15823 - DNA, 80 bp, synthetic construct
  source 1..80: mol_type = other DNA
tttccctccttcccttcagctacaggtctttgatcttaactgcctgtctgaaaatcttttgtatccaaagaccttcaagt

SEQ ID NO: 15824 - DNA, 80 bp, synthetic construct
  source 1..80: mol_type = other DNA
ttttcatcctctgcactctggagcaaatgactccacaaggaatttttttacactccaaaatatttgttttattcttccag

SEQ ID NO: 15825 - DNA, 80 bp, synthetic construct
  source 1..80: mol_type = other DNA
cctgagctgctaatgaacaaagacatttttattaaaaccagatagctagccagagactcacgcagtcgaaactcctatag

SEQ ID NO: 15826 - DNA, 80 bp, synthetic construct
  source 1..80: mol_type = other DNA
accttgctgtgtttcctgcttgcgctctgtctcaaaatgtgtagagctgaacagaactactttggcatcttcaggccaaa

SEQ ID NO: 15827 - DNA, 80 bp, synthetic construct
  source 1..80: mol_type = other DNA
attcctcatatgtttagtccacatgggggaaatccctttatggctctggacccagtgaccagaaaattaatgaatcaaaa

SEQ ID NO: 15828 - DNA, 80 bp, synthetic construct
  source 1..80: mol_type = other DNA
ggcagttgtgttgcttggttgcacactcatcaagatctacaagaaaatgcaagagaggcatttgagtcaagccaacaaaa

SEQ ID NO: 15829 - DNA, 80 bp, synthetic construct
  source 1..80: mol_type = other DNA
aaaaacattagtgactttattttatcacaaattcaaccactatgccctcaccatctgcacaactgctttggagctgcaga

SEQ ID NO: 15830 - DNA, 80 bp, synthetic construct
  source 1..80: mol_type = other DNA
aaacaggaaaagggacaagttgtgagtggacatgtaaaaattacagttgctctttgcactcctaaagccataaagagaac

SEQ ID NO: 15831 - DNA, 80 bp, synthetic construct
  source 1..80: mol_type = other DNA
ggaagatgtttacaggagtaaaattaaaccaaaaaaattttgcaaaggataacttctggttgagaagggatttctgccca

SEQ ID NO: 15832 - DNA, 80 bp, synthetic construct
  source 1..80: mol_type = other DNA
ataagccatcagaaatagacacttacctacacaggaagtcccagttatatctggagtgtacccagttttacaaatgcaat

SEQ ID NO: 15833 - DNA, 80 bp, synthetic construct
  source 1..80: mol_type = other DNA
cttggcgaagtgccgatacaagcactttctacatgggttctcagcccttgactgccaaataaccattttataccaacagc

SEQ ID NO: 15834 - DNA, 80 bp, synthetic construct
  source 1..80: mol_type = other DNA
agcagtacccttcccgattgtctggaagggacattatatggcaaaggggatgtcaggaaattttaagagcaaacaaaata

SEQ ID NO: 15835 - DNA, 80 bp, synthetic construct
  source 1..80: mol_type = other DNA
tgtttgattttattgaaggaccaaaaacaagaagagtcatctgaccattttatagaggatggagctccttccttcgttcc

SEQ ID NO: 15836 - DNA, 80 bp, synthetic construct
  source 1..80: mol_type = other DNA
ctgatgattatttagaaagatcaaaaataatttgctgaggtgcttcccttcctttgagaatagttcagggtccctcagat

SEQ ID NO: 15837 - DNA, 80 bp, synthetic construct
  source 1..80: mol_type = other DNA
tagcaaagctaagtcaatagggaagcattccaatgtgatggggagaattgacccccaaatcaacaaaagagtatggaaag

SEQ ID NO: 15838 - DNA, 80 bp, synthetic construct
  source 1..80: mol_type = other DNA
gcctggctgtccctttatgttttatactcctttgttgaagcatgatttctaattcttgttgactaattgaactaaaaggg

SEQ ID NO: 15839 - DNA, 80 bp, synthetic construct
  source 1..80: mol_type = other DNA
aagagcaaactctatgattactgcagtttgtgaaatagagcctagttcagtgcttaggaaattgcaggtgttcaggaggt

SEQ ID NO: 15840 - DNA, 80 bp, synthetic construct
  source 1..80: mol_type = other DNA
tcccggttctcccagcacagtcccagtttatgtttgttgtcctggtataattattaatgattatttaggtggatgggaaa

SEQ ID NO: 15841 - DNA, 80 bp, synthetic construct
  source 1..80: mol_type = other DNA
cctttccttctttccatacattccaccaggcttacggatggacacttttcagatgcttatatattacaggcaaccgcttt

SEQ ID NO: 15842 - DNA, 80 bp, synthetic construct
  source 1..80: mol_type = other DNA
tccatttccacaaggattgccaacagaacattcatcagtatctgcaagaaaccaggaatgtgtccaaaacatgatgaatt

SEQ ID NO: 15843 - DNA, 80 bp, synthetic construct
  source 1..80: mol_type = other DNA
cacctagaatactcaccattcttattctgacacatcccttggggagaatatctccccttaggaaagaaataattttgaga

SEQ ID NO: 15844 - DNA, 80 bp, synthetic construct
  source 1..80: mol_type = other DNA
ttctagtatctcttctgatatgtccagtgtctgccttcaccattaggctgtaaggtccatgaaaggaaggaacttgtctt

SEQ ID NO: 15845 - DNA, 80 bp, synthetic construct
  source 1..80: mol_type = other DNA
acatgctgtgcatattgataaatgatggaaaaaacaagcccagaaaccagaggaagttatttaacgagactccctaagat

SEQ ID NO: 15846 - DNA, 80 bp, synthetic construct
  source 1..80: mol_type = other DNA
ggaagaggagggcagggctgtgggtgggtgggaacagaatagtctttctttgaaagaatatatttcaatattgattattg

SEQ ID NO: 15847 - DNA, 80 bp, synthetic construct
  source 1..80: mol_type = other DNA
aaatcatctctctaatttctattccacttccccatctgttgtggcaaggacctggcaagcacctttcaatgaattatcct

SEQ ID NO: 15848 - DNA, 80 bp, synthetic construct
  source 1..80: mol_type = other DNA
tccaaattcaggccaagccaaaggcacacaaaaacaagggagtaggagttagaatttatctgactggtctgtaccatgca

SEQ ID NO: 15849 - DNA, 80 bp, synthetic construct
  source 1..80: mol_type = other DNA
aatgggttaatgtgcagtttttcagtctcaagtctaactttggacccacatttttcagcttatctcttcagaggtagggg

SEQ ID NO: 15850 - DNA, 80 bp, synthetic construct
  source 1..80: mol_type = other DNA
ttgacagttattgatataaaaatggaatgtgcaactgccttctaaggggtgcagtgacaaacgtctcttacccagactga

SEQ ID NO: 15851 - DNA, 80 bp, synthetic construct
  source 1..80: mol_type = other DNA
tatacctgtgttatgttccctgtggtttattaatgaatctgatcttctattgccgattgaattactccattctgacactc

SEQ ID NO: 15852 - DNA, 80 bp, synthetic construct
  source 1..80: mol_type = other DNA
ctataggtaaaaacaaaatagacaaacgatataaccacattcatccaaccttgaatgtggtcatttaaagtttttaaatg

SEQ ID NO: 15853 - DNA, 80 bp, synthetic construct
  source 1..80: mol_type = other DNA
taagaagggaaatcacaattgcttacagagcaatttagcaatttcactgtttaatagtttgagtattcttggtgagtaca

SEQ ID NO: 15854 - DNA, 80 bp, synthetic construct
  source 1..80: mol_type = other DNA
taagcattttaataaaagtaatggatatagttacagtggttccctcttatctatggttttgctttctgggggttcagtta

SEQ ID NO: 15855 - DNA, 80 bp, synthetic construct
  source 1..80: mol_type = other DNA
cacccttgccacttttctcaaatattttcacttgaaaatggaaaaaactctgtgtgcatctgggtcttgaggtgttgcca

SEQ ID NO: 15856 - DNA, 80 bp, synthetic construct
  source 1..80: mol_type = other DNA
tgtcagtgctcttgtcattactctggagaagatacaactttatgagaaatgttcccaaatggatgaacccagtcatagcc

SEQ ID NO: 15857 - DNA, 80 bp, synthetic construct
  source 1..80: mol_type = other DNA
taattgcatacttacccaagcacatggtttggtcatcatttgttttaaaaccagtgtggcaaaggcaataaaagcttcca

SEQ ID NO: 15858 - DNA, 80 bp, synthetic construct
  source 1..80: mol_type = other DNA
tggacatctcctccatttcatgtgtccgggatgccactgttatggttatctcctatttagtagatgaatcatcataccat

SEQ ID NO: 15859 - DNA, 80 bp, synthetic construct
  source 1..80: mol_type = other DNA
gaactcttagatgatcatatttgaggttgggataggaggtctgaacaggctactgtggaaagaaacccaaatagtcaaca

SEQ ID NO: 15860 - DNA, 80 bp, synthetic construct
  source 1..80: mol_type = other DNA
acttcctaccacttaatcactggtaggcaaggaaatccaaggaaaatctgaccacgttcccctgtgttgtttcattcaca

SEQ ID NO: 15861 - DNA, 80 bp, synthetic construct
  source 1..80: mol_type = other DNA
ttaactatctgaaaataaatccagatatctgaagcttcatgaagacaaactcttgggtaggcatgtccagcctgtggggc

SEQ ID NO: 15862 - DNA, 80 bp, synthetic construct
  source 1..80: mol_type = other DNA
cattctggaaaaggcaaaactctggagacagtaaaaaatcagtggttgccaggggttaggggagattaggggatacacag

SEQ ID NO: 15863 - DNA, 80 bp, synthetic construct
  source 1..80: mol_type = other DNA
gctattgtctgaaaggctgcaagagcagaatgtctcaaatcttaaagtccacatgaatcacttgggatcttgctaaaatg

SEQ ID NO: 15864 - DNA, 80 bp, synthetic construct
  source 1..80: mol_type = other DNA
gtggaagctccctaaatcacctctacaatccattccaatttcagcattgctgaggcatgtatgcactcaaccttcatttt

SEQ ID NO: 15865 - DNA, 80 bp, synthetic construct
  source 1..80: mol_type = other DNA
gaattctctcatgcatttggaatatctgcattaaccttgttttcacttgggagtagcaaagtctctgtctggaagagaaa

SEQ ID NO: 15866 - DNA, 80 bp, synthetic construct
  source 1..80: mol_type = other DNA
gcctatatttagggaaaaaggcagaggtgagctggtaaagaaccacagaggagcacatggtcatatggaactctgatctt

SEQ ID NO: 15867 - DNA, 80 bp, synthetic construct
  source 1..80: mol_type = other DNA
actggtacatttctcaagcattcaacctgtatttattggctgaattatcacagccaccccatgagatggtctcggtacta

SEQ ID NO: 15868 - DNA, 80 bp, synthetic construct
  source 1..80: mol_type = other DNA
aaatattttgtcatgctggaatttggtaacaataagcatatagctaaataacagatgtccagttttcaagagctagaagc

SEQ ID NO: 15869 - DNA, 80 bp, synthetic construct
  source 1..80: mol_type = other DNA
gggcatctaaggatgcatataaatcacaccagggaaaaactcagagaatgcaatagctttccatctacttttatgttatt

SEQ ID NO: 15870 - DNA, 80 bp, synthetic construct
  source 1..80: mol_type = other DNA
cctaatgttgacgtgataatgaaggagaagtagagatccccagatcacatgccactcattcacatgagtttacctgtagg

SEQ ID NO: 15871 - DNA, 80 bp, synthetic construct
  source 1..80: mol_type = other DNA
aaatgcacaccaggtgtgcataagcttcagattttttaccaacaggtaagtaccacctaaagttgtaaagaccattattc

SEQ ID NO: 15872 - DNA, 80 bp, synthetic construct
  source 1..80: mol_type = other DNA
tatttcaggcaagtgtgtagaattcccggcttgaattttgtgtattagtcctgctcctggctctttcttattcttgtttg

SEQ ID NO: 15873 - DNA, 80 bp, synthetic construct
  source 1..80: mol_type = other DNA
ccacccgtggtggtgaaaaaatgccaagttatgatttataggggaagagtctcctaacaagacagtgaagggatgccagc

SEQ ID NO: 15874 - DNA, 80 bp, synthetic construct
  source 1..80: mol_type = other DNA
ggtaggcagagatagaaatgtggagaaattaaaatatcaaatatcccttaggaagacaagtacgcttcttatgctcacaa

SEQ ID NO: 15875 - DNA, 80 bp, synthetic construct
  source 1..80: mol_type = other DNA
tgcaggtcagttcttgatatctgcaagaccttatcatcctaccaggaccatttaccatcacacactcgtgtatcttcatt

SEQ ID NO: 15876 - DNA, 80 bp, synthetic construct
  source 1..80: mol_type = other DNA
aaaccctttccaaatagagccttaggaaaagctgttctctgttgattcccatcccaattctctccttaatgactagagac

SEQ ID NO: 15877 - DNA, 80 bp, synthetic construct
  source 1..80: mol_type = other DNA
aatttgcctactatgctgtattctcctgaagggcaggatctagtctaattcatctttgcacatccagagtacacattcta

SEQ ID NO: 15878 - DNA, 80 bp, synthetic construct
  source 1..80: mol_type = other DNA
gctgttttcaaaataatacacagtatgcttgcttctctgaaaagtttttaaggtcttaccaacacagccaactcgagttg

SEQ ID NO: 15879 - DNA, 80 bp, synthetic construct
  source 1..80: mol_type = other DNA
gaaggcaaaacactgttgtgacctcggtcaaccaaaaattcagacacaggttttaagaaaatatattgagtatatgtggc

SEQ ID NO: 15880 - DNA, 80 bp, synthetic construct
  source 1..80: mol_type = other DNA
ctaagctttttctaatgttccctgagagtccttggctcaacaagaaaatgatttatacactagagataggtggctgagct

SEQ ID NO: 15881 - DNA, 80 bp, synthetic construct
  source 1..80: mol_type = other DNA
agttccaaagacacagatgttcggaagggagcactcatcaatatcttggggggagggagaaaaaagcaaaaaacttaact

SEQ ID NO: 15882 - DNA, 80 bp, synthetic construct
  source 1..80: mol_type = other DNA
ctgaaatcttcttttcaatgaaggagaatgtgcttaaatttgacaaatgtgggtaaagggaagaatcttgtgttccctaa

SEQ ID NO: 15883 - DNA, 80 bp, synthetic construct
  source 1..80: mol_type = other DNA
aaaaaagcatcaggaatgtttaaataacctaatctcatcaagcccagcaaggctcccagtggcttccccatcagttacct

SEQ ID NO: 15884 - DNA, 80 bp, synthetic construct
  source 1..80: mol_type = other DNA
gatgatggcctgttggagagaaatacatactgttcttctaatctagaacatctaatcccttctccttacatagttcccta

SEQ ID NO: 15885 - DNA, 80 bp, synthetic construct
  source 1..80: mol_type = other DNA
catggtattcttgcagtctgcatgctggctgcacatatgggttccattggaacattcgtccagatcttatagaaaaaggt

SEQ ID NO: 15886 - DNA, 80 bp, synthetic construct
  source 1..80: mol_type = other DNA
taatttaagcatttgcagaaaatgttccttaagacagtatataagccatcttttccctagcttcttagagtcctagcaca

SEQ ID NO: 15887 - DNA, 80 bp, synthetic construct
  source 1..80: mol_type = other DNA
acatggacctatcaagttattactgcaggtcaagagagacacatagctttagactgtgactgggagctttaaccagctaa

SEQ ID NO: 15888 - DNA, 80 bp, synthetic construct
  source 1..80: mol_type = other DNA
ccactgcgcccagctgagcgcatttctttagtcatatcaggattttattctaagccttgctttatggagttaccaaaata

SEQ ID NO: 15889 - DNA, 80 bp, synthetic construct
  source 1..80: mol_type = other DNA
aagaaaagcaaagaaattcaaacttaaagtgacaccgcaaccttcttaaccccaccaaacctttgtcacaaagactcaaa

SEQ ID NO: 15890 - DNA, 80 bp, synthetic construct
  source 1..80: mol_type = other DNA
tgtaatccagcccacttaagccaaggatagaagagctgtgttctgcgtttcaagcaaatgtgttctctctccattaaatg

SEQ ID NO: 15891 - DNA, 80 bp, synthetic construct
  source 1..80: mol_type = other DNA
gcaactgtagtgcacagctctgttaccatggtcttagtatctgtgcaaattcaactacgaaaaacaagcctttcaatata

SEQ ID NO: 15892 - DNA, 80 bp, synthetic construct
  source 1..80: mol_type = other DNA
tgagagtttaaacactgtgccatttatcagaatggacccctagacaggcttcatgtaaggagtagcatagtgaaaatgaa

SEQ ID NO: 15893 - DNA, 80 bp, synthetic construct
  source 1..80: mol_type = other DNA
acctttttccccccacaggtcaagaaaaaaacctgcaacttggatccaatataaacgatgacaaatttcaaagaagtgga

SEQ ID NO: 15894 - DNA, 80 bp, synthetic construct
  source 1..80: mol_type = other DNA
tcatagggcagagtaaaggacaggagagagctacacagaagaaagcaatgccagagatttgctaagagtcttctgcaagt

SEQ ID NO: 15895 - DNA, 80 bp, synthetic construct
  source 1..80: mol_type = other DNA
aaagtaatggataggcataaaagaaatgtccatctggagctgacgaatggccagtcagtcctcataacatatctgacaag

SEQ ID NO: 15896 - DNA, 80 bp, synthetic construct
  source 1..80: mol_type = other DNA
gcctgaattctatcaactgttttagcaatattttaaggtaagaattacttgaaataaccatacctacttagatgctctta

SEQ ID NO: 15897 - DNA, 80 bp, synthetic construct
  source 1..80: mol_type = other DNA
gtatcttgattaaggatacagttaaaatatatgacaaacaagggtttggactcaagcctgcttgactccaaagcctgggc

SEQ ID NO: 15898 - DNA, 80 bp, synthetic construct
  source 1..80: mol_type = other DNA
gggacagacacaatctttgacttcaaaatgattacactgtggccaggagacagatgaacaattaattgcaccatgcatga

SEQ ID NO: 15899 - DNA, 80 bp, synthetic construct
  source 1..80: mol_type = other DNA
aacggccattggggcacaggtgtgcactcagctcacattcattgatgtctgtcgggaaaataagaagaacaaacacccaa

SEQ ID NO: 15900 - DNA, 80 bp, synthetic construct
  source 1..80: mol_type = other DNA
ctacagcttctgtctcaattgtcctctcttccgcctgggtatccatttcaggtgttaaaatcacttctcaagggcccaca

SEQ ID NO: 15901 - DNA, 80 bp, synthetic construct
  source 1..80: mol_type = other DNA
aaataatgtgtctattcagacttctagggcccagcacactgcctgacacatagtgaatatttaaccactacttgctgagt

SEQ ID NO: 15902 - DNA, 80 bp, synthetic construct
  source 1..80: mol_type = other DNA
acgtaactgacatttaagagggccacctagaaactatctgaaactatctctccatacagaacaattttaacccccaggac

SEQ ID NO: 15903 - DNA, 80 bp, synthetic construct
  source 1..80: mol_type = other DNA
ttataaagaagagcagaaagcctagcagagcagaggtcagaagagctggattttggtcctcttctgtaactcagtggatt

SEQ ID NO: 15904 - DNA, 80 bp, synthetic construct
  source 1..80: mol_type = other DNA
gagccatcgcacccggcccacttttttaactacctacaatagtcttcactgagcctacacttcaaagtaatgtggtttca

SEQ ID NO: 15905 - DNA, 80 bp, synthetic construct
  source 1..80: mol_type = other DNA
cagaaactacagttgctgcttactatttgaaagactgtcaaaggagtggccatggaccctatcggacatgctgaattttg

SEQ ID NO: 15906 - DNA, 80 bp, synthetic construct
  source 1..80: mol_type = other DNA
gttttttgttttgttttggccacttgtacaacaaaatatgctgctgaggtcagataagttattaacagcgggtctggacc

SEQ ID NO: 15907 - DNA, 80 bp, synthetic construct
  source 1..80: mol_type = other DNA
ctggaacatgaagtagattgtgttgctataagtatgagataacaaaatgtttctgcgattgcataggtgaggaagaacag

SEQ ID NO: 15908 - DNA, 80 bp, synthetic construct
  source 1..80: mol_type = other DNA
tgttcggggccatcaggattaaatctttgaaaattctcatgtgagcctagataaatgaaatactaggcttccccttttta

SEQ ID NO: 15909 - DNA, 80 bp, synthetic construct
  source 1..80: mol_type = other DNA
acaaaacttccaggagtatttctacattgtccattgtcacaaaggagactgttcagtacacattcattaatatctgcaaa

SEQ ID NO: 15910 - DNA, 80 bp, synthetic construct
  source 1..80: mol_type = other DNA
tactaaagatatgtatatgctgtgctaacatccgaagtataaagtgtccatttgcccagtcctctaagctactcaaaggc

SEQ ID NO: 15911 - DNA, 80 bp, synthetic construct
  source 1..80: mol_type = other DNA
cactcttctatgaacatataatgccctcttcactctgtgtcaggaatgcttggagcaggcctatttacaggtcaaaagcc

SEQ ID NO: 15912 - DNA, 80 bp, synthetic construct
  source 1..80: mol_type = other DNA
gccattttataatactgagcacttaacagttcagaatccttcagaatgcagatggagaatggttcaactagcccatcatc

SEQ ID NO: 15913 - DNA, 80 bp, synthetic construct
  source 1..80: mol_type = other DNA
gagtgaatgatgaaaatgtagaactaactggaatcacactatccaaggaaaggaaactagtgtccccttaagttgccaat

SEQ ID NO: 15914 - DNA, 80 bp, synthetic construct
  source 1..80: mol_type = other DNA
ggtactagaccattttttgtagtgagttcaaataagcatgggttttaataccgatgacaacgctaattgctgggagtttt

SEQ ID NO: 15915 - DNA, 80 bp, synthetic construct
  source 1..80: mol_type = other DNA
gtgactttgttataaaagcacattcagtcctctctagctttctctcactcctgcatgctctgttgcccttccactttcag

SEQ ID NO: 15916 - DNA, 80 bp, synthetic construct
  source 1..80: mol_type = other DNA
tttttgtttgtttgtttgttcgtttgtatttttagtagagatgagatttcaccatgtcagccaagctggtcttgaactcc

SEQ ID NO: 15917 - DNA, 80 bp, synthetic construct
  source 1..80: mol_type = other DNA
aaatcaatacgtgggatgtaaacaaaatttacaaatggccttttggaaagctagtggaaatagtcaagtaatatgacagt

SEQ ID NO: 15918 - DNA, 80 bp, synthetic construct
  source 1..80: mol_type = other DNA
tgaggcccttcaatgctggaattatatctcacttattttgtctttctcgggcctgtgcagagcaggcacttaataaatgt

SEQ ID NO: 15919 - DNA, 80 bp, synthetic construct
  source 1..80: mol_type = other DNA
catgcagatcccaggggtttcacactcgttaatgtctgtggcagagaaaggcacttattaaaaatgaagtgacatttatc

SEQ ID NO: 15920 - DNA, 80 bp, synthetic construct
  source 1..80: mol_type = other DNA
catattaataatagcagagggttttttccccccttaatatggggaagtacaaaaggcaccaaaattgtggtttggaaaac

SEQ ID NO: 15921 - DNA, 80 bp, synthetic construct
  source 1..80: mol_type = other DNA
atttcactggttgccaatggttgccaaacctggtttcatctatgaggtcacagcattatctattggccatacttaatgtt

SEQ ID NO: 15922 - DNA, 80 bp, synthetic construct
  source 1..80: mol_type = other DNA
cgtttaccaaagctgtccactaggggcacacagagaagaggcaccataggactttattctgctttcctctaccttgaata

SEQ ID NO: 15923 - DNA, 80 bp, synthetic construct
  source 1..80: mol_type = other DNA
cgtccatctgatgccagctggaatccaggtttgcaaatacatttaaaactgccatcttcattgatacacattccattaag

SEQ ID NO: 15924 - DNA, 80 bp, synthetic construct
  source 1..80: mol_type = other DNA
gtgccacagaagtttcatcacaccagggatctttaaatggcaagctctcctagcatattaaaatgttatttgattcacac

SEQ ID NO: 15925 - DNA, 80 bp, synthetic construct
  source 1..80: mol_type = other DNA
caccttaattctgcctgaaaaccgtcaatcacatctctaaaatgtccatcttccttataccaattctggtttacgtgcag

SEQ ID NO: 15926 - DNA, 80 bp, synthetic construct
  source 1..80: mol_type = other DNA
ttcagaatgtcatggggttccccattgccctataagacaaatttaaagcttgtcattcaaagttctcctctactgtgttt

SEQ ID NO: 15927 - DNA, 80 bp, synthetic construct
  source 1..80: mol_type = other DNA
tccagtctatcattgatgggcccttttatttaactttaacagagtatttgcctgttttttttttctgtctttactgaatt

SEQ ID NO: 15928 - DNA, 80 bp, synthetic construct
  source 1..80: mol_type = other DNA
ttcagaatgacaataggtggaactaagttcaaaaaagccacgggactgtattagtctcttccggcatgggttatttaaac

SEQ ID NO: 15929 - DNA, 80 bp, synthetic construct
  source 1..80: mol_type = other DNA
gttagatgttcccacttctactcagctctggatgacctctagaaggggtgttcatatcatcaggaaattaaatagtttgg

SEQ ID NO: 15930 - DNA, 80 bp, synthetic construct
  source 1..80: mol_type = other DNA
caatagaaaaccagtagagtcaaggaacagaattacaacagacccttggtgccaacctaggatggatcacgtaccaatac

SEQ ID NO: 15931 - DNA, 80 bp, synthetic construct
  source 1..80: mol_type = other DNA
aaaataactagatgatttttgaattcttacttggtggctcccgagatggatacagatattccactggtggtcgagggacc

SEQ ID NO: 15932 - DNA, 80 bp, synthetic construct
  source 1..80: mol_type = other DNA
gaaccctgaagaatactgattcgtaaaagaaagcaatatcaatggagaagtggcccataagggaggagaaacaccaaggg

SEQ ID NO: 15933 - DNA, 80 bp, synthetic construct
  source 1..80: mol_type = other DNA
gcattcatatttcaacctcacgggacattctgccaatttacatgaggttaaataggaaagtactgttggtactttctggt

SEQ ID NO: 15934 - DNA, 80 bp, synthetic construct
  source 1..80: mol_type = other DNA
ggaacatttggacaaacaaaaacctacctgcaagttattttgctctataaatctgttttgcccaaggcctctgagggctg

SEQ ID NO: 15935 - DNA, 80 bp, synthetic construct
  source 1..80: mol_type = other DNA
tgaactgggattagatttgggactctaaatactgtgctaagtagcaaatgttctttgcaagaaatggagtgaattggcca

SEQ ID NO: 15936 - DNA, 80 bp, synthetic construct
  source 1..80: mol_type = other DNA
ctgtggcagctggttagagcagcgcccgtttgtcagagctgtgtaacagtatcctgggcgaacatctgaggacaaagaaa

SEQ ID NO: 15937 - DNA, 80 bp, synthetic construct
  source 1..80: mol_type = other DNA
gttacggaaagagtttgtggcataggaaaacctaacttctccatatgcctttgagatattaccacgaaacagtgaaggca

SEQ ID NO: 15938 - DNA, 80 bp, synthetic construct
  source 1..80: mol_type = other DNA
actagccagtataaatgtgctttccagaatttttttgtggttccagttcctgtacctctggtcagactaatagtttcacc

SEQ ID NO: 15939 - DNA, 80 bp, synthetic construct
  source 1..80: mol_type = other DNA
aataagtaaaggaagaaaaaactgaaaattggaaaccatttggagtaaatgacctccaggacacagcagcctgaagtttt

SEQ ID NO: 15940 - DNA, 80 bp, synthetic construct
  source 1..80: mol_type = other DNA
ggcagaaaggtcacttggatcattttgtatgacaagtgtctaattatgggcacaacagagttgcaaagaagaaacggggc

SEQ ID NO: 15941 - DNA, 80 bp, synthetic construct
  source 1..80: mol_type = other DNA
aagtcctaatggaaaactaccgagggtttgagcaagagtgttatttaatcgaagcactattttaggaagataaatctgac

SEQ ID NO: 15942 - DNA, 80 bp, synthetic construct
  source 1..80: mol_type = other DNA
ccctggaaacagccatcattaaaaagtaaaaaccgcatggagaacagtcaattcaaaggtagatgctgcttctttcaaca

SEQ ID NO: 15943 - DNA, 80 bp, synthetic construct
  source 1..80: mol_type = other DNA
accagcagaagaagagaaaaaaatgacagcttccttcttaggctagaagtaaactcagggcacagggaatctgcatggcc

SEQ ID NO: 15944 - DNA, 80 bp, synthetic construct
  source 1..80: mol_type = other DNA
taacattggcagaatgggggaaacatcttttccatgctggctgagtgagatttgggccctttattgaagataacaataac

SEQ ID NO: 15945 - DNA, 80 bp, synthetic construct
  source 1..80: mol_type = other DNA
atttgagaacggtcactttctcagtttctataaatcaggctgtgtcaaatgccagccatgaaagcaaaccaggtggggac

SEQ ID NO: 15946 - DNA, 80 bp, synthetic construct
  source 1..80: mol_type = other DNA
cttgaaaatggagtctgaattcttatccatgctgcatccgccgcccgatcacaacttgaaaatggagtctgaattcttat

SEQ ID NO: 15947 - DNA, 80 bp, synthetic construct
  source 1..80: mol_type = other DNA
tgttcatgtgttctttcagcatgcgtactctacagtcattggaaagatcaacaaagaaggtgggcatgaactctttcctt

SEQ ID NO: 15948 - DNA, 80 bp, synthetic construct
  source 1..80: mol_type = other DNA
cagaaaacaaaacacagactggacaagtcataaggactatactcccctcaatcttgaagctgattatatattctgaagct

SEQ ID NO: 15949 - DNA, 80 bp, synthetic construct
  source 1..80: mol_type = other DNA
aaaatgcatccatctaagtgaaacctcaaggtggggtgagttgaggatgaaggaaaaagttttctcttctgatcttgatg

SEQ ID NO: 15950 - DNA, 80 bp, synthetic construct
  source 1..80: mol_type = other DNA
ttcttaccttcacatttttgtgacacttcattaagtttgtgtccagcagggcatttgcactcaaaagacccaacagtatt

SEQ ID NO: 15951 - DNA, 80 bp, synthetic construct
  source 1..80: mol_type = other DNA
gtttttgcgcaaatgaagtggaaatgttcacttcacattctggagaagtgccttgcacagtaaaaattaaacaactcaga

SEQ ID NO: 15952 - DNA, 80 bp, synthetic construct
  source 1..80: mol_type = other DNA
gaactagctgtcttgttgatcatgatttctggccaacagaaaatatagacaaggcaattctccactggctgtatactcca

SEQ ID NO: 15953 - DNA, 80 bp, synthetic construct
  source 1..80: mol_type = other DNA
agtttcaaggtgacttatttcttctcctgacattcagagggatacatttaagggcatccaaaggagctgtatgttgtaca

SEQ ID NO: 15954 - DNA, 80 bp, synthetic construct
  source 1..80: mol_type = other DNA
ttgtccctggcacatctggttgctgatcacagtaaaacatgggcctgtcctgtaatctgaaaataaagaataaaaatctg

SEQ ID NO: 15955 - DNA, 80 bp, synthetic construct
  source 1..80: mol_type = other DNA
ttttcctacagagagagagccaacaacaaataagaaagataaagacgtagtgagcacagaggaccaaacccaggttgtcc

SEQ ID NO: 15956 - DNA, 80 bp, synthetic construct
  source 1..80: mol_type = other DNA
tgatgcccatgctgtaagatcaaccttctgaagaattccaaaaacaaaactccatgccagtcatatatgtaaagaagact

SEQ ID NO: 15957 - DNA, 80 bp, synthetic construct
  source 1..80: mol_type = other DNA
ctttagacaattgagaaaaggcagtagcatataaacaaatgtaattacacctaaagaaacccttgataacgtattgatta

SEQ ID NO: 15958 - DNA, 80 bp, synthetic construct
  source 1..80: mol_type = other DNA
agttgttaattctgacaatctatattaggcatcccaacagtccacagggatccaatttattaagtatactatatatttgg

SEQ ID NO: 15959 - DNA, 80 bp, synthetic construct
  source 1..80: mol_type = other DNA
gcctctgatcctcagctcatgcccagctctgcagctcagaatgctgtggtctacagcattatttcactttcatttgtaat

SEQ ID NO: 15960 - DNA, 80 bp, synthetic construct
  source 1..80: mol_type = other DNA
ctaccagctcatcaaagcaaacaacaaagtcaaaatttaggaaggttgatcatccactactgcagtgtcctaatagttag

SEQ ID NO: 15961 - DNA, 80 bp, synthetic construct
  source 1..80: mol_type = other DNA
ataataaaatttcaggggaaagaaattcctttcaggcctacttttactatgcaatgttgcttctcccatcttatttaagc

SEQ ID NO: 15962 - DNA, 80 bp, synthetic construct
  source 1..80: mol_type = other DNA
atggtctgcaaattccactttaaagaaccagttggctctgattcattcccttttaaaacagcttgtatgaaatgccacgt

SEQ ID NO: 15963 - DNA, 80 bp, synthetic construct
  source 1..80: mol_type = other DNA
acagaatcatgggtttccttaatgcattcgacaaatacttattgagccacaaccctgtatcagtgaatagcacaacataa

SEQ ID NO: 15964 - DNA, 80 bp, synthetic construct
  source 1..80: mol_type = other DNA
tgttatttgagaagtgtgctcctttaagggctcaggagttgaaatggaaagggtttcagggaggctactgaaggatttga

SEQ ID NO: 15965 - DNA, 80 bp, synthetic construct
  source 1..80: mol_type = other DNA
tttggaagaaaatgtctgatgaatgaaaaattcctgagactgtttccagctcagagtctggcactgaactcagctgaaga

SEQ ID NO: 15966 - DNA, 80 bp, synthetic construct
  source 1..80: mol_type = other DNA
caagagggaagccaaacaccacaattttctccaactgtggaagaaaaaacaacttgagccagattttagctctctggatg

SEQ ID NO: 15967 - DNA, 80 bp, synthetic construct
  source 1..80: mol_type = other DNA
ccctcttctgcttaagctagttccattacttgcaaccaatgcacttggactcaatacagtgccttcatttattccttttt

SEQ ID NO: 15968 - DNA, 80 bp, synthetic construct
  source 1..80: mol_type = other DNA
taatcacccgcaaactttgtcaaatttaccacctcaacagcttctttattgcccctcctctgaaattcaattgctactgc

SEQ ID NO: 15969 - DNA, 80 bp, synthetic construct
  source 1..80: mol_type = other DNA
ctctactcccttgcctggccttttgttaaaaacaacagttgaatttgcaatatagagcaaagataaaggtgacatgcaga

SEQ ID NO: 15970 - DNA, 80 bp, synthetic construct
  source 1..80: mol_type = other DNA
atcaccaccagctaccatatacctccaaattcattcctgacataagaaaaattaacccctatttgtttaagtcactgtgg

SEQ ID NO: 15971 - DNA, 80 bp, synthetic construct
  source 1..80: mol_type = other DNA
aagtcgcagctttatagtctattgttttggctcagggaacgggagaatcaagggtagtaaatgaacttatataatacttc

SEQ ID NO: 15972 - DNA, 80 bp, synthetic construct
  source 1..80: mol_type = other DNA
gctaaaaaaatatatgtaataaaatctatgatagaggttacctccctgtggagaagcaggaaagagatggtacggggaat

SEQ ID NO: 15973 - DNA, 80 bp, synthetic construct
  source 1..80: mol_type = other DNA
cattttgggaaaagcctgtccagcttcatatatcaaaatgaacatcttcatcttctgagctcctatggtgtattgctgta

SEQ ID NO: 15974 - DNA, 80 bp, synthetic construct
  source 1..80: mol_type = other DNA
caaaggttagtgactgtctataccactggaatcctggtaaagttttggaagagccttcatgactcaccttcaatttccat

SEQ ID NO: 15975 - DNA, 80 bp, synthetic construct
  source 1..80: mol_type = other DNA
ccaaatctctattcattcaagaatttggtaacctatgtgaattcctgactttgaggatcagaaaggtttttagagaacag

SEQ ID NO: 15976 - DNA, 80 bp, synthetic construct
  source 1..80: mol_type = other DNA
aattccaggagagagggtttaaattattagacctattccaagccaggatataaaaccctttctaaacaggtactccccca

SEQ ID NO: 15977 - DNA, 80 bp, synthetic construct
  source 1..80: mol_type = other DNA
aaatatattatgtctaaagaattttgagaccccttcgaaagggagcttgatccaatcctcaaggctccaggcactttcag

SEQ ID NO: 15978 - DNA, 80 bp, synthetic construct
  source 1..80: mol_type = other DNA
caaaacgaagtaacagatgctacacaggagaagccaggctcacataataaagagttttgaggcaagaaggcagaattcat

SEQ ID NO: 15979 - DNA, 80 bp, synthetic construct
  source 1..80: mol_type = other DNA
tttcctcatctgaacaatagggatcatgccatactacccaacccccagagttgttgtgaaaactaagtaatgtattcaga

SEQ ID NO: 15980 - DNA, 80 bp, synthetic construct
  source 1..80: mol_type = other DNA
accctgccaatcatgacgtaagttgtcagtagatcacattttgggcaacactggactggatgttagaagaatggaatcaa

SEQ ID NO: 15981 - DNA, 80 bp, synthetic construct
  source 1..80: mol_type = other DNA
ccagtacctagtactacagtccttagcacagactatgtcttcaatagatacatgagagacagtgaatgaatgaacagatg

SEQ ID NO: 15982 - DNA, 80 bp, synthetic construct
  source 1..80: mol_type = other DNA
aagtgtaagttatgtgtatttagccaactctcctgtgccattctgcaaacgggcgctccccatgtatttggtactctttc

SEQ ID NO: 15983 - DNA, 80 bp, synthetic construct
  source 1..80: mol_type = other DNA
gacactttggggagaattaagttgaagtttctggactcaatgtctctgtctaaactgctttcagtgattcaggacttttt

SEQ ID NO: 15984 - DNA, 80 bp, synthetic construct
  source 1..80: mol_type = other DNA
atcccaccacccagagtgaaccactgtaaacattttcatctgtgtttttcctaacattaatgaacatatcttaacacata

SEQ ID NO: 15985 - DNA, 80 bp, synthetic construct
  source 1..80: mol_type = other DNA
tccaactataaagttaaacaagacccccaccctttctcttcaagacttcaacatggaaaaacctttgaatgttgacacta

SEQ ID NO: 15986 - DNA, 80 bp, synthetic construct
  source 1..80: mol_type = other DNA
gtgtaccatccttccttccccctaactgagaccagtttaaaaaaaataaattggctcacttctcaacttttctgtgagcc

SEQ ID NO: 15987 - DNA, 80 bp, synthetic construct
  source 1..80: mol_type = other DNA
aaaaaagtccagaaaagtcacagaatacaacatcagtatacaaagagcagtcatagttttatatactaacaatgaacaat

SEQ ID NO: 15988 - DNA, 80 bp, synthetic construct
  source 1..80: mol_type = other DNA
ttaaaagccggcaagacattagagtaaacatgttaccaaagaagatacatgaataggcacatgaaaagatgttcaacacc

SEQ ID NO: 15989 - DNA, 80 bp, synthetic construct
  source 1..80: mol_type = other DNA
agccattttttccaaactaatcctaggacttaacacagttggcttatctaaggatcaaacctgcggttatgacctcatta

SEQ ID NO: 15990 - DNA, 80 bp, synthetic construct
  source 1..80: mol_type = other DNA
tggtctgttgactaatagtgagggtacattgtttgctggaaagcagagttcacaagccccagagaaaggccaaagatcta

SEQ ID NO: 15991 - DNA, 80 bp, synthetic construct
  source 1..80: mol_type = other DNA
agcatattaaacattaatagcagtcactcagggacctatgagtattttctccaatttctctgcacttttctaaattaaaa

SEQ ID NO: 15992 - DNA, 80 bp, synthetic construct
  source 1..80: mol_type = other DNA
aattcatgatggcagtcacctctggagagaggaatggcaaaggaactagggagaaaaagagggacataagctttatctga

SEQ ID NO: 15993 - DNA, 80 bp, synthetic construct
  source 1..80: mol_type = other DNA
agaaagaaaatatatattaccctcctaaggcatagctctcaattaatgatttgtggccagcaaggagatcttggattctc

SEQ ID NO: 15994 - DNA, 80 bp, synthetic construct
  source 1..80: mol_type = other DNA
gtggcttccatgtgacatcagatcaggacaatcaggaggcttccatttggaaactcaagcctgacacaaaatagcatcca

SEQ ID NO: 15995 - DNA, 80 bp, synthetic construct
  source 1..80: mol_type = other DNA
acatgcacatattgcataatggcaaactctggcttttactgtacccattatctgaattgtgagcattgtacccaataggt

SEQ ID NO: 15996 - DNA, 80 bp, synthetic construct
  source 1..80: mol_type = other DNA
gtccttgacctctcagcctgattaaatgtttttttccccctctactctgatctccctttgtgcacatgtctaatatagca

SEQ ID NO: 15997 - DNA, 80 bp, synthetic construct
  source 1..80: mol_type = other DNA
caggtctagccagtacctcctgtgagcacttgctgtacagaaataactaggtcacaatagtgttctcaagattctgaatc

SEQ ID NO: 15998 - DNA, 80 bp, synthetic construct
  source 1..80: mol_type = other DNA
taggcgtgtgctctccaaagcgcatcctataatttatttttaagtgaaaaatgtcagctgtagaaatgcatctccaagtc

SEQ ID NO: 15999 - DNA, 80 bp, synthetic construct
  source 1..80: mol_type = other DNA
aggcacagagatttcaccacgagcactgaatcttgcttgtatgtcataacaaatatctggatgtagcaattagagcagag

SEQ ID NO: 16000 - DNA, 80 bp, synthetic construct
  source 1..80: mol_type = other DNA
caatcgatcaatcagtctctttctccacctctccttagaaactctacgttatatccctctgacataagctttttaggctt

SEQ ID NO: 16001 - DNA, 80 bp, synthetic construct
  source 1..80: mol_type = other DNA
cagcaatgcaccaacaaatcatgcactacaccatcaacccatgtcctattgcaaaaagtgatcagctgtatatatgccag

SEQ ID NO: 16002 - DNA, 80 bp, synthetic construct
  source 1..80: mol_type = other DNA
ataagtgctgcataaatggaagggatgacataaatgtggcatctctgaggtattaacacttcacagaatacacttggctc

SEQ ID NO: 16003 - DNA, 80 bp, synthetic construct
  source 1..80: mol_type = other DNA
tgtgactccagaaggcgggatgcgtgtgtttcattcattattatacatctccagtcattagcatagtgcctgagaaatac

SEQ ID NO: 16004 - DNA, 80 bp, synthetic construct
  source 1..80: mol_type = other DNA
acaactgcaacagttgaatgtgtactaaagaaaagcacacggttgatgtgcttctttcttgatgttgacctttctatatc

SEQ ID NO: 16005 - DNA, 80 bp, synthetic construct
  source 1..80: mol_type = other DNA
ttttatatcattaagatactgtggatgcttctgcttttatcttctccatagtagaacaagaaagttccaaaattttctcc

SEQ ID NO: 16006 - DNA, 80 bp, synthetic construct
  source 1..80: mol_type = other DNA
agtctgactgaaagactatacataaacctctattttagtagtcccaaaagcagattagccaattgtgtaattcccagatg

SEQ ID NO: 16007 - DNA, 80 bp, synthetic construct
  source 1..80: mol_type = other DNA
tcaaatgaatcctcttaggaacccaaaaggtgaatgattaaataatgaagatcttcctccaaaaacctctagacatttag

SEQ ID NO: 16008 - DNA, 80 bp, synthetic construct
  source 1..80: mol_type = other DNA
tcctctgcctagctaaatcctggccctgcttggttacttaactgtttccaatatagtatgcatgtctgtctttccaaaaa

SEQ ID NO: 16009 - DNA, 80 bp, synthetic construct
  source 1..80: mol_type = other DNA
tgcatatcaagagtattcaaatgtccaaagtagcaagtgatgggaagcgggttactctggagagagctgggctgttacta

SEQ ID NO: 16010 - DNA, 80 bp, synthetic construct
  source 1..80: mol_type = other DNA
gttacccagccacaaaaaaacgagtgtgtgtgtcaaaagatgcaattcctggaactattctaggaaaatctagtttattc

SEQ ID NO: 16011 - DNA, 80 bp, synthetic construct
  source 1..80: mol_type = other DNA
caaaatcatttttacatcatcagagaaacaaggtgtgaggacaagtttctcaaacgtcaactgcacatataagaaggagg

SEQ ID NO: 16012 - DNA, 80 bp, synthetic construct
  source 1..80: mol_type = other DNA
gcttttgatcccaaacagctaaaatgtgtgattacccactgtagtcactagaattaacagtaaattactgtaggctgttt

SEQ ID NO: 16013 - DNA, 80 bp, synthetic construct
  source 1..80: mol_type = other DNA
tcagtacatgtcagctgttcttacgtccaatggccgctttatgattctcattctcagaccttcgatgagtctaacaattg

SEQ ID NO: 16014 - DNA, 80 bp, synthetic construct
  source 1..80: mol_type = other DNA
atgtgatacaaatcctgccagtatgacccccaaaggcgtatttcacactcatagtgggtctctgaggtagttattaatgt

SEQ ID NO: 16015 - DNA, 80 bp, synthetic construct
  source 1..80: mol_type = other DNA
aaacagtgaagactctacaaatggaaatagaattctggaatcaaaaagactcctctctcccatgtggtgtgggaaatgac

SEQ ID NO: 16016 - DNA, 80 bp, synthetic construct
  source 1..80: mol_type = other DNA
tttcacacaccactcctcaagctacacattaacaattttaatctcctacaacttccctgattaagtaataaggccacaga

SEQ ID NO: 16017 - DNA, 80 bp, synthetic construct
  source 1..80: mol_type = other DNA
aaaattaaggataattctacacactctagcaggctgcgatgagtactgaataaaccatctacacaaagtagcttctcagc

SEQ ID NO: 16018 - DNA, 80 bp, synthetic construct
  source 1..80: mol_type = other DNA
agtttaacctcgaaaacagtggtttctaagagatgtcactgaatgggaactgtgtgttagcaaagactcttttgcttatg

SEQ ID NO: 16019 - DNA, 80 bp, synthetic construct
  source 1..80: mol_type = other DNA
ccctcccagattacagatgaggaagctgaagtttaggaaaagttttctaattctgccagtgttaattaagcacttgtgtg

SEQ ID NO: 16020 - DNA, 80 bp, synthetic construct
  source 1..80: mol_type = other DNA
ggctacacaaaactcaaccaatattcttctcccactgcagtgtgtggatggtgatacagtttggctgtgtcaccacccaa

SEQ ID NO: 16021 - DNA, 80 bp, synthetic construct
  source 1..80: mol_type = other DNA
gaaccttcaaactgaacaccatgtgataagtacttcggtagcagaatctagattaggaaatgagagggatgcagatacca

SEQ ID NO: 16022 - DNA, 80 bp, synthetic construct
  source 1..80: mol_type = other DNA
tatttttacctgataatgacctaattgagaatgctaaacatattatttgtgtgtgtaaaatcatttaccggctaggcgca

SEQ ID NO: 16023 - DNA, 80 bp, synthetic construct
  source 1..80: mol_type = other DNA
cttctttctacacaaaagcagaaatctgctgtttatgctcactcttcctgaagcacaggggccaaatcttctcttcagag

SEQ ID NO: 16024 - DNA, 80 bp, synthetic construct
  source 1..80: mol_type = other DNA
tacttaactcatgctgcctgatgatgacatcaaaagccatgcccaaagaccaaactgagacttagaagttgtccattgtg

SEQ ID NO: 16025 - DNA, 80 bp, synthetic construct
  source 1..80: mol_type = other DNA
tctttagtggggaataaagcattccgataaaggtgggagcagtcgctcaggatttctgtggggaagtgaaagaactagat

SEQ ID NO: 16026 - DNA, 80 bp, synthetic construct
  source 1..80: mol_type = other DNA
ttacagcccagcacagattagttcttaaatgattcatcagaaaagaacaatgtgagcacgctatgggaatgagagagagg

SEQ ID NO: 16027 - DNA, 80 bp, synthetic construct
  source 1..80: mol_type = other DNA
taaatgagaaaatgtgatcaaactataaggggtttgaaaagtgtaaagggccccaaattgatatacaggtttgatgcaat

SEQ ID NO: 16028 - DNA, 80 bp, synthetic construct
  source 1..80: mol_type = other DNA
acagcaatcagaatagctaaaataaaaaataaagacaacaccaaaagctggtaaggatgcagagaaactgggtcattcat

SEQ ID NO: 16029 - DNA, 80 bp, synthetic construct
  source 1..80: mol_type = other DNA
gtctgtctctcatacttgctccccatgtgatgccttccaccatgggatggccctctatagacattggtgccatgctctgg

SEQ ID NO: 16030 - DNA, 80 bp, synthetic construct
  source 1..80: mol_type = other DNA
tctctcattcaggtcactaagagatcattttctattctcagagtcacaggacactcaagtcaaaaaccacctgaaagaac

SEQ ID NO: 16031 - DNA, 80 bp, synthetic construct
  source 1..80: mol_type = other DNA
ggcttttccctctggtcttgttaacatcctgtctccacatctcatgatttctactcgatagagaagtcattatcagttca

SEQ ID NO: 16032 - DNA, 80 bp, synthetic construct
  source 1..80: mol_type = other DNA
tttaaaactttgtcaaaataggacacacaataaggggggtgcattttcttacaggacaaaaagaaacggaaaagggacct

SEQ ID NO: 16033 - DNA, 80 bp, synthetic construct
  source 1..80: mol_type = other DNA
ataaaccagaggtctgttagcacatggatttggaacacgatttgttataggggaccaatcctcaaatgaggaaacctggg

SEQ ID NO: 16034 - DNA, 80 bp, synthetic construct
  source 1..80: mol_type = other DNA
cacaacagtaagtttaaatggcatatgatttatatttatcggcagactagcacttggtcactacttttcgtcatgacagg

SEQ ID NO: 16035 - DNA, 80 bp, synthetic construct
  source 1..80: mol_type = other DNA
catcatgactaaatttgactttggtgtctccattaaagaacaccttgtctggcatgcgatttgtcactcaacatttgtgg

SEQ ID NO: 16036 - DNA, 80 bp, synthetic construct
  source 1..80: mol_type = other DNA
cggcccatctcacctctataattttacatattctccctttcactaaaattacaggaacgcaaactctgacatgagtcaga

SEQ ID NO: 16037 - DNA, 80 bp, synthetic construct
  source 1..80: mol_type = other DNA
cctctgaactcactacttcaacatcatgcaggtttgggaaccaacataaggtctttgctatgtcctttaccccttttgtt

SEQ ID NO: 16038 - DNA, 80 bp, synthetic construct
  source 1..80: mol_type = other DNA
acgcacaaaccttccaaacttttattataaaagttctctcaatttgaaatgacaatccaggccaaagtcaaccacctcaa

SEQ ID NO: 16039 - DNA, 80 bp, synthetic construct
  source 1..80: mol_type = other DNA
gttaccttaagagatgagaacccggggaagcagagagagagttctcttgctttcttatctaatattcatccacaactgtt

SEQ ID NO: 16040 - DNA, 80 bp, synthetic construct
  source 1..80: mol_type = other DNA
catccagtagtattcatggtgacataagtaacacaaatcacagaatgtccatcaatagaccaaggataaagcacagcata

SEQ ID NO: 16041 - DNA, 80 bp, synthetic construct
  source 1..80: mol_type = other DNA
ttagccaaagcccacttctgcaatttggcctcttacagcaagatagcctttctgtttcctatgcaaagtgcaaactcctt

SEQ ID NO: 16042 - DNA, 80 bp, synthetic construct
  source 1..80: mol_type = other DNA
ctctcattaccacctgaactccacctcctgtcagatcagggacagcattagattctcatagaagcacaaacctgattgtg

SEQ ID NO: 16043 - DNA, 80 bp, synthetic construct
  source 1..80: mol_type = other DNA
actgccaggtccacaaccggatacatcaggactattcaccttgcccacaagcacaaagctgttcaacaattttttttttt

SEQ ID NO: 16044 - DNA, 80 bp, synthetic construct
  source 1..80: mol_type = other DNA
gctaggcactgtgttagataagaaataaaactgaccaagaagagcacacctaatgcctagatcttggttgctaatactat

SEQ ID NO: 16045 - DNA, 80 bp, synthetic construct
  source 1..80: mol_type = other DNA
acagctaagtcaagtctaagaaaacatgactactaaatgcagtgtggtatcctagatgggattctgaacataaaaaggac

SEQ ID NO: 16046 - DNA, 80 bp, synthetic construct
  source 1..80: mol_type = other DNA
tcccctacagcccaaagatggaccttcactctctataatgttaaacatctcattattaggttcagatatctaccaggtag

SEQ ID NO: 16047 - DNA, 80 bp, synthetic construct
  source 1..80: mol_type = other DNA
aagcaactaagtgaaggttttcagctcacaagttggcatgcattttattatggcagattgctgcaactgatcaaggccat

SEQ ID NO: 16048 - DNA, 80 bp, synthetic construct
  source 1..80: mol_type = other DNA
ggattaagcagcactaagaacactaagtctgcttgtctgcttagaaaattacaccaccagaatggactcctcaaagttct

SEQ ID NO: 16049 - DNA, 80 bp, synthetic construct
  source 1..80: mol_type = other DNA
taaaatgttgtttctatgggaaaacacattccacggcaggcaaccagaggaaaacttggccactcaaacccaccatgtct

SEQ ID NO: 16050 - DNA, 80 bp, synthetic construct
  source 1..80: mol_type = other DNA
tttaccactaagacaacataagttaatgagaagtctatcagagtagtgagtatttaatttatttaaaaaggtggatatgt

SEQ ID NO: 16051 - DNA, 80 bp, synthetic construct
  source 1..80: mol_type = other DNA
ctcttcccccaaaccctatcaagaaaatgtattggtgtgctcattctcagatgaggaaactgaaaatgtgagaagtgaag

SEQ ID NO: 16052 - DNA, 80 bp, synthetic construct
  source 1..80: mol_type = other DNA
gtcatttcacccaggagttttctatcaagtaagaatacatgaggccttagagaatgacggacatgtttcactgacatgaa

SEQ ID NO: 16053 - DNA, 80 bp, synthetic construct
  source 1..80: mol_type = other DNA
tttttctacaacaaagtcgcagataagaaaaatcagacccagcatattgcaaacattactggctgtgaagcattgagcct

SEQ ID NO: 16054 - DNA, 80 bp, synthetic construct
  source 1..80: mol_type = other DNA
ccacatctgtgttaaataaaattctttttaaaaaacacaaatttgcagcagcacctggcctagtccatcctgatatccac

SEQ ID NO: 16055 - DNA, 80 bp, synthetic construct
  source 1..80: mol_type = other DNA
agaatgtgtgtcaaacaacctattttcaaggaaggtcccaaatgcaaatgagcagatgagtcagtctgcagtcaaattag

SEQ ID NO: 16056 - DNA, 80 bp, synthetic construct
  source 1..80: mol_type = other DNA
agaacaaataagaatctctttgtagtaaatgagcattatgttgctgcatggcatgaagccaaaggaagggaacgctcaac

SEQ ID NO: 16057 - DNA, 80 bp, synthetic construct
  source 1..80: mol_type = other DNA
gctaaacatgtcaggcatagtactaagaacttgaaatgtaccatcccattaaatcttaggacaacacagaaagatgagta

SEQ ID NO: 16058 - DNA, 80 bp, synthetic construct
  source 1..80: mol_type = other DNA
cataaactcttaatgtatagtttggataactgagccagcaagttacacaacaagaaaccaagcttaatcacagacccaga

SEQ ID NO: 16059 - DNA, 80 bp, synthetic construct
  source 1..80: mol_type = other DNA
accttgagcacttgttcctggaccttctctgggcctcagtttcagtatttatacatttctaaaatctgtcctactataac

SEQ ID NO: 16060 - DNA, 80 bp, synthetic construct
  source 1..80: mol_type = other DNA
aatgtgtctttagggcagacataaatcctgtctcccaacaccaacatcataaaatggttgtactatatttggacttagat

SEQ ID NO: 16061 - DNA, 80 bp, synthetic construct
  source 1..80: mol_type = other DNA
caaaacatactgcttcattaggaactttcattttattcctgacagttgtgagttctttaaatgcagaactgtggacaaac

SEQ ID NO: 16062 - DNA, 80 bp, synthetic construct
  source 1..80: mol_type = other DNA
ggcgcagagacaagattccccactgtgtcctgtctaaattcctgagccacagaatcatgagaaagaataaaattgttgtt

SEQ ID NO: 16063 - DNA, 80 bp, synthetic construct
  source 1..80: mol_type = other DNA
ataaaacaagcaagatctctgccttcaaggagttctcactcctagtagacagtcactttttatcacgtagatcagaggtt

SEQ ID NO: 16064 - DNA, 80 bp, synthetic construct
  source 1..80: mol_type = other DNA
acgctgtccaaagtcccactggctctaacatcctatgattctttctgttttattaatgtctttgcagaaagtttcttgtt

SEQ ID NO: 16065 - DNA, 80 bp, synthetic construct
  source 1..80: mol_type = other DNA
gtaaaatcttattttcacattgaaaataaagctaaaactcccaaagtggttaggctgattggcttactggaagaaaaagc

SEQ ID NO: 16066 - DNA, 80 bp, synthetic construct
  source 1..80: mol_type = other DNA
gagtttgccatcacataatctaccatgggtatgaactgttccatgtgtatttttctggcaacaagacctctggaaaaaaa

SEQ ID NO: 16067 - DNA, 80 bp, synthetic construct
  source 1..80: mol_type = other DNA
agaaggaaccagtgcacagcagatactgatgagtttaaggtaccttttaactagaggaaagattagtgaggtgctgaaag

SEQ ID NO: 16068 - DNA, 80 bp, synthetic construct
  source 1..80: mol_type = other DNA
atgtacaatacattccatgtattaaaaaggatacacacacacatgtgtatgtatacatatatatttgtgtttatttgtac

SEQ ID NO: 16069 - DNA, 80 bp, synthetic construct
  source 1..80: mol_type = other DNA
tacaaaatctccctatatatactgtctgaatttatttaacaggctcctccaagaagataaaaggggtcactgacagtcca

SEQ ID NO: 16070 - DNA, 80 bp, synthetic construct
  source 1..80: mol_type = other DNA
ctcccaaaatctgcctcaacaatggcccaagattccatttaaccacgtcctctcctttggggcagaaatctctgggagta

SEQ ID NO: 16071 - DNA, 80 bp, synthetic construct
  source 1..80: mol_type = other DNA
gcccttcccgagcaccgctccggccctggagggagagagagccagagagcggccgagcgcctaggaggcccgccgagcct

SEQ ID NO: 16072 - DNA, 80 bp, synthetic construct
  source 1..80: mol_type = other DNA
ggccccggccctcccacccatcgacaagggccatgggcactgcctgcacacccctctggggacagcgagcactccctggg

SEQ ID NO: 16073 - DNA, 80 bp, synthetic construct
  source 1..80: mol_type = other DNA
cttgatgtctgtcagccccactctcccttggggccatctctaggcctcctgatatagcagctgaggtcagcccagggccc

SEQ ID NO: 16074 - DNA, 80 bp, synthetic construct
  source 1..80: mol_type = other DNA
gtctggagtagcagctgggatccaagcccacctgaagaaggggcactgagcccaggttaaaggagctgtgcccttcatat

SEQ ID NO: 16075 - DNA, 80 bp, synthetic construct
  source 1..80: mol_type = other DNA
ttggagcctgtgtgtttgagagaaagcaccgggaggcagggagtgagtgtgtcatggaatctgaaagctgccaaaccatt

SEQ ID NO: 16076 - DNA, 80 bp, synthetic construct
  source 1..80: mol_type = other DNA
acttcattctctagcatgtgcagtttgctgtatgtcaatcatagctcagtagaactgttaacaaaacaaaaaggctctgc

SEQ ID NO: 16077 - DNA, 80 bp, synthetic construct
  source 1..80: mol_type = other DNA
ctagagcccagggcctggactccctgccccatgaattttttactgtgccacgaggcactattcctgccgagctgagagag

SEQ ID NO: 16078 - DNA, 80 bp, synthetic construct
  source 1..80: mol_type = other DNA
gtcattctctcctcacaggccctttaatgcctcagtttccccaagtgagcagttagaaggaatagggagtctcataccct

SEQ ID NO: 16079 - DNA, 80 bp, synthetic construct
  source 1..80: mol_type = other DNA
aacctggtgcccctgttcgatccaagcagctgaaccccaagaaagccatcgcctatgggcctggtatgtgtgagcccctg

SEQ ID NO: 16080 - DNA, 80 bp, synthetic construct
  source 1..80: mol_type = other DNA
ggtgacagcacgttccgctgcacatacagacctgccatggaggggccacataccgtgcatgtggcctttgcgggtgcccc

SEQ ID NO: 16081 - DNA, 80 bp, synthetic construct
  source 1..80: mol_type = other DNA
cttcgagttctatgaagtagcccttgttctgtggcattgctggatgttttgtggcatgacttagatcctaaggttgcttt

SEQ ID NO: 16082 - DNA, 80 bp, synthetic construct
  source 1..80: mol_type = other DNA
tcttggtctacaagccaggaatgattctctccaccctaagtgctatacggggtgttatgcacagggatgacaagtgttcc

SEQ ID NO: 16083 - DNA, 80 bp, synthetic construct
  source 1..80: mol_type = other DNA
cggctgcatcgtggacaagcccgctgagttcaccattgatgctcgtgcagctggcaagggagacctgaagctctatgccc

SEQ ID NO: 16084 - DNA, 80 bp, synthetic construct
  source 1..80: mol_type = other DNA
gggtaaaggtgtacggccccggagtggagaagacaggcctcaaggccaatgagcccacctacttcacggtggactgcagc

SEQ ID NO: 16085 - DNA, 80 bp, synthetic construct
  source 1..80: mol_type = other DNA
cagggacagccaagggcgaggttgtgcgggactttgagatcatagacaaccatgactactcctacactgtcaagtacacc

SEQ ID NO: 16086 - DNA, 80 bp, synthetic construct
  source 1..80: mol_type = other DNA
ctgccccctgatccctccaaggtgaggagataggagctggttggggctgggagttggggacttgttgggaagatagatga

SEQ ID NO: 16087 - DNA, 80 bp, synthetic construct
  source 1..80: mol_type = other DNA
gagattggcctctgctcttgtggcaaaactgcacctgcctctgggcgtttttctggagagatctcttctttcatgtgctt

SEQ ID NO: 16088 - DNA, 80 bp, synthetic construct
  source 1..80: mol_type = other DNA
cgggggccaagacagacacctatgtgacagacaatggggacggcacctaccgagtgcagtacaccgcctacgaggagggt

SEQ ID NO: 16089 - DNA, 80 bp, synthetic construct
  source 1..80: mol_type = other DNA
gacccagctgcccgggcaggtcatgtcttcaaatattgtatgacttgggactgctgaaattggaaattttttcccttatc

SEQ ID NO: 16090 - DNA, 80 bp, synthetic construct
  source 1..80: mol_type = other DNA
tgcgggacaatggagatggcacccacactgtccactacaccccagccactgacgggccctacacggtagccgtcaagtat

SEQ ID NO: 16091 - DNA, 80 bp, synthetic construct
  source 1..80: mol_type = other DNA
cttctctctttccagtgtccattggaggccatggcctgggtgagtgccctttctctcctcttcttggtgtgggccagggt

SEQ ID NO: 16092 - DNA, 80 bp, synthetic construct
  source 1..80: mol_type = other DNA
gaggctgccctgcaggaggatgaacacccaaattatcacccagcatttcaggttcctgggccattctctgagtcagcccc

SEQ ID NO: 16093 - DNA, 80 bp, synthetic construct
  source 1..80: mol_type = other DNA
tgccttccctctttcaacaaatatttattgagcacccgctgtgtgcagacaccaggcgaggccccagggaggcttatacc

SEQ ID NO: 16094 - DNA, 80 bp, synthetic construct
  source 1..80: mol_type = other DNA
ttagggcagaggcccttcaaggtgtgaggggtcatattttgataaatgtaaaaacactctgttctccacggcagctaaga

SEQ ID NO: 16095 - DNA, 80 bp, synthetic construct
  source 1..80: mol_type = other DNA
tgagccctgtgagggcagggcctgcctggagtcatagcagcctgatgccccaactcccccaccaggtgatgactccatga

SEQ ID NO: 16096 - DNA, 80 bp, synthetic construct
  source 1..80: mol_type = other DNA
atgtgttccttgctttcccccaggttatgggggcttggggctgagtattgaaggcccaagcaaggtggacatcaactgtg

SEQ ID NO: 16097 - DNA, 80 bp, synthetic construct
  source 1..80: mol_type = other DNA
cctgcaggtgaggccagctctcaggacatgactgcacaggtgaccagcccatcgggcaaggtggaagccgcagagatcgt

SEQ ID NO: 16098 - DNA, 80 bp, synthetic construct
  source 1..80: mol_type = other DNA
tgccatttcttgttacagtttgttccaccttctgttgtaagaatgctagatgacaacatttataagaatgagagcataaa

SEQ ID NO: 16099 - DNA, 80 bp, synthetic construct
  source 1..80: mol_type = other DNA
ggggcccttccttcctcagccaggacagggcacatcgtctgtcatctcccacacaccaagcacagctaggatagcaggtg

SEQ ID NO: 16100 - DNA, 80 bp, synthetic construct
  source 1..80: mol_type = other DNA
agtttaccagggctagaggtgggcctggctctacacagtacacgttctgtggagtcgggcatgatcacgtaaaaatgcca

SEQ ID NO: 16101 - DNA, 80 bp, synthetic construct
  source 1..80: mol_type = other DNA
gcagcaaagcaggcaggtggcggggggagggcgtctcccggggtgtgagcaagaagccgtcagggagcagggtgtgggtc

SEQ ID NO: 16102 - DNA, 80 bp, synthetic construct
  source 1..80: mol_type = other DNA
ttttacacactgcgaggcccagctttctaggggacttttgcacatgtcatgcagctcagctgggagctgcttaggtggaa

SEQ ID NO: 16103 - DNA, 80 bp, synthetic construct
  source 1..80: mol_type = other DNA
acccgcctctgcgcgcccccgggcacgaccccggagtctccgcgggcggccagggcgcgcgtgcgcggaggtgagccggg

SEQ ID NO: 16104 - DNA, 80 bp, synthetic construct
  source 1..80: mol_type = other DNA
tgaaatctgaatgtctcaatcacaaagacccccttaggccaggccaggggtgactgtctctggtctttgtccctggttgc

SEQ ID NO: 16105 - DNA, 80 bp, synthetic construct
  source 1..80: mol_type = other DNA
agagacgcagacccctctgatggctgactttggtttgaggacctctctgcatccctcccccatggccttgctcctaggac

SEQ ID NO: 16106 - DNA, 80 bp, synthetic construct
  source 1..80: mol_type = other DNA
agctgtttggcctgtttcaagtgtctacctgccttgctggtcttcctggggacattctaagcgtgtttgatttgtaacat

SEQ ID NO: 16107 - DNA, 80 bp, synthetic construct
  source 1..80: mol_type = other DNA
accccaggcatgactttgtttttttgtgtaaggatgcaaaatttgggatgtatttatactagaaaagctgcttgttgttt

SEQ ID NO: 16108 - DNA, 80 bp, synthetic construct
  source 1..80: mol_type = other DNA
tgtcatttaactcaggaaaactctcaggaacgacagcacttggatttgccttaatcttaagagaagttgccttcggaaat

SEQ ID NO: 16109 - DNA, 80 bp, synthetic construct
  source 1..80: mol_type = other DNA
gtttatctgcggctttcatttctcggaggtgctgtttgccttgcacttgacccccagcaaacctcaggggtccttctcag

SEQ ID NO: 16110 - DNA, 80 bp, synthetic construct
  source 1..80: mol_type = other DNA
gccttgtgttttctgggaaatgagtcctatgggctgatgcctctcccaactctggccttctgtgctcctaaggagggttc

SEQ ID NO: 16111 - DNA, 80 bp, synthetic construct
  source 1..80: mol_type = other DNA
ttctgagggtctttgtgatatcgagggaatatcaagaagtttgcaggcttggccccagctgtccagggaggtcgggtttg

SEQ ID NO: 16112 - DNA, 80 bp, synthetic construct
  source 1..80: mol_type = other DNA
caggaagacggtgggatttgaggagccatcacgcccagtgggacagctgagaggaatgggccacagtggcccgtgacgat

SEQ ID NO: 16113 - DNA, 80 bp, synthetic construct
  source 1..80: mol_type = other DNA
ttaatcaaatcagagactcccttgtctggcctgggagacttagcaccctcatctctgagaagcagatgggccagcgggga

SEQ ID NO: 16114 - DNA, 80 bp, synthetic construct
  source 1..80: mol_type = other DNA
gaccctccaggcggccaccatctgtgcctccagccaccagtttctctccacacactacaacctgcacaacctctacggcc

SEQ ID NO: 16115 - DNA, 80 bp, synthetic construct
  source 1..80: mol_type = other DNA
ggccgacgtctgcggcttcctgggcaacacctcagaggagctgtgtgtgcgctggacccagctgggggccttctacccct

SEQ ID NO: 16116 - DNA, 80 bp, synthetic construct
  source 1..80: mol_type = other DNA
catcagtgtgttgagggaggattcccagagagtgaggtgattagttaactatttgcagaagtcaatttatttttcttgca

SEQ ID NO: 16117 - DNA, 80 bp, synthetic construct
  source 1..80: mol_type = other DNA
tggaactgatgccaacttgctttcaatagcataaaaaagctttgcttctatgtggtttccattgcctctcgttcctctgt

SEQ ID NO: 16118 - DNA, 80 bp, synthetic construct
  source 1..80: mol_type = other DNA
ctttcctttagttcttcagacacggtttcgctgagctctttgaacacatttaaagtagctgacgtaaactctttgtctag

SEQ ID NO: 16119 - DNA, 80 bp, synthetic construct
  source 1..80: mol_type = other DNA
ttttacaaatagaaatagggcctaaagaagtcacctcaaaaggcatgaacgctccatgaatgtatccatgcagggatcat

SEQ ID NO: 16120 - DNA, 80 bp, synthetic construct
  source 1..80: mol_type = other DNA
catcagcctctccgctcctcacaccatccccatttcccagatgagcagactgaggcctgcttgcagaacctggccaagtc

SEQ ID NO: 16121 - DNA, 80 bp, synthetic construct
  source 1..80: mol_type = other DNA
tgaggggacctgggcttgggggtcccacgatggctacctgccactaggacactctagcaggtggcctggggtcctagagt

SEQ ID NO: 16122 - DNA, 80 bp, synthetic construct
  source 1..80: mol_type = other DNA
gcggagtgtgttagtctctccagagggaggctggttccccagggaagcagagcctgtgtgcgggcagcagctgtgtgcgg

SEQ ID NO: 16123 - DNA, 80 bp, synthetic construct
  source 1..80: mol_type = other DNA
ttgatagcacgacagcgtgactaaagtcaataacttagttacatattttaaaataacttagagtgtaattggattgtttg

SEQ ID NO: 16124 - DNA, 80 bp, synthetic construct
  source 1..80: mol_type = other DNA
cagtgttggtttgttaatgagtcatactaatgtaagatgagaaactggtaaggtttataagaactctgtagcatgtttgc

SEQ ID NO: 16125 - DNA, 80 bp, synthetic construct
  source 1..80: mol_type = other DNA
gatgtttgatctgaatggggtttggattcaaacttgatgacaactgggtgacatgccatctttgctattaccacattttc

SEQ ID NO: 16126 - DNA, 80 bp, synthetic construct
  source 1..80: mol_type = other DNA
aggaacagataatgttcttaatggggcagtagttcatggcaaaatacaaaacaacttttttctgttctgttacagggcca

SEQ ID NO: 16127 - DNA, 80 bp, synthetic construct
  source 1..80: mol_type = other DNA
accaggtctggccaaactccccggtggaagaatcttaagagacaaaatatccattctttaaaatgcctcttaacagttcc

SEQ ID NO: 16128 - DNA, 80 bp, synthetic construct
  source 1..80: mol_type = other DNA
aggcatgagccacctagccttgagcttttaaagtgaatggagaaaaaggtggacaggaagtagtagttggcaataaaata

SEQ ID NO: 16129 - DNA, 80 bp, synthetic construct
  source 1..80: mol_type = other DNA
tatataaagccatcttaaaatatatactcttatttacctgtctaagctggtacccttgcttgcccaaggggtcctgattg

SEQ ID NO: 16130 - DNA, 80 bp, synthetic construct
  source 1..80: mol_type = other DNA
aagtattaagaaaacttaaatcccaggcatatagtttgttaatggaataaaaagtttgtagaggctgggcacggtggctc

SEQ ID NO: 16131 - DNA, 80 bp, synthetic construct
  source 1..80: mol_type = other DNA
atgtagtgaagatggaaggaagtgggctgattcaggagatattttagagatactggtggaaggactgttgatagacagga

SEQ ID NO: 16132 - DNA, 80 bp, synthetic construct
  source 1..80: mol_type = other DNA
atattgaggaaaggcaggaatgaagatgcttctttctctgtgaccgattgacaacctggactcccctaaatgatgttata

SEQ ID NO: 16133 - DNA, 80 bp, synthetic construct
  source 1..80: mol_type = other DNA
cctatgtctgtcctagcaagacctcttagcaagaatcctgctaagtcaatactgccaccattgatatctgatcaatttcc

SEQ ID NO: 16134 - DNA, 80 bp, synthetic construct
  source 1..80: mol_type = other DNA
ttgcaatagcttcctaaaggttatatggaaatacatgcacacatatgtcaagaaccaagttcctttttcctcctagagag

SEQ ID NO: 16135 - DNA, 80 bp, synthetic construct
  source 1..80: mol_type = other DNA
tgaacaagaacattatctataaactcacataattagctagctggcgaatcccatgaggaaagcgctgagggtctgcctga

SEQ ID NO: 16136 - DNA, 80 bp, synthetic construct
  source 1..80: mol_type = other DNA
gccacctgcccagcttccaaaagggctttttaaggaacttggcacaacattacaaaaagttcacctaaaagattacatac

SEQ ID NO: 16137 - DNA, 80 bp, synthetic construct
  source 1..80: mol_type = other DNA
tacataaatatcaaaaccaacacataggaagaaccactgtatttgcaaggtatgatagactaaaaaagaaaaaagaggcc

SEQ ID NO: 16138 - DNA, 80 bp, synthetic construct
  source 1..80: mol_type = other DNA
ttataatcagatgcaaataccaataaaaaaaaatccgtgatgggcaaaattgccacacatactgtaccacagggtcacat

SEQ ID NO: 16139 - DNA, 80 bp, synthetic construct
  source 1..80: mol_type = other DNA
caaacacatggaaaagcaaagggaagggagtacccaatatctgatacctgatgcaggaatctggctcttcctggcagtca

SEQ ID NO: 16140 - DNA, 80 bp, synthetic construct
  source 1..80: mol_type = other DNA
gtaagcaatgcactcacttctaagttacattcatatctgatcttatttgattttcactaggcatagggaggtaggagcta

SEQ ID NO: 16141 - DNA, 80 bp, synthetic construct
  source 1..80: mol_type = other DNA
tgaattctagccaaggagtaacagtgatctgtcacaggcttttaaaagattgctctggctgctatgtggaaagcagaatg

SEQ ID NO: 16142 - DNA, 80 bp, synthetic construct
  source 1..80: mol_type = other DNA
tctgcatttggacatgttaagtttgagattccagtcaggcttccaagtggtgaggccacataggcagttcagtgtaagaa

SEQ ID NO: 16143 - DNA, 80 bp, synthetic construct
  source 1..80: mol_type = other DNA
atgtggctgcagctgagtcagagtctgaaagggtgggatcacatgttcactgttgacttctggactattatggaaaatca

SEQ ID NO: 16144 - DNA, 80 bp, synthetic construct
  source 1..80: mol_type = other DNA
attcagagatctcagctatcatatgaataccaggacaaaatatcaagtgaggccacttatcagagtagaagaatccttta

SEQ ID NO: 16145 - DNA, 80 bp, synthetic construct
  source 1..80: mol_type = other DNA
gtcatcagtggaattgctgtttttgtcgtcatcttgttcattggaattttgttcataatattaaggaagaggcagggttc

SEQ ID NO: 16146 - DNA, 80 bp, synthetic construct
  source 1..80: mol_type = other DNA
aatcagaaagaagccagctcatacagagtccaagggtcttttgggatattgggttatgatcactggggtgtcattgaagg

SEQ ID NO: 16147 - DNA, 80 bp, synthetic construct
  source 1..80: mol_type = other DNA
agaaaaagcatcatggctatctgtgggtagtatgatgggtgtttttagcaggtaggaggcaaatatcttgaaaggggttg

SEQ ID NO: 16148 - DNA, 80 bp, synthetic construct
  source 1..80: mol_type = other DNA
gtcctggaatgtgactcccttgctcctctgttgctctctttggcattcatttctttggaccctacgcaaggactgtaatt

SEQ ID NO: 16149 - DNA, 80 bp, synthetic construct
  source 1..80: mol_type = other DNA
tagccgaattaatcgtgtttcttcactctagggacattgtcgtctaagttgtaagacattggttattttaccagcaaacc

SEQ ID NO: 16150 - DNA, 80 bp, synthetic construct
  source 1..80: mol_type = other DNA
ctgaaaatttgagaaaacaaacaagaaactacttaccagctatttgaattgctggaatcacaggccattgctgagctgcc

SEQ ID NO: 16151 - DNA, 80 bp, synthetic construct
  source 1..80: mol_type = other DNA
ggagtttggtttgtgtctgccggccggcaggcaaacgcaacccacgcggtgggggaggcggctagcgtggtggacccggg

SEQ ID NO: 16152 - DNA, 80 bp, synthetic construct
  source 1..80: mol_type = other DNA
caggtgagttcacaactcaaatgcctggagaactgggaggtggtggaaatttttagccactctgatcatttatactctcc

SEQ ID NO: 16153 - DNA, 80 bp, synthetic construct
  source 1..80: mol_type = other DNA
cactacttcctgggcgctgtgctgaggtttcacaggaataatttcccttcatggtgaggagtcctgggcagaagctattg

SEQ ID NO: 16154 - DNA, 80 bp, synthetic construct
  source 1..80: mol_type = other DNA
accagctccttgttcctgcagagtttataactaactacctgggttacttattgttcaggtaacaaaagggatcggaaaac

SEQ ID NO: 16155 - DNA, 80 bp, synthetic construct
  source 1..80: mol_type = other DNA
aactgggacccagagttccttcctgggtgtcctcccgggtcctttctgtccctgatcagctcaaaccccagcgtgtttct

SEQ ID NO: 16156 - DNA, 80 bp, synthetic construct
  source 1..80: mol_type = other DNA
accatcaactcacttccatacagtgctttggagttcacaaagggcttacaaaatgcgctaagctcattttttcctcctcc

SEQ ID NO: 16157 - DNA, 80 bp, synthetic construct
  source 1..80: mol_type = other DNA
tgtgtgtttgtgtaagagacacacagagagacagaagagagagagtgatagcaagggagtggggggtagggagagagaga

SEQ ID NO: 16158 - DNA, 80 bp, synthetic construct
  source 1..80: mol_type = other DNA
ctagggttataagatgtaagtggccagtcctcagcacggtgcctggctcacagtaaatcctcaagaaacatgagttctca

SEQ ID NO: 16159 - DNA, 80 bp, synthetic construct
  source 1..80: mol_type = other DNA
aaccaattgagcccaggagtttgaggctacagtgagctatgatcacgccactgtgctccagcctgggagacagagcaagt

SEQ ID NO: 16160 - DNA, 80 bp, synthetic construct
  source 1..80: mol_type = other DNA
acgcagacccaagttcaaatcccagtctgcctgtttcagtgctgctgtattgagctgtatttatctgtaactttttgttt

SEQ ID NO: 16161 - DNA, 80 bp, synthetic construct
  source 1..80: mol_type = other DNA
tcattttattccttgtccaaggtcacaggacaagcagagtcccacccacctgaaaggattcagttctaagacagccttta

SEQ ID NO: 16162 - DNA, 80 bp, synthetic construct
  source 1..80: mol_type = other DNA
catgaccatgtgtctgtgtccctgtgtcctggcataaatgaccatacctcaccgtccctgagtctatgtgtaggcccctg

SEQ ID NO: 16163 - DNA, 80 bp, synthetic construct
  source 1..80: mol_type = other DNA
aatatgacctttagaatatgacctttagactaggtcttaaagtgggagttgaattttgacccatggagacgcagggaagg

SEQ ID NO: 16164 - DNA, 80 bp, synthetic construct
  source 1..80: mol_type = other DNA
caacctggacaacatggcaaggttcctcctctaaaaaagaaagaaaggaaagatgataggaaagggaggaaagataggaa

SEQ ID NO: 16165 - DNA, 80 bp, synthetic construct
  source 1..80: mol_type = other DNA
tagacaactctagtccttactctatagctacccctcatcccaattattggggtgttcacactctactgtgctgtaataca

SEQ ID NO: 16166 - DNA, 80 bp, synthetic construct
  source 1..80: mol_type = other DNA
ctaccagcttagcaaccttggaaggaaaagagctcttcttttcagctactttcagttgaatgactctttttatacttgat

SEQ ID NO: 16167 - DNA, 80 bp, synthetic construct
  source 1..80: mol_type = other DNA
ttgattagtgatgtttgccttgaacacaggttaagaaagtgatggcatgtgtgctgtgtgtttgtcatcagtagattaga

SEQ ID NO: 16168 - DNA, 80 bp, synthetic construct
  source 1..80: mol_type = other DNA
gtttggttccattccattcatgccactccttatcactctacttcactctgttcattcatccattccactctatctcattc

SEQ ID NO: 16169 - DNA, 80 bp, synthetic construct
  source 1..80: mol_type = other DNA
cctctccactacataccattttattctatctgtcccatccactcaactccattcactccacatgactccacatttcatcc

SEQ ID NO: 16170 - DNA, 80 bp, synthetic construct
  source 1..80: mol_type = other DNA
atagcactaggcagtgggaggaatggagctaataaatgcagtcccagccttcaaggaactgggagcagctgacccagggc

SEQ ID NO: 16171 - DNA, 80 bp, synthetic construct
  source 1..80: mol_type = other DNA
acctcagaaggtgaagggtctatgggcaaattacagcagggtaagggggactgatgttttctaagtttttgttttatgaa

SEQ ID NO: 16172 - DNA, 80 bp, synthetic construct
  source 1..80: mol_type = other DNA
tgtgcatgcatttgtgtgcatgcctgtgtttctctgaaactcttagggccatatgaatttctaaaatctattcagatttt

SEQ ID NO: 16173 - DNA, 80 bp, synthetic construct
  source 1..80: mol_type = other DNA
agtttagtacagtagcacctgtgcttagtacatagcacctgtgtttagtatagtagcacctgtgcttagtacatagcgcc

SEQ ID NO: 16174 - DNA, 80 bp, synthetic construct
  source 1..80: mol_type = other DNA
tagaaatccagatttctggcatcttttggaaaattggaaaaattcatattcccatataacagtgcaccaggcctcactgc

SEQ ID NO: 16175 - DNA, 80 bp, synthetic construct
  source 1..80: mol_type = other DNA
gcattcacagcagcgcctagattagtgtttgactcagcctagccaagccaacacgtacaactacctacctcggcatctca

SEQ ID NO: 16176 - DNA, 80 bp, synthetic construct
  source 1..80: mol_type = other DNA
agtgacccacatgccatttgtactgaccccatcacctactcacacaggcatttcctgggtggctactctgtgccagagcc

SEQ ID NO: 16177 - DNA, 80 bp, synthetic construct
  source 1..80: mol_type = other DNA
tctcctcaggataattatttattattcatagtcatcagcatcttcattaattattcatatgatccttaattattatcctt

SEQ ID NO: 16178 - DNA, 80 bp, synthetic construct
  source 1..80: mol_type = other DNA
acaagcagtctctgtgttgggacagaagctgggacagaaaaagagacaagattccttcccgcaatccagaaagaactcgg

SEQ ID NO: 16179 - DNA, 80 bp, synthetic construct
  source 1..80: mol_type = other DNA
gccgggtctccagcctggggcaggaagtgggggatgctcagagaagtggggacaccagtgacagcctccaccgggagtgg

SEQ ID NO: 16180 - DNA, 80 bp, synthetic construct
  source 1..80: mol_type = other DNA
agtcgcttcttctgctatcttgcacccactgtcaagccgaccaagaactcccaggaccccctgactgcccaagcactggc

SEQ ID NO: 16181 - DNA, 80 bp, synthetic construct
  source 1..80: mol_type = other DNA
aggctggaccagaagtggtcggagaactcagggtacatgtccagcacctccagcaggtcgtcccgatggatcttgtgtag

SEQ ID NO: 16182 - DNA, 80 bp, synthetic construct
  source 1..80: mol_type = other DNA
agcttccaggctagcatttcttcctctactgcccaggctagaggatctagatttgatcctactttaaggaagcaaaaagt

SEQ ID NO: 16183 - DNA, 80 bp, synthetic construct
  source 1..80: mol_type = other DNA
cttatttgtaaggcatagagaccattcccgccctgggctgtcacaaggatttaaccccatcgcctatgtgacatatacct

SEQ ID NO: 16184 - DNA, 80 bp, synthetic construct
  source 1..80: mol_type = other DNA
tgtagggtttgcctatctggtcgcccaggttgtgcagccagccgatgcgtgagtccatgtgtggctgctccatgttgccg

SEQ ID NO: 16185 - DNA, 80 bp, synthetic construct
  source 1..80: mol_type = other DNA
cgcggtgcctgcagcttgtactcaggcagcacgtcggcgcccagggacaggacctgcacccggggaaggcggaggtgtgg

SEQ ID NO: 16186 - DNA, 80 bp, synthetic construct
  source 1..80: mol_type = other DNA
ccaacttatacagagggacgtgcacacagggactgctcagcagtgacacacacagcccctgtaccagctcacactcacac

SEQ ID NO: 16187 - DNA, 80 bp, synthetic construct
  source 1..80: mol_type = other DNA
agacttagccctgagccacctcccactcctcctccactgtcggcccaagcctgccccaggctgacagaagagcggctgga

SEQ ID NO: 16188 - DNA, 80 bp, synthetic construct
  source 1..80: mol_type = other DNA
gcctttctgggccctgggccgcagagcccctgtcctgctcgccttcccggctggggccgccatggaggacttggctccct

SEQ ID NO: 16189 - DNA, 80 bp, synthetic construct
  source 1..80: mol_type = other DNA
ggggtcttctctggcccaggattcagggacctgacccttccatatctttgtacccaccacctccctatgagaagaaaact

SEQ ID NO: 16190 - DNA, 80 bp, synthetic construct
  source 1..80: mol_type = other DNA
ggagtccatggggtcagctcaagagaccaggggagtcacaagaaacaagagaggtcagacccctgtcccactctaaggaa

SEQ ID NO: 16191 - DNA, 80 bp, synthetic construct
  source 1..80: mol_type = other DNA
tattttgacctcgagtctcaaaaatcattctagaatccagtcatcataaaccgccatatctgaagtgacacttcagggcg

SEQ ID NO: 16192 - DNA, 80 bp, synthetic construct
  source 1..80: mol_type = other DNA
cggtggttggtgtcatgagccggggaccccaccatgtccttctccatcaccacctcgaaattgaggatgaacatgatgac

SEQ ID NO: 16193 - DNA, 80 bp, synthetic construct
  source 1..80: mol_type = other DNA
aatgtatataattcttttctcatgagttataaagattaaccaagtcagcacatgctgagcgcttaggcaatgcctggcgt

SEQ ID NO: 16194 - DNA, 80 bp, synthetic construct
  source 1..80: mol_type = other DNA
aggcaagggtgacaaaccatgcagtcccactccatcttagcaacccagcctcactttttttttttttttttttctgagac

SEQ ID NO: 16195 - DNA, 80 bp, synthetic construct
  source 1..80: mol_type = other DNA
agcggcctgaacagggatgcgcctcaccaggactgaggagaggctggagaccaggaagccttagcccaagagaccccagc

SEQ ID NO: 16196 - DNA, 80 bp, synthetic construct
  source 1..80: mol_type = other DNA
ccagctcttcagccaggcctcccagccagactccatcccaccactggctgggttatggggggatgggagtcccttcactt

SEQ ID NO: 16197 - DNA, 80 bp, synthetic construct
  source 1..80: mol_type = other DNA
ggcaggtacagcgccatcctgctaccacagaaggtgtccatcacttctcagaacacaacgccggcttgctttcatttggt

SEQ ID NO: 16198 - DNA, 80 bp, synthetic construct
  source 1..80: mol_type = other DNA
agacagggagagagtgtgtgtgtgcgcgcgtgtgtgtgtgtgtgctgaatgagagagagaccagtcctaagctcctgcct

SEQ ID NO: 16199 - DNA, 80 bp, synthetic construct
  source 1..80: mol_type = other DNA
cagatggagcaaccatgggaattaaggtgccttttgatgaagcaaaattcaacctggtcatcagttttcatggaacacag

SEQ ID NO: 16200 - DNA, 80 bp, synthetic construct
  source 1..80: mol_type = other DNA
tccaatcaagaatctagtgggtgttttctttccaagaattcaataaactttctctaaagtttatgaagaaaaagggaggc

SEQ ID NO: 16201 - DNA, 80 bp, synthetic construct
  source 1..80: mol_type = other DNA
ttaacagtatgcattggtatctctagagtacacaagcaactcctgcaaatcaacaaggacaaaagacggcgacgtcaaaa

SEQ ID NO: 16202 - DNA, 80 bp, synthetic construct
  source 1..80: mol_type = other DNA
ttgaacggttgcctatggggagggtaatgagactggagagtgagataaaagggaaaaggaaaaaaatgaaagagaaagga

SEQ ID NO: 16203 - DNA, 80 bp, synthetic construct
  source 1..80: mol_type = other DNA
tgcctggctcccaaggtgtttctcatcctggataagcacccaaaaaggagaggggtttatctgaggccaaccacaggcca

SEQ ID NO: 16204 - DNA, 80 bp, synthetic construct
  source 1..80: mol_type = other DNA
tcaggaatgacccccgtggagcccctccaacaggcctctgatccagctagagaagggaaaggtggagggaaggtgctgca

SEQ ID NO: 16205 - DNA, 80 bp, synthetic construct
  source 1..80: mol_type = other DNA
ataaagaccaagggacagagagtaagccaggcaggcagaagacaaaggcaaggagatgtggggagtgagagaggagccga

SEQ ID NO: 16206 - DNA, 80 bp, synthetic construct
  source 1..80: mol_type = other DNA
acagccccattttttggagttgtaacctggagaggggacaagtttgaacttgggctggggatctgggttctaatcccact

SEQ ID NO: 16207 - DNA, 80 bp, synthetic construct
  source 1..80: mol_type = other DNA
tgactgtgtgaacttcagtttcttcatcccccaaaatgaagacaacagtagtgtctacctccctgggttgtgaagagtgc

SEQ ID NO: 16208 - DNA, 80 bp, synthetic construct
  source 1..80: mol_type = other DNA
tcagcgcacaactgccaatctgacctttaacctccatccacgcacgtacctgccatcccagctcggtctaactctagtcc

SEQ ID NO: 16209 - DNA, 80 bp, synthetic construct
  source 1..80: mol_type = other DNA
aggccagagatggcggccaggattccctttgcatcggctctctggattctgcttttaatttccctgctctccagactggg

SEQ ID NO: 16210 - DNA, 80 bp, synthetic construct
  source 1..80: mol_type = other DNA
aaagttgccttttggaactggttcatcttttggccagttcccaaggccccccagacctcccaggcagccatcaattccag

SEQ ID NO: 16211 - DNA, 80 bp, synthetic construct
  source 1..80: mol_type = other DNA
ccccaccgcccatacagggtctaactcacgggtgacacatgggctcagggttatatacacacggcacacacaagaagaga

SEQ ID NO: 16212 - DNA, 80 bp, synthetic construct
  source 1..80: mol_type = other DNA
ccgcctgccaccgcgccgacagccgctccagcgcccgcggctcgggcagcgcctgcggctcggcccggccgcggaagggt

SEQ ID NO: 16213 - DNA, 80 bp, synthetic construct
  source 1..80: mol_type = other DNA
agatgacacgagcggggctaagcaggtgggctcgggcgggggtgggggtgggggcgggggcgcaggcgggggcgggggcg

SEQ ID NO: 16214 - DNA, 80 bp, synthetic construct
  source 1..80: mol_type = other DNA
ggaagtggggaaacgcagaaacacaaactctgcactctcccttgaagttcagaggcgctgctgtgtctgggggtgcgcat

SEQ ID NO: 16215 - DNA, 80 bp, synthetic construct
  source 1..80: mol_type = other DNA
tgagcgtcctcaggtggaagcatctcctctgcctcgggcaggctcagtagagaactggctggagggcatccagaggcctg

SEQ ID NO: 16216 - DNA, 80 bp, synthetic construct
  source 1..80: mol_type = other DNA
gaagtctctgcttgcacttgtgttttcttcctcatttggattgtttaggtctcggaagtttgctcagcaagagtctacct

SEQ ID NO: 16217 - DNA, 80 bp, synthetic construct
  source 1..80: mol_type = other DNA
cagccttggctttccctgtttcccaagaactttccaggggtgttggcagaaccctcgcgggtgcgtgttaatcaacaatg

SEQ ID NO: 16218 - DNA, 80 bp, synthetic construct
  source 1..80: mol_type = other DNA
tacaaccctggggtactgggggcaggagggtccctttttgcttggcagttgcgaggtactggaacctttgcatataacgt

SEQ ID NO: 16219 - DNA, 80 bp, synthetic construct
  source 1..80: mol_type = other DNA
cccaagggcggtgatgccaggagaacattccaggcccaggaagagctgagagacagcagatgcccaagacgagttgctgg

SEQ ID NO: 16220 - DNA, 80 bp, synthetic construct
  source 1..80: mol_type = other DNA
atgatgggacccaggtgtcttcccacttctcgaccatctcctgggaagttctaatgtttggttcagggtgtggggtccat

SEQ ID NO: 16221 - DNA, 80 bp, synthetic construct
  source 1..80: mol_type = other DNA
ctgctgccttccaaaatcatactctggggcgcactgaaagggtgctctgagtagctctccccggctcctggctgaacttg

SEQ ID NO: 16222 - DNA, 80 bp, synthetic construct
  source 1..80: mol_type = other DNA
aatggaacagctttttaaaaaccgcatgtaactccattgtatatgaagtttcgtaaaagaggcagcatctccaaccagtg

SEQ ID NO: 16223 - DNA, 80 bp, synthetic construct
  source 1..80: mol_type = other DNA
catttgctggtaggcatgcaagagggtagactctgtgaggaagggatttggcaacatctagcaaaactgtcttcactgac

SEQ ID NO: 16224 - DNA, 80 bp, synthetic construct
  source 1..80: mol_type = other DNA
aacatatctcaataagagccatctatgacaaacccatggtaaatgtggtactgaatgggtaaaagcgagacacattcccc

SEQ ID NO: 16225 - DNA, 80 bp, synthetic construct
  source 1..80: mol_type = other DNA
aatggcacagggataactggctccccatatgcagaggaatgaagtcagactcctatctatcaccatatacaaaaattaaa

SEQ ID NO: 16226 - DNA, 80 bp, synthetic construct
  source 1..80: mol_type = other DNA
tttgtttaaaaagtctcaaaacaacagatgctggagaggcagtagagaaaggggaacacttacaccctgttgacgggagt

SEQ ID NO: 16227 - DNA, 80 bp, synthetic construct
  source 1..80: mol_type = other DNA
attccaggtctgtggcagaagatgtgcaagctaagcctggagtattcatcacagcagaaggcagggaagttatcagaggc

SEQ ID NO: 16228 - DNA, 80 bp, synthetic construct
  source 1..80: mol_type = other DNA
gatcgatcgatctcaccaagcctcgtgctctaagtacaagtttactggaaatactcgggccagaggaacgcgctaaatga

SEQ ID NO: 16229 - DNA, 80 bp, synthetic construct
  source 1..80: mol_type = other DNA
gttcctcactgcagggcttggagggagcaggtgaaggcttacctgtcttaggtaatgaggagctgtgcgggtctgagaca

SEQ ID NO: 16230 - DNA, 80 bp, synthetic construct
  source 1..80: mol_type = other DNA
catgtgttttggaggcctctcaggtacagggactgtcagcccagctgtaagtggaccttggaccgcaaatttgcatgggc

SEQ ID NO: 16231 - DNA, 80 bp, synthetic construct
  source 1..80: mol_type = other DNA
aggatggcttctcaggccgcctcgcagcagatttgtagtctggttgctgtcgttcctgaaatagcctctgaagctctgtc

SEQ ID NO: 16232 - DNA, 80 bp, synthetic construct
  source 1..80: mol_type = other DNA
gcctgcaaggtagacaggcctctggacttgagtgtggctgtggacgagggcagcgtcgccatcagaggcgatgtctaggg

SEQ ID NO: 16233 - DNA, 80 bp, synthetic construct
  source 1..80: mol_type = other DNA
ggggaccattgactttactgtgtgcctggagagcctaatccctacctgccagtgggtgacacagaaggcaggaatgcaga

SEQ ID NO: 16234 - DNA, 80 bp, synthetic construct
  source 1..80: mol_type = other DNA
aattaaaatatataagtgaggagaggctggtaagaggattctggagtccctggagtgtcttctggcatcgcatggatgag

SEQ ID NO: 16235 - DNA, 80 bp, synthetic construct
  source 1..80: mol_type = other DNA
accgcaccgagaaaatgcagtccctccagagctcctaaccttccatgggccacaggccccttcccagaagtttttttatt

SEQ ID NO: 16236 - DNA, 80 bp, synthetic construct
  source 1..80: mol_type = other DNA
tgggggcattgcttcttcctgtcctagccgggacctgcccatccacccagggggctcagggacgtttttgagttttcctg

SEQ ID NO: 16237 - DNA, 80 bp, synthetic construct
  source 1..80: mol_type = other DNA
ggggctgtgggagcctgagggagtgccttccaggggaagcccgacagatgggggcactccaggcaggggcaggaggtgac

SEQ ID NO: 16238 - DNA, 80 bp, synthetic construct
  source 1..80: mol_type = other DNA
cctgcccagtggccctgtgggtgcaggccatgtgcctctgcatttcctttaccccatctgtaaaatagggataacagcag

SEQ ID NO: 16239 - DNA, 80 bp, synthetic construct
  source 1..80: mol_type = other DNA
cctccctggcattcctggtgactcactgtgtggggtcatcttttcagctgcttagttgttgtccacatatcttctttggt

SEQ ID NO: 16240 - DNA, 80 bp, synthetic construct
  source 1..80: mol_type = other DNA
ctaagtagctgggaccacaggcgcatgtcaccacgcccggctgattgttaaattttttgtagagctggggtctggctatg

SEQ ID NO: 16241 - DNA, 80 bp, synthetic construct
  source 1..80: mol_type = other DNA
gatgaagtccagtttatcaacttgttcccttatggattgtgttttttggtgctctcagaaatctttccctaaaccaaggg

SEQ ID NO: 16242 - DNA, 80 bp, synthetic construct
  source 1..80: mol_type = other DNA
atgtgtataggtgtgtgtatgcgtgcacctatgtgtgtataggcgtgtatgtgtgcgcgtgtgtaggtgtgtgttcatat

SEQ ID NO: 16243 - DNA, 80 bp, synthetic construct
  source 1..80: mol_type = other DNA
aggctggtcccttcatctcagggtgaagcacctttacccagagaaggagggtcgtggcctgggctactttgtgggctgga

SEQ ID NO: 16244 - DNA, 80 bp, synthetic construct
  source 1..80: mol_type = other DNA
ctgggaaatccaaggggcaaggccgtttcccgtcctggtccgtcgttgagtcccctgccgtgggacagcgctcagcatgg

SEQ ID NO: 16245 - DNA, 80 bp, synthetic construct
  source 1..80: mol_type = other DNA
aaacagcagccgccagatgatgggccctaagtggctgcagatagcaggcaccattaaatgcagaggccatctgaggctgc

SEQ ID NO: 16246 - DNA, 80 bp, synthetic construct
  source 1..80: mol_type = other DNA
gtgcagctgtctctgcctttggctgttgtggctagaggctccttcctgaaagcctgatacttagaatggatttaaaaaca

SEQ ID NO: 16247 - DNA, 80 bp, synthetic construct
  source 1..80: mol_type = other DNA
tactgtgtaatagatctgaacattaaaggggcatatatgcatatctgtacaccgaggcaaatttatagctacaggcattt

SEQ ID NO: 16248 - DNA, 80 bp, synthetic construct
  source 1..80: mol_type = other DNA
gctctttacaaagtcatcaaaaagttttttctggaaaagcctccagcccacggtgacctaggttcttcccaccattgaat

SEQ ID NO: 16249 - DNA, 80 bp, synthetic construct
  source 1..80: mol_type = other DNA
gcctgaatactttgaaaatgccagggccaaaaaacgtagaaggctaaataaagtaccgttcagggtgaaggggaaggaag

SEQ ID NO: 16250 - DNA, 80 bp, synthetic construct
  source 1..80: mol_type = other DNA
ttcctagacacaattagggtacaggccttggataaatacacccatttgaaatgggagtaattggccaaaacgaaggggct

SEQ ID NO: 16251 - DNA, 80 bp, synthetic construct
  source 1..80: mol_type = other DNA
atatcattatcagaattttggtcaagcccttcaacaagtttctaggaagttccagactctcccacattttcttgtcatct

SEQ ID NO: 16252 - DNA, 80 bp, synthetic construct
  source 1..80: mol_type = other DNA
gttagaagagaattaccacatcatgttggatttcactcatagccacgagaacgggtggtggtctcttctgcagtgaactg

SEQ ID NO: 16253 - DNA, 80 bp, synthetic construct
  source 1..80: mol_type = other DNA
aaaactgttttccatgaaaccagtcactggtcccaaaaaggttggggaccacggccatcggctgtttgctttatgaattt

SEQ ID NO: 16254 - DNA, 80 bp, synthetic construct
  source 1..80: mol_type = other DNA
agggcatggcacatgcaaaggtcctgtgttgggaacgtgcttggtgcatgtgaagaactgtgcagggaaggtgctggaga

SEQ ID NO: 16255 - DNA, 80 bp, synthetic construct
  source 1..80: mol_type = other DNA
gtgtcagctgggcttctcagctgtaaattaaccattttccgcttcataattagtaaacaccttgaggaagctacattgag

SEQ ID NO: 16256 - DNA, 80 bp, synthetic construct
  source 1..80: mol_type = other DNA
gtctccaactccagttctgccccagtggggccaattctctctctttgttgtaacacctttcttcaatagtgagaaacctg

SEQ ID NO: 16257 - DNA, 80 bp, synthetic construct
  source 1..80: mol_type = other DNA
tacacgtgtgttttcctgtatcccctctttcttacaaaaagggaagcacactatcaatactcttgtagatctttaattgc

SEQ ID NO: 16258 - DNA, 80 bp, synthetic construct
  source 1..80: mol_type = other DNA
tttgtatatcttctttggagaatatctcctcagctcttttgcccacttcattaaattgagaggtttgtttttgctgttga

SEQ ID NO: 16259 - DNA, 80 bp, synthetic construct
  source 1..80: mol_type = other DNA
tgcctgtgtcacactgtcttgattactgtaagtttatagtaaagttttgaaatcagaaagtgttaggcttccagcttggc

SEQ ID NO: 16260 - DNA, 80 bp, synthetic construct
  source 1..80: mol_type = other DNA
ctcatagaatgagttagaaacctttcccctcctctttaattttttgggaaagattgagaaggatgggagtttattcttta

SEQ ID NO: 16261 - DNA, 80 bp, synthetic construct
  source 1..80: mol_type = other DNA
ggaaagtgcagtgctttgggactgtccatcgagctcagtgattccctgttgccacagaaagcagaaccaggctaaattca

SEQ ID NO: 16262 - DNA, 80 bp, synthetic construct
  source 1..80: mol_type = other DNA
attctgggtatgactttgtcttgtgctactactgagtgccagcttagcctctgtagtataccacaccaggtaggtttcta

SEQ ID NO: 16263 - DNA, 80 bp, synthetic construct
  source 1..80: mol_type = other DNA
ggctacaataaatacctaactctttaatgcctagacaccaatgaacaagaccatctaggaaaacatgacctgaccaaaca

SEQ ID NO: 16264 - DNA, 80 bp, synthetic construct
  source 1..80: mol_type = other DNA
cggagagacaaaagttgaagtgtagagattttttgttttactttaagttctggaatacgtgtgctgaacgtgcaggtttg

SEQ ID NO: 16265 - DNA, 80 bp, synthetic construct
  source 1..80: mol_type = other DNA
atataagttgtaaggaaggggtccagtttctgttttctgcatatgactagccagttttcccagcaccatttattaaatag

SEQ ID NO: 16266 - DNA, 80 bp, synthetic construct
  source 1..80: mol_type = other DNA
ctgctggattcagtttgccagtattttattgaagatttttgcatcggtgctcatcagggatattggcctgaagttttctt

SEQ ID NO: 16267 - DNA, 80 bp, synthetic construct
  source 1..80: mol_type = other DNA
gtactgtgttctgagagactgtttgttatgatttccattctttggcatttgctgaggagtgttttacttccagttatgtg

SEQ ID NO: 16268 - DNA, 80 bp, synthetic construct
  source 1..80: mol_type = other DNA
tctggcctgggcaaaagagtgagactccatctcagaaaaaataaaaaataaaaaataaaattaaaaaaaatggctaggat

SEQ ID NO: 16269 - DNA, 80 bp, synthetic construct
  source 1..80: mol_type = other DNA
tttttcatcattttttctctaatcttgtctgcatgccttatttcgttaagttgatcttcaatctctgatatcctttcttc

SEQ ID NO: 16270 - DNA, 80 bp, synthetic construct
  source 1..80: mol_type = other DNA
gggtttttgtgtggggggtcccttttgttgatgttgattttgttgctttctgtttgctagcttttcttctaagagtcaag

SEQ ID NO: 16271 - DNA, 80 bp, synthetic construct
  source 1..80: mol_type = other DNA
cctggtggtataggcacatgaaggagtctcctgatctgcagattgcaaaacccatgggaaaagcatagtatccaggccgg

SEQ ID NO: 16272 - DNA, 80 bp, synthetic construct
  source 1..80: mol_type = other DNA
aataatgagacattttggaaactatacagacatacacatagtaattaaacaatatgctcctgaatgaccagagggtcaag

SEQ ID NO: 16273 - DNA, 80 bp, synthetic construct
  source 1..80: mol_type = other DNA
tatgcctatgtaacaaaactgcatgttctgcacatgtaccccagaacttataaaaatcctgtgggatacagcaaaagcag

SEQ ID NO: 16274 - DNA, 80 bp, synthetic construct
  source 1..80: mol_type = other DNA
attaccctgttaccaaaaccagacaaagatacatcaaaaaaaaaaaaaaaaaaaaaaaaaaaaaggaaccacgggccaat

SEQ ID NO: 16275 - DNA, 80 bp, synthetic construct
  source 1..80: mol_type = other DNA
cacaataccaatgacattcttcacagaaatagtaaaaacactcctcaaacttatatggaatcactaaagtcccagaatag

SEQ ID NO: 16276 - DNA, 80 bp, synthetic construct
  source 1..80: mol_type = other DNA
cctgaatagacatttctcgaaagaagacaaatggatgaaactggaaaccatcattctcagcaaactatcgcaaggacaga

SEQ ID NO: 16277 - DNA, 80 bp, synthetic construct
  source 1..80: mol_type = other DNA
tggccaacatggtgaaacccccttctctacaaaaaacaggaaaattagctggacttggtggcatacacctgtaatcccag

SEQ ID NO: 16278 - DNA, 80 bp, synthetic construct
  source 1..80: mol_type = other DNA
tgtggtcatgggtcgagtgttctctgcatgttggttagatctaggtggcttattgtgttaagtcctctattctgtaactt

SEQ ID NO: 16279 - DNA, 80 bp, synthetic construct
  source 1..80: mol_type = other DNA
atatcagttcgtggggtccttccatattcttttttacagccaccccatactttatggttggatgtgccatgcttattcaa

SEQ ID NO: 16280 - DNA, 80 bp, synthetic construct
  source 1..80: mol_type = other DNA
cgtttggagtttgctcttgtgcatgatctaaggtaatcttttctcagagagtggcctgagacctcttccttagaagttca

SEQ ID NO: 16281 - DNA, 80 bp, synthetic construct
  source 1..80: mol_type = other DNA
tgagaggttttggaactggccttgacttggtgatgtggggttatgagttttattccacacacgtatgtgggagtctgggt

SEQ ID NO: 16282 - DNA, 80 bp, synthetic construct
  source 1..80: mol_type = other DNA
actaagctttttaggaagaaagccatcaattcccctgctctcatacaggcttgaggagggctaaggaaagtcacagttga

SEQ ID NO: 16283 - DNA, 80 bp, synthetic construct
  source 1..80: mol_type = other DNA
gcctctctctttagatatgtcctggcatctgactttggtttcctggtgtttaaaggctaattgggatcggtcgtggtgcc

SEQ ID NO: 16284 - DNA, 80 bp, synthetic construct
  source 1..80: mol_type = other DNA
tcaaaggaacaaacaaggctaacatgttgggctttctctgcttctgggcaatgtccgtgaaattgaagccgcactggtgt

SEQ ID NO: 16285 - DNA, 80 bp, synthetic construct
  source 1..80: mol_type = other DNA
ggcgggactgaggataccgagacagaaataaaactgctaaatgcatctgttgttgaataattcaatgccccatgccaggc

SEQ ID NO: 16286 - DNA, 80 bp, synthetic construct
  source 1..80: mol_type = other DNA
gggccactgggattggcagaaaagggatgcccccgagatgggcagccaggagaactgtctgtctcctatcccaatatgcc

SEQ ID NO: 16287 - DNA, 80 bp, synthetic construct
  source 1..80: mol_type = other DNA
ccacgcagagactatctctaagtgtcagttctggactcagctggaaaggtttcatgacctcaagggacccatgggacttg

SEQ ID NO: 16288 - DNA, 80 bp, synthetic construct
  source 1..80: mol_type = other DNA
gggtaggaggtttccctatacaggagaccaagctacagcaagaaagacttggccgggcgaggtggctcatgggcgcggtg

SEQ ID NO: 16289 - DNA, 80 bp, synthetic construct
  source 1..80: mol_type = other DNA
agtgacctttctccgtctttctgtccaagcatcccatctgtctagcttccactcatgagtgagaacgtgccgtgtttggt

SEQ ID NO: 16290 - DNA, 80 bp, synthetic construct
  source 1..80: mol_type = other DNA
tgtttttaaaggggatgtggcggccagctctgggggcacacgttcctgtttgaattctcaatctccgggctcaaaattgg

SEQ ID NO: 16291 - DNA, 80 bp, synthetic construct
  source 1..80: mol_type = other DNA
ctggtgggagacatggcattctgtctgcaccgaagggggctcagggctgagaagccctgggacgggttggatttggggcg

SEQ ID NO: 16292 - DNA, 80 bp, synthetic construct
  source 1..80: mol_type = other DNA
accgagcttgagggtttaccctaacattcattcacaccatcagtcattcagcaaacacttcacaaacgtgcatcccacgc

SEQ ID NO: 16293 - DNA, 80 bp, synthetic construct
  source 1..80: mol_type = other DNA
tgggatcacatccacgctccttctgtggtttgtgccctgttgtggctgccaggggaggggcttccaaggccctgccaacc

SEQ ID NO: 16294 - DNA, 80 bp, synthetic construct
  source 1..80: mol_type = other DNA
ggaagctgcaaatgtgacctgacatagaaaacacccctttgcagctgaggctgagggtcccgagaggcgtgattgcatta

SEQ ID NO: 16295 - DNA, 80 bp, synthetic construct
  source 1..80: mol_type = other DNA
ttgctcgatctcattcaccagccacggggaacattttgaaccctctgatgcttgctctatgaatgttgtttgctttaaaa

SEQ ID NO: 16296 - DNA, 80 bp, synthetic construct
  source 1..80: mol_type = other DNA
cgtgaagtaggtggctctctttaaggttcctcaactttattgggaaacatctcagggttacaaaacgccccccatgggct

SEQ ID NO: 16297 - DNA, 80 bp, synthetic construct
  source 1..80: mol_type = other DNA
gtgaggttcccagctccgcccgagacaagaatagataaagcggtaaataagataaaactctttttatctggagtagataa

SEQ ID NO: 16298 - DNA, 80 bp, synthetic construct
  source 1..80: mol_type = other DNA
ccctgtgaagggcagaggagctgcaggtaattctgttcgctcgcctctgccttggaggaagtttacagtttttttttttt

SEQ ID NO: 16299 - DNA, 80 bp, synthetic construct
  source 1..80: mol_type = other DNA
tcctcagtttaccccaattgtgacctcagaagcccttggagcctcagtttccctacttgtagcatgtgtttgatgatagt

SEQ ID NO: 16300 - DNA, 80 bp, synthetic construct
  source 1..80: mol_type = other DNA
caccctacggagggctccccacagggttggcccggaggctccagctgtgtctgttgaacaaattactctgcatccaccgc

SEQ ID NO: 16301 - DNA, 80 bp, synthetic construct
  source 1..80: mol_type = other DNA
aggaaaggattgtcctgtccacaggagcttggggaagggggtggggggccagagccccaccttccccagaaacctccgtg

SEQ ID NO: 16302 - DNA, 80 bp, synthetic construct
  source 1..80: mol_type = other DNA
ttcagagttgtgtagccaccaccaccatccacatccagaacgtttaattaccccaaaagaaaaccccacgcccacagcag

SEQ ID NO: 16303 - DNA, 80 bp, synthetic construct
  source 1..80: mol_type = other DNA
ggcacctggatggtcccttccattggcctgagcggtgtctgtgccatttctgccaggcaggtgctgagagcagggcaggg

SEQ ID NO: 16304 - DNA, 80 bp, synthetic construct
  source 1..80: mol_type = other DNA
agacgtccagaggcagtaggaagggtctgctttggggtttttctattctgtcccactggtctcctggacttttcctttac

SEQ ID NO: 16305 - DNA, 80 bp, synthetic construct
  source 1..80: mol_type = other DNA
actctcatgctttgttcagacttttgcactgccctgtgaagtggggtgtgtgtgtcatcttgtggtgccatcttggttgg

SEQ ID NO: 16306 - DNA, 80 bp, synthetic construct
  source 1..80: mol_type = other DNA
gtgctaacgtgagcccacccaggtgctcctgcccagccagggctgtctgtcagcaccacagcgtccaagttcaggtcctc

SEQ ID NO: 16307 - DNA, 80 bp, synthetic construct
  source 1..80: mol_type = other DNA
gtggtgccacgttcaggcccatcacctgtaacactacccaccccacctcacccagcctgggctcactcactccaggccaa

SEQ ID NO: 16308 - DNA, 80 bp, synthetic construct
  source 1..80: mol_type = other DNA
agggattccgagagcacgatgtttaaatgttgggggaaaaaatggatcaaagcgatgtgttcccagggagcccctgtttt

SEQ ID NO: 16309 - DNA, 80 bp, synthetic construct
  source 1..80: mol_type = other DNA
atcacagcttttgtcaaactccacacaaagagagaggcactcaaaagcacaacacaaacacggctagtccgcgcctttgg

SEQ ID NO: 16310 - DNA, 80 bp, synthetic construct
  source 1..80: mol_type = other DNA
cagaacgcggtcgtcttctccctggcagggttgtttccgcctgcatttgttcagccagcaaatctttattaagcacctac

SEQ ID NO: 16311 - DNA, 80 bp, synthetic construct
  source 1..80: mol_type = other DNA
gtaccccctgaagacctgggaccaggccccctgcctctgggaatccatcaaaatgctcccttctgaggccgctttgctgg

SEQ ID NO: 16312 - DNA, 80 bp, synthetic construct
  source 1..80: mol_type = other DNA
ccccccagtccctccctttacctcacagggcatcctccctgcgtgtgagtctggagccaaatttctcctctatgtaagga

SEQ ID NO: 16313 - DNA, 80 bp, synthetic construct
  source 1..80: mol_type = other DNA
tggttccacagtctgtgtctttcttcctgggtgtctgaattttgatttaatctcaggcttgtcagaacgagcagctccca

SEQ ID NO: 16314 - DNA, 80 bp, synthetic construct
  source 1..80: mol_type = other DNA
ttcctctgtgcagcccacacacgggcctcacgttatcttctgcaggccagaattgtcatatatatcaagtttgttcagaa

SEQ ID NO: 16315 - DNA, 80 bp, synthetic construct
  source 1..80: mol_type = other DNA
tggggccctgtcggctggttccatcgtcttccctgttttcaagctacaggagcgcaatctttccagagcattgagtggct

SEQ ID NO: 16316 - DNA, 80 bp, synthetic construct
  source 1..80: mol_type = other DNA
tacattcagatgagttctaattatgttcttggcttcccaggtcacacagagtgaaaaccagaggccctggccgtgcacca

SEQ ID NO: 16317 - DNA, 80 bp, synthetic construct
  source 1..80: mol_type = other DNA
tccatttgcacatttaatccagaaactgtcagcatgggaagcctggatgagaacaaaatgtcaagtgtgtgccgagaggc

SEQ ID NO: 16318 - DNA, 80 bp, synthetic construct
  source 1..80: mol_type = other DNA
attgcagaaagactcccagaccttgctggggaaactccaggatatgggggtatccagactcctgagacttccccgtgggt

SEQ ID NO: 16319 - DNA, 80 bp, synthetic construct
  source 1..80: mol_type = other DNA
tggcggactctgtataaaagtgtttgtagggacttatatttcctttctgcatgggtaaatacctaggtatagaatggctg

SEQ ID NO: 16320 - DNA, 80 bp, synthetic construct
  source 1..80: mol_type = other DNA
taatttttctctatcatgtaagacataggcggagattcatgtgttttttcttatggatgactgactggtccagtgtcatt

SEQ ID NO: 16321 - DNA, 80 bp, synthetic construct
  source 1..80: mol_type = other DNA
gaagacacacatcattgttcaccgtcaagggtgatgttggctctgggtttccatagatgtctttaccaggttaaggaaac

SEQ ID NO: 16322 - DNA, 80 bp, synthetic construct
  source 1..80: mol_type = other DNA
tatagaatttgtagcaatgtctcttctctcattcctgatactagtaatttgtgcctctttctttgttagtgtaatcagtc

SEQ ID NO: 16323 - DNA, 80 bp, synthetic construct
  source 1..80: mol_type = other DNA
ttgttatgtcctcttgagaagtcaacacatttgtcattatgaaactgcctctttatccctggccactttctttgctctga

SEQ ID NO: 16324 - DNA, 80 bp, synthetic construct
  source 1..80: mol_type = other DNA
ccttaacttctacttagtgcctataccacaaacaataagctgactccatttccatcttttataagttcagacccccacaa

SEQ ID NO: 16325 - DNA, 80 bp, synthetic construct
  source 1..80: mol_type = other DNA
ccaagcccttagtgaaaagtttcttaaggcggtttcataggtgcgtgtggggctgttggatacagtgacccacttcaagg

SEQ ID NO: 16326 - DNA, 80 bp, synthetic construct
  source 1..80: mol_type = other DNA
ctccttccccatgactggccctgggtggcggagagacccctgggcaggacacccctccctggcttttccttctgcaccac

SEQ ID NO: 16327 - DNA, 80 bp, synthetic construct
  source 1..80: mol_type = other DNA
atgcctgacatgcatcctcgcctaggccagagtgccaggcagggtaggggaacaaatgccaacacgtgagctgagtgacc

SEQ ID NO: 16328 - DNA, 80 bp, synthetic construct
  source 1..80: mol_type = other DNA
ttgaggcccatccgtgtcatggtctctgcattcagcagtttgtctccttttatttggaaaggataaaatgtaccacagtt

SEQ ID NO: 16329 - DNA, 80 bp, synthetic construct
  source 1..80: mol_type = other DNA
gcacctttgatgaaaatcagttggccgtgtgtgtgggttcgatttctggactttgtcatctgttctgccaggaaagcact

SEQ ID NO: 16330 - DNA, 80 bp, synthetic construct
  source 1..80: mol_type = other DNA
aatttgctagtgtggggaatcgcactgattgactttcaaatagcaaagcaaacttgcttcccttacacaaagcccacttg

SEQ ID NO: 16331 - DNA, 80 bp, synthetic construct
  source 1..80: mol_type = other DNA
agtttgtgtagaattgcaattatttctcccttaaacatttgatagctagaacatgtggaggtatctgggcctggagtttt

SEQ ID NO: 16332 - DNA, 80 bp, synthetic construct
  source 1..80: mol_type = other DNA
ccaagtcaaaagaagggtgctcagcccctggtctctttggtttgccaaacttctagtgctggtgaaattcttaaatatga

SEQ ID NO: 16333 - DNA, 80 bp, synthetic construct
  source 1..80: mol_type = other DNA
tagccggtaggaatacctacctgtcagaggattctttaatccaagggtccgtaaaccatagcctacaaacctggctgctg

SEQ ID NO: 16334 - DNA, 80 bp, synthetic construct
  source 1..80: mol_type = other DNA
caaagcaataatgggtggttgaaaaataaaggaatggccaaagagaggccaagaaactgcaagctaaaagaagaaaagga

SEQ ID NO: 16335 - DNA, 80 bp, synthetic construct
  source 1..80: mol_type = other DNA
ctggtggcttcactgtgtttgcaaatgttgtcccccacgtggattgaaattcatctattgcctgaaagtaatgaagtatg

SEQ ID NO: 16336 - DNA, 80 bp, synthetic construct
  source 1..80: mol_type = other DNA
gaggttttgctcaaggagtgtcccttgagcaaaatattgcactttcgttgctctctgaaagcctaccaggcagtcttccc

SEQ ID NO: 16337 - DNA, 80 bp, synthetic construct
  source 1..80: mol_type = other DNA
ttcctccctctctgtctctggggtcccatgggaagtcagggtggggcctggtgtgtggcttccgctggtttcctgggtgt

SEQ ID NO: 16338 - DNA, 80 bp, synthetic construct
  source 1..80: mol_type = other DNA
agggcgctctgggtgggatgaggacagacgtggaggaaaggagggatcccagcagaggcagcagtggatgggggagggct

SEQ ID NO: 16339 - DNA, 80 bp, synthetic construct
  source 1..80: mol_type = other DNA
cacactaaggggacacttggcaggggaggggctgtggcagggcagggtcatgtccccagcagtaaggccaggacagggca

SEQ ID NO: 16340 - DNA, 80 bp, synthetic construct
  source 1..80: mol_type = other DNA
aaatagacaaaagagataatagaagagtaatatcagagacactaaagtcctcgcgataagggtctgcgaggcttccttta

SEQ ID NO: 16341 - DNA, 80 bp, synthetic construct
  source 1..80: mol_type = other DNA
caccgagcaccattcaacataagtcttgtcagcgttccgatgaaacaagattaggggaattttacagcttgcctgtgttt

SEQ ID NO: 16342 - DNA, 80 bp, synthetic construct
  source 1..80: mol_type = other DNA
tgtagcgacctcacgtgagtggaagcagatagtatttgtccttgtgtaactggatcatttcactgagagtaatgtcttca

SEQ ID NO: 16343 - DNA, 80 bp, synthetic construct
  source 1..80: mol_type = other DNA
gttttttaaataattttaaagcacacaaataagacacctgagagccaacttataacacgccccaggatggacatggattc

SEQ ID NO: 16344 - DNA, 80 bp, synthetic construct
  source 1..80: mol_type = other DNA
tgacctagttgagcctggctttcctcctctgtaaaatgtgaacagaggccaccacccccattatgtgggtctgtgtttgc

SEQ ID NO: 16345 - DNA, 80 bp, synthetic construct
  source 1..80: mol_type = other DNA
cagcaccagcctaattaacctgacaagcggggcctccccagccatgcagccttgcactgccttcccacatccagctggat

SEQ ID NO: 16346 - DNA, 80 bp, synthetic construct
  source 1..80: mol_type = other DNA
agccctaggccggctcattggaatagtcatttatttgttccttcattcgttcattcagcatgtccatgttgagcactgac

SEQ ID NO: 16347 - DNA, 80 bp, synthetic construct
  source 1..80: mol_type = other DNA
cccttatccattgggcttgtcccaaacacatgccggatggtgtaagtatcattccatcctaattaataacatttgggagc

SEQ ID NO: 16348 - DNA, 80 bp, synthetic construct
  source 1..80: mol_type = other DNA
cttcagcggaggctccagcatggctgggttcaaacaggttgcagggtctgaagccactcaaggccgagcctgcctgcagt

SEQ ID NO: 16349 - DNA, 80 bp, synthetic construct
  source 1..80: mol_type = other DNA
gacgagagcagggtgtatgctcttccctggggccctggctgtggcgatcacgaaaagctccccctctcctgcactccaca

SEQ ID NO: 16350 - DNA, 80 bp, synthetic construct
  source 1..80: mol_type = other DNA
cctcccgagggctgcactcagatgggttcaggctgcactggcccctggctctgtggggtgaggggacccttcctctccct

SEQ ID NO: 16351 - DNA, 80 bp, synthetic construct
  source 1..80: mol_type = other DNA
agtgttgagtcctttggcatcaccatcttgaagttctgaatggtctcatccttgaacttgagatttgagagggaaatcgg

SEQ ID NO: 16352 - DNA, 80 bp, synthetic construct
  source 1..80: mol_type = other DNA
acagctgcagggccaggtgggccgtccacaggccactaaggcccagggtggcaccatcacaccttggggagtggccctgg

SEQ ID NO: 16353 - DNA, 80 bp, synthetic construct
  source 1..80: mol_type = other DNA
tgggccccccaccgcccagggctgtggggcaaacagctcccattcagctgccctgcagctgtctggggggagcggcccct

SEQ ID NO: 16354 - DNA, 80 bp, synthetic construct
  source 1..80: mol_type = other DNA
atcttgattgaatcttcaaagagcctatttccaaatatcgcattctgtgggtccaggtgaatatgaattaggggggatgc

SEQ ID NO: 16355 - DNA, 80 bp, synthetic construct
  source 1..80: mol_type = other DNA
ccgatccctctgctgcggagactttccctggaccgaaagggcctcctggtgaggctgggtctccgtttgtggactcactg

SEQ ID NO: 16356 - DNA, 80 bp, synthetic construct
  source 1..80: mol_type = other DNA
gctagcagaggcccagaaggctctagacaggctctagactgggtctctaagtctgcaaggggcaccaaagcactttacaa

SEQ ID NO: 16357 - DNA, 80 bp, synthetic construct
  source 1..80: mol_type = other DNA
cctcctcccgctcttgaccaccccttcctctggacagacgaccaccacatctccagccaggaccaccccttccttctggg

SEQ ID NO: 16358 - DNA, 80 bp, synthetic construct
  source 1..80: mol_type = other DNA
ccctcaggccaattcctgcctctcagcctatcttgggtttgtcctcggctgcctcgggaggcagccgtgcccaggcctct

SEQ ID NO: 16359 - DNA, 80 bp, synthetic construct
  source 1..80: mol_type = other DNA
gggtccctgccctgcccaggcccttctaggcccgtttctgggccacctgtgtgtgctttcttggacttgctgtagacttg

SEQ ID NO: 16360 - DNA, 80 bp, synthetic construct
  source 1..80: mol_type = other DNA
gtttgttcttgccttccatcagagtgtgttaaacaggcctcaggccttcctgccatcagcactgggcccatagggctggg

SEQ ID NO: 16361 - DNA, 80 bp, synthetic construct
  source 1..80: mol_type = other DNA
gggtctcttgccggcctctccgctcatcagagtggtgggtttgggttaggcagttggccctcccgaggctccagtcccat

SEQ ID NO: 16362 - DNA, 80 bp, synthetic construct
  source 1..80: mol_type = other DNA
cacaggtatgtatcctatacatctatgtgcgtatatgtgtgtgcacatgacatgtagacatgtgttagtatgtgcttgtg

SEQ ID NO: 16363 - DNA, 80 bp, synthetic construct
  source 1..80: mol_type = other DNA
ctggcagtggcctgtgtggacgggagcctcctgtccattccttcccaggggattcttggctcggggtttgccctgaaggt

SEQ ID NO: 16364 - DNA, 80 bp, synthetic construct
  source 1..80: mol_type = other DNA
cagtaccaagctctgggatgctgggctctggctctgtcactccaggctctccaggacccaccagagaatgggactgctct

SEQ ID NO: 16365 - DNA, 80 bp, synthetic construct
  source 1..80: mol_type = other DNA
tctccactcggccctctctcaggctcatgtggccagtgatgacaaggccaccaggacatgtcctcatacaaggccctggg

SEQ ID NO: 16366 - DNA, 80 bp, synthetic construct
  source 1..80: mol_type = other DNA
cgaggctgggatctcaccatgcatttggcttggtacagcctgtgtcagggagtcagcatcgttcgggacactgggccata

SEQ ID NO: 16367 - DNA, 80 bp, synthetic construct
  source 1..80: mol_type = other DNA
ccgctaatctgttgtcttgttttttttaggtaaagaaaaaaaagttcaagctggacaaagacaatggggtgactcctgga

SEQ ID NO: 16368 - DNA, 80 bp, synthetic construct
  source 1..80: mol_type = other DNA
gatgcatccgtcatctcgggaccagttttgagacaaacatcctatagggcaggaccgtgaactgggtagctctacagagt

SEQ ID NO: 16369 - DNA, 80 bp, synthetic construct
  source 1..80: mol_type = other DNA
gagccctcatcttccaggtggtggggggagcacagcatttgaagcccactcccctttgaccacttgctgttgtccagaca

SEQ ID NO: 16370 - DNA, 80 bp, synthetic construct
  source 1..80: mol_type = other DNA
atcgatgccgtccattcagcctggttagtgttatgaagtcattagtgctgtctgcggaatgttaatgaggggcaagtgcg

SEQ ID NO: 16371 - DNA, 80 bp, synthetic construct
  source 1..80: mol_type = other DNA
cccatggtagcatcagaacacagactaacctgcagcaaaaatgggctgtgtggtccctgtagagcagcctcactgagggg

SEQ ID NO: 16372 - DNA, 80 bp, synthetic construct
  source 1..80: mol_type = other DNA
gaacactgggctggaaggtcgtggtctgtgacgtaggatcggggaggccacctcagaggccttttgctgctcagagaaca

SEQ ID NO: 16373 - DNA, 80 bp, synthetic construct
  source 1..80: mol_type = other DNA
catcaggctaattgattttcctttgtaagtgaccctccctacctctagtgacttcagaaaccttccttttgactttagtg

SEQ ID NO: 16374 - DNA, 80 bp, synthetic construct
  source 1..80: mol_type = other DNA
ggatcttctagacaacctatgcagtgtaaacagaaaccccaatctcctgtgagagcaagtctaagtaacatatattgaga

SEQ ID NO: 16375 - DNA, 80 bp, synthetic construct
  source 1..80: mol_type = other DNA
caaagcgatgcaaccatttgggaaacagttcagcagtttcttgatgtgttaaatacatacctaccatattctacagcgat

SEQ ID NO: 16376 - DNA, 80 bp, synthetic construct
  source 1..80: mol_type = other DNA
ttaaatatcaaagagtttgataacactctatgggtatgtgtacatggaaactctcagtctcagtcattgatgttagaaaa

SEQ ID NO: 16377 - DNA, 80 bp, synthetic construct
  source 1..80: mol_type = other DNA
gcatttcaattgtgttgccacttggtagcaactgattttttcctttagtgattttatggtcttctctatcatctcttcgt

SEQ ID NO: 16378 - DNA, 80 bp, synthetic construct
  source 1..80: mol_type = other DNA
tgagacaggaaaattaaatcttcctgtacaattatgtttctaaaaattgagtggcaggtttcatggagtggtttggagca

SEQ ID NO: 16379 - DNA, 80 bp, synthetic construct
  source 1..80: mol_type = other DNA
accattgctctgggcacttgcaccctggtgtttctctgtgtgtccaaatatccttttctttaagggcaccagtcacactg

SEQ ID NO: 16380 - DNA, 80 bp, synthetic construct
  source 1..80: mol_type = other DNA
aacatgtttttctgaaacatctgtgagttgcatactccacagctctttgcccctaaacattttgctgtgtatttctgaaa

SEQ ID NO: 16381 - DNA, 80 bp, synthetic construct
  source 1..80: mol_type = other DNA
tgccacgtaaatggaatcacacaatacacgatatcttagaaacggggtcttttggctcggcatcattctctggattcatt

SEQ ID NO: 16382 - DNA, 80 bp, synthetic construct
  source 1..80: mol_type = other DNA
ttctctgcattcttgctggcatttgatgttcacactgtttttaattttctccattcagataggtgtgtagtgagatctca

SEQ ID NO: 16383 - DNA, 80 bp, synthetic construct
  source 1..80: mol_type = other DNA
atccacaaagtgcaaaaaagtgaagtgtgcctgtgtatccccagagctgtgcaactgccactccagtttgagaacatttt

SEQ ID NO: 16384 - DNA, 80 bp, synthetic construct
  source 1..80: mol_type = other DNA
ttctagaacatgtgggtttttgtgtggacatgtgttttcatatctcctgggcatgaaagagatatgaaaggctgggtgtg

SEQ ID NO: 16385 - DNA, 80 bp, synthetic construct
  source 1..80: mol_type = other DNA
tgttccttgttctttggtgttatatctaagaaacctctgccaaatccaaggtcataaagatttacccttatgtttaccct

SEQ ID NO: 16386 - DNA, 80 bp, synthetic construct
  source 1..80: mol_type = other DNA
tcattcgttgtaattgtttcacaatggattccttggggttttctgtatacaacattgatacggtttggatgtttggtccc

SEQ ID NO: 16387 - DNA, 80 bp, synthetic construct
  source 1..80: mol_type = other DNA
gttcctttctattcctagtatattgagtagggctttttctcccatcatggaagggtgttgaattttatcacccaaatgct

SEQ ID NO: 16388 - DNA, 80 bp, synthetic construct
  source 1..80: mol_type = other DNA
atttttttgttgttggaagaggtcataaagaattgatattctttagatatttgttagattcactcatctggccctcttgg

SEQ ID NO: 16389 - DNA, 80 bp, synthetic construct
  source 1..80: mol_type = other DNA
aatttgtaaaactgtcattcatttctgattttagtaatttgagttttctctctccccctttgcctcatgcacttccctct

SEQ ID NO: 16390 - DNA, 80 bp, synthetic construct
  source 1..80: mol_type = other DNA
tactttcagttggcatttatcatctaaagtgtgcctcatatagatggaatacagatggatcctgtttttcaaatctggtc

SEQ ID NO: 16391 - DNA, 80 bp, synthetic construct
  source 1..80: mol_type = other DNA
accatttcatccaagaatagtagttgggtaatagttcaataactcactctgaataattgatagaacaacaagacagaaaa

SEQ ID NO: 16392 - DNA, 80 bp, synthetic construct
  source 1..80: mol_type = other DNA
acatatatgttacaacttaattacacatacattgttacacatcctgttaggacaggggttcccaaccccagggccatgga

SEQ ID NO: 16393 - DNA, 80 bp, synthetic construct
  source 1..80: mol_type = other DNA
cagtgtgcagccactggtgtctttgctcagttttgtttgttttaattcttatgtttgttttgtaagcctggcttcattgg

SEQ ID NO: 16394 - DNA, 80 bp, synthetic construct
  source 1..80: mol_type = other DNA
agaaatcttcctctcacccatatctcttccatcctaattccccctacccattataggtaaccagtttcagtgttttctag

SEQ ID NO: 16395 - DNA, 80 bp, synthetic construct
  source 1..80: mol_type = other DNA
ttggtctatatgtccatccttgtgtcctagagaccacattgtgtcagtaccacattgttttgattactgcagctttgtaa

SEQ ID NO: 16396 - DNA, 80 bp, synthetic construct
  source 1..80: mol_type = other DNA
attagttgtggatttttcacaaatcctctttaacacattttgaaagttccatgtttttatcctgaaaggttgtagaattt

SEQ ID NO: 16397 - DNA, 80 bp, synthetic construct
  source 1..80: mol_type = other DNA
aggttatggatccttcttctttttcagtgtgggcattcacagctataatttttcctctgagcacttctttcactacatcc

SEQ ID NO: 16398 - DNA, 80 bp, synthetic construct
  source 1..80: mol_type = other DNA
gtacaagagttccctaaccctagccaacacttaatagctattctcatgagtgtgaggtgatatcgcatagtaattttgat

SEQ ID NO: 16399 - DNA, 80 bp, synthetic construct
  source 1..80: mol_type = other DNA
catgggttggacaagccacagaactgggtttcctaacgtcatttatgagagagactatctttctgcattgttttcttcgt

SEQ ID NO: 16400 - DNA, 80 bp, synthetic construct
  source 1..80: mol_type = other DNA
cattcgttatattgaggagtgttccttctatacctgaactgttagaatttatcaacaaaggatgttcaacttcatcaaat

SEQ ID NO: 16401 - DNA, 80 bp, synthetic construct
  source 1..80: mol_type = other DNA
ttcctgcattaatttgcttaagatagtggcctctagctgcatccatgttgctgcaaaggacgtaagttcattcatgtata

SEQ ID NO: 16402 - DNA, 80 bp, synthetic construct
  source 1..80: mol_type = other DNA
tgtttggctacttctgtattttcttttaagaaatgtatgttcctgtcctttgccaattcaattggattattcgttttttg

SEQ ID NO: 16403 - DNA, 80 bp, synthetic construct
  source 1..80: mol_type = other DNA
ttattgctgtaaacttccctcttagaactgcttttgctgcatgttttgcttttggtatgttgtgttcccactgtcatttg

SEQ ID NO: 16404 - DNA, 80 bp, synthetic construct
  source 1..80: mol_type = other DNA
tcatgagatctggttgtttaaacgtgtgtggcacttcccatctcactttctttccctctcctgttctgccatggtaaaga

SEQ ID NO: 16405 - DNA, 80 bp, synthetic construct
  source 1..80: mol_type = other DNA
gatttcgatatactctggattcttcgggggatatgtatacacattcagaagtggaattgatggatcctatgataattcca

SEQ ID NO: 16406 - DNA, 80 bp, synthetic construct
  source 1..80: mol_type = other DNA
taaacaataattccccaacccccccaccaccgccatctcttggaaaccaccttgtactttctatgtctctgatttgacta

SEQ ID NO: 16407 - DNA, 80 bp, synthetic construct
  source 1..80: mol_type = other DNA
caggtgcattgttttttggtgatgacttttagaagttctctgtataatctggacattaatcccttatcaggtatgtgatt

SEQ ID NO: 16408 - DNA, 80 bp, synthetic construct
  source 1..80: mol_type = other DNA
acacctggccaattattttattttttgtagagatgaggtctccctgtgttccccaggctggtctcaaactcctggactca

SEQ ID NO: 16409 - DNA, 80 bp, synthetic construct
  source 1..80: mol_type = other DNA
gtgtgtctgtatgtatatgtatgtgatgtgtttatttgggaatttggtgatacacacacacacactattttcttcctttc

SEQ ID NO: 16410 - DNA, 80 bp, synthetic construct
  source 1..80: mol_type = other DNA
gatgtcacatctaaaaaattgtcacaaaaaccaatggcaaggagcttttccctgttttataggttttatggtttcaggtc

SEQ ID NO: 16411 - DNA, 80 bp, synthetic construct
  source 1..80: mol_type = other DNA
ctggcaccatttgttgaaaagagaatccatttgccattgaatggacatggcatgcttgtcagaaatcatgcgttcatata

SEQ ID NO: 16412 - DNA, 80 bp, synthetic construct
  source 1..80: mol_type = other DNA
tccctctttgtttggggggaatattttgatcttatacttcccccgctacattttatttttgatgccccaaggtacacctt

SEQ ID NO: 16413 - DNA, 80 bp, synthetic construct
  source 1..80: mol_type = other DNA
taatgtatcccaatttcttgggagtcagtccctgaaaattattgtatttctcaggtgggtgctatgtttccttggttttt

SEQ ID NO: 16414 - DNA, 80 bp, synthetic construct
  source 1..80: mol_type = other DNA
cttagaggaaaagctcttagtcttttcaccattatgatgctccttgtgggtttttcttctaggagtctttttctttgtcc

SEQ ID NO: 16415 - DNA, 80 bp, synthetic construct
  source 1..80: mol_type = other DNA
tgttgcctgtgcttataaagtcttacccataaaatcttcgctagacccatatcctgaagggtttcccttctgttttcttc

SEQ ID NO: 16416 - DNA, 80 bp, synthetic construct
  source 1..80: mol_type = other DNA
atgtcaggcagtgtagtgcctccagcttcattctgcctgctcagtattgtttgtcctatttgtggtcttttgtggttcca

SEQ ID NO: 16417 - DNA, 80 bp, synthetic construct
  source 1..80: mol_type = other DNA
gatggccagtgatgatgagcattttttcatgtgtcttttggctgcataaatgtcttcttttgagaagtgtctgttcataa

SEQ ID NO: 16418 - DNA, 80 bp, synthetic construct
  source 1..80: mol_type = other DNA
ctgcaaacagggacaatttgacttcctcttttcctaattgaatatcctttctttctttctcccgcctgattgccttggcc

SEQ ID NO: 16419 - DNA, 80 bp, synthetic construct
  source 1..80: mol_type = other DNA
agtcttgctagaggcctatcaattttgttgatcttttcaaaaaaaccacctcctggattcattgattttttgaagggttt

SEQ ID NO: 16420 - DNA, 80 bp, synthetic construct
  source 1..80: mol_type = other DNA
gtctaatgttaacagtggggtgttaaagtctcccattattattgtgtgggagtctgtctctttgtagatctctaaggact

SEQ ID NO: 16421 - DNA, 80 bp, synthetic construct
  source 1..80: mol_type = other DNA
cttgctaggttggggaagttctcctggataatatcctgccttgctaggttggggaagttctcctggataatatcctgaag

SEQ ID NO: 16422 - DNA, 80 bp, synthetic construct
  source 1..80: mol_type = other DNA
atccattcttagatctcaaactccgtgctgggagaaccactactcttttcaaagctgtgagacagggacatttaagtctg

SEQ ID NO: 16423 - DNA, 80 bp, synthetic construct
  source 1..80: mol_type = other DNA
agtcagggtatccatcaccctcaatttatcatctctatagttaggaacatttcaagtcctcttttttattttgaaatata

SEQ ID NO: 16424 - DNA, 80 bp, synthetic construct
  source 1..80: mol_type = other DNA
tattttctcccattcaacaggctgtctcttcactctggtgattgtttcccttgttgtgtacaagctttatcatttaatat

SEQ ID NO: 16425 - DNA, 80 bp, synthetic construct
  source 1..80: mol_type = other DNA
aagatcttttctaccttttttaatggaggcatttattacaataaactttcctcttagcattgcttttgcagtatccctta

SEQ ID NO: 16426 - DNA, 80 bp, synthetic construct
  source 1..80: mol_type = other DNA
tgtcctttcacttcttcctgtaagactcccttaagcattttttgtagtgccagtgtagtggcaattaattccctgagctt

SEQ ID NO: 16427 - DNA, 80 bp, synthetic construct
  source 1..80: mol_type = other DNA
tttgatctgtctttcctaagagagtcttgttcctgaagatatatctatggtgttctttgggcagggcactttggttttga

SEQ ID NO: 16428 - DNA, 80 bp, synthetic construct
  source 1..80: mol_type = other DNA
tcctgaggccctccagtaatgcaagaatgtactgactgtggtaggcaggcacaggaagatccctgtataccctgctgaat

SEQ ID NO: 16429 - DNA, 80 bp, synthetic construct
  source 1..80: mol_type = other DNA
tttggctaatttgctgtttcacagaaatgctactgattttttgggggaggcaggggagtgcagacagggtctcactctgt

SEQ ID NO: 16430 - DNA, 80 bp, synthetic construct
  source 1..80: mol_type = other DNA
gcctgtagttttcttttttgctgttattgtgtccttatctggttttggtatcaagatactgcttgcctcacagaatgagt

SEQ ID NO: 16431 - DNA, 80 bp, synthetic construct
  source 1..80: mol_type = other DNA
ttattgaaataaatgtccctcatagcacttcttttgttgtaccctatacatttttgtatgctgtgtttctattttcattt

SEQ ID NO: 16432 - DNA, 80 bp, synthetic construct
  source 1..80: mol_type = other DNA
atctgctctactagtgttttatgcttttgtagtttcatgatggtagatatcatcctcctacttccagatgtagtactccc

SEQ ID NO: 16433 - DNA, 80 bp, synthetic construct
  source 1..80: mol_type = other DNA
caggatttttgtttggttctttttcatatctaactctgctggatttcccatttagataatgaattgttttcctgatatgt

SEQ ID NO: 16434 - DNA, 80 bp, synthetic construct
  source 1..80: mol_type = other DNA
tttctctgcctacattgttgtccatacctcattactggtctcttgatttccactcttgcttcctgtactccattcttcac

SEQ ID NO: 16435 - DNA, 80 bp, synthetic construct
  source 1..80: mol_type = other DNA
ttccccattaaacattctgagaacatctgcaccggtttccaaggcttctccctcactaattgctttgattattgtgtgaa

SEQ ID NO: 16436 - DNA, 80 bp, synthetic construct
  source 1..80: mol_type = other DNA
cctgcagagacatttccgttcactctgagatttgtgtatgctgaggcttgctatacttattctaaggagaagtgtttggg

SEQ ID NO: 16437 - DNA, 80 bp, synthetic construct
  source 1..80: mol_type = other DNA
gccccatgggatggctgtatccttaggcagctactttctaaaaggggcaaaatggccaccagcttgcattcaacagctca

SEQ ID NO: 16438 - DNA, 80 bp, synthetic construct
  source 1..80: mol_type = other DNA
agaggaagtgagaccagaatttcttgggaacagaaagcctcaaagactttcatgataggagagctctatgtagcctcatg

SEQ ID NO: 16439 - DNA, 80 bp, synthetic construct
  source 1..80: mol_type = other DNA
cctggatatccagatgaactgccctttcaagtacaccatgggctcaaccttctctgcagctgtgagttcaggctgtgaaa

SEQ ID NO: 16440 - DNA, 80 bp, synthetic construct
  source 1..80: mol_type = other DNA
atttgtaggagtcctttgcattttgtgggcactgtcttttcactctttaaggtgtattttgatgattgggtcttaactct

SEQ ID NO: 16441 - DNA, 80 bp, synthetic construct
  source 1..80: mol_type = other DNA
acctcacattttttatttacagaagagaaacaaaaatagtaccgagtacccacatccctttcaccagcttcccctaatgt

SEQ ID NO: 16442 - DNA, 80 bp, synthetic construct
  source 1..80: mol_type = other DNA
caactctacctcctgcaggagagtatcaaaaaaaatctgcaaatatgttaaaactaccacagcaattaaaatacatttca

SEQ ID NO: 16443 - DNA, 80 bp, synthetic construct
  source 1..80: mol_type = other DNA
atatgccagctcctcctcctcctttcctttcactgctatgtcatttgtttgtaacacgctcatcatagtctgcttttcat

SEQ ID NO: 16444 - DNA, 80 bp, synthetic construct
  source 1..80: mol_type = other DNA
caaatattctttccaagtctgtgctttgtcttttcattccattagcagtgtctgttgcacagcaaaagcttttaattttg

SEQ ID NO: 16445 - DNA, 80 bp, synthetic construct
  source 1..80: mol_type = other DNA
ccatgcctatatacctagagaaaaatgaaatgagcttatgttacagagtgacaggaacagagtcacagtgacatcccatg

SEQ ID NO: 16446 - DNA, 80 bp, synthetic construct
  source 1..80: mol_type = other DNA
tgaggtgtcaggcactttggggccatcttaaacacccacccaccccaacacccaactataaaactgattgtcagggctgg

SEQ ID NO: 16447 - DNA, 80 bp, synthetic construct
  source 1..80: mol_type = other DNA
gtccattctggccacagtcccattctggctgctaacccgttggggattccccttgataaatgtctttgtgtcaagatctg

SEQ ID NO: 16448 - DNA, 80 bp, synthetic construct
  source 1..80: mol_type = other DNA
tttcttgttccactccaggatgacagggcctgagagacctgaacatccatccccaagctctctgcccactttgggtctgg

SEQ ID NO: 16449 - DNA, 80 bp, synthetic construct
  source 1..80: mol_type = other DNA
atgctgggccagttccagaattcaaattaaaaacataaataaagacacattttgtttccatctcgagctctccccgcccg

SEQ ID NO: 16450 - DNA, 80 bp, synthetic construct
  source 1..80: mol_type = other DNA
ctagaatgcccttgtcacccatctgcagccaccagatttccattcatctttccaacgtctgctcagtaaaccccccagga

SEQ ID NO: 16451 - DNA, 80 bp, synthetic construct
  source 1..80: mol_type = other DNA
gcctcttgtgacatgacagcttcgcaaatccttgagcaaaaacagccccgtgtgcgttaattagaatttccatgtcttca

SEQ ID NO: 16452 - DNA, 80 bp, synthetic construct
  source 1..80: mol_type = other DNA
aagcagtgaggcttctcatttcctctgcaagggaaaggccatccaaatcaccctgccccagtgcactctggccaggctca

SEQ ID NO: 16453 - DNA, 80 bp, synthetic construct
  source 1..80: mol_type = other DNA
tggtgtaggttgctgtttaagaatattctgtacatgcttttggtgagcatcaggttgcgtttctggggaatatatgccta

SEQ ID NO: 16454 - DNA, 80 bp, synthetic construct
  source 1..80: mol_type = other DNA
gtatccttatagttttggggctcctgaaacatggcatcatgtgtcccttgtttatttaggttgactttcatatcttttac

SEQ ID NO: 16455 - DNA, 80 bp, synthetic construct
  source 1..80: mol_type = other DNA
aacccataggtgcccaatggagagataatctcaaatatggtagcagagttcagactcagtggctttcagatggttagtat

SEQ ID NO: 16456 - DNA, 80 bp, synthetic construct
  source 1..80: mol_type = other DNA
atagggccttgttaggagaaaaggaaagaaaaataaaaggtagagagacagaggtagacaggagtccaggtctgacctca

SEQ ID NO: 16457 - DNA, 80 bp, synthetic construct
  source 1..80: mol_type = other DNA
ctaatcctccctctttgggcctttcaaagttgggcttgtttttcagtgttttctttaggttcatgtcctgatttgttaag

SEQ ID NO: 16458 - DNA, 80 bp, synthetic construct
  source 1..80: mol_type = other DNA
agggctggaccaagtgaccccaactctgggttctgcctgggcattttcttgagtgtcataccctagccacctgactgtca

SEQ ID NO: 16459 - DNA, 80 bp, synthetic construct
  source 1..80: mol_type = other DNA
tgactcatgtcccttgtctgcataggtgttttcctataaatgtttaattcctgaggttgctgaatctcagggcttggaag

SEQ ID NO: 16460 - DNA, 80 bp, synthetic construct
  source 1..80: mol_type = other DNA
ccagcttcctggaaactctcgccaactgctggcctttggaaaggcttgtcaccctaatagctgttttttaaaaaaaaaaa

SEQ ID NO: 16461 - DNA, 80 bp, synthetic construct
  source 1..80: mol_type = other DNA
tttcatgagacatagcagtcacaacatgccatacacatttcttccagaatcactccactggaaattctgtaataagacat

SEQ ID NO: 16462 - DNA, 80 bp, synthetic construct
  source 1..80: mol_type = other DNA
aggcctctaagaaatgggtagcttcacagattcacagatagatagttcattaaggtcttgagtatttccaagggagcact

SEQ ID NO: 16463 - DNA, 80 bp, synthetic construct
  source 1..80: mol_type = other DNA
aatgatttctcaaatagagactgggcagagtagaccagttagttaatcagttgaagaggaaaccaagatcgatgcctaga

SEQ ID NO: 16464 - DNA, 80 bp, synthetic construct
  source 1..80: mol_type = other DNA
gtcagctgtgtcagtcttttatggtttgaggtccttatcttaaattctgaaataacctctcatcctgaaattgttttaat

SEQ ID NO: 16465 - DNA, 80 bp, synthetic construct
  source 1..80: mol_type = other DNA
caaagacaggggctaataacagggtctggagtctgaactcatatcctaattccactactttctacctgctacaccttgag

SEQ ID NO: 16466 - DNA, 80 bp, synthetic construct
  source 1..80: mol_type = other DNA
tcaatttagattaactgatgaagaattgccttccccacctcaaaaaaaaagtctttccagccacaaatagaagcagttta

SEQ ID NO: 16467 - DNA, 80 bp, synthetic construct
  source 1..80: mol_type = other DNA
atgctaagagggtttggaaaaagtcatttttgcagtgtttgtgttctatgaagagtgggtagaaggaagcaggagagtat

SEQ ID NO: 16468 - DNA, 80 bp, synthetic construct
  source 1..80: mol_type = other DNA
acagcagcttttaacacaagaatattatcactcctgttttatagataatctcctaagggttgagggattgagtctagggc

SEQ ID NO: 16469 - DNA, 80 bp, synthetic construct
  source 1..80: mol_type = other DNA
ctcaggtctgtgtggaagaaaggacaggagtccttctgccacccagactgtgcattcagacatctcccttgtgctgtgca

SEQ ID NO: 16470 - DNA, 80 bp, synthetic construct
  source 1..80: mol_type = other DNA
taaatgcaaaagatggccaaaggtgcatgctctgtgacacgtttcatagtcagacaaaaccagctgactgcttttacttt

SEQ ID NO: 16471 - DNA, 80 bp, synthetic construct
  source 1..80: mol_type = other DNA
tggaaaagcaatatatttgatgctttctccatgtcccataaatgactttctggcagaggagagtgactgtcctttgtctg

SEQ ID NO: 16472 - DNA, 80 bp, synthetic construct
  source 1..80: mol_type = other DNA
accagcaagttgctcacatccagacaggagacgctagtcctacaggtgcagtgggaggatctgcagatgactacagctct

SEQ ID NO: 16473 - DNA, 80 bp, synthetic construct
  source 1..80: mol_type = other DNA
agtttccacaattgttttgaaataattcccaacagatacccccaccctcacccagtgttgagtctcactcccgtcacgga

SEQ ID NO: 16474 - DNA, 80 bp, synthetic construct
  source 1..80: mol_type = other DNA
tgaccccctgtcaaggaggtgtgactgagaaaggaaggggcagagatcccttctccattcctctcaggcccctgtaaaaa

SEQ ID NO: 16475 - DNA, 80 bp, synthetic construct
  source 1..80: mol_type = other DNA
tttgatctgagagggaggcgccatgacctctgtttagacaaggaaaatgaagactctggaaaatctaagcacgtcacaca

SEQ ID NO: 16476 - DNA, 80 bp, synthetic construct
  source 1..80: mol_type = other DNA
ctgactttgatgcagtggtttaggccaagctttgaagtcagcccttggaggacgttcctatcagcctttgcacagatatc

SEQ ID NO: 16477 - DNA, 80 bp, synthetic construct
  source 1..80: mol_type = other DNA
tgtggaaggctggtctctccagagactgggctaaactctgctgtgtcaagtgcctggtgacctcaagcaagtcattccat

SEQ ID NO: 16478 - DNA, 80 bp, synthetic construct
  source 1..80: mol_type = other DNA
aaagctctgggtgaactcttggctcaggtatcaggatatgctgggtgagggaaataatggaggcacctttgttctagatg

SEQ ID NO: 16479 - DNA, 80 bp, synthetic construct
  source 1..80: mol_type = other DNA
ggttttcccttctggcatggccactaaatgccagtgcctttctctatgcaaaccatttccctaagctgttccctcagcac

SEQ ID NO: 16480 - DNA, 80 bp, synthetic construct
  source 1..80: mol_type = other DNA
ctccttactctttaagagtcatttgccccaagactactttctgtcaatcaccagatagccctcagtctacactctgtgat

SEQ ID NO: 16481 - DNA, 80 bp, synthetic construct
  source 1..80: mol_type = other DNA
ctactcgtcctcctcctggagtgtactgcaaacctggatccggtatccgctgagaaccactcattcatcagtctgcacta

SEQ ID NO: 16482 - DNA, 80 bp, synthetic construct
  source 1..80: mol_type = other DNA
gctagtgagtgactgaaggggatgacagatatggcaggtcagagcaaaatttcctgtgagatttaaataagaagaaggaa

SEQ ID NO: 16483 - DNA, 80 bp, synthetic construct
  source 1..80: mol_type = other DNA
gtactgcgtgtctgggtggtgtgtaattttaatttaaatacacagtcatgtactgaggccctctttctgtttggcatttg

SEQ ID NO: 16484 - DNA, 80 bp, synthetic construct
  source 1..80: mol_type = other DNA
cctggtatctgccagcagaagtcctctgctctccttttcaaaagttcagttggcatttacaaatatttttcttccacata

SEQ ID NO: 16485 - DNA, 80 bp, synthetic construct
  source 1..80: mol_type = other DNA
gatcctcacatccccatttctttttcttgtattagggtatggccaggatgacatccttggcctactccttatcttaaaga

SEQ ID NO: 16486 - DNA, 80 bp, synthetic construct
  source 1..80: mol_type = other DNA
agcttttggtctagcaaaaggggcaccacagtaaagaaagaactggtaaatgcacatcaaatgtggatattatcaggaaa

SEQ ID NO: 16487 - DNA, 80 bp, synthetic construct
  source 1..80: mol_type = other DNA
attccagactccaatcccaattcagcccactctgaaccaccatgagaactatagacccggaatccgatccttgggacgcg

SEQ ID NO: 16488 - DNA, 80 bp, synthetic construct
  source 1..80: mol_type = other DNA
aggcttgcggcgggctgctgcacggattggctgggtgcggaaagtgatgtgccgtgtcctgtcattggccgaaagagtct

SEQ ID NO: 16489 - DNA, 80 bp, synthetic construct
  source 1..80: mol_type = other DNA
ccgtttggcccttccatgtggactgcaaaaacagtgttggaatgcaggactctgggtatgttctcgaaagttgttacaac

SEQ ID NO: 16490 - DNA, 80 bp, synthetic construct
  source 1..80: mol_type = other DNA
tgagataggaaacgagagagattatgtgagaagacagggtcaggaatgttgagttgagggtggcctcaggcccctgtcct

SEQ ID NO: 16491 - DNA, 80 bp, synthetic construct
  source 1..80: mol_type = other DNA
acctaaccctggaacctcagaccccaagctcctgggcacttggatttttccctgacaaattccccgcctgtgatattcca

SEQ ID NO: 16492 - DNA, 80 bp, synthetic construct
  source 1..80: mol_type = other DNA
aaggtatttagagtgggggtgggggattaggggaggaagttgctgagctaattcttttgcatttgccagcacagaagtgc

SEQ ID NO: 16493 - DNA, 80 bp, synthetic construct
  source 1..80: mol_type = other DNA
cagtggggagtctctaggaggttttgggcaaggcagtgccaaggatcagatctcccttctagaaaggtcactctggctgc

SEQ ID NO: 16494 - DNA, 80 bp, synthetic construct
  source 1..80: mol_type = other DNA
aagttgtttctgattatctcttgagtcctgggagaggtgttaacaaaaagccccatccctgtcgctctggtggttatagt

SEQ ID NO: 16495 - DNA, 80 bp, synthetic construct
  source 1..80: mol_type = other DNA
gtgggatgataaatgtgggctgctttaggaatgaagctgtagggtgacttgtcacacagcaaaggccagctgacagagcc

SEQ ID NO: 16496 - DNA, 80 bp, synthetic construct
  source 1..80: mol_type = other DNA
caggtgtgatggggtggtgatgggatgctgtaggtggatgagaagtagcaccaaagctcactactgtttttctcttatcc

SEQ ID NO: 16497 - DNA, 80 bp, synthetic construct
  source 1..80: mol_type = other DNA
tccacttgaacacaacattgttttttatggaactgggctggggagtcctctgtgactctttcctcagtagggagagagct

SEQ ID NO: 16498 - DNA, 80 bp, synthetic construct
  source 1..80: mol_type = other DNA
gtgagccatcagctgtttataatcagagaagcatatgtttaaaagagctgaggggccttataaactccgtgtgcaaatta

SEQ ID NO: 16499 - DNA, 80 bp, synthetic construct
  source 1..80: mol_type = other DNA
atctctccacattctcaccaacacttgttactgtctgccgttttcattttagccatcttagtgggtgtgaagtgatatct

SEQ ID NO: 16500 - DNA, 80 bp, synthetic construct
  source 1..80: mol_type = other DNA
ccttatgccagtactatatcgtcttgattgttatagctttgtagtgagttttaaaattggaaagtgggttttccaacttt

SEQ ID NO: 16501 - DNA, 80 bp, synthetic construct
  source 1..80: mol_type = other DNA
acaatggagctatttcccagtcagacctcacaatcggtaaactgtgcttaaactaagtgaggtatcttaaggctttacca

SEQ ID NO: 16502 - DNA, 80 bp, synthetic construct
  source 1..80: mol_type = other DNA
gcccaaatgttagacactcttctctcttaggtggtttgaggagacttaggggcttccatattccccttggaacatgaaga

SEQ ID NO: 16503 - DNA, 80 bp, synthetic construct
  source 1..80: mol_type = other DNA
atccattaaatccatattcctcactgtagagttcatggattcagaggatataccgtattctggccgtcttacattactgc

SEQ ID NO: 16504 - DNA, 80 bp, synthetic construct
  source 1..80: mol_type = other DNA
cacttctgaatccccagggctgggcacagggctgtgacgccataggtgctctagatagatggaggagctcacagctgcag

SEQ ID NO: 16505 - DNA, 80 bp, synthetic construct
  source 1..80: mol_type = other DNA
gaaccagcaaagggggtatggggagccctctggggcaccctcatatcacaccctgtccctctggccacattccagctggc

SEQ ID NO: 16506 - DNA, 80 bp, synthetic construct
  source 1..80: mol_type = other DNA
tggaattccattccctgcctcccagaaatcttatcttgagggccgctcagctacagtaggccccaagccccagagactcc

SEQ ID NO: 16507 - DNA, 80 bp, synthetic construct
  source 1..80: mol_type = other DNA
tctgcgcacagtatgccaatgttccccaaaatctacatactgagaaggtagacagcaaagccacagggagacttctgggt

SEQ ID NO: 16508 - DNA, 80 bp, synthetic construct
  source 1..80: mol_type = other DNA
ggatgatgaaccccaggaattggcttccagtggatgcaaggctgactcgtacatgtcatggaggatagttcgggcatctg

SEQ ID NO: 16509 - DNA, 80 bp, synthetic construct
  source 1..80: mol_type = other DNA
tgtctctcattgggggtaacaatggctatgtacataagattaggagaacacacagaaggtggtgctggctaaagccatta

SEQ ID NO: 16510 - DNA, 80 bp, synthetic construct
  source 1..80: mol_type = other DNA
tcaccatacatgcaaatgtagcaaactgcaaaatgtcccaaaacaagtcccttactgtccgtgtccctccatgccagctc

SEQ ID NO: 16511 - DNA, 80 bp, synthetic construct
  source 1..80: mol_type = other DNA
ggacggtccctggacacctgcagcagccaggccccagatgcaagaaagggtatttgtttcttaaagcttgtaaagagttt

SEQ ID NO: 16512 - DNA, 80 bp, synthetic construct
  source 1..80: mol_type = other DNA
tgccttttgggggtcccaggtgatgtgtcatcttaccaggtgttgacaggtggagagaggtaggctgggtgaagatagga

SEQ ID NO: 16513 - DNA, 80 bp, synthetic construct
  source 1..80: mol_type = other DNA
gcaagtgctgccttagcggagtgggggtgggggcatgtgtcactcccaggaccaactggcagatgaaggtctttgggcac

SEQ ID NO: 16514 - DNA, 80 bp, synthetic construct
  source 1..80: mol_type = other DNA
tgtactccagcctctctgtgtcccatttgctcatgacatggtggtcaaagcaagtcacggattccagggggacctcggga

SEQ ID NO: 16515 - DNA, 80 bp, synthetic construct
  source 1..80: mol_type = other DNA
gtccctgtccgtttaagaaaagcctgtgggcccaatagagaagcacagggtctgagaagcatcagacaatgactcctaaa

SEQ ID NO: 16516 - DNA, 80 bp, synthetic construct
  source 1..80: mol_type = other DNA
gataaggcctcgccaagaaaaacagcaggctaaagacccctgatttcttcatgaattccagagcacttggttcactccgg

SEQ ID NO: 16517 - DNA, 80 bp, synthetic construct
  source 1..80: mol_type = other DNA
tttatttttctgcattggcctgaataggagctgactttaatacgggggaaatagtgattttaaagccggctttcccatgg

SEQ ID NO: 16518 - DNA, 80 bp, synthetic construct
  source 1..80: mol_type = other DNA
tagacccaatctgaagccctgggccaggagcttgtggacataacctgcagagatcagcctcctagggcagagtgagctga

SEQ ID NO: 16519 - DNA, 80 bp, synthetic construct
  source 1..80: mol_type = other DNA
gaaccaccagaaacttaatctattattacacagaaacttctgtgcagtcaggggtttgaagtccccagaagtgtttgcct

SEQ ID NO: 16520 - DNA, 80 bp, synthetic construct
  source 1..80: mol_type = other DNA
catttactccacaaatactgaatgcctgctccaggtgccagggacagcagtgacaatacaaaactgatacgaaattccaa

SEQ ID NO: 16521 - DNA, 80 bp, synthetic construct
  source 1..80: mol_type = other DNA
ccgacatgggctacattcaaggagccagcagagctggttcccactggaagctcaaagggaggccccacctcccttggctt

SEQ ID NO: 16522 - DNA, 80 bp, synthetic construct
  source 1..80: mol_type = other DNA
atgtcagagtccccttcgctgcttgaggcaagccctccggaacagacccatcttttgggggaccctgtggtcatggagat

SEQ ID NO: 16523 - DNA, 80 bp, synthetic construct
  source 1..80: mol_type = other DNA
ccaatatccaaacaatagtccacaaaacaagctgccccgtgggcactgcgaagaccctcggggccagagccactccctca

SEQ ID NO: 16524 - DNA, 80 bp, synthetic construct
  source 1..80: mol_type = other DNA
ggtggtacccctagtgagggggactcattctagttgcaaagatacaggtagagcatagggaccccaaagagtagcagggg

SEQ ID NO: 16525 - DNA, 80 bp, synthetic construct
  source 1..80: mol_type = other DNA
gagaggtgcatggtggacgtccaaagaataaacgaatgaaccatccaaagcacaggccagaggcagattgggagggtcag

SEQ ID NO: 16526 - DNA, 80 bp, synthetic construct
  source 1..80: mol_type = other DNA
aaaacgtgtgaaacctgacagcagcgccgcagcaggacagggagggactgtgtgtgagagccagggaagggctgctcagg

SEQ ID NO: 16527 - DNA, 80 bp, synthetic construct
  source 1..80: mol_type = other DNA
gaccagttgaaactccattctaagtcttggggacctaatgggattaaaggcgaccgagcttgggccgtatctgggatctg

SEQ ID NO: 16528 - DNA, 80 bp, synthetic construct
  source 1..80: mol_type = other DNA
ggctggatcccgagagcatctggacttgttcccagggcacccagcacagaagtgaaggggtgccggtggagagggagagc

SEQ ID NO: 16529 - DNA, 80 bp, synthetic construct
  source 1..80: mol_type = other DNA
gccctaactctgtgatggatgcctgctgttgtgatcatggacatgaggatgtgaggcggtcataatacaggagtgggctg

SEQ ID NO: 16530 - DNA, 80 bp, synthetic construct
  source 1..80: mol_type = other DNA
agaggatggctcgagccctgctaccaccatgctgctttgaaaaaggactgacttctctgctgcctccgcctccctgtgaa

SEQ ID NO: 16531 - DNA, 80 bp, synthetic construct
  source 1..80: mol_type = other DNA
agctccaggagctgacatgctccgtcttaaggcaggtcggctgctccgaggactgccggccctgtcagtatggtgtcctt

SEQ ID NO: 16532 - DNA, 80 bp, synthetic construct
  source 1..80: mol_type = other DNA
tgtggctgctggaacaagtcgccaaaattttggtggcctaaaatcaaggtgtcctcagggctggtcccttctggaggctc

SEQ ID NO: 16533 - DNA, 80 bp, synthetic construct
  source 1..80: mol_type = other DNA
accctcttccaacccaggcctgagctctgttcgggtctctatcctcctgccctttagcctcctctcttactgatagaaca

SEQ ID NO: 16534 - DNA, 80 bp, synthetic construct
  source 1..80: mol_type = other DNA
gggctccccccggccctttctcggggcagtttacactttgcagctgaatcaatcaggggcagaaatgcctggcaggggaa

SEQ ID NO: 16535 - DNA, 80 bp, synthetic construct
  source 1..80: mol_type = other DNA
ttactgattcctggagtctgcacagctacatagggtcagattcacgacctcccagctttaaccagccttcttgattagcc

SEQ ID NO: 16536 - DNA, 80 bp, synthetic construct
  source 1..80: mol_type = other DNA
taaaaaagaggacaaaagagatgagaccttcatcctagagcttaggatgtgaactgcgtccttctttaaatggaaatttc

SEQ ID NO: 16537 - DNA, 80 bp, synthetic construct
  source 1..80: mol_type = other DNA
tattcctggatgagaccttctttcccctgctattttggaattttttctcccaggagtttattgctggtataaagaaatgc

SEQ ID NO: 16538 - DNA, 80 bp, synthetic construct
  source 1..80: mol_type = other DNA
ttagtatgcatttgtcacaaggaaacaacagtgctacatgactgttaactgagtccatgcttgatgcagatttcctcagt

SEQ ID NO: 16539 - DNA, 80 bp, synthetic construct
  source 1..80: mol_type = other DNA
acattaattactttaatgggacttattttgcttcgttgcccaaagtaattggtttattaacctctccttccctttaggga

SEQ ID NO: 16540 - DNA, 80 bp, synthetic construct
  source 1..80: mol_type = other DNA
tcaagaagaccactcgggcctagggctctgcaagcaatatctgattttcagaaaaccatggctcacccacactctaccct

SEQ ID NO: 16541 - DNA, 80 bp, synthetic construct
  source 1..80: mol_type = other DNA
gctattcaaaatggcgggaggggcgaggcctctggagcaaggaaagagagtggtggctgtgtccagcaagtccctgttgc

SEQ ID NO: 16542 - DNA, 80 bp, synthetic construct
  source 1..80: mol_type = other DNA
aaaaaaaaaataaaaagtacaggggctctacacggcgccctgagaattgtgtgtaaatgagtgaaaatggggtgagaggg

SEQ ID NO: 16543 - DNA, 80 bp, synthetic construct
  source 1..80: mol_type = other DNA
acccacccagcccctcctgggaaaaagccaggacaaagatgtatttcttcgctagctccttcctggtggctctgtgcagg

SEQ ID NO: 16544 - DNA, 80 bp, synthetic construct
  source 1..80: mol_type = other DNA
gggagttgtgttgtgtagtgttgacttgagttgcatcgtgttgtgttgacttgagctgaactgtgctgagtgttactgag

SEQ ID NO: 16545 - DNA, 80 bp, synthetic construct
  source 1..80: mol_type = other DNA
ctggggaaacagaggaaactggttcctttctttcggttctgggttatgtcaaaatgagttccctttgctgaatctgtttc

SEQ ID NO: 16546 - DNA, 80 bp, synthetic construct
  source 1..80: mol_type = other DNA
ttgagcagacatttctccaaagagcagatacaaatggcaaatgatcacaggaacacatgcacatgaacacacgctcagcc

SEQ ID NO: 16547 - DNA, 80 bp, synthetic construct
  source 1..80: mol_type = other DNA
agaaggaaaaagctagagttgggcccccacctcatgcaatctataaaaactgactccaggtggatctaggaattaaatgt

SEQ ID NO: 16548 - DNA, 80 bp, synthetic construct
  source 1..80: mol_type = other DNA
cttcacttttaaagacttgtggttaattgggcccacctggacaattcaatatgatttccccatctcagtgttcatgacct

SEQ ID NO: 16549 - DNA, 80 bp, synthetic construct
  source 1..80: mol_type = other DNA
tcaataatattatattaaaaaagaaagcaagggagagaggaacacaggattcaggttgatggttacccaggataggggag

SEQ ID NO: 16550 - DNA, 80 bp, synthetic construct
  source 1..80: mol_type = other DNA
atttcagttctccttagaattacctataaatatagcataattcctaacaagaatcctagcaagatttcttatggacatgg

SEQ ID NO: 16551 - DNA, 80 bp, synthetic construct
  source 1..80: mol_type = other DNA
tgttgctgctgggaatgtaaactgatgcagcactcggggaaaataatgtggtcgtttcttataaaagtcagcatgcgact

SEQ ID NO: 16552 - DNA, 80 bp, synthetic construct
  source 1..80: mol_type = other DNA
ttatttccttattttctttccatctccactcccaggcaaagctgataaattcttccttattccagagttagaggatcctc

SEQ ID NO: 16553 - DNA, 80 bp, synthetic construct
  source 1..80: mol_type = other DNA
cattaacaaatgaaccagcggatgggggtggggagctcatctcattcatctacaaattattaacaataacttgttcatta

SEQ ID NO: 16554 - DNA, 80 bp, synthetic construct
  source 1..80: mol_type = other DNA
cctgtcggtgtgctcctacgctggtgtgttcctctcgacctaccctcaacgtccagccgcttgtgtcttcttctgccgat

SEQ ID NO: 16555 - DNA, 80 bp, synthetic construct
  source 1..80: mol_type = other DNA
tgttacagttcatactgtttgcgttcctttaaagacgtctttgcccatcccaggtcgtgaaaatattatccaactttctt

SEQ ID NO: 16556 - DNA, 80 bp, synthetic construct
  source 1..80: mol_type = other DNA
tcttatacatgaacatactatatccccaagtcaagttagggcttctttatctgtctctccaatgctcagtgcttttctgt

SEQ ID NO: 16557 - DNA, 80 bp, synthetic construct
  source 1..80: mol_type = other DNA
acttattctgttgatgtgaagagtgacgctgcttggtccttagagggtaaactcagcatgcacaagtggattaaaccaca

SEQ ID NO: 16558 - DNA, 80 bp, synthetic construct
  source 1..80: mol_type = other DNA
caaatggtaatttgccatttttttaaccgcttgagatggatttcagcctttcctctgctctgagatatgcatttaaagcc

SEQ ID NO: 16559 - DNA, 80 bp, synthetic construct
  source 1..80: mol_type = other DNA
catctaaatattctgaagcaaagcacaatcatctgttagctcacaaatctatgggtcagcaatctgggctgcccagttgg

SEQ ID NO: 16560 - DNA, 80 bp, synthetic construct
  source 1..80: mol_type = other DNA
attacctatttcttagtccttatttctgtatcagttacctattgttgcgtagcaaactagacctaaatttagtggcttca

SEQ ID NO: 16561 - DNA, 80 bp, synthetic construct
  source 1..80: mol_type = other DNA
aactgctttttgctcagtttctgtgattctcacccacccgtgtggcttaggaattcacaagtgtttccagaggaagttgt

SEQ ID NO: 16562 - DNA, 80 bp, synthetic construct
  source 1..80: mol_type = other DNA
cactgggacatggcctaagtatctccatcccatggagttgaacactctccttgtttctggaaggatccagtctgcgtgct

SEQ ID NO: 16563 - DNA, 80 bp, synthetic construct
  source 1..80: mol_type = other DNA
ggaaatacatgtgtaggtgtgggaaccccgtatcctctgtggtgggtgatccagaaggcaaaaatcacaaagcagggaag

SEQ ID NO: 16564 - DNA, 80 bp, synthetic construct
  source 1..80: mol_type = other DNA
accaagttgtgtcaaagctcccagcagtgcctgggacctcttgcagtcaaaataaaagccatggcaaatgccactgctgg

SEQ ID NO: 16565 - DNA, 80 bp, synthetic construct
  source 1..80: mol_type = other DNA
tgggttgaattacctagaagcttgtcagtgacctgtgttcctgaactgtgaaacatgaatatatgggccaagaaatggtt

SEQ ID NO: 16566 - DNA, 80 bp, synthetic construct
  source 1..80: mol_type = other DNA
ccctgtgtctggcccaaggagccggagcctctccacccttcaagtgtgccttgaactccctgtccaccatcagtcagtct

SEQ ID NO: 16567 - DNA, 80 bp, synthetic construct
  source 1..80: mol_type = other DNA
ctccattatacagaaaggagaaacagagctcagcaactcatcttacagaaaggaggatcaaggcttagcatcccatctta

SEQ ID NO: 16568 - DNA, 80 bp, synthetic construct
  source 1..80: mol_type = other DNA
tacggtttttacgggccagagggtctgcctagagtccaaccccatgcctgcctctatcacagttcttggtgtgtcatttc

SEQ ID NO: 16569 - DNA, 80 bp, synthetic construct
  source 1..80: mol_type = other DNA
cacaaatgtggcttggggtttcctgatatcatgagatgctttgttttctctgttgtggtttcaagatgtcacctgagtcc

SEQ ID NO: 16570 - DNA, 80 bp, synthetic construct
  source 1..80: mol_type = other DNA
tgcctctcaaccacccccttctcctcaccacccccagccctgcagagggagggcagctggccacggccacggttcacagc

SEQ ID NO: 16571 - DNA, 80 bp, synthetic construct
  source 1..80: mol_type = other DNA
tgggccattgcacctccaaagtgcatgacatgaaatgaaagccagggagtaaggggaggtagaccccacccttagcaaag

SEQ ID NO: 16572 - DNA, 80 bp, synthetic construct
  source 1..80: mol_type = other DNA
ggccaggctggtttctcatcctctgacaagtggcgtctttactggcaggtggcaccaagtgccccctccccccagctctt

SEQ ID NO: 16573 - DNA, 80 bp, synthetic construct
  source 1..80: mol_type = other DNA
gcccagtgggagatagcgcccatctggcaggacaggaagcaagacccgggagaggtcagctcacaggattggcaagctca

SEQ ID NO: 16574 - DNA, 80 bp, synthetic construct
  source 1..80: mol_type = other DNA
tcacatctgagcaacaaagggaagcattttccggagtccctgatccctagggcaaggtttaagaacaaggctggggccac

SEQ ID NO: 16575 - DNA, 80 bp, synthetic construct
  source 1..80: mol_type = other DNA
tcaaatgagagggtttgactcctgcttgtgtccttagggtcaaaagtcacaaaagctgcctcatgccctttctgttttca

SEQ ID NO: 16576 - DNA, 80 bp, synthetic construct
  source 1..80: mol_type = other DNA
aagtattcttagcttggtctccaggacctgccacactgtttacgttgggccctgtttattttgcaagctaagctcatact

SEQ ID NO: 16577 - DNA, 80 bp, synthetic construct
  source 1..80: mol_type = other DNA
tcactgttttcccccttagtggtcaaacttgacactattcccctgtcttattaaatgtttcgtggacttctggctttgct

SEQ ID NO: 16578 - DNA, 80 bp, synthetic construct
  source 1..80: mol_type = other DNA
aaacaaggtatattctgacattgttgggtgcagtgttatgttcatatccactggaacaagcttgttagttggtctgttca

SEQ ID NO: 16579 - DNA, 80 bp, synthetic construct
  source 1..80: mol_type = other DNA
aagggcctgctgggattttgataggcattgtgttgaatctatagatccatttggggaaaattgacaacttaacaaaattg

SEQ ID NO: 16580 - DNA, 80 bp, synthetic construct
  source 1..80: mol_type = other DNA
tggttttcttttctgactttgatgtcagatttttaaatccttttctttttaatcctacaaccgtaggatttcaggtttgt

SEQ ID NO: 16581 - DNA, 80 bp, synthetic construct
  source 1..80: mol_type = other DNA
tctttcctttgactctagtctgcattttcactaggatatgttaataggtttctttttttctgcctgagctaccttactca

SEQ ID NO: 16582 - DNA, 80 bp, synthetic construct
  source 1..80: mol_type = other DNA
aatcatgtttaccccttccattgccacatatgtgggtgtactgccagcctggacttttaattctaggctcaaagttttct

SEQ ID NO: 16583 - DNA, 80 bp, synthetic construct
  source 1..80: mol_type = other DNA
tattaaaatgaaaattccattcctggatctcagtcaccacttttttaagtgctgtgccacacagattcagctatgggaca

SEQ ID NO: 16584 - DNA, 80 bp, synthetic construct
  source 1..80: mol_type = other DNA
aggggctgcccttcagtcaaaccacacaagccctgttttgtctggggttccaaagataaacctataatgaaagcagcgtt

SEQ ID NO: 16585 - DNA, 80 bp, synthetic construct
  source 1..80: mol_type = other DNA
caccatgagttctcgctttgtccaagattgagatgcgccaggtagttggtgtgctcatttcgaggtgtttctttttcccc

SEQ ID NO: 16586 - DNA, 80 bp, synthetic construct
  source 1..80: mol_type = other DNA
cttcctgcttctcttaccctcagcaatcccccaagaactgttcttttccccacactagcgtctctctttcttggggtgtt

SEQ ID NO: 16587 - DNA, 80 bp, synthetic construct
  source 1..80: mol_type = other DNA
ggtgggaccggcttcctgccctggctccgagcccgcaggtgggggcttccgcctcactttggacggtggcgtccacaaaa

SEQ ID NO: 16588 - DNA, 80 bp, synthetic construct
  source 1..80: mol_type = other DNA
gggcttggggccccggagggctgagatccagctcatggctttggcagcattgttcttgcacgttcaggattagccgagta

SEQ ID NO: 16589 - DNA, 80 bp, synthetic construct
  source 1..80: mol_type = other DNA
accagaagtcacaaggagcagaaaggaaaaaagcaaaggaatccttctgaagcactgtgggcatttattcattcaccttg

SEQ ID NO: 16590 - DNA, 80 bp, synthetic construct
  source 1..80: mol_type = other DNA
ttgaaagcaagatgccaccagtggggaccaatgtacagagaccaggcccagcctagagtgggtatagctcatcacacccc

SEQ ID NO: 16591 - DNA, 80 bp, synthetic construct
  source 1..80: mol_type = other DNA
gtttggccagcatccctagaaatcagaagcccgcccctaattctgccagcttctggctttccgttgccatggtgacaccc

SEQ ID NO: 16592 - DNA, 80 bp, synthetic construct
  source 1..80: mol_type = other DNA
actgctgcgccgtccctcctgcgccacctgacagatgtggcggtgagaaaacgatggggcagggaaacgttcgccattcg

SEQ ID NO: 16593 - DNA, 80 bp, synthetic construct
  source 1..80: mol_type = other DNA
ccctcccctgggagcctgcctcaccctgaccacatggccttcggcacccagcttgagtgtcccatcctgtgaagccagcc

SEQ ID NO: 16594 - DNA, 80 bp, synthetic construct
  source 1..80: mol_type = other DNA
ggtctggaaattaattacccttgcagcgagacaaatgtgaaaactgtgtatttttgacaagaaaatgaagcagctattgg

SEQ ID NO: 16595 - DNA, 80 bp, synthetic construct
  source 1..80: mol_type = other DNA
tgtgtgtgttttgttgtatgtggtgtgtcttctacgtgtgagtgtggtgtgtgttgtgtctgcatgtatcgtgtgtgtgg

SEQ ID NO: 16596 - DNA, 80 bp, synthetic construct
  source 1..80: mol_type = other DNA
gttttgatgccaaggtccaacgcccagcttatcattgtgtaaatctgggcaccacacatagcctctctgtgactcagttt

SEQ ID NO: 16597 - DNA, 80 bp, synthetic construct
  source 1..80: mol_type = other DNA
agtcctatgggaccaaggccctgccttcacagtctcctttaatatttatcacctcctaaaggcctcgtctccaaacacag

SEQ ID NO: 16598 - DNA, 80 bp, synthetic construct
  source 1..80: mol_type = other DNA
ttcatgggcctgcccaatgtctattaattaagccccctggagactccaggagctgggggccttggctcagtgccctctca

SEQ ID NO: 16599 - DNA, 80 bp, synthetic construct
  source 1..80: mol_type = other DNA
tggaggatgtggcagagttcccatggtgtgtgtagaatgatattccctccagaccacggtgccttctgggctctggagaa

SEQ ID NO: 16600 - DNA, 80 bp, synthetic construct
  source 1..80: mol_type = other DNA
tgcaacgtcattttgcagaagggaaactgaggcacaaaatactccactgccaccaagtcacccaactcagtggtagagct

SEQ ID NO: 16601 - DNA, 80 bp, synthetic construct
  source 1..80: mol_type = other DNA
gatacaatgctgacagggacggcagagttccacaggcaatgaggcccccggggtaaaaatgaagcagtttgaaaacaaaa

SEQ ID NO: 16602 - DNA, 80 bp, synthetic construct
  source 1..80: mol_type = other DNA
acaagctaatcacagccttatttataatagtgagaaattggaaacagaccgcatgtgcagcatttgcgggatgttggttc

SEQ ID NO: 16603 - DNA, 80 bp, synthetic construct
  source 1..80: mol_type = other DNA
tgaagtaaatgggacgatgaaggggcagtgtttaaatggctgctttagcccgtttggaagtctgctaattattctcttga

SEQ ID NO: 16604 - DNA, 80 bp, synthetic construct
  source 1..80: mol_type = other DNA
ctttcccgcactctcctccctgacttcctcccacctaccggcctcttccgacctctctctgcctctttcccccatcacga

SEQ ID NO: 16605 - DNA, 80 bp, synthetic construct
  source 1..80: mol_type = other DNA
ttccaacagtacagaaaggtctgaaatgaaaggtaaataccttcatgaccatgccccctttccctaggataccccttgtt

SEQ ID NO: 16606 - DNA, 80 bp, synthetic construct
  source 1..80: mol_type = other DNA
tctagccatgtttccctgagctcttccctctctgtctctaattgatgtgttttcctcccaaaccctccttccttgcataa

SEQ ID NO: 16607 - DNA, 80 bp, synthetic construct
  source 1..80: mol_type = other DNA
ctggaaaggtctctgtatgatttctcatcatggaggccaccatctctgttctctctttctgaaattccttttaagtcaga

SEQ ID NO: 16608 - DNA, 80 bp, synthetic construct
  source 1..80: mol_type = other DNA
gcttccctggctcattgtccctgttacaacccagatttcccttatcgcaactggtcctagcctgtgacctcctggggtgg

SEQ ID NO: 16609 - DNA, 80 bp, synthetic construct
  source 1..80: mol_type = other DNA
cacacaaactttctgtttcaaggaacagaaacacccctgaaacttgtctaagaaggaaatgtgtcaactcacatacatga

SEQ ID NO: 16610 - DNA, 80 bp, synthetic construct
  source 1..80: mol_type = other DNA
tacagaggaagaacccgacagactgtgagccctgtcttcctcttggcaccatgagtcacctgtcaaactgaggggctggc

SEQ ID NO: 16611 - DNA, 80 bp, synthetic construct
  source 1..80: mol_type = other DNA
atgaagagatagatgaatggataaagaggtgaaaggatgaatagagagatggagggaaggagggctgaataaagaaatgg

SEQ ID NO: 16612 - DNA, 80 bp, synthetic construct
  source 1..80: mol_type = other DNA
ctggcctgggatctggagagaaagcacctgtgcagacggccccagcgctatgcccttctgaggcctgctctgcacacaca

SEQ ID NO: 16613 - DNA, 80 bp, synthetic construct
  source 1..80: mol_type = other DNA
cacgcctctgcccatcctgggaaactcaccatggcattgtggttgaagggtcagtggccaccagagagttcctgctgcag

SEQ ID NO: 16614 - DNA, 80 bp, synthetic construct
  source 1..80: mol_type = other DNA
tgagccctgaacagacacaggtgtctgttcagggctcctcaaatgcacaaatacatgtctgtgaccacagcccaacccct

SEQ ID NO: 16615 - DNA, 80 bp, synthetic construct
  source 1..80: mol_type = other DNA
ttagactcaaagagacatgatatccccttgggctgcaacttaaattccaaggagagatcctgaatccagagtcacatgta

SEQ ID NO: 16616 - DNA, 80 bp, synthetic construct
  source 1..80: mol_type = other DNA
cttgtgctcagctgccagcacagcccccaccacacactccccaacaggtgtctccacaactgccaggagacagctcagct

SEQ ID NO: 16617 - DNA, 80 bp, synthetic construct
  source 1..80: mol_type = other DNA
aattatagaaatcacccccaaaaactagactggaaaccttttagaggagggtaggtaactggcatttgtgtctccccaat

SEQ ID NO: 16618 - DNA, 80 bp, synthetic construct
  source 1..80: mol_type = other DNA
ccaataatattgtggatttcttgatgtgttggttttgttcatttgtttttcctgccccatcctctgggcccttaaagcct

SEQ ID NO: 16619 - DNA, 80 bp, synthetic construct
  source 1..80: mol_type = other DNA
cccagcaagtgtgtgtgagctctgtagtcgtgtcatggccccagtgatgtcctcattctatccctgtcccttcatggcag

SEQ ID NO: 16620 - DNA, 80 bp, synthetic construct
  source 1..80: mol_type = other DNA
aatctcaccattgtaagatctgaaattcagaacggtggcataggccagagtaggacattgtgaaaaagaaacaattagag

SEQ ID NO: 16621 - DNA, 80 bp, synthetic construct
  source 1..80: mol_type = other DNA
aaagtatagaatttgctttctatcccttttcttagaaggttctggagaatgcactccagcaaaacgtgggaggaaaccag

SEQ ID NO: 16622 - DNA, 80 bp, synthetic construct
  source 1..80: mol_type = other DNA
tatggtggtgaaggaggggagtcttcaggaaagacccccaggttctggcttggccatatgttggaggctgaaacgattca

SEQ ID NO: 16623 - DNA, 80 bp, synthetic construct
  source 1..80: mol_type = other DNA
tggaatcacaccctggacgcttccttctttgggttagatgtcgtcgtcttcaacaaatattttctgaatgtctgctatgt

SEQ ID NO: 16624 - DNA, 80 bp, synthetic construct
  source 1..80: mol_type = other DNA
gtcagctgcattttaaggctacatttcacgtcagctgtgacttggaaggaaagagggcccggcctttgaaaaatgaagaa

SEQ ID NO: 16625 - DNA, 80 bp, synthetic construct
  source 1..80: mol_type = other DNA
tcaccatcacatctgcattccagcagcaggagggaggtaaaagacatgaaggacaggccccactcctgtaaaaccctaca

SEQ ID NO: 16626 - DNA, 80 bp, synthetic construct
  source 1..80: mol_type = other DNA
tgccagagctgaaagcactggttaaacgtgatgggtaaacacatgtctatttcagcttctttgaatcccactaaggtgac

SEQ ID NO: 16627 - DNA, 80 bp, synthetic construct
  source 1..80: mol_type = other DNA
acacaattcaagaaccagggagactccaacaccaaaaacaaaaggccaagagaattttcaacatgagtgaaagaagttct

SEQ ID NO: 16628 - DNA, 80 bp, synthetic construct
  source 1..80: mol_type = other DNA
ggagagcttcacgggttttctcactaagggtaagaaaatttaagaaggaagtgatggtgccagagaatagggaattctgc

SEQ ID NO: 16629 - DNA, 80 bp, synthetic construct
  source 1..80: mol_type = other DNA
ttcccctctccccatcatcaggtaacccagcacaggctggcccaacccctctctaggcctcagctttcctgtcaggaaaa

SEQ ID NO: 16630 - DNA, 80 bp, synthetic construct
  source 1..80: mol_type = other DNA
ccctcccccaccagagccctggaaggctaggtacagcgaggaagtggccactccatgacccccagtgatttcacttctct

SEQ ID NO: 16631 - DNA, 80 bp, synthetic construct
  source 1..80: mol_type = other DNA
tctcccactttgacctggtccctcccctctcccccagagtgacctggacactagcctcctcccagtgggagacagatgtg

SEQ ID NO: 16632 - DNA, 80 bp, synthetic construct
  source 1..80: mol_type = other DNA
cttgcagaggcaaaatggaggttcagagaggtgagcaaacaccaggtcccatgtttgcacctggctgtgaccgtgcagtc

SEQ ID NO: 16633 - DNA, 80 bp, synthetic construct
  source 1..80: mol_type = other DNA
tggctggttgaagtccatcccaagtctccctccccacgaggctcctgcagatgccaggaatggggctggattccagattc

SEQ ID NO: 16634 - DNA, 80 bp, synthetic construct
  source 1..80: mol_type = other DNA
gggccctggcaagggacttaagtaattacttaaaggagggaaagggtggcctggggctcacagaggaaaagccttcctca

SEQ ID NO: 16635 - DNA, 80 bp, synthetic construct
  source 1..80: mol_type = other DNA
cagcactgtccccgtgattctacgtgcagcctccacaagtgtgtcgcatggaaacaagcagtggagagccacatgtgtgt

SEQ ID NO: 16636 - DNA, 80 bp, synthetic construct
  source 1..80: mol_type = other DNA
gggcagacagaggtgggggatggaaagcaggggaagtggccacagccaaaccaggagggggaagggagggggcctcacca

SEQ ID NO: 16637 - DNA, 80 bp, synthetic construct
  source 1..80: mol_type = other DNA
gaggggtattgctggggtcctaggggctggtgcgctcagaggttccagatggcccagcaagtggctgagggcccagggta

SEQ ID NO: 16638 - DNA, 80 bp, synthetic construct
  source 1..80: mol_type = other DNA
tctccgaccagggagacagacaagaggggaggttatgaggtcacctgggagaggtgtgggttccagctcccgtcgccact

SEQ ID NO: 16639 - DNA, 80 bp, synthetic construct
  source 1..80: mol_type = other DNA
aacccatacacgagacaaatagcacactagggaaaaacatgtgtgatgtgtacttgacatctttcttaacatagagtcct

SEQ ID NO: 16640 - DNA, 80 bp, synthetic construct
  source 1..80: mol_type = other DNA
ttctgcagaaggatttggcccaggctgggagggaaggctcagcctggctgttgcctggaacaagcggggaacaggttggg

SEQ ID NO: 16641 - DNA, 80 bp, synthetic construct
  source 1..80: mol_type = other DNA
ctccaacccttgggcagcccagagaacaacctaatggaaagtgaagggaattgtacaagtgtgtacaagggtgcagggtg

SEQ ID NO: 16642 - DNA, 80 bp, synthetic construct
  source 1..80: mol_type = other DNA
cacggtcgacttttgtccaagaactgaagcactaaagcaaagtcaaacacaatcgctccatgccctgccacgaaccgcga

SEQ ID NO: 16643 - DNA, 80 bp, synthetic construct
  source 1..80: mol_type = other DNA
gggatgatgagagcatgtctctggggccagagaccctagccagtccctcaaagccccagttggcacaggcagcagttgag

SEQ ID NO: 16644 - DNA, 80 bp, synthetic construct
  source 1..80: mol_type = other DNA
atgggagacatggcactttcagccagtgactctgaccctcttttcctgggcctcagtgtctgcatctgtgggatggagtg

SEQ ID NO: 16645 - DNA, 80 bp, synthetic construct
  source 1..80: mol_type = other DNA
catcttccctggggttgtctcacccgcacagaacccagccctggcccacacctcaccccaagcctatccggctggatcag

SEQ ID NO: 16646 - DNA, 80 bp, synthetic construct
  source 1..80: mol_type = other DNA
ccacagaatgtgggtgcagatggtgtctgggaaaatagtggtgtccccgctaggttaaagacatggcataatggttcctg

SEQ ID NO: 16647 - DNA, 80 bp, synthetic construct
  source 1..80: mol_type = other DNA
tgtgggggccccgtctcaggtctgagttgttaccccaagcgccctggcccccacatggtgatgttgacatcactggcatg

SEQ ID NO: 16648 - DNA, 80 bp, synthetic construct
  source 1..80: mol_type = other DNA
atgagtttcacagtgtgattttgattattaattgtgcaagcttttcctaataaacgtggagaatcacaggctgggctggg

SEQ ID NO: 16649 - DNA, 80 bp, synthetic construct
  source 1..80: mol_type = other DNA
agtgcaatcgcgggaagccagggtttccagctaggacacagcaggtcgtgatccgggtcgggacactgcctggcagaggc

SEQ ID NO: 16650 - DNA, 80 bp, synthetic construct
  source 1..80: mol_type = other DNA
cggttcctgtcacaaaggcgacgacaagtcccgggtccccggagccgcctccgcgacatacacgagtcgccctccgttat

SEQ ID NO: 16651 - DNA, 80 bp, synthetic construct
  source 1..80: mol_type = other DNA
gcaaacattctgccactcagttttacaaaagaaagagaggcactggattaatgtgtatctcactcaccaatcaacctctt

SEQ ID NO: 16652 - DNA, 80 bp, synthetic construct
  source 1..80: mol_type = other DNA
tgagatcactctggggaaaatacccaccttatttggaaagaagcactgatcaattgatgtctattttttttttttttgag

SEQ ID NO: 16653 - DNA, 80 bp, synthetic construct
  source 1..80: mol_type = other DNA
tttgagaggagctcattgctttttaggcttccctagcgtgagaaaatctggggatccatgctctagtttacttccttttt

SEQ ID NO: 16654 - DNA, 80 bp, synthetic construct
  source 1..80: mol_type = other DNA
tgatccacccgcctcagcctcccaaagtgctgggattataggcgtgagcccccgaacccggccactcccagctaagttta

SEQ ID NO: 16655 - DNA, 80 bp, synthetic construct
  source 1..80: mol_type = other DNA
ttgacagatctgtagttgggcaagagaattatcagagtttgtgaccacagcagattccaaagctcgactcattttcttct

SEQ ID NO: 16656 - DNA, 80 bp, synthetic construct
  source 1..80: mol_type = other DNA
agaaaaaaagacatagatacatcttttaaagttaggttgtatgttaattacctacaactcagtttcaactgtgcttaaag

SEQ ID NO: 16657 - DNA, 80 bp, synthetic construct
  source 1..80: mol_type = other DNA
agccaggatggtctcgatctcctgatttggtgatccgcccaccttggcctcccaaagtttcaaccatcgatcagaactta

SEQ ID NO: 16658 - DNA, 80 bp, synthetic construct
  source 1..80: mol_type = other DNA
tgttattgcggccgggcatggtggctccagcctataatcccagcactttggtcaggagttcaaggccagcctggccaata

SEQ ID NO: 16659 - DNA, 80 bp, synthetic construct
  source 1..80: mol_type = other DNA
tgcagtgggccgtgatcgctccactgatcgctctaaagtgagaccctgtctcaaaaaaaaagaaaatagaagaaaactaa

SEQ ID NO: 16660 - DNA, 80 bp, synthetic construct
  source 1..80: mol_type = other DNA
ctgttcctgatcggatgacatttctggttaattctttagttggcaggaaatagacacaggaaacgtggtcagtttctgat

SEQ ID NO: 16661 - DNA, 80 bp, synthetic construct
  source 1..80: mol_type = other DNA
actttgcataacctaatgtctttttttttttttttttttgagacggagtctcgttccatcacccaggctggagtgcagtg

SEQ ID NO: 16662 - DNA, 80 bp, synthetic construct
  source 1..80: mol_type = other DNA
tcgtgatccgccagctttggcctcccaaagtgttgggattacaggcgtgagccactgagcccgccccatatgtatgtata

SEQ ID NO: 16663 - DNA, 80 bp, synthetic construct
  source 1..80: mol_type = other DNA
tctcttgggggctcataccaagcctcttccgcccttcaaatccccccttgaccaggaggcattacaaagtggggatggtg

SEQ ID NO: 16664 - DNA, 80 bp, synthetic construct
  source 1..80: mol_type = other DNA
gctatcatcagacacctcggctgatagaaaattgcaagttagctcactgcaacctcggcattataagtactgcacaaagc

SEQ ID NO: 16665 - DNA, 80 bp, synthetic construct
  source 1..80: mol_type = other DNA
ataaattcttacccccacaccactggtccagatagtcagtgctcacccacaacattaaggatattccaaatttgaaacat

SEQ ID NO: 16666 - DNA, 80 bp, synthetic construct
  source 1..80: mol_type = other DNA
tgtgggacatgcagtgatttaggtgccgaagtggatttccaacaacatgccaagaaagtattcccatttcatgtttgttt

SEQ ID NO: 16667 - DNA, 80 bp, synthetic construct
  source 1..80: mol_type = other DNA
ctgcttctttttctctggttgtctcttcttgagaaaatcaacacactctgtcctgttttccagctgtggccacctgtcgc

SEQ ID NO: 16668 - DNA, 80 bp, synthetic construct
  source 1..80: mol_type = other DNA
ccgacgcgttttcttaatgaatccatttgcatgcgttcttatgtgaataaactattatatgaatgagtgccaagcaaact

SEQ ID NO: 16669 - DNA, 80 bp, synthetic construct
  source 1..80: mol_type = other DNA
aaaaaaaaaaaaaaaaaaaaagcgaattctgaaatacatgaattcttttccttagatgcctgcttctgtcttgaggtttg

SEQ ID NO: 16670 - DNA, 80 bp, synthetic construct
  source 1..80: mol_type = other DNA
aaacaaaaaaatgtttgcccatgctggtcttgaactcctgggctcaagctatctgcctgccttggtctcccaaagttctg

SEQ ID NO: 16671 - DNA, 80 bp, synthetic construct
  source 1..80: mol_type = other DNA
cctatgaatgtgatggctctagggacctcctctgagtggaatcagacagcattttccttttttgactggcttatttcact

SEQ ID NO: 16672 - DNA, 80 bp, synthetic construct
  source 1..80: mol_type = other DNA
aagtgtgcttgaaagcagttaggagggtttcatgagattccacctgcatggaaaactatcattggctggccagagtttct

SEQ ID NO: 16673 - DNA, 80 bp, synthetic construct
  source 1..80: mol_type = other DNA
gctgggacctcaggtgcatgccactatgcctggctaattttcttttttctttttttttttttttcgagacggagtctcgc

SEQ ID NO: 16674 - DNA, 80 bp, synthetic construct
  source 1..80: mol_type = other DNA
ctccccggacccccaggctccatcgcctacctcttcttcaccaaccggcacgaggtcaggaagatgacgctggaccggag

SEQ ID NO: 16675 - DNA, 80 bp, synthetic construct
  source 1..80: mol_type = other DNA
ctctgtacctgtcaggtgacatctgctacctaagcacgtgagaggtggcatttcacagtttcagtgtggtgctgacaacc

SEQ ID NO: 16676 - DNA, 80 bp, synthetic construct
  source 1..80: mol_type = other DNA
gggaaagagactctcagactgtctccactcagatacaaatgtgtgtgttgtgtgcgtgtgttctggtctcatatttgttt

SEQ ID NO: 16677 - DNA, 80 bp, synthetic construct
  source 1..80: mol_type = other DNA
aacccaaacaagccacatttggagtttggggttcccagcaggactatttcccaagcctgagcctggctgtttcttccaga

SEQ ID NO: 16678 - DNA, 80 bp, synthetic construct
  source 1..80: mol_type = other DNA
aagccaagatgaacgcagaaaactggttgtgactaggaggaggtcttagacctgagttatttctattttcttctttcttt

SEQ ID NO: 16679 - DNA, 80 bp, synthetic construct
  source 1..80: mol_type = other DNA
gagatggggtctcagtatgttgaccaggcttgtcttaaactcccggcctcaagtgatcctcccacttcagtctcccaaag

SEQ ID NO: 16680 - DNA, 80 bp, synthetic construct
  source 1..80: mol_type = other DNA
ccgagttgagactccgtctcaaaaaaaaaaaaaaaaaaaaaaatacaaaaagtagccaggtgtggtggcaggcacctgta

SEQ ID NO: 16681 - DNA, 80 bp, synthetic construct
  source 1..80: mol_type = other DNA
ggagagagggtggcctgtgtctcatcccagtgtttaacgggatttgtcatcttccttgctgcctgtttaggacaaagtat

SEQ ID NO: 16682 - DNA, 80 bp, synthetic construct
  source 1..80: mol_type = other DNA
aaggactcatgagtcgggataaccatacttttcttggatggacacatcagcaccgggcttgacatttacccagttcccct

SEQ ID NO: 16683 - DNA, 80 bp, synthetic construct
  source 1..80: mol_type = other DNA
tgacttttctcatcctctgagaaagtctcagttgaggccagcacctccctcaagtgaattgaatctcccttttgaacaac

SEQ ID NO: 16684 - DNA, 80 bp, synthetic construct
  source 1..80: mol_type = other DNA
cctggccgtgtctggccttttttagttatttcttttttttttttttttttttttgagacagagtcttactccgtcgccca

SEQ ID NO: 16685 - DNA, 80 bp, synthetic construct
  source 1..80: mol_type = other DNA
ttattaataattatttttgggtttcttttttttgagacagggtcttactctgtcatccaggccatcctgtctgtctgtca

SEQ ID NO: 16686 - DNA, 80 bp, synthetic construct
  source 1..80: mol_type = other DNA
ctatctgtaaagtgggtctaataacagttcttgccctctttgcaaggattaaatgggccaaatcatatgaggggccaggt

SEQ ID NO: 16687 - DNA, 80 bp, synthetic construct
  source 1..80: mol_type = other DNA
ggccaaggtgggagaatggcttgagcccaggagttcaagtccagcctgggcaacatagcaagaccctatctctactacaa

SEQ ID NO: 16688 - DNA, 80 bp, synthetic construct
  source 1..80: mol_type = other DNA
tgatattttgttcattgggtggtttttcattaatttaaattttaaaaaataacatattaaaggctggtgtggaggtgcac

SEQ ID NO: 16689 - DNA, 80 bp, synthetic construct
  source 1..80: mol_type = other DNA
agctgctgggaaatggtgctcctagacttttagcaaacaaacaaaaaaaaatggcacatcggcaaatttcagaccattct

SEQ ID NO: 16690 - DNA, 80 bp, synthetic construct
  source 1..80: mol_type = other DNA
agcatgctgggcattgtggggtccgaaggtggctcccctgtccccttcaaaataccctctttttcttttcttcttttttt

SEQ ID NO: 16691 - DNA, 80 bp, synthetic construct
  source 1..80: mol_type = other DNA
gcctcactcttgcttctctcctgcagctctgggcgacgttgctggcagaggaaatgagaagaagcccagtagcgtgaggg

SEQ ID NO: 16692 - DNA, 80 bp, synthetic construct
  source 1..80: mol_type = other DNA
gttcgagaccaacctgggcaacatggcgaaaccctgtttctagaaaaggtacaaaaattagctgggcaggtggcacgtgc

SEQ ID NO: 16693 - DNA, 80 bp, synthetic construct
  source 1..80: mol_type = other DNA
agcattaggtgaatgcttctgtgcgctcattcagaatgtcagcggacaatggccttggtggtgtagaggaatgttggata

SEQ ID NO: 16694 - DNA, 80 bp, synthetic construct
  source 1..80: mol_type = other DNA
gggtttgaggccgttgtagctggagcaaacagagagaggggtaaaaaggcaggaggctaccaggcaggttgtgcagagcc

SEQ ID NO: 16695 - DNA, 80 bp, synthetic construct
  source 1..80: mol_type = other DNA
ttccttaagccaggaaagggattcatggcgtcggaaatgatctggctgaatccgtggtggcaccgagaccaaactcattc

SEQ ID NO: 16696 - DNA, 80 bp, synthetic construct
  source 1..80: mol_type = other DNA
aggcatggcgaggctgaggtgggaggatggtttgagctcaggcatttgaggctgtcgtgagctatgattatgccactgct

SEQ ID NO: 16697 - DNA, 80 bp, synthetic construct
  source 1..80: mol_type = other DNA
ccccgttgtatgtatgagtggcttctgggagatgggtgtcactttttaaaccactgtatagaaggtttttgtagcctgaa

SEQ ID NO: 16698 - DNA, 80 bp, synthetic construct
  source 1..80: mol_type = other DNA
cggtctttcctcgcagctccggggcaagctaggagtgggatggaagtcgaggtccctaattttttaaggggagggtgcgg

SEQ ID NO: 16699 - DNA, 80 bp, synthetic construct
  source 1..80: mol_type = other DNA
aaaaacccattcagtcccgtttgactccggaaattcggtgagaatgaaaataagtttttaaggcttggagagttaggcac

SEQ ID NO: 16700 - DNA, 80 bp, synthetic construct
  source 1..80: mol_type = other DNA
ctggactggggatttaacataagatcaacagtaaaccttattgtgggatttgatgctactgccaccaagcaagagtgaaa

SEQ ID NO: 16701 - DNA, 80 bp, synthetic construct
  source 1..80: mol_type = other DNA
tatacaggctctccttttccctgcttgcctgatccagaattatggcaatgagagcagaaggtcttacttaaacaatactc

SEQ ID NO: 16702 - DNA, 80 bp, synthetic construct
  source 1..80: mol_type = other DNA
acttctaggtctagactcgctgaaataaggtcattctaaacaaacagcaaataattctaaaaataattcctgttaagccc

SEQ ID NO: 16703 - DNA, 80 bp, synthetic construct
  source 1..80: mol_type = other DNA
agcctcccaaagtgctggaattacagtcgtgagccatcgcgcccggctcccattttcttttcttttcttttctttttttg

SEQ ID NO: 16704 - DNA, 80 bp, synthetic construct
  source 1..80: mol_type = other DNA
gttgctatctaaccaccgtcctttctgctaagagtccagacagttttctctcctttgatagaatgcactcaacacattaa

SEQ ID NO: 16705 - DNA, 80 bp, synthetic construct
  source 1..80: mol_type = other DNA
tgccatgttggccaggctggtgtcaaactcctgagctcaagtgatccgcctacctcagcctctcaaagtgctgggattgc

SEQ ID NO: 16706 - DNA, 80 bp, synthetic construct
  source 1..80: mol_type = other DNA
caaggtactaacgagattctgcaatgcaagatgcagtctggcacagatgaattgacagcatacagtatagaattagaatg

SEQ ID NO: 16707 - DNA, 80 bp, synthetic construct
  source 1..80: mol_type = other DNA
ccaactgacctgggtctgaagggaaataataatatctaccttgtaaggatttaaaacatttcatctatggccaggtgcgg

SEQ ID NO: 16708 - DNA, 80 bp, synthetic construct
  source 1..80: mol_type = other DNA
cagccaaaaaaaattttttttaattagccaggtgtggtgagttgctcttgtagtcttagctacttaggaggctgagatag

SEQ ID NO: 16709 - DNA, 80 bp, synthetic construct
  source 1..80: mol_type = other DNA
aaatgtgatcatgaaatgcccctgataaaagcaccatcttagttccccgttgccatcagattcacactccttagtgtggt

SEQ ID NO: 16710 - DNA, 80 bp, synthetic construct
  source 1..80: mol_type = other DNA
tgtgtatgctcatccatccttccctcttgaacaccctctcacccatatattgccaaatattccacttctccctctgcttt

SEQ ID NO: 16711 - DNA, 80 bp, synthetic construct
  source 1..80: mol_type = other DNA
tggtcttacatatacccccaagtctgctgtggcactcagtatttacccatttgttagcacttagctcctagtgctttctt

SEQ ID NO: 16712 - DNA, 80 bp, synthetic construct
  source 1..80: mol_type = other DNA
acttgcatgcccttccaggcgggtaactgtacatgtctctcccaggcagccttcacagactactcaggggtatggattgg

SEQ ID NO: 16713 - DNA, 80 bp, synthetic construct
  source 1..80: mol_type = other DNA
gcgtttggaggcactcatcacacattaattactttatccatgaagatgaaagctgtctttggcacccagatggtactgag

SEQ ID NO: 16714 - DNA, 80 bp, synthetic construct
  source 1..80: mol_type = other DNA
acgccgtacatgcacatatcacttatatcacttattgctcacaacagtcctatggaattaccgttatccctgttttatca

SEQ ID NO: 16715 - DNA, 80 bp, synthetic construct
  source 1..80: mol_type = other DNA
gatgaacagatggagtgagacagatgaaattggataacctagcataaaatgccatgtgaaaagaaggtacgcaactcatg

SEQ ID NO: 16716 - DNA, 80 bp, synthetic construct
  source 1..80: mol_type = other DNA
tggcctttgaagctaggtctctagggtttgaatcccagctccaccgtttattaattgtgcaacattggaccctttgtgct

SEQ ID NO: 16717 - DNA, 80 bp, synthetic construct
  source 1..80: mol_type = other DNA
gataggacctgctttataggtaggcaattatattgttccttcccttgaaaaacttttatcgaggtctagtgcacacccat

SEQ ID NO: 16718 - DNA, 80 bp, synthetic construct
  source 1..80: mol_type = other DNA
caatgtggagccactgttagtttaaagtcttctggaaacaaaatgaggctttcattttgaaaagatcgctgtgggctggg

SEQ ID NO: 16719 - DNA, 80 bp, synthetic construct
  source 1..80: mol_type = other DNA
ggatgcttaggaatcactcctggtctgggaatacttggggtcgtcttctaagaattctcaagagtggaaggccactcacc

SEQ ID NO: 16720 - DNA, 80 bp, synthetic construct
  source 1..80: mol_type = other DNA
gtctgccttatttcctgggatcccttcccacttctccctggggacttgtgctgttgcagaggcactgagaagtccatccc

SEQ ID NO: 16721 - DNA, 80 bp, synthetic construct
  source 1..80: mol_type = other DNA
tttgcaaggtctgagccccaagagatgtcccagagtagagggaaggcctggcagcccagggattttcccttagcccagct

SEQ ID NO: 16722 - DNA, 80 bp, synthetic construct
  source 1..80: mol_type = other DNA
ccttccacctctaaaccttagctccaccaagctccaaggggagagaagagagggcatatgggaatgttttgctggacccc

SEQ ID NO: 16723 - DNA, 80 bp, synthetic construct
  source 1..80: mol_type = other DNA
aaagatcattttgtatttcttaaagagggcctccccacaaaattgtgtgcactttaggtaggatgaacaactgtccctat

SEQ ID NO: 16724 - DNA, 80 bp, synthetic construct
  source 1..80: mol_type = other DNA
gacaagagaaaggaaggagatgtcactgctgaatttctgctgaatttccttctgcctgctgcccgatttctatttgactg

SEQ ID NO: 16725 - DNA, 80 bp, synthetic construct
  source 1..80: mol_type = other DNA
ctctgtcatttagtagattgtgctttttgggtgagatttcatttgagtgagggggatctctgactttacaaatagctgtc

SEQ ID NO: 16726 - DNA, 80 bp, synthetic construct
  source 1..80: mol_type = other DNA
cctgtccagggttctagccacctgatggtaagatcttggctttccaattcaggcaaactcgtattaaaatttcagttctg

SEQ ID NO: 16727 - DNA, 80 bp, synthetic construct
  source 1..80: mol_type = other DNA
ttacttacggcctagttttaggaaagtcagcctcatctgcaaagcagggaaataatttccaacccatgaggttgttgtat

SEQ ID NO: 16728 - DNA, 80 bp, synthetic construct
  source 1..80: mol_type = other DNA
ggcagttctgtaaagcccctaaatcttccttctccaagaagccctccttcaaatgtatgtaaccttatttagttattgca

SEQ ID NO: 16729 - DNA, 80 bp, synthetic construct
  source 1..80: mol_type = other DNA
agacttctgggatccctttggaattcatccaattcagagtcctctactgctctttaatcatttgtgcttgttggttttgc

SEQ ID NO: 16730 - DNA, 80 bp, synthetic construct
  source 1..80: mol_type = other DNA
aagattctcaaaaaaagagcggggaggtctaggacaggaagggttaagtgtggtttagctttcccagcctggaaaggaag

SEQ ID NO: 16731 - DNA, 80 bp, synthetic construct
  source 1..80: mol_type = other DNA
aaacaaacagaggatgaggtggatggtgggaccaggataggggccaggatgaggggaggggagtggaaggcttatcaaaa

SEQ ID NO: 16732 - DNA, 80 bp, synthetic construct
  source 1..80: mol_type = other DNA
acttctttaggggactgtggcttgttgcttgggtctaaaaacgaatgcttggctttgaagagagatagattggggcaaaa

SEQ ID NO: 16733 - DNA, 80 bp, synthetic construct
  source 1..80: mol_type = other DNA
cggggatgcccgcaagacccttgactcagtagccaaggagcgcgcccgcctgcagctggagctgagcaaagtgcgtgagg

SEQ ID NO: 16734 - DNA, 80 bp, synthetic construct
  source 1..80: mol_type = other DNA
ttttctaaaaaagcctttgggagcttggaagtataggccctctcttccagccccatcaaaatttgtttcccttcttcctg

SEQ ID NO: 16735 - DNA, 80 bp, synthetic construct
  source 1..80: mol_type = other DNA
ccaaagtgttgggattagagacgggagccactgcgcctggcttctttttttcttgagatagggtttcactctgttaccca

SEQ ID NO: 16736 - DNA, 80 bp, synthetic construct
  source 1..80: mol_type = other DNA
tgcattctaaactagtccactcatctaccaaagccctgtgaaggacatttttagcagttttagcagttttctggtcaaaa

SEQ ID NO: 16737 - DNA, 80 bp, synthetic construct
  source 1..80: mol_type = other DNA
ttcgccaatactctctctctcttctttttttgagacagggtcttgttctgttgcccaggctggggtgcagtggcatgatc

SEQ ID NO: 16738 - DNA, 80 bp, synthetic construct
  source 1..80: mol_type = other DNA
ggtggtgtctggacacatagctctctctggacaggtaacatgcacaagtaattagaatccagagttgagttcagagttat

SEQ ID NO: 16739 - DNA, 80 bp, synthetic construct
  source 1..80: mol_type = other DNA
tggtgattcttgtcttgagactatcttgagacttgtcatgggaattgtccacccggattgaaaggaagctgtgccttttg

SEQ ID NO: 16740 - DNA, 80 bp, synthetic construct
  source 1..80: mol_type = other DNA
tattataggagatctctggaagattgcagggtctcttatccctcaataaggggcaaggcaagccgggcgcagtggctcac

SEQ ID NO: 16741 - DNA, 80 bp, synthetic construct
  source 1..80: mol_type = other DNA
ccggcaggggcgctgagtcatggtagagggcagagtggagagtggacaggagaccctaagcttgtccagtcagaaaagca

SEQ ID NO: 16742 - DNA, 80 bp, synthetic construct
  source 1..80: mol_type = other DNA
tctctcagcaccagttctccccacttcagcccctccctctgcctggaattaaaacctggctttgtcttagggaaggacag

SEQ ID NO: 16743 - DNA, 80 bp, synthetic construct
  source 1..80: mol_type = other DNA
tcccagactgtcttactgggtctctctgtgttattctctgcagtgtctgtgtgtatcgtgccattttctatgttttgcac

SEQ ID NO: 16744 - DNA, 80 bp, synthetic construct
  source 1..80: mol_type = other DNA
ataataataataggggctgggcgcggtggctcatgactgtaatcccagcattttgggaggtggaggcgggtggatcacct

SEQ ID NO: 16745 - DNA, 80 bp, synthetic construct
  source 1..80: mol_type = other DNA
caagtgccaactctcatttctaccttattcttttcctctctgttcccctccccaccccctctcttccctctttctgagat

SEQ ID NO: 16746 - DNA, 80 bp, synthetic construct
  source 1..80: mol_type = other DNA
ccacaaaggttcttcctcacttccctctctgctcgtggtttttctcatctgcagggtgtgtcttagtcctttaatctcct

SEQ ID NO: 16747 - DNA, 80 bp, synthetic construct
  source 1..80: mol_type = other DNA
aaaacttctgtgctcatcagcccataagctcgcagagcacagggatcatgcatctatgttttcctcagtcagtgtctgcc

SEQ ID NO: 16748 - DNA, 80 bp, synthetic construct
  source 1..80: mol_type = other DNA
caaatctagccttccctatccctcttcacagtgaattgctgggcctcttggagtttaggacttttgtggtagaagaaaaa

SEQ ID NO: 16749 - DNA, 80 bp, synthetic construct
  source 1..80: mol_type = other DNA
cacatgtgtaaaagggactaggagaggtgaccagtacctttggggctcagatcgagaagtgctagggacatgtgggccat

SEQ ID NO: 16750 - DNA, 80 bp, synthetic construct
  source 1..80: mol_type = other DNA
tcacctgtcctagagtcattttacccactgaggtcacatcttatcctaatttggctgccaatgggatctaccacagtgaa

SEQ ID NO: 16751 - DNA, 80 bp, synthetic construct
  source 1..80: mol_type = other DNA
caacaactacttgtgaggctgaggcaggaaaatcatttgaacccaggatcagaggttgtggtgaactgagattgcaccat

SEQ ID NO: 16752 - DNA, 80 bp, synthetic construct
  source 1..80: mol_type = other DNA
agcctgtgcttccttgccctgtttttctttataaatagagccatgttctcctctctctctctctcttttttttttttttt

SEQ ID NO: 16753 - DNA, 80 bp, synthetic construct
  source 1..80: mol_type = other DNA
cttcagcagtactgatctttccaaagaccccagaacacacatgccttcatacctctgtgcctgtacatgcttgtttctgc

SEQ ID NO: 16754 - DNA, 80 bp, synthetic construct
  source 1..80: mol_type = other DNA
tggtttctgtgtccttcctccaacccttccaggagctgcgtgagaccaagcgccgtcatgagacccgactggtggagatt

SEQ ID NO: 16755 - DNA, 80 bp, synthetic construct
  source 1..80: mol_type = other DNA
tttctgtacactcttacctcaccttcacttctcagggctttggttttcccattcgaaaatggaggctgttcttaatctcc

SEQ ID NO: 16756 - DNA, 80 bp, synthetic construct
  source 1..80: mol_type = other DNA
ctttgagttgtcaggaagatgaaagataaggtatccgtgtgcctggtgctgcgtatgtgtccacagatcatggctattat

SEQ ID NO: 16757 - DNA, 80 bp, synthetic construct
  source 1..80: mol_type = other DNA
ccagtaggcaaaccaaaagatgcttcctcaacagcacaaggggtggaagttagacagtgaggattgttaaaggcagagcc

SEQ ID NO: 16758 - DNA, 80 bp, synthetic construct
  source 1..80: mol_type = other DNA
ccgacaaggcatctgccagcggctcaggagcccaggtgggcggacccatctcctctggctcttctgcctccagtgtcacg

SEQ ID NO: 16759 - DNA, 80 bp, synthetic construct
  source 1..80: mol_type = other DNA
aaaacacaagcaaaaaaaaaaaaaagcatctatctcatctatctcaatcctaatttctcctcccttccttttccctgctt

SEQ ID NO: 16760 - DNA, 80 bp, synthetic construct
  source 1..80: mol_type = other DNA
ggtggaggggtgtggcagtggttttggcaaacgctaaagagcccttgcctccccatttcccatctgcaccccttctctcc

SEQ ID NO: 16761 - DNA, 80 bp, synthetic construct
  source 1..80: mol_type = other DNA
gccaccatttccttaagaaactttttctgattagccatggcagaaaacagttggaaaaggcaagtgttcataaggaaaga

SEQ ID NO: 16762 - DNA, 80 bp, synthetic construct
  source 1..80: mol_type = other DNA
tagcagtaaatctagatggcagggcttgtttgtgtgtctgaggtcatgatgctgatcaaatgggacagactcacacacat

SEQ ID NO: 16763 - DNA, 80 bp, synthetic construct
  source 1..80: mol_type = other DNA
cactgggagaatctaatttggattgggaagttagggaaggcttcttacagaaagtgacatttaagctgaatctgtaggtg

SEQ ID NO: 16764 - DNA, 80 bp, synthetic construct
  source 1..80: mol_type = other DNA
ctgaggctgctgactggcttcaccaacatgttatatttcttaatttcactggcgcttcactaactgccttataatccttt

SEQ ID NO: 16765 - DNA, 80 bp, synthetic construct
  source 1..80: mol_type = other DNA
cctgattgacatcatcacctgaatgcagtcccagcatcctaagacccacacatccaaaagtcagctgatcacgggtcaca

SEQ ID NO: 16766 - DNA, 80 bp, synthetic construct
  source 1..80: mol_type = other DNA
actgcatgaaggctcttactctgagccaagtacagtgggaatttgataaacaattgtggaattgactacctagcaaaggg

SEQ ID NO: 16767 - DNA, 80 bp, synthetic construct
  source 1..80: mol_type = other DNA
gacagatgcctatgaggtaaacacattacccaggaactcttgctgtcaaattatccaccaaatcctcctcctttttctat

SEQ ID NO: 16768 - DNA, 80 bp, synthetic construct
  source 1..80: mol_type = other DNA
cttaacttctttcctgcccattactgccatctgggaatgcagacccagggttgccaaatcatctttgtttcctttttttt

SEQ ID NO: 16769 - DNA, 80 bp, synthetic construct
  source 1..80: mol_type = other DNA
ttataaaactggggcagtactcctacctaccctgcctagccttgaatgctcaataatcatttatggtttaattaggatca

SEQ ID NO: 16770 - DNA, 80 bp, synthetic construct
  source 1..80: mol_type = other DNA
tctcttcagagaatgtatatctccttggttctataccgagaaaatagcagcccctaacctcctggcctgtaggaagtcct

SEQ ID NO: 16771 - DNA, 80 bp, synthetic construct
  source 1..80: mol_type = other DNA
aaggattctggtttcttctgtggccttttcttttggctcttgactctggtctttgagaaaagtcttaatcatcaactctg

SEQ ID NO: 16772 - DNA, 80 bp, synthetic construct
  source 1..80: mol_type = other DNA
tggaaggagagttggacacagtttctgcagtaacaggaatttaattgtcaaagaaaggcccacgtggttttttttttttt

SEQ ID NO: 16773 - DNA, 80 bp, synthetic construct
  source 1..80: mol_type = other DNA
gcagtacattctgtgaaatactatataaccattaaaaaatgtataaatgtggccacgcatgatcacacctgtaaccccag

SEQ ID NO: 16774 - DNA, 80 bp, synthetic construct
  source 1..80: mol_type = other DNA
cagctactcgggagactaaggcaggagaattgcttgaatctgggaggtggacgttgcgacgagccaagatcatgccactc

SEQ ID NO: 16775 - DNA, 80 bp, synthetic construct
  source 1..80: mol_type = other DNA
gatgccttaaaagctttacctgtggttcttctacgcattgatttagtgaacttttaaacatttcttagacttcccaataa

SEQ ID NO: 16776 - DNA, 80 bp, synthetic construct
  source 1..80: mol_type = other DNA
aaacactgggattataggcgtgagccaccatgcccagtccataggtaggacttcagcttgcctcttttttttttgagagt

SEQ ID NO: 16777 - DNA, 80 bp, synthetic construct
  source 1..80: mol_type = other DNA
ctacaggacggtccctgcaccaaagaattactgagccccagtgtcaacagttgagaaactctgctctaaagtagccaact

SEQ ID NO: 16778 - DNA, 80 bp, synthetic construct
  source 1..80: mol_type = other DNA
atttttacaactctcatgtgaattccctttgaggtggaaaatggaggctagagccagatacagttctgactaatactgca

SEQ ID NO: 16779 - DNA, 80 bp, synthetic construct
  source 1..80: mol_type = other DNA
ctataaacatctatacgtgttctatattggccactagccacagttagttgtggagtacttgaaatgtgtcttgtgtgact

SEQ ID NO: 16780 - DNA, 80 bp, synthetic construct
  source 1..80: mol_type = other DNA
tttaattggaattaggtgtggcttgggtgttgggatttttttaaaacaccccccaagtaattttagttgtgcagcaagga

SEQ ID NO: 16781 - DNA, 80 bp, synthetic construct
  source 1..80: mol_type = other DNA
gcgttcggcacgattctatcttaggagctgggaaagggagtggataaccaggtgactctttttctttcttttaaaaaatg

SEQ ID NO: 16782 - DNA, 80 bp, synthetic construct
  source 1..80: mol_type = other DNA
accctttctggtgcacttcggaagaccccggactgatgatagggctctcttgatttcacctaaagcaagactgtaacctc

SEQ ID NO: 16783 - DNA, 80 bp, synthetic construct
  source 1..80: mol_type = other DNA
gcctggaatctagtgggaatttggtgttttgacatgaatgctctctgactttgtttttgccctttggctgtgtacctagt

SEQ ID NO: 16784 - DNA, 80 bp, synthetic construct
  source 1..80: mol_type = other DNA
tgccagttagctcgaaattattattttcttccataagtgtctgatgtaccaagcaagttgcttcctcacctggcagatta

SEQ ID NO: 16785 - DNA, 80 bp, synthetic construct
  source 1..80: mol_type = other DNA
gcagattgcatccattttccttgctttgcctggtttctagtaccccgattccatcatttttcacttggcatttctttcat

SEQ ID NO: 16786 - DNA, 80 bp, synthetic construct
  source 1..80: mol_type = other DNA
gacaaattcaaatttgagagctgcgatgactgggtggagggaaagggggagaaatacatgaaaaggttgtattacgtttc

SEQ ID NO: 16787 - DNA, 80 bp, synthetic construct
  source 1..80: mol_type = other DNA
taccatgcctggccaggagaaggatttttgagcagaattcaaaccaatgatttttgtcttccctgtgccgggtatttgaa

SEQ ID NO: 16788 - DNA, 80 bp, synthetic construct
  source 1..80: mol_type = other DNA
ccctctagaggtttaaggactgtattggagtggactcacctgttcctatccttgtttgatctattacaatttggtggcct

SEQ ID NO: 16789 - DNA, 80 bp, synthetic construct
  source 1..80: mol_type = other DNA
agtgagagcctgaattgatttaaccagtttttagagcaatttgacagtatgtcaaaggtgcccttgcgtaggacccagta

SEQ ID NO: 16790 - DNA, 80 bp, synthetic construct
  source 1..80: mol_type = other DNA
ctcaaaaaaagaagcaaaaggtatagtagacacatatatactatgatggaatgatagccaagctgagatactgttttagt

SEQ ID NO: 16791 - DNA, 80 bp, synthetic construct
  source 1..80: mol_type = other DNA
cattgttaataaggctgataatagtaaccagagttcattgaggactgtcatgctcaatggtaaggcagctatagttgaga

SEQ ID NO: 16792 - DNA, 80 bp, synthetic construct
  source 1..80: mol_type = other DNA
taagtagctgggacaacaagcgcgtgccaccataaccagctaatgtttaaaaaaaaaatttgtagagatgggatctgtct

SEQ ID NO: 16793 - DNA, 80 bp, synthetic construct
  source 1..80: mol_type = other DNA
tgattcttaattctctgtatgtttttttcttctgtctctctttttctatccccatcctgtccttctttagcggcttggaa

SEQ ID NO: 16794 - DNA, 80 bp, synthetic construct
  source 1..80: mol_type = other DNA
gcatccaccatccgctaattttttaaatttttgtagagacaaagcctcaccacattgcccaggttggtctcaaactcctg

SEQ ID NO: 16795 - DNA, 80 bp, synthetic construct
  source 1..80: mol_type = other DNA
cgcacctggccagccttttaaaaatatgacatcccattagtacatttgattgtctgacttttaagaatactttgaggctg

SEQ ID NO: 16796 - DNA, 80 bp, synthetic construct
  source 1..80: mol_type = other DNA
ttatcagttccctcagagaggaatcttctaaattcctgcttggggtatgaaactggcagccttgtgtgaaatacacagag

SEQ ID NO: 16797 - DNA, 80 bp, synthetic construct
  source 1..80: mol_type = other DNA
gagccatgatctgcagtcaacctaggtaacagagttaagaccctgtttcaaaaataaaagatcactagaatcaacaatca

SEQ ID NO: 16798 - DNA, 80 bp, synthetic construct
  source 1..80: mol_type = other DNA
cctgctgcactgtgtaaacatttagtacctacatttaaatgagttgtttaggcagagctggctaattgcattgagaaggc

SEQ ID NO: 16799 - DNA, 80 bp, synthetic construct
  source 1..80: mol_type = other DNA
taaggtagggataacaatccttatttttttaaggttaaaggagagaacatttataaacagcctggcacatagtaggtact

SEQ ID NO: 16800 - DNA, 80 bp, synthetic construct
  source 1..80: mol_type = other DNA
ctgtctcttttaagcatttgtgactgtgactctctatgggcaggtgttgccttgaagagggaataatctaaacaacagct

SEQ ID NO: 16801 - DNA, 80 bp, synthetic construct
  source 1..80: mol_type = other DNA
taataaactccccggagcagggaagtaatgagaaatgagctactggtagtcttgccttcaatttccaacttaagccatgt

SEQ ID NO: 16802 - DNA, 80 bp, synthetic construct
  source 1..80: mol_type = other DNA
acgttcgtttctgtggggtctcaaatgggaacgcaaaaccgaagtagttagtgagcaaaaagtctgggaacattctctct

SEQ ID NO: 16803 - DNA, 80 bp, synthetic construct
  source 1..80: mol_type = other DNA
tgacactgaattaaagtaagcagagcctctgtcccattttcccggcctgggcccactgggctttaggtgtcagtattaag

SEQ ID NO: 16804 - DNA, 80 bp, synthetic construct
  source 1..80: mol_type = other DNA
gaatcccatttttagtgaagagttgactacaaaaaattcatagaaagtatctaggatgtgaagttacaggtgatgtttgc

SEQ ID NO: 16805 - DNA, 80 bp, synthetic construct
  source 1..80: mol_type = other DNA
atcaaaaggttaagggttaaataataaaaatctctccaaacagtagctgcataccatgggctgatatagaaagctctgca

SEQ ID NO: 16806 - DNA, 80 bp, synthetic construct
  source 1..80: mol_type = other DNA
aattaaaaacagttaaccagacatggtggcacatgcctgtagtcctagctactcaggaggctgaggtagaaggatcactt

SEQ ID NO: 16807 - DNA, 80 bp, synthetic construct
  source 1..80: mol_type = other DNA
ggatatctggaagctccttgtagagcttttgaactttgagcttctatgctttaataatataggaagtcactgaaacagtc

SEQ ID NO: 16808 - DNA, 80 bp, synthetic construct
  source 1..80: mol_type = other DNA
cacagggattgtgctgagagtagtctataaattcttaaagcagtttatcagtatctattaaaagccttaacaatgtttat

SEQ ID NO: 16809 - DNA, 80 bp, synthetic construct
  source 1..80: mol_type = other DNA
ttttatttttagaaatcttttcccccgtttttcttttttgctattttctccaaaatgggaaaggttattgataccataaa

SEQ ID NO: 16810 - DNA, 80 bp, synthetic construct
  source 1..80: mol_type = other DNA
cccacttgataactgtgtggcccacagaattctttgaccatagtgattggacttcagagtgaagaagtccagttgcttgt

SEQ ID NO: 16811 - DNA, 80 bp, synthetic construct
  source 1..80: mol_type = other DNA
aggcctactcagagccagatctcaagagcagaggtgtcaccttcagcacctgcatagcgctaggttgtatgggaaaaagc

SEQ ID NO: 16812 - DNA, 80 bp, synthetic construct
  source 1..80: mol_type = other DNA
tgctgggattatgggtgtgagccactgtgctcagccagtggggctttaaataacactgctgggaaaaccatgcctcctct

SEQ ID NO: 16813 - DNA, 80 bp, synthetic construct
  source 1..80: mol_type = other DNA
gatgccatctcttcagagaatgagatccccagaatgctctgcctcagtgccttgttcatattctttgtagtactttactc

SEQ ID NO: 16814 - DNA, 80 bp, synthetic construct
  source 1..80: mol_type = other DNA
taaccctgtcccaaatttgacatgtatcatgcctgtggatgtttttgtgctattgctacatacatatgtatctataagca

SEQ ID NO: 16815 - DNA, 80 bp, synthetic construct
  source 1..80: mol_type = other DNA
caaacccaaacacattccacaaaccccacctctcaacatagccatcttggggatcagatttcaacattaatttttgtggg

SEQ ID NO: 16816 - DNA, 80 bp, synthetic construct
  source 1..80: mol_type = other DNA
gataaccaattgaccagcaccatttactgaagtctacaacctttcctgctgatgtgtatctcatgtgtaccacaccctca

SEQ ID NO: 16817 - DNA, 80 bp, synthetic construct
  source 1..80: mol_type = other DNA
tgatatgtttcattaatattctgatgttaagccttatattcccaggataagcccttcttggtcatagtagaggcagtgtg

SEQ ID NO: 16818 - DNA, 80 bp, synthetic construct
  source 1..80: mol_type = other DNA
cacagtgggagaatcctgaatattggcctaggattatgccgtgtcaaatctaaagtttcttttgggtttctgtgatgtac

SEQ ID NO: 16819 - DNA, 80 bp, synthetic construct
  source 1..80: mol_type = other DNA
cagagcaagactctctcaaaaaaaaaaaaaaaaaaaaaaaaacagtttgagatagtattgtacatactgttttctcacat

SEQ ID NO: 16820 - DNA, 80 bp, synthetic construct
  source 1..80: mol_type = other DNA
tcatgccaaggctgggctttgggtcccaccaagatgagttctctgtaagactgtggtggagttgcaccaggaggtgcctc

SEQ ID NO: 16821 - DNA, 80 bp, synthetic construct
  source 1..80: mol_type = other DNA
gatgtctcttatttgtgatctgtaccaagaaaatgcccaatggtaggagctactaaaggttgctcagggatcgtcagtct

SEQ ID NO: 16822 - DNA, 80 bp, synthetic construct
  source 1..80: mol_type = other DNA
cgcacctttggagagatttattatgtgactccttgagtagaagacatttatgtagcattcaaggtggatgaccccaaata

SEQ ID NO: 16823 - DNA, 80 bp, synthetic construct
  source 1..80: mol_type = other DNA
aattaggattgttgccaaaggggtaaatggatgctagagaggcaaatggccattgctctcaaacagtgattactgggata

SEQ ID NO: 16824 - DNA, 80 bp, synthetic construct
  source 1..80: mol_type = other DNA
cactgtcgtacatgcattctgttgttaaccaaaacatgatgtggcgtgactatatacaaaactctaccaccaattagccc

SEQ ID NO: 16825 - DNA, 80 bp, synthetic construct
  source 1..80: mol_type = other DNA
cttaatggaaactttcccttgccctctgctccccctgaggaaatacagcgcttacaaaataacaataagaaaaatgcatg

SEQ ID NO: 16826 - DNA, 80 bp, synthetic construct
  source 1..80: mol_type = other DNA
aagatagtacacagagttcccacagacccattagtcagttttccctattaacatcttccactaataggtggcatttgcca

SEQ ID NO: 16827 - DNA, 80 bp, synthetic construct
  source 1..80: mol_type = other DNA
atgaaaccccatagcaactaaaaacacaaaaattagcctggtgtggtggcatacacctgtaatctcagctactcgagaag

SEQ ID NO: 16828 - DNA, 80 bp, synthetic construct
  source 1..80: mol_type = other DNA
cctaacctcatctctaagcttcttcaaggcaaggcccagcctttataagctgcctagattgccccagtagccagcacaat

SEQ ID NO: 16829 - DNA, 80 bp, synthetic construct
  source 1..80: mol_type = other DNA
attttttgaatcagactttgcatggctcattccatactcctgggttcctgcagaagtaggctttctggagagaaggcaca

SEQ ID NO: 16830 - DNA, 80 bp, synthetic construct
  source 1..80: mol_type = other DNA
tagcattcaacatacatttacctcccctttcaaggattttaatatactaaactcttattacatcagcgaaaaggagagtt

SEQ ID NO: 16831 - DNA, 80 bp, synthetic construct
  source 1..80: mol_type = other DNA
aaattctctattcgctatctagcagtgtagacattgacaaactcttttttcctacctgggtttcctcttcaggctagaga

SEQ ID NO: 16832 - DNA, 80 bp, synthetic construct
  source 1..80: mol_type = other DNA
cagagacaggactgtgaacccagccagtctgctttcagaggccaagcataaaacacacatgatactatcagaaacagaat

SEQ ID NO: 16833 - DNA, 80 bp, synthetic construct
  source 1..80: mol_type = other DNA
atggcttcacccacagctcacttctaacaccaatactaagcaaaccaactgtatacttaagcccagatatacaaagagat

SEQ ID NO: 16834 - DNA, 80 bp, synthetic construct
  source 1..80: mol_type = other DNA
tagatctagaaatgttgccacagctaaggctacatccctgttgaacctcaaaagcctcatccaatgaacaaagccatcac

SEQ ID NO: 16835 - DNA, 80 bp, synthetic construct
  source 1..80: mol_type = other DNA
cccttaaaaaggaggagggttcattctgattactccaaaccggtcatcttctcaaagtagagcagttcagattcacaaag

SEQ ID NO: 16836 - DNA, 80 bp, synthetic construct
  source 1..80: mol_type = other DNA
gtagttggtctgcagttgggcacttgacctcgccttctccagtgcacggactaaaaggcaaccaagggagtgtgttactg

SEQ ID NO: 16837 - DNA, 80 bp, synthetic construct
  source 1..80: mol_type = other DNA
cctgaacacctggagtctctggtacttacacagcacattccactccaaggacctcaaagctcttttcagacacctgatgc

SEQ ID NO: 16838 - DNA, 80 bp, synthetic construct
  source 1..80: mol_type = other DNA
agagtagctgggattacaagtacatgccacgttgcctggctaatttttacatttttaataaagatggggtttcaccatgt

SEQ ID NO: 16839 - DNA, 80 bp, synthetic construct
  source 1..80: mol_type = other DNA
ccttgctagagtaagttcgtaagtcaataacatggatgtcatgttactgtgcccctagacatcaaacttgtctgggagat

SEQ ID NO: 16840 - DNA, 80 bp, synthetic construct
  source 1..80: mol_type = other DNA
ggaaaaagtgagatgcgtttctttagttgagtcagtcagcttatgcagaaggaatgagagttcctagcctagcaatggat

SEQ ID NO: 16841 - DNA, 80 bp, synthetic construct
  source 1..80: mol_type = other DNA
catagtgtcttgggaacaacaggagtccaaagaaggctggattggtttaaactcagaacgaggccttcagaatgctaagc

SEQ ID NO: 16842 - DNA, 80 bp, synthetic construct
  source 1..80: mol_type = other DNA
ggaactaatttaaaaagatcaatagaattgcagggacactgttgtcatggaggggaaagttggaggaggaaaaggactac

SEQ ID NO: 16843 - DNA, 80 bp, synthetic construct
  source 1..80: mol_type = other DNA
cattgaaggaaggttatttttctttctattttaaagacaggtgagaactaaacaggcttctagcagaaacacattgaaag

SEQ ID NO: 16844 - DNA, 80 bp, synthetic construct
  source 1..80: mol_type = other DNA
tggatccacattaaactagttcattcaaaaatggaaccccatcaatgccagcaaaggaggctggaaggttgtaaggccag

SEQ ID NO: 16845 - DNA, 80 bp, synthetic construct
  source 1..80: mol_type = other DNA
ttaaaaattgaatgcaaccccaattgcccaaaagaaacatgcctaatgactaaacatgagcacactgtatgacctagcga

SEQ ID NO: 16846 - DNA, 80 bp, synthetic construct
  source 1..80: mol_type = other DNA
ataccatttaattaggtgataagttaatcacagaaattagggagactgaggagaggtcccacaaaaggccacagaggttc

SEQ ID NO: 16847 - DNA, 80 bp, synthetic construct
  source 1..80: mol_type = other DNA
tttcagcaaagagattggcagcattttgcccctacgctagagataagtggaactttgaacttcacagagatgatttaggg

SEQ ID NO: 16848 - DNA, 80 bp, synthetic construct
  source 1..80: mol_type = other DNA
ggacttctgagttaatgctgaaatgagttaagacaaggcacgattggttttgaaatgtgaggacatgagatttgggaggg

SEQ ID NO: 16849 - DNA, 80 bp, synthetic construct
  source 1..80: mol_type = other DNA
ctatgtgcaggcactgagggaagaaatataaccaaaaggagacattctccctgccttcacggtacttattgtagtgtagt

SEQ ID NO: 16850 - DNA, 80 bp, synthetic construct
  source 1..80: mol_type = other DNA
cataagtatggtgagcttagtgccagtgaaccattgtgtaacactccctagtacccaagcaaggacacttaaataatact

SEQ ID NO: 16851 - DNA, 80 bp, synthetic construct
  source 1..80: mol_type = other DNA
gttacagatgggatagtgatcttgagcctgttaacaacactgacaggagcaacagcagtaataactaactgtcaaataac

SEQ ID NO: 16852 - DNA, 80 bp, synthetic construct
  source 1..80: mol_type = other DNA
taaaaaaacgccaggtttagtgagaactgataagtctaagggaccaaaatattctgttcgactcacggcacctatgaaac

SEQ ID NO: 16853 - DNA, 80 bp, synthetic construct
  source 1..80: mol_type = other DNA
agttgtgatcctatgacccacctctcccaatgtattcaaacttaagaatgcctaagaatcatctgactgcttgttataaa

SEQ ID NO: 16854 - DNA, 80 bp, synthetic construct
  source 1..80: mol_type = other DNA
ggaattctcatggaggtctagggtattaatgacctctggaatctttactgttatcccaaacgaactcttggccactcttt

SEQ ID NO: 16855 - DNA, 80 bp, synthetic construct
  source 1..80: mol_type = other DNA
cgacaggaacatccaaagtagctcgatgcatccagctcatgcataagtaaaataaaagttattcagggggacaaagtgtg

SEQ ID NO: 16856 - DNA, 80 bp, synthetic construct
  source 1..80: mol_type = other DNA
ttgaaattctcctgttatttaatcctaaaagtcccagtcattacagaggaagaggagactgggagcacctgtagtcatct

SEQ ID NO: 16857 - DNA, 80 bp, synthetic construct
  source 1..80: mol_type = other DNA
tcccattcactgagctctgaaaggactcaaatggacaagtctctcggttggaggattgtaagtgaacttggctgtagatc

SEQ ID NO: 16858 - DNA, 80 bp, synthetic construct
  source 1..80: mol_type = other DNA
gggtgaagactcccagtgtaaggcatctaatatcctcccccaaatgcaaaactggttttaaaaaacaagcccaaacaatt

SEQ ID NO: 16859 - DNA, 80 bp, synthetic construct
  source 1..80: mol_type = other DNA
tccctaagagaaagacatggatttcaattttccaatacctgtcctgcttgtagctgattgcctggtatacatttccaaca

SEQ ID NO: 16860 - DNA, 80 bp, synthetic construct
  source 1..80: mol_type = other DNA
caaatcagtttcactttctgttagagttagcctaacttcctaactctcttctcagtatcttacatttctcatgtagtaag

SEQ ID NO: 16861 - DNA, 80 bp, synthetic construct
  source 1..80: mol_type = other DNA
tttctcttactgggaagtcagtataatttcaattcaaaggataattctgcaaaggaaggctaaacgatccttaccctcca

SEQ ID NO: 16862 - DNA, 80 bp, synthetic construct
  source 1..80: mol_type = other DNA
atactgacccttcactcctactaacaaaccactggagttcagtagtgctgactttttagaagaggcactgctctccagta

SEQ ID NO: 16863 - DNA, 80 bp, synthetic construct
  source 1..80: mol_type = other DNA
tatttttacacttaacattcaataataagaaagaaaatgccggcggcagaggaagcggagggtggggagtcagcccgaca

SEQ ID NO: 16864 - DNA, 80 bp, synthetic construct
  source 1..80: mol_type = other DNA
gctcgcagcgctggggcagccgagacttgtagttcttgtccctctaacagacggcccgggtagctccagaaaaactacaa

SEQ ID NO: 16865 - DNA, 80 bp, synthetic construct
  source 1..80: mol_type = other DNA
gaggaaactaggatttccaaattctggagcaggactgaagttatttggggcagggagcttggattcgcaagatatggaat

SEQ ID NO: 16866 - DNA, 80 bp, synthetic construct
  source 1..80: mol_type = other DNA
gccgcacctgggccagtggggagagcaaggtgagagcaaggttgccggccagtggctggaactccaggaccctgctctgg

SEQ ID NO: 16867 - DNA, 80 bp, synthetic construct
  source 1..80: mol_type = other DNA
tggaagtcccactgctggatgatggtggttaaacattggagatttgagactgttctgagaaaaaaaaaattaggaggaga

SEQ ID NO: 16868 - DNA, 80 bp, synthetic construct
  source 1..80: mol_type = other DNA
tgaactgattctgcacacagttgacacaaagtgagactggatgggcgataccccccaacacacaaagttctcttctcatc

SEQ ID NO: 16869 - DNA, 80 bp, synthetic construct
  source 1..80: mol_type = other DNA
ggtcaatggaagggttgatggcacacaccatgaacgccacctccatcttgcggtcacagcgcatgtatgatcctttcagg

SEQ ID NO: 16870 - DNA, 80 bp, synthetic construct
  source 1..80: mol_type = other DNA
ggtgcaaagctctttgcaagccctgactcttaagccttttgaggtcaagccccttctctgtctcaaacatttttgaccag

SEQ ID NO: 16871 - DNA, 80 bp, synthetic construct
  source 1..80: mol_type = other DNA
gtttcccaactgcaaagaggaaaataacacctgccgaacctcacaaggcttacagttcttaaaagggttctgtaaaccat

SEQ ID NO: 16872 - DNA, 80 bp, synthetic construct
  source 1..80: mol_type = other DNA
actcagggattggcccttcccttcaggccgaccaggcaggaagcgtgcccgcagtgccttctggaaaatgtagtccgggg

SEQ ID NO: 16873 - DNA, 80 bp, synthetic construct
  source 1..80: mol_type = other DNA
gaagagacccagcaacccacagagttgagaaatttgactggcattcaagctgtccaatcaatagctgccgctgaagggtg

SEQ ID NO: 16874 - DNA, 80 bp, synthetic construct
  source 1..80: mol_type = other DNA
ttcagagggtactgtgttactgttttcttgcttttcattcattccagaaatcatctgttcacatccaaaggcacaattca

SEQ ID NO: 16875 - DNA, 80 bp, synthetic construct
  source 1..80: mol_type = other DNA
actgggcctattattgtactgtgccagaatactgtaaaacaaaactaaacatactagcttggtggcttgtaattaattac

SEQ ID NO: 16876 - DNA, 80 bp, synthetic construct
  source 1..80: mol_type = other DNA
agataactctttctcatgcagcccctgctagaaaatttgttttctctagcagttggtctgtgcttataggctactctttg

SEQ ID NO: 16877 - DNA, 80 bp, synthetic construct
  source 1..80: mol_type = other DNA
atggaagagtcaggacctttctctgttctggaaactaggcttttgcagatgggattttttcactgaaaaattcaacacca

SEQ ID NO: 16878 - DNA, 80 bp, synthetic construct
  source 1..80: mol_type = other DNA
gagtttggaatgcagggtagagatttagggatgaatatttggtagttgtctgcattttaatggtattaaaagccacgaga

SEQ ID NO: 16879 - DNA, 80 bp, synthetic construct
  source 1..80: mol_type = other DNA
attcatagagacagtagagtggtggttgcccagggccggggggagcgaggagaatggaaattattgtttattgggtacag

SEQ ID NO: 16880 - DNA, 80 bp, synthetic construct
  source 1..80: mol_type = other DNA
actgtaaccttgaactcctgggctcaagcaattctgtcatctcagccagctgaagtagtaactgtaggttcacaccacca

SEQ ID NO: 16881 - DNA, 80 bp, synthetic construct
  source 1..80: mol_type = other DNA
ggtgacagagcaagactctgtctcaaaggaggttgcagtgagctgagatctcgccactgcacttcagcctgggtgacaga

SEQ ID NO: 16882 - DNA, 80 bp, synthetic construct
  source 1..80: mol_type = other DNA
atggtaaatgatactgagattgggagactacatggaaaaagacttgttcccttcaacagatagacagcagggaaaaaaga

SEQ ID NO: 16883 - DNA, 80 bp, synthetic construct
  source 1..80: mol_type = other DNA
ggtaaaagaatacatattttaaaaactgtattagtttcctgttgctgtcaaaaaatttccagaaacttagtggcattaaa

SEQ ID NO: 16884 - DNA, 80 bp, synthetic construct
  source 1..80: mol_type = other DNA
gtggttctcagcactttgtatactttgtattaactctgactcctgacagtaactctacagaggttctgctgttacccagt

SEQ ID NO: 16885 - DNA, 80 bp, synthetic construct
  source 1..80: mol_type = other DNA
tctatttggagtgattcctttacccatttctgaaggcaagttttaaaaattactagaagacacttcattgagaatattat

SEQ ID NO: 16886 - DNA, 80 bp, synthetic construct
  source 1..80: mol_type = other DNA
gtagctgctggctatctgttatgctggtacagttttcagaaactgatgaatggcctttgaacagaacaaaaatgagattc

SEQ ID NO: 16887 - DNA, 80 bp, synthetic construct
  source 1..80: mol_type = other DNA
tttcatttttgtttttgccttcctggatggtctttcctgctgtctccacctgaaactattcctctctaaagaacagatga

SEQ ID NO: 16888 - DNA, 80 bp, synthetic construct
  source 1..80: mol_type = other DNA
atctctctactggatattaatttgttatattttctcattagagcaagttactcagatggaaaactgaaagcccctcctaa

SEQ ID NO: 16889 - DNA, 80 bp, synthetic construct
  source 1..80: mol_type = other DNA
tgcctaatcctggatgtgacgagccaggcaggaggcagaaaagaatgtgtgttttgcaatacatgttaagagacatcttg

SEQ ID NO: 16890 - DNA, 80 bp, synthetic construct
  source 1..80: mol_type = other DNA
tgaagaatatgggaaaattttggaagttgttggcaggtacagtccaaaatctgggagtgggtctctgagatttgtcatca

SEQ ID NO: 16891 - DNA, 80 bp, synthetic construct
  source 1..80: mol_type = other DNA
tgctggtacagatggtacaggtggcttcagtataggctctccgaacccacatatcattgattatgatagggatatgttaa

SEQ ID NO: 16892 - DNA, 80 bp, synthetic construct
  source 1..80: mol_type = other DNA
tggcccatttttcagtatttctaaaaaaaatctaaagtgggtcaaacatttcaccttaatagaatgacaggtttgtacat

SEQ ID NO: 16893 - DNA, 80 bp, synthetic construct
  source 1..80: mol_type = other DNA
gagtctgtgttttgattcagtcacctttagcatttttatttccatgaagtttctgctggtttatttttctgtgggtaaaa

SEQ ID NO: 16894 - DNA, 80 bp, synthetic construct
  source 1..80: mol_type = other DNA
gtaatcaacactttctaggtgtatgtaatctcctagattctgtggcgtgaatcatgtgttctttcaaggtcttagtcttg

SEQ ID NO: 16895 - DNA, 80 bp, synthetic construct
  source 1..80: mol_type = other DNA
agggactgtacaagattagaaatcctctatagcagcatttcccaaagcaggcttccagaacactagcctcatgaggcatt

SEQ ID NO: 16896 - DNA, 80 bp, synthetic construct
  source 1..80: mol_type = other DNA
tcaagtttgagcaaaataaggtctcagagcttggattcattgttctgttccagcaattagagcagtacctggcacatagc

SEQ ID NO: 16897 - DNA, 80 bp, synthetic construct
  source 1..80: mol_type = other DNA
acggaaaaggggtaccttaggtataggcattgtcattaaagaaattgctaagatacttgagattttcctgtttaaggaat

SEQ ID NO: 16898 - DNA, 80 bp, synthetic construct
  source 1..80: mol_type = other DNA
acttttcctgttggaaataaaaagatttgacgtatccttgtctacagcaacacaggacaacagataatcagcaggtcatc

SEQ ID NO: 16899 - DNA, 80 bp, synthetic construct
  source 1..80: mol_type = other DNA
aagagttggctcactatttagcacacacacacgtctataatagtgctggccacttggggttggaattagtttatttatca

SEQ ID NO: 16900 - DNA, 80 bp, synthetic construct
  source 1..80: mol_type = other DNA
tagaggctctaaatattacttctgctggggtcagttgggaagccacaacagctactgttcatcttccataaaagacaatc

SEQ ID NO: 16901 - DNA, 80 bp, synthetic construct
  source 1..80: mol_type = other DNA
agttttagattaagtgttttcatgttttcccttgcaaagtaataaactggtcaagttatcaccttgttccatctccatat

SEQ ID NO: 16902 - DNA, 80 bp, synthetic construct
  source 1..80: mol_type = other DNA
cttgcccaaggtcacacaaagaattccactagttctaaaatgacagtaattacagttaacatacattgtatgtggcagat

SEQ ID NO: 16903 - DNA, 80 bp, synthetic construct
  source 1..80: mol_type = other DNA
tgcccggccagacgtgagagcccagatttttgcctgttatttaggaactttctttgcaagtattacctggatagttttaa

SEQ ID NO: 16904 - DNA, 80 bp, synthetic construct
  source 1..80: mol_type = other DNA
actatgatacacaggaaatgcccagtaactcttagttggtttgatatctgttcccattgctcacttaagctcagtgcccc

SEQ ID NO: 16905 - DNA, 80 bp, synthetic construct
  source 1..80: mol_type = other DNA
gagttgaggctgcagaattcaggccaaatagagaggttttcatcaggatattaaagagtttagatttcaatttggtggga

SEQ ID NO: 16906 - DNA, 80 bp, synthetic construct
  source 1..80: mol_type = other DNA
aacaacaatcaactcaaaagatttctataaccacttgtgtgggggtttctccccacacactaaacaagcagtcagttcca

SEQ ID NO: 16907 - DNA, 80 bp, synthetic construct
  source 1..80: mol_type = other DNA
tggtgacagcctgattccctcattgtaaacttatccatcaacatgtagcttaatcgtttcaccttttgtgatgaccatta

SEQ ID NO: 16908 - DNA, 80 bp, synthetic construct
  source 1..80: mol_type = other DNA
tacttttaggcttttccagtggtcagagctaggaaatatgtatatttaaaaatggacagttgaatggttgttgccaggag

SEQ ID NO: 16909 - DNA, 80 bp, synthetic construct
  source 1..80: mol_type = other DNA
tacttccagcaaccccaggtatggccttttgggaaaagtacagcctacctcctttattctgtaataaaactgccttctaa

SEQ ID NO: 16910 - DNA, 80 bp, synthetic construct
  source 1..80: mol_type = other DNA
tagatattctttatttaaagtgtacttgtatgaaacctggagctcaaggtgaaggaatttgcccaaggctgcacttgcac

SEQ ID NO: 16911 - DNA, 80 bp, synthetic construct
  source 1..80: mol_type = other DNA
tgccagtggcctttgtccattgagtctgaagttctttctcctctcatttccccatcattctattatgctaccttgtttta

SEQ ID NO: 16912 - DNA, 80 bp, synthetic construct
  source 1..80: mol_type = other DNA
agttttgctgggcaagctcctcttcctttactaacccacaatagcatcagcttaaagacaatttttgattgggagaaaag

SEQ ID NO: 16913 - DNA, 80 bp, synthetic construct
  source 1..80: mol_type = other DNA
tttatgagtgagactatgagtaatggtctaagtgtagacatcattgtccagggctccagtaggcagctctgtacttgaga

SEQ ID NO: 16914 - DNA, 80 bp, synthetic construct
  source 1..80: mol_type = other DNA
ggcttctttaattttgtcggtctcagtcaccatttgtctaagcaaattcaggcaggcttcaccttgcctttctacatttg

SEQ ID NO: 16915 - DNA, 80 bp, synthetic construct
  source 1..80: mol_type = other DNA
attctctagttgaatgctgtatagggatttgactgaggctcagatttggtgaggaagaccactaaccttaacagaccaac

SEQ ID NO: 16916 - DNA, 80 bp, synthetic construct
  source 1..80: mol_type = other DNA
aatacccttaacgttttttgcctccagatatccacacttaatttcattttcttgctctttggtgaacagtcctgggtctg

SEQ ID NO: 16917 - DNA, 80 bp, synthetic construct
  source 1..80: mol_type = other DNA
cttattgctgtgctatgacccatgccccgttttctccaacctctcttgtcctcactcttcctttttgctggtgatatttt

SEQ ID NO: 16918 - DNA, 80 bp, synthetic construct
  source 1..80: mol_type = other DNA
attgctgggtcataaaatgacagattgttttccagaggggtcatattgatttaaattatcaccaacaattatattgtcag

SEQ ID NO: 16919 - DNA, 80 bp, synthetic construct
  source 1..80: mol_type = other DNA
tctagcccacctggaattgattttcacagatactacattttttactagttatagattggccccttcgtagagcaagtccg

SEQ ID NO: 16920 - DNA, 80 bp, synthetic construct
  source 1..80: mol_type = other DNA
aactgaaaggaagagcttaatgagaaaggcatattaaaagccagtataggttgaaagctaggcctcttgtgcaagttagc

SEQ ID NO: 16921 - DNA, 80 bp, synthetic construct
  source 1..80: mol_type = other DNA
atgagcatagaaagtagtttcttgagaaagaacttaattctggtgaagatgctgttaatattgttgaaatggcaacaaag

SEQ ID NO: 16922 - DNA, 80 bp, synthetic construct
  source 1..80: mol_type = other DNA
agtgtttttaaattaagctacctacgttgattttagacataatgctatttgcacacttaatagattacagtgtggtgtaa

SEQ ID NO: 16923 - DNA, 80 bp, synthetic construct
  source 1..80: mol_type = other DNA
gtattttgtcttcaaagtcttcagatattgtcctcttcctgccctctctccgactccttctggaacatgagttatgtatt

SEQ ID NO: 16924 - DNA, 80 bp, synthetic construct
  source 1..80: mol_type = other DNA
ctcctattagactctccatttcaaaccattccatgattttgtcctccttttgccaccttccgagcctgtaaaaactaatg

SEQ ID NO: 16925 - DNA, 80 bp, synthetic construct
  source 1..80: mol_type = other DNA
tagcatctctgttaaatctgttctcaaataggtaatgcatatgggaggatgctgccaccttgcatctactagacatcacc

SEQ ID NO: 16926 - DNA, 80 bp, synthetic construct
  source 1..80: mol_type = other DNA
gtgggggaagttaagcagacaaaaagtttttaaatcttactgcagagtgtcaggaaccttttatagcaccagacaggtag

SEQ ID NO: 16927 - DNA, 80 bp, synthetic construct
  source 1..80: mol_type = other DNA
atctactgacacttaatacttggaaagggataaaaataaacattgtctaaagccgtggtccaaacacaacccctgccaac

SEQ ID NO: 16928 - DNA, 80 bp, synthetic construct
  source 1..80: mol_type = other DNA
aaaaaacttcaatttcctattgtttatttgctagtatatagaaatacatatagttttgtaccttgatgctgtatcttgca

SEQ ID NO: 16929 - DNA, 80 bp, synthetic construct
  source 1..80: mol_type = other DNA
ggcgaacatggtgaaactctgtctctattaaaaatacaaaatatagttgggtgtggcagttcacgtctgtaatcccagct

SEQ ID NO: 16930 - DNA, 80 bp, synthetic construct
  source 1..80: mol_type = other DNA
tatctatggatctcttggtgacataacctctctcattcctaatattggtaatttcaggcttttctttttaacttggtcag

SEQ ID NO: 16931 - DNA, 80 bp, synthetic construct
  source 1..80: mol_type = other DNA
aggtatatcaagttgatagtgatgcccaagtctcctgtatctttactgattttctgcctgttctgttattgagaaagggg

SEQ ID NO: 16932 - DNA, 80 bp, synthetic construct
  source 1..80: mol_type = other DNA
tggtcccaaagaaggacttgctgaatacattgttgagtttctgaagaagaaggctgagatgcttgcagactatttctctt

SEQ ID NO: 16933 - DNA, 80 bp, synthetic construct
  source 1..80: mol_type = other DNA
aggcctgggaaagcactggagaaatgggatttgtttaaactatgacagcattatttcttgttcccttgtcctttttcctg

SEQ ID NO: 16934 - DNA, 80 bp, synthetic construct
  source 1..80: mol_type = other DNA
atctttaggagatgaaacttgcccatctctaaaatttcgggatttctttgtacccaacaaggttcaaacacaacagtcag

SEQ ID NO: 16935 - DNA, 80 bp, synthetic construct
  source 1..80: mol_type = other DNA
tcctacagttgccatccaaatatcagtcaggatcagacatgatgttagctcctgctacaataaaaccattttctccctga

SEQ ID NO: 16936 - DNA, 80 bp, synthetic construct
  source 1..80: mol_type = other DNA
aagctgattgggtgtggtcgccgtggccggacgccgctcgggggacgtgggaggggaggcgggaaacagcttagtgggtg

SEQ ID NO: 16937 - DNA, 80 bp, synthetic construct
  source 1..80: mol_type = other DNA
gaatctcttattaacaaacagcagccaggagtgagatttaaaatagactgggggtttaggagacccttttatgacacgta

SEQ ID NO: 16938 - DNA, 80 bp, synthetic construct
  source 1..80: mol_type = other DNA
gggttagatgaccaaaggcttttagtgtggtgttgagctgttgaaattttatgctgtagccaatgaaaagtctgaaatgt

SEQ ID NO: 16939 - DNA, 80 bp, synthetic construct
  source 1..80: mol_type = other DNA
aaaattaaaaagttacctttagaacttacgatttttatgtgtagactccatataagcagagggtctatgcttattcacta

SEQ ID NO: 16940 - DNA, 80 bp, synthetic construct
  source 1..80: mol_type = other DNA
actgtgttggccaggatggtcttgatctcttgacctcgtgatcttcccgcctccgccttccaaagagctgggattaccta

SEQ ID NO: 16941 - DNA, 80 bp, synthetic construct
  source 1..80: mol_type = other DNA
cagacagcttgcaccatgtgcctggaaaagctgtagacacttaacgccatctcatgaaagcaaccaggcagtgtgctgta

SEQ ID NO: 16942 - DNA, 80 bp, synthetic construct
  source 1..80: mol_type = other DNA
tgagacactttaatagcaattagcatgtggtttttaaaaagttgcagtttggctggtcgcagtggctcatgcttgtaatc

SEQ ID NO: 16943 - DNA, 80 bp, synthetic construct
  source 1..80: mol_type = other DNA
gttgggattacaggcgtgagccacagcactcagccagttatttttttataagaaaacattttactggccaggcctggtgg

SEQ ID NO: 16944 - DNA, 80 bp, synthetic construct
  source 1..80: mol_type = other DNA
caagctgtttgttgtgtaagatttattttacctcagatcttttctcccccctttcctttctgtcttgtgttccaaaagag

SEQ ID NO: 16945 - DNA, 80 bp, synthetic construct
  source 1..80: mol_type = other DNA
tctttttgtggtcctcaagtaccataagcaccgctggagataacacatgtgatgggcatttttagcatagattgtatcta

SEQ ID NO: 16946 - DNA, 80 bp, synthetic construct
  source 1..80: mol_type = other DNA
tgtaaactatagtgactttttagaaggatatttctgtcatatttatctcaaaacctaaactgtgtatcaatgatattaag

SEQ ID NO: 16947 - DNA, 80 bp, synthetic construct
  source 1..80: mol_type = other DNA
gtggatttttgcatttatatttcatagcacgagcatgtcagaatttatccattttacttcccttctgcccgccactgcta

SEQ ID NO: 16948 - DNA, 80 bp, synthetic construct
  source 1..80: mol_type = other DNA
ctcaagagattaacctttagttttcttggtttggattgggaaggaacaccaaggaaaatgagggacttcagaatttattt

SEQ ID NO: 16949 - DNA, 80 bp, synthetic construct
  source 1..80: mol_type = other DNA
gccttagcctctagagtggtagctgggattacaggcatgaaccaccatgctctgctattttttttcaaggtttttttttt

SEQ ID NO: 16950 - DNA, 80 bp, synthetic construct
  source 1..80: mol_type = other DNA
ttctttctattttattttttgtttactagggttctgttgaagataccactggctctcagtctctggctgccttgctgaat

SEQ ID NO: 16951 - DNA, 80 bp, synthetic construct
  source 1..80: mol_type = other DNA
aaaaaaaaaaattagctcagtgtggtgacatgtacctgtagcccgagctactcgggaggctgaggtgggaatatcaccct

SEQ ID NO: 16952 - DNA, 80 bp, synthetic construct
  source 1..80: mol_type = other DNA
attgtgccactgcactctaccctgggtgagaaacgagattttgtatcaaacaaacaaacaaacaaaaaaagacgcccaaa

SEQ ID NO: 16953 - DNA, 80 bp, synthetic construct
  source 1..80: mol_type = other DNA
gttttacaagacttgttcattagaagtaacatctgtgaggatggctttatgagtcaaaatattatctgcttaatacccca

SEQ ID NO: 16954 - DNA, 80 bp, synthetic construct
  source 1..80: mol_type = other DNA
tactgttcctctttccattcactaaaacctacttgcaactatgagcatatgttattgccatctagaaatgagtttctagg

SEQ ID NO: 16955 - DNA, 80 bp, synthetic construct
  source 1..80: mol_type = other DNA
tactctctggctctttctcagaagaagaaataacacttttatttcttttcaaagccaacctttccatactttacttggag

SEQ ID NO: 16956 - DNA, 80 bp, synthetic construct
  source 1..80: mol_type = other DNA
agcttcagatgaatctataaatggacaaaagaaaaagcttaaaaggataaagagcaacactccaagtgcatgtataaaca

SEQ ID NO: 16957 - DNA, 80 bp, synthetic construct
  source 1..80: mol_type = other DNA
gatccccaaaatgactcagctgtatgcaatttaatgcaatattaattcgcatgttgactctcagaattgcatacagctga

SEQ ID NO: 16958 - DNA, 80 bp, synthetic construct
  source 1..80: mol_type = other DNA
caaagtgctgggattacaggtgtgagccactgcacccagtccttaatgctactttataggtgaaaattgtgaaataactt

SEQ ID NO: 16959 - DNA, 80 bp, synthetic construct
  source 1..80: mol_type = other DNA
tttgagtatcttttaaaaccagtaaggacaaactagaggtgtcagctctcttcatgggctttggagaaacaagacaaaaa

SEQ ID NO: 16960 - DNA, 80 bp, synthetic construct
  source 1..80: mol_type = other DNA
cgagaggaaaggatatgtgtgcctgtgggctcttcaactctgttgattagttatgatttattttctggtcagtttgagag

SEQ ID NO: 16961 - DNA, 80 bp, synthetic construct
  source 1..80: mol_type = other DNA
cataataattgcatgggatttcacagctgggccccattcccagggattttgtattatctacctccaagtgattttgatgc

SEQ ID NO: 16962 - DNA, 80 bp, synthetic construct
  source 1..80: mol_type = other DNA
tcacatcgtttataaacataaggaagatcgttgctcatctgatagcattccgaaccttgagtcatctgtaatgcctatgg

SEQ ID NO: 16963 - DNA, 80 bp, synthetic construct
  source 1..80: mol_type = other DNA
ctaatcaggaaatgtttgcctcacagtcttacagagctttccaccttctaaaaaagctaacgtttcagaatagattcagg

SEQ ID NO: 16964 - DNA, 80 bp, synthetic construct
  source 1..80: mol_type = other DNA
tacaagattgttaccgactctatcagggtataaatcaactacctaatgttatacaggctctggaaaaacatgaaggtaac

SEQ ID NO: 16965 - DNA, 80 bp, synthetic construct
  source 1..80: mol_type = other DNA
gctaataatagaattgttggaattaactcacacagcacacctatgagagagagttaagatagagggtcttggtggtctct

SEQ ID NO: 16966 - DNA, 80 bp, synthetic construct
  source 1..80: mol_type = other DNA
gaaaccttttcccttatctagtgcaagaggtagctaagtgcttattttctcaaagtactgtgttataaaaagtattccta

SEQ ID NO: 16967 - DNA, 80 bp, synthetic construct
  source 1..80: mol_type = other DNA
gagtctatactttgctgttttcatactctcttagtgtggtgtaggcagccatgtatcccccttgtgcctctatttctcca

SEQ ID NO: 16968 - DNA, 80 bp, synthetic construct
  source 1..80: mol_type = other DNA
gtggtggccgggcagaggggctcctcactacccagtaggggcggccgggcagaggcgcccctcacctcccggacggggcg

SEQ ID NO: 16969 - DNA, 80 bp, synthetic construct
  source 1..80: mol_type = other DNA
acgctcctcacatcccagacggggcggcagggcagaggcgctccccacatctcagacgatgggcggcctggtagagacgc

SEQ ID NO: 16970 - DNA, 80 bp, synthetic construct
  source 1..80: mol_type = other DNA
ctggctctttaccactgcgtatttttaggtgcatacatctattttttaaaaaagcacccttgttcctgggtcctcttcca

SEQ ID NO: 16971 - DNA, 80 bp, synthetic construct
  source 1..80: mol_type = other DNA
actctcctaaggttatgttaaacatttttgtattcttggttttctttttgttccatgggttatttctctttatccttctt

SEQ ID NO: 16972 - DNA, 80 bp, synthetic construct
  source 1..80: mol_type = other DNA
ttccccaacctccctgtataggcacagtctaatatacttgatgacagtttgcaacaagtcaacaatttcctacttttctg

SEQ ID NO: 16973 - DNA, 80 bp, synthetic construct
  source 1..80: mol_type = other DNA
gagccttgacctcctgggctcagctcaagtgttcctctcacctcagtctgccaagtagctgggactacaggcatgcacca

SEQ ID NO: 16974 - DNA, 80 bp, synthetic construct
  source 1..80: mol_type = other DNA
tgttccgctgtaactcttgttttgaaaacagatttgttccaatgtgggtggtatattagggaacaatttgagcataatgt

SEQ ID NO: 16975 - DNA, 80 bp, synthetic construct
  source 1..80: mol_type = other DNA
tttcacatgtataaaactgtgctactacttttatgaggttcctgtctttattttttttaacatgtcgctggtgaaggttc

SEQ ID NO: 16976 - DNA, 80 bp, synthetic construct
  source 1..80: mol_type = other DNA
ctttttctgtgagtaattttctaaaactggtttctaggccaggctatttatgtcttgctttttattttttttggcgatgg

SEQ ID NO: 16977 - DNA, 80 bp, synthetic construct
  source 1..80: mol_type = other DNA
aaccagtgttaatttttttttttttttttttgagacggagtcttgctctatttcccaggctggagtgcagtgatgccatc

SEQ ID NO: 16978 - DNA, 80 bp, synthetic construct
  source 1..80: mol_type = other DNA
atacacacacacatatatatacacatatgcaggcacacatatatatacatatatatatatacataccacagtttctttat

SEQ ID NO: 16979 - DNA, 80 bp, synthetic construct
  source 1..80: mol_type = other DNA
agaatgtagctttacaaagtctagttggaaattggcaactgggggttagtacaagttacaaggaagggatggaatttaag

SEQ ID NO: 16980 - DNA, 80 bp, synthetic construct
  source 1..80: mol_type = other DNA
taccaatagtgcatgagctaatttggaataaagaactaggcattgtagcacaacagacattatgtgggcaaagtgttgtt

SEQ ID NO: 16981 - DNA, 80 bp, synthetic construct
  source 1..80: mol_type = other DNA
atcatgtccggcctccccatcatgtacccttaaataccatcaagcacagttccattgtgtaaaaacttggcttgatttaa

SEQ ID NO: 16982 - DNA, 80 bp, synthetic construct
  source 1..80: mol_type = other DNA
ctcctgccttagccttagtaggtgtaaatacaggtgtgtaccaccatgcctggcgaattttaaaaaaacttttttataga

SEQ ID NO: 16983 - DNA, 80 bp, synthetic construct
  source 1..80: mol_type = other DNA
ttaaattccctgttaaaatggtcatgcaggaatatacgcttgcattattcatattagggtaactgtttggtttgctagtt

SEQ ID NO: 16984 - DNA, 80 bp, synthetic construct
  source 1..80: mol_type = other DNA
ccactgcccctggccgcatttttcttttcttttcctttctttttttttttttttttttgaaacggagttttgccattgtc

SEQ ID NO: 16985 - DNA, 80 bp, synthetic construct
  source 1..80: mol_type = other DNA
tgatggttaacaaaaactatgagtataatagagcctagtccctattacggactggtattgatctggtgtgggaagagtat

SEQ ID NO: 16986 - DNA, 80 bp, synthetic construct
  source 1..80: mol_type = other DNA
aatgctgcacacttaggcagtcactggacaatatctgccccaaaattggtttgtataattgagaatatttaagaggttgt

SEQ ID NO: 16987 - DNA, 80 bp, synthetic construct
  source 1..80: mol_type = other DNA
cccactgaactccagcctgggcaacagagcaagactctgtctccaaaaaaaaaaaatgtatttttctttgaagcttttct

SEQ ID NO: 16988 - DNA, 80 bp, synthetic construct
  source 1..80: mol_type = other DNA
ggagaggcagtaagattgaagaaaagaggtttgagcttcgaggggtggtaaattgtgggaaggtaattatttggggcaaa

SEQ ID NO: 16989 - DNA, 80 bp, synthetic construct
  source 1..80: mol_type = other DNA
tagttgatgatgtcagggaagaaaagctttttctctgccttacgttaagtagttgggggcaaattaaattaataaaagac

SEQ ID NO: 16990 - DNA, 80 bp, synthetic construct
  source 1..80: mol_type = other DNA
gtgatgggaccatttaaacagtgattgtgaccagggacatagaatgggatgattggcccgaggtaaccatggttgggtat

SEQ ID NO: 16991 - DNA, 80 bp, synthetic construct
  source 1..80: mol_type = other DNA
tatttagcttgggactttaaatgatatgtcttaaatgtaaacatttctatactgcattttggccatcttttgatactagt

SEQ ID NO: 16992 - DNA, 80 bp, synthetic construct
  source 1..80: mol_type = other DNA
aaaatgaaatagttttaaagaagccacagttgtgtgatcctgatacaactatatcattattgtatgagtatatatgagtt

SEQ ID NO: 16993 - DNA, 80 bp, synthetic construct
  source 1..80: mol_type = other DNA
ccagtgatgatgagctatagaaatcctttttagaaacaacagagccttgttgtaaaacaggtaaatgtacgtgaggactt

SEQ ID NO: 16994 - DNA, 80 bp, synthetic construct
  source 1..80: mol_type = other DNA
aatgcttcaggatcttgatcccttgtttaaatttctatggaaagctctgctcctgtctgcagttaatctgggtgcaacag

SEQ ID NO: 16995 - DNA, 80 bp, synthetic construct
  source 1..80: mol_type = other DNA
ctgttaacattaagtctgttctcaactctaggcattattgagggttttgaggacaggtcttgaaaatttctatggctacc

SEQ ID NO: 16996 - DNA, 80 bp, synthetic construct
  source 1..80: mol_type = other DNA
tatggacataccacatttattattaatttattgattgattgacaggatcctgctctgttgtccaggctggagtgcagtgg

SEQ ID NO: 16997 - DNA, 80 bp, synthetic construct
  source 1..80: mol_type = other DNA
ctattatgtttgttgtagttactagtatctttggatttatttctacctaattatttggtgattcctcttcttcctggttc

SEQ ID NO: 16998 - DNA, 80 bp, synthetic construct
  source 1..80: mol_type = other DNA
ttttaagaagttcctttgttggaggtctgttaggttttatttgtttgaaaatgtctgtatttcacccttgttcttgaagg

SEQ ID NO: 16999 - DNA, 80 bp, synthetic construct
  source 1..80: mol_type = other DNA
cttctgttgcattgtttcctcagattgaatttctaggagtagaattgctatgtcaaagagaataacaagtatctctgagc

SEQ ID NO: 17000 - DNA, 80 bp, synthetic construct
  source 1..80: mol_type = other DNA
atgttctttcacaatttcatgtaaattttagttgttttgtttcaaaaaacaattcctattgaacaatctctaggaataga

SEQ ID NO: 17001 - DNA, 80 bp, synthetic construct
  source 1..80: mol_type = other DNA
cttagagctttttgagatttctaaggtagatccttggtttgggcaacatataactattacaagttttgcacattgaacgt

SEQ ID NO: 17002 - DNA, 80 bp, synthetic construct
  source 1..80: mol_type = other DNA
aattattttataagttccctgtccccaagatgatgacttcacatctctgtcaaacagaaatcgcccaacaggcccttgta

SEQ ID NO: 17003 - DNA, 80 bp, synthetic construct
  source 1..80: mol_type = other DNA
gactagcctgtgccacatagaccacatttctaccaaaaatcaaaaggaaaaaacttgctgggtgtggtgatgcacacctg

SEQ ID NO: 17004 - DNA, 80 bp, synthetic construct
  source 1..80: mol_type = other DNA
tctttcattgtggaactactctttcactttgaatgttttgagaggttcctttgttcagatcagtccgatttcgtttctgg

SEQ ID NO: 17005 - DNA, 80 bp, synthetic construct
  source 1..80: mol_type = other DNA
cagaattgtttgagagtgaacatctggaggcccacaaggactttccttgtggaggggaagtatgtagtgagggaagtatg

SEQ ID NO: 17006 - DNA, 80 bp, synthetic construct
  source 1..80: mol_type = other DNA
gatgtgaatgttctatgataagttttactaatgtagtcatcaggtaagagtcaagctttcttccatagagcagtcagctg

SEQ ID NO: 17007 - DNA, 80 bp, synthetic construct
  source 1..80: mol_type = other DNA
tggggggaggctaaagcctttctccttctgtactgttctggaaactatggcctgttctactccctcccctcctgaatttt

SEQ ID NO: 17008 - DNA, 80 bp, synthetic construct
  source 1..80: mol_type = other DNA
tgctgtgccattgagtgattccatcaaggccacaattatcatcttgatgaactgattttctcccactgctgataattact

SEQ ID NO: 17009 - DNA, 80 bp, synthetic construct
  source 1..80: mol_type = other DNA
aatcgtagctattgtggaggccgaggcatgagaatcgcttgagcccgggaagcagaggttgcagtgagttgagatgacac

SEQ ID NO: 17010 - DNA, 80 bp, synthetic construct
  source 1..80: mol_type = other DNA
ttttttttttgtttttttctttctctctctctcttttttttttttttgacagagttttgctcctgttgtccaggctggag

SEQ ID NO: 17011 - DNA, 80 bp, synthetic construct
  source 1..80: mol_type = other DNA
cagttttactcaggggaatataattgttatagcaggaattgtgccattgcgctattccaaacagtgtaaaagaacattaa

SEQ ID NO: 17012 - DNA, 80 bp, synthetic construct
  source 1..80: mol_type = other DNA
aaatttagattgtggtgcattcaaggcctgaactttaataaatgtccatgtcacggcagcaaaaaagaaatcaacaggtc

SEQ ID NO: 17013 - DNA, 80 bp, synthetic construct
  source 1..80: mol_type = other DNA
atgaaacttcttcttggtctgatattacatattatgagctatttttatttaaaaatgtaatggcggccagacatggtgat

SEQ ID NO: 17014 - DNA, 80 bp, synthetic construct
  source 1..80: mol_type = other DNA
ataatcccagcattttgggaggccgaggcgggtggatcacctgaggtcaggagttcgaaactggcctaaccaacatgttg

SEQ ID NO: 17015 - DNA, 80 bp, synthetic construct
  source 1..80: mol_type = other DNA
gagagaatgtcttggataagcagctgtgtagttttatattttgctgataagggaaggtactctatttttgttttttgtgt

SEQ ID NO: 17016 - DNA, 80 bp, synthetic construct
  source 1..80: mol_type = other DNA
aaaagcttgtgagagaatagtgtattcatgtgaaacttcttccatgggttcagagcatttagaaacaaacatcccttcac

SEQ ID NO: 17017 - DNA, 80 bp, synthetic construct
  source 1..80: mol_type = other DNA
caggtatatttgtcatggcttctcttgatgaaaggcccagtatcggtttgtctgaagatatataatagcattgcttttgg

SEQ ID NO: 17018 - DNA, 80 bp, synthetic construct
  source 1..80: mol_type = other DNA
tcactttttaggagcttccttgaaggtagggactataccttctatttcttggtatctttttctttctttttttaaaagtt

SEQ ID NO: 17019 - DNA, 80 bp, synthetic construct
  source 1..80: mol_type = other DNA
ttcaggtctgcaaccaaagattcattaataatcatagatgaattgggaagaggaacttctacctacgatggatttgggtt

SEQ ID NO: 17020 - DNA, 80 bp, synthetic construct
  source 1..80: mol_type = other DNA
gccagaattatctgtactcttgaacatcaccatggaggcattttctgctacctcccatggcagtatgttttcttgttgaa

SEQ ID NO: 17021 - DNA, 80 bp, synthetic construct
  source 1..80: mol_type = other DNA
tttcctgcaaataatcaatatttaattaaagctactccaaattagtgacactttacgtgtctgtctttctccctcccctt

SEQ ID NO: 17022 - DNA, 80 bp, synthetic construct
  source 1..80: mol_type = other DNA
gatatcatggaaccagcagcaaagaagtgctatctggaaagagaggtttgtcagtttgttttcatagtttaacttagctt

SEQ ID NO: 17023 - DNA, 80 bp, synthetic construct
  source 1..80: mol_type = other DNA
tcttatttcactgcctggtcctggaaacatgtactgcaatatacattgtgacaactttttacctgtcatgtttttagctt

SEQ ID NO: 17024 - DNA, 80 bp, synthetic construct
  source 1..80: mol_type = other DNA
aattactaatgggacattcacatgtgtttcagcaaggtgaaaaaattattcaggagttcctgtccaaggtgaaacaaatg

SEQ ID NO: 17025 - DNA, 80 bp, synthetic construct
  source 1..80: mol_type = other DNA
taccgtgagcctccatcccgtctgccattctcccatccctggtctatgataagacttagaaatctggattttaacaaaac

SEQ ID NO: 17026 - DNA, 80 bp, synthetic construct
  source 1..80: mol_type = other DNA
tataaaatcactaagaaaaggggtcacttaagaatctcattaacaaaaagaatttgaatatttttccaaggaagatatgc

SEQ ID NO: 17027 - DNA, 80 bp, synthetic construct
  source 1..80: mol_type = other DNA
cttttgcccattgtgctgcgagatgtatacaagaatgttcctaatacctccacactggaaacaactcatcagtgaaaatg

SEQ ID NO: 17028 - DNA, 80 bp, synthetic construct
  source 1..80: mol_type = other DNA
tttttagattgctgcacagaagcatgtttaacgtggaaatcagctcatggttttagttgttagggctacaagaaattggg

SEQ ID NO: 17029 - DNA, 80 bp, synthetic construct
  source 1..80: mol_type = other DNA
aagtggaagcccagtgtgatagttttctgcccgatgttggcctgtcttcacacccacaccacttatcttgattgatagag

SEQ ID NO: 17030 - DNA, 80 bp, synthetic construct
  source 1..80: mol_type = other DNA
atatttattgtcaattccagtgtgtttcattgctaaacatcaggctcagccaaagcaatcacgaaaatgactccacgttg

SEQ ID NO: 17031 - DNA, 80 bp, synthetic construct
  source 1..80: mol_type = other DNA
gtcaccaaatgctggcatccaaccaagtgattgcattgtaccctgtttggatgaaagattgtgtttaaatgaaaagagag

SEQ ID NO: 17032 - DNA, 80 bp, synthetic construct
  source 1..80: mol_type = other DNA
gagtactctctgacattttcatgatgatatgaaaggatttttccatacatactcaaaaggcgctcacgcctctgttgcag

SEQ ID NO: 17033 - DNA, 80 bp, synthetic construct
  source 1..80: mol_type = other DNA
ctgcaatgaatggacctactgtgtttgagggtactgagaggagtttggggttgaattaatacctacaaagcatccacaaa

SEQ ID NO: 17034 - DNA, 80 bp, synthetic construct
  source 1..80: mol_type = other DNA
tgttatttaaaaatttagaggtaagtgatagaggattgtgaaagtggctacctctgggacagtgaacagggcagcattga

SEQ ID NO: 17035 - DNA, 80 bp, synthetic construct
  source 1..80: mol_type = other DNA
aataatagccaacatttgttgggagccaatagcctgagtgaccagctcagcattcttgataaccacccccttctccctat

SEQ ID NO: 17036 - DNA, 80 bp, synthetic construct
  source 1..80: mol_type = other DNA
ttcatatttatttccgctcaaagcttcatttggcctctggtcttccttctctttctctcacagcttttttggactctatc

SEQ ID NO: 17037 - DNA, 80 bp, synthetic construct
  source 1..80: mol_type = other DNA
actgctttcttctgactttcctcagtagacatctatggctcttttaatgacattctctctccaacctgcttggactccat

SEQ ID NO: 17038 - DNA, 80 bp, synthetic construct
  source 1..80: mol_type = other DNA
acagtccttggatgatccgagctgggaggggcttcaaacaactgtatcaagttcaaacccttgatttaaatgtgaggaaa

SEQ ID NO: 17039 - DNA, 80 bp, synthetic construct
  source 1..80: mol_type = other DNA
ccattaagtaggcatgattgatgaaatcactggccattagtgattgaactcacactccagactaggtgtggtggctccca

SEQ ID NO: 17040 - DNA, 80 bp, synthetic construct
  source 1..80: mol_type = other DNA
ttgcacgcgtgggtttgatcgaagtgaggttctatcagtaacatgtgactatgcctctttcataggttgttgcttcaaag

SEQ ID NO: 17041 - DNA, 80 bp, synthetic construct
  source 1..80: mol_type = other DNA
ctgcgcctggcccttacagtattttctcagagggaaagaaggcctctgtcttcaggggccaccttagatcccagaaggat

SEQ ID NO: 17042 - DNA, 80 bp, synthetic construct
  source 1..80: mol_type = other DNA
ccagctactcgggaggctgaggtaggaggatcacctgagcccagaaatttgaggctgcagtgagctgtgatcatgccact

SEQ ID NO: 17043 - DNA, 80 bp, synthetic construct
  source 1..80: mol_type = other DNA
ctgaccctcaggcctggcagatgttattaggaactgaaacttaccagatcaccacatcagggcaatgagacaccagaccc

SEQ ID NO: 17044 - DNA, 80 bp, synthetic construct
  source 1..80: mol_type = other DNA
aggcacacgccaccacatccagctaattttttatttttcatttttaacttttttttcagagatggagtcttgctctgtca

SEQ ID NO: 17045 - DNA, 80 bp, synthetic construct
  source 1..80: mol_type = other DNA
caaggaggcttcctgtaatgtatctatcatctcttcatttagctcattttttgggtttcagaatccctcgtggaaggtcc

SEQ ID NO: 17046 - DNA, 80 bp, synthetic construct
  source 1..80: mol_type = other DNA
tggtcatgttcacataagaaaggttgaacttgtgggagaggaggcaaaaagaggaagtgatagtcactgaatgtgtgtgc

SEQ ID NO: 17047 - DNA, 80 bp, synthetic construct
  source 1..80: mol_type = other DNA
tggttcccaaagcctgtcagcccggggctgcgggcctctctctcacaaagccttgtctaggtgacttgggaggtgaggcc

SEQ ID NO: 17048 - DNA, 80 bp, synthetic construct
  source 1..80: mol_type = other DNA
aagagctgaaaatgagacacgcgtggaggggtgaaagtggagtgtggtcaacagtgtggttacagagatgtgtgtcgggg

SEQ ID NO: 17049 - DNA, 80 bp, synthetic construct
  source 1..80: mol_type = other DNA
aagtgagcaatacagctggtcccaacttacagtggttcaacttgtgagttttgcactctacaatgggtttattgggacat

SEQ ID NO: 17050 - DNA, 80 bp, synthetic construct
  source 1..80: mol_type = other DNA
agtggcggaacattgaggaggtttatttcttctttatacaaatatgctgtggatcaggatgactctccaggcaactgtct

SEQ ID NO: 17051 - DNA, 80 bp, synthetic construct
  source 1..80: mol_type = other DNA
taagactgggtctcgcagttgggcacagtggctcatacctgtaatcccagcactttaggaggctgaggtgggtacatcac

SEQ ID NO: 17052 - DNA, 80 bp, synthetic construct
  source 1..80: mol_type = other DNA
tatgttcagcctccatcctctgaaggcaaaagttagcaaagttgatgtatggcgttgctttttctgggaactttatctcg

SEQ ID NO: 17053 - DNA, 80 bp, synthetic construct
  source 1..80: mol_type = other DNA
tggatgagagttagattctacacattagatgcactttagcaagattttcaaaagcagattggagaaggagcccatgcttc

SEQ ID NO: 17054 - DNA, 80 bp, synthetic construct
  source 1..80: mol_type = other DNA
aagtcctgttgggagagagcattttttaccttctccctgctacttcttgctactagtaacatggatgtgagccttggagg

SEQ ID NO: 17055 - DNA, 80 bp, synthetic construct
  source 1..80: mol_type = other DNA
cccagaataaatgaagaatagcttattctttgccaggttgaagatagaaaaggaatgaagggccggagaagtacagctgg

SEQ ID NO: 17056 - DNA, 80 bp, synthetic construct
  source 1..80: mol_type = other DNA
tggtactttacttgtccttggggaagcagaaacaaatgaaaacgaggatctggagctcatgaagtttctcatggggtggg

SEQ ID NO: 17057 - DNA, 80 bp, synthetic construct
  source 1..80: mol_type = other DNA
tctaaatcaatccactatcaacaggtagctatcatactaccctcattgtcacccctcagaggtcccactgcagctgcata

SEQ ID NO: 17058 - DNA, 80 bp, synthetic construct
  source 1..80: mol_type = other DNA
atgctgagaacttccaaaatgttggtctagcctgggtcattgttatgagctctagactcacaaggccaattgcttggtgg

SEQ ID NO: 17059 - DNA, 80 bp, synthetic construct
  source 1..80: mol_type = other DNA
caagattggccaggggattaaataagataaatatgcaagtctcttatctgggggtctggcttggtaaatataaagttctt

SEQ ID NO: 17060 - DNA, 80 bp, synthetic construct
  source 1..80: mol_type = other DNA
ttctagggaaaattgaaggaaaagaaggagggggatgtggaggggagagaaggcctcagtagagtttgcactattattag

SEQ ID NO: 17061 - DNA, 80 bp, synthetic construct
  source 1..80: mol_type = other DNA
ctctcttggaatgctgctcagaaaaatagatgtattgtttgagaaaccctgcaggcttgtcccgcatgctctagccccct

SEQ ID NO: 17062 - DNA, 80 bp, synthetic construct
  source 1..80: mol_type = other DNA
caatttagcagctattttccagggtttggcttgggtttggatgctggcttctgtgtgaaacctgaatacatgcaaattgt

SEQ ID NO: 17063 - DNA, 80 bp, synthetic construct
  source 1..80: mol_type = other DNA
tgcttaccattcctttagaagattgctcaagctgcctccaattgcctctttccaaaaccaaagcataggaaaacaagtaa

SEQ ID NO: 17064 - DNA, 80 bp, synthetic construct
  source 1..80: mol_type = other DNA
cttgccctcatcatatatgagaaaaatgggcagagagagtgttcgtttacacccccagaccactatcctttcaatgaagc

SEQ ID NO: 17065 - DNA, 80 bp, synthetic construct
  source 1..80: mol_type = other DNA
tgtgctctgtgctaaatggactaactctgagctgagaaaggccagctaagcccctcaccactgcaatttccaaatctggg

SEQ ID NO: 17066 - DNA, 80 bp, synthetic construct
  source 1..80: mol_type = other DNA
ccgatggtgctgaaggtgacgaagcagaagtagagcgagtccacgtagtcccagccctccacgctggtgtacatggccga

SEQ ID NO: 17067 - DNA, 80 bp, synthetic construct
  source 1..80: mol_type = other DNA
cctacttgagaatggtgaaaaaagccaagtaatcttagtgctgtgactaattttcactttacaggcacttcgaaaaggcc

SEQ ID NO: 17068 - DNA, 80 bp, synthetic construct
  source 1..80: mol_type = other DNA
actgcgtattgcttcaggcccttatcgttgttaacttaccacttgttcaaagcacaggctttaagggtgtctttatcaat

SEQ ID NO: 17069 - DNA, 80 bp, synthetic construct
  source 1..80: mol_type = other DNA
tttgctacattttaaagccacactcaagttcttgagtttataaagaaatcagctctgaatttacatggctataagtggag

SEQ ID NO: 17070 - DNA, 80 bp, synthetic construct
  source 1..80: mol_type = other DNA
ctccccattctaaagagaagttccagacacatccatgctggacttaataaaacagcaaaacaggtctggggctagcaacc

SEQ ID NO: 17071 - DNA, 80 bp, synthetic construct
  source 1..80: mol_type = other DNA
gaatttgaagatttgattaaacaactgagaacgagtctcaatcttaaaactggtacttaattaacaacaacaacaacaac

SEQ ID NO: 17072 - DNA, 80 bp, synthetic construct
  source 1..80: mol_type = other DNA
tcatgctctttccaccacattagactgtattctgagggcaccaaggaagctccatttttcttaagaaaccaaattgcagt

SEQ ID NO: 17073 - DNA, 80 bp, synthetic construct
  source 1..80: mol_type = other DNA
cattccttcagcaaacatttactgtggacagcatcaggttggcagtatcatgcaaggctcagaaatatggtggaaaacca

SEQ ID NO: 17074 - DNA, 80 bp, synthetic construct
  source 1..80: mol_type = other DNA
cacaattgatctgccatcccagtttgcaaagagcagacacttgggggctttattatgccactttgacaaaagctgtgaag

SEQ ID NO: 17075 - DNA, 80 bp, synthetic construct
  source 1..80: mol_type = other DNA
ggataatccagttccttaccatgactggctcaagaatgggtagacctaagtcaatcagtgcagagcattttcatgactac

SEQ ID NO: 17076 - DNA, 80 bp, synthetic construct
  source 1..80: mol_type = other DNA
gctggtgctaaaagaatagctggagaagtcactactgaggactgaaaatgcggagggtataataactgctgttgtgtatc

SEQ ID NO: 17077 - DNA, 80 bp, synthetic construct
  source 1..80: mol_type = other DNA
tgtttaaaaaaaaaaaaaagattaggtgggatttcaagagattgacagggagcagaggcctaggcttgggaaaggcatcc

SEQ ID NO: 17078 - DNA, 80 bp, synthetic construct
  source 1..80: mol_type = other DNA
acccaccaccacacctggcaaccgttcttttgttgctttgtctttcattgctttattcttttgttgctttgtaagggttt

SEQ ID NO: 17079 - DNA, 80 bp, synthetic construct
  source 1..80: mol_type = other DNA
gcacgatgggtgaggcatggaccttatttcacagcaaagtggctcaggtgaggcaggcaaggaatgggcaaatcacgaca

SEQ ID NO: 17080 - DNA, 80 bp, synthetic construct
  source 1..80: mol_type = other DNA
ctcaggccagtgacttctaacattagagaggttttggttaactgggagcaaatgcaagtgacttctttgaatcgactttg

SEQ ID NO: 17081 - DNA, 80 bp, synthetic construct
  source 1..80: mol_type = other DNA
ggtaaaggggctgcccacagcacctcagcacatgggtctctctctcttttcatccagcccaaaatgtcaaagcacaaggg

SEQ ID NO: 17082 - DNA, 80 bp, synthetic construct
  source 1..80: mol_type = other DNA
aggcatttaactgtgtgctgtcttgtgacagcccctgtcctgaccattgtcccagagatttaaccctttgtgtttttcta

SEQ ID NO: 17083 - DNA, 80 bp, synthetic construct
  source 1..80: mol_type = other DNA
ggacgatgttcttgttttggtctgtgtttggacatgattatggggtgaatggtcttgtttttctctcactccatcttggt

SEQ ID NO: 17084 - DNA, 80 bp, synthetic construct
  source 1..80: mol_type = other DNA
agaatgaaggcccctgaggaacttcagtatctaaagggcagaagaggagtctatgaaggagaccacattcattcaacaaa

SEQ ID NO: 17085 - DNA, 80 bp, synthetic construct
  source 1..80: mol_type = other DNA
ggtgacagagaaaacaatggacaaagagattagccagcaaatccctcctgcacactttcagggcaaagtttaggtgatat

SEQ ID NO: 17086 - DNA, 80 bp, synthetic construct
  source 1..80: mol_type = other DNA
gaatgacggggcaaggggtcagaaatttctagaagaatctagtaagatggaaacctaacagtcctactgggatttggcaa

SEQ ID NO: 17087 - DNA, 80 bp, synthetic construct
  source 1..80: mol_type = other DNA
gagactccatccctagaaacaattaaaaacaaacaaacaaacaaacaaacaaaagcaagctgggcatggtggctcacacc

SEQ ID NO: 17088 - DNA, 80 bp, synthetic construct
  source 1..80: mol_type = other DNA
tacctcagaatgttactgcattggtagaaaggctttttaaaaaagggaatcaaggtaaaacgaggccattagggtgagcc

SEQ ID NO: 17089 - DNA, 80 bp, synthetic construct
  source 1..80: mol_type = other DNA
cagccaggttgggctttcaggagcctatatttcatctgggccccagtcacactacatagatttttgttttatcacagaaa

SEQ ID NO: 17090 - DNA, 80 bp, synthetic construct
  source 1..80: mol_type = other DNA
cactgaggcttatgtggggttttctggttttaggaatcattttcacacacggtttatttacatttcttcacaaccaccta

SEQ ID NO: 17091 - DNA, 80 bp, synthetic construct
  source 1..80: mol_type = other DNA
tggcatctctgccgagggcataaaccatattagctctgaatcataaagaatgtttactgagaaccacatttgggaagacc

SEQ ID NO: 17092 - DNA, 80 bp, synthetic construct
  source 1..80: mol_type = other DNA
tcgagtgaattaaagaccactcgttttgtcattatttttaaaggcagagtctcaccgtctgggtggggagggaagtcata

SEQ ID NO: 17093 - DNA, 80 bp, synthetic construct
  source 1..80: mol_type = other DNA
atcaggcttggaatcctttgggaactctgcagttattgcaaaggcatatcaatctacttggtcaccaattgttgtttgca

SEQ ID NO: 17094 - DNA, 80 bp, synthetic construct
  source 1..80: mol_type = other DNA
tccagtccaattttctatttttaattcttaaatgtgagtggacagccacagttcagacatttgaggaaagcctgtaagcc

SEQ ID NO: 17095 - DNA, 80 bp, synthetic construct
  source 1..80: mol_type = other DNA
tctcatgatagtaagttctcatgagatctggttgtttaaaagtgtgtagcaccttcccctttgctctcttcctcctgctc

SEQ ID NO: 17096 - DNA, 80 bp, synthetic construct
  source 1..80: mol_type = other DNA
ctgcttaactgctgtaactactgtggagcactggagaggaaggaaccatcaagaaaaaggactccagaaatctactaggg

SEQ ID NO: 17097 - DNA, 80 bp, synthetic construct
  source 1..80: mol_type = other DNA
atgatgagaaaaatgggaaaaatttttttaaaaccaagtagaatatctcgagatgaaaaatatagggggctgggtgcggt

SEQ ID NO: 17098 - DNA, 80 bp, synthetic construct
  source 1..80: mol_type = other DNA
caagccagaaaacaatctttaaggtgctaaaagaaacaggaaaacaaaacaatgaaaaaaaccccacacttcagtaaata

SEQ ID NO: 17099 - DNA, 80 bp, synthetic construct
  source 1..80: mol_type = other DNA
atgttttctggatgccaaattagaatacagggcctgctaactgttctggaaagtatgacgtgtgaaatcagtattacccc

SEQ ID NO: 17100 - DNA, 80 bp, synthetic construct
  source 1..80: mol_type = other DNA
aataaagcaagaatgtagatggaagtgaaggggactctagggacaaaaatgctatgaattaaggtcattgccacacacca

SEQ ID NO: 17101 - DNA, 80 bp, synthetic construct
  source 1..80: mol_type = other DNA
ctctacccaattcatcctgccacaaatattcagcatcctgggctgccatataaacaaatgaacaaacatttactggttct

SEQ ID NO: 17102 - DNA, 80 bp, synthetic construct
  source 1..80: mol_type = other DNA
ttcaacaaacacaaggtactgtgctaggcaatgggaatataatagtggacaagagagacaagaaccctgttctcatggag

SEQ ID NO: 17103 - DNA, 80 bp, synthetic construct
  source 1..80: mol_type = other DNA
gcttgtgaggggaacagtcaagagtgggatatagcaggaatcaggagttctattttgggcttttaaaagttttgatacat

SEQ ID NO: 17104 - DNA, 80 bp, synthetic construct
  source 1..80: mol_type = other DNA
ttaatctgtcttttaattcagggccctagcggctgaaaataagaaaatgtaggggaaaagcttttcctctacaggtgaga

SEQ ID NO: 17105 - DNA, 80 bp, synthetic construct
  source 1..80: mol_type = other DNA
aggatgggagctggaagcatgggaggtggtggtcagaggtgagatgtttagagtcaaaaactttgaaggtaatgcagtta

SEQ ID NO: 17106 - DNA, 80 bp, synthetic construct
  source 1..80: mol_type = other DNA
gtgtatgacccacttcagctcttgttatatactctgctgaactgccttctgggtcatgtatattgctcactaatttgatg

SEQ ID NO: 17107 - DNA, 80 bp, synthetic construct
  source 1..80: mol_type = other DNA
tgaggctgccagaccttcagaattagctcccatgcaatctcagctttctttcccgaccttccattttagaagagaaccca

SEQ ID NO: 17108 - DNA, 80 bp, synthetic construct
  source 1..80: mol_type = other DNA
tcatgttattaattgtaacagtgacaagcactactaagatgtagcttctgaggtggagaaagaagaaactacgttttctg

SEQ ID NO: 17109 - DNA, 80 bp, synthetic construct
  source 1..80: mol_type = other DNA
gagatcttgagcagtcaggagccgtggatcctctattctgccattgactgacttgctgtgtgatgccaagaaagttgctt

SEQ ID NO: 17110 - DNA, 80 bp, synthetic construct
  source 1..80: mol_type = other DNA
tggtctaactcaccactcaatcattcattcagttatccaccaattacatccttgacaatgattaaagagcactgcgccta

SEQ ID NO: 17111 - DNA, 80 bp, synthetic construct
  source 1..80: mol_type = other DNA
aagcactgctgcatgctatcctaccttcctggtctgtaacatctgttgctgttgagtataaagacactgtgaacattgta

SEQ ID NO: 17112 - DNA, 80 bp, synthetic construct
  source 1..80: mol_type = other DNA
tacctttggcaatattgatgtaactcttctagggaggatgagagcgcaagctctcagggaatccccctttgacttgctgg

SEQ ID NO: 17113 - DNA, 80 bp, synthetic construct
  source 1..80: mol_type = other DNA
atggagcaattaggtggataactgtccagtcgctcctaggctttgtagaggcataggctcagatacaaagagaccagaca

SEQ ID NO: 17114 - DNA, 80 bp, synthetic construct
  source 1..80: mol_type = other DNA
agagaaatacgcaaggaaggatgcgcctctccttctggataatgtgtttcattccagatatcaaaactatctccagctgg

SEQ ID NO: 17115 - DNA, 80 bp, synthetic construct
  source 1..80: mol_type = other DNA
tattcagattgactttctacacagcctgaacggctgctgaataatcacaggcaaaattttccactggtaccgcactgtgt

SEQ ID NO: 17116 - DNA, 80 bp, synthetic construct
  source 1..80: mol_type = other DNA
tgtgctaattttcctcttcattggataaagagtcagataaagaatcctgactgcccattttttgtggactgaggttttgc

SEQ ID NO: 17117 - DNA, 80 bp, synthetic construct
  source 1..80: mol_type = other DNA
agagcacaagtcaacaatgagctatggatgcatgatgtcatcctctaggactaagcatccttagtacttttaaagcactt

SEQ ID NO: 17118 - DNA, 80 bp, synthetic construct
  source 1..80: mol_type = other DNA
ggagtattgacacagcattcttcataaggttgagaaaacgtgaactgtttatatccaaaaaaagagagaagagatgatgg

SEQ ID NO: 17119 - DNA, 80 bp, synthetic construct
  source 1..80: mol_type = other DNA
ggacattagaagggaaggcagagccgagggacgcggaccgagcggccgagcagtggaaagggcggcaggtgaaaggcaca

SEQ ID NO: 17120 - DNA, 80 bp, synthetic construct
  source 1..80: mol_type = other DNA
ggagggagggggtggagagttgggctgctgcgacgcctcccggtggctctggcggcaccaatgcggggcaccggagcagg

SEQ ID NO: 17121 - DNA, 80 bp, synthetic construct
  source 1..80: mol_type = other DNA
tgtgctatggaacgcccctgggaaatggtcgcccccctacgccccaccgcggcaggaaaagacgacggatgccccgcgcg

SEQ ID NO: 17122 - DNA, 80 bp, synthetic construct
  source 1..80: mol_type = other DNA
accaagaaagtcgaacctccctcttttctggagcacagcagaaggtgtatacaaacacaaatttttgttattgcagacta

SEQ ID NO: 17123 - DNA, 80 bp, synthetic construct
  source 1..80: mol_type = other DNA
atctaaaccacagtctccaatggctcccctaaagctataaaaatgtagtctttaaacccttgaggctgccattcaaagac

SEQ ID NO: 17124 - DNA, 80 bp, synthetic construct
  source 1..80: mol_type = other DNA
aaaaatgttctaaagttgattgtggtgatgattgcacagctctgtaaatatactaaaaagcattgaattgtacactttaa

SEQ ID NO: 17125 - DNA, 80 bp, synthetic construct
  source 1..80: mol_type = other DNA
tgtgatggtaaaattttggtgacaagttttgcattccaagtagtagcagattcaaaatgttctggttgccttcaaacctc

SEQ ID NO: 17126 - DNA, 80 bp, synthetic construct
  source 1..80: mol_type = other DNA
aaggtgaaatattgaggtctgcaactacaagagtaaaactatctagttctcccttcaattatgtcaatgctggtgtcaca

SEQ ID NO: 17127 - DNA, 80 bp, synthetic construct
  source 1..80: mol_type = other DNA
ctgcaagagcttagagtctggctggggtgataagatgcacatgtatgaagcagtaaggactatgatatagcagatacagt

SEQ ID NO: 17128 - DNA, 80 bp, synthetic construct
  source 1..80: mol_type = other DNA
aagctgattgctgcctgttgatagggagttttgaaatgaagacaagaatcccagagtgaagaggagccttaaagctttga

SEQ ID NO: 17129 - DNA, 80 bp, synthetic construct
  source 1..80: mol_type = other DNA
tttaattctagcaaaatattatgtgggtcttccaggaaggctgcataaaagaaagctaattccacaggaaggggggccct

SEQ ID NO: 17130 - DNA, 80 bp, synthetic construct
  source 1..80: mol_type = other DNA
aataaatgcgtaggaaactgggggtaactgttttacttgctaatagcccagaaatgagcattggtgagtggggaaattgg

SEQ ID NO: 17131 - DNA, 80 bp, synthetic construct
  source 1..80: mol_type = other DNA
atcctaactcatttaaaattgcctatatattaatgactgggtaggagggagggtgggagtaccattaggggctgttggaa

SEQ ID NO: 17132 - DNA, 80 bp, synthetic construct
  source 1..80: mol_type = other DNA
agactatgttgtttcaggagatgcatatagggatatttgacttaggcagggctgagacaggtaggcattgaccaggaaga

SEQ ID NO: 17133 - DNA, 80 bp, synthetic construct
  source 1..80: mol_type = other DNA
taaagctttttaatcacctgggtgcaggcaggctgagtctgaaaagagagtcagcaaaaggtggtgggattgtcattagt

SEQ ID NO: 17134 - DNA, 80 bp, synthetic construct
  source 1..80: mol_type = other DNA
gtgtagggattagtgggatgactcttttttgttgtgttggtgtcatgagagggacaagcagttgttcattcccatctgca

SEQ ID NO: 17135 - DNA, 80 bp, synthetic construct
  source 1..80: mol_type = other DNA
ggctgtgtaagagtgggaagaaagggaaatgcatggccaacaattatttgctagagaaggattggaggcagtgaggagag

SEQ ID NO: 17136 - DNA, 80 bp, synthetic construct
  source 1..80: mol_type = other DNA
ggtcagattcttaacaagaactgatcatccagctagggtgtcttcatatggctgggaatctggagtaggcaagagaagat

SEQ ID NO: 17137 - DNA, 80 bp, synthetic construct
  source 1..80: mol_type = other DNA
ggagttaccaatgagaaggagaaaaactggccatgagggacagaagttgtaatgctcgctgcttctttagctaccttatc

SEQ ID NO: 17138 - DNA, 80 bp, synthetic construct
  source 1..80: mol_type = other DNA
ttgtttttttatagaagggtttggggtttgagagatcagccagacatgaccggcagggagagcatgtgtgttttcatgaa

SEQ ID NO: 17139 - DNA, 80 bp, synthetic construct
  source 1..80: mol_type = other DNA
caatcaggcagcatcagtcttcagccgctaagctgagcagatctgggaaggactcagtcagagagccttgggccagagct

SEQ ID NO: 17140 - DNA, 80 bp, synthetic construct
  source 1..80: mol_type = other DNA
gagtgataaaatgcatatcgagaataagacggccttctagccctgctgggtccaaggctgtaaagcatctcagggttgct

SEQ ID NO: 17141 - DNA, 80 bp, synthetic construct
  source 1..80: mol_type = other DNA
ggtggtacttgccacccaggggaggtggtgcttgctaccccagggaggtggtacttgccaccaaggtgaaggatcaaggc

SEQ ID NO: 17142 - DNA, 80 bp, synthetic construct
  source 1..80: mol_type = other DNA
aaaagtcaattgatcagttaggatggggcaagaacaaatcacaatggtggaatgtcatcagttaaggcaggaactggcta

SEQ ID NO: 17143 - DNA, 80 bp, synthetic construct
  source 1..80: mol_type = other DNA
aattcttgttaaccatgtgaggatggcgtcaactccttttcctctgtcaacatagcaaaggaaatgccagaacactattg

SEQ ID NO: 17144 - DNA, 80 bp, synthetic construct
  source 1..80: mol_type = other DNA
taaaaccaacctcctcggctcagctcatcataggaattttctaaattattggaggagatgtcaccccgattcatgaattg

SEQ ID NO: 17145 - DNA, 80 bp, synthetic construct
  source 1..80: mol_type = other DNA
ttaactcaagttcccatcttcagctcccggagaactgagacacatcattaactgtaaattatagtgactcctccaccctg

SEQ ID NO: 17146 - DNA, 80 bp, synthetic construct
  source 1..80: mol_type = other DNA
tttgaactcaggccacctgggtccagagtccattcaacaaacagagctcacagggttgtgtggttagtgagatgggcaat

SEQ ID NO: 17147 - DNA, 80 bp, synthetic construct
  source 1..80: mol_type = other DNA
tggattcctttcacattcaaaaagacctcacatcacctccctgttctctagagagaagtgccctgtttcttaagcaaagt

SEQ ID NO: 17148 - DNA, 80 bp, synthetic construct
  source 1..80: mol_type = other DNA
aattaggggcttttgatgaatccactgggaaaagtgaagctttccttcagtggggatcactagctctagggataatgtct

SEQ ID NO: 17149 - DNA, 80 bp, synthetic construct
  source 1..80: mol_type = other DNA
agatttcatgagaactcactcactactgtgaggacagtaccaagcagatggtactaaatcattcatgagaaatccaccct

SEQ ID NO: 17150 - DNA, 80 bp, synthetic construct
  source 1..80: mol_type = other DNA
tactgtcccagggcctccagcagaatgtccctcactagtttggaattgttcctgggctggtgactgtgatggtgcaatcc

SEQ ID NO: 17151 - DNA, 80 bp, synthetic construct
  source 1..80: mol_type = other DNA
atcttcataaaagtctaggattttgcagctggcaggggccatggagataatccggaccacctgccctggtgtctcttctc

SEQ ID NO: 17152 - DNA, 80 bp, synthetic construct
  source 1..80: mol_type = other DNA
gaacatcctgttcatgtcatggacccctgctttttgaagggccactcaattgccttattgaaagatgggtgctgtatgat

SEQ ID NO: 17153 - DNA, 80 bp, synthetic construct
  source 1..80: mol_type = other DNA
agacagctgcctgtgtggtagatagtgaaaatcagaaaagactccagtgccccctcaatgtagttctcctttgtgcctga

SEQ ID NO: 17154 - DNA, 80 bp, synthetic construct
  source 1..80: mol_type = other DNA
caccagtgaactaaccatagaaaggggttaccattctccactcaaactctgagcaagagcattgccttccctcacatacc

SEQ ID NO: 17155 - DNA, 80 bp, synthetic construct
  source 1..80: mol_type = other DNA
agaaatgcggtcagttcttcctcctcctcgttcttaacaacacttattaaataactactactattaactggggacctgct

SEQ ID NO: 17156 - DNA, 80 bp, synthetic construct
  source 1..80: mol_type = other DNA
ggtttcatgttttcttattatcgaattcagagagttctttattaagagtcctctcaacaatgttttgtagtttccagcat

SEQ ID NO: 17157 - DNA, 80 bp, synthetic construct
  source 1..80: mol_type = other DNA
ctaggtttgatgaagaagtgaatgacggcggtgaagtatgattggattagaagtatgatctaatgctaacaaactagggg

SEQ ID NO: 17158 - DNA, 80 bp, synthetic construct
  source 1..80: mol_type = other DNA
actcctctgtgccctcaggatgagttctaaactcttggcctcatgttcaagaaagcccaacacctggtccttccctgtgt

SEQ ID NO: 17159 - DNA, 80 bp, synthetic construct
  source 1..80: mol_type = other DNA
tcccttcaaggacacatgggagcaaatggcaaccaaacgtggaaagtgggtccattttaaaaagaattatagaaaaacac

SEQ ID NO: 17160 - DNA, 80 bp, synthetic construct
  source 1..80: mol_type = other DNA
gattaattctaagtctggggctagtgttaatacagacacagctggcgagatacagaattaaataaacacaaggtcctctg

SEQ ID NO: 17161 - DNA, 80 bp, synthetic construct
  source 1..80: mol_type = other DNA
caggcccattttagttgctgggtctctgcatctcaaattctgggcatgaatatgggtaaatttttcatctgtgtcctaca

SEQ ID NO: 17162 - DNA, 80 bp, synthetic construct
  source 1..80: mol_type = other DNA
attcaagaggtgtggccccgacagattggaagagcataaaaagaattcagaatagtattaagcagtcaatagaggacttt

SEQ ID NO: 17163 - DNA, 80 bp, synthetic construct
  source 1..80: mol_type = other DNA
agtgcttaaaacaataacagcattaattttgctctctttacgtagcaaaattgaggcctgcccaatttcaaggggaagag

SEQ ID NO: 17164 - DNA, 80 bp, synthetic construct
  source 1..80: mol_type = other DNA
gaagagatgctcagaaatactcaagggtaggtttagggcttatgggaagcatcaccagtgtctgctacaggatagtaaaa

SEQ ID NO: 17165 - DNA, 80 bp, synthetic construct
  source 1..80: mol_type = other DNA
taaagagcacatgccccagctgttaaagccagggtgtttaatgtattaggtaagacggtgccatggaatagaattttcca

SEQ ID NO: 17166 - DNA, 80 bp, synthetic construct
  source 1..80: mol_type = other DNA
aataatgaatggtcccaaaccataagagaaagccattgtacaacctcaacacacatgtctgggcagccctaaggagaagg

SEQ ID NO: 17167 - DNA, 80 bp, synthetic construct
  source 1..80: mol_type = other DNA
cactaacacagaatatagagagctggcttatggaattaacgaagacctcatagaaaagtgaaaattgggatgaaatgcca

SEQ ID NO: 17168 - DNA, 80 bp, synthetic construct
  source 1..80: mol_type = other DNA
aagggaagaatgggatccaaacagcagatgaaacatcatcaggctgtgagcctcctaatgcacagctccagggcttcaag

SEQ ID NO: 17169 - DNA, 80 bp, synthetic construct
  source 1..80: mol_type = other DNA
agtgagcattactggttggcaggtagctttgctgcccttgatcattgagggacccaagttttttccatcttgttctttat

SEQ ID NO: 17170 - DNA, 80 bp, synthetic construct
  source 1..80: mol_type = other DNA
cattcaagacagcttagctggacataagtgagacaaagtaacacgacagagataaccttcaacagactcagtcaaagaaa

SEQ ID NO: 17171 - DNA, 80 bp, synthetic construct
  source 1..80: mol_type = other DNA
gcctcccaaatacctctgatgggagggttatgcaaagcccccctcaattctactcccaacaggccacactctttggcctt

SEQ ID NO: 17172 - DNA, 80 bp, synthetic construct
  source 1..80: mol_type = other DNA
agaatgcctgatgtttctctcatcttagcccaggcactgaagagagaatgcttgtctcaaaatgagttcagaggctttta

SEQ ID NO: 17173 - DNA, 80 bp, synthetic construct
  source 1..80: mol_type = other DNA
gcagccctagaaaactaatacagagttgaaagcagcttcactccgcagcacccatttaaacaggatttatgtcgtctgtg

SEQ ID NO: 17174 - DNA, 80 bp, synthetic construct
  source 1..80: mol_type = other DNA
attttatcctcacaataactctgtgaagtggcctgttatctccttcttacagatgaaaacacagcagctcagagaggttg

SEQ ID NO: 17175 - DNA, 80 bp, synthetic construct
  source 1..80: mol_type = other DNA
ttaagtgtggagctgtaacagcaaaccctggccctgaatttcagtggatactggtctctcaatcagttacaataaactta

SEQ ID NO: 17176 - DNA, 80 bp, synthetic construct
  source 1..80: mol_type = other DNA
taaattttgaatttttgtgggtatataatatgtgtatatatttatggggtacataagatattttgatacatacatgcaat

SEQ ID NO: 17177 - DNA, 80 bp, synthetic construct
  source 1..80: mol_type = other DNA
tgggagaacgtccaaactgttctccatagtggtcatactaatttacatttccaccaacagtgcatgagggttcccttttc

SEQ ID NO: 17178 - DNA, 80 bp, synthetic construct
  source 1..80: mol_type = other DNA
gtttttgtttttgttttttgcttaagatagctttggctattccgggtcttttgtgtggttttttttttctatttctgtga

SEQ ID NO: 17179 - DNA, 80 bp, synthetic construct
  source 1..80: mol_type = other DNA
cagcgtaggagggttcccctttctccacatttgtatcatttgctgtcttgttttttgatagcagcaattttaacaagtga

SEQ ID NO: 17180 - DNA, 80 bp, synthetic construct
  source 1..80: mol_type = other DNA
gcccggaactggggagattcccaaaagtctcagctacaacccaaaagtgacaaagtgtaaggggagtgatatcatttaga

SEQ ID NO: 17181 - DNA, 80 bp, synthetic construct
  source 1..80: mol_type = other DNA
ttttgatgcatggaagctgagtggcctataagacatttaaatggaacacccagcaggcagttgaatctgaatctggatct

SEQ ID NO: 17182 - DNA, 80 bp, synthetic construct
  source 1..80: mol_type = other DNA
cttggaccaagtccctactacatatgggatttaggaaatgtagagagaaacagggaatctaaaacattccctgttttcat

SEQ ID NO: 17183 - DNA, 80 bp, synthetic construct
  source 1..80: mol_type = other DNA
acatgtaaacaaagagtcaccaaacaatgcaataagcaccataaaacagcaaggccaagtgcacagatggaggaacccat

SEQ ID NO: 17184 - DNA, 80 bp, synthetic construct
  source 1..80: mol_type = other DNA
gcacttctgaggacagagtccttgtcagggctggtttcttggctgaaccctcctttgccaccaacagagagatgcctgca

SEQ ID NO: 17185 - DNA, 80 bp, synthetic construct
  source 1..80: mol_type = other DNA
ggagatgcttccaggaggaaaaggacatgagaggtggtgaggaaatttcatgctagagtaatgatagaaccagaaggctg

SEQ ID NO: 17186 - DNA, 80 bp, synthetic construct
  source 1..80: mol_type = other DNA
ggagttctgaatgtcaggattgcctcttgctgtatccttgggcttgagatctttgtcatcccttatcaccaccctttgca

SEQ ID NO: 17187 - DNA, 80 bp, synthetic construct
  source 1..80: mol_type = other DNA
aagctgagattggatgtcatttgtcaaccttggcagagaagtactgaatgcgtcaaaataattgaaggttatttggtgcc

SEQ ID NO: 17188 - DNA, 80 bp, synthetic construct
  source 1..80: mol_type = other DNA
tcttggcaggatttatgggtcccctttacgctgagctgtctacccctgttgcctaaatgcctttcctacctaacagtagc

SEQ ID NO: 17189 - DNA, 80 bp, synthetic construct
  source 1..80: mol_type = other DNA
gaagccacacaggaagcaccttgggagtccttggaaactagaaatcaaccccctttgcattctaaggtctctggtttatt

SEQ ID NO: 17190 - DNA, 80 bp, synthetic construct
  source 1..80: mol_type = other DNA
tttcttgtgggtatagggtgggcacctcatgtaagggtcttatcacctacttcagagcaagatcaaggaattcttttatg

SEQ ID NO: 17191 - DNA, 80 bp, synthetic construct
  source 1..80: mol_type = other DNA
ctgggcaccatgtgcagtaaccaaagcagaatattcatcctgtgaatctgaacagcattaatgaagaatgtaggtctcct

SEQ ID NO: 17192 - DNA, 80 bp, synthetic construct
  source 1..80: mol_type = other DNA
gtgtaatctagaggtggacactaccccttgtcatcaaatatccaaagagctgttaggtagaagcaccttgaacttgcttc

SEQ ID NO: 17193 - DNA, 80 bp, synthetic construct
  source 1..80: mol_type = other DNA
aaaacaaaaattcattcaatggtgtctgttgcagttagataaagtccaggctccttctgagatgcacagggtcctgcata

SEQ ID NO: 17194 - DNA, 80 bp, synthetic construct
  source 1..80: mol_type = other DNA
tgtctcggctcagacagcaagaaaatatacacttcccctgcttttttattccattcaggccctcagcagatttgattgtg

SEQ ID NO: 17195 - DNA, 80 bp, synthetic construct
  source 1..80: mol_type = other DNA
ggggaacccaagatgggtcaactacactaggtcaagttactggtaagcctcagttttcttacatataaggtaggataatc

SEQ ID NO: 17196 - DNA, 80 bp, synthetic construct
  source 1..80: mol_type = other DNA
tgatcattgttgatttagaacctctaaatgtgatggcacttagccctatatgagtcataaatatttttcccaattggtca

SEQ ID NO: 17197 - DNA, 80 bp, synthetic construct
  source 1..80: mol_type = other DNA
ggagccagtgtcctctcaggggctccacttggaagcttaatctgcattttgaaaatagcacttcctaacccaaactcctg

SEQ ID NO: 17198 - DNA, 80 bp, synthetic construct
  source 1..80: mol_type = other DNA
cagagcgatgctcttaaaatgtaagtctgatcatgtcctcttctgtgcaaaacctgtagtggttcccaaagtcccacaga

SEQ ID NO: 17199 - DNA, 80 bp, synthetic construct
  source 1..80: mol_type = other DNA
ttacttggttaattatttcacgtaccaattctaagtgccttttgcctcagagtggaattaacagataccaggtagtcccc

SEQ ID NO: 17200 - DNA, 80 bp, synthetic construct
  source 1..80: mol_type = other DNA
ggagttgggcttggtaatgctggttcaaagaccagagaagcaaggtgctaagtatatttgtcagctcataacaaaatacc

SEQ ID NO: 17201 - DNA, 80 bp, synthetic construct
  source 1..80: mol_type = other DNA
gcagtgttgagagataaggcctaagggggatgtgtttaggtcacgagggtttctcatgaatggattaatgttgattataa

SEQ ID NO: 17202 - DNA, 80 bp, synthetic construct
  source 1..80: mol_type = other DNA
taaataaataaataaaaagggcttgggtctaggggttcactctcttgccttctcttgaccttctgcttttctccatggga

SEQ ID NO: 17203 - DNA, 80 bp, synthetic construct
  source 1..80: mol_type = other DNA
gcaatccaagagagcacaaactagaaatcacaatgtctcatatgacctagccttggaattcaattcgcactatgtcattt

SEQ ID NO: 17204 - DNA, 80 bp, synthetic construct
  source 1..80: mol_type = other DNA
tcagcctggggagagactaaaggcagaggcaggagccttgaccttatgagaagctgaattaagatactggaattaagaat

SEQ ID NO: 17205 - DNA, 80 bp, synthetic construct
  source 1..80: mol_type = other DNA
cctgactccaggtatcttagggatctgaaatgttctttttcactctactctactacaagcacacaatagtcagaagactg

SEQ ID NO: 17206 - DNA, 80 bp, synthetic construct
  source 1..80: mol_type = other DNA
cagcttcccaacttgccaaccaattactttgttctgcaggccttggtctcctcatctatgaaatgggatagcaataagcc

SEQ ID NO: 17207 - DNA, 80 bp, synthetic construct
  source 1..80: mol_type = other DNA
gtgtctcctgtcctgtctctctctctctgtcttttttttttctttttttgagacagtgtctcgccctatcccccaggctg

SEQ ID NO: 17208 - DNA, 80 bp, synthetic construct
  source 1..80: mol_type = other DNA
ttcttatagttccagattcaaaaggaacaaaaggatattctgtgaaaattctccctcccactcctgtctctcaaccacct

SEQ ID NO: 17209 - DNA, 80 bp, synthetic construct
  source 1..80: mol_type = other DNA
aacccactttgatgtggtagttaccattgcggcgcattaacgctgatgtgattcaaaagaccatataatttttatgctgc

SEQ ID NO: 17210 - DNA, 80 bp, synthetic construct
  source 1..80: mol_type = other DNA
tcagcctacaatgtgcccataaagagttctagagaaggaatcttcaatcctatggaagttggattggatgtagggcagaa

SEQ ID NO: 17211 - DNA, 80 bp, synthetic construct
  source 1..80: mol_type = other DNA
tctcacactgtctgccttgtctgggctgcttcagctggcagctcccacatacagctgtgtgaccggctctcccctgcctt

SEQ ID NO: 17212 - DNA, 80 bp, synthetic construct
  source 1..80: mol_type = other DNA
gctctcagtccgcagttccagctaagtttaaatatgcaaatacctccgaaatggcaaaggtgagggcttctctgaagcgt

SEQ ID NO: 17213 - DNA, 80 bp, synthetic construct
  source 1..80: mol_type = other DNA
cgctcttatatctgactgaggtgttaagagtatgagctgtgtcatcagggaccaggcttcaagtcctggctgtactgctt

SEQ ID NO: 17214 - DNA, 80 bp, synthetic construct
  source 1..80: mol_type = other DNA
tgaagtcagtatttatggtttccgtataaggaggctttggagagacactaaaagacaaaagtcaaagccctgaatgctga

SEQ ID NO: 17215 - DNA, 80 bp, synthetic construct
  source 1..80: mol_type = other DNA
aggtcaaatgttttgccccaaagcctcagctcgttaagggaactagtggggttggaactcaagtctcccaaacatttggg

SEQ ID NO: 17216 - DNA, 80 bp, synthetic construct
  source 1..80: mol_type = other DNA
ttcaccattagtgcttctagaggcacatcttcaccccagactgtaaatgcacacccatagtcagacaaaataaggagtgt

SEQ ID NO: 17217 - DNA, 80 bp, synthetic construct
  source 1..80: mol_type = other DNA
gttctgtttccctttgaaaaggtctatcttttcgcttggctgggataactgtctccttatttttgtcaactcctggaact

SEQ ID NO: 17218 - DNA, 80 bp, synthetic construct
  source 1..80: mol_type = other DNA
tggctaaggtaaattgtatgggaggaaattgtcaaatgataattgatgctagatcttctttcagttacatttattgatat

SEQ ID NO: 17219 - DNA, 80 bp, synthetic construct
  source 1..80: mol_type = other DNA
gatatttcctgtcatagttgaagtgtgcactggctttaagttccctgcctctagaccctattttcctgcctcacctcctc

SEQ ID NO: 17220 - DNA, 80 bp, synthetic construct
  source 1..80: mol_type = other DNA
ctatctgtttatgtatatctgtgtatgtatagtatgcatatgtggtgttttctctacctctggatggtactgccaaatac

SEQ ID NO: 17221 - DNA, 80 bp, synthetic construct
  source 1..80: mol_type = other DNA
cggcagtgggcatgtcttagggaagcccctctgtatgagttcccttatctgtgcctgcagcatgcagcatgatttttttt

SEQ ID NO: 17222 - DNA, 80 bp, synthetic construct
  source 1..80: mol_type = other DNA
ggaatacaaatttattagcgtgcatatgggagagaaccacagagtgattatccctaccatgcaatggggttctgaagctt

SEQ ID NO: 17223 - DNA, 80 bp, synthetic construct
  source 1..80: mol_type = other DNA
acaggtatgggccactgcgcacagccaagattggtcttttgagatatcttttcaggtttttgcatttctgactaacgatg

SEQ ID NO: 17224 - DNA, 80 bp, synthetic construct
  source 1..80: mol_type = other DNA
tcgggcgttattaatgggacgaattcctgggaactgcggatatagctcaccacagcatcttatcagttcattgcattctt

SEQ ID NO: 17225 - DNA, 80 bp, synthetic construct
  source 1..80: mol_type = other DNA
caagattagaaattatgatttaggagccatgcagtctctggctggaagagtctcaacctccccaaattgcttctgggaat

SEQ ID NO: 17226 - DNA, 80 bp, synthetic construct
  source 1..80: mol_type = other DNA
atggagatagtagatggtataaattttctgtttttacttgacagagtaaaccttgccaaccttactgagaaagtatactt

SEQ ID NO: 17227 - DNA, 80 bp, synthetic construct
  source 1..80: mol_type = other DNA
gacactgtgccagtgaaaactggcttatagtctacattaactgtcacctttgggattgtcttctctaaaggacagaaata

SEQ ID NO: 17228 - DNA, 80 bp, synthetic construct
  source 1..80: mol_type = other DNA
atgttctcacaacttttataacctcccttgtagagtagagaaatattaatggcaaaattgactctctttttaatcgctga

SEQ ID NO: 17229 - DNA, 80 bp, synthetic construct
  source 1..80: mol_type = other DNA
ccaccccaaaatgcgtctctttgacataaggactatttacagctgatatttttgagaaacagcagacacaggaaaaggtc

SEQ ID NO: 17230 - DNA, 80 bp, synthetic construct
  source 1..80: mol_type = other DNA
tggtgccactgcactccagcctgggcaacagagcgagactctgtctcaaaaaaataaataaataagaaataaaacatttt

SEQ ID NO: 17231 - DNA, 80 bp, synthetic construct
  source 1..80: mol_type = other DNA
gtctcaaaaaaaaaaaccaaatcgtactcttgtttaccatacttttcctggtcatcttcccataaccagtcatcaacaga

SEQ ID NO: 17232 - DNA, 80 bp, synthetic construct
  source 1..80: mol_type = other DNA
aacacatgacctcaggtgatccacccaccttggcctcccagagtgctaggattccaggcatgagccaccagccaatatat

SEQ ID NO: 17233 - DNA, 80 bp, synthetic construct
  source 1..80: mol_type = other DNA
cacagctcttcatcccattgacttggaggcaataggatgaatccttctttactaataaagcctttggaaactggaggcaa

SEQ ID NO: 17234 - DNA, 80 bp, synthetic construct
  source 1..80: mol_type = other DNA
gacagagcaagagactctgtctcaaaaaaaaaaaaaaagttattcttggctggccacggtggctcgtgcttataatccca

SEQ ID NO: 17235 - DNA, 80 bp, synthetic construct
  source 1..80: mol_type = other DNA
gagcaaagacacagaagcaaggcacagcttggtgtgggccggaattctaagtcctctagtgttgttggagcttaaaattc

SEQ ID NO: 17236 - DNA, 80 bp, synthetic construct
  source 1..80: mol_type = other DNA
tgaggtgcaacccatataatcacccagatgttattaggccatgatcattctgtagtaagctacctcccttctgtgtttcc

SEQ ID NO: 17237 - DNA, 80 bp, synthetic construct
  source 1..80: mol_type = other DNA
aataaatgtctgtagaattaagccacccagtctatgatgtttcacgacagcagcccaagcagatgaatacagggctattc

SEQ ID NO: 17238 - DNA, 80 bp, synthetic construct
  source 1..80: mol_type = other DNA
accctggggagagactgtggcccctactagaggggtcttccgaggccacgtttctatgatgacctggagaatccaggaga

SEQ ID NO: 17239 - DNA, 80 bp, synthetic construct
  source 1..80: mol_type = other DNA
gtctctacaaaagaaaaaatttttttaattagctgggcatggtggtaagcacatgtggtcccagttagtcaggaagctga

SEQ ID NO: 17240 - DNA, 80 bp, synthetic construct
  source 1..80: mol_type = other DNA
gtgcattggacacgtggttgtcagtcatgcaacaagagcaaacaaacatacgggcaaaaatggaagcactggaggccagc

SEQ ID NO: 17241 - DNA, 80 bp, synthetic construct
  source 1..80: mol_type = other DNA
aaagccaatttttcctacaaagtccctctagcctcctcttctaacaaaaactaacactgttgtcattgcaaaagagaaat

SEQ ID NO: 17242 - DNA, 80 bp, synthetic construct
  source 1..80: mol_type = other DNA
tgatttcatcaaaattaaaaacttcagttcatcaaaagacatcaagaaaatgaaaagagctgggcatggtggctcacacc

SEQ ID NO: 17243 - DNA, 80 bp, synthetic construct
  source 1..80: mol_type = other DNA
agccataggctaggatgtgcctatatcccatgccatatttgtaactcatatttctgacaaataacttgtatccagattat

SEQ ID NO: 17244 - DNA, 80 bp, synthetic construct
  source 1..80: mol_type = other DNA
atgtctaactcaacattaaaatggaaaaaaaatttggccaggcccaatggcttgtgctacttggccaagaaagttctata

SEQ ID NO: 17245 - DNA, 80 bp, synthetic construct
  source 1..80: mol_type = other DNA
actttgggagtctgaggtgggatcacttgaggccaggagttccagatcagcctgggaaacaaagtgagaccccttgtccc

SEQ ID NO: 17246 - DNA, 80 bp, synthetic construct
  source 1..80: mol_type = other DNA
ttgaagatataggagaaaagggatagcagacaaggtccctgagaaagcgagaaggaaggaaactcagagcccagacggag

SEQ ID NO: 17247 - DNA, 80 bp, synthetic construct
  source 1..80: mol_type = other DNA
acagacaaagcatttaagatttctttgacaacctgcgtttcagtaaattccacatatttgttgaaagcctattgtatagg

SEQ ID NO: 17248 - DNA, 80 bp, synthetic construct
  source 1..80: mol_type = other DNA
cagtagtcactatgctgctgacctctatccagcacctcccagagctgatagaagatatgtcgctggctctaaacgactgg

SEQ ID NO: 17249 - DNA, 80 bp, synthetic construct
  source 1..80: mol_type = other DNA
ctttcccatagaagcctttctctcgctctcttttccttattaggttgagatcaatgagcttctttatctgaacgttcctg

SEQ ID NO: 17250 - DNA, 80 bp, synthetic construct
  source 1..80: mol_type = other DNA
ggcagaagccttccttcaacttcattgtgacggatgacaacctagcgttggaaggagagaaaaaaaaatccatttaaaaa

SEQ ID NO: 17251 - DNA, 80 bp, synthetic construct
  source 1..80: mol_type = other DNA
aaaataagaacttccaagaagtccagaatctgccattctgcatgccttcttggatgtcatgagagcattagagttgcctc

SEQ ID NO: 17252 - DNA, 80 bp, synthetic construct
  source 1..80: mol_type = other DNA
tttcaagtgcttactagctagagattgcatactggacagcatagaaatagaacattcccatcaacacagacttttactag

SEQ ID NO: 17253 - DNA, 80 bp, synthetic construct
  source 1..80: mol_type = other DNA
atatacgagcatcatgattgacagcttcacaggccacctggaaaaagaaggcgttacccaaaggaaccagaagaatagat

SEQ ID NO: 17254 - DNA, 80 bp, synthetic construct
  source 1..80: mol_type = other DNA
ctgcccaggagactgaggcgggagtatttctcaagcccagggattcaaggctacagtgagctatgattgcatcactacac

SEQ ID NO: 17255 - DNA, 80 bp, synthetic construct
  source 1..80: mol_type = other DNA
tggctactacattatatgagcattgcagtcactgtgcattcttgccagaacttgggtttgttggttttttttttttttaa

SEQ ID NO: 17256 - DNA, 80 bp, synthetic construct
  source 1..80: mol_type = other DNA
ctactccagaggcagagcagccccaagggctgctggttgcccatttttatggttatttctcgattacatgctaaataagt

SEQ ID NO: 17257 - DNA, 80 bp, synthetic construct
  source 1..80: mol_type = other DNA
gcatgtgccaccatattttttgtggagacgggatgtcgccatgttgcccaagctggtcttgaattcctgggctcaagcaa

SEQ ID NO: 17258 - DNA, 80 bp, synthetic construct
  source 1..80: mol_type = other DNA
ggggtcattgattggttggagtaaagtgaacgaaataatcagaatgtgttgacccagtgcagtggcttacgcctatagtc

SEQ ID NO: 17259 - DNA, 80 bp, synthetic construct
  source 1..80: mol_type = other DNA
gcctttttttttttttttttaattattattatttgagacaaggtctggctctgtcatccaggctggagtggggtggctca

SEQ ID NO: 17260 - DNA, 80 bp, synthetic construct
  source 1..80: mol_type = other DNA
atgacactgcagaggaatcaattctttctgtagatgttcaagagaaaggccttttgagaaatgtgcaagttccttttgta

SEQ ID NO: 17261 - DNA, 80 bp, synthetic construct
  source 1..80: mol_type = other DNA
ctggcccaatctatattttagaatcagcataccgactccatttttctgtaagggaccacaggcttacaggggctccctga

SEQ ID NO: 17262 - DNA, 80 bp, synthetic construct
  source 1..80: mol_type = other DNA
accatgtcttgctactaaacatgatttaccaacgtaaactgtttggggccatactcttagcctgcattctttttgtaacc

SEQ ID NO: 17263 - DNA, 80 bp, synthetic construct
  source 1..80: mol_type = other DNA
ttcccagtgtttggggatattgtgttttatgctttcacgtctcattatgtctgcaaaatgcccatttgtgtctcctgcct

SEQ ID NO: 17264 - DNA, 80 bp, synthetic construct
  source 1..80: mol_type = other DNA
atcttagacaatgttccagggtacccacaccatatcatcaacacgcatcctgatgtaaaggttgtgtattgtcactgaac

SEQ ID NO: 17265 - DNA, 80 bp, synthetic construct
  source 1..80: mol_type = other DNA
cttcaagcccaatgtgctttcagttatgcacattaatggtgaggacccatacaaggattctgtctttcactttcagtaca

SEQ ID NO: 17266 - DNA, 80 bp, synthetic construct
  source 1..80: mol_type = other DNA
tcaggaaatcctcaatattggaaactccttctttcataggaccaggagttgtccaagagtaaggtctcagtgcttcaaat

SEQ ID NO: 17267 - DNA, 80 bp, synthetic construct
  source 1..80: mol_type = other DNA
aagaaacagaatggtaatcatgctatgtgactcagtctccagggcttatggcaaaataaatttaggtggccctgaaactt

SEQ ID NO: 17268 - DNA, 80 bp, synthetic construct
  source 1..80: mol_type = other DNA
gagtccccaaacccctatcatttctgtaatctctgaatggtattaaaacttcagccatctgacccctcctttgagtctca

SEQ ID NO: 17269 - DNA, 80 bp, synthetic construct
  source 1..80: mol_type = other DNA
tcctttgcaagttttttcctgatccaggaaagaattaactaagagtctggcacatcttaaggcctcataaaagacattta

SEQ ID NO: 17270 - DNA, 80 bp, synthetic construct
  source 1..80: mol_type = other DNA
gactctctttgtcgacactgccctaatgtcttgaaggaaaccaaaatattccagtccaaaatacacttctttggcatatt

SEQ ID NO: 17271 - DNA, 80 bp, synthetic construct
  source 1..80: mol_type = other DNA
tgaaattggcaggattcaaagtaactcccctcaaccaccctgtgtttctctctgaaagtgatactgggtaccagcatgaa

SEQ ID NO: 17272 - DNA, 80 bp, synthetic construct
  source 1..80: mol_type = other DNA
ttctcattatctattgcagaaaataagaccaaggcgtaaacacacctgaacagacccgttttaatgacagtttccaagga

SEQ ID NO: 17273 - DNA, 80 bp, synthetic construct
  source 1..80: mol_type = other DNA
gaaaagtgggctcgcttaacctgggacactcaaaagcagcagaagccaaagtagggatcttctgaaatgtctgaaataat

SEQ ID NO: 17274 - DNA, 80 bp, synthetic construct
  source 1..80: mol_type = other DNA
gtgccaggcagctgccccacatgatgggaagcggcttgcagagccaagccagctgggagccatgggctggagtggggtgg

SEQ ID NO: 17275 - DNA, 80 bp, synthetic construct
  source 1..80: mol_type = other DNA
tttgaaagcggaaaatcttcccaaattggctcctctaagacttgttcttctattttcttccacatctgcttctccttcct

SEQ ID NO: 17276 - DNA, 80 bp, synthetic construct
  source 1..80: mol_type = other DNA
taaaaattagccaggtgtggtagcctgtaattgcagctcctctgcaggctgacgcaggaaaatcatgtgaacccaggaga

SEQ ID NO: 17277 - DNA, 80 bp, synthetic construct
  source 1..80: mol_type = other DNA
tttatagcccataatggactaattggtactgaggagtaggtcattgctataaagacacctgaaaatgcagaagcagcttt

SEQ ID NO: 17278 - DNA, 80 bp, synthetic construct
  source 1..80: mol_type = other DNA
tgcataaattttgcgtaactaaaaagaaggtaaatgctaatagtgaagacaatggggaaagggccttgaagacatttcac

SEQ ID NO: 17279 - DNA, 80 bp, synthetic construct
  source 1..80: mol_type = other DNA
aataagttaagactttgggggactgttgggattacaggtgcacaccaccactcccagctaatttttttttttttttgtat

SEQ ID NO: 17280 - DNA, 80 bp, synthetic construct
  source 1..80: mol_type = other DNA
accagacagctttaaggaactaggattgacattaggaagccaataaacacccttggaaaaactggccccatactttaaat

SEQ ID NO: 17281 - DNA, 80 bp, synthetic construct
  source 1..80: mol_type = other DNA
acttaaaagagcctgtatggccattactattcttgttgtaccttatcaggcaacatataatactaaaacttgcttttgag

SEQ ID NO: 17282 - DNA, 80 bp, synthetic construct
  source 1..80: mol_type = other DNA
aggttgacatatctgttaatctaccttttgtgagttgacttgtcagaaggggacggggaagttttttttggcccacatgt

SEQ ID NO: 17283 - DNA, 80 bp, synthetic construct
  source 1..80: mol_type = other DNA
aaatgaacaaaagtccctgtttctgtctcataggagtgagtggtgcttctttttcaattacagctttagcctcagtttgt

SEQ ID NO: 17284 - DNA, 80 bp, synthetic construct
  source 1..80: mol_type = other DNA
gagccctgccaaaaagattcttaatagaattacacccactttctgacagtatctaatccagagcaaagcctgtttctttg

SEQ ID NO: 17285 - DNA, 80 bp, synthetic construct
  source 1..80: mol_type = other DNA
gtccattgtagctaaaagtttgaattttgggctaatgttttgtttatttatagggtcgtgcactatcgcccagactagag

SEQ ID NO: 17286 - DNA, 80 bp, synthetic construct
  source 1..80: mol_type = other DNA
gcctctataatgccccatatctgcctacgagcagaaggaaataattattttcttctctatggcagtgttttggttttcat

SEQ ID NO: 17287 - DNA, 80 bp, synthetic construct
  source 1..80: mol_type = other DNA
tgttgcccaggctggggtgtagtggtgtgatcatggctcactacagcctcgacttccccaagcccagatgatcctcccac

SEQ ID NO: 17288 - DNA, 80 bp, synthetic construct
  source 1..80: mol_type = other DNA
gctcaagtaatcctcctaccttcaccccacaaagtggtgggattacaggtgtgagccactgcacctggccttctgaagcg

SEQ ID NO: 17289 - DNA, 80 bp, synthetic construct
  source 1..80: mol_type = other DNA
tccaacaatctctaaacaaggataaaataacctgggaaggttacatgagtcaaaccaaagtctcatagcaagccaggtac

SEQ ID NO: 17290 - DNA, 80 bp, synthetic construct
  source 1..80: mol_type = other DNA
agctgtaggggaggaaaattatttttttcctcaactcccataggttcttggttggaatggacccctgtaatgaaagacag

SEQ ID NO: 17291 - DNA, 80 bp, synthetic construct
  source 1..80: mol_type = other DNA
aaggataccaaaataaattacttactgctctcaaaaagcaaaccgtttgctggcagacttgatcatataccaatgactgg

SEQ ID NO: 17292 - DNA, 80 bp, synthetic construct
  source 1..80: mol_type = other DNA
ctgagatgatccacctgcctcgacctcccaaagtgctaggattacaggcatgagccatcacgcccagaccagaaatttct

SEQ ID NO: 17293 - DNA, 80 bp, synthetic construct
  source 1..80: mol_type = other DNA
aggggtggggaatttccagaacagagggtttctcttccttttagaccatgtagagtaacttcgagtcattgccatagcat

SEQ ID NO: 17294 - DNA, 80 bp, synthetic construct
  source 1..80: mol_type = other DNA
ctcaagtgattctcccacctaagttttcaagtatctgggaccacaggtgcatgccaccacacttggctaatttttaaaaa

SEQ ID NO: 17295 - DNA, 80 bp, synthetic construct
  source 1..80: mol_type = other DNA
tctggtttaaggtgggcatttcaacgcacagacttcattaaaattgggtgagaagcatcttacaatagtttagattaatg

SEQ ID NO: 17296 - DNA, 80 bp, synthetic construct
  source 1..80: mol_type = other DNA
tctccaaatgtcccgggagaggggggtgcatttagattttaatgtctttcaggaagttcctggaatgaataaagtcattt

SEQ ID NO: 17297 - DNA, 80 bp, synthetic construct
  source 1..80: mol_type = other DNA
tgatgcatggaaattattaagaggaaacattgggggaaggggatatcctggctaaactgatctgacaggattcttgttga

SEQ ID NO: 17298 - DNA, 80 bp, synthetic construct
  source 1..80: mol_type = other DNA
gcatgattgcttgtctcattttagagtctctctgggagtgataatttaaaagaactcacctcctaaaataaaagtgatca

SEQ ID NO: 17299 - DNA, 80 bp, synthetic construct
  source 1..80: mol_type = other DNA
tttgaggttgcagagataacacagaaacccaaaagtcaagcctagctggaaaagagctcagaagtgcctgagtagagttt

SEQ ID NO: 17300 - DNA, 80 bp, synthetic construct
  source 1..80: mol_type = other DNA
tccagactgcccagcgctgtgatcaggcctgtgaacagctactgtactccagcctgggcaaagcagcaggaccctgtttc

SEQ ID NO: 17301 - DNA, 80 bp, synthetic construct
  source 1..80: mol_type = other DNA
agcacagagtgccaaagaggcatgtcccacctcccaccccagggcctaaggaaacccacctgctggccctttcctctgag

SEQ ID NO: 17302 - DNA, 80 bp, synthetic construct
  source 1..80: mol_type = other DNA
taaaagggcttgacagagggaattcatctctttttgctcttccacattccttcatgtgaggacagtgttcctcccttgtg

SEQ ID NO: 17303 - DNA, 80 bp, synthetic construct
  source 1..80: mol_type = other DNA
tacacaggcattgttcttgagtgttgagtgtacagtggtaaacaagcctttaacacctgaagtgcagtggagaagagcaa

SEQ ID NO: 17304 - DNA, 80 bp, synthetic construct
  source 1..80: mol_type = other DNA
aagtgaaggcataaaataagactggagaagtaacagggaccagcagtaaggcgtttggattgtattccttatgtgatggg

SEQ ID NO: 17305 - DNA, 80 bp, synthetic construct
  source 1..80: mol_type = other DNA
atgaaaccctgtctctacaaaaaatataaaaactagccaggagtggtggcatgcagctgtggtcccagctacttgggagg

SEQ ID NO: 17306 - DNA, 80 bp, synthetic construct
  source 1..80: mol_type = other DNA
cagttccaagcttcattaactaagtgttctcaggcaagaatctttccttcaggcaagcaccctttaataataaaaataat

SEQ ID NO: 17307 - DNA, 80 bp, synthetic construct
  source 1..80: mol_type = other DNA
gtttgtgataacatttgcttatgcaggggcctgtggtctttctattatatcttcatagccatgaaactcccctggagagg

SEQ ID NO: 17308 - DNA, 80 bp, synthetic construct
  source 1..80: mol_type = other DNA
ctcattccatcctcccaatacctccataagcaaatattagtgaatccccatttatcagattaggagaccaaggctcaagt

SEQ ID NO: 17309 - DNA, 80 bp, synthetic construct
  source 1..80: mol_type = other DNA
attcatctggctgggataacaaagataaagtcagctacaaagttaaacaggaaacacaatctgtcccaaggataaactgc

SEQ ID NO: 17310 - DNA, 80 bp, synthetic construct
  source 1..80: mol_type = other DNA
cacaaaacatgcccctcctttcttcatccttgactttatctcccaaggcccaggacaaagacgtagattgctgggtcacg

SEQ ID NO: 17311 - DNA, 80 bp, synthetic construct
  source 1..80: mol_type = other DNA
aaaaaaaagacagacttttattcagatatgcatgcaggagttcacagaaaaaaaaagtgagtccaggaggctgttatttg

SEQ ID NO: 17312 - DNA, 80 bp, synthetic construct
  source 1..80: mol_type = other DNA
agaataacgttatattcagttgaaccaaaatgaattaaatattaatatttgtacttcaaaaacggtccagcttggctggg

SEQ ID NO: 17313 - DNA, 80 bp, synthetic construct
  source 1..80: mol_type = other DNA
aactaaatgagataaaatggtgttaaattggaagtattatagtatttctgttaacaacatagggctccagaaccagcttc

SEQ ID NO: 17314 - DNA, 80 bp, synthetic construct
  source 1..80: mol_type = other DNA
aattttacataggtttttaccaatgtacagctgttgattgtgactggtttccggcaatctggatttcacaatctggataa

SEQ ID NO: 17315 - DNA, 80 bp, synthetic construct
  source 1..80: mol_type = other DNA
ctatacaaatcttgagaatacaacgtgaaggtgaactgctgactaaagtttggtccctttcgctccgtctccttgcgaaa

SEQ ID NO: 17316 - DNA, 80 bp, synthetic construct
  source 1..80: mol_type = other DNA
cagggggttgggggggtgcacggcctggccctgggctcggaggaggcggggccgcagagttggcttgaatgagtgcaggg

SEQ ID NO: 17317 - DNA, 80 bp, synthetic construct
  source 1..80: mol_type = other DNA
ctttttatccgggcagctggcgacattttgaaaagcttgcttttgctgtttgccagatacatatatatgtattttgagac

SEQ ID NO: 17318 - DNA, 80 bp, synthetic construct
  source 1..80: mol_type = other DNA
ggaacagagccagcatccgcaataacaaactcctggttagaaaagcatgacgtattgtttacttgagcatgaattgattg

SEQ ID NO: 17319 - DNA, 80 bp, synthetic construct
  source 1..80: mol_type = other DNA
cctagttctttgtcatttgtgtgtgatataaatgtcttctttcacaatgagttctttcatttagtttatggctttgttgt

SEQ ID NO: 17320 - DNA, 80 bp, synthetic construct
  source 1..80: mol_type = other DNA
taaaagcacttgcaaaatcctaaaatcataatttaaggtgtttttggagggcaggagcaatggtggcaggcagtgttttg

SEQ ID NO: 17321 - DNA, 80 bp, synthetic construct
  source 1..80: mol_type = other DNA
agttttgttacacaatacattttactacctgtttaattatcttttttgactcagaaaccagtttcctgggtccaggatgt

SEQ ID NO: 17322 - DNA, 80 bp, synthetic construct
  source 1..80: mol_type = other DNA
caccgcacccggcccatactgctatttcttaacagcagagaaattatgtgtcagattctgtaagtgtaatggtatataaa

SEQ ID NO: 17323 - DNA, 80 bp, synthetic construct
  source 1..80: mol_type = other DNA
gttgttgacttgagtttttccgtagtttgtagggggagggtaatagagtattaggtagcttttggaatacataggagtgt

SEQ ID NO: 17324 - DNA, 80 bp, synthetic construct
  source 1..80: mol_type = other DNA
tgttcatgtacagttttttgatgacagcccaacaaggggctgggttagcaaaaggcttttaaagccatatacaggtaaga

SEQ ID NO: 17325 - DNA, 80 bp, synthetic construct
  source 1..80: mol_type = other DNA
agagtctccagtctagtacgttgtcgtactcggtgttgtaaaatccaaacaagggtcagtttcccaggtaactgggaaat

SEQ ID NO: 17326 - DNA, 80 bp, synthetic construct
  source 1..80: mol_type = other DNA
ggctaaagtaacttattttctgatactgtttacttatatttagaatgaatctcattggggttgcactggggccgggcatg

SEQ ID NO: 17327 - DNA, 80 bp, synthetic construct
  source 1..80: mol_type = other DNA
gtctcttttaggaccaatttcgagatttaaaaaatttggcagaattactttttttttttgcagcggagtccagctttatc

SEQ ID NO: 17328 - DNA, 80 bp, synthetic construct
  source 1..80: mol_type = other DNA
ataaattttaacgcgttgagtctgaactgggctgccctttcaaaatgtgaaggccccttaaagtagcacattggttggtt

SEQ ID NO: 17329 - DNA, 80 bp, synthetic construct
  source 1..80: mol_type = other DNA
gctagtaagtttttaagaaagattctcaaacctcttttaaatcgtctgcctcacttgaagaggtatgccctacctgttta

SEQ ID NO: 17330 - DNA, 80 bp, synthetic construct
  source 1..80: mol_type = other DNA
tatttatgttagggtgatgggggaagaaagggggagggtgtattaacaagataccttgttttatatatgtgtgtgtatat

SEQ ID NO: 17331 - DNA, 80 bp, synthetic construct
  source 1..80: mol_type = other DNA
gactgtcaacaacaacaaaaaatgttatagaagtgaaaaaaattgattaatttagaacaagcttgtccagtctgtggccc

SEQ ID NO: 17332 - DNA, 80 bp, synthetic construct
  source 1..80: mol_type = other DNA
cctgatatttatgatatatggtcatgccaacagctttgtcataaatagaactcccatggcagcaatcacttaatcttgta

SEQ ID NO: 17333 - DNA, 80 bp, synthetic construct
  source 1..80: mol_type = other DNA
ggtcatatcagattctgagagtgacattggtggctctgatgtggaatttaagccagacactaaggaggaaggaagcagtg

SEQ ID NO: 17334 - DNA, 80 bp, synthetic construct
  source 1..80: mol_type = other DNA
agaaatgatggaggcacgatgtagaaagatggcacatatatccaagtatgatagagtggtgaggagggagatctgtagga

SEQ ID NO: 17335 - DNA, 80 bp, synthetic construct
  source 1..80: mol_type = other DNA
aagacctcatggttgtgcctgacaaaatctccgaagttgtagagcttctaaagaagcttccagatcttgagaggctactc

SEQ ID NO: 17336 - DNA, 80 bp, synthetic construct
  source 1..80: mol_type = other DNA
ctaggctgcccacagcaatttaagttacttgaaactcgcttttatcttagtagccctttggcctttcttcagtttttttt

SEQ ID NO: 17337 - DNA, 80 bp, synthetic construct
  source 1..80: mol_type = other DNA
acttcataagcaattttgttctttaaatgtcacggccaacattacctggaaccattgctgttttatagtttaggtttatg

SEQ ID NO: 17338 - DNA, 80 bp, synthetic construct
  source 1..80: mol_type = other DNA
cttttaacagatgttttactgtgcctggctaactatagtcgagggggtgatggtcctatgtgtcgcccagtaattctgtt

SEQ ID NO: 17339 - DNA, 80 bp, synthetic construct
  source 1..80: mol_type = other DNA
atgcaaatgaggtaagaaagcaaatatagttcatgacctctagcaactgttgaaaactgctctttagggatgacatgctg

SEQ ID NO: 17340 - DNA, 80 bp, synthetic construct
  source 1..80: mol_type = other DNA
ctcacaccaattgatagagtgtttactagacttggtgcctcagacagaataatgtcaggtgagttttttgtttcccactt

SEQ ID NO: 17341 - DNA, 80 bp, synthetic construct
  source 1..80: mol_type = other DNA
agactcgtgtagctaaacaaggcctatttatagaatgcttttagacgtggatgtactaaccgatgttgcttttctgtcct

SEQ ID NO: 17342 - DNA, 80 bp, synthetic construct
  source 1..80: mol_type = other DNA
aattttaagggaagtttgcctggctagtgaaaggtcaactgtagatgctgaagctgtccataaattgctgactttgatta

SEQ ID NO: 17343 - DNA, 80 bp, synthetic construct
  source 1..80: mol_type = other DNA
caattggtacccatgtccataaaggcagcaacaaagctgcttgtctattgaagattactactgcaaattggactgcattc

SEQ ID NO: 17344 - DNA, 80 bp, synthetic construct
  source 1..80: mol_type = other DNA
gtcacagtgactgggatatatcaaacacttaaccccgacatctttaccttgaaatttctaggaaaacattacacaacatg

SEQ ID NO: 17345 - DNA, 80 bp, synthetic construct
  source 1..80: mol_type = other DNA
cacattaacaccagatgctaaaaataagcctccaaaccggttgttaaaaatctgattgccttctagtgttgcagttgcgt

SEQ ID NO: 17346 - DNA, 80 bp, synthetic construct
  source 1..80: mol_type = other DNA
tgaggccagaatcacctgagttcgaaaccagtctgagcaacatagcgagacccccatctcaaaaaaatacaacataaaat

SEQ ID NO: 17347 - DNA, 80 bp, synthetic construct
  source 1..80: mol_type = other DNA
ctccacaattcatatcccacaaaactcagtacaggcatttcacacacctgtgacactggagagtcctcatcatttttttc

SEQ ID NO: 17348 - DNA, 80 bp, synthetic construct
  source 1..80: mol_type = other DNA
tcctgtttacacagtaatatattcatgtagaacatgtaggaaacacaaggaagtacaacaaagacaacaaaggtagtgcc

SEQ ID NO: 17349 - DNA, 80 bp, synthetic construct
  source 1..80: mol_type = other DNA
ggctaagagctgttcctgctccacctgagaggcacagggttgagtgtcatagggcagagtcactccttaggacttctcac

SEQ ID NO: 17350 - DNA, 80 bp, synthetic construct
  source 1..80: mol_type = other DNA
aggctctcatctggggtctgacccatgacccttcccttcctcccctggagtcacctgcatccatccggtatagtagttga

SEQ ID NO: 17351 - DNA, 80 bp, synthetic construct
  source 1..80: mol_type = other DNA
tcagagcaattgtcccaatgtcacacagcaatacagtcagaattacaccctcagtgagtctcttttgttttgagacaaga

SEQ ID NO: 17352 - DNA, 80 bp, synthetic construct
  source 1..80: mol_type = other DNA
tgtctgagaacagatggcaaatcagtgggagaacagagattagctatttttattcctaatctagtaaaccataggtggct

SEQ ID NO: 17353 - DNA, 80 bp, synthetic construct
  source 1..80: mol_type = other DNA
actctcccaaagccaggataaagttgttctctggaactctttatctgcctaaagtccaaactcactaaaaagaatacttg

SEQ ID NO: 17354 - DNA, 80 bp, synthetic construct
  source 1..80: mol_type = other DNA
tataaactcacgaactctgtagggagatgggtaatcactttatggttctcccaatgtgcatgttaataaatttgtatgcc

SEQ ID NO: 17355 - DNA, 80 bp, synthetic construct
  source 1..80: mol_type = other DNA
ttatagagccccctaatatgtgccaagcagttttaggcacttggcatacttcagtaaataaaacatcaaaagttcctgcc

SEQ ID NO: 17356 - DNA, 80 bp, synthetic construct
  source 1..80: mol_type = other DNA
agtcagtgccaggtaaactgtacacaatagatacctgttaaatgaattaatgggatgggggatagtcaaaagagtttccc

SEQ ID NO: 17357 - DNA, 80 bp, synthetic construct
  source 1..80: mol_type = other DNA
caatttgtcccttcctcgccatccatactgccagccttaattcaagttcacattatcacttgattggattattacaaaag

SEQ ID NO: 17358 - DNA, 80 bp, synthetic construct
  source 1..80: mol_type = other DNA
gctcataacggttagtagtaatagttgtgattcagttcagtggagtggattgagcgttgtgatccaaaggaaggtaggac

SEQ ID NO: 17359 - DNA, 80 bp, synthetic construct
  source 1..80: mol_type = other DNA
ttatcttttattgcccaataaacattgggaagacatagcaggccagaaaggcctgtccccagacattgtttcttgaggcc

SEQ ID NO: 17360 - DNA, 80 bp, synthetic construct
  source 1..80: mol_type = other DNA
gttcaccaggggctgggtgaagcttggggcctcggagaagtccagggccttatagttgggtggctcataggtgatgcctg

SEQ ID NO: 17361 - DNA, 80 bp, synthetic construct
  source 1..80: mol_type = other DNA
ctctggtacctcagatcaggccagccctgagacatcagtccactggatgggaacaacacactatagcctctctcccctgg

SEQ ID NO: 17362 - DNA, 80 bp, synthetic construct
  source 1..80: mol_type = other DNA
tttactttccctgttccagaactaagggactgacatacaccaagagagccctttctgcactttttttttttttgagacgt

SEQ ID NO: 17363 - DNA, 80 bp, synthetic construct
  source 1..80: mol_type = other DNA
ttttcactaggcaagcttttttacttctgaaaacaggacagatatttctctgggtgtcctcaactttcggcaaaagtggg

SEQ ID NO: 17364 - DNA, 80 bp, synthetic construct
  source 1..80: mol_type = other DNA
tatgattaggtgagttgactaagaactgaacaaaccaggaatcagtccctaaaacgagaggcctggacccttctccccac

SEQ ID NO: 17365 - DNA, 80 bp, synthetic construct
  source 1..80: mol_type = other DNA
agtcgaggatgaaaggagactgtggatgtgagtgtctagcatggctgcctgcagagcacctgctattattggaggttttt

SEQ ID NO: 17366 - DNA, 80 bp, synthetic construct
  source 1..80: mol_type = other DNA
ccagtcctctcctgacatgtttcattcattctccacacccaaaaggccctttccctcctccacccctttgtacacagttt

SEQ ID NO: 17367 - DNA, 80 bp, synthetic construct
  source 1..80: mol_type = other DNA
tacactggcagaaaagtgtctcagaaactactcctgagttgagagggagcacaaggtcaaggtcaaggtcagcttaggat

SEQ ID NO: 17368 - DNA, 80 bp, synthetic construct
  source 1..80: mol_type = other DNA
tgaggtatagtttatgctcagatctgacagtaggctgagttctgacagatgaatacacccatgcaattattaatccaacc

SEQ ID NO: 17369 - DNA, 80 bp, synthetic construct
  source 1..80: mol_type = other DNA
ggtctgatacatcatgtcacctcatctttataactatcctatgaggtggcactatcagggttcccattttagagaagagg

SEQ ID NO: 17370 - DNA, 80 bp, synthetic construct
  source 1..80: mol_type = other DNA
ttcttctctgtctctgacgaactctcctatgtgtgtgcctccctgtgcatatctttctgtctctatagaactatttctgt

SEQ ID NO: 17371 - DNA, 80 bp, synthetic construct
  source 1..80: mol_type = other DNA
cgcgtcctccagcatggcctcgttgatgatcaggtggtgtctctgcccgtccttcttgaaccggtatttgaaggtctcct

SEQ ID NO: 17372 - DNA, 80 bp, synthetic construct
  source 1..80: mol_type = other DNA
ttgtggcctttgctcacctggtaggccggctccagcttcttctgaaaggctgagcaccacccctcagccccggccacccc

SEQ ID NO: 17373 - DNA, 80 bp, synthetic construct
  source 1..80: mol_type = other DNA
ttcgagaattaaatgagataattacataaagcacctagtggctggcttaggaaggaactcactcactttttttgagatgg

SEQ ID NO: 17374 - DNA, 80 bp, synthetic construct
  source 1..80: mol_type = other DNA
atgatcgtgtgtgttttgtgtgtgtgctttgggaggggcttgtctcccatatcctgcatggaagctgacccctccattca

SEQ ID NO: 17375 - DNA, 80 bp, synthetic construct
  source 1..80: mol_type = other DNA
tcctggcagaattaggggtgatgagggtgctgtgctatgttgggcactcacctcggggtccggaaactgctgctccaggg

SEQ ID NO: 17376 - DNA, 80 bp, synthetic construct
  source 1..80: mol_type = other DNA
tttaactccttccacactgggatcatcccctcgacagacaaggaaaccaactcagagaggtgcagtgttgtgctcagggt

SEQ ID NO: 17377 - DNA, 80 bp, synthetic construct
  source 1..80: mol_type = other DNA
tggtggacacctcacagcggtagctgccagtgaaggcaggctgggcatcggtgatgtgcagctcgaacagatagacctgt

SEQ ID NO: 17378 - DNA, 80 bp, synthetic construct
  source 1..80: mol_type = other DNA
tgaacaaacaaggggacttaagccttaaggttctggtgggcagggcggaaaaaaacaaaacacaaaaaacgaaggcttaa

SEQ ID NO: 17379 - DNA, 80 bp, synthetic construct
  source 1..80: mol_type = other DNA
aagtactggggattataggcctgagccaccgcacctggcccagcaaaggcttttgagacctgccctggacacgccctacc

SEQ ID NO: 17380 - DNA, 80 bp, synthetic construct
  source 1..80: mol_type = other DNA
ctggcggggggcacagccacagcaaaggcaagaaagtgtgaaagcacctcctgttccctggatggatggagagtcgctgg

SEQ ID NO: 17381 - DNA, 80 bp, synthetic construct
  source 1..80: mol_type = other DNA
ctcaacatgggggccacaccgtacaggctcatgaagcagataatgtcacagccaggaggaaccaacccaatgccaccacc

SEQ ID NO: 17382 - DNA, 80 bp, synthetic construct
  source 1..80: mol_type = other DNA
ttgtgatttataaccatttattagtgaaagtgtttttaagcacagtcagggtgtaaacagtgcagcattcctgctcccct

SEQ ID NO: 17383 - DNA, 80 bp, synthetic construct
  source 1..80: mol_type = other DNA
atttgagaatggatttagacaatgctaagtacagtctgctgggttttgctttgttctgggttgttgttgggttttttttg

SEQ ID NO: 17384 - DNA, 80 bp, synthetic construct
  source 1..80: mol_type = other DNA
gagttgaagagagaacatactgtttttcttctgtatctcctcacccccattcgccttagaggtgagttttcaagatttga

SEQ ID NO: 17385 - DNA, 80 bp, synthetic construct
  source 1..80: mol_type = other DNA
atcagatctgcctgctgccagccttcaccgttcagaagaaacacttaactcttttcagcaaccgcaacaaataattatgt

SEQ ID NO: 17386 - DNA, 80 bp, synthetic construct
  source 1..80: mol_type = other DNA
agatgtgacccttaagtctttttcttttttagcactgttttccaagcgcttgactcagaaggatgctcaaattcagcgca

SEQ ID NO: 17387 - DNA, 80 bp, synthetic construct
  source 1..80: mol_type = other DNA
ctatacctgttacaggaactaagggacccccctaaaggttttcttaaagggtctgatcctggagaatctggaattttttt

SEQ ID NO: 17388 - DNA, 80 bp, synthetic construct
  source 1..80: mol_type = other DNA
tagctagacatcactcaagccacgtgcagcccccggcatttgtcagacatcgcagtgagctcatttccttcgcagacaag

SEQ ID NO: 17389 - DNA, 80 bp, synthetic construct
  source 1..80: mol_type = other DNA
agaatccccggaggttaccatcagcaaacaagaaggagcccggttaagtatattcttaattgttaaagacatttgcttcg

SEQ ID NO: 17390 - DNA, 80 bp, synthetic construct
  source 1..80: mol_type = other DNA
ctacttttaagaacctcctataaatcccatgattgcatactggttcagggaagtaaaagcatttgagcaagctagtttga

SEQ ID NO: 17391 - DNA, 80 bp, synthetic construct
  source 1..80: mol_type = other DNA
cagcagtggggtagggagtcagagtggctgtatccccatcgctcagcccagccactcaggagaggcagggggactggttg

SEQ ID NO: 17392 - DNA, 80 bp, synthetic construct
  source 1..80: mol_type = other DNA
ttatattcatgtatgattaaaactgttaaaagatcaagtcattggtattaaaggtagtaagaggctcagcacatggctgt

SEQ ID NO: 17393 - DNA, 80 bp, synthetic construct
  source 1..80: mol_type = other DNA
aacagagcaagactctgcccaaaagagaactaagttgataccctggggcggtctagtggcaagcaggtttcgaggtgagg

SEQ ID NO: 17394 - DNA, 80 bp, synthetic construct
  source 1..80: mol_type = other DNA
tgcccagccaagcttgagtttcatttgggttgtgctttcaccaaatgattgcagcaatgcaagagggggaaccggatgtt

SEQ ID NO: 17395 - DNA, 80 bp, synthetic construct
  source 1..80: mol_type = other DNA
atctcagtgcctggcccacactaagcttagtgattaaggagaagcaggaataaaccacagaagggagtggcggctgtggg

SEQ ID NO: 17396 - DNA, 80 bp, synthetic construct
  source 1..80: mol_type = other DNA
acagcatggatgagcctggaattcttgccaagtgaaagaagacacatagcagacaacatagtgtgtgattccgttgatat

SEQ ID NO: 17397 - DNA, 80 bp, synthetic construct
  source 1..80: mol_type = other DNA
actagaagagaatgggtgagaatccttagaatccaatggtaagaaatgtgctgtgatcatatgcctcattcgacccataa

SEQ ID NO: 17398 - DNA, 80 bp, synthetic construct
  source 1..80: mol_type = other DNA
gctccttgttctgccgctcgagctgctgccgggcactctcattcttctgggccgtgctgcgctctgtggccagctcgttg

SEQ ID NO: 17399 - DNA, 80 bp, synthetic construct
  source 1..80: mol_type = other DNA
cctgcacacaggaagccgccacgcgtgtgttgactggtgcaggatcctgctgcaggagagacagtaggcagcgtgactgt

SEQ ID NO: 17400 - DNA, 80 bp, synthetic construct
  source 1..80: mol_type = other DNA
tttaaaaaataaaatgggggtcgaggatgctgcctgtccccccatcctctgcttcagagccctcttcctccattcagttt

SEQ ID NO: 17401 - DNA, 80 bp, synthetic construct
  source 1..80: mol_type = other DNA
cagctgccagggcacgttgctttcgctcgtcttccagttccgtctcatactcgtgaagctgggcgaggaatagagatgtg

SEQ ID NO: 17402 - DNA, 80 bp, synthetic construct
  source 1..80: mol_type = other DNA
tccagctcttccagctgcgtcttcatctcctccatctgggtctccagggcccgcttggacttctccagctcatggacctg

SEQ ID NO: 17403 - DNA, 80 bp, synthetic construct
  source 1..80: mol_type = other DNA
aaaccactagacctgcccacgttgcttagagcacactgaggtcaaagtgagatttaaagctgccagaagctagttattag

SEQ ID NO: 17404 - DNA, 80 bp, synthetic construct
  source 1..80: mol_type = other DNA
ggtttgggtcatacaggggtctccatttatcgtacaattaagatttgtgaatctcatcacatgtaagttttaccccaaaa

SEQ ID NO: 17405 - DNA, 80 bp, synthetic construct
  source 1..80: mol_type = other DNA
gaataaataagcacctcattccttcttcaggctagaaactaaggcatcaccatgtgtgcaggtgaccctcatggtgctgg

SEQ ID NO: 17406 - DNA, 80 bp, synthetic construct
  source 1..80: mol_type = other DNA
cctttttactcaaaacacatgggctagtacttgaggtgttcactgattgagaaaatacccgtgaggtatgggactctgat

SEQ ID NO: 17407 - DNA, 80 bp, synthetic construct
  source 1..80: mol_type = other DNA
atcttgacactgcttatatgagggcggcaaaagccctgctctcaactgcatgtgagaaaaaaacatctcacttaattctt

SEQ ID NO: 17408 - DNA, 80 bp, synthetic construct
  source 1..80: mol_type = other DNA
accgtgcctggccagaaggtttttttaatatttaattgaacagggagatcatcgcctctcctccaggaacgcaactagag

SEQ ID NO: 17409 - DNA, 80 bp, synthetic construct
  source 1..80: mol_type = other DNA
ttcccagcttctttttcaaaaaactttaatgtttgaaggcatgccatggcagctcatacttgtcatccccagcactttgg

SEQ ID NO: 17410 - DNA, 80 bp, synthetic construct
  source 1..80: mol_type = other DNA
gtcctagttaagggaaacttattttatggaaccagctcctgtaggcatgtgagttgccctacaggaaaaaaaaagtgtgt

SEQ ID NO: 17411 - DNA, 80 bp, synthetic construct
  source 1..80: mol_type = other DNA
ggtcttaataactgcgtcttcccaaagaggcctggctgggaatgggcttggcttctagctcctgttcacgtctaatgaac

SEQ ID NO: 17412 - DNA, 80 bp, synthetic construct
  source 1..80: mol_type = other DNA
atagaaccaaatgcaaattccccaaaatttttaggcaatgctgcacccacttaatctagcagaaccaaaagcttccactg

SEQ ID NO: 17413 - DNA, 80 bp, synthetic construct
  source 1..80: mol_type = other DNA
taggcacctaggacctcagtttctttgcttgtaaaatgagtttaatagtacacgtctcacagggtggttgtgaagattaa

SEQ ID NO: 17414 - DNA, 80 bp, synthetic construct
  source 1..80: mol_type = other DNA
gtagtaatttgaggctgctgatgtcactcttatgtgtcatcaccaaaaagcatcaccaaaaagcattaccctcttgaact

SEQ ID NO: 17415 - DNA, 80 bp, synthetic construct
  source 1..80: mol_type = other DNA
ctaaggctaagagagggtaagcagttttacccatggtgtcacagccattgtgtgatggagccagaattagaagctaaacc

SEQ ID NO: 17416 - DNA, 80 bp, synthetic construct
  source 1..80: mol_type = other DNA
cttggggactgactgatacacacacagacaggaaggaatttctcaagaatgttaactggtgtgactaagggtgatttttt

SEQ ID NO: 17417 - DNA, 80 bp, synthetic construct
  source 1..80: mol_type = other DNA
ccctggtatatactactcttctgatgagaaataagatgatgagggtcgggtgcagtggctcacacatgtaataccagcag

SEQ ID NO: 17418 - DNA, 80 bp, synthetic construct
  source 1..80: mol_type = other DNA
attgaccccagactggcaaggtacctggtcacagtagggactgtgtagatgctttctgaatgttggacagttcttcttcc

SEQ ID NO: 17419 - DNA, 80 bp, synthetic construct
  source 1..80: mol_type = other DNA
gtctgcaaaggtattgcttgaaaagaacttagcaccgagtgagcaggtaaataatcattcatagtggctgctgcagtatt

SEQ ID NO: 17420 - DNA, 80 bp, synthetic construct
  source 1..80: mol_type = other DNA
cattttacccggaggagatgaacacatcccccaatcagtaaccatcatagtcacggtctggaccattatctcccgatgaa

SEQ ID NO: 17421 - DNA, 80 bp, synthetic construct
  source 1..80: mol_type = other DNA
ttcttggccttttcttcctcttctgcaagatttgtcgttaagtcactaatcctctcctcaaggagttttcgttccttttt

SEQ ID NO: 17422 - DNA, 80 bp, synthetic construct
  source 1..80: mol_type = other DNA
gcttttctgctttgagaactgaaagtcccaaatccccaaaatctccctgatcctggtaagcctgttgtttttaatgcaga

SEQ ID NO: 17423 - DNA, 80 bp, synthetic construct
  source 1..80: mol_type = other DNA
atggaacctcaacctcctcatctataaaatgagcacagtaggtaccatggtggttttaaaatctatccacaagttctttg

SEQ ID NO: 17424 - DNA, 80 bp, synthetic construct
  source 1..80: mol_type = other DNA
ggtcaagtgatttgctacccaccacgggctgcccctgtgacaccttaccagcatctgctgggccatcttcttcctttcag

SEQ ID NO: 17425 - DNA, 80 bp, synthetic construct
  source 1..80: mol_type = other DNA
aagggagaaaaaaaatctttcatatcccacccacctccctatcaaagtcattattaacattgtttacatttccttcctgg

SEQ ID NO: 17426 - DNA, 80 bp, synthetic construct
  source 1..80: mol_type = other DNA
caccacacctggctaagacgattttcttaggatagtttttcagaagttggttcagtggggacgaacatttccaaaaagca

SEQ ID NO: 17427 - DNA, 80 bp, synthetic construct
  source 1..80: mol_type = other DNA
ctgcagtattgatacatgcaacagtctggatgctctctaattccatgtatagaatatttgttttatttttttttgagacg

SEQ ID NO: 17428 - DNA, 80 bp, synthetic construct
  source 1..80: mol_type = other DNA
gccccaatctccccaactcaggttcttccagaaaccctgtgtgacacatgtgttgtctggctgcaaacaacttaaatcat

SEQ ID NO: 17429 - DNA, 80 bp, synthetic construct
  source 1..80: mol_type = other DNA
tttaggaatttcacactgtgaccctgaaccagcactcttcccgtttaagggctatcgatagattgagaaacgatagaaca

SEQ ID NO: 17430 - DNA, 80 bp, synthetic construct
  source 1..80: mol_type = other DNA
catgcgttatcttagtgacacctcatgaacagctctctgaggtcaaaatgattatgctcagtttccagctaaaaaactgg

SEQ ID NO: 17431 - DNA, 80 bp, synthetic construct
  source 1..80: mol_type = other DNA
atctcgtagcttgaaacacagagcagaagtcaccccgggtacctccagcatccattcctccacccagtcccgctcacccc

SEQ ID NO: 17432 - DNA, 80 bp, synthetic construct
  source 1..80: mol_type = other DNA
ccattcagcctcaatcctacctcacaccatctgattcctacctcatgccatcacacatttgcaacatgaaatgacctatt

SEQ ID NO: 17433 - DNA, 80 bp, synthetic construct
  source 1..80: mol_type = other DNA
aaaaatgtctgtagcatgtccatatagaggacacaatcgccccaagctgaagatgcctgcaccagattatgagaaaccca

SEQ ID NO: 17434 - DNA, 80 bp, synthetic construct
  source 1..80: mol_type = other DNA
ctgtgcctcagtctccctttctacaaaagggaggtaataataccgtctaccttctagggcaggggtaaaaaaaaataagg

SEQ ID NO: 17435 - DNA, 80 bp, synthetic construct
  source 1..80: mol_type = other DNA
cacatgccaagcccaacccacaggccatggatggcaccatttcttcaccttctactcagattctgtgtaacaatcttttt

SEQ ID NO: 17436 - DNA, 80 bp, synthetic construct
  source 1..80: mol_type = other DNA
ggatgaatgttttcaggcccgccccatccctggccccagacctgcagaattagatcttagggtaggcccagccatctggg

SEQ ID NO: 17437 - DNA, 80 bp, synthetic construct
  source 1..80: mol_type = other DNA
cacgtagtaggacatcagccagtgatagccattgctgggaaagcctagtttccattccatattctcctactaacgctgct

SEQ ID NO: 17438 - DNA, 80 bp, synthetic construct
  source 1..80: mol_type = other DNA
aagtgttgtctctatatgcttaaaggaacatatacccccttgaatataggctaggagttgggaaacttttggtgaaggcc

SEQ ID NO: 17439 - DNA, 80 bp, synthetic construct
  source 1..80: mol_type = other DNA
gtactgaggagtcaatagaatactacaattctgcaagccagactaagctatgtcctttgtacattatccaggactcttga

SEQ ID NO: 17440 - DNA, 80 bp, synthetic construct
  source 1..80: mol_type = other DNA
ggttggaaaacatgagagtggctacagctgatgccttacagatgcgtagacaaattacgaataggacttggttgggattc

SEQ ID NO: 17441 - DNA, 80 bp, synthetic construct
  source 1..80: mol_type = other DNA
gccgagttcataattcttgcaaatgaatttgttgcttgacttgaattcacctagggttcctgttagaaaagttttttttg

SEQ ID NO: 17442 - DNA, 80 bp, synthetic construct
  source 1..80: mol_type = other DNA
ggctggtgaagttgatatcacatggccctcacacaccttaaagatgcttatctcctccatctgcacaaccatctatggat

SEQ ID NO: 17443 - DNA, 80 bp, synthetic construct
  source 1..80: mol_type = other DNA
aactttcttcaaacccatgggtaaaggatccaatatccatgtttctactacatgaggtattgcaagctcctgcaaacagt

SEQ ID NO: 17444 - DNA, 80 bp, synthetic construct
  source 1..80: mol_type = other DNA
agggcaaccaggggaacccggttattctcaatgggctccattttcacataagccaggctggtggtgaagatttttattct

SEQ ID NO: 17445 - DNA, 80 bp, synthetic construct
  source 1..80: mol_type = other DNA
gcagctggatggagaaaagaaacatcgtgagtgcatcacaaaagaaatagcttggcaagaagacacatcgcatgggatat

SEQ ID NO: 17446 - DNA, 80 bp, synthetic construct
  source 1..80: mol_type = other DNA
gtgattttaggatttttttttccccatctcttggcaagagcactttttcatttctctttccctgaggtctttccttggca

SEQ ID NO: 17447 - DNA, 80 bp, synthetic construct
  source 1..80: mol_type = other DNA
tgtaatttcatctctgacccaaccaatcagcacccccaactcactggcctccccctaaccacattatgcttaaaaactct

SEQ ID NO: 17448 - DNA, 80 bp, synthetic construct
  source 1..80: mol_type = other DNA
tttaacaaaacaattaagtggggtattttagaagagatggtccctcgggatcttgtctggtcactattaggggtaggacg

SEQ ID NO: 17449 - DNA, 80 bp, synthetic construct
  source 1..80: mol_type = other DNA
caacccctgccacagaacagtgagaatgaatgagctacaactaccacaaatcaaaactgatgtattggggccagcatagt

SEQ ID NO: 17450 - DNA, 80 bp, synthetic construct
  source 1..80: mol_type = other DNA
aggatagatggatgaatagaggatggattgatggatgaataattcatggatagaggatagacggatgatggatggatgga

SEQ ID NO: 17451 - DNA, 80 bp, synthetic construct
  source 1..80: mol_type = other DNA
ggggatataagccaagtgttgctggaacttctgatttttctagataatggaaacccagagtttttatgtgaagtgtaccc

SEQ ID NO: 17452 - DNA, 80 bp, synthetic construct
  source 1..80: mol_type = other DNA
ctagtaggtgataaagagtggaagccacctatattaggttgaatgttggtctttctaaaatatgtccacctggaacctgt

SEQ ID NO: 17453 - DNA, 80 bp, synthetic construct
  source 1..80: mol_type = other DNA
caggatggacaatttaggtgattttattttttatcttcaaaatacattagaagcagtataaccaggccaggcatggtggc

SEQ ID NO: 17454 - DNA, 80 bp, synthetic construct
  source 1..80: mol_type = other DNA
gccttgtctctacccacccctccaaaaatcaaaccaaaacaaaacaaaaaaccccaggccaggcacggtggctcatgcct

SEQ ID NO: 17455 - DNA, 80 bp, synthetic construct
  source 1..80: mol_type = other DNA
acaggcatgagccactgtgcccagcctgttccagttttttattatttaaataaaactatactgaacagtgtagtacatca

SEQ ID NO: 17456 - DNA, 80 bp, synthetic construct
  source 1..80: mol_type = other DNA
ctggaacccagctatgttgctgtcaacaaactgcatcctatagagaaacaatgtagtcgagagagatagaagacaagaaa

SEQ ID NO: 17457 - DNA, 80 bp, synthetic construct
  source 1..80: mol_type = other DNA
cagggtcaataagacatacttctaatttcaacatgagaccgagatctggtcaagggtctgggccatcataattcctttcc

SEQ ID NO: 17458 - DNA, 80 bp, synthetic construct
  source 1..80: mol_type = other DNA
attataatgtatataccattatgtattacatatcataggccaagggttccccaacccataggccatagaccagtaccggt

SEQ ID NO: 17459 - DNA, 80 bp, synthetic construct
  source 1..80: mol_type = other DNA
cgtgcccagccacccccagctatttttagttgaatcaatatataaggcttatatcacaggttggcaaatctggtcccctg

SEQ ID NO: 17460 - DNA, 80 bp, synthetic construct
  source 1..80: mol_type = other DNA
gtttgctggtacataaaaaatccattcagcattccccctttaccaaaaattgctccacctcatagcctatgttcctgaaa

SEQ ID NO: 17461 - DNA, 80 bp, synthetic construct
  source 1..80: mol_type = other DNA
tgagctcactggtttatgtgttgcctgcactcattggtttatatattgcctgtggctgctcttgtattacaatggcagag

SEQ ID NO: 17462 - DNA, 80 bp, synthetic construct
  source 1..80: mol_type = other DNA
aattcacatgggatgactttccagttctacccctgggatcggtaatgtctaactttgaccattgcccctatggacaaatg

SEQ ID NO: 17463 - DNA, 80 bp, synthetic construct
  source 1..80: mol_type = other DNA
ctggctgagatgtgtgtttctaaagagctcccaagtgatgctgatgctgctggtttggaaacatactttgagaaccactg

SEQ ID NO: 17464 - DNA, 80 bp, synthetic construct
  source 1..80: mol_type = other DNA
cgtagccagcccttactctgcacctcgcatggtgcctagagctttatatgagttcattcactctattctcacatttctat

SEQ ID NO: 17465 - DNA, 80 bp, synthetic construct
  source 1..80: mol_type = other DNA
gagctgaaaccaccccaggcctgacagcaacagaacgtgtaaaacatgttcacagatcaatttcattcggcttttgcaat

SEQ ID NO: 17466 - DNA, 80 bp, synthetic construct
  source 1..80: mol_type = other DNA
cttgctcagtccttgacaaaaccttcaaactttccccattgggaaacatgcagtagagtgatttgggatgaccatatccc

SEQ ID NO: 17467 - DNA, 80 bp, synthetic construct
  source 1..80: mol_type = other DNA
atctgtgtgactctagagaagattgttctttggttcagcgcttcactgagagtcagttgccattctggaaaatcccatgc

SEQ ID NO: 17468 - DNA, 80 bp, synthetic construct
  source 1..80: mol_type = other DNA
gaactattcatcgcaatcctgtgagactcgctgagtgcctggtatacagtaggcacttaataaaaacagcaaatgagaaa

SEQ ID NO: 17469 - DNA, 80 bp, synthetic construct
  source 1..80: mol_type = other DNA
gctaatgttcagatttacaggaggatttcagaagagaagcaactgtctgagctctctaatagctaggacatctgctccct

SEQ ID NO: 17470 - DNA, 80 bp, synthetic construct
  source 1..80: mol_type = other DNA
acaggacaaagcaggaagctgctatttgtttctgttttgatttgtccacacatcctcctttttgtagctcccagagaaag

SEQ ID NO: 17471 - DNA, 80 bp, synthetic construct
  source 1..80: mol_type = other DNA
aggatggtattttggtgcatttactgatttaagttgtgaaactctagggcctaccccatttctaccaccagctacgggac

SEQ ID NO: 17472 - DNA, 80 bp, synthetic construct
  source 1..80: mol_type = other DNA
gatccagacatttcaaaggttttcataattactggggccacattaggctccttaaaacagtatccagtgagacaatgtct

SEQ ID NO: 17473 - DNA, 80 bp, synthetic construct
  source 1..80: mol_type = other DNA
aaaggtaccttaacccctgggacgttacagagattcatgaaaggagtgcttctcaatcaagggcaactgtcccaccccag

SEQ ID NO: 17474 - DNA, 80 bp, synthetic construct
  source 1..80: mol_type = other DNA
tgatcccagcacttggggaggctgaggtgggaggatcatttgagcccaggagtgtgagaccagctcagcaacacagagag

SEQ ID NO: 17475 - DNA, 80 bp, synthetic construct
  source 1..80: mol_type = other DNA
gcctctatgttccaccactcctagtgaaagataaggacagtgccttgaccaaaacttcacttgtttatcgtcttcttcta

SEQ ID NO: 17476 - DNA, 80 bp, synthetic construct
  source 1..80: mol_type = other DNA
aattatttcctttatcctcttcctgcttccatgttattatagaaggaagagtcttgcccagagtgggtaagcaattttcc

SEQ ID NO: 17477 - DNA, 80 bp, synthetic construct
  source 1..80: mol_type = other DNA
gtatgaattacttcaatcaggctaacgtcagaaccttgcttgacttcattctaaagtgaaggggttggattctgattaaa

SEQ ID NO: 17478 - DNA, 80 bp, synthetic construct
  source 1..80: mol_type = other DNA
tgtaccgtctcacagggaccaccctgtgcttcatactctaatgttgccatctggaaattcttcctaattctttataaacg

SEQ ID NO: 17479 - DNA, 80 bp, synthetic construct
  source 1..80: mol_type = other DNA
cctcagtttctttaccccattataaaatgggtataataaaaacacttaccttgtatgatttttttttttttttttttgag

SEQ ID NO: 17480 - DNA, 80 bp, synthetic construct
  source 1..80: mol_type = other DNA
attctttgtcacatctgctcagctctccactgcagcacaaaagcaaatacgtaaacaagtgggtgcggctgtgtttcaat

SEQ ID NO: 17481 - DNA, 80 bp, synthetic construct
  source 1..80: mol_type = other DNA
ctctaactcccaagctcaagtgatcctccctccccaacctcctgagtagctgggactacaggcatgcaccatcccaccta

SEQ ID NO: 17482 - DNA, 80 bp, synthetic construct
  source 1..80: mol_type = other DNA
caagtccttgctaacgctgcattccaggagatggagatacacaatagccaagtaaacaaataatcaagatagttcgtggt

SEQ ID NO: 17483 - DNA, 80 bp, synthetic construct
  source 1..80: mol_type = other DNA
ctggattgcaggaaggatttttaaaaaatagtgagcactttcactacaatagcagctgatccttacaaagtgctcaccat

SEQ ID NO: 17484 - DNA, 80 bp, synthetic construct
  source 1..80: mol_type = other DNA
cttttaagtgaactttgtgctcatcacaaagttcttttggatagcaccgttttagatgaaacagcacctgctgatggcat

SEQ ID NO: 17485 - DNA, 80 bp, synthetic construct
  source 1..80: mol_type = other DNA
tgtcaaacatcaaatgtgtacatcctaccatggaatatgagaattcagttcccatctaatcctcttccctttccccacag

SEQ ID NO: 17486 - DNA, 80 bp, synthetic construct
  source 1..80: mol_type = other DNA
gcacacatacaaaaatgtccccagcatagtgctcaagtgttggctcatgtttccaagcacaataaagttgtgatacccat

SEQ ID NO: 17487 - DNA, 80 bp, synthetic construct
  source 1..80: mol_type = other DNA
tcagttccttcatctgtaatatagtattgtgcacatttgtgtttttttgtaaatccagcatccatttcctcttcttccag

SEQ ID NO: 17488 - DNA, 80 bp, synthetic construct
  source 1..80: mol_type = other DNA
ctaacaatgtagaaatcccagcatcatatctgctggtagacaatgccacagtggcaagcatttcttaaatccactccctg

SEQ ID NO: 17489 - DNA, 80 bp, synthetic construct
  source 1..80: mol_type = other DNA
ctaaagactagtcagctctggggtttcaattctggtgtgtttatataatggcacatttaaaaataggcaggccgggcgca

SEQ ID NO: 17490 - DNA, 80 bp, synthetic construct
  source 1..80: mol_type = other DNA
ccccttgtcccagctacttgggaggctgagacagtaggatcccttgagccaaggagttcaaggttgcagtgagctgtgat

SEQ ID NO: 17491 - DNA, 80 bp, synthetic construct
  source 1..80: mol_type = other DNA
cactgtatcccacctgtgattttatttagaataagggtcttgcagatgtaattaagggaaggatgttgagatgaggtcat

SEQ ID NO: 17492 - DNA, 80 bp, synthetic construct
  source 1..80: mol_type = other DNA
ccaaagtactaaaaagtgattttttaaaagagggtgaaggatagaagaaccaggtaccctgtgattagaacccagacaga

SEQ ID NO: 17493 - DNA, 80 bp, synthetic construct
  source 1..80: mol_type = other DNA
ttagtacattcacaatgttacgtaactaccacctttatctagttctaaaatattctgtcacccccaaatgaaaccctcta

SEQ ID NO: 17494 - DNA, 80 bp, synthetic construct
  source 1..80: mol_type = other DNA
aaaagtgctttgagaaaacggtgcctttctctaatataaacatgagtgtcacatggcctagtggttcccatggtccacag

SEQ ID NO: 17495 - DNA, 80 bp, synthetic construct
  source 1..80: mol_type = other DNA
gccaggagctgcgggtaggaatatggagtgacaaaaaaatgtgcacaagatttctttgggggatgatagaaatataaaat

SEQ ID NO: 17496 - DNA, 80 bp, synthetic construct
  source 1..80: mol_type = other DNA
gggactacaggtgcatgccactacgcctggctaatggtttttttgttttttgttttcattttttttgtagagacagggcc

SEQ ID NO: 17497 - DNA, 80 bp, synthetic construct
  source 1..80: mol_type = other DNA
aatgcctgttgaacttgtcctgtccatgcaccgtgtccctacacactgaccgaatcacccttgtaacaactggagtaagc

SEQ ID NO: 17498 - DNA, 80 bp, synthetic construct
  source 1..80: mol_type = other DNA
aaaatatataataaataaaaacatgaaagcagaactggccagtgaaggggtgtaggagacaggaaaaccaacgctctccc

SEQ ID NO: 17499 - DNA, 80 bp, synthetic construct
  source 1..80: mol_type = other DNA
acaaacaaggaaggtgttgccaagtgtcagctggggcttttcaggttcactcccttaagtatgtccctttttcaatttaa

SEQ ID NO: 17500 - DNA, 80 bp, synthetic construct
  source 1..80: mol_type = other DNA
tttatcatcatcatctaaaacagtgatctagggaagaggttatagacagcagtgattctgaatcggcaggacaggatatt

SEQ ID NO: 17501 - DNA, 80 bp, synthetic construct
  source 1..80: mol_type = other DNA
gaattagccaagagccccaagctgataaaggctggctgttatttctttttttaatcccctgagtgtggccatttgttgct

SEQ ID NO: 17502 - DNA, 80 bp, synthetic construct
  source 1..80: mol_type = other DNA
tggtggtgcatggctgcagtcccagctacttggggagctgaggtgagaagatcactggagcctaggaggtcaagcctgca

SEQ ID NO: 17503 - DNA, 80 bp, synthetic construct
  source 1..80: mol_type = other DNA
atacatgaaccagtttagccgggcatggtggctcatgcctggaatcccagctcttaggaaggcacaggcatgaggaaagc

SEQ ID NO: 17504 - DNA, 80 bp, synthetic construct
  source 1..80: mol_type = other DNA
ggcctctggaagaaaagatcaaggaggagacaaaaacataaggactgggtcaaatataaggcactgttagacccctccca

SEQ ID NO: 17505 - DNA, 80 bp, synthetic construct
  source 1..80: mol_type = other DNA
acgtttatagattaattgggccactaagtgtccaggataacaaataaaaatggactcatagcaagtcccatcatcctgaa

SEQ ID NO: 17506 - DNA, 80 bp, synthetic construct
  source 1..80: mol_type = other DNA
gaacactgagtttgtcaaaactaagataaaattatactgggactctgatatgaggcatgtgtgttggaacgaggaaatag

SEQ ID NO: 17507 - DNA, 80 bp, synthetic construct
  source 1..80: mol_type = other DNA
gatacatattttaaatatcagcttctcttcccataccctcaaggggcttggcttccacttgggagggtgccatgttgtga

SEQ ID NO: 17508 - DNA, 80 bp, synthetic construct
  source 1..80: mol_type = other DNA
agtcaacacactgggcctacgtgtttcttcacaaaaaccaatttcctacttgggaatggagaaaaaattaagcaggtgaa

SEQ ID NO: 17509 - DNA, 80 bp, synthetic construct
  source 1..80: mol_type = other DNA
tgtgttaaaacctagagaccatgaggaatcaaatatatgaacacagggtgtccttgtcaattacaacattgcctcacagt

SEQ ID NO: 17510 - DNA, 80 bp, synthetic construct
  source 1..80: mol_type = other DNA
caagagggaaactccatccggaaaaaaaaaaaaaaaaagaaagaaagaaagacaaaagaaagaaaaagattcagggcaat

SEQ ID NO: 17511 - DNA, 80 bp, synthetic construct
  source 1..80: mol_type = other DNA
aatgtcatttttcaagctcagtcaaatattttgcccactctctttccctcctccacacacatactatctacagtgaaact

SEQ ID NO: 17512 - DNA, 80 bp, synthetic construct
  source 1..80: mol_type = other DNA
ctgacctggtacacttgtttgcattaactgcctagtccctctgtttgacttgggggtggctatttcaggggctccaaagt

SEQ ID NO: 17513 - DNA, 80 bp, synthetic construct
  source 1..80: mol_type = other DNA
cgagccccggagctggagctggagcgggcccatgcccgtatttgcccaagctcttggctctccctcaccctcccaggctg

SEQ ID NO: 17514 - DNA, 80 bp, synthetic construct
  source 1..80: mol_type = other DNA
aagaaacccaaccagtgacgggagcagttaagtctgaagagcaagaacagaagagaatgttgtttacttttttttttttt

SEQ ID NO: 17515 - DNA, 80 bp, synthetic construct
  source 1..80: mol_type = other DNA
ttgtggttcccagaggctggaaagaggtgggaaatgaggaggaactgctcatgggtataaggtttccttttgaggctata

SEQ ID NO: 17516 - DNA, 80 bp, synthetic construct
  source 1..80: mol_type = other DNA
ttcattctgtacgtcccagatgccatgcaaaaggtgctgggactacattagaacattaaaaaaacacaggatcccagccc

SEQ ID NO: 17517 - DNA, 80 bp, synthetic construct
  source 1..80: mol_type = other DNA
gatagctcctgcccttaaagaacttaaatcagagggggagacaagtacattaaaacacgtcgtaagaacagagaatgata

SEQ ID NO: 17518 - DNA, 80 bp, synthetic construct
  source 1..80: mol_type = other DNA
ggcagtaaagggcagtggctaagggctcagaactgggtatggggtacttgaatttgaaccttcactttgctacttcttcg

SEQ ID NO: 17519 - DNA, 80 bp, synthetic construct
  source 1..80: mol_type = other DNA
gtgagctgagatcatggtgctgcactccagcctgggcaacagagtgagactctaaaaaaaaaaaaaaaagaaggaaggaa

SEQ ID NO: 17520 - DNA, 80 bp, synthetic construct
  source 1..80: mol_type = other DNA
cagcaagtcccagctgcaggcccaggatttccctcttgtgaccgtattaggaagcagctccagtttttctctgacgcttt

SEQ ID NO: 17521 - DNA, 80 bp, synthetic construct
  source 1..80: mol_type = other DNA
attttggaggggtgcaggaggggctctctatgtggctgcatgtgtataaaacatcactggaggctggatggagcagctca

SEQ ID NO: 17522 - DNA, 80 bp, synthetic construct
  source 1..80: mol_type = other DNA
gtgtacatacatgaacctgtgaatcatgtttgcctccagggaagagggctgctttttgtgatacatacttatttttaaat

SEQ ID NO: 17523 - DNA, 80 bp, synthetic construct
  source 1..80: mol_type = other DNA
tctagcacctagttaggtgctcaaggaatcataataaaaggttcaattccttcttgctctgcacttaaagcttgtctacc

SEQ ID NO: 17524 - DNA, 80 bp, synthetic construct
  source 1..80: mol_type = other DNA
cttctatagactcttctagatccaagagcacaagaggtctgccagaaccttctcaagggcacatcgtttgaggcgagcct

SEQ ID NO: 17525 - DNA, 80 bp, synthetic construct
  source 1..80: mol_type = other DNA
aaacagccccagatcaataatttttccatacaaacagtgccacagacaagagacttcccctacttaagaaagtaaagata

SEQ ID NO: 17526 - DNA, 80 bp, synthetic construct
  source 1..80: mol_type = other DNA
tgcaccgcatctctggttaaggactaatttttctgttttgtgttcactatgctttctgaactctccaagtgttccatagt

SEQ ID NO: 17527 - DNA, 80 bp, synthetic construct
  source 1..80: mol_type = other DNA
aacaaagcttcagaggcatgaggtaacctgctcgagggtgagcaaggcctttcagagagaagacatagacataggccggg

SEQ ID NO: 17528 - DNA, 80 bp, synthetic construct
  source 1..80: mol_type = other DNA
agaacgatgccaatgaaatctgttgagagtttatcatacgtcttggcacttggcacatgtgatgacatgggattgtcaca

SEQ ID NO: 17529 - DNA, 80 bp, synthetic construct
  source 1..80: mol_type = other DNA
tgccttgttggtcccctgtggaataaggtaacagggtcagaatcagaccacaaccaagcccggaagacagaccaaccact

SEQ ID NO: 17530 - DNA, 80 bp, synthetic construct
  source 1..80: mol_type = other DNA
agtgtacacgtgctaatatgggaagatggtcaagtctaactgtgcgctgcaaaataagagtcctcatacgattaaacata

SEQ ID NO: 17531 - DNA, 80 bp, synthetic construct
  source 1..80: mol_type = other DNA
aaattaaaaaaaagagttgccagtggcaaggaaaggaatggattagtaagaggcacagaagaggtacataagaggtaaga

SEQ ID NO: 17532 - DNA, 80 bp, synthetic construct
  source 1..80: mol_type = other DNA
gttctatctggtcaaatacgagacagtgtgaatatcaataagaaaaataattatatgtccatcaccctaacaccccaaaa

SEQ ID NO: 17533 - DNA, 80 bp, synthetic construct
  source 1..80: mol_type = other DNA
ctcctgaaacccaaccttttgggtgatgcagattttgcaagacagaatgggagtggcagatattccaatacctatttttt

SEQ ID NO: 17534 - DNA, 80 bp, synthetic construct
  source 1..80: mol_type = other DNA
caatcctcctttctgcattttaaaattgttattgaatttggcttagctcatagtaagaccaacagtgtcctgcccctgac

SEQ ID NO: 17535 - DNA, 80 bp, synthetic construct
  source 1..80: mol_type = other DNA
ctcttgtggaatttttaagggatgggtccgcctgccatcacctaaatctactaattaaccctaacatcacaaaaagagag

SEQ ID NO: 17536 - DNA, 80 bp, synthetic construct
  source 1..80: mol_type = other DNA
aaggaggggaacccatagattaaaaaataattgaaagaaaagaggctggcagtagcccacatgtataatcccatattttg

SEQ ID NO: 17537 - DNA, 80 bp, synthetic construct
  source 1..80: mol_type = other DNA
ggcagcaaaataggaaatgcggcaaaatattcaatcattccctgataatctcttgtttcttaaggtgtcgcagcagatcg

SEQ ID NO: 17538 - DNA, 80 bp, synthetic construct
  source 1..80: mol_type = other DNA
gttgacctctagatcttcatctgaatgccagccctatgagtgttcactttctgaaaattcatcaaactgttgggccaggt

SEQ ID NO: 17539 - DNA, 80 bp, synthetic construct
  source 1..80: mol_type = other DNA
ccaattacatcccaagagggctaggagagtgtttcatttgttctaagcactatgacaagtaaagtggacttctttttttt

SEQ ID NO: 17540 - DNA, 80 bp, synthetic construct
  source 1..80: mol_type = other DNA
gaaacctgaaagctgttttgctcctacgagccttgggtccccaaaacaacatttagccacagatttgccaaatgttttga

SEQ ID NO: 17541 - DNA, 80 bp, synthetic construct
  source 1..80: mol_type = other DNA
tgcatcagctccaagggctgaaaggacatctctgaaattactacccagaactgctgaccacgaagtacagttcactcatc

SEQ ID NO: 17542 - DNA, 80 bp, synthetic construct
  source 1..80: mol_type = other DNA
gttttaccatcagtttcatttttcccagaagaactcaggggcaaaagatcttgccctctctgcttcagcattaataaaaa

SEQ ID NO: 17543 - DNA, 80 bp, synthetic construct
  source 1..80: mol_type = other DNA
cccatctctatttcaaataaacgaatgaatgaatgccacacaggcaaaacagaagttctctgaacctgatctgcaacaca

SEQ ID NO: 17544 - DNA, 80 bp, synthetic construct
  source 1..80: mol_type = other DNA
acctgtcacattcttattgccttgtgacatctgcctaatcatctgaataccaatggtttcaagtaactccagaaagaagt

SEQ ID NO: 17545 - DNA, 80 bp, synthetic construct
  source 1..80: mol_type = other DNA
cctaatttactcagagatggcattagcgatgtttgacacatctgaatatgtcagccctattcacagtcctgtcctaacaa

SEQ ID NO: 17546 - DNA, 80 bp, synthetic construct
  source 1..80: mol_type = other DNA
tggatcacatacaaggtttctttcaaattcttgcctgcctttctctaaattcagtctttcctccattgtgtggccagggt

SEQ ID NO: 17547 - DNA, 80 bp, synthetic construct
  source 1..80: mol_type = other DNA
ccccatttcccggatgagaaagtgaggtttggggaggtgcgggagatgatttttaaatttgcttatggccttctatgatt

SEQ ID NO: 17548 - DNA, 80 bp, synthetic construct
  source 1..80: mol_type = other DNA
gttggaagcatttagtcccaccagaaacctgaccccaacaagtttgtgtccatggtaaagaagaaagatagtggggtcaa

SEQ ID NO: 17549 - DNA, 80 bp, synthetic construct
  source 1..80: mol_type = other DNA
ctgtaaattttttggtgcctagaataaaagtgagatgccttgattgtctgcaccggacctctgagatttccaagggagca

SEQ ID NO: 17550 - DNA, 80 bp, synthetic construct
  source 1..80: mol_type = other DNA
aagatgtggcaaagctactcctcattcaagcccttttgaaaggaaacaaagtccaatcagtccttggagagatggtattg

SEQ ID NO: 17551 - DNA, 80 bp, synthetic construct
  source 1..80: mol_type = other DNA
ctttagctgcagcttgtctaccaggtcctgcagccgcagcaggtttttcctgtcctcctccgtctgggggccagagggta

SEQ ID NO: 17552 - DNA, 80 bp, synthetic construct
  source 1..80: mol_type = other DNA
gtgtgtgtcccctggcgatgggctaagagtgggtgttgagatggagctcccaggccaggaggctcagagactgacctctg

SEQ ID NO: 17553 - DNA, 80 bp, synthetic construct
  source 1..80: mol_type = other DNA
ggaatctggtgcctgtatcaagacactactgcttcgccaggccacgtggaggccagtcccctctgggtgagtaccttcaa

SEQ ID NO: 17554 - DNA, 80 bp, synthetic construct
  source 1..80: mol_type = other DNA
atgtggaaatgggaagctcagctaagatgcaatgggtaaaatgtttatgtgaagagagttcagtgactggtcattcattc

SEQ ID NO: 17555 - DNA, 80 bp, synthetic construct
  source 1..80: mol_type = other DNA
caagaggaaacaacatgaaccttctcaaagacaatccttgaaacctcagaagtgtagctggagaagcctgaggacaggtc

SEQ ID NO: 17556 - DNA, 80 bp, synthetic construct
  source 1..80: mol_type = other DNA
atctatgtccaaacccccagtggacctgtcatggtttactgtttgctgataacaaagaatgccaatacagcagtgaacta

SEQ ID NO: 17557 - DNA, 80 bp, synthetic construct
  source 1..80: mol_type = other DNA
aaagaagagggaaggtgtgaaaagaaggaggggatctgagaaccaggcagaggaagggaagtgggaaaatgaaccatgaa

SEQ ID NO: 17558 - DNA, 80 bp, synthetic construct
  source 1..80: mol_type = other DNA
atagtttgaagagccttcctttaggcgagggcctgacagtctacatgctctttattggaaggaaagtggttgaaacttgc

SEQ ID NO: 17559 - DNA, 80 bp, synthetic construct
  source 1..80: mol_type = other DNA
aatgagggggtcggactagattgtttcaaaggtcctttttagctctgatggtctttaattttgtcactattgctttgggt

SEQ ID NO: 17560 - DNA, 80 bp, synthetic construct
  source 1..80: mol_type = other DNA
aatctttgtgttcaggacttgggaaaccttccccagagtgggccaaatgttattaggggactgtgagattgcctagatat

SEQ ID NO: 17561 - DNA, 80 bp, synthetic construct
  source 1..80: mol_type = other DNA
tcagaattgatcaccacctctgacttttcattccccagctcctttctagaaagatatcagaaaagttaacatcctctaac

SEQ ID NO: 17562 - DNA, 80 bp, synthetic construct
  source 1..80: mol_type = other DNA
ctaggatatccccacttggcaagagcttcagaagtatggggaggggaagagtttcaggatagtataacttgggaacactg

SEQ ID NO: 17563 - DNA, 80 bp, synthetic construct
  source 1..80: mol_type = other DNA
tttgaagatctgctgagctttttttcctgacactgcccctgaaccagcctgggcctcagagaagcgggaaacctcctctt

SEQ ID NO: 17564 - DNA, 80 bp, synthetic construct
  source 1..80: mol_type = other DNA
ctggactgaagttctgggttctgatcctggctttgtcactgattagcttgtaatcttagcaagtcagttagtaataatca

SEQ ID NO: 17565 - DNA, 80 bp, synthetic construct
  source 1..80: mol_type = other DNA
gagcgcaagttggtcatcagcttgttcagattttcctgtggccaaaaatgcaatagagaaaagtaaagaaaatgccagaa

SEQ ID NO: 17566 - DNA, 80 bp, synthetic construct
  source 1..80: mol_type = other DNA
tcacacaggtggacatggattctgctctatggtcaatatacttgctcgtggaggtgccatgttgggtgttaaggtagtag

SEQ ID NO: 17567 - DNA, 80 bp, synthetic construct
  source 1..80: mol_type = other DNA
tcgttggtgaagttgatgcagagctgctcaaagctgttgaactgcagggggcatgaggggtgggagcagtcagaaagtgg

SEQ ID NO: 17568 - DNA, 80 bp, synthetic construct
  source 1..80: mol_type = other DNA
tgcttcagcttgaacttcatgtttccaaagtgcatgatggcgcctgtcagcttatacatggagtttttctcctctgaagt

SEQ ID NO: 17569 - DNA, 80 bp, synthetic construct
  source 1..80: mol_type = other DNA
ctgggtcctcacacactcacatcagtggccatgagctcctcagcgtcatcaatggaggccacggtggtctctccttggga

SEQ ID NO: 17570 - DNA, 80 bp, synthetic construct
  source 1..80: mol_type = other DNA
aatgaattcgaatgaatttcccctggagagatggaagagagtggtgatgagttgggggaaggctcatatctgagaccatt

SEQ ID NO: 17571 - DNA, 80 bp, synthetic construct
  source 1..80: mol_type = other DNA
acacctgatggggctggaggctgggatcagggagattctgaaagggaatacagtagcagctacactcacgtgatcaggat

SEQ ID NO: 17572 - DNA, 80 bp, synthetic construct
  source 1..80: mol_type = other DNA
gatcttggccttgacaaactcctgtttgtcatcaggcacgaagacatccttcttgaggtcaaaaggcctggtctgcgctt

SEQ ID NO: 17573 - DNA, 80 bp, synthetic construct
  source 1..80: mol_type = other DNA
tgagagacaactaatggtcacatttgttcggcactttccagtctaaaagcacttcaatgcactttctcctactcagtctt

SEQ ID NO: 17574 - DNA, 80 bp, synthetic construct
  source 1..80: mol_type = other DNA
gggtagctacacattccaggcctcacagaatcacatgaaggcatacacacttcctagaatccttctccaccattctttct

SEQ ID NO: 17575 - DNA, 80 bp, synthetic construct
  source 1..80: mol_type = other DNA
tttgtcagagaaatgtcgtgaccaaatacacgacctcctgtttattggaacatggcctctggatggatttccaactgtag

SEQ ID NO: 17576 - DNA, 80 bp, synthetic construct
  source 1..80: mol_type = other DNA
agacacgtggccatctaaaaaggtgacatgaagtgaccacagggtccagggtgtcagaaatctagatttttgtttttaca

SEQ ID NO: 17577 - DNA, 80 bp, synthetic construct
  source 1..80: mol_type = other DNA
tgctgggattacaggtgtgattattgttattttagatgagtgactttacttccctgggtctcagtttgcctatctgtaaa

SEQ ID NO: 17578 - DNA, 80 bp, synthetic construct
  source 1..80: mol_type = other DNA
atgcatataaagtggttagcatgaggtctgacttaggttaagtcttggagcaatgttagttgctgtgtttttgttttgtt

SEQ ID NO: 17579 - DNA, 80 bp, synthetic construct
  source 1..80: mol_type = other DNA
atttgatgcagatattttcatttttcactcaaatgggaaaggctcatgttgtaaattagcccttcacagttggaggcggg

SEQ ID NO: 17580 - DNA, 80 bp, synthetic construct
  source 1..80: mol_type = other DNA
ctgaaatttgtcttaaagaccagttgtggcagagttgtttctttgggaaatgacaccatcttgagcttttctgatggtcc

SEQ ID NO: 17581 - DNA, 80 bp, synthetic construct
  source 1..80: mol_type = other DNA
atttctatgaaatgtccagaacaggaaattcatggagacagaaaatggattagcagttgccaggggctggtgggagaggg

SEQ ID NO: 17582 - DNA, 80 bp, synthetic construct
  source 1..80: mol_type = other DNA
gtagctttctgcctggaaggtgactatctcaagttcagatatgacacttgcctcaggaatttctctttccctatgggaca

SEQ ID NO: 17583 - DNA, 80 bp, synthetic construct
  source 1..80: mol_type = other DNA
taagttcctttgacccagcagttctgcttttaggaatttacccccaagaaataaccagagatacaagcaaagaggtgtta

SEQ ID NO: 17584 - DNA, 80 bp, synthetic construct
  source 1..80: mol_type = other DNA
ctctcttctttgctttcttaggtgcctgggggaaaaaagcatcgattaaaagagtgagaggctgggagtcaaaaaactag

SEQ ID NO: 17585 - DNA, 80 bp, synthetic construct
  source 1..80: mol_type = other DNA
taaaaaagccaactctcttattttgtgtttgtgagtccccgagagctgctgttatttgtggcctatcggggcattgattg

SEQ ID NO: 17586 - DNA, 80 bp, synthetic construct
  source 1..80: mol_type = other DNA
gaggccgaggcgggaagattgcttgagcctaggagtttgcgaccagcctgggtgacatagggagatgcctgtctctacgc

SEQ ID NO: 17587 - DNA, 80 bp, synthetic construct
  source 1..80: mol_type = other DNA
catggtaggctgtgcctgtagtcctagttactcaggaggctgaggtgggaggatcccttaagcccgagggttccaggctg

SEQ ID NO: 17588 - DNA, 80 bp, synthetic construct
  source 1..80: mol_type = other DNA
tgtcctaaatctatccaaatatgcctcattgaaattttcatggtctcactctttcccaatcaatgccctgacttttatgt

SEQ ID NO: 17589 - DNA, 80 bp, synthetic construct
  source 1..80: mol_type = other DNA
ctcctccttaaagaaaaggcatgtccatttttgcacataaatagtgtttacccaagtctccactagccttcacaagaagg

SEQ ID NO: 17590 - DNA, 80 bp, synthetic construct
  source 1..80: mol_type = other DNA
ggggaaatagtaaattctctaaactgtgaagcagtctcccagccacacacacatccagtggtaaatagtggaagtaaaac

SEQ ID NO: 17591 - DNA, 80 bp, synthetic construct
  source 1..80: mol_type = other DNA
tttaaggttacagtgagctatgatcatgcccctacactccagcctgggtgacagagcaaggccctgtctctgagaaagaa

SEQ ID NO: 17592 - DNA, 80 bp, synthetic construct
  source 1..80: mol_type = other DNA
actcattctataaggccagcactagtctattactaaagctagacaaatacattataagaaaaaactacaggtgcatattc

SEQ ID NO: 17593 - DNA, 80 bp, synthetic construct
  source 1..80: mol_type = other DNA
tgtttgcaggtgccatgatcctatatttagaaaaccccaaagactccaccctaaaactcccacaaaagcctgttagagat

SEQ ID NO: 17594 - DNA, 80 bp, synthetic construct
  source 1..80: mol_type = other DNA
ggatatgacaccaaaagcactgccacaaaagaaaaaagtagacaaactggacttaataaaaattggtagcctttgtgcta

SEQ ID NO: 17595 - DNA, 80 bp, synthetic construct
  source 1..80: mol_type = other DNA
cctaggacaccctcaaaaactgtgtcccccatccttccaaatcctccttatcctcctttaatttttcccatagtacttcg

SEQ ID NO: 17596 - DNA, 80 bp, synthetic construct
  source 1..80: mol_type = other DNA
atctttgtccctcaattacagatgggacttctggactctccacagtgcctcaggcagagtccccctaagatatcctgaac

SEQ ID NO: 17597 - DNA, 80 bp, synthetic construct
  source 1..80: mol_type = other DNA
cttattaaaaacaggcggtggtcaggcccccgctgctttcccagtagaaactggagtgtttgttccaaaaggaacaagag

SEQ ID NO: 17598 - DNA, 80 bp, synthetic construct
  source 1..80: mol_type = other DNA
ggctaacagagacactcacagcccacacggaaacaggaacacatacctggacacaggctcacacctggaagcacacccaa

SEQ ID NO: 17599 - DNA, 80 bp, synthetic construct
  source 1..80: mol_type = other DNA
taattaacatgtgcttgaaaaacaatggttttcattaaagtgggtgggggagagaagggactgtaggggagaatatttca

SEQ ID NO: 17600 - DNA, 80 bp, synthetic construct
  source 1..80: mol_type = other DNA
agcatggagaaggcatgccatcggtgttcaataaatgcatgtagaagggtgagaatgaagagatgatccctccgagtcaa

SEQ ID NO: 17601 - DNA, 80 bp, synthetic construct
  source 1..80: mol_type = other DNA
ctgcacctgaacttatcctcccctaagtgccgcagtcaccctcccataacactgtcttcttgcctctctgcacccactct

SEQ ID NO: 17602 - DNA, 80 bp, synthetic construct
  source 1..80: mol_type = other DNA
ccagctgcaggccccagaggtgaaaacaggtatggacatccagaggtttggggacactcagaatctcaggatcccagata

SEQ ID NO: 17603 - DNA, 80 bp, synthetic construct
  source 1..80: mol_type = other DNA
atacaagataggacattttttcaaaactttcttgggtattgtgataagttgggccttagggcttggaaatgcccaagtgc

SEQ ID NO: 17604 - DNA, 80 bp, synthetic construct
  source 1..80: mol_type = other DNA
ggcccgccctctccctgaccccacaactctcactactacccatggccccaggaccgaccacggaggacaccccaaacacc

SEQ ID NO: 17605 - DNA, 80 bp, synthetic construct
  source 1..80: mol_type = other DNA
gacacacatatacaacacacatacaaacacaagcccacattcacttacagacacagatccacaggcatacatgcacaact

SEQ ID NO: 17606 - DNA, 80 bp, synthetic construct
  source 1..80: mol_type = other DNA
acgactgagagcaggtgcaatctgtgctcaggacaccagcccagggtaggcatacccagaaagaaaatgctgaaactact

SEQ ID NO: 17607 - DNA, 80 bp, synthetic construct
  source 1..80: mol_type = other DNA
ggtagtccttgatctggtccttgtctcagggattacttctgggggagcccagcctaagacacttcatctctcccttttcc

SEQ ID NO: 17608 - DNA, 80 bp, synthetic construct
  source 1..80: mol_type = other DNA
tgatgttcagcatctttgcatgtgcttattggttatctgtatatcctttggtgttttgttttgttttgttttgttttgtt

SEQ ID NO: 17609 - DNA, 80 bp, synthetic construct
  source 1..80: mol_type = other DNA
tcacatcaagcctgcgtgaatcatctcctcgaggaagcctcccctctctatcctcatcaggctccaggactcaggggagg

SEQ ID NO: 17610 - DNA, 80 bp, synthetic construct
  source 1..80: mol_type = other DNA
aaaaggagggaggaaggaaaaaaagggggaaggaagaaggaaaagaggaaaggaagaaaggaaaggagggaagaagggga

SEQ ID NO: 17611 - DNA, 80 bp, synthetic construct
  source 1..80: mol_type = other DNA
ccttggccatcaccccatttctgaggccaggagaatcagtgacaagttaagaaggggcctggggtgcagtacgtgctgtc

SEQ ID NO: 17612 - DNA, 80 bp, synthetic construct
  source 1..80: mol_type = other DNA
tttgccatttaaaagcaaactaccatcgcgaggcactttacagtctactgagcaatgcactgtttccatagccctttgct

SEQ ID NO: 17613 - DNA, 80 bp, synthetic construct
  source 1..80: mol_type = other DNA
aaatcagcatggatccagatgctccagcaaaccattactgcatgtcacctggtcggcatggccctgtgactggcctcggt

SEQ ID NO: 17614 - DNA, 80 bp, synthetic construct
  source 1..80: mol_type = other DNA
ccaggacagcacagggccagggcagtgctgctgagtgtttgctgaagtcacattggggccaccttgattgacgtcaatca

SEQ ID NO: 17615 - DNA, 80 bp, synthetic construct
  source 1..80: mol_type = other DNA
gtttcacagctgaggaaaccacgcctcagagcagcgaagaacttggcaactaaaatggagcagagttgggatttgaaccc

SEQ ID NO: 17616 - DNA, 80 bp, synthetic construct
  source 1..80: mol_type = other DNA
cctattgccaccacccagcttccatacccaccttgatcttggaagcatcaaactcgacctccttagggcgctcaggctca

SEQ ID NO: 17617 - DNA, 80 bp, synthetic construct
  source 1..80: mol_type = other DNA
agtgtgtctgcgggtgttgcttctgtgtgtttatgtctgggtgtttacatgtgtctgtatgtgagtgtctggtcatggca

SEQ ID NO: 17618 - DNA, 80 bp, synthetic construct
  source 1..80: mol_type = other DNA
cgcctcacagggagggacagcagtccagggctggggccagcccgctcctgactggaacacgttctgcctctcatctggag

SEQ ID NO: 17619 - DNA, 80 bp, synthetic construct
  source 1..80: mol_type = other DNA
acacgccatgtcccagagccctctcaggcagccacttacctctcccttcccccagccaaggagaatgcggggaagatatg

SEQ ID NO: 17620 - DNA, 80 bp, synthetic construct
  source 1..80: mol_type = other DNA
agaccccagactcaggtctcacaatttgagtgccaaactcagaacccagaacccagattccaggactagaccccactgtg

SEQ ID NO: 17621 - DNA, 80 bp, synthetic construct
  source 1..80: mol_type = other DNA
cagcaattctgactagagatggcacgaggcaggtacaaggaccagcagaaggagataaatttctacaccatcccatggcc

SEQ ID NO: 17622 - DNA, 80 bp, synthetic construct
  source 1..80: mol_type = other DNA
tactctcccaccagcagcttcccaaagagcaaatatttattgtccttggaagaaaaaaaaagactccccttttaggatcg

SEQ ID NO: 17623 - DNA, 80 bp, synthetic construct
  source 1..80: mol_type = other DNA
aaaaaaaacccgtcagtcagacgaggagtctgaattgagtggttgtttgagtggatggaccgactgtctcaggcaaacag

SEQ ID NO: 17624 - DNA, 80 bp, synthetic construct
  source 1..80: mol_type = other DNA
catatacttttgcacacatgtatacacacattcacatgcctttgcatacacatccatgcactctcccacatacacctaat

SEQ ID NO: 17625 - DNA, 80 bp, synthetic construct
  source 1..80: mol_type = other DNA
agcatctggccttggagccctctgctccagggagcctcatgcggttttagagccagggctgaggtaaatacctctgtgcc

SEQ ID NO: 17626 - DNA, 80 bp, synthetic construct
  source 1..80: mol_type = other DNA
agcctacccatggcaactgagagacaaagaggtaagggagcagggtgtttggaatccacagctctggccaataggtgtgc

SEQ ID NO: 17627 - DNA, 80 bp, synthetic construct
  source 1..80: mol_type = other DNA
gagccagctgtgctgagagagggtgctgctgtgaggacaggatgtactggatggccctgagttcagtgctccagtccctt

SEQ ID NO: 17628 - DNA, 80 bp, synthetic construct
  source 1..80: mol_type = other DNA
tgatattttgagtttaagaaaactttgcagtcggcaggagctcttaaaggttataaatagcagcagcgggagcccatgca

SEQ ID NO: 17629 - DNA, 80 bp, synthetic construct
  source 1..80: mol_type = other DNA
acaatgtgcatggggcaagaactgttacgacgctgcaaatacctggaaactcaggcgagtctcaggctcccacccaccat

SEQ ID NO: 17630 - DNA, 80 bp, synthetic construct
  source 1..80: mol_type = other DNA
tgactaacttgtgaaacaaaaagtactttggaaactctaatgagtggtaccctccccaggagcctggaagacccagggag

SEQ ID NO: 17631 - DNA, 80 bp, synthetic construct
  source 1..80: mol_type = other DNA
ccctctgatttctctgggtgccttaaacttgagtgaagtcactagtaggggctgtgttcatacctcgtggcagcctgata

SEQ ID NO: 17632 - DNA, 80 bp, synthetic construct
  source 1..80: mol_type = other DNA
tgcagcctgactttggggctagtgttgggatgaagcactggggaaatataaggactcagaaatagatgtgagccattagt

SEQ ID NO: 17633 - DNA, 80 bp, synthetic construct
  source 1..80: mol_type = other DNA
ttccaatccctccattaatgttcttttctcatcaccaagggggaaagcagggtggaagatcagtggtcacagaaccataa

SEQ ID NO: 17634 - DNA, 80 bp, synthetic construct
  source 1..80: mol_type = other DNA
aagaccaggagtctagcagacagttcctgttagggagagtcatttttggaggaaactgtctcaaatagcacagcccttga

SEQ ID NO: 17635 - DNA, 80 bp, synthetic construct
  source 1..80: mol_type = other DNA
accctcgtggaaactaaacagtaaagttaacattgcccttgaatcagctggccaacctctccattttgcagatgaggaaa

SEQ ID NO: 17636 - DNA, 80 bp, synthetic construct
  source 1..80: mol_type = other DNA
tcggctcagggtctctattcgccagcgggggccggatgatcaagggaaaaaaaatttaaaagcccgtgctttccagaaga

SEQ ID NO: 17637 - DNA, 80 bp, synthetic construct
  source 1..80: mol_type = other DNA
tgcgcttcccgcgggcgcgcggagtgaggacggtgacagccacgcgcgcgcgtacgcgcccgatgcagcgcggccccgtg

SEQ ID NO: 17638 - DNA, 80 bp, synthetic construct
  source 1..80: mol_type = other DNA
atgtacccaggtattagaagttgcgtcttgtttattggaaagccaatacttgtttcccttttctaaagcttgcatattct

SEQ ID NO: 17639 - DNA, 80 bp, synthetic construct
  source 1..80: mol_type = other DNA
ctcgtgaccagccgacctgggcctcccaaagtggtgggaaagtggtgcgattacagatgtgagccaccccgcccagcctc

SEQ ID NO: 17640 - DNA, 80 bp, synthetic construct
  source 1..80: mol_type = other DNA
atgacatactgaaattactggtgccccaattgctcatcccccagttcttgcaggctgagcctcaggttattgcggtcccc

SEQ ID NO: 17641 - DNA, 80 bp, synthetic construct
  source 1..80: mol_type = other DNA
agagcaagttatgcctcagtgtgttgttgaaaataatagaacaatatgccacaattagtggagcttcatagctgggtgtg

SEQ ID NO: 17642 - DNA, 80 bp, synthetic construct
  source 1..80: mol_type = other DNA
aagtacaataacaaatttaaaaattaactagagggactcaggactcaataacagatttgaactgggtgaagaaagaattc

SEQ ID NO: 17643 - DNA, 80 bp, synthetic construct
  source 1..80: mol_type = other DNA
aaaatggacaaactcctagaaagatataaaccaccaaaattgacccaagaagagacactatctgaatagacctataacaa

SEQ ID NO: 17644 - DNA, 80 bp, synthetic construct
  source 1..80: mol_type = other DNA
caggaatattgactaccaaatcatagtgtagttgaagccattctgcgtttttgagcagttattcgtttcagtgattataa

SEQ ID NO: 17645 - DNA, 80 bp, synthetic construct
  source 1..80: mol_type = other DNA
acagttcttcacaaagtcttcaaaaatgaaaaagaggagaaaatacttacaaacgaattttatgagactggtattaccct

SEQ ID NO: 17646 - DNA, 80 bp, synthetic construct
  source 1..80: mol_type = other DNA
gagatagcactactgcacacaataggctgggcgacagagctcaaaacaaacaaacaaacaaacaaaatagtgaaagactg

SEQ ID NO: 17647 - DNA, 80 bp, synthetic construct
  source 1..80: mol_type = other DNA
tatcagcctcccaagcagctcagaccacaggcatgcgcgatcatccctagctttttttttttgtttgtttgttttttaat

SEQ ID NO: 17648 - DNA, 80 bp, synthetic construct
  source 1..80: mol_type = other DNA
cacaatagctaaatcttgaaaaagaacaaagcagaaagactcacgctttgtgatttcaagacatactataaaacaactaa

SEQ ID NO: 17649 - DNA, 80 bp, synthetic construct
  source 1..80: mol_type = other DNA
aagaaattaaacccttacctcacactacatacaaaaattaactcatggctgggcacggtggctcacacctgtaatcccag

SEQ ID NO: 17650 - DNA, 80 bp, synthetic construct
  source 1..80: mol_type = other DNA
ctggaggctgagacatgagaatcacttgaactcgggaggtggaggttgcagtgagctcagattgtgctactgcactccaa

SEQ ID NO: 17651 - DNA, 80 bp, synthetic construct
  source 1..80: mol_type = other DNA
ctgggaaaaatgggtggggtagagggtgtgatagctgaaatatacaaggttttatttatgaagtgatgaaaatactctaa

SEQ ID NO: 17652 - DNA, 80 bp, synthetic construct
  source 1..80: mol_type = other DNA
ccctggcactattgacattttggctggatgattctttgttgtggggagctgtcttgtatgttctaggatgtttagcagga

SEQ ID NO: 17653 - DNA, 80 bp, synthetic construct
  source 1..80: mol_type = other DNA
actgccctgttgtgatttatcaagccattacacctcactgaacctcagatttccagtggaaaaacctgtttgtaaaccat

SEQ ID NO: 17654 - DNA, 80 bp, synthetic construct
  source 1..80: mol_type = other DNA
tctggagggcagtgtagttgtacagggtaatagttctatactctatattagtgcaacaagaaacttctattcctgtttca

SEQ ID NO: 17655 - DNA, 80 bp, synthetic construct
  source 1..80: mol_type = other DNA
taaatgcacactacctcatttgatataacagggactcatttattcattcaagagatattataaaataggctaggcacagt

SEQ ID NO: 17656 - DNA, 80 bp, synthetic construct
  source 1..80: mol_type = other DNA
taaagcctgcagttgcttatttgaacctcacattgaggctgacatgtaagttgagcaaatcttaactcaagcttcagttt

SEQ ID NO: 17657 - DNA, 80 bp, synthetic construct
  source 1..80: mol_type = other DNA
tgttctctttgcctggaatgccattctcatttgttgcttggcagaactgaactcattctccttctaggctctgctcaagg

SEQ ID NO: 17658 - DNA, 80 bp, synthetic construct
  source 1..80: mol_type = other DNA
gacctgctgggctcaagtgattctcctgcctaagcctcccaagtagctgggactacaggcacatgccaccaatacctggc

SEQ ID NO: 17659 - DNA, 80 bp, synthetic construct
  source 1..80: mol_type = other DNA
tctcttgtctggttcctgcatcgttttacttgtgtaaaatcatcaagatccctaaaccgatgtctgaacaccaggcttct

SEQ ID NO: 17660 - DNA, 80 bp, synthetic construct
  source 1..80: mol_type = other DNA
tttgagacatgaatgaggtggacctttacaggcacttggttcagggcctgacccgtagtgagcatttgataaatgttacc

SEQ ID NO: 17661 - DNA, 80 bp, synthetic construct
  source 1..80: mol_type = other DNA
cgtttgaggttttaaaaacccagaattgagttttctcagagctgctaatctttctagccagctggtgacgaggcttctca

SEQ ID NO: 17662 - DNA, 80 bp, synthetic construct
  source 1..80: mol_type = other DNA
ggtcaagctagaaacagagaatattcaaaatttctttccaggcaaacatctgggttcaatagaagctagttcacatgaat

SEQ ID NO: 17663 - DNA, 80 bp, synthetic construct
  source 1..80: mol_type = other DNA
agaggttaagtgacttacccagcacagcgggtttgggtgttttatagctgtttgactatatgagctatgattgctctcat

SEQ ID NO: 17664 - DNA, 80 bp, synthetic construct
  source 1..80: mol_type = other DNA
cttcaaggagtttgtgatctgcagaactggaggaaagacagaaaacttggggaaagacaagtacctcatttttcaatatg

SEQ ID NO: 17665 - DNA, 80 bp, synthetic construct
  source 1..80: mol_type = other DNA
aggaaaaaagtctctctctctccccactcccctctttttgctgtgatctattttttttcccacacttttcacaggtgttg

SEQ ID NO: 17666 - DNA, 80 bp, synthetic construct
  source 1..80: mol_type = other DNA
ggctgataatttagcccaccagacccctatgaaagggaatattgcttctctcttagctttttccacattttagtattctc

SEQ ID NO: 17667 - DNA, 80 bp, synthetic construct
  source 1..80: mol_type = other DNA
ctgaaagcgttacgtgccatcagttatccaaaaagaacattttttaaccagaaaataaacatgagactcatcccactagt

SEQ ID NO: 17668 - DNA, 80 bp, synthetic construct
  source 1..80: mol_type = other DNA
aatctaaggagaggtggcagagttacaattaacaataactaccccttactgagtatttatttgctatgggccaagcactc

SEQ ID NO: 17669 - DNA, 80 bp, synthetic construct
  source 1..80: mol_type = other DNA
attatcttttcccagctagttcatatcctagtcctctgagtgtagagacttgtttctttttccccatttgtcccctgcac

SEQ ID NO: 17670 - DNA, 80 bp, synthetic construct
  source 1..80: mol_type = other DNA
gcagtttcctgtagaaagcatgacttttaaaaaaagacttatttccttctctcctgcatctaactctcacttgctcttta

SEQ ID NO: 17671 - DNA, 80 bp, synthetic construct
  source 1..80: mol_type = other DNA
ttttatgctggagaatttaaactcccatgtcaggaaattcactcatcattcccttggcagcttttgtttctctgcactgc

SEQ ID NO: 17672 - DNA, 80 bp, synthetic construct
  source 1..80: mol_type = other DNA
tgtagaatcaggttttagcaaaaaccaatcaggtatcagaggtctaacttatttttcccttcttggttttatagcaagtc

SEQ ID NO: 17673 - DNA, 80 bp, synthetic construct
  source 1..80: mol_type = other DNA
tagactctcctaaatgaggatgcttatttaccagctttcctaaattagcagctttggagatgttaaaatccgtaaggaac

SEQ ID NO: 17674 - DNA, 80 bp, synthetic construct
  source 1..80: mol_type = other DNA
attaatatgatctaaggaatagagagtgcctggtccccagggtgaaagaatgtccattttgtcctcaggattctctgggg

SEQ ID NO: 17675 - DNA, 80 bp, synthetic construct
  source 1..80: mol_type = other DNA
agctttacaggggtgaatggaattgttagaagatttaaaggcagtggtttacagactgtgcttcaagtattttgtggggc

SEQ ID NO: 17676 - DNA, 80 bp, synthetic construct
  source 1..80: mol_type = other DNA
ctgcaattctgcaggtactggatcatgatgtttcaaaggaagaaccagtcacctttcacttcttggccaaattttatcct

SEQ ID NO: 17677 - DNA, 80 bp, synthetic construct
  source 1..80: mol_type = other DNA
tagtgacacttggtttgtcccccatatgtggtacttcagacatcgtgcttcatgctatgctgtgtctctaattgtcctat

SEQ ID NO: 17678 - DNA, 80 bp, synthetic construct
  source 1..80: mol_type = other DNA
aagttaaatataataaaaccccctaaattctttttaaaaaaggtctggggggcgtgtgtgtgtgtgtgtgtgtgtgcacg

SEQ ID NO: 17679 - DNA, 80 bp, synthetic construct
  source 1..80: mol_type = other DNA
ctcacgtgtacttaaaagttgaatcgatcaaattttattgcttccttttcccttagagcagcacgttgagagtgatggtt

SEQ ID NO: 17680 - DNA, 80 bp, synthetic construct
  source 1..80: mol_type = other DNA
acctttctattagccaggaaaaatgaatttatggtctccaattttagccaaacatggcctttaggtcagaaaggcccagg

SEQ ID NO: 17681 - DNA, 80 bp, synthetic construct
  source 1..80: mol_type = other DNA
atttttatagagatggggtctcactatgttgtccaggctggtcttgaactcctgagctcaagtgatccttccaccttggc

SEQ ID NO: 17682 - DNA, 80 bp, synthetic construct
  source 1..80: mol_type = other DNA
ttctcatatggggcggctgcctggcggaggagctcctcacttcacagacggggcggttgccaggcagagggtctcctcac

SEQ ID NO: 17683 - DNA, 80 bp, synthetic construct
  source 1..80: mol_type = other DNA
ctcttaactcactttttggggtagattaatgcaatttcagatcaaagccaggaagtaactgtcatttgtggggaaaaaag

SEQ ID NO: 17684 - DNA, 80 bp, synthetic construct
  source 1..80: mol_type = other DNA
gaggaaaaatgtgtcctttcaatcagtatcaccccgacagtgatgaagcagtcattggcactttgattaaatccgagcac

SEQ ID NO: 17685 - DNA, 80 bp, synthetic construct
  source 1..80: mol_type = other DNA
acaagaaccatatatgagttatacttgaatcaaaagtgtaggcagggactgggcacagtggctcacacctgtaatcctag

SEQ ID NO: 17686 - DNA, 80 bp, synthetic construct
  source 1..80: mol_type = other DNA
tgcagtgaagggtttatattttagatagagcctgtagtggctgtgtgatggacagattggagtgagacaactttggaaac

SEQ ID NO: 17687 - DNA, 80 bp, synthetic construct
  source 1..80: mol_type = other DNA
tggctactccagaggaatctctgcacacacatccttttcacttaaaactgtcacaacagatagacccacttcattttctt

SEQ ID NO: 17688 - DNA, 80 bp, synthetic construct
  source 1..80: mol_type = other DNA
agaaagtagatttagtggttgccagggaaagggagaaggaggaaattaggagtgactgatactggccaggcacggtggct

SEQ ID NO: 17689 - DNA, 80 bp, synthetic construct
  source 1..80: mol_type = other DNA
cataaacttactgtccatttgtatttctttgttctgtgaatcaaccgtttatgacttgcctactactgtattgtttgttt

SEQ ID NO: 17690 - DNA, 80 bp, synthetic construct
  source 1..80: mol_type = other DNA
ggatttttttcttcccttgttgtttaaagagacatttaagagcagacacatacatcaaggtggctttaatgttggaagca

SEQ ID NO: 17691 - DNA, 80 bp, synthetic construct
  source 1..80: mol_type = other DNA
tcctctaaggccagtgctctcatttgacaaatgaaagacagatttggagagacctgagatcttttggacatcaggtttat

SEQ ID NO: 17692 - DNA, 80 bp, synthetic construct
  source 1..80: mol_type = other DNA
tgcccaccctatttttttaaatgaagaaatgcctaaactgtgttacaaaaactgtggcatgtttaaaatgtttaaatttg

SEQ ID NO: 17693 - DNA, 80 bp, synthetic construct
  source 1..80: mol_type = other DNA
aaaggtattaaaactactgcctgcattattcctggatccccctagtaatgggctccaattaccagtcacttataagaatt

SEQ ID NO: 17694 - DNA, 80 bp, synthetic construct
  source 1..80: mol_type = other DNA
ggggtcaccaggactagcatggcctgtaaatgttttttctagcgtggttgttttttcagatgcagttgagcatcattgat

SEQ ID NO: 17695 - DNA, 80 bp, synthetic construct
  source 1..80: mol_type = other DNA
gacatgcttgttaaacaaaatgcagtactgaagtctataaaagaaaaggggagagctggggagctgggagtaacgttggt

SEQ ID NO: 17696 - DNA, 80 bp, synthetic construct
  source 1..80: mol_type = other DNA
atgagagtgtcccaccccccacccccagtctatcctcaacaattgtttttatcagtctaatttttgtaatctaaaaagtg

SEQ ID NO: 17697 - DNA, 80 bp, synthetic construct
  source 1..80: mol_type = other DNA
ggagagagaaggaagaggacaaggtcatagggagacttgagttaaaatatttcagtatgatacctgtttgggagttttct

SEQ ID NO: 17698 - DNA, 80 bp, synthetic construct
  source 1..80: mol_type = other DNA
gacttcaattagatcataggtaattaagtgtcacttgagccttgggggacttggacctggttctgctctcagcagaaacc

SEQ ID NO: 17699 - DNA, 80 bp, synthetic construct
  source 1..80: mol_type = other DNA
tagctggggagtatcactgtgcctggctgaaaaggtttcttattagggaatatttctacatcagtcagactaatggatac

SEQ ID NO: 17700 - DNA, 80 bp, synthetic construct
  source 1..80: mol_type = other DNA
accagacttgctttatcacatgaagactacattttatcataaaatgagaccatccagccccaggcactgaaaattttctt

SEQ ID NO: 17701 - DNA, 80 bp, synthetic construct
  source 1..80: mol_type = other DNA
gctgtgacttctgttgggacctgctgaaacttgtcacatgtgacagtgtgtgccagattctttggaaggttgaataaaat

SEQ ID NO: 17702 - DNA, 80 bp, synthetic construct
  source 1..80: mol_type = other DNA
gctcttagaatttaaatatttccatatagggtggtgacttttaccaaaaaggtcccataatgtataatcttatgtttact

SEQ ID NO: 17703 - DNA, 80 bp, synthetic construct
  source 1..80: mol_type = other DNA
agcttatgttgctgcctgcagagccccaaacctgagcatatttcctgttttctctttttcatggcaactcaaggaaggga

SEQ ID NO: 17704 - DNA, 80 bp, synthetic construct
  source 1..80: mol_type = other DNA
taacagcttttaccaaattattcccatgttcagaaacctgtggtgagctcaggtatcctgtcacatcaaacctaaaccct

SEQ ID NO: 17705 - DNA, 80 bp, synthetic construct
  source 1..80: mol_type = other DNA
attaaggatgcttattttaggttgtcaagaatcccttcccacactcatgcctaagatggtctagagagcgtacctttagg

SEQ ID NO: 17706 - DNA, 80 bp, synthetic construct
  source 1..80: mol_type = other DNA
cctgctggtctctcctttccctctccccaagggtgatcactgttttgagttgagtattcatcatcctcttgcttttcaac

SEQ ID NO: 17707 - DNA, 80 bp, synthetic construct
  source 1..80: mol_type = other DNA
gccacttctatactgttttaacaggctgttatgaaaacttttgtatctgcctcctggtgcacataggcaatagtttcttt

SEQ ID NO: 17708 - DNA, 80 bp, synthetic construct
  source 1..80: mol_type = other DNA
ccctccccagtagctgggactacagacacacaccaccatgcccagctaattttttgtattttttttatagagacaaagtt

SEQ ID NO: 17709 - DNA, 80 bp, synthetic construct
  source 1..80: mol_type = other DNA
gctcttgttttataccttttggatcttcatttgccgatgcctacctggtgggatgtcatctctggaaatgaggaataaac

SEQ ID NO: 17710 - DNA, 80 bp, synthetic construct
  source 1..80: mol_type = other DNA
ggatgctttcagggtgatgggatggatttgttggacaaagaaatcctactgagccagcatggggtcatagtggcagtttc

SEQ ID NO: 17711 - DNA, 80 bp, synthetic construct
  source 1..80: mol_type = other DNA
tacaaggagaaaattggagaagaactttcactgttttattgcttgtctttgcattatctttttgagcttgtgtgtgtgtg

SEQ ID NO: 17712 - DNA, 80 bp, synthetic construct
  source 1..80: mol_type = other DNA
agagatgtgagaggggtccatgtggattagaaatggtgagatggcttgcctgcccagatgagaaagctgcttatttctgg

SEQ ID NO: 17713 - DNA, 80 bp, synthetic construct
  source 1..80: mol_type = other DNA
ctagatcccagtagcagcacctcaccctccatttgtaacaatccaaaacatcttcagacattgccacatgtctctttttt

SEQ ID NO: 17714 - DNA, 80 bp, synthetic construct
  source 1..80: mol_type = other DNA
tggttctaaccactgatttaaagggaaagaacagagtttaagttgtttttctccacgtgaagcataagcctgagctgagg

SEQ ID NO: 17715 - DNA, 80 bp, synthetic construct
  source 1..80: mol_type = other DNA
acattccccacagcttttggctctgttgatttagagcacttgaatttggcttttagctaccaaggtgcattcactacagt

SEQ ID NO: 17716 - DNA, 80 bp, synthetic construct
  source 1..80: mol_type = other DNA
caaacaaaagtcctcaggaatgttgtccttgcttggaagttctgatttcatgtaaatatccctgtctcactgtccttttt

SEQ ID NO: 17717 - DNA, 80 bp, synthetic construct
  source 1..80: mol_type = other DNA
gcttgaagggggagcaggaagtagccaggtggagaagagaacatagggtattcagggtgagggcacagatgcacacatgg

SEQ ID NO: 17718 - DNA, 80 bp, synthetic construct
  source 1..80: mol_type = other DNA
agtcataccagttcatgctctcactagtggtgcagcaactagtacgcgtttttgctgaaaatttttatgatgtgtaacat

SEQ ID NO: 17719 - DNA, 80 bp, synthetic construct
  source 1..80: mol_type = other DNA
accctttgtgctgggatgaaagtccaaaaaaaaaaaaaactacaccacccctgcttcaggccctactccggttccattgt

SEQ ID NO: 17720 - DNA, 80 bp, synthetic construct
  source 1..80: mol_type = other DNA
ctgcaaaggtttgctctgctcttacaccctggaggaagaatttccttaatcagaaattaaggacaacagatcagcattca

SEQ ID NO: 17721 - DNA, 80 bp, synthetic construct
  source 1..80: mol_type = other DNA
gctaagtagccaatgaaccagagcctctagctgtcatatctgctgtccatgttcctttcaccattatccagacatataca

SEQ ID NO: 17722 - DNA, 80 bp, synthetic construct
  source 1..80: mol_type = other DNA
tgcacatattggcagagtctctatactaaccatggcaatccctatggagtgtttttggtatttgtattgcatggtttttc

SEQ ID NO: 17723 - DNA, 80 bp, synthetic construct
  source 1..80: mol_type = other DNA
cagagtggaatacatggaaaagagcaagcatctgcaggagcagctcaatgaactcaagacagaaatcgaggccttgaaac

SEQ ID NO: 17724 - DNA, 80 bp, synthetic construct
  source 1..80: mol_type = other DNA
ttttatggactgtctctgtttttagtggttaagctgtatctgaaaactccaggggatctgtttctgcctgccttcgttgt

SEQ ID NO: 17725 - DNA, 80 bp, synthetic construct
  source 1..80: mol_type = other DNA
atggcttcttgtccagtcaggtgtgtctaaaagtcctttgtcttggtggcatactcctagcatggaaatggggtcaatct

SEQ ID NO: 17726 - DNA, 80 bp, synthetic construct
  source 1..80: mol_type = other DNA
atcctacttgtggtcgttatcccatcaagagaggtcagctgttaaagtccctgatagatcttattaaaaggtacacttga

SEQ ID NO: 17727 - DNA, 80 bp, synthetic construct
  source 1..80: mol_type = other DNA
gatgcaaaagctgatagtgaatggaacagtttccaatgtccaaaagcttgctaatctgggatcaaaccagcctgtgttga

SEQ ID NO: 17728 - DNA, 80 bp, synthetic construct
  source 1..80: mol_type = other DNA
tataaaaaaggatgaattcttactctctcttgaggcacagtgtcctcacctgcaaaaggtggataaaaatagtctttgcc

SEQ ID NO: 17729 - DNA, 80 bp, synthetic construct
  source 1..80: mol_type = other DNA
ccaaggaaattgacggatgagaaatcatgggggtggtggagcttagaaagcttatttcattagtaaatggtttgaaccgt

SEQ ID NO: 17730 - DNA, 80 bp, synthetic construct
  source 1..80: mol_type = other DNA
tgtctcgtaactgttgagagcttagttttcttgcttgtttctggtagctctagatagaagactgtatcggcctcttctaa

SEQ ID NO: 17731 - DNA, 80 bp, synthetic construct
  source 1..80: mol_type = other DNA
aaaaagagaaagtaaagaaaagcttgatctggccacttagtacagccatccccctttactggcccttcctctttgcttat

SEQ ID NO: 17732 - DNA, 80 bp, synthetic construct
  source 1..80: mol_type = other DNA
gaacaagatgatcacaatgcagccttgtgaatcaattttctgtctgtgctgatgaaagtgtaattcattcttaatcaagc

SEQ ID NO: 17733 - DNA, 80 bp, synthetic construct
  source 1..80: mol_type = other DNA
ttcagtcgagagagaacttaattcctcctgtgttattcacacggctgattctaatcagatgtgaagagacagctggagga

SEQ ID NO: 17734 - DNA, 80 bp, synthetic construct
  source 1..80: mol_type = other DNA
attttatgaagggctagctttttgccatttcttctgagcttttgccttttcctttatgaatacttcctgcctatgggtgt

SEQ ID NO: 17735 - DNA, 80 bp, synthetic construct
  source 1..80: mol_type = other DNA
cagggaggggagaaacgtgatgttgctattagcaataacagctgccgagttcccaccatgcgccaggtgcagtgttgagt

SEQ ID NO: 17736 - DNA, 80 bp, synthetic construct
  source 1..80: mol_type = other DNA
ttagttatcttcatagcccacgtcctggtcgcttaacaaacattgagctcctgatcggcacataacactaagccagatat

SEQ ID NO: 17737 - DNA, 80 bp, synthetic construct
  source 1..80: mol_type = other DNA
tcacctcctaatttgaattattgggcaaatctggccgcttatttgggactgacagccaacttcttgagcatctatttgaa

SEQ ID NO: 17738 - DNA, 80 bp, synthetic construct
  source 1..80: mol_type = other DNA
gaggggctgggtagtgccgtgcgggagctgatggtacagggcactcgctgtccccctccggccaccctagaccagggtcc

SEQ ID NO: 17739 - DNA, 80 bp, synthetic construct
  source 1..80: mol_type = other DNA
tgtcttaatcagataaaagatagaggctatgggggcctcaagatttttggagagcagaggtggtctctggcaattccatc

SEQ ID NO: 17740 - DNA, 80 bp, synthetic construct
  source 1..80: mol_type = other DNA
gagttactttcctcctgacctgtaaatttgttctttaacaatggctgcaggtgggagcatatggtggtttataaaaacgc

SEQ ID NO: 17741 - DNA, 80 bp, synthetic construct
  source 1..80: mol_type = other DNA
tctcttttttttgtcaaaagcccagagactgacaaccagctgcagtgtctaagtgttcctcactgacagggtggggcctc

SEQ ID NO: 17742 - DNA, 80 bp, synthetic construct
  source 1..80: mol_type = other DNA
gctccctcactgcaactgaacacatttcttagtttttaggtggcccccgctggctaacttgctgtggagttttcaagggc

SEQ ID NO: 17743 - DNA, 80 bp, synthetic construct
  source 1..80: mol_type = other DNA
tgagttagctgggtaaacaaggccatcaggtggagacatcactaccagaaagcttctagaacagtttcatgttaataatg

SEQ ID NO: 17744 - DNA, 80 bp, synthetic construct
  source 1..80: mol_type = other DNA
tgaacatctactttgtgccatgccctatcaaggagttggagatacggtggtaaataacgtaaaaatatacttcactccag

SEQ ID NO: 17745 - DNA, 80 bp, synthetic construct
  source 1..80: mol_type = other DNA
ataggaaatatgtggttagaatttgatggtgccacaaaataggaatcgcagttttgaagtgagcggtcatatcgccatgg

SEQ ID NO: 17746 - DNA, 80 bp, synthetic construct
  source 1..80: mol_type = other DNA
acacacgtggacatccagacaacgtgattataagacgttcatgttcttgcatagaggagagaaaccagtgcactttgatt

SEQ ID NO: 17747 - DNA, 80 bp, synthetic construct
  source 1..80: mol_type = other DNA
ggctgccccttgtctctatcaataatttatatcacatatgggtatgtggcaacagtgaggagggtttcaagtaaactttt

SEQ ID NO: 17748 - DNA, 80 bp, synthetic construct
  source 1..80: mol_type = other DNA
ctccagaagttaaagtctttatctcaaattgtccatggggatcagagtatcatttaacactgaattttttcctactctgg

SEQ ID NO: 17749 - DNA, 80 bp, synthetic construct
  source 1..80: mol_type = other DNA
gggaccattgtatttgctttccttccagtgataaatttccctggttagttctcgatatctatgaaaaacagctctttttc

SEQ ID NO: 17750 - DNA, 80 bp, synthetic construct
  source 1..80: mol_type = other DNA
ctccatgattttcaggccttgtgttcagcctgggccataccctatatttgctcttccctcaacataaattttgtcttttt

SEQ ID NO: 17751 - DNA, 80 bp, synthetic construct
  source 1..80: mol_type = other DNA
agagtcaggaaaggaatctcttaggaagtgatatttaagcttacagcctgagaatgagaaggagccagctttgagagttg

SEQ ID NO: 17752 - DNA, 80 bp, synthetic construct
  source 1..80: mol_type = other DNA
attgttaccctgctgctgtttgagaggctgtagatatacagccagaggaacttagtgaagacaaagttattgacataact

SEQ ID NO: 17753 - DNA, 80 bp, synthetic construct
  source 1..80: mol_type = other DNA
aacagcaaacaaaaacacaaaggggcacaaggaaactctggggtgggggaaggttatctgctaacatttattggagatgt

SEQ ID NO: 17754 - DNA, 80 bp, synthetic construct
  source 1..80: mol_type = other DNA
agccttgtgagcattcagaagtaagaggatacaacaaaatcccgcagaggctgagaataggggatgatattgaatccttt

SEQ ID NO: 17755 - DNA, 80 bp, synthetic construct
  source 1..80: mol_type = other DNA
aatataataaaatatttggttcttcttagtctaaaccttttaaatttttattttcgtgtatgttttgttatgtacataat

SEQ ID NO: 17756 - DNA, 80 bp, synthetic construct
  source 1..80: mol_type = other DNA
atcaccattgcaaaaagacctccataaatcccaacagatgattaactcttcatcccaagtagcacaggctctcttgttag

SEQ ID NO: 17757 - DNA, 80 bp, synthetic construct
  source 1..80: mol_type = other DNA
cttggatgccagaggaaatgtaattgtctgtatcaaagactgctatgagaaattcctaatgataagcgggggttctccaa

SEQ ID NO: 17758 - DNA, 80 bp, synthetic construct
  source 1..80: mol_type = other DNA
acatgaggttatatgtgatttgctgtgctttatcaagaataagaagataaagcatttgctgtgctttatcaagaggccga

SEQ ID NO: 17759 - DNA, 80 bp, synthetic construct
  source 1..80: mol_type = other DNA
tgaaacctcacagtcaaggtaattgattatcatggagcatacaggcatacaaaaaagcataaaaatcagttattgaatga

SEQ ID NO: 17760 - DNA, 80 bp, synthetic construct
  source 1..80: mol_type = other DNA
aaaaactgaggacaggagtgaccgcaactgctatgggttgatgttcctataaaacacctgaaataagagaaaaggtctcc

SEQ ID NO: 17761 - DNA, 80 bp, synthetic construct
  source 1..80: mol_type = other DNA
gcctctctagtagctgggattataggcacccaccaccactccaggctaatttttttttttttttttggtattttgagtag

SEQ ID NO: 17762 - DNA, 80 bp, synthetic construct
  source 1..80: mol_type = other DNA
tatggggatctggtccttggtcattagaacatcatcatcaaatatccatgctaggttctgttgggacttctatattccca

SEQ ID NO: 17763 - DNA, 80 bp, synthetic construct
  source 1..80: mol_type = other DNA
ttgcctcttttctttctctctgcatttctgctctaccagacctcacttgaatcaataatatgactgcccaaatgagcaat

SEQ ID NO: 17764 - DNA, 80 bp, synthetic construct
  source 1..80: mol_type = other DNA
cattcaggaaaacaggctgaaatggggccagcaaatggctcaaaggcacgtacctaataaatggcagacccaggattgga

SEQ ID NO: 17765 - DNA, 80 bp, synthetic construct
  source 1..80: mol_type = other DNA
cgctcttttgtgtctgacttcgttcgcttaacattatgagatgtatcgatgtagctgtgtgtagttgtagatcattcatg

SEQ ID NO: 17766 - DNA, 80 bp, synthetic construct
  source 1..80: mol_type = other DNA
agctgatgtgaaagcataaacaaatgaaacaggtaaaagcaggcttctctggataaagggtggagaaagagtggaagccc

SEQ ID NO: 17767 - DNA, 80 bp, synthetic construct
  source 1..80: mol_type = other DNA
tggctttttggggaatcgttggatgatcttgaacaaaggagggacatgatctacttgcattttaaaaggatccctctgac

SEQ ID NO: 17768 - DNA, 80 bp, synthetic construct
  source 1..80: mol_type = other DNA
tagaaaatgaagatcaactttgttgaatactgctaagtgaaggaagagggctcagaaatggccactagatggagtaacgt

SEQ ID NO: 17769 - DNA, 80 bp, synthetic construct
  source 1..80: mol_type = other DNA
ggaaatttaaaaatgtgctcctgaatgaccattaagtcactgacaaaattaagaagaaaatttaaatagttcttgaaaca

SEQ ID NO: 17770 - DNA, 80 bp, synthetic construct
  source 1..80: mol_type = other DNA
tcttgaacccaccaatcatgaccttcacacaggaactttgcacatgctcttcccactatctcgtatgttttctatggttc

SEQ ID NO: 17771 - DNA, 80 bp, synthetic construct
  source 1..80: mol_type = other DNA
agaaatggggtcagaatgttcattacaggtcccatagcaagtaggactgtttgggcatttcatattctttgatcctacct

SEQ ID NO: 17772 - DNA, 80 bp, synthetic construct
  source 1..80: mol_type = other DNA
cataccaataccctttacatcagtctaacaattgttaatatgttgccttcttcgtctacttgttttggttgttgaactaa

SEQ ID NO: 17773 - DNA, 80 bp, synthetic construct
  source 1..80: mol_type = other DNA
aagcattgagatagtggtttcaagtcactaagagtaaaaaaagtaaaagggccactttactgttttccttatcttccaat

SEQ ID NO: 17774 - DNA, 80 bp, synthetic construct
  source 1..80: mol_type = other DNA
ttttccctctttccctgatattctgaatacctctccctcatcctgtggccactttccatcggttgaaataatttttcttg

SEQ ID NO: 17775 - DNA, 80 bp, synthetic construct
  source 1..80: mol_type = other DNA
agataacgtctgctttttatggcaaccaccctagtataaagaattcacctcatttgacttgctgaagagatttcaaataa

SEQ ID NO: 17776 - DNA, 80 bp, synthetic construct
  source 1..80: mol_type = other DNA
agatgaggaaagcatggctcagagaagttaatggagcttagaagctgactaagtcagggtttaaatcaagctgtctttat

SEQ ID NO: 17777 - DNA, 80 bp, synthetic construct
  source 1..80: mol_type = other DNA
gcatgggagatgggggatgtcagaaaaaggagtagagtagctattgtagaaatctgactttcttttgtgtacgtcattac

SEQ ID NO: 17778 - DNA, 80 bp, synthetic construct
  source 1..80: mol_type = other DNA
caataaaatgacagagccaggtacgcaatgctgtaggaagagtgtcacagaaagaactgctgatgcataagcctaaggca

SEQ ID NO: 17779 - DNA, 80 bp, synthetic construct
  source 1..80: mol_type = other DNA
taactgaaataattgttgaacagcaatgctcattgccccccacctccaacccctggcaaccaccattctactttctcctt

SEQ ID NO: 17780 - DNA, 80 bp, synthetic construct
  source 1..80: mol_type = other DNA
cttttatttttttgctgttaaattgtaggcattccttatattttggacattaaccccttgtgagacacaggtgtgcaaat

SEQ ID NO: 17781 - DNA, 80 bp, synthetic construct
  source 1..80: mol_type = other DNA
gtaactggtaagggagtgtatgttatatccatgggaagacagccttaagatttgagttgttttcttgcttcagcatggat

SEQ ID NO: 17782 - DNA, 80 bp, synthetic construct
  source 1..80: mol_type = other DNA
ttgcctgggcttctctgtgtatcttctcctcttcttataagaatatctgtcattgaatttaggacctaccctactccata

SEQ ID NO: 17783 - DNA, 80 bp, synthetic construct
  source 1..80: mol_type = other DNA
tataccccattcatttttctctaaggtcttcaaacttgggatctaacatttaaatcaaaacaacctggccattatagatc

SEQ ID NO: 17784 - DNA, 80 bp, synthetic construct
  source 1..80: mol_type = other DNA
ggaaaggatttatttatagcaaccatccttttcatggagagagtgaccatcactctctcaaaatggtcattgagccctgc

SEQ ID NO: 17785 - DNA, 80 bp, synthetic construct
  source 1..80: mol_type = other DNA
ttgctaccattgttggctaatgccaaagattgtctgcagagctgtaagaatgcactggaaggcaaacagtactgtatata

SEQ ID NO: 17786 - DNA, 80 bp, synthetic construct
  source 1..80: mol_type = other DNA
gtgctttaacctccaaggggctttttgtgcctacagggatattccgcactctttgtcctttgtttacagtccaatttcat

SEQ ID NO: 17787 - DNA, 80 bp, synthetic construct
  source 1..80: mol_type = other DNA
gtcttcatagcttctcctctcatttctaacctcctgcctctctcttattctctagtgttatattgggcccacccagggta

SEQ ID NO: 17788 - DNA, 80 bp, synthetic construct
  source 1..80: mol_type = other DNA
tttcttttgaaaaaggaaagtagtttctgggggggggcagggcagaggtaagaagtaattggtacgtgaaggaagtgagg

SEQ ID NO: 17789 - DNA, 80 bp, synthetic construct
  source 1..80: mol_type = other DNA
ggcccaacccaacctggccaactaattctagttcaaatgcttttgaaatggccatgatcaaaattacactccgtcattgt

SEQ ID NO: 17790 - DNA, 80 bp, synthetic construct
  source 1..80: mol_type = other DNA
tggagtaaatggttattatcgttttcctcattggaaattgcatatgcgactggtgctagccaaccgctggactccttttc

SEQ ID NO: 17791 - DNA, 80 bp, synthetic construct
  source 1..80: mol_type = other DNA
ctgctgctgccttgggacttctcttgctagcgactgagcttaaagaaaatacgtcttttataagtgtgtaaaatcttgtt

SEQ ID NO: 17792 - DNA, 80 bp, synthetic construct
  source 1..80: mol_type = other DNA
ggctatgagattccagaaggtcaactgcagtgttaatccagactttttttatttgtctgtacacactttagggagtgcta

SEQ ID NO: 17793 - DNA, 80 bp, synthetic construct
  source 1..80: mol_type = other DNA
gctctcagatgatgctgatgttgctactctgaggggcaaggtgctagctttggttctcaactttggcagcacgttacaat

SEQ ID NO: 17794 - DNA, 80 bp, synthetic construct
  source 1..80: mol_type = other DNA
tttattgctttctgtgtcagttcaggtccactaagcagatttcaagaaggaattagacttgcaagagatttattgaggga

SEQ ID NO: 17795 - DNA, 80 bp, synthetic construct
  source 1..80: mol_type = other DNA
gctcgagtgtataaacaatcagatttggacaccctggctaaagaagcatccatcccaattatcaatgggctgtcagattt

SEQ ID NO: 17796 - DNA, 80 bp, synthetic construct
  source 1..80: mol_type = other DNA
aagattcctcttgtttggtttgccacagccaatctacattatattgcccctggaaatcctaacagccatggtttctatgt

SEQ ID NO: 17797 - DNA, 80 bp, synthetic construct
  source 1..80: mol_type = other DNA
ctggccaactaacagtattattgagcatctttgtcaacttcgtataatgggaacatgctctgagccactatgctacactg

SEQ ID NO: 17798 - DNA, 80 bp, synthetic construct
  source 1..80: mol_type = other DNA
tgatgactggcattgtgcattaccaccacaaaggctgaagaaagcaataaaatccaggcagcatagaattctcaacccat

SEQ ID NO: 17799 - DNA, 80 bp, synthetic construct
  source 1..80: mol_type = other DNA
aagaatctaagcaaggatgccatttacagtgaccaaccatcctgatttgctcaagatcaagagatttctggggacatggg

SEQ ID NO: 17800 - DNA, 80 bp, synthetic construct
  source 1..80: mol_type = other DNA
ccaagtacacctgccatagaaaaaatgtactgcatgcagtggaagtcatcctattatagtaaatttgagggactcagaga

SEQ ID NO: 17801 - DNA, 80 bp, synthetic construct
  source 1..80: mol_type = other DNA
taaattttcagggtaggaggcacctgggggaatatccaagtctcttcatttatgtttaccagtatggctgttcacaacat

SEQ ID NO: 17802 - DNA, 80 bp, synthetic construct
  source 1..80: mol_type = other DNA
ttattcctggagggggatctcgggagcataccacagcgttcaccacaatgcttcagtgaaaagtgataaaaatcaactca

SEQ ID NO: 17803 - DNA, 80 bp, synthetic construct
  source 1..80: mol_type = other DNA
tttagctgggatggtcagggaaggtttttctgaggaggggacatttcaactgagacctgaaaaagttatccacatggaat

SEQ ID NO: 17804 - DNA, 80 bp, synthetic construct
  source 1..80: mol_type = other DNA
aatttgaaacccactgagaagagaggagcaggcttttccctctcacaagaatcgaggcattgcagtgttttactctttgt

SEQ ID NO: 17805 - DNA, 80 bp, synthetic construct
  source 1..80: mol_type = other DNA
ctaaattgcttacccaaagaagattaaaaatgtatactgctgcagctgtatattatagttatttttccatatcctctcca

SEQ ID NO: 17806 - DNA, 80 bp, synthetic construct
  source 1..80: mol_type = other DNA
agagttctttactgaaaggtctactgttccactaaatagaataacagaaaactgagttactggtgtaacttgaagtggta

SEQ ID NO: 17807 - DNA, 80 bp, synthetic construct
  source 1..80: mol_type = other DNA
agtggacaatcatggtaagcaagaaacaaggaatggaggataagttctttgtgtggttccaacttggtcattcatgcctt

SEQ ID NO: 17808 - DNA, 80 bp, synthetic construct
  source 1..80: mol_type = other DNA
aaccagatgtcagatactccattatagccaccacagctgaaatagatttctctacctgcatatgtagcagaagatccaat

SEQ ID NO: 17809 - DNA, 80 bp, synthetic construct
  source 1..80: mol_type = other DNA
cattttgagtagcaaagatctagatgacaaagaaaatgtgagctctccaaccacatacctcaggaagagacacagcaaaa

SEQ ID NO: 17810 - DNA, 80 bp, synthetic construct
  source 1..80: mol_type = other DNA
gagaatagtatgcagccaccacacagcctgtacagttcatagaagcataacattttcaagtgggatgagaccttagagac

SEQ ID NO: 17811 - DNA, 80 bp, synthetic construct
  source 1..80: mol_type = other DNA
gttatactaaccaagttgttgaatgctcaatagccacatgtggctggtggctacactattggtattggacagcacagaca

SEQ ID NO: 17812 - DNA, 80 bp, synthetic construct
  source 1..80: mol_type = other DNA
aaatgagaggggctcccaggaacccattaagaagtttacagtgtcttttacctggtagacattcttatgccaaagtttgc

SEQ ID NO: 17813 - DNA, 80 bp, synthetic construct
  source 1..80: mol_type = other DNA
gaacacatgtacagtgtggttgaagtgtaagaacaaggacctgagagaccacaaaactaccttttaagagtagagtcatc

SEQ ID NO: 17814 - DNA, 80 bp, synthetic construct
  source 1..80: mol_type = other DNA
tagttgtttgagttccttatatattttggatattaatcccttaacagatgtatggtttacaaatattttgtcccattctg

SEQ ID NO: 17815 - DNA, 80 bp, synthetic construct
  source 1..80: mol_type = other DNA
tttatctatgtgggttctttgtggttccctacaaacttaaggattgtatttttgatttatgtgaaaaatgacattggaat

SEQ ID NO: 17816 - DNA, 80 bp, synthetic construct
  source 1..80: mol_type = other DNA
tcaaggggaagcggtatactcttggctatagagataatactctttcaggaatacccagcttcagagagcagacattgctc

SEQ ID NO: 17817 - DNA, 80 bp, synthetic construct
  source 1..80: mol_type = other DNA
acgtggtatgggtgaaccgtatgatatgctttgccattgtgaaactttccttaagcctttaatttaagtgctgatgcact

SEQ ID NO: 17818 - DNA, 80 bp, synthetic construct
  source 1..80: mol_type = other DNA
ttacaaaaatcaacctaaaaccctttttctcaaagtatacataaatgtacatccaagatcagtggtgctaccatcattag

SEQ ID NO: 17819 - DNA, 80 bp, synthetic construct
  source 1..80: mol_type = other DNA
tttcactatttgagattaccctgtttccatattcagtgggaatttcccccacaaaagatgccatctatgaagcagaaacc

SEQ ID NO: 17820 - DNA, 80 bp, synthetic construct
  source 1..80: mol_type = other DNA
aattaaggtgcccacctctccactcttgtgctctcaaacagtgcaagcttcatgtattgtattttgtgcactgaacaaca

SEQ ID NO: 17821 - DNA, 80 bp, synthetic construct
  source 1..80: mol_type = other DNA
tattttgttgtagcagcctaatagaactaagatatgcttcctacaggattggtaccaaacaggctttcaaggattcctga

SEQ ID NO: 17822 - DNA, 80 bp, synthetic construct
  source 1..80: mol_type = other DNA
ctatagataaatataaactgcctgcatgatagaggctcagtcaaactcagtcagatttcaaagtaaagatgtcttcctaa

SEQ ID NO: 17823 - DNA, 80 bp, synthetic construct
  source 1..80: mol_type = other DNA
aacgactcactctctttggcacagggatgactcaggacaataaagagaagcccctaatttcggagaaaaataaatatccc

SEQ ID NO: 17824 - DNA, 80 bp, synthetic construct
  source 1..80: mol_type = other DNA
gggtgaccaaaaaaagataccatcacctatggctgtttctgtgagaaaatgtgttaaagttctctcctggctttaaaatt

SEQ ID NO: 17825 - DNA, 80 bp, synthetic construct
  source 1..80: mol_type = other DNA
ggcagtaggatagcttgagacaagcctgggaaacacagctgaagacctcatcatctaaaaaaattaaattaaaatttagc

SEQ ID NO: 17826 - DNA, 80 bp, synthetic construct
  source 1..80: mol_type = other DNA
gagccaccatgcctggccccagtgcttatttttccatggctaataaactaagaatgtttttcagattttgaaatggctga

SEQ ID NO: 17827 - DNA, 80 bp, synthetic construct
  source 1..80: mol_type = other DNA
ttttaatatcaagtgggtattgatgttgtaatataaaaggtataacattatttaaatgcttaataagtaaattctaggcc

SEQ ID NO: 17828 - DNA, 80 bp, synthetic construct
  source 1..80: mol_type = other DNA
tattacaggcatgtgccactacacctggccacaactgtcttatttaaaggaggacaaaggttaggctcaagattatgtgt

SEQ ID NO: 17829 - DNA, 80 bp, synthetic construct
  source 1..80: mol_type = other DNA
taccacagcctcgacctcctgggctccagggatcccctgaactcagcctcctgagtagctgggactacagctgcatgcca

SEQ ID NO: 17830 - DNA, 80 bp, synthetic construct
  source 1..80: mol_type = other DNA
cagttcaaatccacagctagaaataaatatttgccctcaggtcctacagccagaaaatttaccaagcaatcactgtacca

SEQ ID NO: 17831 - DNA, 80 bp, synthetic construct
  source 1..80: mol_type = other DNA
attacatgtatttatactacaactagaccaaaataatggatagaaggaaggattgaagtggggtaggaagagaggggtga

SEQ ID NO: 17832 - DNA, 80 bp, synthetic construct
  source 1..80: mol_type = other DNA
cacctgacctgctccccagctttattgaggatttgtgacattgataactgctttgtcatgatactctatttttttgtttt

SEQ ID NO: 17833 - DNA, 80 bp, synthetic construct
  source 1..80: mol_type = other DNA
ggtggtatttataactctcatgaatccagcagtgcaatatttacattatcactcattgctccatttcctgaaatctttct

SEQ ID NO: 17834 - DNA, 80 bp, synthetic construct
  source 1..80: mol_type = other DNA
atgtttggaagatattaaatgaaatgtctcagtgaatatggacagcaagacttccttacacactggcccctcagtgttta

SEQ ID NO: 17835 - DNA, 80 bp, synthetic construct
  source 1..80: mol_type = other DNA
gtgggggtgaaaatatcccctaaggggaacttagaagccaagtatagaaatccctccccaacttcccagcactctagaag

SEQ ID NO: 17836 - DNA, 80 bp, synthetic construct
  source 1..80: mol_type = other DNA
gacagataatgaaggtgtggactatggaaatagcacaaagaatagaaaagacaacttctggaagagcaccatcctcaaat

SEQ ID NO: 17837 - DNA, 80 bp, synthetic construct
  source 1..80: mol_type = other DNA
ctttagtagagatggggtatctttagtagagacgccacacttattttttgtatactgagtaactttggactgtatcctag

SEQ ID NO: 17838 - DNA, 80 bp, synthetic construct
  source 1..80: mol_type = other DNA
tagtgccattcccttcacctaaagggagaaacccctccagtatgtttcttctttttcttgttctctggtgcctttagaaa

SEQ ID NO: 17839 - DNA, 80 bp, synthetic construct
  source 1..80: mol_type = other DNA
atcttcacaacaaccctgtaaaattagaggtatatcctcatactacagatgagggaactgaggacctagagggaaagctt

SEQ ID NO: 17840 - DNA, 80 bp, synthetic construct
  source 1..80: mol_type = other DNA
atttaaggtgtccccaatacgtctaataaataggcctgcaggtctagagctcaagaaagagctcagaggtagaaatgtat

SEQ ID NO: 17841 - DNA, 80 bp, synthetic construct
  source 1..80: mol_type = other DNA
ttcagtagtacttgcttttcactttcatcatcagaggaacaaaacaatgccctaagccaaatataaggaaaaatggggtg

SEQ ID NO: 17842 - DNA, 80 bp, synthetic construct
  source 1..80: mol_type = other DNA
ctacacacacgagattatacacatcaggcactggaactatctgtaatactggaacctaaataaaacaaagcagccaaaaa

SEQ ID NO: 17843 - DNA, 80 bp, synthetic construct
  source 1..80: mol_type = other DNA
aacccgtctctaggctgggtgtagagctcatgcctgtaaccccagcactttgggaagccgaggcgagtggatcacttgag

SEQ ID NO: 17844 - DNA, 80 bp, synthetic construct
  source 1..80: mol_type = other DNA
attttggtaagctgcccatctacattatcaggcaaatggctgcaaagatctctttcagctcgagattcccacttacctct

SEQ ID NO: 17845 - DNA, 80 bp, synthetic construct
  source 1..80: mol_type = other DNA
ttgaaacaacatacattatactatctactattatgaccatgggagcactatgtatcaaaccacagagcgtggccaaagca

SEQ ID NO: 17846 - DNA, 80 bp, synthetic construct
  source 1..80: mol_type = other DNA
cacgtaatggccaactctcgagtctaatgtagaaaaacaataatttagaaatgggagaatggggaagagaggcttaatta

SEQ ID NO: 17847 - DNA, 80 bp, synthetic construct
  source 1..80: mol_type = other DNA
tcagttacttagcctaagttgttcttgccaataggttggcatagaaactttaagaggagagctcaaaacataaacagagg

SEQ ID NO: 17848 - DNA, 80 bp, synthetic construct
  source 1..80: mol_type = other DNA
ggttttgctgggctgcctgaactgtcgaattgtttagtatcactggcaagacagactgagtctttcaaatgagcaagttg

SEQ ID NO: 17849 - DNA, 80 bp, synthetic construct
  source 1..80: mol_type = other DNA
acaacggtcatgagttagttgattaattagcagctatttttctgcactacccaaaacagtgtattgctagccaggtatgg

SEQ ID NO: 17850 - DNA, 80 bp, synthetic construct
  source 1..80: mol_type = other DNA
tacattctttcctacctctaaaactgtgatttcaacaggctgccagagtatgttctacaaaatgctggctcttctcacta

SEQ ID NO: 17851 - DNA, 80 bp, synthetic construct
  source 1..80: mol_type = other DNA
ttaattttgttacgtgaatgtcaccttgagaaaaaaagtttttaaatgtagctgcagtttactacaattatagcagacta

SEQ ID NO: 17852 - DNA, 80 bp, synthetic construct
  source 1..80: mol_type = other DNA
ccaaaaaagttgcttaggccttttcattacatgatgacttctaaaagagatagtcagtggagtcttagtcttgttttttt

SEQ ID NO: 17853 - DNA, 80 bp, synthetic construct
  source 1..80: mol_type = other DNA
ccctgtcactttttagaaaagaaagaaaaggaagtgccaggcaaatagtaattgttaactttcatcatcatcatcatcat

SEQ ID NO: 17854 - DNA, 80 bp, synthetic construct
  source 1..80: mol_type = other DNA
aagaatgtttttctgcagaaagaggagaggttgcttccaggctaagactcttaggttgacttagaatctcactttcctga

SEQ ID NO: 17855 - DNA, 80 bp, synthetic construct
  source 1..80: mol_type = other DNA
caggtgaaataaacctattttttaggctgtgagtagtaaggtcactgttacctttaggaggaatgtgttcaaggtgttga

SEQ ID NO: 17856 - DNA, 80 bp, synthetic construct
  source 1..80: mol_type = other DNA
actgaaaatagagactatagattttacggcatatgaattttatgttaattagaatatattgcagccgggcacagtggctc

SEQ ID NO: 17857 - DNA, 80 bp, synthetic construct
  source 1..80: mol_type = other DNA
tctggaacatgtccttcctttgccaattcctactgattcctcaaaccttagcttagatttttatttccctgggatagact

SEQ ID NO: 17858 - DNA, 80 bp, synthetic construct
  source 1..80: mol_type = other DNA
attgggctgaatcaaattactgttctctgaaagcctagattccctcgtctctctggcttctttgcttcaaaggattctct

SEQ ID NO: 17859 - DNA, 80 bp, synthetic construct
  source 1..80: mol_type = other DNA
cgtcaccacacccggctaatttttgtatttttagtagagacggggtttcactacgttgcctaggctggtctcaaactctg

SEQ ID NO: 17860 - DNA, 80 bp, synthetic construct
  source 1..80: mol_type = other DNA
aggagcaagggtgtcgatacagctttatctacaaactgttacacattgtattaatgcgctgctactgtaatgaaatttgt

SEQ ID NO: 17861 - DNA, 80 bp, synthetic construct
  source 1..80: mol_type = other DNA
gttccgttaatgtttaatcagataggatcgtccgatggggctctggtggcgtgatctgcgcgccccaggcgtcaagcacc

SEQ ID NO: 17862 - DNA, 80 bp, synthetic construct
  source 1..80: mol_type = other DNA
ggtgaaggagtgaatgcctggaacgtactgggaactgcaccaggcacagagaaagcgggcttgccattatagtgggttcc

SEQ ID NO: 17863 - DNA, 80 bp, synthetic construct
  source 1..80: mol_type = other DNA
tgttgaccatgagtgaacttacaatgcaagccccggggggatcacttgcagttttgtccctgtctgcagtgtgacctgtt

SEQ ID NO: 17864 - DNA, 80 bp, synthetic construct
  source 1..80: mol_type = other DNA
cccaattcattcaatttttatttagcggaaggcattttcagatgggtctttgaagcattagtaggagttcagcgatgatg

SEQ ID NO: 17865 - DNA, 80 bp, synthetic construct
  source 1..80: mol_type = other DNA
caagcagactctgattgcccattactgcctttctaaaatccaaacaagttctgaggttcaaaaccgttttggccctaagg

SEQ ID NO: 17866 - DNA, 80 bp, synthetic construct
  source 1..80: mol_type = other DNA
cacaaccagtaaatattggagctggaattcaggtccacggtttcctggctccaaagcccatgattttttccctcaattta

SEQ ID NO: 17867 - DNA, 80 bp, synthetic construct
  source 1..80: mol_type = other DNA
tcaccctggccctagtgcttcaaatcttaaaaaaacgtttttatttgtgcttctgcaccaccttctagcccacctcgttt

SEQ ID NO: 17868 - DNA, 80 bp, synthetic construct
  source 1..80: mol_type = other DNA
tttaaggactaaatgaggtcgtgaagcattcagcagatgctaggtacggaaactcgctgaagtgggggcaggttaagaag

SEQ ID NO: 17869 - DNA, 80 bp, synthetic construct
  source 1..80: mol_type = other DNA
agaatagactaggggacaaaccgaattgccagtgctgttatgtcatgatttaggcatggagtccagggcctgagcttcac

SEQ ID NO: 17870 - DNA, 80 bp, synthetic construct
  source 1..80: mol_type = other DNA
gtgttaagtttgaggtgcccatggtgtgaggtctggagctcagcgcagagatgatgcaatgtggtgggtccatgcaacat

SEQ ID NO: 17871 - DNA, 80 bp, synthetic construct
  source 1..80: mol_type = other DNA
aagatcttgccccctaagttagtttcctagcactgctgtgacaaattaccaccccctcggttggaacaagttgattctct

SEQ ID NO: 17872 - DNA, 80 bp, synthetic construct
  source 1..80: mol_type = other DNA
ccaacagtgtatccagaagattaatccattccttaaacaaatgctacttgacacagattagttctggataggctgagagc

SEQ ID NO: 17873 - DNA, 80 bp, synthetic construct
  source 1..80: mol_type = other DNA
cagctgcagcctcagttccctcctcacacacgacgaggaacatggactggaagcctgcccagcaggccttctgctcgatg

SEQ ID NO: 17874 - DNA, 80 bp, synthetic construct
  source 1..80: mol_type = other DNA
tgagatgagaatctctactctgcagcatatttggaggatcactgcgggggccacagaggtgctgttcagatggcacttca

SEQ ID NO: 17875 - DNA, 80 bp, synthetic construct
  source 1..80: mol_type = other DNA
ggccagacatcactgttattctcctttgagtctttaaatcttgttgtctttcttgcagactcggtgagctgtgaaaggct

SEQ ID NO: 17876 - DNA, 80 bp, synthetic construct
  source 1..80: mol_type = other DNA
ccacagttccacactgctccccttttaaaatccggtgatgtctttatgtcttttgttatgttatcttcaatgtggaggga

SEQ ID NO: 17877 - DNA, 80 bp, synthetic construct
  source 1..80: mol_type = other DNA
agactttcctacagagtacaggttttgatgttcagttttaaaggcaagaatcaataaccttctgccccatcaggtgaccc

SEQ ID NO: 17878 - DNA, 80 bp, synthetic construct
  source 1..80: mol_type = other DNA
agctgcgttaggcctccagtctccaggccactgggccagagctcacaggctggcagagggttagaactgttactggtggc

SEQ ID NO: 17879 - DNA, 80 bp, synthetic construct
  source 1..80: mol_type = other DNA
gcagcagcatttccactggcttttgaccaaacatcaggccacaaagttgatccccaaaattaaccatcactctgtgcctg

SEQ ID NO: 17880 - DNA, 80 bp, synthetic construct
  source 1..80: mol_type = other DNA
tatctaggggaaggaatcttgttccacttcaagtctggaacttcaagtctgtgtgtgtgcgtgcgcgcgcgcgcgttggg

SEQ ID NO: 17881 - DNA, 80 bp, synthetic construct
  source 1..80: mol_type = other DNA
aggagggacatttgatcgggagcttgatggatgaataggagttcacctggccgataagacagcaactaccaaggcttaga

SEQ ID NO: 17882 - DNA, 80 bp, synthetic construct
  source 1..80: mol_type = other DNA
gtcagcacactcggggcctacacggatggccacagccgtcgcccgctgcgccccagatgaggagctgctgagctgctcca

SEQ ID NO: 17883 - DNA, 80 bp, synthetic construct
  source 1..80: mol_type = other DNA
agttgatcctgtctagtccctttctgtgttttcaaagcccattctaaagcagattcccatttccgtctttgactctaagg

SEQ ID NO: 17884 - DNA, 80 bp, synthetic construct
  source 1..80: mol_type = other DNA
ccctttggaagtgctcagccgatgagctcacaggcacatgtcagtttgaagtcatggaatctgactccatgaagcgcacc

SEQ ID NO: 17885 - DNA, 80 bp, synthetic construct
  source 1..80: mol_type = other DNA
ccttaaagagagagggtctgatggggatgggcactggagacggagcatcccagcatttcacatctgagctggctttcctc

SEQ ID NO: 17886 - DNA, 80 bp, synthetic construct
  source 1..80: mol_type = other DNA
aaaggcagccctaaggagtccactcttaaatgaactcagagtcagttttaaaatgcaagtctgtgttgattctggtctgg

SEQ ID NO: 17887 - DNA, 80 bp, synthetic construct
  source 1..80: mol_type = other DNA
tgcggggtgggagatacacggttgtgtcccaaatgggctctgagccagcgagggccgtctgcactttggcctcacagaag

SEQ ID NO: 17888 - DNA, 80 bp, synthetic construct
  source 1..80: mol_type = other DNA
tcacaggctgtgccttggtttcctgagccacctttactctgctctatgccaggctgtgctagcaacacccaaaggtggcc

SEQ ID NO: 17889 - DNA, 80 bp, synthetic construct
  source 1..80: mol_type = other DNA
taatgccttaaaaaacacaaaaagttctgaacacacatttattatctggaggaataaatgcactccaaatgcttatcatc

SEQ ID NO: 17890 - DNA, 80 bp, synthetic construct
  source 1..80: mol_type = other DNA
ataaagatagagtccattctttcactagtccagggcagtggccaaaaaagtccaggaaaggcattacatagaatgccatc

SEQ ID NO: 17891 - DNA, 80 bp, synthetic construct
  source 1..80: mol_type = other DNA
atctactggtggcaaacttgcaaaggtcttctggaagactcataaaattatgttctatttgttttctggattcaggggac

SEQ ID NO: 17892 - DNA, 80 bp, synthetic construct
  source 1..80: mol_type = other DNA
accatatctgtttttgttttctttttaaaccactagcacagtgctaataaataaatagtttataggccaggtggggtggc

SEQ ID NO: 17893 - DNA, 80 bp, synthetic construct
  source 1..80: mol_type = other DNA
ttttaactttatcctaaatgtcccacctctggcttagatcagtgccgccttagatctctttctcttctatcacctgatta

SEQ ID NO: 17894 - DNA, 80 bp, synthetic construct
  source 1..80: mol_type = other DNA
tttgcaacagtaattcactctttccacaaagactgagcaactctaatactatctgccagcctctggggatgggtgaatat

SEQ ID NO: 17895 - DNA, 80 bp, synthetic construct
  source 1..80: mol_type = other DNA
gcacttgcctattcagaggactcctgctttgcctacattctgctgttattaaatcacagctgtggctttgggaaactaat

SEQ ID NO: 17896 - DNA, 80 bp, synthetic construct
  source 1..80: mol_type = other DNA
tttcttaaaaagaaacacagctggttaacaacacatggaaagatgtaatttccctaataacaaatttttaaaaatatttg

SEQ ID NO: 17897 - DNA, 80 bp, synthetic construct
  source 1..80: mol_type = other DNA
aacagagagagaccctgtctcaaaaaaaaaaaaaaaaagaatacatactattaccaaaaaacccacgtaagaaacctgag

SEQ ID NO: 17898 - DNA, 80 bp, synthetic construct
  source 1..80: mol_type = other DNA
tttgacaaagcaaacaaaaacattaagtggggaaaggccaccctattcaacatattcaacaaatgatgctgggataattg

SEQ ID NO: 17899 - DNA, 80 bp, synthetic construct
  source 1..80: mol_type = other DNA
atggaatactactcagccattaaaaagaaagacataatggcctttgcggcaaattggatggaattagagaccactattct

SEQ ID NO: 17900 - DNA, 80 bp, synthetic construct
  source 1..80: mol_type = other DNA
atctaaagccagagtgctgtagtttcagtcctggttctgctactttacagctctatggcctgagcaagctacttaatgtc

SEQ ID NO: 17901 - DNA, 80 bp, synthetic construct
  source 1..80: mol_type = other DNA
cattttaataattctgagagtgcctatggcgaggtctctttcagattcactgagaatgttccaggcttatctctacttag

SEQ ID NO: 17902 - DNA, 80 bp, synthetic construct
  source 1..80: mol_type = other DNA
cagtgcatctttgtgaacgggaggtgatacagacaacatttcattgcattgtatcttcagcatgtacatattacacatag

SEQ ID NO: 17903 - DNA, 80 bp, synthetic construct
  source 1..80: mol_type = other DNA
aatcaaggttatactaacatcattaagttagttgggtagtatttaatctttttctatctcctttagctatttgtgtaata

SEQ ID NO: 17904 - DNA, 80 bp, synthetic construct
  source 1..80: mol_type = other DNA
taactgtccactgtattttttgttttcaggtgagaagaaacatgaaaagcaattgagggaccaggaactgggtcctttag

SEQ ID NO: 17905 - DNA, 80 bp, synthetic construct
  source 1..80: mol_type = other DNA
agaaagcaccacactgttctccacaatggttgaactaatttgcactcccaccaatggtggaaaagcattcttttttctct

SEQ ID NO: 17906 - DNA, 80 bp, synthetic construct
  source 1..80: mol_type = other DNA
tttccaattctgtgaagaatgtcaatggtagtctaacggggatagcattgaatctataaattactttgggcagtagttta

SEQ ID NO: 17907 - DNA, 80 bp, synthetic construct
  source 1..80: mol_type = other DNA
ttgccttggggtttgtttggtctggttttctagttcttttagttgtgatgttaggttgataccttgagatctttctagct

SEQ ID NO: 17908 - DNA, 80 bp, synthetic construct
  source 1..80: mol_type = other DNA
ttgatccagagctgagttaactcttcttgttgaattgaaccctttaccattatataatgcccttctttgtctttttttga

SEQ ID NO: 17909 - DNA, 80 bp, synthetic construct
  source 1..80: mol_type = other DNA
ctggctgcccttaacacttattctttcattttgacctggaatctgataagtatgtgtcttggataatcttctcatggagt

SEQ ID NO: 17910 - DNA, 80 bp, synthetic construct
  source 1..80: mol_type = other DNA
actccatcccagggtgggtactgacctgctgctggcccaaatgctcgtttcagaggtttctggagacccttattgaaagg

SEQ ID NO: 17911 - DNA, 80 bp, synthetic construct
  source 1..80: mol_type = other DNA
ctcaacaatagctcttattttagcagtctctctttgattttataaatagacatgagttgttctgttatgaatgcctgctg

SEQ ID NO: 17912 - DNA, 80 bp, synthetic construct
  source 1..80: mol_type = other DNA
taaacattttttaaatgagaatttcagctgggagatgagcagaacagttgtcatgtaataacaaaatctttgcagtcatc

SEQ ID NO: 17913 - DNA, 80 bp, synthetic construct
  source 1..80: mol_type = other DNA
ctgagtaaactgtgtattgtgtgcctgcgttttgactgtgactcgtcacataaggtcaagtataacattttcaacgcatg

SEQ ID NO: 17914 - DNA, 80 bp, synthetic construct
  source 1..80: mol_type = other DNA
tgacttccaggagcttactagagaaataaaaaattgtagcctgcagttttcaaaaccaattcatcacaagattgaaggtt

SEQ ID NO: 17915 - DNA, 80 bp, synthetic construct
  source 1..80: mol_type = other DNA
aattaaaatttgtctttcattaatttgcagaacattctgttagactatttgctctcctctgagaagaatccttcccctgt

SEQ ID NO: 17916 - DNA, 80 bp, synthetic construct
  source 1..80: mol_type = other DNA
taaatttcttatttagactatggtgcatgaaccatcacattaaatattatctttccaggctgggcactatggctcaagcc

SEQ ID NO: 17917 - DNA, 80 bp, synthetic construct
  source 1..80: mol_type = other DNA
atttgtaagaacaatcattgaaaacatgtgactctagatgaggtctgattccttaaatgctgtttgctcagcttggggac

SEQ ID NO: 17918 - DNA, 80 bp, synthetic construct
  source 1..80: mol_type = other DNA
ctgccttccacagtggctgaactaatttatattcccaccaatagtatgtaagtgttcccttctctccaaagcctcaccag

SEQ ID NO: 17919 - DNA, 80 bp, synthetic construct
  source 1..80: mol_type = other DNA
tttactttaaggctagtcctttttgtgtccattttaatgaagtctttccctgtttcaggtcatgaagatattcttccatg

SEQ ID NO: 17920 - DNA, 80 bp, synthetic construct
  source 1..80: mol_type = other DNA
attccatccttttgctactagagtgaccattataactgaactaataaagcttaaactaacatacttttactaactagaaa

SEQ ID NO: 17921 - DNA, 80 bp, synthetic construct
  source 1..80: mol_type = other DNA
atttctgtttttcatcccagtaagactattacccaacacagggatttgtcttatttactgctgtgtaacctacaccataa

SEQ ID NO: 17922 - DNA, 80 bp, synthetic construct
  source 1..80: mol_type = other DNA
tttattttgtagttgaatttctgggacacaaaagcacagatggcctttccaactccatactgcagtagacatctgctgtt

SEQ ID NO: 17923 - DNA, 80 bp, synthetic construct
  source 1..80: mol_type = other DNA
tgtctacaatatcattattttaaaaagtaggaaatcaggcccaatactcactggtccacttccggccgtgaggttctgca

SEQ ID NO: 17924 - DNA, 80 bp, synthetic construct
  source 1..80: mol_type = other DNA
tgggtagcaatgaaaatctggagccagactgcctggcattgtattcaatctcttccacttatttgctgaattattccagg

SEQ ID NO: 17925 - DNA, 80 bp, synthetic construct
  source 1..80: mol_type = other DNA
acagcacacaattactcagatttccatcttcttttggtggatggtgatgattattaagaaggattatagtccaggtgctg

SEQ ID NO: 17926 - DNA, 80 bp, synthetic construct
  source 1..80: mol_type = other DNA
cttaagaatattctgaagcatcttagtaagacaaaacaggatatttatctcttgaattaccttgtcatctggctggtaat

SEQ ID NO: 17927 - DNA, 80 bp, synthetic construct
  source 1..80: mol_type = other DNA
aaatggcagagagatgttacagaaaacatgagagtttgcagtgtgtaaggcttcagtcaaaagtatgacctataaatatc

SEQ ID NO: 17928 - DNA, 80 bp, synthetic construct
  source 1..80: mol_type = other DNA
aaaaatagggccttcaggttttaagaacttgagaatcacctctattcccaactttaattgctaagaactgtccctataaa

SEQ ID NO: 17929 - DNA, 80 bp, synthetic construct
  source 1..80: mol_type = other DNA
ctgcctcaaaatactgctttcagtgcatatttgtcaaagaaacaaaggtgcctaagcattacatcaagaactaaaggtgg

SEQ ID NO: 17930 - DNA, 80 bp, synthetic construct
  source 1..80: mol_type = other DNA
actagaagccaaaagtttccgttacttttcctggtgacagcaaattagtggtaaagtcaggaaaagagggctgttcttta

SEQ ID NO: 17931 - DNA, 80 bp, synthetic construct
  source 1..80: mol_type = other DNA
cttgtgggaatcagaaaattaacatggctacctttaggcagaattgatcttttttacaacgtatctcttgaatcataaga

SEQ ID NO: 17932 - DNA, 80 bp, synthetic construct
  source 1..80: mol_type = other DNA
tacaggctcttccacataaggtaggatataaagtagtttgtctgtggctatgtgcaggggtgctgtcaaatatgcttaat

SEQ ID NO: 17933 - DNA, 80 bp, synthetic construct
  source 1..80: mol_type = other DNA
atggttttttaactaacacacagtttatgtgcatgtattgtatacaaggcctggtggctgtgggaccagtcttttatttt

SEQ ID NO: 17934 - DNA, 80 bp, synthetic construct
  source 1..80: mol_type = other DNA
gctatgttgtcatctgttccacaccaagaaactagaaggtggtagaggagaaaatctatccttaaaaatcctttagctct

SEQ ID NO: 17935 - DNA, 80 bp, synthetic construct
  source 1..80: mol_type = other DNA
tcaatccatacctccaagataggcacagattttaaccacacaatagtgacaaaatcatcagttgctttatcctgatgtat

SEQ ID NO: 17936 - DNA, 80 bp, synthetic construct
  source 1..80: mol_type = other DNA
atgtacttgtttgtatatctaaagtaaccaacagaaaatatggttatgactggttatgatagtataacattagaaatatt

SEQ ID NO: 17937 - DNA, 80 bp, synthetic construct
  source 1..80: mol_type = other DNA
ttaaaaattatatttggtatgtggtttttttggtgtgtatgtgctggagaagacagttgtaactgaatgcattaaaaatg

SEQ ID NO: 17938 - DNA, 80 bp, synthetic construct
  source 1..80: mol_type = other DNA
ggcaaaaataggtcccattcccttttgaaatctcagaaatttaaatagtggtttggatagagcaggccttcaacaagtac

SEQ ID NO: 17939 - DNA, 80 bp, synthetic construct
  source 1..80: mol_type = other DNA
tgtagaaaacagagttaatagtcaggtcacaccaatgccctaggaactgatactatgagccacagtataaattcacacta

SEQ ID NO: 17940 - DNA, 80 bp, synthetic construct
  source 1..80: mol_type = other DNA
agggggagatgtctgacttacagagtttaccaatttctttctttctttgtttttagagatgggtccatgtagcccaggct

SEQ ID NO: 17941 - DNA, 80 bp, synthetic construct
  source 1..80: mol_type = other DNA
cattctgactcatatcctgagtattctcctagtggcctttctattcattgtgacaacatttaccctgaagttgtctacaa

SEQ ID NO: 17942 - DNA, 80 bp, synthetic construct
  source 1..80: mol_type = other DNA
gcttttggaaggtgaaattcaaatgagtggtctggactgttttgcaaacactgtttaaaacagtgctattctgactggag

SEQ ID NO: 17943 - DNA, 80 bp, synthetic construct
  source 1..80: mol_type = other DNA
tgtaaacaactatcatataacagcaatgtgacaaaatcagtaacagtggtgacttggctatgaactcccgtttgaaccct

SEQ ID NO: 17944 - DNA, 80 bp, synthetic construct
  source 1..80: mol_type = other DNA
tacaaacagaaaaagagtgagtcctaggaatgctgaattctgtcccaaaaagggaatacggtcatggttcctggtatact

SEQ ID NO: 17945 - DNA, 80 bp, synthetic construct
  source 1..80: mol_type = other DNA
ataaacatcttatcataataaattctttcagttaccatccaaataaagtctctcaaaaaataaactgtgtaggccgggca

SEQ ID NO: 17946 - DNA, 80 bp, synthetic construct
  source 1..80: mol_type = other DNA
tcaactagaagaacccaattagaactcattagatggtgatggaggctgacccacatgagcaataaatacatggcttaggc

SEQ ID NO: 17947 - DNA, 80 bp, synthetic construct
  source 1..80: mol_type = other DNA
attatctttcataccgtaatgggttacactaactcactaatgcccaggaaaaggagaagaggggcagaaagagaagggat

SEQ ID NO: 17948 - DNA, 80 bp, synthetic construct
  source 1..80: mol_type = other DNA
gcagtcttttgggcttaaacagtttgcttctgctgtgcacaggtagctactttttgaaactgtaaccagatttccactgg

SEQ ID NO: 17949 - DNA, 80 bp, synthetic construct
  source 1..80: mol_type = other DNA
ttgcatagaaatgtcatgcctgtcaaatttctgggtggcatgaaagctgtgaaagaactaagatgttcaatagagattca

SEQ ID NO: 17950 - DNA, 80 bp, synthetic construct
  source 1..80: mol_type = other DNA
accaattataagagacaataactccattagccagaaatttactgccaaccgtgatgtttgtaaaaaatagctaaccagta

SEQ ID NO: 17951 - DNA, 80 bp, synthetic construct
  source 1..80: mol_type = other DNA
tgggggtgtctttgatcctgaagttctttcattagaagagaagatcctaggctactactgcagaagtagagcgagagatg

SEQ ID NO: 17952 - DNA, 80 bp, synthetic construct
  source 1..80: mol_type = other DNA
tggttcaattagcatgtaatgaacaccctccagtagggatgtttggcttatactagaaatcctgggtgctgcacaatcaa

SEQ ID NO: 17953 - DNA, 80 bp, synthetic construct
  source 1..80: mol_type = other DNA
tctcagtacctgacccctgaaagctgctctgtaaatgttggttaaatgaatggaatcacttttaatttctacaggcattt

SEQ ID NO: 17954 - DNA, 80 bp, synthetic construct
  source 1..80: mol_type = other DNA
atatcgctgagacattgaagatatttaacaaaaatttactgatgattgcactcagttatgcctcctgcaatctttgttaa

SEQ ID NO: 17955 - DNA, 80 bp, synthetic construct
  source 1..80: mol_type = other DNA
gggacacctaggataacagtgaaatcctacacgttcttaaactacaaagtgggctgttagtgaatttaagcagaattttc

SEQ ID NO: 17956 - DNA, 80 bp, synthetic construct
  source 1..80: mol_type = other DNA
agcttgaggatgccacgaagctggttaacctggggaagaagcagatgcatatttctaatattaattttgatgtggcatca

SEQ ID NO: 17957 - DNA, 80 bp, synthetic construct
  source 1..80: mol_type = other DNA
ttaaatgtgttatttaaaaaatattccttctatccaaatacgtaagaaagcgcatgctattagagaaagggcacaaccag

SEQ ID NO: 17958 - DNA, 80 bp, synthetic construct
  source 1..80: mol_type = other DNA
acatttgcagaacaagagacagatgggagagtggccacagcaattttgttggactgtgtctaaagccatttaaatgcatg

SEQ ID NO: 17959 - DNA, 80 bp, synthetic construct
  source 1..80: mol_type = other DNA
atttatgttaaaacaacctgtaattcacgtttccctaattccctaatttttatttcatggtaaggttttaaggtaaattc

SEQ ID NO: 17960 - DNA, 80 bp, synthetic construct
  source 1..80: mol_type = other DNA
aaccagggaggtttgatgagtttcccaattatactgaatcctcggggtatttttccctcctttgggaaaaggaaaaaaga

SEQ ID NO: 17961 - DNA, 80 bp, synthetic construct
  source 1..80: mol_type = other DNA
tactgtgtaagatgagcagttacatgtcaggcacacagtagttactcaacacaaggtagcaactaccatcacctttaaca

SEQ ID NO: 17962 - DNA, 80 bp, synthetic construct
  source 1..80: mol_type = other DNA
ctgtgaagcatgagactattaggaatggataagaatggagacagggatgttaatctggagacagctggattaacagaaga

SEQ ID NO: 17963 - DNA, 80 bp, synthetic construct
  source 1..80: mol_type = other DNA
accagcctgggcaatgcagggagatcccatctgcacaaaaaatgtttaaaaattagctgggcatagtggcatgcacctgt

SEQ ID NO: 17964 - DNA, 80 bp, synthetic construct
  source 1..80: mol_type = other DNA
tgttcatcactagctaaatgtcttctaaaatccttattcattcttcctacggaacaaataggcaaagggtcagtgagaaa

SEQ ID NO: 17965 - DNA, 80 bp, synthetic construct
  source 1..80: mol_type = other DNA
agcctttgcacttctatttctaccagttgagttacatgtttaccaacagtaatttaggtttgcttcccagggtatttatg

SEQ ID NO: 17966 - DNA, 80 bp, synthetic construct
  source 1..80: mol_type = other DNA
ctcagagtttgagaagaccaaaggagctaatttttgcagaaaagagtaccacagagaaaagagctgaacagaaacagaac

SEQ ID NO: 17967 - DNA, 80 bp, synthetic construct
  source 1..80: mol_type = other DNA
gaaaggatcaaactgtttccaagcaccttaactgcacccagaacaaagctcaagaatatttacaaaaatatccagcatcc

SEQ ID NO: 17968 - DNA, 80 bp, synthetic construct
  source 1..80: mol_type = other DNA
ccagaggtgggaagaaaagactcatgtatggaggaagaaagataaggatgacaggagatttcttatctaaaacaatgcaa

SEQ ID NO: 17969 - DNA, 80 bp, synthetic construct
  source 1..80: mol_type = other DNA
agaaaattcttcagatcatctgggcacggtggctcacacctctaatccctgcactttgggaggtagatcacttcaggagg

SEQ ID NO: 17970 - DNA, 80 bp, synthetic construct
  source 1..80: mol_type = other DNA
agccactgatagtctaaacagccccacagcagttcaagaaactgaatttgcagctaagaaccttctcacacataaaaatc

SEQ ID NO: 17971 - DNA, 80 bp, synthetic construct
  source 1..80: mol_type = other DNA
ataaaactctgctgagaaaaactgaagacctaaatagatgttaacatgtaccatggtcatgggtcacaagactcaatatt

SEQ ID NO: 17972 - DNA, 80 bp, synthetic construct
  source 1..80: mol_type = other DNA
cagagtgactccgtctcaaaaaaaaaaagacaaatagatcaatagaacagaatacacagtccagaaatagactcacatat

SEQ ID NO: 17973 - DNA, 80 bp, synthetic construct
  source 1..80: mol_type = other DNA
taaaacacctgtacaaacttacaggctaacattaaggctcactatatcaaatgttaagatgaggaggaactggaactctc

SEQ ID NO: 17974 - DNA, 80 bp, synthetic construct
  source 1..80: mol_type = other DNA
ggctggagggattatatggattacacaggggcacaagaaaacgctggaggtaatggatatatttgttatcttgattgtga

SEQ ID NO: 17975 - DNA, 80 bp, synthetic construct
  source 1..80: mol_type = other DNA
ctggggttacaggcatgtgccaccacacatggctaatttttgtatttttttttagtagagttggggtttcatcatttggc

SEQ ID NO: 17976 - DNA, 80 bp, synthetic construct
  source 1..80: mol_type = other DNA
cgaatactgggaagcactagaacatctgaaccttggcttttcttcagccaaaagaaaaatcagcacccaagatcacaagg

SEQ ID NO: 17977 - DNA, 80 bp, synthetic construct
  source 1..80: mol_type = other DNA
catgaccaaaaactaataccccctgcttctgaaacacgtgttcaaacacagaagggttacctcataagtataaagggtat

SEQ ID NO: 17978 - DNA, 80 bp, synthetic construct
  source 1..80: mol_type = other DNA
aacactgccaccttcttcacaagccaccttctttgacttttccaggaagcttatcatactacctaattctcacccattct

SEQ ID NO: 17979 - DNA, 80 bp, synthetic construct
  source 1..80: mol_type = other DNA
gaggatcaggaagagaagttgttccctagccccactgacccctgaacatattctccagaagtaagtcatttcaacaattt

SEQ ID NO: 17980 - DNA, 80 bp, synthetic construct
  source 1..80: mol_type = other DNA
aggtagtaattaagaggacgtggagggaagtcaatatgatctgttttctgctctgcagtgctcttggtcacaaatttgac

SEQ ID NO: 17981 - DNA, 80 bp, synthetic construct
  source 1..80: mol_type = other DNA
ctatgaagatcctactactcatttgcagaaccatcagcctccaactggtcataaatcatggttttagaaaaattcatcta

SEQ ID NO: 17982 - DNA, 80 bp, synthetic construct
  source 1..80: mol_type = other DNA
taagttgtttatctttaatagaagtggggtctcggggtctccctattttgcccaagctggtctcaaactcctgggctcaa

SEQ ID NO: 17983 - DNA, 80 bp, synthetic construct
  source 1..80: mol_type = other DNA
ttctgactgagcaagaccagaggcagagagccctgtgtaatggaaatggaaagaagggtaaaaattcaagacccatcata

SEQ ID NO: 17984 - DNA, 80 bp, synthetic construct
  source 1..80: mol_type = other DNA
cggcttatttttcctctttgtaagtatgctcatattgcctaaggtctgcttactataagaaatgttagaaatctcatggt

SEQ ID NO: 17985 - DNA, 80 bp, synthetic construct
  source 1..80: mol_type = other DNA
ctgcctgaaaagtcattattttaatcacttatctctggaagcccttctctcaagccccagaagtgccagctcatgctgtc

SEQ ID NO: 17986 - DNA, 80 bp, synthetic construct
  source 1..80: mol_type = other DNA
ggagaaatctccagtctcctcagaggatgcctcaaggacctttcttccacggacttctgggagctgtactgtgctgttcc

SEQ ID NO: 17987 - DNA, 80 bp, synthetic construct
  source 1..80: mol_type = other DNA
ttggctgggcacggtggcttacacctgtaatcccagaactttgagaggcagaggtgggtggatcacccgaggtcaggcat

SEQ ID NO: 17988 - DNA, 80 bp, synthetic construct
  source 1..80: mol_type = other DNA
caggagagttaggcaggaaaggaaatcaacctctatgctccatccaaatggctgcttttgtggaatcacctggcccctct

SEQ ID NO: 17989 - DNA, 80 bp, synthetic construct
  source 1..80: mol_type = other DNA
atccatcctaaattatgtttgtacacgtgtccttatttcctatagccaaacaatctgcctgataaacaattttcaggcct

SEQ ID NO: 17990 - DNA, 80 bp, synthetic construct
  source 1..80: mol_type = other DNA
gggctatccatgttcaaacctttagaccacatgaaaactgaattaggaaagtcagggacaatctagaatggcaaagtact

SEQ ID NO: 17991 - DNA, 80 bp, synthetic construct
  source 1..80: mol_type = other DNA
ccctggtctctgctgtctgactgcaaggtggctactatgacattgtcatttatcaaggccttagagggattattattata

SEQ ID NO: 17992 - DNA, 80 bp, synthetic construct
  source 1..80: mol_type = other DNA
ccttctcccttgaagcagaccatataaaatcaagctgaccttcctttgaattaggtcaaagactcattccagaaggatcc

SEQ ID NO: 17993 - DNA, 80 bp, synthetic construct
  source 1..80: mol_type = other DNA
ggactttttctggtgacttctgattgacccgtcactgaggagcacgatgatattactgtgttttccagccattcatttca

SEQ ID NO: 17994 - DNA, 80 bp, synthetic construct
  source 1..80: mol_type = other DNA
attacctgtttctgggcatatttataaaaaaccaactacagtttcttttatagtaagcaaatgacagagaactgctaaac

SEQ ID NO: 17995 - DNA, 80 bp, synthetic construct
  source 1..80: mol_type = other DNA
agcttaaaagaaagcagaaaatatactgagactcatcaaagaccatacgtatgtccgcactcctgagttggtgaaggaat

SEQ ID NO: 17996 - DNA, 80 bp, synthetic construct
  source 1..80: mol_type = other DNA
cacgatataccagccactagagtccttatttttcaggagccccctaagcaattcaagagctatcttctgatataccaatt

SEQ ID NO: 17997 - DNA, 80 bp, synthetic construct
  source 1..80: mol_type = other DNA
aggttttctttgtaatgactttcaagtcattatatttcccctgcctctcacgtgccagggttaacccctcccaactgatt

SEQ ID NO: 17998 - DNA, 80 bp, synthetic construct
  source 1..80: mol_type = other DNA
agggtagtggccccagggatgaagtttgagaagttgcaggcattagatcacgaagaacttggaatgctgtgttcaataat

SEQ ID NO: 17999 - DNA, 80 bp, synthetic construct
  source 1..80: mol_type = other DNA
atgaaaaagagtaatcaagatccaataagcttgatgctcacccacacccaccccataaatagcttactgagagattcaga

SEQ ID NO: 18000 - DNA, 80 bp, synthetic construct
  source 1..80: mol_type = other DNA
caacaggtttttaatgtttttattatgagagcacttgatagtttgtttagtagtcttactctactagtcaggggagccag

SEQ ID NO: 18001 - DNA, 80 bp, synthetic construct
  source 1..80: mol_type = other DNA
ttaattatttttggacttaccgaactcaatctgcttggccctggacaaaaagtggctcacaggccatattacacagacac

SEQ ID NO: 18002 - DNA, 80 bp, synthetic construct
  source 1..80: mol_type = other DNA
ccaaaagtcactgagtgatttacaatgaaaaccacccagctatactaaggcattggaaagaagacaaagggttaaagact

SEQ ID NO: 18003 - DNA, 80 bp, synthetic construct
  source 1..80: mol_type = other DNA
aatattcattctgttccctcctagaatgatctttctccagtcacctccctatgtccagtcctactgaatttttgagatct

SEQ ID NO: 18004 - DNA, 80 bp, synthetic construct
  source 1..80: mol_type = other DNA
agaaagaatatctaatatgcctcctgtgtctcctacgcaggggaagctgatttggtttcagtttagcactggacctatgg

SEQ ID NO: 18005 - DNA, 80 bp, synthetic construct
  source 1..80: mol_type = other DNA
tcatgatctctaattttcacaagtggcttgccatcttctttcccttccacctcccccgtctatcaatcatgaacatagtg

SEQ ID NO: 18006 - DNA, 80 bp, synthetic construct
  source 1..80: mol_type = other DNA
tctgctgcacctgctcctggatccgcaggctcttgactgtctggccgccgcggccgctgctccccgccagcttcagcttg

SEQ ID NO: 18007 - DNA, 80 bp, synthetic construct
  source 1..80: mol_type = other DNA
acacagctgtcttgggggctgttatcctgccacagctcccaatctggagagttcataagtgggatcctgcagaccacgcc

SEQ ID NO: 18008 - DNA, 80 bp, synthetic construct
  source 1..80: mol_type = other DNA
atgtgttcttgcctggacacacacacacgagcgcatgcaaacatagagaaaaaaaatttgcaagcaatgctccatctggt

SEQ ID NO: 18009 - DNA, 80 bp, synthetic construct
  source 1..80: mol_type = other DNA
tcagcagccagtgattacttttaaagggctgtcaggttattcattccacttcacagctctccccctcacctgaataaaag

SEQ ID NO: 18010 - DNA, 80 bp, synthetic construct
  source 1..80: mol_type = other DNA
ctattaggtctttatccaagaaacactgtggctagaagtcagactctgggccctcttctaattaaactctgcccttgagt

SEQ ID NO: 18011 - DNA, 80 bp, synthetic construct
  source 1..80: mol_type = other DNA
tggcctcaagcaatcctcctgccttggcctcccaaaatgctgggattacacgtgtgagccaccatgcctggcttccatcc

SEQ ID NO: 18012 - DNA, 80 bp, synthetic construct
  source 1..80: mol_type = other DNA
ctcccaatgttgttatgacccataaggtccatagacgaacaaggtacctcaaacgctaactgcgttggagtcaaccaaag

SEQ ID NO: 18013 - DNA, 80 bp, synthetic construct
  source 1..80: mol_type = other DNA
aatacaattttgagaaaaatccatgacttgacaaacacgtttcacttgaaagctacttaggatgaacatctgaggccggg

SEQ ID NO: 18014 - DNA, 80 bp, synthetic construct
  source 1..80: mol_type = other DNA
agagtctgaggtctgaaaaacacaaaaatgattcaaaccatatcctgaagtcaaacatttagctttacagcagaaatgaa

SEQ ID NO: 18015 - DNA, 80 bp, synthetic construct
  source 1..80: mol_type = other DNA
atcctgttccttcctctgcctgtattatatctccatccctctctcctcctggatttactgtttgtttttttttaaccttt

SEQ ID NO: 18016 - DNA, 80 bp, synthetic construct
  source 1..80: mol_type = other DNA
attacctgggccaacttgaaatgtcacagatgagaggttatctttgccgaatggctaaaaaatacaagacctcagccggg

SEQ ID NO: 18017 - DNA, 80 bp, synthetic construct
  source 1..80: mol_type = other DNA
gcctcaatctcctgggctcaaacgatcctcccacctcagcctcccgaatagctgggaccacaggcacacaccatcaagtc

SEQ ID NO: 18018 - DNA, 80 bp, synthetic construct
  source 1..80: mol_type = other DNA
gcttgtggaatggtgatggtaacagtaacaaccccataggtttttgaggattaaaggaactaatacacatacattatttc

SEQ ID NO: 18019 - DNA, 80 bp, synthetic construct
  source 1..80: mol_type = other DNA
gcctctattagatcttcaatttgagggggagtctgggaatgaacactaaacacactcacgctatgagcctctgcccctgg

SEQ ID NO: 18020 - DNA, 80 bp, synthetic construct
  source 1..80: mol_type = other DNA
ggcttaaccatcccactttctaaagataacattaattattcattcatccaactctccggagaagacatcagttgctacta

SEQ ID NO: 18021 - DNA, 80 bp, synthetic construct
  source 1..80: mol_type = other DNA
cttcaacatctaatgtcattaaatactaacttagtcaatctggacaaaagacagacaccaccgctaaccttcacacgaga

SEQ ID NO: 18022 - DNA, 80 bp, synthetic construct
  source 1..80: mol_type = other DNA
agatcaggcagagtgcaatcaatcaagagacaaaaaccacaccagtgattttaacagggacttttttttttaagacaggg

SEQ ID NO: 18023 - DNA, 80 bp, synthetic construct
  source 1..80: mol_type = other DNA
atatgccctggttcccagtacatagataatctgctcaaaagctggtgctggcctaaaagacccaagtcttccatgtgttt

SEQ ID NO: 18024 - DNA, 80 bp, synthetic construct
  source 1..80: mol_type = other DNA
ctggaaagaatttcttcttttttaaaacgctttgtgtttggggttgcgagattagttggctgaggcaaaactcgaaattt

SEQ ID NO: 18025 - DNA, 80 bp, synthetic construct
  source 1..80: mol_type = other DNA
atttttattaagttacctaagcaaacgtggacggagaagagggtcagggactatcctgaaatggtgagaggacgtgctta

SEQ ID NO: 18026 - DNA, 80 bp, synthetic construct
  source 1..80: mol_type = other DNA
atgagagaaagaaacaaatcacagaaaaggacagactgaataacttcaaattaaaaacagattaaactataccgttttgg

SEQ ID NO: 18027 - DNA, 80 bp, synthetic construct
  source 1..80: mol_type = other DNA
tctaatcatatatcttatatgacttcatccgtttacagtttacaaaaaactagaggtacttggaggcagctacttgggag

SEQ ID NO: 18028 - DNA, 80 bp, synthetic construct
  source 1..80: mol_type = other DNA
cattataggtaggtgtgtaaattggtacatctagaacacaatacagaaaaagccttaaaatgatcatattcactgaccca

SEQ ID NO: 18029 - DNA, 80 bp, synthetic construct
  source 1..80: mol_type = other DNA
aaaacattcacatctaaggataaagagcagtatacaaaattattttctcatcccaaagaatatgggagtaggggagagag

SEQ ID NO: 18030 - DNA, 80 bp, synthetic construct
  source 1..80: mol_type = other DNA
aataaatgacaaatgttcccagccccccgcattctaacaacattctattctaaccaaccagcatgttcttagaaggggat

SEQ ID NO: 18031 - DNA, 80 bp, synthetic construct
  source 1..80: mol_type = other DNA
atcacactataggttaaaaaatttagaagttcaaccacatctggcagattacaagcaaactctaaagcatcattgaaaaa

SEQ ID NO: 18032 - DNA, 80 bp, synthetic construct
  source 1..80: mol_type = other DNA
aaaggaaatatagaaaccatgtaatcagtctatactgaaaggtgacatagaatgttataaaatgtttagtttcttcaaat

SEQ ID NO: 18033 - DNA, 80 bp, synthetic construct
  source 1..80: mol_type = other DNA
tgtatgtcaaaaatgcctttgtgataacctaacctactgaatgtcccatctcagccttgcctcagaatacttacatagtc

SEQ ID NO: 18034 - DNA, 80 bp, synthetic construct
  source 1..80: mol_type = other DNA
gttcacgggtatctgtgctccaaatcttgatgagtcatcaaagaaccaaaccttctggaatattctaaagctcctacagt

SEQ ID NO: 18035 - DNA, 80 bp, synthetic construct
  source 1..80: mol_type = other DNA
aatcctatttatggaagtgtctattttcttatacgaaaagtaatgacactgaactgccttcatcagatgccaggaaagtc

SEQ ID NO: 18036 - DNA, 80 bp, synthetic construct
  source 1..80: mol_type = other DNA
tcacagttacttcctaataaagacagagtggacttaatctgttttctttcttagtcaagctattgacattacaagcgcaa

SEQ ID NO: 18037 - DNA, 80 bp, synthetic construct
  source 1..80: mol_type = other DNA
aagtacctacttattcagaacccacacattgcccacaataacttatatttttttcagagagagagtgaaaagacgcagta

SEQ ID NO: 18038 - DNA, 80 bp, synthetic construct
  source 1..80: mol_type = other DNA
atcaattctaagattttattctccattctactggaagggacaatggaaacccgctataatcactagagcaataagaggcg

SEQ ID NO: 18039 - DNA, 80 bp, synthetic construct
  source 1..80: mol_type = other DNA
acgagttcgagacctgcctgggcaacacagaaggacccatctctacaaaaaaaacaaaaattagccgggcatggtagcac

SEQ ID NO: 18040 - DNA, 80 bp, synthetic construct
  source 1..80: mol_type = other DNA
aaacacacatacaaaatgggaaggcacaaagaagacagcaaaaactgcatgagatctcacatccaaggataactgctgag

SEQ ID NO: 18041 - DNA, 80 bp, synthetic construct
  source 1..80: mol_type = other DNA
gtcctaataaacactatgtgatgaaaagaaaaaagtaaatcatcctaaagttaagtctttaatgttaaatctttaatgag

SEQ ID NO: 18042 - DNA, 80 bp, synthetic construct
  source 1..80: mol_type = other DNA
aaccaatggtaactatcatttattatctacatgttaggttaaaattgagaattactgttttaataagggtaaccatcttt

SEQ ID NO: 18043 - DNA, 80 bp, synthetic construct
  source 1..80: mol_type = other DNA
cgcgttgcactttgaccatccttttcttttgaaagaaataattttaacatacccaataaagagaacggggaccgggtgca

SEQ ID NO: 18044 - DNA, 80 bp, synthetic construct
  source 1..80: mol_type = other DNA
ggcctcaagcaattcccccacctcggcctctcaaagggctaggattataggcgtgagacaccacgcccagctgttctgca

SEQ ID NO: 18045 - DNA, 80 bp, synthetic construct
  source 1..80: mol_type = other DNA
acatggagaaaacatacattgtatctctcaaattaccaaaatctttggcaacaatggtgtcttctttcttgaaaagtgaa

SEQ ID NO: 18046 - DNA, 80 bp, synthetic construct
  source 1..80: mol_type = other DNA
gaacatcacaagctctttgagacactacagtgtataagcaggtctctgtctaaaccgctctcctcttcctcctctgccca

SEQ ID NO: 18047 - DNA, 80 bp, synthetic construct
  source 1..80: mol_type = other DNA
tatgcaaataaggatgtgtctggacgctctaccgtccccaaaataaccttaattttttaaaaaggccaggcacggtgcat

SEQ ID NO: 18048 - DNA, 80 bp, synthetic construct
  source 1..80: mol_type = other DNA
ggactgggaaagttccctccagggctcccacaggcgctccgcctcctgaactcccattggctgctttcgacgttgtgctc

SEQ ID NO: 18049 - DNA, 80 bp, synthetic construct
  source 1..80: mol_type = other DNA
tggtagatagtaggatctattttaatttttcaatctgaaaaaaaaaaacccaaaacaaaaaaaaaacaaactatcctcat

SEQ ID NO: 18050 - DNA, 80 bp, synthetic construct
  source 1..80: mol_type = other DNA
aatctaaagaaaacaaactgatttggtaaaaggttcaaagacttccacattcaagctcggtgttgtttcacacgcgtgcg

SEQ ID NO: 18051 - DNA, 80 bp, synthetic construct
  source 1..80: mol_type = other DNA
ctccgtttctgtctccttttgtttggcacctgtcagtggatggaagatgaaagtttcaaagctcatggtaacagcagggt

SEQ ID NO: 18052 - DNA, 80 bp, synthetic construct
  source 1..80: mol_type = other DNA
acaatgaactgttgctaaaaacttttttgagaaagagaaagtgttattgtgttgaaccagtacccctctggggaacggtg

SEQ ID NO: 18053 - DNA, 80 bp, synthetic construct
  source 1..80: mol_type = other DNA
tagagactattgtgagattcaggtcttttaaacacttgaagtttgcaagtgactgcaccaggccccatttctagagtttc

SEQ ID NO: 18054 - DNA, 80 bp, synthetic construct
  source 1..80: mol_type = other DNA
ctctgctcctcactgtctgagactctgaaggcttgctcaaagtgaatctgtcaaaaaatgagtttaaccacactctatct

SEQ ID NO: 18055 - DNA, 80 bp, synthetic construct
  source 1..80: mol_type = other DNA
aaagcaacacacacacacacatcccataaatgaataaatgagggaaagtagccacagacagacccatacgatgaccttag

SEQ ID NO: 18056 - DNA, 80 bp, synthetic construct
  source 1..80: mol_type = other DNA
tccatctctagttttctactctgaaatctctgatgagtgacggcagagcgttttgaggtgtttctgtaacaggcctttca

SEQ ID NO: 18057 - DNA, 80 bp, synthetic construct
  source 1..80: mol_type = other DNA
caaaaaaaaaaaaaaaaaaaaaaaaaaaaaggcttcagaacctgggccacggcagctctgtgccggctgcgccctgggag

SEQ ID NO: 18058 - DNA, 80 bp, synthetic construct
  source 1..80: mol_type = other DNA
aaaaaaaaatagtggatattaaacagatatcttttgaactctgaaggctaagggaaaccatctcatccagagaattaagc

SEQ ID NO: 18059 - DNA, 80 bp, synthetic construct
  source 1..80: mol_type = other DNA
gattcacctatgataccaggacttttccattcaattcaattcaacaaacttttagagatcgcctatatgccaagtagtgt

SEQ ID NO: 18060 - DNA, 80 bp, synthetic construct
  source 1..80: mol_type = other DNA
gtgactgttatgtttaacataatagtgtgaagcaaagggtttgaggcagctgcagaagaatgtttaatgtggggtcagta

SEQ ID NO: 18061 - DNA, 80 bp, synthetic construct
  source 1..80: mol_type = other DNA
aatatgttcaaggctttgatgatgggagtgtctggatgtatgaaggcaatgttgtggtacgttcctattccaagctcatc

SEQ ID NO: 18062 - DNA, 80 bp, synthetic construct
  source 1..80: mol_type = other DNA
agaaagccctattaggtcatctagtccatctcaacatagcgaattccctgttgcacactataggcttaggctaattttca

SEQ ID NO: 18063 - DNA, 80 bp, synthetic construct
  source 1..80: mol_type = other DNA
accccatgctccctctgttcctattaaacttcaactactaaagcggctgcattcccagatgtccagtctgataaacaatg

SEQ ID NO: 18064 - DNA, 80 bp, synthetic construct
  source 1..80: mol_type = other DNA
caggtcatttcaagtagctgagaaaacctacaggttaatacaggccttatttggaccaacatggtattctcttgccaaaa

SEQ ID NO: 18065 - DNA, 80 bp, synthetic construct
  source 1..80: mol_type = other DNA
tgcgcccagccaggaagaggagtttttttaaagagtgtatttagtgattttatttgaaagacgatgaaacctaaatcctt

SEQ ID NO: 18066 - DNA, 80 bp, synthetic construct
  source 1..80: mol_type = other DNA
ttttgtagtgttcctagatttactgaatgcgtacagtgtagctggaattaaggaggcaggccctgtttggaatgaagaac

SEQ ID NO: 18067 - DNA, 80 bp, synthetic construct
  source 1..80: mol_type = other DNA
caggcccaggcgagtctcctgcctcagcctcccgagtagctgggagtacaggtgcgcaccaccacgcctggctacttttt

SEQ ID NO: 18068 - DNA, 80 bp, synthetic construct
  source 1..80: mol_type = other DNA
aactcttcaattttgaattcaaaattttccttcagttggtccctccatttctaccagtgtttccttgagcaccctccaaa

SEQ ID NO: 18069 - DNA, 80 bp, synthetic construct
  source 1..80: mol_type = other DNA
atttggaaaatgaaacaaaacatagcttggataatagcattttctattcgcaattagaaaatgaggcggccaggtgcggt

SEQ ID NO: 18070 - DNA, 80 bp, synthetic construct
  source 1..80: mol_type = other DNA
tgggaaataaatacaggatatttacaaaatctttggtaaaacttcctaagagtatggttgtgtttgtttttcggagacag

SEQ ID NO: 18071 - DNA, 80 bp, synthetic construct
  source 1..80: mol_type = other DNA
agatacgtacagctccaactactgacataggaactggtgccacttaccataggtgatttatagtatctatgtagtatatt

SEQ ID NO: 18072 - DNA, 80 bp, synthetic construct
  source 1..80: mol_type = other DNA
gctgtaagttacacaacagttttaacagtataacaatggtctggcagagacatcagtcatgtttacagcatctaatttgc

SEQ ID NO: 18073 - DNA, 80 bp, synthetic construct
  source 1..80: mol_type = other DNA
gtgttgggattacaggcgtgagccaccgcacctggccagaaaaatacccttaacatatttgaccaagtcttatcagttat

SEQ ID NO: 18074 - DNA, 80 bp, synthetic construct
  source 1..80: mol_type = other DNA
aataagccgatattttaaagttgcagctcctaatacaagggctattataaaaccactggtggcaccaaacactgagaaaa

SEQ ID NO: 18075 - DNA, 80 bp, synthetic construct
  source 1..80: mol_type = other DNA
ctcatcaattatttcacgcatttattttaacccgtccagcgctgagtcctgaatatagcagggattctagacattagtca

SEQ ID NO: 18076 - DNA, 80 bp, synthetic construct
  source 1..80: mol_type = other DNA
acaggcacatgccaccatgtccagataattttttttcttgtagaggcaggatcttgctatgttgcccagactggtctcaa

SEQ ID NO: 18077 - DNA, 80 bp, synthetic construct
  source 1..80: mol_type = other DNA
gatatccttcaaaaaggattggcaaagtaaggttttttggattaaaaaagcagagaaaattgtcaccaaccaaccagcat

SEQ ID NO: 18078 - DNA, 80 bp, synthetic construct
  source 1..80: mol_type = other DNA
cagaggagaaaaatgggttaaacatagtttgttaaatcgagtgaagaaggaataaaagaacaaatcaatagaaaaagtga

SEQ ID NO: 18079 - DNA, 80 bp, synthetic construct
  source 1..80: mol_type = other DNA
aaggtggcaaatacatgtatgggaaagtatacggggtaataatacagacgttagaaactgatcacgcgtgctgaatcaag

SEQ ID NO: 18080 - DNA, 80 bp, synthetic construct
  source 1..80: mol_type = other DNA
ctctacagaacagggacactgcttcatttctcaaactgaaatcataagcacagcagctcacttcgtttttctgatggcct

SEQ ID NO: 18081 - DNA, 80 bp, synthetic construct
  source 1..80: mol_type = other DNA
agggtgttccaattaaccaataaacaggatacaaagaggactaacacaatctagttctaatttgcaggaagaaaccgctc

SEQ ID NO: 18082 - DNA, 80 bp, synthetic construct
  source 1..80: mol_type = other DNA
catctgacagggccttgaacgctgaagtcacacaagtcccagttttacacagatctcactagaagggttaggaaaaaaaa

SEQ ID NO: 18083 - DNA, 80 bp, synthetic construct
  source 1..80: mol_type = other DNA
attctccctccctgttctcagcccgttttcatctttttagaatattcacatgctctcatctcttctgtccttgatgccat

SEQ ID NO: 18084 - DNA, 80 bp, synthetic construct
  source 1..80: mol_type = other DNA
caacacaattagaaaccttgctccaggtgttgactgagatttaaatattaattgatctgcttggctgccaagctgcagct

SEQ ID NO: 18085 - DNA, 80 bp, synthetic construct
  source 1..80: mol_type = other DNA
ccataaatccatactgaaatagatgactgaataaacaaacagatggagaagggacaaatctcccttgcagaaaaatccca

SEQ ID NO: 18086 - DNA, 80 bp, synthetic construct
  source 1..80: mol_type = other DNA
gatgtcaaaattcaactgggtgtggggtatatgtaaattctctgcactagctttgccatgtttctgtacatctaaaactc

SEQ ID NO: 18087 - DNA, 80 bp, synthetic construct
  source 1..80: mol_type = other DNA
tattggcagcatgaaaacaggctaatacactaactgatacctatctttctctgaattcctgggcttatctggaagggaag

SEQ ID NO: 18088 - DNA, 80 bp, synthetic construct
  source 1..80: mol_type = other DNA
ttgtcagtgggaaatcagattcctgtaatccagggcaggccatggcattgtgactaaaaaagccatcatctgtgcctgtg

SEQ ID NO: 18089 - DNA, 80 bp, synthetic construct
  source 1..80: mol_type = other DNA
aagtatgtatgggaataggtgctagtaacgttaggacaaagacgagaaatttaacactagtttggtgggactgattgcta

SEQ ID NO: 18090 - DNA, 80 bp, synthetic construct
  source 1..80: mol_type = other DNA
tttggaggcaacatgcaccacatgtgtacgtgctactctgacaccggtactgagtgacactaaaagctgttttcagagag

SEQ ID NO: 18091 - DNA, 80 bp, synthetic construct
  source 1..80: mol_type = other DNA
acggctctgatgacgtcgtatcctcagagtaacgtggtcattttgagtactgttctgcagcttactttttcttttcctaa

SEQ ID NO: 18092 - DNA, 80 bp, synthetic construct
  source 1..80: mol_type = other DNA
ttctgggggatgggcgtgaggctgaaataggttgagccagtagttcctttattttgggaattcagaacttctcattattt

SEQ ID NO: 18093 - DNA, 80 bp, synthetic construct
  source 1..80: mol_type = other DNA
tgtgttcaaaaccccatcttgtactagctctgtggattaggtccttaaattccacaacaacttgtggactaagctttctt

SEQ ID NO: 18094 - DNA, 80 bp, synthetic construct
  source 1..80: mol_type = other DNA
gtcttctactgctaaaagaaaaaaaggcaaaacatcagtaataataaagaattccctcaatcggatgaagagcatatacg

SEQ ID NO: 18095 - DNA, 80 bp, synthetic construct
  source 1..80: mol_type = other DNA
aactcaggaggtgaaagacctctagagtgaaaactataaaacactgatgaaagaattgaagcagaccaggtgtggtagca

SEQ ID NO: 18096 - DNA, 80 bp, synthetic construct
  source 1..80: mol_type = other DNA
agaagaaaacataggggaaatgcttcatgactttggtctgggcaaatattttatggataaagcctcaaaagcacatggaa

SEQ ID NO: 18097 - DNA, 80 bp, synthetic construct
  source 1..80: mol_type = other DNA
cgtggaaagacaaataccatcccattcatctgtggaatctaaacaagctgatctcacaggagtagaaagtagagagtggt

SEQ ID NO: 18098 - DNA, 80 bp, synthetic construct
  source 1..80: mol_type = other DNA
tgcatcttccacagctgtccacactgcatccaggaagattttgccagatgcaaatataatctaatccagatgctttagaa

SEQ ID NO: 18099 - DNA, 80 bp, synthetic construct
  source 1..80: mol_type = other DNA
tggctcaaggatatgactggtgagtcatggaacctgaatttgaacttgaagcctctggattccaaagctgtgttctcagc

SEQ ID NO: 18100 - DNA, 80 bp, synthetic construct
  source 1..80: mol_type = other DNA
ggtaaggaaatctaaaatgacttcttcccctgaacgccaacagcattttacttctgtctcatcagttattaccttctatc

SEQ ID NO: 18101 - DNA, 80 bp, synthetic construct
  source 1..80: mol_type = other DNA
gcgcaaaacaaaagccaaagatcagggcagtcaagcatacattcagccagtatttaagttacaaattgcctgccaaatct

SEQ ID NO: 18102 - DNA, 80 bp, synthetic construct
  source 1..80: mol_type = other DNA
aggtagcctatttaaagcagtgtgagaacacacggtttttctcagtctttgggttacacagtttcattctcatcatcaca

SEQ ID NO: 18103 - DNA, 80 bp, synthetic construct
  source 1..80: mol_type = other DNA
aatcacctgagtgaagtcatatttgtcaggtttctccaagtagaggtactctttccctcctcctttatgtactgtaatct

SEQ ID NO: 18104 - DNA, 80 bp, synthetic construct
  source 1..80: mol_type = other DNA
ctctgtaactgggttccaggtttgggggaggatctacgacattttttaaaaatataaagcactcgaccaaacaaagtaac

SEQ ID NO: 18105 - DNA, 80 bp, synthetic construct
  source 1..80: mol_type = other DNA
gagactccgtctcaaaaaaaaaaaaaaaaaaaagaattgcttcaacccaggacatggaggttgcagtgagctgagattgt

SEQ ID NO: 18106 - DNA, 80 bp, synthetic construct
  source 1..80: mol_type = other DNA
attatcaaaattcctgagagggcaagaagttccaactccatattcaaaagctaactgaggttaagatattaacacaatgc

SEQ ID NO: 18107 - DNA, 80 bp, synthetic construct
  source 1..80: mol_type = other DNA
gcctcatctcctatcacatcccctaggaatctcatctctaggatcatttcaacatatccttttcaaaggaagggtttgaa

SEQ ID NO: 18108 - DNA, 80 bp, synthetic construct
  source 1..80: mol_type = other DNA
aatttgagaggggcaagtacggatctgagatgactatattgtgttcctgacctcagagaggaaatgtcagcaaatgaagc

SEQ ID NO: 18109 - DNA, 80 bp, synthetic construct
  source 1..80: mol_type = other DNA
cctatttataaaaataacaactgctaaaataatccactactaaccagacagttaccatcaatctgcccgtcccaggttct

SEQ ID NO: 18110 - DNA, 80 bp, synthetic construct
  source 1..80: mol_type = other DNA
gccaacaccacctttatctcatgctccacattttaatatgtcaacatacacagggactgctgcttactttccagactata

SEQ ID NO: 18111 - DNA, 80 bp, synthetic construct
  source 1..80: mol_type = other DNA
cacacccagccaatattttcaattcaaagttgagaaaatggccacagggagctctaaataagtcattttttatattctct

SEQ ID NO: 18112 - DNA, 80 bp, synthetic construct
  source 1..80: mol_type = other DNA
tgaattaaatgcagtgcttttgactttggacttacatgcagagagaaagaggagagttgagtaacatgctcagcctgtct

SEQ ID NO: 18113 - DNA, 80 bp, synthetic construct
  source 1..80: mol_type = other DNA
gcatggggaaccccaagaaatagtgcaataacctgaagctgttaccagccctagacctggggtgaggaacagttacaaaa

SEQ ID NO: 18114 - DNA, 80 bp, synthetic construct
  source 1..80: mol_type = other DNA
tcccaagtagctgggattacaggcgcacaccaccacccctggctaagtttcatatttttggtagagacaggctttcgcta

SEQ ID NO: 18115 - DNA, 80 bp, synthetic construct
  source 1..80: mol_type = other DNA
tttctttcagagcaaacagctcgcagtgatgatctgtggccctaagcccactttgccaggaccgctccagttcagcacca

SEQ ID NO: 18116 - DNA, 80 bp, synthetic construct
  source 1..80: mol_type = other DNA
gcaaatcaaaacccttgattctctaatgatgttgctgcaccttcaacaccactgggaactctgcctgctgcaagccaaat

SEQ ID NO: 18117 - DNA, 80 bp, synthetic construct
  source 1..80: mol_type = other DNA
aatagcatatacaaagacagaggtcccaaagaacatggcatgtttgaaaaatgatgtagccgtatcttagcctgaaacag

SEQ ID NO: 18118 - DNA, 80 bp, synthetic construct
  source 1..80: mol_type = other DNA
tgaaatgcattttaaaacaaaatttacactgtcccaaacttcacttaaaaactccccaaaccgaaaaaaaccctgactcc

SEQ ID NO: 18119 - DNA, 80 bp, synthetic construct
  source 1..80: mol_type = other DNA
gaacctaggaggcggggtttgcagtgagctgagatcgcaccattgcactctagcctggacgacagagagagattccgtct

SEQ ID NO: 18120 - DNA, 80 bp, synthetic construct
  source 1..80: mol_type = other DNA
gagtgccaacacaatgccataagttaccctgaacacatcggtttttcactgtatttatcagtagcatagaaatacagagt

SEQ ID NO: 18121 - DNA, 80 bp, synthetic construct
  source 1..80: mol_type = other DNA
agtggctgggactacaggcatccgctaccatacctggctaattttttttattgtttgtagagatgggagtctcgctatgt

SEQ ID NO: 18122 - DNA, 80 bp, synthetic construct
  source 1..80: mol_type = other DNA
ttcctgaaaagttttacagaattcatccataaacaggctgaatagaatggtatgctcttctgtagcagaagaggaataag

SEQ ID NO: 18123 - DNA, 80 bp, synthetic construct
  source 1..80: mol_type = other DNA
tgaattcattctgatgaattcaagatgggcacttcatccaagtccccgcaagtgtcctgaagtttgagactctgacaaaa

SEQ ID NO: 18124 - DNA, 80 bp, synthetic construct
  source 1..80: mol_type = other DNA
aaaaaaaaaaaaaaaaaaaaaaaaaaaagctcataaagagtgtgcaacctagatcccttgcttgtgcagttcacaatagg

SEQ ID NO: 18125 - DNA, 80 bp, synthetic construct
  source 1..80: mol_type = other DNA
actcacctcccatgtctggctaattttctgtattatttatttatttttatagagagagggtttcgccatgttgcccaggc

SEQ ID NO: 18126 - DNA, 80 bp, synthetic construct
  source 1..80: mol_type = other DNA
ttcactcatcccagtggcctcaagacctggcaaatattaagatttcagtctccatcctcacagagcttacaatgtaatgg

SEQ ID NO: 18127 - DNA, 80 bp, synthetic construct
  source 1..80: mol_type = other DNA
aatcctcccagcattgtcctctgcttaaactagtcagggatcttccggtgacaaaacctctatctactccaagacaacaa

SEQ ID NO: 18128 - DNA, 80 bp, synthetic construct
  source 1..80: mol_type = other DNA
tagcacagatatactgtgtatttgttcatgtgccgtggccctttgggtggccaaaatccactgtaacagctgcaattttt

SEQ ID NO: 18129 - DNA, 80 bp, synthetic construct
  source 1..80: mol_type = other DNA
tggattctactttggaaaatctttgcaagtgaagaagaataggacagaatggctgaactgggatgaaataagcggcaaat

SEQ ID NO: 18130 - DNA, 80 bp, synthetic construct
  source 1..80: mol_type = other DNA
agagaagtacagagggtattcagagaaggcctcggagaccagatgagacttgagctgagccttgaagtcttactaagatc

SEQ ID NO: 18131 - DNA, 80 bp, synthetic construct
  source 1..80: mol_type = other DNA
tggatgctgaaagatgaaatgaggatctcgtcaagggctccctattatgtaggatatttagaggtgtaatgtcttactgc

SEQ ID NO: 18132 - DNA, 80 bp, synthetic construct
  source 1..80: mol_type = other DNA
tactaatataagagacaaaaccctggtgatttagacattcaaagtcttatggaacgggcacaccattccaccctgtggac

SEQ ID NO: 18133 - DNA, 80 bp, synthetic construct
  source 1..80: mol_type = other DNA
ctcaacaccgattcaataacctcttcaggttttcctatttaactttccccattaaaaaagaagacacaccctaccggtca

SEQ ID NO: 18134 - DNA, 80 bp, synthetic construct
  source 1..80: mol_type = other DNA
ggagaggcccgcggcccgcccccactccgccccccggcgccgctcaccttcccagcaccggcggccgcgctcggcaggct

SEQ ID NO: 18135 - DNA, 80 bp, synthetic construct
  source 1..80: mol_type = other DNA
gtggggagagaaaaagaaaacaaaactaagatgtttcatggtaaaaagctacagcagataccatacttcatagtgaaaga

SEQ ID NO: 18136 - DNA, 80 bp, synthetic construct
  source 1..80: mol_type = other DNA
actttttggagaaaatatttgggaactggggcaaggcaaaagttagacttgacaccaaaaacacagtccataaaaggaaa

SEQ ID NO: 18137 - DNA, 80 bp, synthetic construct
  source 1..80: mol_type = other DNA
cttttttgcaacagtgcaaacgaaataacagatgtcgttcaatggatgaatggtgaagcgggctgtggtaggtccatcta

SEQ ID NO: 18138 - DNA, 80 bp, synthetic construct
  source 1..80: mol_type = other DNA
acagcttgtacccattagcagtcacgtcccattacctgctcaaccctcacacccatccctaggcaactatttcctgtctc

SEQ ID NO: 18139 - DNA, 80 bp, synthetic construct
  source 1..80: mol_type = other DNA
ctctctacatttaatattttgaggacctgctgaactgttttcaaggtggctgcaccattttacatttttaccagcaatgt

SEQ ID NO: 18140 - DNA, 80 bp, synthetic construct
  source 1..80: mol_type = other DNA
cgtcgttgcccttttatggcaatgttttcttaaagtctcaacagacttatgccagacttaattttagctgtttcaggcag

SEQ ID NO: 18141 - DNA, 80 bp, synthetic construct
  source 1..80: mol_type = other DNA
ataaatcaacctcaaatactgggtaaggagctcctgaataatttagcatacagaactcttagtttctgtgcatcctgctg

SEQ ID NO: 18142 - DNA, 80 bp, synthetic construct
  source 1..80: mol_type = other DNA
atgaggcaattcccccaataaatcccctctcatccatctatcagtcagtcaatcaatcaatcaatcaatcatctattatc

SEQ ID NO: 18143 - DNA, 80 bp, synthetic construct
  source 1..80: mol_type = other DNA
tggccagttcttactatttttaaagattcagatcaatctttctctgaaagcctttcccgattcttttctttcagtctgct

SEQ ID NO: 18144 - DNA, 80 bp, synthetic construct
  source 1..80: mol_type = other DNA
tgccaagaaatgatggcagggtagtttttattgtaatagattctatctgaggaccaaagttcgctggcagtatgagatcc

SEQ ID NO: 18145 - DNA, 80 bp, synthetic construct
  source 1..80: mol_type = other DNA
cctggccaattttagtttctgttaagggaagacaattgatttttaaaagtagtgtagaaatttgaaaaaaatctcaaata

SEQ ID NO: 18146 - DNA, 80 bp, synthetic construct
  source 1..80: mol_type = other DNA
attccacagtatcttttcagagagagtagcaaccaatttgtccagctcaagtcagctgaaaacctgtttcaaaggaagta

SEQ ID NO: 18147 - DNA, 80 bp, synthetic construct
  source 1..80: mol_type = other DNA
attagaatgcaatgtacagaatgatatagtgtcacaaggcagtctctgttttctattctctgctccctcccctgcaactg

SEQ ID NO: 18148 - DNA, 80 bp, synthetic construct
  source 1..80: mol_type = other DNA
tttgccattcattcatgtcgctcagtataccagtagtttgttcatttctattgctaagtagcatcccattctatggatag

SEQ ID NO: 18149 - DNA, 80 bp, synthetic construct
  source 1..80: mol_type = other DNA
acaaaagagcctgaggcagaggactcaactaagctgtacctgaacttctgacctacagaagctatgagataatcaatgca

SEQ ID NO: 18150 - DNA, 80 bp, synthetic construct
  source 1..80: mol_type = other DNA
atggctgtgagtcctttaagttccttatgtttctatatacattccagaattaaaaataaaacctactggaatcttggctg

SEQ ID NO: 18151 - DNA, 80 bp, synthetic construct
  source 1..80: mol_type = other DNA
cttctgtacctgtatggatgatacaatagatgtccttatccttcaagccagtttgagttggaattctctgctgctttgca

SEQ ID NO: 18152 - DNA, 80 bp, synthetic construct
  source 1..80: mol_type = other DNA
gtttcgactttgtggattaggaagtaaataggaaagagattgggaatgtcagggaacagggattgaatgggcctgtgtga

SEQ ID NO: 18153 - DNA, 80 bp, synthetic construct
  source 1..80: mol_type = other DNA
caaatttcccttcacccgaagagcaagtagccagtgtctgtactaagttagacctgagggaaggaatgattattttattt

SEQ ID NO: 18154 - DNA, 80 bp, synthetic construct
  source 1..80: mol_type = other DNA
gaaatgtccccctcacctccccgacacacacccctgtatgtgttgcaaagcgtaatgactacttggtatttctattttct

SEQ ID NO: 18155 - DNA, 80 bp, synthetic construct
  source 1..80: mol_type = other DNA
ctttttacccaccattgcttttccccatcaatgtcagcaccgtggcaaattctggtgccttaattcacatcaacaaggca

SEQ ID NO: 18156 - DNA, 80 bp, synthetic construct
  source 1..80: mol_type = other DNA
aaagttcaatgatatggtgtcagattacacactgcggctaaccttcaagaaactaccacttgtcctctgggttcatccat

SEQ ID NO: 18157 - DNA, 80 bp, synthetic construct
  source 1..80: mol_type = other DNA
agagtacaatggcatgatcgggctcactgcaacctcttcacccccaggctcaagtggtccttctcatgagtggctgggac

SEQ ID NO: 18158 - DNA, 80 bp, synthetic construct
  source 1..80: mol_type = other DNA
tcagcctggccagcatggtgaaaccaagtctctactagaaatacaaaaattagccaagcatggtgacggatgcctgtaat

SEQ ID NO: 18159 - DNA, 80 bp, synthetic construct
  source 1..80: mol_type = other DNA
tcaccttcctttttgtcatttttctcctgtgcttttactatgctcagtctgatattggagaaagtgccagagacagtaaa

SEQ ID NO: 18160 - DNA, 80 bp, synthetic construct
  source 1..80: mol_type = other DNA
agactatgacaatagagcatcaaatcaaggatgggactcatctaaacacagggccctgtgtgctgtgaaacatccatgaa

SEQ ID NO: 18161 - DNA, 80 bp, synthetic construct
  source 1..80: mol_type = other DNA
cttaatccaacaatatatttagctaaacataaacctttgaaggattgaatccatttattaggatgcaggtagagggatgc

SEQ ID NO: 18162 - DNA, 80 bp, synthetic construct
  source 1..80: mol_type = other DNA
aatgctgttgttggtttgggagtggggagtgccatttggtaaaatgaaaagaacatggattccaaaggtaggtctcaatt

SEQ ID NO: 18163 - DNA, 80 bp, synthetic construct
  source 1..80: mol_type = other DNA
aataaataaataaataaataaataaataaataagaataatagggctgggtgcagtggctcatgcatgtaatcccagcact

SEQ ID NO: 18164 - DNA, 80 bp, synthetic construct
  source 1..80: mol_type = other DNA
tccaccactcccatttaagtcaggttaacagggtaaatgctgacgatgcactgagtctactggttctaaaagccctttgt

SEQ ID NO: 18165 - DNA, 80 bp, synthetic construct
  source 1..80: mol_type = other DNA
aggcaaatgactcagaaacgtttatggtctccctggtactaaagtactgtatacttagtttcttaaaagaatctgattca

SEQ ID NO: 18166 - DNA, 80 bp, synthetic construct
  source 1..80: mol_type = other DNA
cttcttcatcttacaggaatgttgtttttaaaagagagaaccaaatacttctccagatgtatgtgttttgaaaaatcaaa

SEQ ID NO: 18167 - DNA, 80 bp, synthetic construct
  source 1..80: mol_type = other DNA
ttaagggaacactggtattaggttttgtgtcacagttgtaccaaggatacctcgccagctaaagttaatgcttttctaag

SEQ ID NO: 18168 - DNA, 80 bp, synthetic construct
  source 1..80: mol_type = other DNA
agctatgatcacactccagcatgagtgacagagggagaatctatctctaaaaacaaacaaatacataaaacacaagtctg

SEQ ID NO: 18169 - DNA, 80 bp, synthetic construct
  source 1..80: mol_type = other DNA
tcactctgctgttgcagcatgaaaacggcaaggacaataaataaatgaatgcacgtagctgtgtgccaataaaactttaa

SEQ ID NO: 18170 - DNA, 80 bp, synthetic construct
  source 1..80: mol_type = other DNA
ttaaggtctactgcatacctaggtgatgtcctttattgacattgccagcccaagttagggaaaaagataatcacggtgca

SEQ ID NO: 18171 - DNA, 80 bp, synthetic construct
  source 1..80: mol_type = other DNA
aagaatgccaattataatatttttttgacagctgggagaatagacacactctgcctgtctcttcagcacacaggcagcac

SEQ ID NO: 18172 - DNA, 80 bp, synthetic construct
  source 1..80: mol_type = other DNA
ggtattctgttatgatagtcccagcaaactaatatagtatctcttatggtttccgtgggtcaggaattcatgaccagttc

SEQ ID NO: 18173 - DNA, 80 bp, synthetic construct
  source 1..80: mol_type = other DNA
tgttgaaaccaagtgataaggtagattgtcttggtagagatagaggtgtgcctaatcctccacttcttcctgtatccact

SEQ ID NO: 18174 - DNA, 80 bp, synthetic construct
  source 1..80: mol_type = other DNA
aaatctgctggatacatgaatcagctggcaaaagaagagcatagagaattcagactatagaatatgtcctcgattcattt

SEQ ID NO: 18175 - DNA, 80 bp, synthetic construct
  source 1..80: mol_type = other DNA
caattgccacttatatctgaatgattttcaaattgaagttccagctccagactcaatatccacttgccctttgggcacct

SEQ ID NO: 18176 - DNA, 80 bp, synthetic construct
  source 1..80: mol_type = other DNA
cagttaggggatcaccctaaaatgcacagctgattattgcttttccctgttgaaaagaatttcgacttcctctgggatca

SEQ ID NO: 18177 - DNA, 80 bp, synthetic construct
  source 1..80: mol_type = other DNA
tatcctggtagccaaattaacagaatcagccaagcacataaggaacttagcacataaagatactcaataaaatccaatta

SEQ ID NO: 18178 - DNA, 80 bp, synthetic construct
  source 1..80: mol_type = other DNA
ggattacaggcgtgagccactgcgcccagccaccattcgaacgattttcaagtgtacagttcagttgcagcaagtacatt

SEQ ID NO: 18179 - DNA, 80 bp, synthetic construct
  source 1..80: mol_type = other DNA
actgtctcttcttaaatggggttattctaatccatgatccctagtcaaagcctaattttcttttctagaaggttctccct

SEQ ID NO: 18180 - DNA, 80 bp, synthetic construct
  source 1..80: mol_type = other DNA
attgggatgcaaagaaagacaaagggaagatggctatgtgagaacgggacagagactggagtaacactgtcacaagctga

SEQ ID NO: 18181 - DNA, 80 bp, synthetic construct
  source 1..80: mol_type = other DNA
atgatttttaagaagctgaggggaaaaaaacctcctcctggtcatgtcccagatgttaccatttttcattttgtttcttt

SEQ ID NO: 18182 - DNA, 80 bp, synthetic construct
  source 1..80: mol_type = other DNA
ctcaccattcctggtgcccaaaacctcaaatggcaagaagccaaattattctgaatgttgaggaaaagctttaaaaacca

SEQ ID NO: 18183 - DNA, 80 bp, synthetic construct
  source 1..80: mol_type = other DNA
ttttgaaagcagagctggagatgcagaggctcgtcaagaagaggttaaataaatcatggcacagtgcacaggtaggatgt

SEQ ID NO: 18184 - DNA, 80 bp, synthetic construct
  source 1..80: mol_type = other DNA
gttttctgtacattgtgaactgtaacagaccatagcctacattcgtgccagccagagttttggcaatcacatgtagccaa

SEQ ID NO: 18185 - DNA, 80 bp, synthetic construct
  source 1..80: mol_type = other DNA
ggagagggttaggacccgaaacttaaaatgtaaaaggccctcacaacaaagtcccaaactcttgaaaaatagaggccagg

SEQ ID NO: 18186 - DNA, 80 bp, synthetic construct
  source 1..80: mol_type = other DNA
ttcctgtaggcatgtgcagggacctgatggggcagagctgaataggatgtggtggggggcgttttaggttcaaaaacctg

SEQ ID NO: 18187 - DNA, 80 bp, synthetic construct
  source 1..80: mol_type = other DNA
ctccaagatggagcggtaagtgaagaaagccaactgcagagccatctgtatcgaatgataccatttgtagttttgaaaaa

SEQ ID NO: 18188 - DNA, 80 bp, synthetic construct
  source 1..80: mol_type = other DNA
gagtcttgcagcatcaacactttttttttgttttttgcacgatgccaccctgtttacagagggcttacacactctggccc

SEQ ID NO: 18189 - DNA, 80 bp, synthetic construct
  source 1..80: mol_type = other DNA
cgccatgcctggccccccattacttttaaatagaccaatgtatttcttaatcataaggtcaactgctgaactcaaccttg

SEQ ID NO: 18190 - DNA, 80 bp, synthetic construct
  source 1..80: mol_type = other DNA
gaggaggaggaggagaacagaggtgccaccaaagggaactgagccctgctggaacggaatagctgtgctgggtggaaaca

SEQ ID NO: 18191 - DNA, 80 bp, synthetic construct
  source 1..80: mol_type = other DNA
cccacacccctgggaaaagccccttcagaaccccagctgaatgtccttgtttcctgcccccaacgatacagtttccagcc

SEQ ID NO: 18192 - DNA, 80 bp, synthetic construct
  source 1..80: mol_type = other DNA
catgctcagcttctctttgagaactgctgtggtagacaaatatttcagcttcagcacccctttacactcttgaaaaatag

SEQ ID NO: 18193 - DNA, 80 bp, synthetic construct
  source 1..80: mol_type = other DNA
ttaatccaatctccctatttcacagataggaaacttctaaagtaattgttagttcccattctttatggtcatgtggtccg

SEQ ID NO: 18194 - DNA, 80 bp, synthetic construct
  source 1..80: mol_type = other DNA
atggacccaaaacgtaaccctagatacttcgcttgggcaaaagacaacagcagatatgcatcttgatgttgccacttaga

SEQ ID NO: 18195 - DNA, 80 bp, synthetic construct
  source 1..80: mol_type = other DNA
gtcatttcctagaaggaaataagggaaggacaccaattcaataggagacctgggggactttcatactctcagctgatgcc

SEQ ID NO: 18196 - DNA, 80 bp, synthetic construct
  source 1..80: mol_type = other DNA
agaagtagttcttcaactttcttgaatctcaggacacttggatcatctgacgaaactgatgaatgaagcatgggtacaca

SEQ ID NO: 18197 - DNA, 80 bp, synthetic construct
  source 1..80: mol_type = other DNA
gctctcctcattcacatcatgaagggagaggcagggatcgtgagctctagtggttgtctgcctccagtgattaattggta

SEQ ID NO: 18198 - DNA, 80 bp, synthetic construct
  source 1..80: mol_type = other DNA
tgcctccatgcaattttctctttagtgccaggtttctagaatcagtgcatgaaaaatgatatctgaatacggtgcttagg

SEQ ID NO: 18199 - DNA, 80 bp, synthetic construct
  source 1..80: mol_type = other DNA
gccactcttagaagatatgaaaccttgttcacacaaaatcctgaatgcaatgttttcagtggctctattcatagttgccc

SEQ ID NO: 18200 - DNA, 80 bp, synthetic construct
  source 1..80: mol_type = other DNA
ttacacaactgcagatgtttctcaaaactctcagaatagcacatttttttttaaaagggtgagttttactctacgtaact

SEQ ID NO: 18201 - DNA, 80 bp, synthetic construct
  source 1..80: mol_type = other DNA
gcaatggctgcaccttgagagcttgctttatttttagctttaaaagttgtgttttaaagacatctatatactgagtataa

SEQ ID NO: 18202 - DNA, 80 bp, synthetic construct
  source 1..80: mol_type = other DNA
catttcatagtacaacactgaaactctgtcctcataaaaataactcatttctccccacctgcaacccctggcaaccatct

SEQ ID NO: 18203 - DNA, 80 bp, synthetic construct
  source 1..80: mol_type = other DNA
atccctgccctctttcaactgattttgcaaggacttcaggaacacattctagcacaactaactagagctgctcacttatg

SEQ ID NO: 18204 - DNA, 80 bp, synthetic construct
  source 1..80: mol_type = other DNA
atctctcctttgactgagaacaaggacctctttccttgcctaaatagcctacggctaagaggaaatcacccccagttacg

SEQ ID NO: 18205 - DNA, 80 bp, synthetic construct
  source 1..80: mol_type = other DNA
accagctgcagcccaccaggcctgctcttggggtcccaacaggcagggagaagtggtggacctgtgtccgagcatcaggg

SEQ ID NO: 18206 - DNA, 80 bp, synthetic construct
  source 1..80: mol_type = other DNA
cagccagcacttcaccaggtcccttgtgaggcctcagctgtccccactgtccctctgagcctcctcctggtttttccctt

SEQ ID NO: 18207 - DNA, 80 bp, synthetic construct
  source 1..80: mol_type = other DNA
gctaaactgcactgtagttggagactcttgagaaaccgaatgaacaatatttctgaagatctcccacgaaggttgcctcc

SEQ ID NO: 18208 - DNA, 80 bp, synthetic construct
  source 1..80: mol_type = other DNA
tggagttctcggcaatgtggtttttgtcctgtcatctcataggaaacaggtctttgaataagtcattgcatcattgcaaa

SEQ ID NO: 18209 - DNA, 80 bp, synthetic construct
  source 1..80: mol_type = other DNA
tgtccaagaggcagccactggcctcacatagctatttctttataaaattcaagttcagctccttagttgctgttatgggt

SEQ ID NO: 18210 - DNA, 80 bp, synthetic construct
  source 1..80: mol_type = other DNA
gaagcaaaggttaaaagtttaattttcagaaaaagttgctggggtagcccagttgcatcttccacatcctttacatccct

SEQ ID NO: 18211 - DNA, 80 bp, synthetic construct
  source 1..80: mol_type = other DNA
gaactggagcaagtagagtgaatgtcaaactgccaagggcacgattttgcctctaagcatccgtccatgtactactcacc

SEQ ID NO: 18212 - DNA, 80 bp, synthetic construct
  source 1..80: mol_type = other DNA
aagaggcatgcaatgtgaaataagctggtcacggggaatgggatatccatcctctcaagcatttatcctttgagttacaa

SEQ ID NO: 18213 - DNA, 80 bp, synthetic construct
  source 1..80: mol_type = other DNA
tagcaagttaatgagaatttttcaaccttctgataaaacgtaaatgcaattgagttatacttccagctgctctgaacaga

SEQ ID NO: 18214 - DNA, 80 bp, synthetic construct
  source 1..80: mol_type = other DNA
tcatcagggttaagatgaaacgacaggtatgtgaaaccatgttgtaccctgcaaagcatgttgaaaatgcttcccggagt

SEQ ID NO: 18215 - DNA, 80 bp, synthetic construct
  source 1..80: mol_type = other DNA
ctgaaatcttctgactttcttccaaggaatgtattcaaaggaaagatgcaaacccattttggctgtctcccagactaggc

SEQ ID NO: 18216 - DNA, 80 bp, synthetic construct
  source 1..80: mol_type = other DNA
aactgggtcctcaccactgctgcagtggcaaacaaaggacacaaaaataattgagtggctggtcaagaaccaagttaaac

SEQ ID NO: 18217 - DNA, 80 bp, synthetic construct
  source 1..80: mol_type = other DNA
accagaggggatgacaaaggtaaaatgtccagcaattcacagggaacttgagcacagcaaagtcactgggtaagtgcagt

SEQ ID NO: 18218 - DNA, 80 bp, synthetic construct
  source 1..80: mol_type = other DNA
ctgaatgacgagtgacactgacacatgtgactgtcagtgacatgatatatgtgacactgaatgacacatgtgacattgtg

SEQ ID NO: 18219 - DNA, 80 bp, synthetic construct
  source 1..80: mol_type = other DNA
agggactttgttctctgtacctctgtgtcagcagagtctagaatattgcttggcacagagcactcatagtggtaggcaga

SEQ ID NO: 18220 - DNA, 80 bp, synthetic construct
  source 1..80: mol_type = other DNA
gctaagcttagagcactaacagtgctaggcttagtagtaacagtaataggcatcacagtaccagtgatgactaagcactt

SEQ ID NO: 18221 - DNA, 80 bp, synthetic construct
  source 1..80: mol_type = other DNA
cacaatcaggctcctgttgccaaaaaagggagtgcatgcagagtaagcaaaatgagtgtgccccataaccacattcagtc

SEQ ID NO: 18222 - DNA, 80 bp, synthetic construct
  source 1..80: mol_type = other DNA
ctttgtttccttttgctctgatatctttccccccacccaaagcagacccttttgtttaattctgatgctgtaggacgcac

SEQ ID NO: 18223 - DNA, 80 bp, synthetic construct
  source 1..80: mol_type = other DNA
gtcagcgctcattaaacatcctatgcagttactcaccggcctaacttacgtttgacttctaagccttgaggaaaatgtgt

SEQ ID NO: 18224 - DNA, 80 bp, synthetic construct
  source 1..80: mol_type = other DNA
gtggcacaatctcagctcactgcaacctccacttccaattctcctgtctcagcaattctcctgtctcagcctcccaagtt

SEQ ID NO: 18225 - DNA, 80 bp, synthetic construct
  source 1..80: mol_type = other DNA
agtgttgattatgacatgtcaggcaaatgtttgccaagtgaatggatagagacctccatcgggtgaaaatgctttgtgtt

SEQ ID NO: 18226 - DNA, 80 bp, synthetic construct
  source 1..80: mol_type = other DNA
gccccacaaaaattcgaggcaacaaaagagggaaagaggtgggccgggtgtggtggctcacgcctgtaatcccagcactt

SEQ ID NO: 18227 - DNA, 80 bp, synthetic construct
  source 1..80: mol_type = other DNA
aggtgcttgtcattctttctgcccacgcagcatctttttacacctcctctatgcctgaccttgggagtggggggaagggg

SEQ ID NO: 18228 - DNA, 80 bp, synthetic construct
  source 1..80: mol_type = other DNA
ttcatctctcttcagcatcggcctctgagacctaaagggctgcctgtttccctgtgttcctgagggtgccagcctgcatc

SEQ ID NO: 18229 - DNA, 80 bp, synthetic construct
  source 1..80: mol_type = other DNA
gatggtccaatcagaatcagggaagggccctcattccacagtagggggaaatgccctttcttctttctctccctccagat

SEQ ID NO: 18230 - DNA, 80 bp, synthetic construct
  source 1..80: mol_type = other DNA
acagaaggagatggagcaggcagaggggatggagggaatggaggagaatgaagaacagaggggggtgaaaaaggacagac

SEQ ID NO: 18231 - DNA, 80 bp, synthetic construct
  source 1..80: mol_type = other DNA
gtagagatttagtttgtctggagaagacagatgttttggcctcggatattcacagtgtcaggccaacgtcccatcaagca

SEQ ID NO: 18232 - DNA, 80 bp, synthetic construct
  source 1..80: mol_type = other DNA
acaggcacttcttattatggatgtgctactaacacacagcaaaactgattagataggcacaggcccggcaggtccccatt

SEQ ID NO: 18233 - DNA, 80 bp, synthetic construct
  source 1..80: mol_type = other DNA
cttctacttatacagatcgagttagaatgtagtaggcttcccatccatttcacttctaagaacatggtggcgaactggcc

SEQ ID NO: 18234 - DNA, 80 bp, synthetic construct
  source 1..80: mol_type = other DNA
ctgctgtccctcagaggttgcacctgctcccgtcctcccctcctgaggaagggggtgactggtgacttcccaaggcaggg

SEQ ID NO: 18235 - DNA, 80 bp, synthetic construct
  source 1..80: mol_type = other DNA
ggtaaattttatgttatgcatatttaccgcagtgaagaaaaaaaaaaaaagagccaggctgggtgtggtggcactttacc

SEQ ID NO: 18236 - DNA, 80 bp, synthetic construct
  source 1..80: mol_type = other DNA
acacacacacagagctgatgccacattatttactatggctgcgtgcgtaccctactaccagtaatcttagtacgagtcca

SEQ ID NO: 18237 - DNA, 80 bp, synthetic construct
  source 1..80: mol_type = other DNA
gggccctacgcccctccaggctgtaatgagtgcaggggcagaggcatccagccatcgaggtggggaggaccccaggtgag

SEQ ID NO: 18238 - DNA, 80 bp, synthetic construct
  source 1..80: mol_type = other DNA
cgctaaaagacaaattattaccgcagggcagaattcatcttgctctctgaatgtaccaagtgctcactctcatctggaaa

SEQ ID NO: 18239 - DNA, 80 bp, synthetic construct
  source 1..80: mol_type = other DNA
ggagtggagagttctcaaattgtgtgaacactgtcccatcatcccaaatgcttctactcactggctacagtgtccgaaac

SEQ ID NO: 18240 - DNA, 80 bp, synthetic construct
  source 1..80: mol_type = other DNA
acctggtgatgaaaatacgtttgccatcgaaacaaggcagacgcaaaaggacaaacactacgtgattctatttctaggag

SEQ ID NO: 18241 - DNA, 80 bp, synthetic construct
  source 1..80: mol_type = other DNA
tggctccagtgctggcctcagaaatgagcccttaagacgctaaatggtttttatttaattactgccctgtaattgcagag

SEQ ID NO: 18242 - DNA, 80 bp, synthetic construct
  source 1..80: mol_type = other DNA
agtagctgggactacaggtgcacacaaccacacccaactaactattttttgtagagaaggagttttgccatgttgcccaa

SEQ ID NO: 18243 - DNA, 80 bp, synthetic construct
  source 1..80: mol_type = other DNA
ctgagatatcgcccctgttcacaagcagccagatcacagaaaaggcacccagagtggtttttctttgagacggagtctca

SEQ ID NO: 18244 - DNA, 80 bp, synthetic construct
  source 1..80: mol_type = other DNA
tctacagtagataagtgtttattactttattacttaaataaaagtcatctttttagaccgtgttagtgagtctcccgtct

SEQ ID NO: 18245 - DNA, 80 bp, synthetic construct
  source 1..80: mol_type = other DNA
tccatcttgcagtgggctcttcaggaataacctatgccatgcaagcagtaacgctggcaatgcgctgactctgatttgtt

SEQ ID NO: 18246 - DNA, 80 bp, synthetic construct
  source 1..80: mol_type = other DNA
ctgaaaacaacagtgcccatccactcttacttttcccctgagccacagtttttgcataaatgaatgacaatccaatccat

SEQ ID NO: 18247 - DNA, 80 bp, synthetic construct
  source 1..80: mol_type = other DNA
agacaattcttggcaccaattggccagagcacattcccattgtgacatgacatcacacaactattttgattcatgggttc

SEQ ID NO: 18248 - DNA, 80 bp, synthetic construct
  source 1..80: mol_type = other DNA
tttagcctagttccaacagtctgaacctctcatggtaactgattcttcccaaatgactatgcacatgaggaggagactat

SEQ ID NO: 18249 - DNA, 80 bp, synthetic construct
  source 1..80: mol_type = other DNA
acagaagccagagatgcccagatgtgccactcccacggggcctccatccacagaagccagagatgcccagatctgccact

SEQ ID NO: 18250 - DNA, 80 bp, synthetic construct
  source 1..80: mol_type = other DNA
cacgtgattggacctgacctattaaagatgtgtaagtgtgctcttcctgcctaggggacctgacccatctctgtctagaa

SEQ ID NO: 18251 - DNA, 80 bp, synthetic construct
  source 1..80: mol_type = other DNA
caaagaggggacttttctctcctttgaaagattttagctcttctattctatatgtgaatgtcgcccttaccacagagaag

SEQ ID NO: 18252 - DNA, 80 bp, synthetic construct
  source 1..80: mol_type = other DNA
gccagctaggtcccctgatatactgatggattatttctgctgttaaatatggtagcccaaacttaactgtgattaaattc

SEQ ID NO: 18253 - DNA, 80 bp, synthetic construct
  source 1..80: mol_type = other DNA
tcaacaggtagttattaaacctctagtaagcgtgcagggcagttgttgattgaagggatgaggtgctacaaataattcgg

SEQ ID NO: 18254 - DNA, 80 bp, synthetic construct
  source 1..80: mol_type = other DNA
ataaaataaaaagtccttatttgcattaaagccacctcgcaacacagaccagacgagtcaggaggctacaacaagctgac

SEQ ID NO: 18255 - DNA, 80 bp, synthetic construct
  source 1..80: mol_type = other DNA
actgttagcatgcttcattgttttctggcttttggtttaattttctccccagctagactgaaagctccccgatgacaggt

SEQ ID NO: 18256 - DNA, 80 bp, synthetic construct
  source 1..80: mol_type = other DNA
aagcccaccctatctctggacttccaattatatcaaaaccaaatttttgaaaagaccccaagctttccgtctcatcaaag

SEQ ID NO: 18257 - DNA, 80 bp, synthetic construct
  source 1..80: mol_type = other DNA
caaaatactgtgtcatgtttcatggaaagttctaaaggtcactgctgcacttgactctgagatcgccacgtcgcctcact

SEQ ID NO: 18258 - DNA, 80 bp, synthetic construct
  source 1..80: mol_type = other DNA
atagcaaaaatatcctgtaagctgcagagcatttcacaaacagaggacatggccattctctgtccctgaaagcagcctct

SEQ ID NO: 18259 - DNA, 80 bp, synthetic construct
  source 1..80: mol_type = other DNA
gttctcataactcagtggctgctgctggatgtgttgacgcatatagggtgatctagcaagaacctgactcatctataaag

SEQ ID NO: 18260 - DNA, 80 bp, synthetic construct
  source 1..80: mol_type = other DNA
gcattttagggggtaattttcaaaagattgatttttttaaaagagagcagagggaaaactgggaaggtgtggggtgggac

SEQ ID NO: 18261 - DNA, 80 bp, synthetic construct
  source 1..80: mol_type = other DNA
aaactcagaaaaggaggctacggagaatttgccatcttttctctctcctcactagaagctttaaagggatagttagaccc

SEQ ID NO: 18262 - DNA, 80 bp, synthetic construct
  source 1..80: mol_type = other DNA
agggaactgcaaatcaaaacagcaatggtagaccacttcacatcctctaggacaaccacactgaaaaaaaaaaaaaaaag

SEQ ID NO: 18263 - DNA, 80 bp, synthetic construct
  source 1..80: mol_type = other DNA
gtcgcacaacactgtgactactgagttatatactttaacactgttaaggtggccaggcacagtggtatgttcctgtcgtc

SEQ ID NO: 18264 - DNA, 80 bp, synthetic construct
  source 1..80: mol_type = other DNA
accccaggagtgacatgcacacgtaaacactatttgccactaaaagtgacaagggctctttagagcaatggctaattcca

SEQ ID NO: 18265 - DNA, 80 bp, synthetic construct
  source 1..80: mol_type = other DNA
gtttgatgagaaagaagacatttacacaatcccaaagtaggtccccctgaagccctgactggtgacaagggggaaagtaa

SEQ ID NO: 18266 - DNA, 80 bp, synthetic construct
  source 1..80: mol_type = other DNA
tggaattacaagcgtgagccacctcgcccagccctaaagtgttattttaaaaaaggaattaagaaatacaggctgagcag

SEQ ID NO: 18267 - DNA, 80 bp, synthetic construct
  source 1..80: mol_type = other DNA
tggctgaacttttcaggaaacttggatgccgcacatacttttcctttctttgtgggcaggcaagatgagtcacgtttttc

SEQ ID NO: 18268 - DNA, 80 bp, synthetic construct
  source 1..80: mol_type = other DNA
ttggagttttcatttaaatgtgctggggcggcgtcaaggggttgaacaggggatgacatgatgggatttatgttttaaaa

SEQ ID NO: 18269 - DNA, 80 bp, synthetic construct
  source 1..80: mol_type = other DNA
gaacctctctgcctctgaggcaccaaaggtttcctgtccttgcaatgctgggagggaccctagatggatttgtgggtgca

SEQ ID NO: 18270 - DNA, 80 bp, synthetic construct
  source 1..80: mol_type = other DNA
gctgggatataaaggaagagctgtctgtgatccaacgctgaaatggtgtgaaaggacctgaagttttacaagttaaataa

SEQ ID NO: 18271 - DNA, 80 bp, synthetic construct
  source 1..80: mol_type = other DNA
agtcagggtcaatattgcttcgtaaaagggcttttgttgatgtgttgtatgtgctggattatgccatcagatggatttgt

SEQ ID NO: 18272 - DNA, 80 bp, synthetic construct
  source 1..80: mol_type = other DNA
ataggaagttatcacgagagaacacagactgcaaagagacttaaaataacagctatatttcagggctctggcagattgct

SEQ ID NO: 18273 - DNA, 80 bp, synthetic construct
  source 1..80: mol_type = other DNA
accccgacctactctctcacccagactttttctacgagtgaactcagatgtaaacagacattcagaaaataaaggtgaaa

SEQ ID NO: 18274 - DNA, 80 bp, synthetic construct
  source 1..80: mol_type = other DNA
ccactgcacccagctgagagagttttttaaaagctggggactgccctacagcatgaggcttttgctaatgtgcacttagc

SEQ ID NO: 18275 - DNA, 80 bp, synthetic construct
  source 1..80: mol_type = other DNA
ttgatagataactgtcctgcatggcatgaccggactcatgtcagttaactctttctttactgtgacgccgtggtctcagt

SEQ ID NO: 18276 - DNA, 80 bp, synthetic construct
  source 1..80: mol_type = other DNA
cacacacatatgttaattcttacatatacgacgtatacgtaagcttaaggagcaggtaggcaggcacaagaagcctagct

SEQ ID NO: 18277 - DNA, 80 bp, synthetic construct
  source 1..80: mol_type = other DNA
cagagtcgagcacacgggttgctcttgatgtcttgggtgggaagtgacgcctgtcctctctctttggtgaaaccccatca

SEQ ID NO: 18278 - DNA, 80 bp, synthetic construct
  source 1..80: mol_type = other DNA
gtctctagcaagggaatgacataataaaagtggtgatggaaacatctgtgcagcagccgctttgacagatctgcaatcac

SEQ ID NO: 18279 - DNA, 80 bp, synthetic construct
  source 1..80: mol_type = other DNA
tgagcccgcagtccatctgtattagtccgttctcacactgctagaaggaactacctgaaactgggtaacttatgcagaaa

SEQ ID NO: 18280 - DNA, 80 bp, synthetic construct
  source 1..80: mol_type = other DNA
ccaacttcacttacagcagtaaagcccatttatcaaaatctatttcctttaaatgatggtaggaacggggaagaagtgag

SEQ ID NO: 18281 - DNA, 80 bp, synthetic construct
  source 1..80: mol_type = other DNA
tcacatgttgaaatcctaactcacagcacctccaaacgtgacctcatgtggaagtagggtcattgaagatgtggttagct

SEQ ID NO: 18282 - DNA, 80 bp, synthetic construct
  source 1..80: mol_type = other DNA
gcaaataataacataataatcagaataaagagcaggggagcttagaaagcatgttcacttggctcatgggactcctccag

SEQ ID NO: 18283 - DNA, 80 bp, synthetic construct
  source 1..80: mol_type = other DNA
gccagtcttcaagatttttccaaacagaccaagaaggctgcagttggtgccaggactaagtcaatggacaaggacagccc

SEQ ID NO: 18284 - DNA, 80 bp, synthetic construct
  source 1..80: mol_type = other DNA
agggaccacggaggccaaattcagtaccttttgagaaataaagctaaaattctaagcccctaaccaactgaaagaacccc

SEQ ID NO: 18285 - DNA, 80 bp, synthetic construct
  source 1..80: mol_type = other DNA
ttttaaagaagtgatcctttccaaatgtaggaaccttatcattcttcaactgacactttgctggtcactgagcaaggtgt

SEQ ID NO: 18286 - DNA, 80 bp, synthetic construct
  source 1..80: mol_type = other DNA
cacaatgccatctttcctagaagtctcaggctctggggtatatatcaatatcacctgaggagcctgttaaaactttcgat

SEQ ID NO: 18287 - DNA, 80 bp, synthetic construct
  source 1..80: mol_type = other DNA
caaaatcttctccaaccaaaactcaccttctagaatcttcccttcactcacctggacccccgttatgcatttctctctta

SEQ ID NO: 18288 - DNA, 80 bp, synthetic construct
  source 1..80: mol_type = other DNA
gctagctggctatcccattattggtttatagatccctaagatctattccattaaagcagagtctcagcacctggactaaa

SEQ ID NO: 18289 - DNA, 80 bp, synthetic construct
  source 1..80: mol_type = other DNA
agaaccatggtccccatctgtgttccccctcctgtcttagagtgtcttagaagattgaattacctctttttcctttttca

SEQ ID NO: 18290 - DNA, 80 bp, synthetic construct
  source 1..80: mol_type = other DNA
aaggcatttaggacagtaaatggagagagacacagactaggacttctctggatctcttggaaagatccacgaattcttgc

SEQ ID NO: 18291 - DNA, 80 bp, synthetic construct
  source 1..80: mol_type = other DNA
ttctagggcagtgggggagcaatctacagtctgggaaccctgatccaggaatagatttcaagtacggagaaaagcagaca

SEQ ID NO: 18292 - DNA, 80 bp, synthetic construct
  source 1..80: mol_type = other DNA
tgagtggactgtgggcccctacccagcaatgaggccttcaggtacattgcagaggatgatcaggggcctcacagtctctg

SEQ ID NO: 18293 - DNA, 80 bp, synthetic construct
  source 1..80: mol_type = other DNA
gattggtcttttgagataattttttagacttgaattctggcaaccaatggaccccacccagacccatgactcatgactca

SEQ ID NO: 18294 - DNA, 80 bp, synthetic construct
  source 1..80: mol_type = other DNA
tgttccacatctcgccaccgccccaaagctcaggtctgggagcttgacatttttttcaagatgtattcatttttaattac

SEQ ID NO: 18295 - DNA, 80 bp, synthetic construct
  source 1..80: mol_type = other DNA
ctcatctctagacgatgtttatacaaggagatggggaaagaaaggggcaccttaaggctaaagtgcacaaacttaaagga

SEQ ID NO: 18296 - DNA, 80 bp, synthetic construct
  source 1..80: mol_type = other DNA
gccataaactttctagttcgtggtatatttcatattatcatcgacggcgctcaaatgaaaataccttatcctcagatcac

SEQ ID NO: 18297 - DNA, 80 bp, synthetic construct
  source 1..80: mol_type = other DNA
ccacgtcctggaggtccactgaccatcctgtcccactccttagaaggggcttccaggaggtagaggggaggaagggaagc

SEQ ID NO: 18298 - DNA, 80 bp, synthetic construct
  source 1..80: mol_type = other DNA
actttgagaaatatctcacgtgcccgcagccgtgttcctgctggatgcgtggaggagctcctgccctgcctctgggtgcc

SEQ ID NO: 18299 - DNA, 80 bp, synthetic construct
  source 1..80: mol_type = other DNA
tatgaaaagcatttagattctctgtttatagaatatcccagttagccactattccacctaactatgggaatcaggacaaa

SEQ ID NO: 18300 - DNA, 80 bp, synthetic construct
  source 1..80: mol_type = other DNA
gagtgcccacaaggccgaagcaccataagcaccatgcagatggataaatggcccggagctgaaacctgccccttaacaga

SEQ ID NO: 18301 - DNA, 80 bp, synthetic construct
  source 1..80: mol_type = other DNA
tgtctctcccacactctcagatcttccgtgcaaggttttcactggaaagaagggttttgcagagtcaaacaggaggaaga

SEQ ID NO: 18302 - DNA, 80 bp, synthetic construct
  source 1..80: mol_type = other DNA
aaaaaggcgtgtggagagggtgcaacacgaggtggaaggagagagcccagcgctgggggtgggcgctggtgggcagcagg

SEQ ID NO: 18303 - DNA, 80 bp, synthetic construct
  source 1..80: mol_type = other DNA
aggcagaatcctgcccagtcatcctcaaatcgggcacagctgcatccctaacctttctttttcattttaaagtttttagt

SEQ ID NO: 18304 - DNA, 80 bp, synthetic construct
  source 1..80: mol_type = other DNA
ggaccctgctttcaattctttccagttatccccagaagtggaactgctggacatcaggtcatcctactgtcaattttttg

SEQ ID NO: 18305 - DNA, 80 bp, synthetic construct
  source 1..80: mol_type = other DNA
gcaatttcattcttttacatgtagatagccagttttcccagcactatttgttgaaaagatggtcctttcccagttgaata

SEQ ID NO: 18306 - DNA, 80 bp, synthetic construct
  source 1..80: mol_type = other DNA
gagggtttgtcattttccaaacacagctatgcatccatggacatcccacctggaatgctgtcttaactcctcagacactt

SEQ ID NO: 18307 - DNA, 80 bp, synthetic construct
  source 1..80: mol_type = other DNA
agggtgggtctcttatcgcccattttaatgagcacattcctctctggtttcaaattctcattaccctctaacatttgttc

SEQ ID NO: 18308 - DNA, 80 bp, synthetic construct
  source 1..80: mol_type = other DNA
tgaagtattaacgacagagccaacattaatctgacattagtatgtccttctgaaatctcccaactgttgcctcatttggt

SEQ ID NO: 18309 - DNA, 80 bp, synthetic construct
  source 1..80: mol_type = other DNA
ctaagtgtatatcgatcagatgcagttccgaccttccagcgtttctgatgttttgtcttacagagctcctttgttgatgc

SEQ ID NO: 18310 - DNA, 80 bp, synthetic construct
  source 1..80: mol_type = other DNA
ccatcttaacctgtgtcttgatacgcttcttaggttctaacccttaaggtttctcaactgattgttcagctccctcaatc

SEQ ID NO: 18311 - DNA, 80 bp, synthetic construct
  source 1..80: mol_type = other DNA
cagttcctcgtctggcccgaggccacccggggcttccctagctccatatcagcaccagacatgaaactctttttgctcaa

SEQ ID NO: 18312 - DNA, 80 bp, synthetic construct
  source 1..80: mol_type = other DNA
tcccaggccaggttgagtccagcctctgctcatcacacatgcttgtcttcttccagcctgtctgagatcccccagaagga

SEQ ID NO: 18313 - DNA, 80 bp, synthetic construct
  source 1..80: mol_type = other DNA
atattaagaaaaataggagatctatatgcttggatctctagtcttggttctccttctctgcagacccctcctaacacaga

SEQ ID NO: 18314 - DNA, 80 bp, synthetic construct
  source 1..80: mol_type = other DNA
ccctgtacggagggaacagcccttcatttctaggactgtcttcagctctgacattatgattctaccaagacagggtgtga

SEQ ID NO: 18315 - DNA, 80 bp, synthetic construct
  source 1..80: mol_type = other DNA
ttgtttcacccacctgctctgtgccaggcacattatagatcaaaaggtacagggagttcagaggaaggaggaaataccat

SEQ ID NO: 18316 - DNA, 80 bp, synthetic construct
  source 1..80: mol_type = other DNA
cccctctccgtactttatgcccagaaatacacatggagttaagaacacagaacatcacatctctttattaccacaagggt

SEQ ID NO: 18317 - DNA, 80 bp, synthetic construct
  source 1..80: mol_type = other DNA
tttgcatcttgtctccagcgacagcacaaagcccgtgctccaactccctttctggtgtcatttattgtacatgaatctgt

SEQ ID NO: 18318 - DNA, 80 bp, synthetic construct
  source 1..80: mol_type = other DNA
aaaaaaaaaaagaaagtcgcctcccatctctggtcgtcagtttcctcctctgagacaggaggtgtctagactcaacccct

SEQ ID NO: 18319 - DNA, 80 bp, synthetic construct
  source 1..80: mol_type = other DNA
tgggagaagggtctgagaacccaggtccccatctctcaggcccaggcccttggcccccaggctggggcaatgaggaccaa

SEQ ID NO: 18320 - DNA, 80 bp, synthetic construct
  source 1..80: mol_type = other DNA
gccctattttcatggcttaaagggcagaatcaaaagatcacagtaggtcagttctccccaggctatctgtgtgcccagcc

SEQ ID NO: 18321 - DNA, 80 bp, synthetic construct
  source 1..80: mol_type = other DNA
cactgtgcctgacctagataagtgattttaaaggtaatagctggggagccggaattccttgattctgatgatttgcgatt

SEQ ID NO: 18322 - DNA, 80 bp, synthetic construct
  source 1..80: mol_type = other DNA
ttcaatatcagcacgtagggatttgggggtatccacgtcatatgcttttgtctggaatgctctagtttaaccagtcccct

SEQ ID NO: 18323 - DNA, 80 bp, synthetic construct
  source 1..80: mol_type = other DNA
aacagaaatgcagcagaaaccacaccacctgacttctgggttaggtgagaaggaacctcgcagttcctcctggatctctt

SEQ ID NO: 18324 - DNA, 80 bp, synthetic construct
  source 1..80: mol_type = other DNA
caagggctaacttcctcatttattattaaaagaaaaaagaaaaaggcagaggccagtggtgaaggctggcgatttctggt

SEQ ID NO: 18325 - DNA, 80 bp, synthetic construct
  source 1..80: mol_type = other DNA
cctaatgtactcatttaaacatcacttgtgtccacctgggttcagaattgcgctggacatgggatacacaaaggtaagac

SEQ ID NO: 18326 - DNA, 80 bp, synthetic construct
  source 1..80: mol_type = other DNA
cttctctgacttggcgggttattggattagctactctcagaagacccaaaaggcataggggagagaagagataaatctgg

SEQ ID NO: 18327 - DNA, 80 bp, synthetic construct
  source 1..80: mol_type = other DNA
gtaggggagatggttctcatagatcaagtcgggctttgagaaggaaggtgaacaggagaaaaaaaaaaatagaggcctca

SEQ ID NO: 18328 - DNA, 80 bp, synthetic construct
  source 1..80: mol_type = other DNA
attggtgagaatatttctaaaagtgtcctgcacatttccctgctttgatgaatggaacggcagggcaggatttaactgtc

SEQ ID NO: 18329 - DNA, 80 bp, synthetic construct
  source 1..80: mol_type = other DNA
acaataaaatgccaccacataccttgcccacaaaataaaatcaaaacaaacacctaagtctggctttgcttttcttctgc

SEQ ID NO: 18330 - DNA, 80 bp, synthetic construct
  source 1..80: mol_type = other DNA
ttttctcttaactcataattcagtaattgaggctagagctttgccatctcacattaaacccttttaggactccagggcct

SEQ ID NO: 18331 - DNA, 80 bp, synthetic construct
  source 1..80: mol_type = other DNA
gactggtctgtggggcatctctggggaggagagacctgaatacttttaaaggaagaaaaagatctatagtttgaaagagc

SEQ ID NO: 18332 - DNA, 80 bp, synthetic construct
  source 1..80: mol_type = other DNA
attgtaaggaaaaaaaaaaaaaaggacatggcttactcaaagtgccatgcatcaatgtcacagaagggcgacaagaggga

SEQ ID NO: 18333 - DNA, 80 bp, synthetic construct
  source 1..80: mol_type = other DNA
ttgctcagccttggggtatctgatttaataagaggctcttggagaacaaagccacaattcagcatcagtcttacacacca

SEQ ID NO: 18334 - DNA, 80 bp, synthetic construct
  source 1..80: mol_type = other DNA
acagcctgcaaacatcatccaggagacaacatggtctctgcctatatcagccatgtctctgattttctgtattctgatgc

SEQ ID NO: 18335 - DNA, 80 bp, synthetic construct
  source 1..80: mol_type = other DNA
atattgagtgatctgttgctgcaggtattcaagaaaaggaggcttcttccacgagcctgtgactcaaaggctatgattta

SEQ ID NO: 18336 - DNA, 80 bp, synthetic construct
  source 1..80: mol_type = other DNA
tttctgtgtgctttattccaaagcatacatacgagcctgaggaaaaaagcctaattggttttccttggaaaagctggaaa

SEQ ID NO: 18337 - DNA, 80 bp, synthetic construct
  source 1..80: mol_type = other DNA
taggttatcaccagggccctctcctggaactcatgttttgagtctattttaagtgctgagtattttacatatcctctctc

SEQ ID NO: 18338 - DNA, 80 bp, synthetic construct
  source 1..80: mol_type = other DNA
ccagcatttgagattgactgggcctggtgggatgtagacggtgtggcattttactttggaacctcattcctatgacagct

SEQ ID NO: 18339 - DNA, 80 bp, synthetic construct
  source 1..80: mol_type = other DNA
gagactgccaatatttaccaaagtaaccagatgtttgctgagtggctgtgctgagattagattagctgagaatagttcgc

SEQ ID NO: 18340 - DNA, 80 bp, synthetic construct
  source 1..80: mol_type = other DNA
gtggcctggcccctgtggcttctgcagggcacactctactcggaacaccgctccgtggcctggcccctgtggcttctgca

SEQ ID NO: 18341 - DNA, 80 bp, synthetic construct
  source 1..80: mol_type = other DNA
aaaccattttttttctacaaattgccctctataacaatgcccctaagcaagtcctctctaagacacattggattcctcgt

SEQ ID NO: 18342 - DNA, 80 bp, synthetic construct
  source 1..80: mol_type = other DNA
cccaaggcctcctttaatcaactgaccacgatgtacccagcgctgcctgggtgaaggcgctgtgggagtaaaaaggagca

SEQ ID NO: 18343 - DNA, 80 bp, synthetic construct
  source 1..80: mol_type = other DNA
tctcagaatgcattatactctgctgttatgggttaaagtgcttgcacccgcaaaaaagacattggagtcttcactcccag

SEQ ID NO: 18344 - DNA, 80 bp, synthetic construct
  source 1..80: mol_type = other DNA
ctggttcctgacttccacattctaagaagatacagaagtgattggattatgctgcttgtgttaacatcaaggtttgtgga

SEQ ID NO: 18345 - DNA, 80 bp, synthetic construct
  source 1..80: mol_type = other DNA
ctttgccctggcattgctatttgaatcaaattcgaattaaagggcctttgagaatgtagtcctaaacccaaataggacac

SEQ ID NO: 18346 - DNA, 80 bp, synthetic construct
  source 1..80: mol_type = other DNA
acatttgaagaagcccctccatcccagagaactggagcagctgtcaccctaacaggtagagtaccttttccccagttggt

SEQ ID NO: 18347 - DNA, 80 bp, synthetic construct
  source 1..80: mol_type = other DNA
tctctggagttcaaaacaacaaccacaaaaaccccaatgcctggtctcagagtttctcatttaatccatctggggtccag

SEQ ID NO: 18348 - DNA, 80 bp, synthetic construct
  source 1..80: mol_type = other DNA
aggactctccccggattcaggtctatgttgtattcatctctgcacagttcctgatagacagtgcatgctcagtaaatatt

SEQ ID NO: 18349 - DNA, 80 bp, synthetic construct
  source 1..80: mol_type = other DNA
catcaagaagatggaaagacaacccaaagaatgaatcatatatctgatagggacttgtattcacaatacataaagaactg

SEQ ID NO: 18350 - DNA, 80 bp, synthetic construct
  source 1..80: mol_type = other DNA
attgaggatttcattctagatggagaaatgggatggaatggcttctgttccaatgtcgaggactgttccacctggttttt

SEQ ID NO: 18351 - DNA, 80 bp, synthetic construct
  source 1..80: mol_type = other DNA
caagagaaataaaaacatatttccatacagaaatttgtacacaaatgtttatagcaacattattcataatagccaaaagg

SEQ ID NO: 18352 - DNA, 80 bp, synthetic construct
  source 1..80: mol_type = other DNA
aggggaggaaggtccctcccagaatgcttgaaattgaatttccccccaacccaatagggtggacactagtgactgattag

SEQ ID NO: 18353 - DNA, 80 bp, synthetic construct
  source 1..80: mol_type = other DNA
tccagtggagaggcgcatgtcaaaataaaaagctaatttcattccggtaagaactgtaagagaatcaggtgtgatcagtg

SEQ ID NO: 18354 - DNA, 80 bp, synthetic construct
  source 1..80: mol_type = other DNA
ttactgccagtttctggaggaaaaaaaaaatagaaaatggcagcaggtggatcattccccgacagcagttaaatgcacct

SEQ ID NO: 18355 - DNA, 80 bp, synthetic construct
  source 1..80: mol_type = other DNA
ccggccatctttggggtttcctggcttgtagaagcatcaccttgatctccaccttcatcctcaccagaggtctctccggg

SEQ ID NO: 18356 - DNA, 80 bp, synthetic construct
  source 1..80: mol_type = other DNA
gcctttaggaaccactctcgttgtggttttaaattgtcatcacttgccagataaggagaggttgctgtatggacagacac

SEQ ID NO: 18357 - DNA, 80 bp, synthetic construct
  source 1..80: mol_type = other DNA
gtcctgtgacaaattcacttaggactaagaagccactgagaatattcagttcttggatcatccacaacagcggaagcaga

SEQ ID NO: 18358 - DNA, 80 bp, synthetic construct
  source 1..80: mol_type = other DNA
atgctaatgatctattaatcactgtttctggctgacttccctttacaccagtgccttcagaagctcccctaccgagtggg

SEQ ID NO: 18359 - DNA, 80 bp, synthetic construct
  source 1..80: mol_type = other DNA
gagataaagcaagaccctgtttcaaaaaaaaaaaaaaaaaagtaaagaaggccaggcacagtggctcacaccggtaatcc

SEQ ID NO: 18360 - DNA, 80 bp, synthetic construct
  source 1..80: mol_type = other DNA
acctctttaggcctcagtttccccacctagacaaggatgatggtccatgagtctgctatttttcattgagcaaccttgta

SEQ ID NO: 18361 - DNA, 80 bp, synthetic construct
  source 1..80: mol_type = other DNA
ctcaccatgcaccagttagttactcattcattcatttagatgaggtctcgctctgtcatccaggctcaatcatagctggg

SEQ ID NO: 18362 - DNA, 80 bp, synthetic construct
  source 1..80: mol_type = other DNA
agggtagcagtggtggtagtaacagtaggtagtgatggtagtgatgttagtgatggtaggtagtaatgatagtgatggta

SEQ ID NO: 18363 - DNA, 80 bp, synthetic construct
  source 1..80: mol_type = other DNA
gatggtagtgatggtaggtagggatggtagtgatggtagtgatggtaggtagggatggtagtgatggtaggtagtgatga

SEQ ID NO: 18364 - DNA, 80 bp, synthetic construct
  source 1..80: mol_type = other DNA
cacacagtgtctatatatctatgtgcacagatttctgggcatgaatatatgtgttccaagccccagtgtacctacaagtt

SEQ ID NO: 18365 - DNA, 80 bp, synthetic construct
  source 1..80: mol_type = other DNA
aagatcatactgggtgacctcatccctaacacctcgtctctagctctcaacttctaccactccgcgaagtcgtgtgggct

SEQ ID NO: 18366 - DNA, 80 bp, synthetic construct
  source 1..80: mol_type = other DNA
tccttctcaggtgaagacgttgttagtggagaaaatgaatcttgggctaatgagctgatcagaaccttgagctgcaagag

SEQ ID NO: 18367 - DNA, 80 bp, synthetic construct
  source 1..80: mol_type = other DNA
agtccctgtgacatgactttccagagccagacctcccggcctgatcagtgctcgcccctacttgcggtgtgtgagctgac

SEQ ID NO: 18368 - DNA, 80 bp, synthetic construct
  source 1..80: mol_type = other DNA
tttgtgttttaatgacacaaatgtgagtcctcatctgcttcttaaactgtcagcaagatcaccaaggctgttactaatgt

SEQ ID NO: 18369 - DNA, 80 bp, synthetic construct
  source 1..80: mol_type = other DNA
aacactatgaatcagagctgcttttctaaagagtcagttgctaaagagtgcccgtggcccagcggcttttaaactacgcc

SEQ ID NO: 18370 - DNA, 80 bp, synthetic construct
  source 1..80: mol_type = other DNA
ctttaaaaattaaattggacttccgtcagcagacatcatctcatttgatcttcacagcccgcaggtgaggagagttgggg

SEQ ID NO: 18371 - DNA, 80 bp, synthetic construct
  source 1..80: mol_type = other DNA
accctgctctaggatgacctcatcttcgctaagtacatctgccagagacgccatatccacacaaggtcacatttacaggt

SEQ ID NO: 18372 - DNA, 80 bp, synthetic construct
  source 1..80: mol_type = other DNA
gcagttgtgcaaatcagttcagctcagtgagttttaattcagtgtctactttgatgctgaagatctagtccctcccccca

SEQ ID NO: 18373 - DNA, 80 bp, synthetic construct
  source 1..80: mol_type = other DNA
acagatggaaatttccatatgcccctgttcagccaaaatcacaggcttttggtttcattatcattgtcaaaccattaacc

SEQ ID NO: 18374 - DNA, 80 bp, synthetic construct
  source 1..80: mol_type = other DNA
gcagcctcatgtgccctccactgctacatcctcagtgtagaccacagacctgtaggggggcatgtggtaagcaccccatt

SEQ ID NO: 18375 - DNA, 80 bp, synthetic construct
  source 1..80: mol_type = other DNA
agctgggtcgacacagcaagattccagaaaagagaggagaaagtcggtttcagaaaaggggaaaaaagtcaaaatgacag

SEQ ID NO: 18376 - DNA, 80 bp, synthetic construct
  source 1..80: mol_type = other DNA
aaggagcttgacttgaacctggaactttctaaaatgcagagtatctatgcatctctatctacatgcatgcctcccttccc

SEQ ID NO: 18377 - DNA, 80 bp, synthetic construct
  source 1..80: mol_type = other DNA
caccctccacatacaccatgctccacacacaccgccctccacacacaccatcctccacacacaccatgctccacacacca

SEQ ID NO: 18378 - DNA, 80 bp, synthetic construct
  source 1..80: mol_type = other DNA
catatcatggcaaacctacatagggtatcatttaattctcatggccacctgcaggcaggtattcttattgctgtttcact

SEQ ID NO: 18379 - DNA, 80 bp, synthetic construct
  source 1..80: mol_type = other DNA
ctaagacccatctatttgcaattaggcaagggctgatcattgctggaaaaaaaaaaaaaaaaagcccacagggagtataa

SEQ ID NO: 18380 - DNA, 80 bp, synthetic construct
  source 1..80: mol_type = other DNA
ttcccaaggccccagcctcttccacagtcagctacatccaccaatgattgtccccagcccctgctgctacccagcaaggc

SEQ ID NO: 18381 - DNA, 80 bp, synthetic construct
  source 1..80: mol_type = other DNA
tcaaggggagttttcagaaacttctcagatcaaggaaagctcagaaaatccagtgtctcctgaggagaagccagaccctg

SEQ ID NO: 18382 - DNA, 80 bp, synthetic construct
  source 1..80: mol_type = other DNA
gctggagggacgcagggttgcaggacacgagtgcccatcttctgatgtagtccaagattccctctccgccacctgcaggt

SEQ ID NO: 18383 - DNA, 80 bp, synthetic construct
  source 1..80: mol_type = other DNA
gaccttggcctgtctcagtgtgaataaggagacctattgaacaaatttgcaaattattcagccaaagcctaatgagggat

SEQ ID NO: 18384 - DNA, 80 bp, synthetic construct
  source 1..80: mol_type = other DNA
tgccagtgaactgcccaataggacacagggggcaatcattgacaccggggttgcgaccttggcctctggcacccaaactc

SEQ ID NO: 18385 - DNA, 80 bp, synthetic construct
  source 1..80: mol_type = other DNA
tgacaaagtgtagacgcatgccatctttaaaggagcttatggtttaattaaggagacaggctggatacttcgaaagaaaa

SEQ ID NO: 18386 - DNA, 80 bp, synthetic construct
  source 1..80: mol_type = other DNA
ccttcaggtgaaggtgacaaaggccactggagggcagaccatcatttaacaaggaatagaaccaaatatgaggccagcac

SEQ ID NO: 18387 - DNA, 80 bp, synthetic construct
  source 1..80: mol_type = other DNA
aatactctattacctatgccccaaggtcatgtcagaaatctcaaaatacacctaacatgcaaagcagagtggtgaggaga

SEQ ID NO: 18388 - DNA, 80 bp, synthetic construct
  source 1..80: mol_type = other DNA
cacgagaacttcccagctgacagagagaacagtgagaaagaataaattctgtggctttcagtccctatgtttttggtgtt

SEQ ID NO: 18389 - DNA, 80 bp, synthetic construct
  source 1..80: mol_type = other DNA
atagccaagcagagatatcaaaaacctgacaagacacaacagagacttttctcagcaggttgggctagaatggttgtgaa

SEQ ID NO: 18390 - DNA, 80 bp, synthetic construct
  source 1..80: mol_type = other DNA
ctgttggattaggttcctgggctgtgataatgcggcaccacatactgggggctttaaaacagaatggattctctcattgc

SEQ ID NO: 18391 - DNA, 80 bp, synthetic construct
  source 1..80: mol_type = other DNA
gtgagattccaattaaccattccaaggcagggctaaaatacagttccaccaaatcaccttcttctactggggaagctcag

SEQ ID NO: 18392 - DNA, 80 bp, synthetic construct
  source 1..80: mol_type = other DNA
tatttcacctccactgtaattaaccctgtcatctaccatgtaatgatgaacaggctttttctcagctgggcatttgtgaa

SEQ ID NO: 18393 - DNA, 80 bp, synthetic construct
  source 1..80: mol_type = other DNA
acactgggagcttctacataagctagtccatgaaccacactttgttaaacattgccctaaaccctaatccagcaaatctt

SEQ ID NO: 18394 - DNA, 80 bp, synthetic construct
  source 1..80: mol_type = other DNA
ggcagccagccttgattaaagcatgtctatggggtctatgaactttagcactaatagggaagctgctttttcttagaccg

SEQ ID NO: 18395 - DNA, 80 bp, synthetic construct
  source 1..80: mol_type = other DNA
agtgtctttcaagagttattactcctcagaatccaagatgtccttggcagtggcagtccctgcacaccacagtcctctga

SEQ ID NO: 18396 - DNA, 80 bp, synthetic construct
  source 1..80: mol_type = other DNA
gcagcattgccagatcaaatacaggacgcccccattaatctgggatttcacatcaacaatggatactttttagtatttcc

SEQ ID NO: 18397 - DNA, 80 bp, synthetic construct
  source 1..80: mol_type = other DNA
aatggcccaaccactggacaatggcatgttcttgtttctctctatatatttttttaaaaaactaggtgtctgatgtatat

SEQ ID NO: 18398 - DNA, 80 bp, synthetic construct
  source 1..80: mol_type = other DNA
gcaccactgcattcccacctggggagcagagtgacaccctgactcaaaacaaaaaaaacaataaaaaagagttttcccat

SEQ ID NO: 18399 - DNA, 80 bp, synthetic construct
  source 1..80: mol_type = other DNA
tgaagttcaatgcagcctgcacggattagggagctccgagcccccaaataccacagagacccaaagtacactcccggggc

SEQ ID NO: 18400 - DNA, 80 bp, synthetic construct
  source 1..80: mol_type = other DNA
gcctgtgcccaagtggggaatctggaaccagtaagcccgttcgtgcataaatgtaatcctcggccgcagaataaaccagc

SEQ ID NO: 18401 - DNA, 80 bp, synthetic construct
  source 1..80: mol_type = other DNA
catgaggacacagatttgggggaagggggaatctctaggcaaaggctgttacagtcaaatctctgcgaacgattgtgatc

SEQ ID NO: 18402 - DNA, 80 bp, synthetic construct
  source 1..80: mol_type = other DNA
gcggcggcggcagcggcggcgtttctcgcctcctcttcgtcttttctaaccgtgcagcctcttcctcggcttctcctgaa

SEQ ID NO: 18403 - DNA, 80 bp, synthetic construct
  source 1..80: mol_type = other DNA
gtttggctagacggaactcttgcctggttgcaagtgtcaagccaccgattgctttcttaggctatctatatggtctcttc

SEQ ID NO: 18404 - DNA, 80 bp, synthetic construct
  source 1..80: mol_type = other DNA
tgaataagacagaagcccaagaattttaacagtgtgtagctttagttgtctaaaagttaggccttcgggcttcaaaagtt

SEQ ID NO: 18405 - DNA, 80 bp, synthetic construct
  source 1..80: mol_type = other DNA
tacatgtgagctgtgacatgactggcattttctttgatttcagcgtatgttggtctctacacatgaaatttgtgtgactt

SEQ ID NO: 18406 - DNA, 80 bp, synthetic construct
  source 1..80: mol_type = other DNA
ggaaaggcaactggtgatattttaatttttgtatggaacagtgcatctgctttctcatagccacataaaatacataaact

SEQ ID NO: 18407 - DNA, 80 bp, synthetic construct
  source 1..80: mol_type = other DNA
ctgccacatatacgttcttccataggtggttaaaagtatattggtctgtgtttggtgattctctttgtacatattgagta

SEQ ID NO: 18408 - DNA, 80 bp, synthetic construct
  source 1..80: mol_type = other DNA
gcctggccagtgttgagaatattgagagatggatattgtagctgtacctgccatcaaaagaattttcttgacctccacat

SEQ ID NO: 18409 - DNA, 80 bp, synthetic construct
  source 1..80: mol_type = other DNA
ggaagtctgggtatgacatgtctgtgattttgctggttcatcacaaatgggaaataaatctctgctaactcaaactgttg

SEQ ID NO: 18410 - DNA, 80 bp, synthetic construct
  source 1..80: mol_type = other DNA
gcattttggcatctgagcacagctgagttttctaaatcaatctctctccttgcacctagtttttgctttagatcactacc

SEQ ID NO: 18411 - DNA, 80 bp, synthetic construct
  source 1..80: mol_type = other DNA
aacaatacactttttaaatcattagctcatttgattttgcaaagaagaacaggtaacctaagaggcagacagaacaggca

SEQ ID NO: 18412 - DNA, 80 bp, synthetic construct
  source 1..80: mol_type = other DNA
tagaaaggcagtatggtggaatggagcatagatttggagttggctagacctaaagtccagattaaatctctgctcaaggc

SEQ ID NO: 18413 - DNA, 80 bp, synthetic construct
  source 1..80: mol_type = other DNA
ttggctgattgtgaaagtgttgctttgaacttctgttagaaaaggttgaagatgttttccgtaagtgtttttaatactgt

SEQ ID NO: 18414 - DNA, 80 bp, synthetic construct
  source 1..80: mol_type = other DNA
atgcatatactttaaaacctagttcatggtgaacttaagagggtgttctttttaaaaaacaatttccattgcactttgtc

SEQ ID NO: 18415 - DNA, 80 bp, synthetic construct
  source 1..80: mol_type = other DNA
ttgtttgtgagtgtatgcatttatgctttttgacaacctaagaaacactcttacatctgagtatctttcatggactagct

SEQ ID NO: 18416 - DNA, 80 bp, synthetic construct
  source 1..80: mol_type = other DNA
agactcagtttgtagactttggtgagaactgaattggaggctatgaaaaaaataccttttgggcctttctgaatagacat

SEQ ID NO: 18417 - DNA, 80 bp, synthetic construct
  source 1..80: mol_type = other DNA
agcacttaggcaaagctatttttaccagttggaaaaaaagtaagtcatttccaaccaattttcctggcttgtagtataga

SEQ ID NO: 18418 - DNA, 80 bp, synthetic construct
  source 1..80: mol_type = other DNA
tgctgtagaaaattaacagttggcatttggcttagttcaagtataatgctgttgacaagtatatctgacacgtcattgaa

SEQ ID NO: 18419 - DNA, 80 bp, synthetic construct
  source 1..80: mol_type = other DNA
ggatagctttaaaaatggttcttaagtttaatgagttcaactgggaaaaaagttagttctattttagatgttgtgtcact

SEQ ID NO: 18420 - DNA, 80 bp, synthetic construct
  source 1..80: mol_type = other DNA
taagtacttagcacaggatttggtacctagtaaatatttaaatgttcctgtgttattcctgactattccttctttattct

SEQ ID NO: 18421 - DNA, 80 bp, synthetic construct
  source 1..80: mol_type = other DNA
agaagctctttaggacaaattgttcttaaataatgaacagttggcactttttcaactggaaaattcaaggaactgctctt

SEQ ID NO: 18422 - DNA, 80 bp, synthetic construct
  source 1..80: mol_type = other DNA
agtttcttttttgctcacaagaaccctaactgtgtgttacttgaaagcactgatggaaatcagggaaaaagctccagaag

SEQ ID NO: 18423 - DNA, 80 bp, synthetic construct
  source 1..80: mol_type = other DNA
ttgttctttggtgagaaaggattcttgtaacacctaaatcaagactgtccaaacatggcatatgcagtttaccagtcaaa

SEQ ID NO: 18424 - DNA, 80 bp, synthetic construct
  source 1..80: mol_type = other DNA
aaaatggttcattaaccatggtacacccatcaatataatgttatattgtcatttaaaattgtattcccaagtttcgtatc

SEQ ID NO: 18425 - DNA, 80 bp, synthetic construct
  source 1..80: mol_type = other DNA
agtgtatgttattaaccattatgccgtagtgcctgcaagtagatctctagatgtcagaaatactcatcttcctctggtta

SEQ ID NO: 18426 - DNA, 80 bp, synthetic construct
  source 1..80: mol_type = other DNA
ctccttatctgtctgattaaattgaattcgctgccgtggcatccttaaagctggaccttactttgtcagtcctgccttct

SEQ ID NO: 18427 - DNA, 80 bp, synthetic construct
  source 1..80: mol_type = other DNA
aaaatctggaacttcttagagagttgtcatcagttggtagaactataagtggtaaaggtctttctgatgatatctcagaa

SEQ ID NO: 18428 - DNA, 80 bp, synthetic construct
  source 1..80: mol_type = other DNA
tgtggcttaggctactgctgagtactcaaatggtaaaccttggcagcgtctatatggtgctaattctgcaggctcacagg

SEQ ID NO: 18429 - DNA, 80 bp, synthetic construct
  source 1..80: mol_type = other DNA
taaccactttgggttccctgccattgcttctggtgcctcattttttctgacgtcttccattttcttacatttgtcttcta

SEQ ID NO: 18430 - DNA, 80 bp, synthetic construct
  source 1..80: mol_type = other DNA
ttggctaaaacagtatccaggccagcattgcacctatgaaattggctgttaggaatcttgtatctttaaaaatcaagggc

SEQ ID NO: 18431 - DNA, 80 bp, synthetic construct
  source 1..80: mol_type = other DNA
ccatttttcaaagtgaagaactattccgttaaccacctcaaaagatgataaataaaaagggtatttttagttgtttcaac

SEQ ID NO: 18432 - DNA, 80 bp, synthetic construct
  source 1..80: mol_type = other DNA
cctgtttcagggggaaaaaaaagataaaatagtttgaggaggctggatgtagtggctcatgcatgtcatcctggcacttt

SEQ ID NO: 18433 - DNA, 80 bp, synthetic construct
  source 1..80: mol_type = other DNA
gattaggtcaactttgaattttatttggaagataaatgagtccagaagtgagtgggcagagattattggagttggtcttg

SEQ ID NO: 18434 - DNA, 80 bp, synthetic construct
  source 1..80: mol_type = other DNA
gaagaaggtccacatacaagtggtccgacacagctcaaaccggttttgttcattggccaactgtagtttgattgaaagta

SEQ ID NO: 18435 - DNA, 80 bp, synthetic construct
  source 1..80: mol_type = other DNA
aaatgctggtcaccaggtttaatacctggattccattacagtgtgatttttgtcttatttcatagttggggattaggctt

SEQ ID NO: 18436 - DNA, 80 bp, synthetic construct
  source 1..80: mol_type = other DNA
acttggcttgaacccccaggtagagggtagaggccagtctgggtaacacagcgagaacccatctcttaaaaaaaaagttt

SEQ ID NO: 18437 - DNA, 80 bp, synthetic construct
  source 1..80: mol_type = other DNA
gtgtgctagtttttacgttggtctcttctcagtgtcgttagtcactgaggctgattgatcatcttttaggttactgataa

SEQ ID NO: 18438 - DNA, 80 bp, synthetic construct
  source 1..80: mol_type = other DNA
ttttcctgtgatttttccccaaacggaaaatactctgcagagattagactttgttattgttgtactacatcattgctttg

SEQ ID NO: 18439 - DNA, 80 bp, synthetic construct
  source 1..80: mol_type = other DNA
ccacatctcatagaagctaactattcccaaattgtttttttcttcttttcctcttactactgctgttttcctcctttctt

SEQ ID NO: 18440 - DNA, 80 bp, synthetic construct
  source 1..80: mol_type = other DNA
cctgaggaattgccacactgtcttccacaatggttgaactagtttacagtcccaccaacagtgtaaaaatgttcctgttc

SEQ ID NO: 18441 - DNA, 80 bp, synthetic construct
  source 1..80: mol_type = other DNA
ggctccatatgaactttaaagtagttttttccaattctgtgaagaaatttattggtagcttgatggggatggcattgttt

SEQ ID NO: 18442 - DNA, 80 bp, synthetic construct
  source 1..80: mol_type = other DNA
gttgaattttgtcaaaggccttttctgcatctattgagataatcatgtggttttttgtctttggttctctttatgtgatg

SEQ ID NO: 18443 - DNA, 80 bp, synthetic construct
  source 1..80: mol_type = other DNA
tttaaaaaaaccagctcctggattcattgattttttttttgaagggttttttgtgtcctatctccttcaattctgctctg

SEQ ID NO: 18444 - DNA, 80 bp, synthetic construct
  source 1..80: mol_type = other DNA
ttacttccaactatgtggtcaattttggaataagtgtgatgtggtgctgataagaatgtatattctgttgatttgggatg

SEQ ID NO: 18445 - DNA, 80 bp, synthetic construct
  source 1..80: mol_type = other DNA
tgtgtgtctgcatgtgagatacatctcctgaatacagcacactgatgggtcttgactctttatccaatttgccagtcttt

SEQ ID NO: 18446 - DNA, 80 bp, synthetic construct
  source 1..80: mol_type = other DNA
tgcatgcgtcatgtagttctcgagccatgattttcagctccatcaggtcatttatggtcttctgtacactgtttattcta

SEQ ID NO: 18447 - DNA, 80 bp, synthetic construct
  source 1..80: mol_type = other DNA
tggaactgctacgctagcagtgagcaaggctctgtgggcgtaggacctgctgagccaggcacgggatataatctcctgtt

SEQ ID NO: 18448 - DNA, 80 bp, synthetic construct
  source 1..80: mol_type = other DNA
agatttatttattgtcttgttcactgtgagctttttcccccatgtataagcagctgtgtaatagattcaagagcaccccc

SEQ ID NO: 18449 - DNA, 80 bp, synthetic construct
  source 1..80: mol_type = other DNA
aaattcacataacagctaaccattttaaccacggaaagtgtacattccgtggcatttattaccttcacagtgttacctct

SEQ ID NO: 18450 - DNA, 80 bp, synthetic construct
  source 1..80: mol_type = other DNA
ctgcgtgacaaaaatcagctggagctgtgtaatgtccgacctgtctctgtcaatgaacagattattcattgtcatttctc

SEQ ID NO: 18451 - DNA, 80 bp, synthetic construct
  source 1..80: mol_type = other DNA
agataagtgaaacacgtatggaatactgctagttttgtaagtctcctttaccatggcaggacatctgtagttaataaatc

SEQ ID NO: 18452 - DNA, 80 bp, synthetic construct
  source 1..80: mol_type = other DNA
actgtttgatatactggctgcccaattttacattaccaccagcaatacactagggttccgaatttgccacatcctcacca

SEQ ID NO: 18453 - DNA, 80 bp, synthetic construct
  source 1..80: mol_type = other DNA
tgacaatagatgcaagggtttatttttgggctctctcgactattctgttagactatatgtttgtttttttatgtcaggac

SEQ ID NO: 18454 - DNA, 80 bp, synthetic construct
  source 1..80: mol_type = other DNA
gggtatagaaacacaactgattcttcgcacattaaatttgtgccctgcttcttcgcgggtttgtttattctttttttgtg

SEQ ID NO: 18455 - DNA, 80 bp, synthetic construct
  source 1..80: mol_type = other DNA
gtgctagttgagatgaccatgtgatttgttttcttctttctattaacatgatatattgtttttcatatattgagccattt

SEQ ID NO: 18456 - DNA, 80 bp, synthetic construct
  source 1..80: mol_type = other DNA
tcttctgcgtttaaccgtgtattttttaatttccacagttggtgaattttctactttttcttcagttattgattttattg

SEQ ID NO: 18457 - DNA, 80 bp, synthetic construct
  source 1..80: mol_type = other DNA
ttctatatgccttacagcttttttgtccctcatttcctgccttactggcacttgtgtttagttgatattttgtggtgaag

SEQ ID NO: 18458 - DNA, 80 bp, synthetic construct
  source 1..80: mol_type = other DNA
cgtggtattttcagctgttctgccttccaagtttactgattcttctgcctgcccaaattggcttttgaattcctctagta

SEQ ID NO: 18459 - DNA, 80 bp, synthetic construct
  source 1..80: mol_type = other DNA
caagtctttccttagaaactgaaaacctgaatagactccagagttccagaatcacagattctgcttacagtcgtctaggt

SEQ ID NO: 18460 - DNA, 80 bp, synthetic construct
  source 1..80: mol_type = other DNA
tgtgaagaaagtaaagaatttaaaaaatgaagacagattttctcaccctgcttatgggtgcttctcgtgctagccttttg

SEQ ID NO: 18461 - DNA, 80 bp, synthetic construct
  source 1..80: mol_type = other DNA
aaagtgctgttttcttgctttttttccgcctttccattgtgtcagacttataaggcaatcagccaactgtgggcatgaaa

SEQ ID NO: 18462 - DNA, 80 bp, synthetic construct
  source 1..80: mol_type = other DNA
tttccaagtatatctttaaggcaaattcttagcagtggagttgctaggtccattgcgtctatggtttaaactagtgcctt

SEQ ID NO: 18463 - DNA, 80 bp, synthetic construct
  source 1..80: mol_type = other DNA
agggaatttaagagttcctgcctttttccttgtctttagcattatatagctgtttaatgtgtgggagtctaatttctttt

SEQ ID NO: 18464 - DNA, 80 bp, synthetic construct
  source 1..80: mol_type = other DNA
caagcatggcaagaatttattggaaaactgcatgtagttgaaaatatgtttagtatatattttgacagctgtgaagtctc

SEQ ID NO: 18465 - DNA, 80 bp, synthetic construct
  source 1..80: mol_type = other DNA
agtagaattgttgggtcacatgatgtagatcagttgaacagagtagattccagaaaagttcacatacacatttcttgaca

SEQ ID NO: 18466 - DNA, 80 bp, synthetic construct
  source 1..80: mol_type = other DNA
atcagggaaatgaaaatttaaacgtaatgagatagctcatatttactggaatggctcaaaaagggcttacaggaattggc

SEQ ID NO: 18467 - DNA, 80 bp, synthetic construct
  source 1..80: mol_type = other DNA
attctaataaccatcctgaagatggtcaggaggcattagttaagaattgaaatgtttggagcttgcctgtgttgatggga

SEQ ID NO: 18468 - DNA, 80 bp, synthetic construct
  source 1..80: mol_type = other DNA
tgctttgcctgtctagtaaattttaatcgtatgttgaaatgtagggagtttggattgttacttcctttaagggtgctgag

SEQ ID NO: 18469 - DNA, 80 bp, synthetic construct
  source 1..80: mol_type = other DNA
ctcacccctaattgtataaatctctcaacatgtttaagcacatttggcattatatcaattttatcttttccaggtgcctt

SEQ ID NO: 18470 - DNA, 80 bp, synthetic construct
  source 1..80: mol_type = other DNA
tttattctgtatattctgttaattcctcggcttcatggtcttctagcccttcttttgcctatcttatggggttgaggatt

SEQ ID NO: 18471 - DNA, 80 bp, synthetic construct
  source 1..80: mol_type = other DNA
atcttccatggaggtatacttcagagtgaatataattttgtttatcctgtgtctctagagctattgactgaaaaagctgt

SEQ ID NO: 18472 - DNA, 80 bp, synthetic construct
  source 1..80: mol_type = other DNA
agaacattggaaacactaattttaccttataaagaaggtttcataaaggaaggcaagtttgagctggggtgaaaaggacc

SEQ ID NO: 18473 - DNA, 80 bp, synthetic construct
  source 1..80: mol_type = other DNA
tagctcttaatgcatatattttaatgccccttccccacatggaatcataagctttcagaactggagagtacctgaaagag

SEQ ID NO: 18474 - DNA, 80 bp, synthetic construct
  source 1..80: mol_type = other DNA
gagacttatcactaccaaaccacaaagaatttaaaagaaactgtcagtaggtataggtggaaggagggcatttatcagag

SEQ ID NO: 18475 - DNA, 80 bp, synthetic construct
  source 1..80: mol_type = other DNA
tcctgagaaagtaggggaagtttagagaactgaagctgcacaaaactaatgtttattttctgttgtgttgtcctgagacc

SEQ ID NO: 18476 - DNA, 80 bp, synthetic construct
  source 1..80: mol_type = other DNA
tgctaaccacactgatatgtaagatctctttctgagccttttattgtttgtaaacatggcctgttaatcattagaaagcc

SEQ ID NO: 18477 - DNA, 80 bp, synthetic construct
  source 1..80: mol_type = other DNA
tcttttagttgtgctgaaagacattatgacaccgccaaatttaattgcagaggtaggtatgaatgtactgtactatgttg

SEQ ID NO: 18478 - DNA, 80 bp, synthetic construct
  source 1..80: mol_type = other DNA
tggaggtttttgtgtaccactgggaaaatgaagttaggcagatgactaagtgaaagctgtcctgctgactccttataatg

SEQ ID NO: 18479 - DNA, 80 bp, synthetic construct
  source 1..80: mol_type = other DNA
ttatttttctctggaatccagtgtttcttttaaatacctgttaagtttgtatgcaacatttctaaagttacctacttgtt

SEQ ID NO: 18480 - DNA, 80 bp, synthetic construct
  source 1..80: mol_type = other DNA
aaaagaaaactcttgggagaacttttacagtgatttaattttgctgttgatatatttctttgggtggtaagtatggcaaa

SEQ ID NO: 18481 - DNA, 80 bp, synthetic construct
  source 1..80: mol_type = other DNA
ggcgcagaacactagatttaagccagggggtcttaaattgtgttacattccttttaaagtctgatggaaggtataaatgt

SEQ ID NO: 18482 - DNA, 80 bp, synthetic construct
  source 1..80: mol_type = other DNA
aagagataagatttctttcaggattgatgacagtcttgcaccctagcgcatactgatgaagagagcagtgggtgaccatg

SEQ ID NO: 18483 - DNA, 80 bp, synthetic construct
  source 1..80: mol_type = other DNA
ctggtaatactatcaattctgtttctcttcagaggtgaggggagactatttgatgaaatcgtaagtcctgtagggtgttg

SEQ ID NO: 18484 - DNA, 80 bp, synthetic construct
  source 1..80: mol_type = other DNA
ggtcttattttgaaaggctcctcagcttatacctttccttacaaatgcttccttacaaatgctaaagcatttaatgactc

SEQ ID NO: 18485 - DNA, 80 bp, synthetic construct
  source 1..80: mol_type = other DNA
cccctttcttttttgaagggagatgaggcagtcatattttggtaaagaatttgtagactttgcagaggtctcttcaaaat

SEQ ID NO: 18486 - DNA, 80 bp, synthetic construct
  source 1..80: mol_type = other DNA
gttaggaactcttgtgtacatgagttcattgagcttattcttaataaagacaaatcttctagaaataatagttgtatctt

SEQ ID NO: 18487 - DNA, 80 bp, synthetic construct
  source 1..80: mol_type = other DNA
gtttcacaaaacgaacagatctgcaaagatcaacctgtcctaagtcatataatctctttgtgtaataataaaaaccccat

SEQ ID NO: 18488 - DNA, 80 bp, synthetic construct
  source 1..80: mol_type = other DNA
tgaggtccagatcctggttttgaatgagataattacgtgcagtcggactgttttctgatcctaaaaatagagacaataat

SEQ ID NO: 18489 - DNA, 80 bp, synthetic construct
  source 1..80: mol_type = other DNA
agctaaaaagcttctatcacctagtgatgttgaagccgttgcaatgcaatgtatcactcacatgtttgtggtaatgctgg

SEQ ID NO: 18490 - DNA, 80 bp, synthetic construct
  source 1..80: mol_type = other DNA
tataccatctaggcttgtgtaagtatattttatgacacagtgatgaaatcatccagatacagtttctcttaagcaacaca

SEQ ID NO: 18491 - DNA, 80 bp, synthetic construct
  source 1..80: mol_type = other DNA
aatacttctatttggccaaagtaagagtacattcaagggaattgtgagaggtaagagtggaaacagaggttggagctgta

SEQ ID NO: 18492 - DNA, 80 bp, synthetic construct
  source 1..80: mol_type = other DNA
tggaatagattggtttgacagaggggaaactctttttgagataggcctatatttagggacaagagaagagacaaccaata

SEQ ID NO: 18493 - DNA, 80 bp, synthetic construct
  source 1..80: mol_type = other DNA
aggcagatttcttgagtccaggagttgagaccagcctaggcaacatggcaaaaccctcgttcctccttaataaataaata

SEQ ID NO: 18494 - DNA, 80 bp, synthetic construct
  source 1..80: mol_type = other DNA
cactaaatatacttctgaggtctacctcctggtctgtgaacataaaggagctgaaagagtaatggctgaagttctttagt

SEQ ID NO: 18495 - DNA, 80 bp, synthetic construct
  source 1..80: mol_type = other DNA
agagatgattagtgtcacacagtgttttaaacagattcttgcaaccctggagttcactgcagtagcaacagaagttagct

SEQ ID NO: 18496 - DNA, 80 bp, synthetic construct
  source 1..80: mol_type = other DNA
tcacttgaggtcaggagttcaagacagcctggccaacatgctgactcacccttccctactgaaaatacaaaagttagcca

SEQ ID NO: 18497 - DNA, 80 bp, synthetic construct
  source 1..80: mol_type = other DNA
agtactgctcttcaaagtactactactttaccttaccttttactgttttgttaagaaaattaggccgggcgcagtggctc

SEQ ID NO: 18498 - DNA, 80 bp, synthetic construct
  source 1..80: mol_type = other DNA
aaattgtctataataaaatcatgctcatctttgaaaaaatattaggagtactacagtggatacctacatacttgctattc

SEQ ID NO: 18499 - DNA, 80 bp, synthetic construct
  source 1..80: mol_type = other DNA
tgcctatggggttcatgggtcagagcgctgttgtgacctttgaataaatgggttgttatgataattgttttaagggagga

SEQ ID NO: 18500 - DNA, 80 bp, synthetic construct
  source 1..80: mol_type = other DNA
ggcagcaagctgaagtatgatgagtaaagaataggaatcaaagtatgtggagtgttagagaaaacctggatttagatcca

SEQ ID NO: 18501 - DNA, 80 bp, synthetic construct
  source 1..80: mol_type = other DNA
gtactatgatttaatactgtagtaaagttttaataaaatatgagctatatgtaattaagtgggaggttgtggggctaggc

SEQ ID NO: 18502 - DNA, 80 bp, synthetic construct
  source 1..80: mol_type = other DNA
tgtgagtgactgttagaggatcttgaatggggataacagacttgatttcataaatactgagatgtcatgataatacttga

SEQ ID NO: 18503 - DNA, 80 bp, synthetic construct
  source 1..80: mol_type = other DNA
aggcaaaaggggagcatggtgagaatgggagcaagaaagagaaggagtggtggggagaaggtgccacccacttttaaatg

SEQ ID NO: 18504 - DNA, 80 bp, synthetic construct
  source 1..80: mol_type = other DNA
tcttgaagttagatttcccagtgaaatttcagtatcacataaagtcttatgaaatggctcattgcactttgaactttgag

SEQ ID NO: 18505 - DNA, 80 bp, synthetic construct
  source 1..80: mol_type = other DNA
gtgaacatgtagtgatttgtattttgtgatctttgccgcatgctagagacttaagaatactatagcaaatatctgtcttc

SEQ ID NO: 18506 - DNA, 80 bp, synthetic construct
  source 1..80: mol_type = other DNA
tattagatctgcaggtgttttgcttactctggcattggtgagacattataagggtaaataatcctgtttgaaggaaaagg

SEQ ID NO: 18507 - DNA, 80 bp, synthetic construct
  source 1..80: mol_type = other DNA
gttaatgaagtttgaatttgattgatctgtatttagagaaggcaacgtcttattattttaaaaccaactatccgccctgt

SEQ ID NO: 18508 - DNA, 80 bp, synthetic construct
  source 1..80: mol_type = other DNA
gtatacaagattactttgccaggtactgttaaaagatgcaatgacatttaagacgtaacatccttaaggatcttattttc

SEQ ID NO: 18509 - DNA, 80 bp, synthetic construct
  source 1..80: mol_type = other DNA
ttttttttttttttaggacaaaatgtttcacttttgggtaaatacattcttcataccaggaccagaggaaacctcagaaa

SEQ ID NO: 18510 - DNA, 80 bp, synthetic construct
  source 1..80: mol_type = other DNA
accatttttttcttcccccttcctatttcttattctacctgattttcccctgttcattcaccacactcgtttctttctct

SEQ ID NO: 18511 - DNA, 80 bp, synthetic construct
  source 1..80: mol_type = other DNA
aaccaacatctccctatcctcccctcccactccctttcccggcctctaataaccacactcttatgagctcaactttttta

SEQ ID NO: 18512 - DNA, 80 bp, synthetic construct
  source 1..80: mol_type = other DNA
ttccctgtgttcatgctttcaaaatacagatgagtgaggaaagtagggagaaggggtaataaaggaagctgagagatcag

SEQ ID NO: 18513 - DNA, 80 bp, synthetic construct
  source 1..80: mol_type = other DNA
gcctgggcaacatcatgaaccccatttctactaaaatacaaaaaattatctgggcatggtggtgtacacctgtagcccta

SEQ ID NO: 18514 - DNA, 80 bp, synthetic construct
  source 1..80: mol_type = other DNA
tattccagttttataaaaagtggagacagactgatgtgtatacgtaggaattttttccttttgtgttctgtcaccaactg

SEQ ID NO: 18515 - DNA, 80 bp, synthetic construct
  source 1..80: mol_type = other DNA
ttttttctttgaagatttatgatgcacttattcaatagctgtcagccgttccacccttttgaccttacacattctattac

SEQ ID NO: 18516 - DNA, 80 bp, synthetic construct
  source 1..80: mol_type = other DNA
cctcaccattgaaatttatatgccaccttgtctttcataaaagctgaaaattgttacctaaaatgaaaatcaacttcatg

SEQ ID NO: 18517 - DNA, 80 bp, synthetic construct
  source 1..80: mol_type = other DNA
gaataaatagcatcaccattctttgctgtggcacaggttataaacttaagtggagtttaccggcagcatcaaatgtttca

SEQ ID NO: 18518 - DNA, 80 bp, synthetic construct
  source 1..80: mol_type = other DNA
ggcttttgtctattattctgtactctgccatcagcatatggaaagcttcatttactcatcatgacttgtgccatataaaa

SEQ ID NO: 18519 - DNA, 80 bp, synthetic construct
  source 1..80: mol_type = other DNA
tgttaagctaggtattttgagactacttccccatcacaacaacaataaaataatcactcataatcctatcacctggagac

SEQ ID NO: 18520 - DNA, 80 bp, synthetic construct
  source 1..80: mol_type = other DNA
atttcctctgttgcatgaggattctcatctgtgcttataatggttagagattttatttgtgtggaatgaagtgaggcttg

SEQ ID NO: 18521 - DNA, 80 bp, synthetic construct
  source 1..80: mol_type = other DNA
tccatttggctactgatggacaaaaaatagaaatgccttcctatggagagtatttttcctttaaaaaattaaaaaggtta

SEQ ID NO: 18522 - DNA, 80 bp, synthetic construct
  source 1..80: mol_type = other DNA
ggcgctcagttgccgggcgggggagggcgcgtccggtttttctcaggggacgttgaaattatttttgtaacgggagtcgg

SEQ ID NO: 18523 - DNA, 80 bp, synthetic construct
  source 1..80: mol_type = other DNA
ccttagaacaataatgcatcgaggccttggggactcaaagccatctgtagtgattgatggagcgtaactctttagaggaa

SEQ ID NO: 18524 - DNA, 80 bp, synthetic construct
  source 1..80: mol_type = other DNA
tttcccttgggaaaatgcagtaatggctactctaaagaattccatgttatgcacacagctttggaagcatactctaatgt

SEQ ID NO: 18525 - DNA, 80 bp, synthetic construct
  source 1..80: mol_type = other DNA
tgcttgaggccaggagtttgagaggagcctgggcaacaaaacaagaccctgtctctaaaacaaattttaaaaaattagcc

SEQ ID NO: 18526 - DNA, 80 bp, synthetic construct
  source 1..80: mol_type = other DNA
acctgattttactgcattatgtcagaaattaaagataccagatcatgtcagagagagagcttggttaacttgggagaaag

SEQ ID NO: 18527 - DNA, 80 bp, synthetic construct
  source 1..80: mol_type = other DNA
ggagcaaataattactagagttttatatgtactggggcaatagtataagaattttacatagccgggcatggtggtgtgtg

SEQ ID NO: 18528 - DNA, 80 bp, synthetic construct
  source 1..80: mol_type = other DNA
tgtgtaaaatgtgaaatgttcatttaacagatgaagacactgagtagagtgaggttgagtaacttgaccaaggtccctag

SEQ ID NO: 18529 - DNA, 80 bp, synthetic construct
  source 1..80: mol_type = other DNA
tcttatttcctaatggagctcataatggggactaggatgtgtgaaattatttatggctaggtactggaggaaggtaagaa

SEQ ID NO: 18530 - DNA, 80 bp, synthetic construct
  source 1..80: mol_type = other DNA
agtgattttgatgtagtaatgtttgttaaaattcttatttttaagtactttagcatcagaaaagttgtttatgcatacat

SEQ ID NO: 18531 - DNA, 80 bp, synthetic construct
  source 1..80: mol_type = other DNA
tactaattattgagggagaaatatgaagcctccaactataattagaatggtccttttaaattctgttttttattaatgta

SEQ ID NO: 18532 - DNA, 80 bp, synthetic construct
  source 1..80: mol_type = other DNA
gagcattttttatgcatgttttagtgcctctttctgactagtctcttcttttctccatccaatccatcctgtgcctgatt

SEQ ID NO: 18533 - DNA, 80 bp, synthetic construct
  source 1..80: mol_type = other DNA
tctaagaaggccttgactaacccaaggtcatgaagacttattctgtgctttcttctaaaagtcatatggtttttagttct

SEQ ID NO: 18534 - DNA, 80 bp, synthetic construct
  source 1..80: mol_type = other DNA
ttcgtttaagtctttctttcaccagtgttttcagttttcagagtataaatcttactaaatatttattcttggtgatatta

SEQ ID NO: 18535 - DNA, 80 bp, synthetic construct
  source 1..80: mol_type = other DNA
acttccaataccatgttgaataggagtggtgagagagagcatccttattttgttctgcctttcaaggggaatgctttcaa

SEQ ID NO: 18536 - DNA, 80 bp, synthetic construct
  source 1..80: mol_type = other DNA
cattgtgctttaaatcgttttttccagcggacagctgtgactgcagttttcaaatgtgctctggcctccaaggaccaggg

SEQ ID NO: 18537 - DNA, 80 bp, synthetic construct
  source 1..80: mol_type = other DNA
ccccgcctccactccgcatctctactttccgagcgcagcgcgcacgggttccggtgggtgaagtcgctcgagggcagggt

SEQ ID NO: 18538 - DNA, 80 bp, synthetic construct
  source 1..80: mol_type = other DNA
atggattcccttcagaggcggaggcagaggcgcatcccctcactcggaaggccggggccgtgtcctggctcctgacgccc

SEQ ID NO: 18539 - DNA, 80 bp, synthetic construct
  source 1..80: mol_type = other DNA
caagattgcttccgcgcgcgtcagttcagcggacgtgtctgcctggcacgaggaccgttctacaaactcgttcctggaag

SEQ ID NO: 18540 - DNA, 80 bp, synthetic construct
  source 1..80: mol_type = other DNA
gccactgcctgcagccctggaaggctgggctgcgcctggctggcccctgccagccccgggctgtgcggctccactctttg

SEQ ID NO: 18541 - DNA, 80 bp, synthetic construct
  source 1..80: mol_type = other DNA
ttacgcatagatttattcttgacctgaccaacgagctcttgaaattctctttgcaactaggtcgactgtgaaactgcagc

SEQ ID NO: 18542 - DNA, 80 bp, synthetic construct
  source 1..80: mol_type = other DNA
ccagcctggacgacaggagtgaaactgcattgcaaaaacagcaacaaaaaaaatccattcatctagtttgtccacttttt

SEQ ID NO: 18543 - DNA, 80 bp, synthetic construct
  source 1..80: mol_type = other DNA
gcctttcacagaatggactgggaagtgttccctcctcttctgttttgatggggcagtttgtgaagaatagatattaattc

SEQ ID NO: 18544 - DNA, 80 bp, synthetic construct
  source 1..80: mol_type = other DNA
ttcactcttggccaatattatttactacagcgtgttttcttcttcatgaggaaccatggaagaaatctttggtccaagac

SEQ ID NO: 18545 - DNA, 80 bp, synthetic construct
  source 1..80: mol_type = other DNA
tggagcttcattcatgatggcatatgcatcaacaatttatttattctcattactgagtagtatctcactgcatgggattt

SEQ ID NO: 18546 - DNA, 80 bp, synthetic construct
  source 1..80: mol_type = other DNA
ttcctttccctaagccacccacttctcttcagaggcaactaataaaagtttctagttttgcattattctacaccttgctt

SEQ ID NO: 18547 - DNA, 80 bp, synthetic construct
  source 1..80: mol_type = other DNA
catttgggtcaagaaaagaatatcagaagaggtatgttattttaacaaacaggaaaatggacaaaaatggatagtttgcc

SEQ ID NO: 18548 - DNA, 80 bp, synthetic construct
  source 1..80: mol_type = other DNA
ggtggtttgtattttaaaagaaacagttttcttatgattcgcttcaagttctggtggaaatgcttacaggaactagctaa

SEQ ID NO: 18549 - DNA, 80 bp, synthetic construct
  source 1..80: mol_type = other DNA
tggagcaagagttggaacagtttctttaggcttacttgatccaagtttgatggatatgggtgatgctttctttgtcgtct

SEQ ID NO: 18550 - DNA, 80 bp, synthetic construct
  source 1..80: mol_type = other DNA
agttttattcaagatatacaaagctgccaactagtgcttttcatcagcatcaggtaaattgtgttactatactgcgttga

SEQ ID NO: 18551 - DNA, 80 bp, synthetic construct
  source 1..80: mol_type = other DNA
cagtaggaccccagataagtaacctaactttacatctctcagaactaggtagaaaaagaacaaataagcccaaagtaata

SEQ ID NO: 18552 - DNA, 80 bp, synthetic construct
  source 1..80: mol_type = other DNA
gacaaggatcatttgtcacttgcattcaacatagtactggaaatctagccagagatattaggcaagaaaaagaaataaaa

SEQ ID NO: 18553 - DNA, 80 bp, synthetic construct
  source 1..80: mol_type = other DNA
tacatacaaacagtaaaaaggtggttagcaggggtggggagcctggggagaatgtggagatgtttgtcaaagggtacaaa

SEQ ID NO: 18554 - DNA, 80 bp, synthetic construct
  source 1..80: mol_type = other DNA
gtatgtgaatgtagtctgtttctctcaaaataggtactccgctcacctgttttcaaaccatggttgaccatgggaaactg

SEQ ID NO: 18555 - DNA, 80 bp, synthetic construct
  source 1..80: mol_type = other DNA
gctggacactacaaggctcttggggtaaagtagtgaattagatacaatatttctgccttcaggatgcttacatattcata

SEQ ID NO: 18556 - DNA, 80 bp, synthetic construct
  source 1..80: mol_type = other DNA
ttgtgacagcatacatagtagtacttttctgatagttccaggatgatttatgtcaccacttggtggagctcttttataag

SEQ ID NO: 18557 - DNA, 80 bp, synthetic construct
  source 1..80: mol_type = other DNA
ttaaaagaggaatcaggctggaaagcagaatgagatatgagaatcatctgtatatgagatgatgagggctgtaggagtgg

SEQ ID NO: 18558 - DNA, 80 bp, synthetic construct
  source 1..80: mol_type = other DNA
ctcttctctagttcttttaattgtgatgttagggtgtcaattttggatgtttcctgctttctcttgtgggcatttagtgc

SEQ ID NO: 18559 - DNA, 80 bp, synthetic construct
  source 1..80: mol_type = other DNA
gaatttgatcctgtcattatgatgttagctggtgattttgctcgttagttgatgcagtttcttcctagcctcgatggtct

SEQ ID NO: 18560 - DNA, 80 bp, synthetic construct
  source 1..80: mol_type = other DNA
cttcttctttcaaatcgtcaaagtcattctccatccagctttgttccgttgctagcgaggagctgcgttcctttggaggg

SEQ ID NO: 18561 - DNA, 80 bp, synthetic construct
  source 1..80: mol_type = other DNA
gtgaggtgatgcctcgccctgctttggctcacacttggttggctgcactcactttcctgcacccactgtctgacaagccc

SEQ ID NO: 18562 - DNA, 80 bp, synthetic construct
  source 1..80: mol_type = other DNA
acacaagctgcatctgaaataaaggttacattttgctcataggaaagttcttcaggtccttaaaaatcagaacctacttg

SEQ ID NO: 18563 - DNA, 80 bp, synthetic construct
  source 1..80: mol_type = other DNA
gattgtgccattttacattttcaccagtgatgtttaagtgttccattgcactacatcctcactgacccttgatattgtca

SEQ ID NO: 18564 - DNA, 80 bp, synthetic construct
  source 1..80: mol_type = other DNA
atgaatagagcaaggaaagaataagcgaataagaacgtgggcttgtttttttcaaacaaattatatgttatggactctag

SEQ ID NO: 18565 - DNA, 80 bp, synthetic construct
  source 1..80: mol_type = other DNA
attgttttaactagaggatattataactaaatgctttttttcagattatatattgatttgaacatgctacaatacttgaa

SEQ ID NO: 18566 - DNA, 80 bp, synthetic construct
  source 1..80: mol_type = other DNA
ataattcaattctaaaatcattggtggggcaaataaagtatgcattttggtgtgtatctctgacaggagggtgccacagg

SEQ ID NO: 18567 - DNA, 80 bp, synthetic construct
  source 1..80: mol_type = other DNA
agaggtgtaagttgaaggctaattatttttgcaaaaagtaattccttccaaaggatatagtagtgatttgatgtagagct

SEQ ID NO: 18568 - DNA, 80 bp, synthetic construct
  source 1..80: mol_type = other DNA
aaataagcaattgtgtaatagcatggtaaagggagaagggtaaaagaggcatggccctattctggagagaatgaggatgg

SEQ ID NO: 18569 - DNA, 80 bp, synthetic construct
  source 1..80: mol_type = other DNA
gggactcattggtaggagtgatttggggtacagttctgattttttttcctgctatagtaatttcgactggatgcttccaa

SEQ ID NO: 18570 - DNA, 80 bp, synthetic construct
  source 1..80: mol_type = other DNA
ggacatgtgaacttatatatttgacacaacccagcagttcgtaagtagttcacagaatgttatttttcacttaaaaaaaa

SEQ ID NO: 18571 - DNA, 80 bp, synthetic construct
  source 1..80: mol_type = other DNA
attccaacaagtgaatgtctctggaaagattatcaaggcaaagtgttaaattggcaaactaaagtcatccaaaccttcat

SEQ ID NO: 18572 - DNA, 80 bp, synthetic construct
  source 1..80: mol_type = other DNA
agaaaaattatctaaaatccacccagggataatcggcattaaaattacataattgggatgcagttaaggtatagaatttt

SEQ ID NO: 18573 - DNA, 80 bp, synthetic construct
  source 1..80: mol_type = other DNA
taagtgcctacatcccaaaagaggaaaacatctttttttaaaaaaacttttaggttcaggggtacatgtgatggtttgtt

SEQ ID NO: 18574 - DNA, 80 bp, synthetic construct
  source 1..80: mol_type = other DNA
gtttgcaaaatttttccccattctgtaggttgttcatttactctgttgattgtttcttttgctgtgcagaagctcttgag

SEQ ID NO: 18575 - DNA, 80 bp, synthetic construct
  source 1..80: mol_type = other DNA
tatcctgaaactttgctgaagttgttgatcagctgaaggagctttttggctctaagactacagggttttctagatatagc

SEQ ID NO: 18576 - DNA, 80 bp, synthetic construct
  source 1..80: mol_type = other DNA
aaattgacaagcctttagctagattaactaaggaaaaaagagagaagatacaaataagatcagaaatgaaaaaggagaca

SEQ ID NO: 18577 - DNA, 80 bp, synthetic construct
  source 1..80: mol_type = other DNA
gatataaagggaatccagattggaaagaaagaagtcaagttatccttgtttgcagctgatacaatcttatatttggaaga

SEQ ID NO: 18578 - DNA, 80 bp, synthetic construct
  source 1..80: mol_type = other DNA
aacgagatcatatcaagttaaaaagcttctacacagcaaaggatacaatgaatgaagtgaagagacaacccacagaatgg

SEQ ID NO: 18579 - DNA, 80 bp, synthetic construct
  source 1..80: mol_type = other DNA
taaaaagatgggtagttgagtgcattcacgaatataattttctaaaactaggttcatattacagtgctacctttaaaata

SEQ ID NO: 18580 - DNA, 80 bp, synthetic construct
  source 1..80: mol_type = other DNA
tttctggcattgaacattgctgttgagaaagctgagactagcgtaattccgctcctcatttacttcctgaagaatttttt

SEQ ID NO: 18581 - DNA, 80 bp, synthetic construct
  source 1..80: mol_type = other DNA
aatcagcctcagctggttaagttcttagtgcaagcactcatagggcattttcttcttttagattatctttcagattgggt

SEQ ID NO: 18582 - DNA, 80 bp, synthetic construct
  source 1..80: mol_type = other DNA
tgaggataccgtttgagttagtctcgctcagtcagtctctcatttgatattggtaccagcactttaatacctaataaaat

SEQ ID NO: 18583 - DNA, 80 bp, synthetic construct
  source 1..80: mol_type = other DNA
ctgatagtgattgttgaatgaataaatttatggatatactctaccctgcgattttctctcatacaaagatctgaatctct

SEQ ID NO: 18584 - DNA, 80 bp, synthetic construct
  source 1..80: mol_type = other DNA
aaaaattaagtatggagcagaattttgaagatgtgttgaacatggtttggcagagaaggcagaaaccttcatttagcaga

SEQ ID NO: 18585 - DNA, 80 bp, synthetic construct
  source 1..80: mol_type = other DNA
gtttttgctgatcatattctgtggtatagtttaacatgttcttctgtcctctcaatttcttgtaagttgttgattggatc

SEQ ID NO: 18586 - DNA, 80 bp, synthetic construct
  source 1..80: mol_type = other DNA
attgttcttatctaatttaccacttttacagaaacagctgttatacccattaatggttcacctcgaacacccaggcgagg

SEQ ID NO: 18587 - DNA, 80 bp, synthetic construct
  source 1..80: mol_type = other DNA
cagggactgatagcttattatttacagcgtctacattagactttgggatatctggtactattgcttctttcctttttacc

SEQ ID NO: 18588 - DNA, 80 bp, synthetic construct
  source 1..80: mol_type = other DNA
gttggcttccagtcaacagtaggctgttagttaaattttgggtactcaaaagtaatcgataggtctgtagtctcagctac

SEQ ID NO: 18589 - DNA, 80 bp, synthetic construct
  source 1..80: mol_type = other DNA
aatgcttaatatatgtcaggcacgtgctagatactatggatacagagatttcactctcagtcactatccttaaagtgcta

SEQ ID NO: 18590 - DNA, 80 bp, synthetic construct
  source 1..80: mol_type = other DNA
ctccttttaaaatgcaattttacttctctgaggttggaatcactttggcgttaaaagtcacagtagaaggcatgccaata

SEQ ID NO: 18591 - DNA, 80 bp, synthetic construct
  source 1..80: mol_type = other DNA
ctgtgcctctgtgtgctgagagatgtaatgacatgtaaaggataattgtcagtgacttttttctttcaaggttgaaaatc

SEQ ID NO: 18592 - DNA, 80 bp, synthetic construct
  source 1..80: mol_type = other DNA
caccacgaaaaagtaaccttgatgaagaggtgaatgtaattcctccacacactccagttaggtatgaattttcctacttt

SEQ ID NO: 18593 - DNA, 80 bp, synthetic construct
  source 1..80: mol_type = other DNA
ctagaaatgtaaatcagttacattcaccttgctgttaaacccactgactgcttcccattgcaattggtatacagtgcaaa

SEQ ID NO: 18594 - DNA, 80 bp, synthetic construct
  source 1..80: mol_type = other DNA
aaagcaatgtctgaactgaattttgaaacatgcaaaggcctgtgtcacaggataaagattttagggagtgggaacagcat

SEQ ID NO: 18595 - DNA, 80 bp, synthetic construct
  source 1..80: mol_type = other DNA
aggggctgccagccatgtcaattcattagcacacaaaaggacatcactggagtttctaagtattttacgagttgtatgtc

SEQ ID NO: 18596 - DNA, 80 bp, synthetic construct
  source 1..80: mol_type = other DNA
aaggttggggactgctgttctagagaatgggaaagtatgattggggagtgcagagattgaagcgaagaaagctgagggag

SEQ ID NO: 18597 - DNA, 80 bp, synthetic construct
  source 1..80: mol_type = other DNA
ctttgcataattaaagtgtcccaaatgttcagctactccaaaattgtaacattgatatttaccatatactgcccccttca

SEQ ID NO: 18598 - DNA, 80 bp, synthetic construct
  source 1..80: mol_type = other DNA
acctatttgccttgctcaccattcttccttgcaacttatgcctcacttctgagataatttttttcttcttcagatatatc

SEQ ID NO: 18599 - DNA, 80 bp, synthetic construct
  source 1..80: mol_type = other DNA
catctttatgtccatgagtacctgatatttagctcccactcattagtgagaacatgcagtatttggttttctttttctgt

SEQ ID NO: 18600 - DNA, 80 bp, synthetic construct
  source 1..80: mol_type = other DNA
ccactgtgcctggccataatcttaattttagaaactttatttttgaatgtatatattgaatgtgttttatgtataaagga

SEQ ID NO: 18601 - DNA, 80 bp, synthetic construct
  source 1..80: mol_type = other DNA
atccagtgaaatgatattgtctgcttatgttcagtagttgtggttacctagttattatggaagtgtttccacatttttat

SEQ ID NO: 18602 - DNA, 80 bp, synthetic construct
  source 1..80: mol_type = other DNA
tcaggaaatctaaagctaatataataggtaagagtatgggccatggagtgacagccctgggtttatatttggttctacca

SEQ ID NO: 18603 - DNA, 80 bp, synthetic construct
  source 1..80: mol_type = other DNA
aggatcaggattaacaataccactgtcttctgcctccaaattctgtcccaagtcttcagggacaataaaatgcatagagc

SEQ ID NO: 18604 - DNA, 80 bp, synthetic construct
  source 1..80: mol_type = other DNA
agacaagctagcttttgtgttgtcttggcggccatatttgtaagaagggtgagaagtatgttttaagaaaaggcttttta

SEQ ID NO: 18605 - DNA, 80 bp, synthetic construct
  source 1..80: mol_type = other DNA
tctgagtatactggtatactgaatccaaaaaaggtactttttgaaatccctccgaagacctttgagattgtagagtgcca

SEQ ID NO: 18606 - DNA, 80 bp, synthetic construct
  source 1..80: mol_type = other DNA
atgataaaacatttagaacgatgtgaacatcgaatcatggaatcccttgcatggctctcagtaagtagctaaataattga

SEQ ID NO: 18607 - DNA, 80 bp, synthetic construct
  source 1..80: mol_type = other DNA
tgattttttcttgtaaatttgtttgagttctttgtagattctggatattagccctttgtcagatgggtagattgtaaaag

SEQ ID NO: 18608 - DNA, 80 bp, synthetic construct
  source 1..80: mol_type = other DNA
aggggcacaaattatattgtctaggattctctttatagcattataactattgataaggcttttgttttaataaaagtggc

SEQ ID NO: 18609 - DNA, 80 bp, synthetic construct
  source 1..80: mol_type = other DNA
atacgccatatgccttgaattgagagagatactgtgaagatacaaaaaagataaaggcttggaaaattgtggaggatgta

SEQ ID NO: 18610 - DNA, 80 bp, synthetic construct
  source 1..80: mol_type = other DNA
tgtgtggggaactgggttcagcatttttgcttgacagccttgagataaaataaatccataaggaaaaagcccacttctgt

SEQ ID NO: 18611 - DNA, 80 bp, synthetic construct
  source 1..80: mol_type = other DNA
aattatccagcatagaaagaaggtcaaagaaaccaaatgctggtttatagaataggagctttaggccaggtgtgtggtgc

SEQ ID NO: 18612 - DNA, 80 bp, synthetic construct
  source 1..80: mol_type = other DNA
gaacccgtcactcttttcgtgaaacacatgtgttacttgtaagactgataagcaattgtgtttatttatgcttgggtatg

SEQ ID NO: 18613 - DNA, 80 bp, synthetic construct
  source 1..80: mol_type = other DNA
ataggaagtagattattggttttctaaggctggtggggaggactaggtgttttgaggatgatggctagagagtatggttt

SEQ ID NO: 18614 - DNA, 80 bp, synthetic construct
  source 1..80: mol_type = other DNA
taggctaagattatggaccataaaaaatgccacccttttttgacagtttatcttgtgccaggcactttggtgagcacttc

SEQ ID NO: 18615 - DNA, 80 bp, synthetic construct
  source 1..80: mol_type = other DNA
cattacaaagtctgagtgagtgcttgctcactcagacttttcagataggagctgaaaagttttagcaacaatgaagtcac

SEQ ID NO: 18616 - DNA, 80 bp, synthetic construct
  source 1..80: mol_type = other DNA
aggaggttgtagtcaaagagttgtttcaccttagaatttctggagacagaacatttctgggtagtttactgtattttaag

SEQ ID NO: 18617 - DNA, 80 bp, synthetic construct
  source 1..80: mol_type = other DNA
atagtatatttccattttcccttttccaacctttgggctgttgttgtcatacattttgcttcgacagaagttataagctc

SEQ ID NO: 18618 - DNA, 80 bp, synthetic construct
  source 1..80: mol_type = other DNA
gctgtatctttttcctgcaggtttttctttctgtatttcatgttgaataccttctaaagctatgtcttcaagtttattaa

SEQ ID NO: 18619 - DNA, 80 bp, synthetic construct
  source 1..80: mol_type = other DNA
cagagcagtctttaatcaatagccgattttccttcactatccaggcattgctcttctgagtactctactgaatatcccat

SEQ ID NO: 18620 - DNA, 80 bp, synthetic construct
  source 1..80: mol_type = other DNA
ggtacgtcacataaacattgagtctcctttaaatgtgtcaaatgtagctgacttactaattggattctgtcatactcttt

SEQ ID NO: 18621 - DNA, 80 bp, synthetic construct
  source 1..80: mol_type = other DNA
ttgaaattctcgctgccatcacagcagtctgaggtcgacctgggatggtagagctaggtagggggaggggcattccccat

SEQ ID NO: 18622 - DNA, 80 bp, synthetic construct
  source 1..80: mol_type = other DNA
agtcaggggcctatagataaaactcccatctacctgggacagagcacgtgggggaaggcgcagctgtggacacatcttca

SEQ ID NO: 18623 - DNA, 80 bp, synthetic construct
  source 1..80: mol_type = other DNA
gttgaaatgaaggaaaaaatattaagagcagccactgctcaaggaaataagagagggcacaaacaaatggcaaaacattc

SEQ ID NO: 18624 - DNA, 80 bp, synthetic construct
  source 1..80: mol_type = other DNA
aagagcttctgcacagcaaaagaaactatcttcagagtgaacaggcaacctacagaatgggagaaaatttttgcaatgta

SEQ ID NO: 18625 - DNA, 80 bp, synthetic construct
  source 1..80: mol_type = other DNA
tatacctatgtaacaaacctgcacattctgcacatgtatcctagaacttaaagtataataaaaaaacagaaaatatttaa

SEQ ID NO: 18626 - DNA, 80 bp, synthetic construct
  source 1..80: mol_type = other DNA
tgatgggaagcaaacacaaaagggagaacagtctgtggctctgaaaaaaccaaaaaggatatctgttgtatgtttgtatg

SEQ ID NO: 18627 - DNA, 80 bp, synthetic construct
  source 1..80: mol_type = other DNA
tcacccagttggcatttgaactcatattggtttgattccaaattccatactggtttctagtaaaggtctctgtcactgta

SEQ ID NO: 18628 - DNA, 80 bp, synthetic construct
  source 1..80: mol_type = other DNA
ggtatgcctaaagtcatcttctatacgaatgcaaaaatgtaacgacaaagaagggaaaataaaagaaggcaatatcttag

SEQ ID NO: 18629 - DNA, 80 bp, synthetic construct
  source 1..80: mol_type = other DNA
tgtgtccacaaaactggttggtgacagagccagaattttaactcaggctatctggttccagagactatacttttagcctc

SEQ ID NO: 18630 - DNA, 80 bp, synthetic construct
  source 1..80: mol_type = other DNA
tgttgctttagttatgaatcatgtcagtaattaccctgagggtggtgttagttcactattcaagtacaaacaagaaggga

SEQ ID NO: 18631 - DNA, 80 bp, synthetic construct
  source 1..80: mol_type = other DNA
atagtgtacacttttagattggcatctgatttagttgaacccacatattttaacggggtcttctgaaaataaacgtttgc

SEQ ID NO: 18632 - DNA, 80 bp, synthetic construct
  source 1..80: mol_type = other DNA
atgtaaaaacactattttttagcagcagtcaaagggcttaagtagtatgactttttgtgtaacttggattgtgcaattgc

SEQ ID NO: 18633 - DNA, 80 bp, synthetic construct
  source 1..80: mol_type = other DNA
cttcctctttactaatggattataaaaagatgccgtccggacacagcaaccctaagcttggtatgcagagtttaggctga

SEQ ID NO: 18634 - DNA, 80 bp, synthetic construct
  source 1..80: mol_type = other DNA
agcttccagagagaaaaagtaagctattttaggggaatgagatccagatcagcacagaagttctcattaggaatactgga

SEQ ID NO: 18635 - DNA, 80 bp, synthetic construct
  source 1..80: mol_type = other DNA
aaccccacccttgttttttggtttatctttcctgtgtttctttttataaaaataagcaggtatgcacgttttattttgcc

SEQ ID NO: 18636 - DNA, 80 bp, synthetic construct
  source 1..80: mol_type = other DNA
gttttaattctttcagtatccaaattctctcccacagggcctttgcctgtggtgcttgccttgccaccattaagtaacta

SEQ ID NO: 18637 - DNA, 80 bp, synthetic construct
  source 1..80: mol_type = other DNA
aggaaagccccaaaaagctttttaaaaagtttgtttttggagtctttaagatttcatccctgcctaagcactgtttataa

SEQ ID NO: 18638 - DNA, 80 bp, synthetic construct
  source 1..80: mol_type = other DNA
tgaaaaattttctcagcttactgtgttcctttgaagggagttaatgtgggaaggaagattagtcaaatcatctaccgttt

SEQ ID NO: 18639 - DNA, 80 bp, synthetic construct
  source 1..80: mol_type = other DNA
ctctaacttggaactcctgggctgaaggcattaaagatgtattttgctttaggtttatctaaaggaaaccatggatccct

SEQ ID NO: 18640 - DNA, 80 bp, synthetic construct
  source 1..80: mol_type = other DNA
gaagagtgaaggaaaagaaaatatttacagtcatgcatcacgtaatagcattttggtcaatgaccgcataaacgatggtg

SEQ ID NO: 18641 - DNA, 80 bp, synthetic construct
  source 1..80: mol_type = other DNA
tggaaaaatagtttgtccaaaaagacacttttcacagttgaaggaacttgaaagttctgtcccagtgagtcctaatggtt

SEQ ID NO: 18642 - DNA, 80 bp, synthetic construct
  source 1..80: mol_type = other DNA
cctccgatcacagttaaccacacgccagtgcaaacaatctttgcatttcttttggttcttagagtctttgacttaaatgg

SEQ ID NO: 18643 - DNA, 80 bp, synthetic construct
  source 1..80: mol_type = other DNA
taatatgacatcacaggaagaagaggctgggtttggacaaagaaactttcagcccagtttgtttgcacttcctttaatct

SEQ ID NO: 18644 - DNA, 80 bp, synthetic construct
  source 1..80: mol_type = other DNA
attttaggttcatagtcttatcttccttcttcctcccagctcttcccttaaccccttaatatgacattaactatatattg

SEQ ID NO: 18645 - DNA, 80 bp, synthetic construct
  source 1..80: mol_type = other DNA
aagatgtatgtgtgtgttcttattagaaggctggtagaagctgagtgagcattaatgaaaaaaggagtggttaataagct

SEQ ID NO: 18646 - DNA, 80 bp, synthetic construct
  source 1..80: mol_type = other DNA
taactctgagaatcaacttatttcttatatggattttttggggggagcgaaaattaaacagagccagatagatgttaaaa

SEQ ID NO: 18647 - DNA, 80 bp, synthetic construct
  source 1..80: mol_type = other DNA
gtggttttcacctcacagtgtaagcaaagccaccgggaagtttgaactgggtggagcccactgtagcccaactgcttctc

SEQ ID NO: 18648 - DNA, 80 bp, synthetic construct
  source 1..80: mol_type = other DNA
agtatcaacagccaaagcagaagaaaggatatcagagattgaagatcacctttatgaaataaagtgtgaagacaagatta

SEQ ID NO: 18649 - DNA, 80 bp, synthetic construct
  source 1..80: mol_type = other DNA
ctaatgggcatcaactaatgggcaaactaactggctagcatcataatgacaggatcagattcacatataacaatattaac

SEQ ID NO: 18650 - DNA, 80 bp, synthetic construct
  source 1..80: mol_type = other DNA
ggagaaagcagaaaagatgtaaaattgacaccctaacatcacaattaaaagaactagagaagcaagagcaaactaattca

SEQ ID NO: 18651 - DNA, 80 bp, synthetic construct
  source 1..80: mol_type = other DNA
ctatttagaaaaccccattatctcagcccaaaatctccttaagctgataagcaacttcagcaaagtctcaggatacaaaa

SEQ ID NO: 18652 - DNA, 80 bp, synthetic construct
  source 1..80: mol_type = other DNA
tacagaatgggagaaaatttttgcgatctatccatctgacaaagggctaaagtccagaatctacaaggaacttaaacaaa

SEQ ID NO: 18653 - DNA, 80 bp, synthetic construct
  source 1..80: mol_type = other DNA
tttttaggactgttgccataatgaccttgtagactgatttgaaatatagtgtatcagctttggcaacatagggaaaccct

SEQ ID NO: 18654 - DNA, 80 bp, synthetic construct
  source 1..80: mol_type = other DNA
gagagagtatgtgagacttaaaacagaaataaattgatttaagttcaaaagaaagtgtgagccaggcatagtggtacact

SEQ ID NO: 18655 - DNA, 80 bp, synthetic construct
  source 1..80: mol_type = other DNA
atgggaatgatggttgaagcaggttcaaacaagtagggaaaggaaatcaagaggagtgaaaatgttattgtggtaagatt

SEQ ID NO: 18656 - DNA, 80 bp, synthetic construct
  source 1..80: mol_type = other DNA
aaggctgaatttggtcataaaaccttagttgggtaaggctaggtgggttgtagctttcaaaaatttttcacctagtttag

SEQ ID NO: 18657 - DNA, 80 bp, synthetic construct
  source 1..80: mol_type = other DNA
accttaccttgggcaaactctgccctgaactttaagatggatatgacatgcccttttgaccttatgaagagttttcagaa

SEQ ID NO: 18658 - DNA, 80 bp, synthetic construct
  source 1..80: mol_type = other DNA
cttctggtgagtcctgaggaagtttatattaatggcagaagtcggaggggaaacaggcatgtcacgtggtgacaatagga

SEQ ID NO: 18659 - DNA, 80 bp, synthetic construct
  source 1..80: mol_type = other DNA
tccagcactggggagcacacttcaacacgagtcatcttctaccaaacctcacctccagcactggggagcacacttcaaca

SEQ ID NO: 18660 - DNA, 80 bp, synthetic construct
  source 1..80: mol_type = other DNA
aagttaaaaaggattggtctctcaggatgctcctggaagctgcatgcttgtggctataaagctattctctgatatacctg

SEQ ID NO: 18661 - DNA, 80 bp, synthetic construct
  source 1..80: mol_type = other DNA
ataaaggccataagagaatacttgaacatgtgccaggcagtttttctgggacaaatctatacatttaatgccaatccagt

SEQ ID NO: 18662 - DNA, 80 bp, synthetic construct
  source 1..80: mol_type = other DNA
ggctgcagtaggccatgccactgtacttcagcctgggtgacagcccaactctaacaattaaaataaaataatatatttaa

SEQ ID NO: 18663 - DNA, 80 bp, synthetic construct
  source 1..80: mol_type = other DNA
tttgagggtttcctgtctatactagaagatacgagcactactccagaaaggttagaaacaaaagaccaaaggacggcttc

SEQ ID NO: 18664 - DNA, 80 bp, synthetic construct
  source 1..80: mol_type = other DNA
cccagatcaacagttccatttcagtcacattccaccctgacttgtctcttctcaccattcggtgattaggttcatgtctt

SEQ ID NO: 18665 - DNA, 80 bp, synthetic construct
  source 1..80: mol_type = other DNA
actccctcagagtacctgctggagatgaatctgtaaaaaatttttgttcagagaatttctgccactaaataagtcttaaa

SEQ ID NO: 18666 - DNA, 80 bp, synthetic construct
  source 1..80: mol_type = other DNA
tcatttttcttcaggtgcttttatccaacaagcctaagactcctaagattcccttccccattaggaagctccaggcaagc

SEQ ID NO: 18667 - DNA, 80 bp, synthetic construct
  source 1..80: mol_type = other DNA
atcaggatgatagctaatgatattgattaacctttccctgtttatttgtgacctgtatttcctctctggtgaaatttctc

SEQ ID NO: 18668 - DNA, 80 bp, synthetic construct
  source 1..80: mol_type = other DNA
ttggtgtccagttggaaatatggatctagaacttgaaagcatagttttagtcagaaatgtagacttaggaataatataga

SEQ ID NO: 18669 - DNA, 80 bp, synthetic construct
  source 1..80: mol_type = other DNA
gggagtggctttactgtgtgattttgactcatgtttcctcatgagagattcttaaattgtcaaccaaggctgcagctagt

SEQ ID NO: 18670 - DNA, 80 bp, synthetic construct
  source 1..80: mol_type = other DNA
tattttaagaactccctgaaagtcccatctgaaccctggtagtcacctgtctaaaatccttcagcgagtttatattttgc

SEQ ID NO: 18671 - DNA, 80 bp, synthetic construct
  source 1..80: mol_type = other DNA
actagtatagcagctaacggcacaagttttagaaacaggtagacttgggtttgaatcactgctccatcacttatcagcca

SEQ ID NO: 18672 - DNA, 80 bp, synthetic construct
  source 1..80: mol_type = other DNA
atagggtaggaaggagatagaatagtaggattacattagaatctgcttaggagcttttcttacatgtagatattctctct

SEQ ID NO: 18673 - DNA, 80 bp, synthetic construct
  source 1..80: mol_type = other DNA
taggccattgatagtctaagcttgaaattaatcattagattttctgaactcttattacactggatctgttcagtctgctt

SEQ ID NO: 18674 - DNA, 80 bp, synthetic construct
  source 1..80: mol_type = other DNA
tgtttatttctgacttttaaactcgaattcacccttcttgtgtttttctattcagtcgtaacccactccttctacatcta

SEQ ID NO: 18675 - DNA, 80 bp, synthetic construct
  source 1..80: mol_type = other DNA
ggattactgttttgaaagacttaaaaaaaatgcttagctattttttagctaagaaaaaagattcctttttcagtaaatgg

SEQ ID NO: 18676 - DNA, 80 bp, synthetic construct
  source 1..80: mol_type = other DNA
tattgctgaaataaaaacccagaacatagtgatgtgtaggaaaaaactctctcaaaccatgtttttcttctgctctcata

SEQ ID NO: 18677 - DNA, 80 bp, synthetic construct
  source 1..80: mol_type = other DNA
gagggtcttaaagacacacaatttacaatgatgggggaaaaattagagtcctgccttggaacaggttaaaggagggcaag

SEQ ID NO: 18678 - DNA, 80 bp, synthetic construct
  source 1..80: mol_type = other DNA
tgaatttgtcatcacatacttatttccttgtttgtgtgcctcttctcaccagaccctgagcaccgtgtaagtaggaacaa

SEQ ID NO: 18679 - DNA, 80 bp, synthetic construct
  source 1..80: mol_type = other DNA
agagtgttagagcatgaggtctgagaggtatcaaggggccagaactcatgtagtgttttgtaaaccaagataaggcattt

SEQ ID NO: 18680 - DNA, 80 bp, synthetic construct
  source 1..80: mol_type = other DNA
tggctctacttcctagcatagacatacaacatatactgggtggatggatggataactaggcatacagtcatacgtttgag

SEQ ID NO: 18681 - DNA, 80 bp, synthetic construct
  source 1..80: mol_type = other DNA
ttggagttgtagagtctgcttctttttccaaagcatacatgccaccttctcttttttctccccgccataaaatccagctc

SEQ ID NO: 18682 - DNA, 80 bp, synthetic construct
  source 1..80: mol_type = other DNA
gttagaaactctgagcacctggatgaggtttgggaacttcattgtatagttatttggtagagcaatttcttaagaaaccc

SEQ ID NO: 18683 - DNA, 80 bp, synthetic construct
  source 1..80: mol_type = other DNA
tcagatggatagattgcaaaaattttctcccattctgtaggttgtctgtgcactctgatgatatatatatattttttttt

SEQ ID NO: 18684 - DNA, 80 bp, synthetic construct
  source 1..80: mol_type = other DNA
gaatgcttccagcttttccccattcagtattatgttggctgtggatttgtcatagatggctctttgagatacattccttg

SEQ ID NO: 18685 - DNA, 80 bp, synthetic construct
  source 1..80: mol_type = other DNA
gtatcaatattgtactagcttcataaaatgagatgaggaatgtttctagtttttccattccaggaagaaaatctgagtaa

SEQ ID NO: 18686 - DNA, 80 bp, synthetic construct
  source 1..80: mol_type = other DNA
atcacctaggatttgcataatgagagcagttttcatggcagagttggcagtttaggtggaataggatttcaatgtggaaa

SEQ ID NO: 18687 - DNA, 80 bp, synthetic construct
  source 1..80: mol_type = other DNA
tattttgtttctgtttaattctgtgtaggaactgacattacagtattctgtattagtgcaggggccattttccagagatg

SEQ ID NO: 18688 - DNA, 80 bp, synthetic construct
  source 1..80: mol_type = other DNA
accaatttggagactatttctgtagttcagatgagggatgtaggtgacttggtctaaggtatggtattagaaatagaaat

SEQ ID NO: 18689 - DNA, 80 bp, synthetic construct
  source 1..80: mol_type = other DNA
aatagacaagatgtatctgggtgtacaaccttgaagtgtatgtataatctgtgattcttagccaacttgaaatgaagact

SEQ ID NO: 18690 - DNA, 80 bp, synthetic construct
  source 1..80: mol_type = other DNA
tcccaacaagtgttcagttctcagcagaaagggtagctcctctctgcagctgctcgtcctgacaagtgttcagctatcag

SEQ ID NO: 18691 - DNA, 80 bp, synthetic construct
  source 1..80: mol_type = other DNA
atgtacatacaaaagtagtgtgttgttgcctactgcagacacatttcctggatattttcaggacatttaagaaggccagt

SEQ ID NO: 18692 - DNA, 80 bp, synthetic construct
  source 1..80: mol_type = other DNA
aacaaaccctattgggtttgtctaattttacagtgtcttatgacctttcctccactacttcccacctctgccccaatttc

SEQ ID NO: 18693 - DNA, 80 bp, synthetic construct
  source 1..80: mol_type = other DNA
ccagccttgttaagtgatttctaaagaaaatattagattcaaatgagaaactagatcaatttattagacttaatatatgt

SEQ ID NO: 18694 - DNA, 80 bp, synthetic construct
  source 1..80: mol_type = other DNA
cataccctcaagcagtcaccccctattcccctaccccctcagcccaaggcaatactaatctattttctctctatggattt

SEQ ID NO: 18695 - DNA, 80 bp, synthetic construct
  source 1..80: mol_type = other DNA
tacaggcatgagccaccatgcccagcccattttgttttgagacatggtcttactctgtcacccaggctggagtgcagtga

SEQ ID NO: 18696 - DNA, 80 bp, synthetic construct
  source 1..80: mol_type = other DNA
cagcaccattttttgaagagtttttttctctcttcattgacagttgtcaaaaaatcagttgactgtaaatatataagtat

SEQ ID NO: 18697 - DNA, 80 bp, synthetic construct
  source 1..80: mol_type = other DNA
attcaaaatcattgtaacagcatacaaggatcttcctcatgctgttcaggaggtaggtaattttccatagtaagtttttt

SEQ ID NO: 18698 - DNA, 80 bp, synthetic construct
  source 1..80: mol_type = other DNA
tccatctgctgctgcctggctatttctctcaatcattctgtgacatttcacttctagaagagcagctataatccaagcct

SEQ ID NO: 18699 - DNA, 80 bp, synthetic construct
  source 1..80: mol_type = other DNA
gctagactcttgaaactctatttgcttatttaagtaacataataagaatatgggggcggggtgaagaaaatctatttacg

SEQ ID NO: 18700 - DNA, 80 bp, synthetic construct
  source 1..80: mol_type = other DNA
ggtgggaattgaacaatgagatcacatggacacaggaaggggaatatcacactctggggactgtggtggggtcgggggag

SEQ ID NO: 18701 - DNA, 80 bp, synthetic construct
  source 1..80: mol_type = other DNA
cttgttatattaaatgtagattactgtcaattaagtctttagaggtccatccctaatcctgctggcggcctctttaccac

SEQ ID NO: 18702 - DNA, 80 bp, synthetic construct
  source 1..80: mol_type = other DNA
ggtgttcttgtagttggatatctgtgtactgatatctactacttgttctaagctgctaagatgccacgtcatgtctattt

SEQ ID NO: 18703 - DNA, 80 bp, synthetic construct
  source 1..80: mol_type = other DNA
ttagacgggcactgttagaataattcccaaatgaatatagtttgtcagtggttctagggtagaggtaacctttaatttgg

SEQ ID NO: 18704 - DNA, 80 bp, synthetic construct
  source 1..80: mol_type = other DNA
gaaagttccaagcttctactcaagacttggtctttctggcaaccagcttccatcctaaattagctaggtacccaccaagt

SEQ ID NO: 18705 - DNA, 80 bp, synthetic construct
  source 1..80: mol_type = other DNA
cgcttattatctccatttctgtgggtcaataatctaggcatgacttagctgggccagagtttctccaaagtctgtgatca

SEQ ID NO: 18706 - DNA, 80 bp, synthetic construct
  source 1..80: mol_type = other DNA
cacgggatttagtttttgttaaattgtatatgtgctccaaatagatttaccatcaaaacctgttttgaatttaatattgg

SEQ ID NO: 18707 - DNA, 80 bp, synthetic construct
  source 1..80: mol_type = other DNA
ctcagcactgctcctggcttataccaatttctttcatgccaagtttatttggaagttgtgagaatggctcaaaataatag

SEQ ID NO: 18708 - DNA, 80 bp, synthetic construct
  source 1..80: mol_type = other DNA
tatggtagtgagtgtaacatttcccagtatctgctgccagatccattgataggaaaaggaactgggattttgaaagaaga

SEQ ID NO: 18709 - DNA, 80 bp, synthetic construct
  source 1..80: mol_type = other DNA
tgatttgatgtatttgcagtacctgcaaggcatctgcaaacataagggaacctatagctttgtaaagaataccaccactc

SEQ ID NO: 18710 - DNA, 80 bp, synthetic construct
  source 1..80: mol_type = other DNA
tgcagtaaattaactgtaactccctacggtactgtcaaatactagaatgaagaccactgcttttgcaaggtcctgagcgc

SEQ ID NO: 18711 - DNA, 80 bp, synthetic construct
  source 1..80: mol_type = other DNA
gttctgccagatcttaggtatagaggaccctaacacagtatatcccaagtgcactttctaatgtttctgggtcctgaaga

SEQ ID NO: 18712 - DNA, 80 bp, synthetic construct
  source 1..80: mol_type = other DNA
agtttcaaacttactattttgacagttattttgataacaatgacactagaaaacttgactccatttcatcattgtttctg

SEQ ID NO: 18713 - DNA, 80 bp, synthetic construct
  source 1..80: mol_type = other DNA
aatgccaagcctattcttaccttaggcttttatatttcttcttccttctgcctggaatactcttttcccacagttttgca

SEQ ID NO: 18714 - DNA, 80 bp, synthetic construct
  source 1..80: mol_type = other DNA
cattctaatcattctaaactcccccaaaattatgaaacccatctggcaccaagggtttcagacaagggattatcttaaat

SEQ ID NO: 18715 - DNA, 80 bp, synthetic construct
  source 1..80: mol_type = other DNA
cactgcacctggcctatttactttttcattacagctttctaaaggtacaaatggccaggaacaaactagttatactagtt

SEQ ID NO: 18716 - DNA, 80 bp, synthetic construct
  source 1..80: mol_type = other DNA
aaggttcttcaaacactcatctgttagaaggaaattttaaaaaggaaatctttctccttcccataggagtgtcaatggca

SEQ ID NO: 18717 - DNA, 80 bp, synthetic construct
  source 1..80: mol_type = other DNA
gagataagaagcatgtaaacctacacaaaacaaagcttagggagcaaaacggggtaagagtccagagtaacaatctgtac

SEQ ID NO: 18718 - DNA, 80 bp, synthetic construct
  source 1..80: mol_type = other DNA
ggctgcttcaagtcatggtggaaagccaaagtggggcagacgtgcacaaagagatcatgtggtgagaaaccaaggtcgct

SEQ ID NO: 18719 - DNA, 80 bp, synthetic construct
  source 1..80: mol_type = other DNA
ctgctcatggacatgaaaaacggtacagccactttgaactacagtttgacagtttcttaaaaaaaaaaaaatactcttaa

SEQ ID NO: 18720 - DNA, 80 bp, synthetic construct
  source 1..80: mol_type = other DNA
ttaggttgtttataagctatttgtggtctagggtgggctttcctatgagactttatccgagtaactgcttgataagagca

SEQ ID NO: 18721 - DNA, 80 bp, synthetic construct
  source 1..80: mol_type = other DNA
gtcacatctgatcagaacattcaatgctttctacataaactctgggtttaggcagacaaagaccactcaccaccatcctt

SEQ ID NO: 18722 - DNA, 80 bp, synthetic construct
  source 1..80: mol_type = other DNA
gtaagagagacccaacagattggtgttttctggcttactgtaatgcactctgggccaaagaataatgctgtaataattct

SEQ ID NO: 18723 - DNA, 80 bp, synthetic construct
  source 1..80: mol_type = other DNA
cttttaagaaaagaaagaaactatactaggaaaatgtttatttcatgcctgaagataactgggcaggctgttggtaccac

SEQ ID NO: 18724 - DNA, 80 bp, synthetic construct
  source 1..80: mol_type = other DNA
tcctatttcactgagaaccagaatcacttgaaaagaacctccacaagctctccccaccacgtctccttgcctattacaga

SEQ ID NO: 18725 - DNA, 80 bp, synthetic construct
  source 1..80: mol_type = other DNA
tggctctactttcaaaatgtattcaaaatcttaaccactttttaccatccccacaggtgataacttggaccaatccacca

SEQ ID NO: 18726 - DNA, 80 bp, synthetic construct
  source 1..80: mol_type = other DNA
actgaggacaatggagaattgtagttaaacatgcggttttaaaatgtgcccaatcttggactgtatcccagttttgcagt

SEQ ID NO: 18727 - DNA, 80 bp, synthetic construct
  source 1..80: mol_type = other DNA
gaccaaaggagaggatatccttataccaaaaggaaactgactcgaagatgttacagcctgtttcctaaagatttggttct

SEQ ID NO: 18728 - DNA, 80 bp, synthetic construct
  source 1..80: mol_type = other DNA
agcgatggcattctcctcgcagatgccttgcttgatagtttgttggcagagctttttcaaacgattttctctataaaatg

SEQ ID NO: 18729 - DNA, 80 bp, synthetic construct
  source 1..80: mol_type = other DNA
cgacatttacacagaatttgatatggttgataatgctctccttaggacactttgtcacttgcttgcatttttcttctctt

SEQ ID NO: 18730 - DNA, 80 bp, synthetic construct
  source 1..80: mol_type = other DNA
atcaaagttatagaggaaagacagatagcccactggaggacactgaaatcttgagttgtgaatggcttcattgtttttgg

SEQ ID NO: 18731 - DNA, 80 bp, synthetic construct
  source 1..80: mol_type = other DNA
ttatcacttgggtatctaatgggaagctcaaactcctttgactttcaaagtccagagcaagcctgttgttctctatcttc

SEQ ID NO: 18732 - DNA, 80 bp, synthetic construct
  source 1..80: mol_type = other DNA
tgctgtggctcctcactttctttgctggccagggttttcaaacaatcatctattcagcaaggctgtatatacaaacctgc

SEQ ID NO: 18733 - DNA, 80 bp, synthetic construct
  source 1..80: mol_type = other DNA
aaagactctgccatctaaaaaaaataaggtggggggaaatttggacacagacatgcacaaagggagaatgccacatgctg

SEQ ID NO: 18734 - DNA, 80 bp, synthetic construct
  source 1..80: mol_type = other DNA
gtactggttcccggaaccacacaacctgtgttatttcttgtttcatgtatatttctccccgctccactgtatgcttgtaa

SEQ ID NO: 18735 - DNA, 80 bp, synthetic construct
  source 1..80: mol_type = other DNA
tatgatagtgcacctaacaaaatcctcattatcaaagtaaagccctgagctctttcccagattttcaggccatcccccaa

SEQ ID NO: 18736 - DNA, 80 bp, synthetic construct
  source 1..80: mol_type = other DNA
agagcagtttcctaggatcactatgtgatatgccctactgctctaagttcacgattgatgaggaggtaattctcagaaca

SEQ ID NO: 18737 - DNA, 80 bp, synthetic construct
  source 1..80: mol_type = other DNA
taaaatcctgacacaagacataactccatccatgatttggcgtcacctctgtacagacatctcacaagtcaattttgtcc

SEQ ID NO: 18738 - DNA, 80 bp, synthetic construct
  source 1..80: mol_type = other DNA
tggagaccatgtatttctagtgatcaattcaaattagtacgactttccctagaagagtcctttcctgatatttgcagggt

SEQ ID NO: 18739 - DNA, 80 bp, synthetic construct
  source 1..80: mol_type = other DNA
gttctgatttgatctgatgtgataggcaaatgggaaactgctttgtaaacagggccatgatgtgaggaaatggtattctc

SEQ ID NO: 18740 - DNA, 80 bp, synthetic construct
  source 1..80: mol_type = other DNA
caaataatgcggttcttatgttcccttctgagatgtttgttctttgttattagcatccatgaaagagggtagcctctgcc

SEQ ID NO: 18741 - DNA, 80 bp, synthetic construct
  source 1..80: mol_type = other DNA
gttaagaacaaagatacaaatgttggtcaatctgtccccaaggtactgaaacttcagaaagattggatgactggattagg

SEQ ID NO: 18742 - DNA, 80 bp, synthetic construct
  source 1..80: mol_type = other DNA
tttaagaagacagaaatgcaatagataactcccaatgtccagttaagcaacttggcactcacacagcttccattcccatt

SEQ ID NO: 18743 - DNA, 80 bp, synthetic construct
  source 1..80: mol_type = other DNA
gaaacgtttttgctctacactactatcaggaaatgaaaagtggaaaggcagtgatctgaccatgcttgagaaattccaaa

SEQ ID NO: 18744 - DNA, 80 bp, synthetic construct
  source 1..80: mol_type = other DNA
ctaatgtgtgtgcgtagccacaggcgacctggaaggaaaaaaatccactcaggactgcaaatataagtaattatttcact

SEQ ID NO: 18745 - DNA, 80 bp, synthetic construct
  source 1..80: mol_type = other DNA
aatacattgatatctttgccagcgaagacttaaaaatacacgcacacaaactgacagtggacgtaccctctggacacgga

SEQ ID NO: 18746 - DNA, 80 bp, synthetic construct
  source 1..80: mol_type = other DNA
gtatctactttgccccagccatcttttccagcatttggggatttttcttattgcaaataacctctttactacagcaacag

SEQ ID NO: 18747 - DNA, 80 bp, synthetic construct
  source 1..80: mol_type = other DNA
caaattagaaagcacacacccatgtactactacttaagtcaagaaatataaccttataatcaccccccaaaaggccctca

SEQ ID NO: 18748 - DNA, 80 bp, synthetic construct
  source 1..80: mol_type = other DNA
gagtcaatctaataactgagacagctactaagtaactaacgggtgggagtgtctatggcagagatgctggacaaagggat

SEQ ID NO: 18749 - DNA, 80 bp, synthetic construct
  source 1..80: mol_type = other DNA
tcaatttcacaggaagagctagcaactctcaaccaattaaacaatgttctcaagggcagctgcgaataaagctgaaattc

SEQ ID NO: 18750 - DNA, 80 bp, synthetic construct
  source 1..80: mol_type = other DNA
atccctcaaggaagtttgggggttgacaggaattaacacccagaaaacacgtgtacttgtttgttaaggcagccgtaaca

SEQ ID NO: 18751 - DNA, 80 bp, synthetic construct
  source 1..80: mol_type = other DNA
tcccatcagttattaaatcaaccttaccgggaatgtggtctggtgtataactgagtggactatccacttaccttctacag

SEQ ID NO: 18752 - DNA, 80 bp, synthetic construct
  source 1..80: mol_type = other DNA
ttacagcagcacaaagaaactaacagagaagacaagcagcttgtccctgctatcagcatcaccctgtgagttaatggcag

SEQ ID NO: 18753 - DNA, 80 bp, synthetic construct
  source 1..80: mol_type = other DNA
gtaggacatagatattattatcctcatgttacctatgaggaaactggggcacagggagactaagtaatctttcaagatca

SEQ ID NO: 18754 - DNA, 80 bp, synthetic construct
  source 1..80: mol_type = other DNA
ttgcttttaatttctggcagaaggctggctgttggaagttagtcatcaaagactcaatttttaagtttgttagggcaact

SEQ ID NO: 18755 - DNA, 80 bp, synthetic construct
  source 1..80: mol_type = other DNA
ctttattattcctttgagtgtgtgatacctgtataactatgcttctccagcaatatgaagaatcgagtgtataaccaaac

SEQ ID NO: 18756 - DNA, 80 bp, synthetic construct
  source 1..80: mol_type = other DNA
cgattatctgttggcatctcagtgattacactgtgagcccctcaaagatagatagtatctcattgattttcctatcggtg

SEQ ID NO: 18757 - DNA, 80 bp, synthetic construct
  source 1..80: mol_type = other DNA
taacagcaggagcagctctagcagaagctatgcaatatgtctggactgtggtttaatcattatgtagttaacgatttcat

SEQ ID NO: 18758 - DNA, 80 bp, synthetic construct
  source 1..80: mol_type = other DNA
acagcccatggctcagagtaaaacgcaacgtattcatacaaagcatccttagaacccagctttttgtatactggaactgg

SEQ ID NO: 18759 - DNA, 80 bp, synthetic construct
  source 1..80: mol_type = other DNA
tgaaacaggttaatcattgcctccattttattcacacatttcagtaacgtgaccaatagtcaccaaccaatcagtgtcag

SEQ ID NO: 18760 - DNA, 80 bp, synthetic construct
  source 1..80: mol_type = other DNA
ttttagcaacactgccctagataaactctagagcatacacacaaatattcccaatagcaaaaagcaagaaagaacaaatt

SEQ ID NO: 18761 - DNA, 80 bp, synthetic construct
  source 1..80: mol_type = other DNA
attagcctaagcaacagagcaagactctgtctctaagaaaataaaaatagcctgggcgcggtggctcatgcctgtaatct

SEQ ID NO: 18762 - DNA, 80 bp, synthetic construct
  source 1..80: mol_type = other DNA
cttgcaatataaatagaaaatggaatgataagtaacctctccacgcagaagttcctgccactgatctctgtctttaaagg

SEQ ID NO: 18763 - DNA, 80 bp, synthetic construct
  source 1..80: mol_type = other DNA
agcatcggtgtgttaatgagctgcagaccacataaatttcaataggataatgatggttcccaaatatatccttaggtgag

SEQ ID NO: 18764 - DNA, 80 bp, synthetic construct
  source 1..80: mol_type = other DNA
ttaacacgcctgctacagagatcctaattgttaaagatctttgacccacagcatatatattccttcaacatggcaggccc

SEQ ID NO: 18765 - DNA, 80 bp, synthetic construct
  source 1..80: mol_type = other DNA
ttctctaagccttctttaattatggattgaaatttagttaggtctatctggttcattcagatacctgtaagagaggtcat

SEQ ID NO: 18766 - DNA, 80 bp, synthetic construct
  source 1..80: mol_type = other DNA
atatcagatggtgattaagtgctacaaagccgaaccagcagtacaagagtttggagagccagacattttaggtgaggtag

SEQ ID NO: 18767 - DNA, 80 bp, synthetic construct
  source 1..80: mol_type = other DNA
aaccacttttattcagctctgacaaggtaagtcgccaagcgcggtacaaagtagctccatgaaatgcgttttgttatagt

SEQ ID NO: 18768 - DNA, 80 bp, synthetic construct
  source 1..80: mol_type = other DNA
gcctgccccagtggtacctgacagcatcccacgtcacggccgcgatccccctcggcctcccacaccactcctccaccctc

SEQ ID NO: 18769 - DNA, 80 bp, synthetic construct
  source 1..80: mol_type = other DNA
gaagtaagctacttgcttttatactggctgtttcatgaggacactggttcctctacagtgtagagccaaaagtagtaaag

SEQ ID NO: 18770 - DNA, 80 bp, synthetic construct
  source 1..80: mol_type = other DNA
atgagctgtgcatgctcttatttaagttcaactcttccacctttgtattagatcctgtcttccttacagtctcaaggttt

SEQ ID NO: 18771 - DNA, 80 bp, synthetic construct
  source 1..80: mol_type = other DNA
gttttagtcctgccacttcttatgtcctaacaagttcatgacactactcttgtgaaactaggagcccttgtccttttcca

SEQ ID NO: 18772 - DNA, 80 bp, synthetic construct
  source 1..80: mol_type = other DNA
aatgacaaaataccaagaggtgatcagagaaggctttccaaaacagattactttagcattaagttttcagtgtgggctgg

SEQ ID NO: 18773 - DNA, 80 bp, synthetic construct
  source 1..80: mol_type = other DNA
aaaaaatcattgcccagaccaatgtcatggagttttcccctacgttatagtagttttatagtttcaggtcttaagtttta

SEQ ID NO: 18774 - DNA, 80 bp, synthetic construct
  source 1..80: mol_type = other DNA
ttcaccatgttggggcctggggagtcacgccctccaaaccatagtctcatcagacgggttttacttagtgctatataacg

SEQ ID NO: 18775 - DNA, 80 bp, synthetic construct
  source 1..80: mol_type = other DNA
taacagcaagatgtatcataggatctaacaaaatattttaagcaggaggacaacatgatggctcaccatcatgccagtgg

SEQ ID NO: 18776 - DNA, 80 bp, synthetic construct
  source 1..80: mol_type = other DNA
tgtacaattaccaagattgggttcctttcagtgatgtaaatatgattcagtgttaagaaattgattaatatattcttcca

SEQ ID NO: 18777 - DNA, 80 bp, synthetic construct
  source 1..80: mol_type = other DNA
tgccaatcactgagttttccaaaatctgatttccttgaatgtacccttcatatttccctcaaattggtgtgattggatct

SEQ ID NO: 18778 - DNA, 80 bp, synthetic construct
  source 1..80: mol_type = other DNA
acttcaggggaagattaccttcccatcttgtccccttttcagctgcctctcttggtgattatcactttcattggcaataa

SEQ ID NO: 18779 - DNA, 80 bp, synthetic construct
  source 1..80: mol_type = other DNA
ccctccttcccttcctgctttttttaggttgtcacatgaggacttgtttggagaggtgctgctgaagcttggaacatctc

SEQ ID NO: 18780 - DNA, 80 bp, synthetic construct
  source 1..80: mol_type = other DNA
acgctgaagatgaatctagaaaggcagttcctcaagggcattgataaatattaaacaaagagcagatatggtctggagga

SEQ ID NO: 18781 - DNA, 80 bp, synthetic construct
  source 1..80: mol_type = other DNA
atgcatgggtcagtgagaaagtttaagagcctcacctagaagaaacggtattgagtctgtattatttagaaccagtgtcc

SEQ ID NO: 18782 - DNA, 80 bp, synthetic construct
  source 1..80: mol_type = other DNA
cacaagattgacagggctttcttttggacttctctttgattaggatttagcttttccttggctcactcggggtttcaaca

SEQ ID NO: 18783 - DNA, 80 bp, synthetic construct
  source 1..80: mol_type = other DNA
gctgagtaacttgtttaagatgaactgagtaccaagcccaggtctgtctgaatccagcatcttcttacagcatattttaa

SEQ ID NO: 18784 - DNA, 80 bp, synthetic construct
  source 1..80: mol_type = other DNA
aacatagtgagacccccatctctagcaccttggagtgttcttataatttctggaatgggcctggtcataactgggtgtgg

SEQ ID NO: 18785 - DNA, 80 bp, synthetic construct
  source 1..80: mol_type = other DNA
gctaagaaatctgtggaaaaaatcgtgtattttctctcatgattaattgcgggctaccctgccttgcaaagccatcatat

SEQ ID NO: 18786 - DNA, 80 bp, synthetic construct
  source 1..80: mol_type = other DNA
ccagattgcagatgcttgtgccctgattttggatttgccagcctctagggttgtaagaagtgaatatctgtatttccaaa

SEQ ID NO: 18787 - DNA, 80 bp, synthetic construct
  source 1..80: mol_type = other DNA
gccctgagaacaaccagacaattataaatcaagaaaaagagaccagaaacaaagatgcttagattatccctcagacaaag

SEQ ID NO: 18788 - DNA, 80 bp, synthetic construct
  source 1..80: mol_type = other DNA
tggaacaacctgcctttttcagataggagttacccactctgggtctcctctccactgagggctggacactcattggtcaa

SEQ ID NO: 18789 - DNA, 80 bp, synthetic construct
  source 1..80: mol_type = other DNA
taccccaaggattctgtgacaacatgacccagtcaatattctggaatcaaattagtattctcccttttggagaaggagaa

SEQ ID NO: 18790 - DNA, 80 bp, synthetic construct
  source 1..80: mol_type = other DNA
acctatcttaactgatgccagtggggatactatctactttatgtggcaataatcaagaaagctttggactctgtgctaca

SEQ ID NO: 18791 - DNA, 80 bp, synthetic construct
  source 1..80: mol_type = other DNA
atgagtcttcttttccattagaaatatttatttcttttttcttttttgagatggaggctcactctgttgcccaggctgga

SEQ ID NO: 18792 - DNA, 80 bp, synthetic construct
  source 1..80: mol_type = other DNA
gacttcttttgtggcctagaagagtgctcagtttttataaattctctataggtgctccaaactttaattgttggtaagag

SEQ ID NO: 18793 - DNA, 80 bp, synthetic construct
  source 1..80: mol_type = other DNA
attgtaatattctgttacactgaactgtgtctctcagtattcaggcccttgtgtagtctgctcctcttgaatctgggctt

SEQ ID NO: 18794 - DNA, 80 bp, synthetic construct
  source 1..80: mol_type = other DNA
gccttttaactctaaggccatattcttttcacttgactagctttttattatacagcagtcacacttcatggaaggcatgt

SEQ ID NO: 18795 - DNA, 80 bp, synthetic construct
  source 1..80: mol_type = other DNA
atggaatacccccaccaaatgagaatagaagacacagttttttttcaggctacatagaaccttcccagtagatcatatca

SEQ ID NO: 18796 - DNA, 80 bp, synthetic construct
  source 1..80: mol_type = other DNA
ctcttccagaaaatagaaacagcagaaatacttcgcaactcattttatgagcccagtattaccttgacactaaaatatga

SEQ ID NO: 18797 - DNA, 80 bp, synthetic construct
  source 1..80: mol_type = other DNA
gctgggtttcctcaaagttaaaaactttgctctgcaaaagtctatgggaggaggatgaaaagatcaactacagactagga

SEQ ID NO: 18798 - DNA, 80 bp, synthetic construct
  source 1..80: mol_type = other DNA
gttataaacgggcagcaggaggaccctcgtggtgatgaaatattctgtatgttaactgtggtgatggattcatgaaccta

SEQ ID NO: 18799 - DNA, 80 bp, synthetic construct
  source 1..80: mol_type = other DNA
tggcatcatgtgactgaagggacatttctcttgaagtctatctgtactatctttctacagctgcaaaattgttctctcca

SEQ ID NO: 18800 - DNA, 80 bp, synthetic construct
  source 1..80: mol_type = other DNA
aaaatgtgatacaccctgatttgagatgtttagtcgcttatctgcaggaagcaacactcacctcagagaaggaaacctca

SEQ ID NO: 18801 - DNA, 80 bp, synthetic construct
  source 1..80: mol_type = other DNA
ccactgcactccagcctgggcaacagagcaagactctgtctcaaaaaaaaaaaaaaaaaaaaatcacaaaatgatgaact

SEQ ID NO: 18802 - DNA, 80 bp, synthetic construct
  source 1..80: mol_type = other DNA
ttgttggtaaaagtgcccaagggaagataggatatacagttgcccatcagcatcttggagagagattgaaaatgaaattg

SEQ ID NO: 18803 - DNA, 80 bp, synthetic construct
  source 1..80: mol_type = other DNA
cattataaggataaaatcaataaacatttggtgtggacagatgatttctgtggtatgcctttttaggggaggaacagctc

SEQ ID NO: 18804 - DNA, 80 bp, synthetic construct
  source 1..80: mol_type = other DNA
atttcacaggtatgcttgcaactgggaacgtgagaaatgtattcttgaaatttcatgtggctcatctgactttgccacat

SEQ ID NO: 18805 - DNA, 80 bp, synthetic construct
  source 1..80: mol_type = other DNA
cttcctcagggagccacttatccctgtttgggcctgcaagatcttatgtcttttttttacgtaaacctataggtctttga

SEQ ID NO: 18806 - DNA, 80 bp, synthetic construct
  source 1..80: mol_type = other DNA
catgcagatcaatggtgtgccatgtaaaatttttctgaacttagcattttcactgcttccaaagggctgcactatttcat

SEQ ID NO: 18807 - DNA, 80 bp, synthetic construct
  source 1..80: mol_type = other DNA
agatattgaagttggggaaggcaggagacgtcacagcagtttgtagaatgcaattatgatgatgagatgggatttagcta

SEQ ID NO: 18808 - DNA, 80 bp, synthetic construct
  source 1..80: mol_type = other DNA
tgtacgcatgaatgaatgcacaaaatagagtgggtggtctgtaggaaagaattcagataaatgggtgcagtggattccat

SEQ ID NO: 18809 - DNA, 80 bp, synthetic construct
  source 1..80: mol_type = other DNA
attttttttacagcagccattggaaatgaatacagatgttctcactccaccttcatgtgacagccctaacagttgggtac

SEQ ID NO: 18810 - DNA, 80 bp, synthetic construct
  source 1..80: mol_type = other DNA
ccacagagcctaaaatatctacacgagattgtgggagaaaacccaacagccttcatttcctgccatgtgttttatgtaat

SEQ ID NO: 18811 - DNA, 80 bp, synthetic construct
  source 1..80: mol_type = other DNA
atgctcaataggccttttgaacactttaaaggactccaaagatgttggagaaaatggaacattcattcgtacttttttag

SEQ ID NO: 18812 - DNA, 80 bp, synthetic construct
  source 1..80: mol_type = other DNA
atatagggatgaattctgagatttagtgcaccccatacttggcacaattgaccttccatgctccttaatgtagagtttgc

SEQ ID NO: 18813 - DNA, 80 bp, synthetic construct
  source 1..80: mol_type = other DNA
cccagggtgatactgatatgaatgttctttccttgcccccaactcaccctgctcaagtcacatagctaaggtcagctttg

SEQ ID NO: 18814 - DNA, 80 bp, synthetic construct
  source 1..80: mol_type = other DNA
ccttaagtataaggagagtggaggataaacaaggtttgaaatgtttgaagctggaagatagtctatggagcattcttgca

SEQ ID NO: 18815 - DNA, 80 bp, synthetic construct
  source 1..80: mol_type = other DNA
aaagcatagaggaggaggttgaaagggttagaaaggtcaagtttcttggaagctttgtgtgggaattccatcacttttat

SEQ ID NO: 18816 - DNA, 80 bp, synthetic construct
  source 1..80: mol_type = other DNA
tatgttgccctctgggacttggaagcaaggaaaacagctgaaacataatgcttatgctgcttggtgactgtaaataataa

SEQ ID NO: 18817 - DNA, 80 bp, synthetic construct
  source 1..80: mol_type = other DNA
caaattttcagggtttgtggagcaattaattgcttcatacacatgctgggccacgttcttcagaatgaggcaggtcacat

SEQ ID NO: 18818 - DNA, 80 bp, synthetic construct
  source 1..80: mol_type = other DNA
aatttttaaatttttcatagagacaaggtctccctatattgcccaggctggtcttgaacttccgggctcaagtgatcctc

SEQ ID NO: 18819 - DNA, 80 bp, synthetic construct
  source 1..80: mol_type = other DNA
ctttcttatttttgagagaaagtttcaattcctgttacagctgaattcaccgggaagtatgggtaatttgtctccatact

SEQ ID NO: 18820 - DNA, 80 bp, synthetic construct
  source 1..80: mol_type = other DNA
aaaatcctttctttacagtcgaataatattttagcaatgctgccctctgcagagcaaaactaggatcgcaactctaggtg

SEQ ID NO: 18821 - DNA, 80 bp, synthetic construct
  source 1..80: mol_type = other DNA
ccaaaccatatcattgactgacttaaattcaacagaactgtgctttggaggacatcgttgcgctgctgacttctaacact

SEQ ID NO: 18822 - DNA, 80 bp, synthetic construct
  source 1..80: mol_type = other DNA
ggctgtgatatgcctgtgtcatgctttttaaagagtagtcctcctggaaaataactcatccttctctaggtctggaagat

SEQ ID NO: 18823 - DNA, 80 bp, synthetic construct
  source 1..80: mol_type = other DNA
gtgttttgccttgtgttataattctttaactacatgtctcaaggccctttgaagagagagagtcaattccatctctatac

SEQ ID NO: 18824 - DNA, 80 bp, synthetic construct
  source 1..80: mol_type = other DNA
ggaagctctcataacactgtccttttgagtttttatagaggctttatcatgtgggcatgattgataaaaccactggctat

SEQ ID NO: 18825 - DNA, 80 bp, synthetic construct
  source 1..80: mol_type = other DNA
atacaactcccaactaaatgtgtagctttgatttaaatgatgggttatgtaccgtcacttaatggggacaggataagtga

SEQ ID NO: 18826 - DNA, 80 bp, synthetic construct
  source 1..80: mol_type = other DNA
aatagttgctcattctttagatgctaaaatttagagaattcctccactgcctctcactcaacctgccattttccattgag

SEQ ID NO: 18827 - DNA, 80 bp, synthetic construct
  source 1..80: mol_type = other DNA
tgaaatatgactgggtgtcctgtgtttcacctggcaactctatacagggattcaaatgtcctaattttcataccttactg

SEQ ID NO: 18828 - DNA, 80 bp, synthetic construct
  source 1..80: mol_type = other DNA
taggaagtgaaaattggtaggtattttgagcactaacataaaggatggaagaagcagagatacccagaagtcctggaagc

SEQ ID NO: 18829 - DNA, 80 bp, synthetic construct
  source 1..80: mol_type = other DNA
aaaataaaataaaataaaataaaactaagaaaaagaacaggatatctgttacacaaattaccccagattgctgaaaccac

SEQ ID NO: 18830 - DNA, 80 bp, synthetic construct
  source 1..80: mol_type = other DNA
atggaggggcacttccccaatgagctttgtagtcatttaactttaataggctcattgaccgatgcacacagcaagtcatt

SEQ ID NO: 18831 - DNA, 80 bp, synthetic construct
  source 1..80: mol_type = other DNA
tgtgcagatatttttttctgcactttttcccactagcatatcatttaatcttcctggggtgaccattgtgggtaagttat

SEQ ID NO: 18832 - DNA, 80 bp, synthetic construct
  source 1..80: mol_type = other DNA
agctggcgaggtggccagtgtgtgtggtgattcttagtctgtgggggatgaggggctgctgaggaatgagtaaagaaaga

SEQ ID NO: 18833 - DNA, 80 bp, synthetic construct
  source 1..80: mol_type = other DNA
ttggtctggaaaggcaggacaacttggtggggagagtttacaggtcataggtggattcaaagattttctgactggcagtt

SEQ ID NO: 18834 - DNA, 80 bp, synthetic construct
  source 1..80: mol_type = other DNA
agaaagtataaggagacacatctgacaccctgtcttcccctcatagcctaaactagtttttctggttttctttcggtccc

SEQ ID NO: 18835 - DNA, 80 bp, synthetic construct
  source 1..80: mol_type = other DNA
ttgcatatgttaatgtcctggtgaattctatcttttatcgaatttctgcatcaggtctgcctgttcttccctcgatggtt

SEQ ID NO: 18836 - DNA, 80 bp, synthetic construct
  source 1..80: mol_type = other DNA
gcacaacactaacaggacaggaacacagggatgccactaaggaatatttcagatttgaacatgcgatggactaaatgtgt

SEQ ID NO: 18837 - DNA, 80 bp, synthetic construct
  source 1..80: mol_type = other DNA
agtgaaaaaaagcacattagattttgacttcaaatttattagtcactgatgtttaatttccatgcaaggcagagtgtggg

SEQ ID NO: 18838 - DNA, 80 bp, synthetic construct
  source 1..80: mol_type = other DNA
attgcataccctagccttctttgttcatttttaacttttatcaagaaaaggtatggatatatgtgtatacaaacatatac

SEQ ID NO: 18839 - DNA, 80 bp, synthetic construct
  source 1..80: mol_type = other DNA
tctataaaggagatctccatacataagggtgtcttcctgtctgcaacaggaagagaagaatgactctaaatcactagaaa

SEQ ID NO: 18840 - DNA, 80 bp, synthetic construct
  source 1..80: mol_type = other DNA
gtgttaataaactctaaggcattatgcacatgttaattggaatttgcagtgaatgggtagacctgagagctagtggctca

SEQ ID NO: 18841 - DNA, 80 bp, synthetic construct
  source 1..80: mol_type = other DNA
tttccacaactccctctgaatgtttgtgttgggaatcagaacatgagaacctcaagtatagcactttggtatgctgaata

SEQ ID NO: 18842 - DNA, 80 bp, synthetic construct
  source 1..80: mol_type = other DNA
gcgccaccgggaaggacaaggggactgggcacggggaccccggccagtgagcgcccgtggcccgggaccgcccctccctt

SEQ ID NO: 18843 - DNA, 80 bp, synthetic construct
  source 1..80: mol_type = other DNA
ccccgagaggctctttcagcccgtttgaggaacatacaagtaaaaacagtgatgctttgtattgtttgttcttttgagat

SEQ ID NO: 18844 - DNA, 80 bp, synthetic construct
  source 1..80: mol_type = other DNA
gtttaacattagaaaacgctggtatcatatttcagaacaaaatggttccctatgttgactggtggaatactgagtctcca

SEQ ID NO: 18845 - DNA, 80 bp, synthetic construct
  source 1..80: mol_type = other DNA
cttcaatgcgccgaaatttgagcaggttattttgaaactgcatttgcataagtccatctgagcaaacatttttatggagt

SEQ ID NO: 18846 - DNA, 80 bp, synthetic construct
  source 1..80: mol_type = other DNA
attagaatgaaaacagagccactcaattccgtgtgaaatgttgaagttagctgtcagatggaaccacgaagtataccact

SEQ ID NO: 18847 - DNA, 80 bp, synthetic construct
  source 1..80: mol_type = other DNA
accccaacagggaagaaaaggggggggtgctattttcttagcagcctgaatgattcttttgcttatctagaaagctttcc

SEQ ID NO: 18848 - DNA, 80 bp, synthetic construct
  source 1..80: mol_type = other DNA
tcctggtctccctgccagacaaaagcttgaatggtctcctacaccacaaaatcctacttaatctgatttttatttcctgc

SEQ ID NO: 18849 - DNA, 80 bp, synthetic construct
  source 1..80: mol_type = other DNA
atattggtgctgatgtactttatgggcaaaaagggagcagttaagcaacttgcatgaggatgtgttcataactcacagct

SEQ ID NO: 18850 - DNA, 80 bp, synthetic construct
  source 1..80: mol_type = other DNA
ataataattttcatgtgtctgaattggattgtgttaaacacaggccaacaggagtgtgtttggtgacatcgatggtttca

SEQ ID NO: 18851 - DNA, 80 bp, synthetic construct
  source 1..80: mol_type = other DNA
gtgtatgagtgtgtgctggtgcctgccagccttaaaaaacatctgaagaacaaatgtaaagaacattaacagtagttcta

SEQ ID NO: 18852 - DNA, 80 bp, synthetic construct
  source 1..80: mol_type = other DNA
gcggggactatatttgcattcttgcttgcccttgagtgtgctctctcttgctttttcttttcctgaactatttgaaagta

SEQ ID NO: 18853 - DNA, 80 bp, synthetic construct
  source 1..80: mol_type = other DNA
catagatattatctagagcctctggatttttctagtcctgacttcataggacttgatccatgggtcagctacttcccatt

SEQ ID NO: 18854 - DNA, 80 bp, synthetic construct
  source 1..80: mol_type = other DNA
tgtttccgtcccccacccccgcccttttttttccccttaaaactttaagtacagctttggtttaaagtgaaatctatatc

SEQ ID NO: 18855 - DNA, 80 bp, synthetic construct
  source 1..80: mol_type = other DNA
aagtgtggtaagctgcacatgtttaaagcatccatcaggatccattaaaccattaaacaattgagataataataaacatt

SEQ ID NO: 18856 - DNA, 80 bp, synthetic construct
  source 1..80: mol_type = other DNA
atccatactgtgtcatgtgtcagcacttcatgccttttcactgccgaataatactccattgtataggtaccgaaaacgtt

SEQ ID NO: 18857 - DNA, 80 bp, synthetic construct
  source 1..80: mol_type = other DNA
tttgggccttttactttgctaagtagtattctgttttgtggatatagtgcaaactctttatccatctgttgatggacatt

SEQ ID NO: 18858 - DNA, 80 bp, synthetic construct
  source 1..80: mol_type = other DNA
ctcctcaactagaacattctgaattctgcttagacctcacctcttccagggagctttccccaaccctaagcaggaaggag

SEQ ID NO: 18859 - DNA, 80 bp, synthetic construct
  source 1..80: mol_type = other DNA
agatgacaggtgaacatgccttggtaggaaagcagtactgaatacatgtgtcctcatgtaagccagctttttgtctcatg

SEQ ID NO: 18860 - DNA, 80 bp, synthetic construct
  source 1..80: mol_type = other DNA
cttgaacccatctcttcccatccaggctgtcttattttgctttatttcttccacttgttgtcttctagcataaggatccc

SEQ ID NO: 18861 - DNA, 80 bp, synthetic construct
  source 1..80: mol_type = other DNA
agcccacctaggatatgaactatatgggcttcagggtctgagttttgtgattcaggaaactgaaagtggaaggtgttaga

SEQ ID NO: 18862 - DNA, 80 bp, synthetic construct
  source 1..80: mol_type = other DNA
aactgggtcaggcagttccttgagaacatcactgccctttctcaaagaaatttcctcggtctaaaatgtagagaattgaa

SEQ ID NO: 18863 - DNA, 80 bp, synthetic construct
  source 1..80: mol_type = other DNA
tttgtattttagtagagtcggggcgttgcccagactggtctcgacctcctgagctcaggcaatccacctgcctcagcctc

SEQ ID NO: 18864 - DNA, 80 bp, synthetic construct
  source 1..80: mol_type = other DNA
cttgtctactgaacagcctagaaataatgacaaacctagtagcagtaagcacctgtaacatccagattatggcctctaag

SEQ ID NO: 18865 - DNA, 80 bp, synthetic construct
  source 1..80: mol_type = other DNA
caggcacatgtcaccatgcctggctacttttttttttcttttgtagagataggctcttcctatattgcccaagcttgtct

SEQ ID NO: 18866 - DNA, 80 bp, synthetic construct
  source 1..80: mol_type = other DNA
actctagggttgtatactaaagtatagattaaatatgatatgtctgggattagcttcaaaataatgaaggggggtgcaaa

SEQ ID NO: 18867 - DNA, 80 bp, synthetic construct
  source 1..80: mol_type = other DNA
ggattgagagagatctgggttaggtagcacagcctgttacttaggatgtgtgtggtcttactgttctgtgccacagttgt

SEQ ID NO: 18868 - DNA, 80 bp, synthetic construct
  source 1..80: mol_type = other DNA
tagcatatgaatgtgaacgtgaagtctttctttagatccccctaactcaattactgacgtatgccaagcatcccgcctgg

SEQ ID NO: 18869 - DNA, 80 bp, synthetic construct
  source 1..80: mol_type = other DNA
agttgtcttgaacctcataaaggtgttgtggtttttaagcagaggaaaatcttccttcgttttttctggaatagcagcaa

SEQ ID NO: 18870 - DNA, 80 bp, synthetic construct
  source 1..80: mol_type = other DNA
gtctgtccagttagtaaaaggtagggattggggtggcaagagttgtacattgacacagttcttaagcacacagtgactaa

SEQ ID NO: 18871 - DNA, 80 bp, synthetic construct
  source 1..80: mol_type = other DNA
tgcatcctcttcataatttaatttttcatgatggcattggcgctgccaaagaaagtcactttcccatgccaggagaaaag

SEQ ID NO: 18872 - DNA, 80 bp, synthetic construct
  source 1..80: mol_type = other DNA
attgctcagaacagtgtctaccaaagtattatgcattgtgcgctcgtgaaacaaacacctctccagctcaagattttttt

SEQ ID NO: 18873 - DNA, 80 bp, synthetic construct
  source 1..80: mol_type = other DNA
aagcttgacacatacttagtatagagcagtagaaagcagggaggaaaaactcgtcatgggtccactatctaaaatcaact

SEQ ID NO: 18874 - DNA, 80 bp, synthetic construct
  source 1..80: mol_type = other DNA
attctgaggacagtggcctatattgaaactggaggaatgaggtttacttgtgtttcagggattgaagtggtactagaggt

SEQ ID NO: 18875 - DNA, 80 bp, synthetic construct
  source 1..80: mol_type = other DNA
gtaataagtgcaggcgttaagattgatcactgcttaagtcttcaagatcacatacaaggtctggtgtttttgaggctgtc

SEQ ID NO: 18876 - DNA, 80 bp, synthetic construct
  source 1..80: mol_type = other DNA
ttcttcaccactgtataatactgtctcttggtgcttgttgaaagcccctgttgagattaacatagtccccctcaagttct

SEQ ID NO: 18877 - DNA, 80 bp, synthetic construct
  source 1..80: mol_type = other DNA
cgctctcagaatttatggggcaacatcacttagtacttcttacacttgcgttcctgcacatttcaaactgttcatatggt

SEQ ID NO: 18878 - DNA, 80 bp, synthetic construct
  source 1..80: mol_type = other DNA
taataacccattaatccattaactatgaatatgttaacctataaatggattaatccagagcccttatgacccagtcacct

SEQ ID NO: 18879 - DNA, 80 bp, synthetic construct
  source 1..80: mol_type = other DNA
agcatgttgagaccatgatcttctcataatttggttcactttgattaaagcagcatcatgcccactgcagcatcatcaga

SEQ ID NO: 18880 - DNA, 80 bp, synthetic construct
  source 1..80: mol_type = other DNA
atttataagtactcctgtcttcctcccaaggttggcactaggatgaaggctgtataaagtgattagcacagtatctggca

SEQ ID NO: 18881 - DNA, 80 bp, synthetic construct
  source 1..80: mol_type = other DNA
atttaggctaattaaaaacaatgaaacccagaaactgtgagtggtggcattagagccgggagccgggcacctgttgtcat

SEQ ID NO: 18882 - DNA, 80 bp, synthetic construct
  source 1..80: mol_type = other DNA
acagacatgacttgttacattcgtgaaaaatcttaagtctgcctggatggtttctgtctagggggcacttgcttgataga

SEQ ID NO: 18883 - DNA, 80 bp, synthetic construct
  source 1..80: mol_type = other DNA
gccatcacatctggccttcactaatgtgtttttctatttcaggatgcaatccaggatcccacctggcattcgttgtcatg

SEQ ID NO: 18884 - DNA, 80 bp, synthetic construct
  source 1..80: mol_type = other DNA
ctgtaaggaagagctgttgttccttcttcctcgcttgtttatttatcaagtatttatgtcagtatggagtcagatatttc

SEQ ID NO: 18885 - DNA, 80 bp, synthetic construct
  source 1..80: mol_type = other DNA
tgtagctctttgctggaagataatggaagaaaaagaaaaatcaagttatatcctgtgactaagaacagagttgtatgcct

SEQ ID NO: 18886 - DNA, 80 bp, synthetic construct
  source 1..80: mol_type = other DNA
tcttgagaagtgaatctgtttgcaaaagctttagcacaaggagagcgatctgcctgaattgcggtagagagtgttgtttg

SEQ ID NO: 18887 - DNA, 80 bp, synthetic construct
  source 1..80: mol_type = other DNA
aaagcacagtgacgcaggctgacatgataggagaacttttaagagaccctttaaatcctcacaggtatttaacgtaagcc

SEQ ID NO: 18888 - DNA, 80 bp, synthetic construct
  source 1..80: mol_type = other DNA
ggatcccaccactgcatccagcctaggtgatggagccagatgctgtctctaaaaaaaaataataaaatataaatggaaat

SEQ ID NO: 18889 - DNA, 80 bp, synthetic construct
  source 1..80: mol_type = other DNA
aagtcacttgaccattgtccacctgtgatacaggggatgtgactacatatctcgaatgagaaaagacttcttcccatgtt

SEQ ID NO: 18890 - DNA, 80 bp, synthetic construct
  source 1..80: mol_type = other DNA
atgttcatgtgtttaatgctatggttctggcctggactctactgggttcaaagtctagcacatgcatcatacttgtttgt

SEQ ID NO: 18891 - DNA, 80 bp, synthetic construct
  source 1..80: mol_type = other DNA
tagcttctaggaaacagacatagcaagtaaacacatgcacaaacagtataatgtcagctaatgagtgctatgaggaaaaa

SEQ ID NO: 18892 - DNA, 80 bp, synthetic construct
  source 1..80: mol_type = other DNA
ctggaggattgcttgacgctgggagttttagaccagcctgggcaacacagtgagccctcctgtctactaaaaaaatttaa

SEQ ID NO: 18893 - DNA, 80 bp, synthetic construct
  source 1..80: mol_type = other DNA
cacgaaagagcttgctcttgctcttgctctctacccataccatgtgaggatagtaggagaatacagtcccaagttagaag

SEQ ID NO: 18894 - DNA, 80 bp, synthetic construct
  source 1..80: mol_type = other DNA
tatcgtgtaaactgtagtttataatctcaagttctggtctttgattcctttttgcatattgtgtaaggatccaacttcat

SEQ ID NO: 18895 - DNA, 80 bp, synthetic construct
  source 1..80: mol_type = other DNA
atgttgaatagaagtggagaaagcaagcattcttatcttgcttctggtattaggagaaaacttgcagttttttgttttgt

SEQ ID NO: 18896 - DNA, 80 bp, synthetic construct
  source 1..80: mol_type = other DNA
atttaaatttctccattttcttatcagacactgggtcagagagagctaagagaagcaaccagcatcagtggggcacaaga

SEQ ID NO: 18897 - DNA, 80 bp, synthetic construct
  source 1..80: mol_type = other DNA
tccaaaccacagccctcttgctaacagcaaactggattataccataagaaggcaactagttcagttagaacataccttag

SEQ ID NO: 18898 - DNA, 80 bp, synthetic construct
  source 1..80: mol_type = other DNA
agagtacgaaatctacaaccaactcctcttctggttaaacaaaggaggtgatgtattgaagagaggcccaagagaaatga

SEQ ID NO: 18899 - DNA, 80 bp, synthetic construct
  source 1..80: mol_type = other DNA
caagggtggcagaccttggaagtgatgaaggtggggatgaagtggcactcactgggctggatctaggagcacccagatgg

SEQ ID NO: 18900 - DNA, 80 bp, synthetic construct
  source 1..80: mol_type = other DNA
gcctttaaatatggttttgtttcttagtttggggcctcctgcatgactgagggtgcttagtaatttccttggttcactct

SEQ ID NO: 18901 - DNA, 80 bp, synthetic construct
  source 1..80: mol_type = other DNA
ctatacttcccagcattgctccagcatgccctgcacagttctgagcttatggcagatacccaggacacacaggaggtggg

SEQ ID NO: 18902 - DNA, 80 bp, synthetic construct
  source 1..80: mol_type = other DNA
gagatccggcaggcagtggcttcttactcaaggcatgctgattttgaaaagtatgagggcatctttaaaaaaaaaaagtg

SEQ ID NO: 18903 - DNA, 80 bp, synthetic construct
  source 1..80: mol_type = other DNA
gagtgtggaattggcaaccttttatgactgttaagcaaaatctttgcagaggagctgtaccaattaagaaatccttggct

SEQ ID NO: 18904 - DNA, 80 bp, synthetic construct
  source 1..80: mol_type = other DNA
cttacttctcacctggtcagccaaagcttaactgaaaatctccaagagttcctgtctttagaaacccataaagtccggtc

SEQ ID NO: 18905 - DNA, 80 bp, synthetic construct
  source 1..80: mol_type = other DNA
ctctgctgggcaaaagtgggaagttgctctcaagtgttaaacgtgttcactctcaccaagtggaagattttacattagaa

SEQ ID NO: 18906 - DNA, 80 bp, synthetic construct
  source 1..80: mol_type = other DNA
agactgcttatgttggaatcatcttccacccacttactcactgtgtgccctttggacagttatttaaccactctgcacct

SEQ ID NO: 18907 - DNA, 80 bp, synthetic construct
  source 1..80: mol_type = other DNA
tcatgtttccagcactacagtcgagatactaaatagttccatcacaaggatctcttgctttgccttttacaaccacatcc

SEQ ID NO: 18908 - DNA, 80 bp, synthetic construct
  source 1..80: mol_type = other DNA
ataaattaaaacagaccactggcttttacaatgtatccaggactgtgtaagaggaaagggagaggaggggattcagatgg

SEQ ID NO: 18909 - DNA, 80 bp, synthetic construct
  source 1..80: mol_type = other DNA
tctcaacagtggttgcaataattgtttggaacctaaaccaacaaaacaattgtttttgtgaaggagtagcttctcattga

SEQ ID NO: 18910 - DNA, 80 bp, synthetic construct
  source 1..80: mol_type = other DNA
tatgatccacacaaagtgtctggagtggcattggcatacaataggttcttaagaaatgtgagttgtcttcacttctccac

SEQ ID NO: 18911 - DNA, 80 bp, synthetic construct
  source 1..80: mol_type = other DNA
tgcctgccattctgctgatttatttcctagagaaagttaaacatttttaaaacacagaatgaatggttttaaaaggcaaa

SEQ ID NO: 18912 - DNA, 80 bp, synthetic construct
  source 1..80: mol_type = other DNA
catagggccccatgcttaaaggggctctgtgcttgggcgtgatgctctggtaatcaccattttgaaattcttactaattt

SEQ ID NO: 18913 - DNA, 80 bp, synthetic construct
  source 1..80: mol_type = other DNA
agtgtgtctttgtttctcatttctttttctttttaaatgttctcctcacctcatccctcaatagcaggtcagacgtgttg

SEQ ID NO: 18914 - DNA, 80 bp, synthetic construct
  source 1..80: mol_type = other DNA
accactgaattcgatcaacttttttttatcatgctatttgatccttagtgtccaaggtccctttagtgctgacgagtgaa

SEQ ID NO: 18915 - DNA, 80 bp, synthetic construct
  source 1..80: mol_type = other DNA
gcacaggagaaggagaagtgaggtcaggaacccttatcccaaagacaggcttcatgtgagtcccaggctctggacttgtg

SEQ ID NO: 18916 - DNA, 80 bp, synthetic construct
  source 1..80: mol_type = other DNA
gatttattcatgcatttatcccacaatgcttagtatcatctgcgtacaatgctaggtactaggaaaacaggacttcaggg

SEQ ID NO: 18917 - DNA, 80 bp, synthetic construct
  source 1..80: mol_type = other DNA
aatctgtttggcataaactgtttttgctcttttctgtgattccccaacacatctattacaccctctgtagagtatcttaa

SEQ ID NO: 18918 - DNA, 80 bp, synthetic construct
  source 1..80: mol_type = other DNA
cctgtgtcccttatgacactttgcacgctacaggggcagagtagtcatttaataattcagtactgcaactgggtttttag

SEQ ID NO: 18919 - DNA, 80 bp, synthetic construct
  source 1..80: mol_type = other DNA
ctggcctgtctgaagctgtgctctgcagtggttgtagtcatactgagctgaccacctgaccatctaggctcctaggaact

SEQ ID NO: 18920 - DNA, 80 bp, synthetic construct
  source 1..80: mol_type = other DNA
gtgaatattcgtacttctatactccatcactctttactgactaactcccaagtggaagtgaatgtttccatcttgtgtca

SEQ ID NO: 18921 - DNA, 80 bp, synthetic construct
  source 1..80: mol_type = other DNA
ataatttaggcatcctctgtgtgaaggtcttggtcttttctctttcctagtaatgaggaggtagaatggtaggtgcgtaa

SEQ ID NO: 18922 - DNA, 80 bp, synthetic construct
  source 1..80: mol_type = other DNA
tttaattcactacaccctcattctttcctattctttagaagtactgttgggaccttcaaatctcataaatattctactgc

SEQ ID NO: 18923 - DNA, 80 bp, synthetic construct
  source 1..80: mol_type = other DNA
aatgtgagtctggggcttcgggcatctgttctgtttgacatgtggcaatatcctttgagaatgaagaaaaacagacaagc

SEQ ID NO: 18924 - DNA, 80 bp, synthetic construct
  source 1..80: mol_type = other DNA
gtagattctgccaaatggtgttccaaaaaggcttttcggattcagactcccacctgcagagcaggaaatatttgttttcc

SEQ ID NO: 18925 - DNA, 80 bp, synthetic construct
  source 1..80: mol_type = other DNA
ctctgtcttattctgtttgggctgtcttattgggtagcttaaataaacatttatttttaacggctctggaggctggggca

SEQ ID NO: 18926 - DNA, 80 bp, synthetic construct
  source 1..80: mol_type = other DNA
atcagaataaaagccagaggtcccactatggcctggcaggccctccatggccttcaccttcgtttcctctcacttcattt

SEQ ID NO: 18927 - DNA, 80 bp, synthetic construct
  source 1..80: mol_type = other DNA
tggcttccgactgtggttctgcttgtgaaagtgtctccctatttctcatggaacatcttaatgtagctgggtacttggat

SEQ ID NO: 18928 - DNA, 80 bp, synthetic construct
  source 1..80: mol_type = other DNA
acacataaagctaaagtctcttttttccaccactctcaaactcagatcttgccccagaattagtcactgttatcagcttg

SEQ ID NO: 18929 - DNA, 80 bp, synthetic construct
  source 1..80: mol_type = other DNA
gcacggcccttcctctgtggcagtgcacagggaaggcagaattattgtgattttcagttcatatgaaattccttaagtgt

SEQ ID NO: 18930 - DNA, 80 bp, synthetic construct
  source 1..80: mol_type = other DNA
tatttcctgagagtgcttcgtcaagattttctcagttctgtttctggagacagagcaggaaccattgacttgaatcacgt

SEQ ID NO: 18931 - DNA, 80 bp, synthetic construct
  source 1..80: mol_type = other DNA
ataaaatggaaaacaattgcagaggtgcaggctttaaaaaaatacagaaacagagcacatcaacctggattttaggtgtg

SEQ ID NO: 18932 - DNA, 80 bp, synthetic construct
  source 1..80: mol_type = other DNA
gaggtgggactaacacccgcttctttggtttttgaggattaaatgacattgtagaaaaactacaaagtttggggtcctca

SEQ ID NO: 18933 - DNA, 80 bp, synthetic construct
  source 1..80: mol_type = other DNA
ggttgtttactcatatgcaatgttttgatataaagaagaccaaatcacttccctcttggctcttatttataagaggctta

SEQ ID NO: 18934 - DNA, 80 bp, synthetic construct
  source 1..80: mol_type = other DNA
aggtctccagcctctctggagattgagttgatgctgcatggcccagggcccctgccataaatcacgttattagactatct

SEQ ID NO: 18935 - DNA, 80 bp, synthetic construct
  source 1..80: mol_type = other DNA
tttaaatagtcaataaaataatatgtgttgttcccaaagctctctcctgcgaggggttgtctcttccttcaggtcctggt

SEQ ID NO: 18936 - DNA, 80 bp, synthetic construct
  source 1..80: mol_type = other DNA
cagctaattggttgcttagaacacattcaagatggtttcctcggacttctgttctcctgactgtgcattaacatagcaat

SEQ ID NO: 18937 - DNA, 80 bp, synthetic construct
  source 1..80: mol_type = other DNA
atttccacaagttcagtaatgttctatccataggttcttacacctgtaccctgggtcacaaattccctttgccatatccc

SEQ ID NO: 18938 - DNA, 80 bp, synthetic construct
  source 1..80: mol_type = other DNA
gctgtcagtcatggttatttctcagttcctccatgctctttcctatgagaattattttttatgaaaatgggcatcccttc

SEQ ID NO: 18939 - DNA, 80 bp, synthetic construct
  source 1..80: mol_type = other DNA
tacagccagcgacaaacaatgccctttcagaaaatggagtttctttactacttacttgaagttgttcttgggatctcttt

SEQ ID NO: 18940 - DNA, 80 bp, synthetic construct
  source 1..80: mol_type = other DNA
ctttcactctcgctctaaagataatcgcctctaaagcaaggtaatggacatgttttatccccagcaattcggtttgccct

SEQ ID NO: 18941 - DNA, 80 bp, synthetic construct
  source 1..80: mol_type = other DNA
aaatctcctactgtcccactctgttcttcccatgacgttaatcatccttcttccagtgtatccacagtgtatacaccacc

SEQ ID NO: 18942 - DNA, 80 bp, synthetic construct
  source 1..80: mol_type = other DNA
atttgttcaggattgctgatctcatggctagattagtgaacattcaccccaagagtgaaaggctctggaatttaaccaca

SEQ ID NO: 18943 - DNA, 80 bp, synthetic construct
  source 1..80: mol_type = other DNA
caaaatgcatattttgaaacctgatccccaagatggtggtattaagaggtggagcctttgggaagcaattaagtcatgaa

SEQ ID NO: 18944 - DNA, 80 bp, synthetic construct
  source 1..80: mol_type = other DNA
ggaacaagtggctaccttttgagtcactcttcagcctctgacgatctttaacaatgttgacctctctgaagatagattag

SEQ ID NO: 18945 - DNA, 80 bp, synthetic construct
  source 1..80: mol_type = other DNA
gaccaaggtctgtgaaatgacagggagcttacgaaacggtgcaacttggactaacacttatgacataggaagtggatctg

SEQ ID NO: 18946 - DNA, 80 bp, synthetic construct
  source 1..80: mol_type = other DNA
tgttttgatgagctgccggatctcttgacccctcagagaattttacattagggaaaagtgcttgtgtgtaggcataagaa

SEQ ID NO: 18947 - DNA, 80 bp, synthetic construct
  source 1..80: mol_type = other DNA
aaggttaggatgcttttgtttctgatgagaccatctagtgtaggtcaaaaggactgtgtcggagatagaaaacaacattt

SEQ ID NO: 18948 - DNA, 80 bp, synthetic construct
  source 1..80: mol_type = other DNA
caacaacttcatgtgtccgaagttgaactcatgcaaactcagcctttgttttccacatgactcctccatcaactcagaaa

SEQ ID NO: 18949 - DNA, 80 bp, synthetic construct
  source 1..80: mol_type = other DNA
catgatgtagttcctgtaaaaaataataaataaacctaggaggagcctcaaagtcccttcctgacctgatgttctgcgat

SEQ ID NO: 18950 - DNA, 80 bp, synthetic construct
  source 1..80: mol_type = other DNA
aagcctggcagggttccgaaaacctcagggtttaatcactcccctgtttaaggaactcagacacaatgtattttacaaat

SEQ ID NO: 18951 - DNA, 80 bp, synthetic construct
  source 1..80: mol_type = other DNA
gtgagccacggtgcccagctgtccttttatttttatttggtgttccttgttggaagagatcagcttctcttcactagaga

SEQ ID NO: 18952 - DNA, 80 bp, synthetic construct
  source 1..80: mol_type = other DNA
tggcatctttcttatgcactgtcactctcctcgtggttactgttgtttgggtcaatgttgtaagcagttgcttgaataca

SEQ ID NO: 18953 - DNA, 80 bp, synthetic construct
  source 1..80: mol_type = other DNA
gcctactccaggagctgtcactttcaacatgcttggtgtttgatgaatgaatgcgtgataacatgtgaggagggctgaaa

SEQ ID NO: 18954 - DNA, 80 bp, synthetic construct
  source 1..80: mol_type = other DNA
tagaactgttgtgggaaatttcttcacctccccaaatgggggactggagtaagatgctgcaaatatcatcccatcacaat

SEQ ID NO: 18955 - DNA, 80 bp, synthetic construct
  source 1..80: mol_type = other DNA
tggctgggaccaaaagtaagtgatgcatccaaggctagaaggtagattaaatgactttttaatctgggttttccttgcta

SEQ ID NO: 18956 - DNA, 80 bp, synthetic construct
  source 1..80: mol_type = other DNA
agctctcttttgactcctaaaattacagtgaaaaactgggttctcgtaatcacacttacgagttgttgtgtccctggact

SEQ ID NO: 18957 - DNA, 80 bp, synthetic construct
  source 1..80: mol_type = other DNA
gcctaagaatcactgtgaatttaatactagataacagtgcatgatgaatgagtgggaaaggctgagcacatcattgactt

SEQ ID NO: 18958 - DNA, 80 bp, synthetic construct
  source 1..80: mol_type = other DNA
tttcttttaagctctagaccttgctgttttccttgacagggtgaaactgggtgttctgtaatgaaatgtgtgctccctga

SEQ ID NO: 18959 - DNA, 80 bp, synthetic construct
  source 1..80: mol_type = other DNA
gccatgtttattcatctccacagcatcatttcacaaagcccctaattctgtgatgacataccactctccaaaaagatact

SEQ ID NO: 18960 - DNA, 80 bp, synthetic construct
  source 1..80: mol_type = other DNA
atatggccttttcagactggcctctttcacctagtaatgtgtatttaagtttactccatgtgttttcatgacttgatagt

SEQ ID NO: 18961 - DNA, 80 bp, synthetic construct
  source 1..80: mol_type = other DNA
ggaagttcatttggatttactcatcatgcatctgtcactttctttgctcttcattcctttttgtgtttccagtcttccat

SEQ ID NO: 18962 - DNA, 80 bp, synthetic construct
  source 1..80: mol_type = other DNA
ggtaacactcacagcttccagggactatgacctgaatatctttgggggtcattcatctttcctcatcagaattatagatt

SEQ ID NO: 18963 - DNA, 80 bp, synthetic construct
  source 1..80: mol_type = other DNA
ttcctctggttgccttttggagtcactacaaatgaaattcattgtccatgtatgatatagaaccctggggtgcaaatctg

SEQ ID NO: 18964 - DNA, 80 bp, synthetic construct
  source 1..80: mol_type = other DNA
ataagtttcatccttgccttaaaaaaaatgaccaccaagggaaaactactcttagctggcttcccaaccacctcagcctg

SEQ ID NO: 18965 - DNA, 80 bp, synthetic construct
  source 1..80: mol_type = other DNA
tctctgtttaagacttagcaaaagacaaaatgcagaaagcctgaaggtgggagctaatctttctggctgtcaccaggtct

SEQ ID NO: 18966 - DNA, 80 bp, synthetic construct
  source 1..80: mol_type = other DNA
gctgcatctcttttgggtggcttttgtcctctaactccagagtcatgggatagaccctactgtgagttgtttattcaaaa

SEQ ID NO: 18967 - DNA, 80 bp, synthetic construct
  source 1..80: mol_type = other DNA
gtgaggtggcctctttgagaagatgacagtagcactgggacgtgagtttgagactcagtcacatgaagatatgaagcgac

SEQ ID NO: 18968 - DNA, 80 bp, synthetic construct
  source 1..80: mol_type = other DNA
gaaataagagaaaaagaaaaggccccaggaatgtttccagtggttttcttacatgccatatatgcattgggatctctcag

SEQ ID NO: 18969 - DNA, 80 bp, synthetic construct
  source 1..80: mol_type = other DNA
gggctgtgttagacactttcatctgaggggttcattggaagacactataagctacatgggtcaatattagcccagctgaa

SEQ ID NO: 18970 - DNA, 80 bp, synthetic construct
  source 1..80: mol_type = other DNA
acaatgattcctgttaacggtttggtatgttctccaataggatttctttcctaccagaggaaagccttttacatggctgt

SEQ ID NO: 18971 - DNA, 80 bp, synthetic construct
  source 1..80: mol_type = other DNA
ggtatacagtaggtactcaatacatgcctacgacattgaactgaattttcatttgggatgttcagcttgtgcgtcttcat

SEQ ID NO: 18972 - DNA, 80 bp, synthetic construct
  source 1..80: mol_type = other DNA
ggctggtcaaacatatccgactggctttcactttggtttttcagtgcgactatagaaacgtcacacaccgggtctgaatt

SEQ ID NO: 18973 - DNA, 80 bp, synthetic construct
  source 1..80: mol_type = other DNA
gaaaggtattgcagttaccactgggtaggtgaaatgatgggtcatctccgttcatctcctgttccacaaaaataaagaag

SEQ ID NO: 18974 - DNA, 80 bp, synthetic construct
  source 1..80: mol_type = other DNA
ggcgctgagcatttgtgcatgagtatgcgatttgtctgtgtccccaccccctccgttttaaaaaaaaattaacaaatgat

SEQ ID NO: 18975 - DNA, 80 bp, synthetic construct
  source 1..80: mol_type = other DNA
ttcacacacttgcccttcccccacatgcatatgctaacagctgccatgtatgatttttgtggaatttgatatttcgaatg

SEQ ID NO: 18976 - DNA, 80 bp, synthetic construct
  source 1..80: mol_type = other DNA
cctcccggacggggcggctgaccccccccacctccctcccggatggggtggctggccgggcggggggctgacccccccca

SEQ ID NO: 18977 - DNA, 80 bp, synthetic construct
  source 1..80: mol_type = other DNA
cggggcagagacgctcctcactttccagactgggcagccaggcagaggggctcctcacgtcccagacgatgggtggaggt

SEQ ID NO: 18978 - DNA, 80 bp, synthetic construct
  source 1..80: mol_type = other DNA
acctcacctggcattctgcagcagaaactgtatgtgttctctgggggaaatcttgttgcaaaaaatatttatcgatttgc

SEQ ID NO: 18979 - DNA, 80 bp, synthetic construct
  source 1..80: mol_type = other DNA
caccctctgttctctgtactagtgaactcagtgtagatggaggtatgctttctccctttccaacaaacctggtaatatga

SEQ ID NO: 18980 - DNA, 80 bp, synthetic construct
  source 1..80: mol_type = other DNA
gtcgatagggtgacatgaagtcaataagatgtagagttattggtgacagagcttttggtctacttaaaaccgacacagtc

SEQ ID NO: 18981 - DNA, 80 bp, synthetic construct
  source 1..80: mol_type = other DNA
gggaacattaagccaagaaaacgaagggagaacacacagctattatctacatacacatatacatggagcaggcatgtcca

SEQ ID NO: 18982 - DNA, 80 bp, synthetic construct
  source 1..80: mol_type = other DNA
tggtatttcatttactaaatcttcagggatataggtaagagagcctccgtgctgaactgactgcctaacagaacaaggtt

SEQ ID NO: 18983 - DNA, 80 bp, synthetic construct
  source 1..80: mol_type = other DNA
tacaaaaaaaagaactccctgagatccagggaaactaactgacctaggatcccacagggagtgaataagggctgttgggc

SEQ ID NO: 18984 - DNA, 80 bp, synthetic construct
  source 1..80: mol_type = other DNA
ccggggatctgataccaaacatgttagttaaactcatgtttaactaacccaaactcatgtttaactggcccaaaggaagt

SEQ ID NO: 18985 - DNA, 80 bp, synthetic construct
  source 1..80: mol_type = other DNA
ttgtcattgtcacctttgtaacctgacattcaggaatgtccctctctagttcatattctgacctagcttctgaaagcatt

SEQ ID NO: 18986 - DNA, 80 bp, synthetic construct
  source 1..80: mol_type = other DNA
taagtgatggcttaacaacaatttagcaaccatggcatgacagagaatcatgcctgatagctctaacaaagtatccgaga

SEQ ID NO: 18987 - DNA, 80 bp, synthetic construct
  source 1..80: mol_type = other DNA
cctaggaaggtgactttgtacctgcttgtaggtttagttttatttgcttcttgggtgtatttagattgtcctttttgagc

SEQ ID NO: 18988 - DNA, 80 bp, synthetic construct
  source 1..80: mol_type = other DNA
tggttagttttcttattttttgaggaatctgaatgggttaacgtctgtaacctgggccatactctgaaaaggacaggttt

SEQ ID NO: 18989 - DNA, 80 bp, synthetic construct
  source 1..80: mol_type = other DNA
gtactgcctaagcatgcttattgtacagcatgcattgtttatggcaactccaatttccagttttccagtccccttcttcc

SEQ ID NO: 18990 - DNA, 80 bp, synthetic construct
  source 1..80: mol_type = other DNA
tcgtgttgtgagagtataggagacgctgaatttgtttgtgcctatattcagacaggaagacaattcatgttacttttgga

SEQ ID NO: 18991 - DNA, 80 bp, synthetic construct
  source 1..80: mol_type = other DNA
ttgattatcattgacattgtgcctattctactctctctccaacacggagtgccattttaaaaaattgctattttgctagg

SEQ ID NO: 18992 - DNA, 80 bp, synthetic construct
  source 1..80: mol_type = other DNA
cacagggcaggatggtcaagctgccttttccaaagatttttacggacccaactcccaaggttcacatgtggccagcggat

SEQ ID NO: 18993 - DNA, 80 bp, synthetic construct
  source 1..80: mol_type = other DNA
cccccgtagtatgcctagaatctactgccccttgagtacccatattgtagtgagttagaaaagaaaaaaagcagaatttt

SEQ ID NO: 18994 - DNA, 80 bp, synthetic construct
  source 1..80: mol_type = other DNA
tttggtcacttttctttccttctgacctaggactgggagctgcatgtgaaagggaagctgcacgctcagaaatgcctggt

SEQ ID NO: 18995 - DNA, 80 bp, synthetic construct
  source 1..80: mol_type = other DNA
gtttaacttattaaggagccggtttccctttctcgccctctccagtgctggcatccggtgtatacttggttcggcagagg

SEQ ID NO: 18996 - DNA, 80 bp, synthetic construct
  source 1..80: mol_type = other DNA
ggcttttgaggtctagacccatttatacctggtacccttcaattttccactctgggaattacacttctctagtttccaag

SEQ ID NO: 18997 - DNA, 80 bp, synthetic construct
  source 1..80: mol_type = other DNA
cagtagcatttgttggccccttgaggaactggtttgtgctgtatgatgtttttgtttgtttttagttttgctgtctctgc

SEQ ID NO: 18998 - DNA, 80 bp, synthetic construct
  source 1..80: mol_type = other DNA
ggcaagtcactttacttctctgaggctctgtttccttaagtgggaacaataatgcctttggaagataaagtaaacaactg

SEQ ID NO: 18999 - DNA, 80 bp, synthetic construct
  source 1..80: mol_type = other DNA
aggggacagagagccccagtcattgtaggatgataataaaaacaacagccaacatttatatagtactcaatatgttctta

SEQ ID NO: 19000 - DNA, 80 bp, synthetic construct
  source 1..80: mol_type = other DNA
cagtttccaatgaatgcccagtgagttgtttttgcatatacatttctaatgtttttctgcttacaaaacttatgcttatt

SEQ ID NO: 19001 - DNA, 80 bp, synthetic construct
  source 1..80: mol_type = other DNA
taaacagagtaatcaggtttctggaaggggccttggggctttctcagcctgttagtagtttttgtgtacctgcccgaggt

SEQ ID NO: 19002 - DNA, 80 bp, synthetic construct
  source 1..80: mol_type = other DNA
cagtgacacctgagttttaatcacaaatctgccactgtttaattggccacagattaagatccttaacttctctgaggctt

SEQ ID NO: 19003 - DNA, 80 bp, synthetic construct
  source 1..80: mol_type = other DNA
aagcctccctgaggctgaaaaaggatgattgtccctttagcttggtaattcaggctttagtcacacccctgcaacttagc

SEQ ID NO: 19004 - DNA, 80 bp, synthetic construct
  source 1..80: mol_type = other DNA
tggagaaagctatcattatcctggttcttggggtttagcttgtcaaggcatctgggaggagtggaattttagaacttaga

SEQ ID NO: 19005 - DNA, 80 bp, synthetic construct
  source 1..80: mol_type = other DNA
ctgagactcagctatttgttagaaaagtacactacttcaggctttcacctaggtgatgtgctaagttaaaatgcagttcc

SEQ ID NO: 19006 - DNA, 80 bp, synthetic construct
  source 1..80: mol_type = other DNA
cttggccttcagcctgagggatcaatatcttggcactcctataaccatttgcagttgatgtagctcataattggaaagct

SEQ ID NO: 19007 - DNA, 80 bp, synthetic construct
  source 1..80: mol_type = other DNA
gctattagaatgtgtttcaggttcggaaaattatatccttctcttccacattgggttggcttatggttactaattcttga

SEQ ID NO: 19008 - DNA, 80 bp, synthetic construct
  source 1..80: mol_type = other DNA
tttttgttttccaaaaatggcattatagtacacataccacttggtaacctgcttttaacttaacaatctgtcttaaaaag

SEQ ID NO: 19009 - DNA, 80 bp, synthetic construct
  source 1..80: mol_type = other DNA
tttaggggaaagatagccattaagaacgtctggaagagaggggaaaagggaaccgtcttctgaataccactaatgatctt

SEQ ID NO: 19010 - DNA, 80 bp, synthetic construct
  source 1..80: mol_type = other DNA
cacatcaggtcattaagctatctctctccatcaacctggagtgagactactcacttgtctctgttcctacttctcagaaa

SEQ ID NO: 19011 - DNA, 80 bp, synthetic construct
  source 1..80: mol_type = other DNA
ggtaaccctggggatcaggaaagggccatcttataatgagctcttttggtgatgtttataaaaaggtctctttgaacaga

SEQ ID NO: 19012 - DNA, 80 bp, synthetic construct
  source 1..80: mol_type = other DNA
ctatacagaccttcagtaacattttcttcttctgtcacccccttgatctcttgttctcttctctctccttcatatttacg

SEQ ID NO: 19013 - DNA, 80 bp, synthetic construct
  source 1..80: mol_type = other DNA
cacattcttgctaacacattgtcttgtccaacttttaaatttttgcctgtcgtgggagagtatcatggtttatcacagtt

SEQ ID NO: 19014 - DNA, 80 bp, synthetic construct
  source 1..80: mol_type = other DNA
attgcttctttcagacaagtaagcatcccaccccattctatatccaaccaaagttcctggtctcctggattcttccctgg

SEQ ID NO: 19015 - DNA, 80 bp, synthetic construct
  source 1..80: mol_type = other DNA
taattgagtcccggtactctggggcaaagaagtttacatacattatttaatcctgacatcagtcctgttagacaggtatt

SEQ ID NO: 19016 - DNA, 80 bp, synthetic construct
  source 1..80: mol_type = other DNA
tttctcccccttccctttccttcaacaagagaaagccagagttttttcctagaagctcccacaaaagtcctgagactttt

SEQ ID NO: 19017 - DNA, 80 bp, synthetic construct
  source 1..80: mol_type = other DNA
tcttgtgaatggtccatggtgctctcagttgggaagatgattgagagtcttctctatgtgctgatagttacaaagcaata

SEQ ID NO: 19018 - DNA, 80 bp, synthetic construct
  source 1..80: mol_type = other DNA
gtgagtacagatgtgtattagtccgttctcacactgctttaaagaactgcctgaggccaggccgtggtggctcacgcctg

SEQ ID NO: 19019 - DNA, 80 bp, synthetic construct
  source 1..80: mol_type = other DNA
agtatttgcagattcatattcattctctgcagccacatccttccatctctccagccatgcatcttgggattagtgttagg

SEQ ID NO: 19020 - DNA, 80 bp, synthetic construct
  source 1..80: mol_type = other DNA
ttttatgttctgaagaattgccatatacatttatgccagtctgggggcacattctttagcctttgtctattctagcttgg

SEQ ID NO: 19021 - DNA, 80 bp, synthetic construct
  source 1..80: mol_type = other DNA
accagccctggcaacatagcgagaccttgtcttttataaaacctaaaaaaattagcctggtgtggtggtgagcccctgta

SEQ ID NO: 19022 - DNA, 80 bp, synthetic construct
  source 1..80: mol_type = other DNA
tctggctctaagtttccatagatataaaaagcggaggctgcagtcaatgatcttcaagtctttccaagtttacaatgcat

SEQ ID NO: 19023 - DNA, 80 bp, synthetic construct
  source 1..80: mol_type = other DNA
tcctcaccctttgttggaaaataatataggaaaaggtctgttaatatttggccctttggggcaagtctacaccctattaa

SEQ ID NO: 19024 - DNA, 80 bp, synthetic construct
  source 1..80: mol_type = other DNA
taaattgagctgagaaataaatgagaaaactggaggctaagaggttggcttcattctgatacagcccaaatgtaggagtg

SEQ ID NO: 19025 - DNA, 80 bp, synthetic construct
  source 1..80: mol_type = other DNA
aagtcggacaagtatctgaagcagcagcaggatgcccccgggaggtccaggaggaaagacgaggccaggctgcgggaaag

SEQ ID NO: 19026 - DNA, 80 bp, synthetic construct
  source 1..80: mol_type = other DNA
tcctgccagaagcatttaccagtcctggaactctgaggagaagtggtgaaggagaagccgtcaccacctgctaaattaaa

SEQ ID NO: 19027 - DNA, 80 bp, synthetic construct
  source 1..80: mol_type = other DNA
aaataatttgtatacaatgggactcatgccagcatttacagcggatgagctgctctgtgggcaattattaactctgcaca

SEQ ID NO: 19028 - DNA, 80 bp, synthetic construct
  source 1..80: mol_type = other DNA
tacctcagttcaagataatgaaaggtgcagacttctatagaatcagatgccctgaaaggatgtgctagacaaatgcccag

SEQ ID NO: 19029 - DNA, 80 bp, synthetic construct
  source 1..80: mol_type = other DNA
ctcctcacctccttcgtctttactcatggccacattctctactgtccctggccactgcacatgatttcaacaccccaacc

SEQ ID NO: 19030 - DNA, 80 bp, synthetic construct
  source 1..80: mol_type = other DNA
aggaccataaagaggaggaaagaaatgaagtcacagataaggaaaacatggggaagaaacactgctacatcctactggga

SEQ ID NO: 19031 - DNA, 80 bp, synthetic construct
  source 1..80: mol_type = other DNA
ctacactatgcagggccttgtaggcaggttgaagatttttgcctttatcttaactaccaggggaagcaaatgaagtattt

SEQ ID NO: 19032 - DNA, 80 bp, synthetic construct
  source 1..80: mol_type = other DNA
gcaaacactggaaacaaaggactttaggatttgaaccatgtatccctgtccagtaataactggtgaaaccagtcagccct

SEQ ID NO: 19033 - DNA, 80 bp, synthetic construct
  source 1..80: mol_type = other DNA
tctataaaacgaagatgctgatagcagctgcctccaagggattctgggaggataaaggaaatgctgtatgtgaaacctat

SEQ ID NO: 19034 - DNA, 80 bp, synthetic construct
  source 1..80: mol_type = other DNA
aaaatgaaaaaatccagttacagttctcctgggctggagctgccacaacaaaaagaaatatccttggaacagggccatct

SEQ ID NO: 19035 - DNA, 80 bp, synthetic construct
  source 1..80: mol_type = other DNA
ctgcttccacaagctgtcccagtgacatggacgtggaaatgcctggcctaaatctggatgctgagcggaagccagctgaa

SEQ ID NO: 19036 - DNA, 80 bp, synthetic construct
  source 1..80: mol_type = other DNA
attttttgctagggtctgacagtgatacaagacttgtttcaggatattctctcactccattggaggtgacgttttgtgcc

SEQ ID NO: 19037 - DNA, 80 bp, synthetic construct
  source 1..80: mol_type = other DNA
aaccagaggatgtgttcagtgaacttagcattcctctaggtaagcaaaacacacagtctttcctgaaattcaggtctagg

SEQ ID NO: 19038 - DNA, 80 bp, synthetic construct
  source 1..80: mol_type = other DNA
tgtaatttagacagcgattttttcaatggtggaagtgttgggaatgaagtggggagggagtttactgatggaatcaccta

SEQ ID NO: 19039 - DNA, 80 bp, synthetic construct
  source 1..80: mol_type = other DNA
ctgtgctagacactctggggtaaccaagaaatataacgcaagtctcttgtcatccaagaacttggaacctaattgatact

SEQ ID NO: 19040 - DNA, 80 bp, synthetic construct
  source 1..80: mol_type = other DNA
gcgaccttgagtgagagttcccaatatccacctcccattggattttatcagtttttaatctttcctaaccagttaggaag

SEQ ID NO: 19041 - DNA, 80 bp, synthetic construct
  source 1..80: mol_type = other DNA
ataaaataaaataaaactagccaggagttgtggtgtaaatctgcagtcccagctacttgggaggctgagggaggaggatt

SEQ ID NO: 19042 - DNA, 80 bp, synthetic construct
  source 1..80: mol_type = other DNA
caaagtgcaagctccctcctctatccatcccagctttactaggatgacagagttataattacccgtgccatgagctgtta

SEQ ID NO: 19043 - DNA, 80 bp, synthetic construct
  source 1..80: mol_type = other DNA
tgacagtagaagtctttgttcaagtgaaatcggttccagaactgacagaagatagctctagctacactgctgggggcttt

SEQ ID NO: 19044 - DNA, 80 bp, synthetic construct
  source 1..80: mol_type = other DNA
tcagagctgcccttcacactgataagtggctattttgaaatgaaaaaaaagttctaatgacaagtctaggctgcttcctt

SEQ ID NO: 19045 - DNA, 80 bp, synthetic construct
  source 1..80: mol_type = other DNA
atggcccccccaaaagaggcctacatataggttaattatgtggaagaaaatatttggattggagtgactctgggtgattt

SEQ ID NO: 19046 - DNA, 80 bp, synthetic construct
  source 1..80: mol_type = other DNA
ctcctagcacatgtctctactttaatacctaaaacatcctgtttgggttggctttggcaatatccacctctccctctata

SEQ ID NO: 19047 - DNA, 80 bp, synthetic construct
  source 1..80: mol_type = other DNA
gaatttggaggtggaaggcagattgcaggaatatgtaatttgagaaagttctccaaaagattcaaatgtgcacccctagt

SEQ ID NO: 19048 - DNA, 80 bp, synthetic construct
  source 1..80: mol_type = other DNA
cacatagttcaaggtcacctcggaagttaggaagagttcagacttgccagggcctctaattctaattcatgtatgtttcc

SEQ ID NO: 19049 - DNA, 80 bp, synthetic construct
  source 1..80: mol_type = other DNA
gaggagtggctttctccaactcatatggctggtgctgctaataagaaaagccaacattactgagtgtttattctgtgtca

SEQ ID NO: 19050 - DNA, 80 bp, synthetic construct
  source 1..80: mol_type = other DNA
ttgggctgtttctggaaaacagagttgttttgggagttaaatgagcttatttaagtcaagcagttagaacagcacttgac

SEQ ID NO: 19051 - DNA, 80 bp, synthetic construct
  source 1..80: mol_type = other DNA
tcacagtgtttaaattcttggtaggatataacaggtcaggcctagctgagtcaggcaaggaaaaggtttaatggaaactc

SEQ ID NO: 19052 - DNA, 80 bp, synthetic construct
  source 1..80: mol_type = other DNA
ggctgtggaaaacagagttgtcttgggggttaaatgagcttatttaagtcaaggaaacatcatctgtccttgattcagcc

SEQ ID NO: 19053 - DNA, 80 bp, synthetic construct
  source 1..80: mol_type = other DNA
aagcagaccaacttgaacagatgtgatgcggagaggttggaagaagcaagaaacctgaactcatcatcaggctattaaat

SEQ ID NO: 19054 - DNA, 80 bp, synthetic construct
  source 1..80: mol_type = other DNA
aaagtgtctcccaaaaaaggatgctgaagagcaattgctcccttaagcaacagattcatatttaccctgggttaatacaa

SEQ ID NO: 19055 - DNA, 80 bp, synthetic construct
  source 1..80: mol_type = other DNA
gcttcagtcccgcgaccgaagcagggcgcgcagcagcgctgagtgccccggaacgtgcgtcgcgcccccagtgtccgtcg

SEQ ID NO: 19056 - DNA, 80 bp, synthetic construct
  source 1..80: mol_type = other DNA
ctcagcgtccgtgcgttcctcccccagctctgccgtcctggccagccgagggattcggaggctcttttgaaaagattgct

SEQ ID NO: 19057 - DNA, 80 bp, synthetic construct
  source 1..80: mol_type = other DNA
gctggggcctttgaagaggctgcagagctctttcccaggagccacagctccggaggttcgagccgcactcttggagctgc

SEQ ID NO: 19058 - DNA, 80 bp, synthetic construct
  source 1..80: mol_type = other DNA
gaaggacattccctctctgcccctgggccccggggccttctgttcccagcatggaagagctgggcactgtgacttggcag

SEQ ID NO: 19059 - DNA, 80 bp, synthetic construct
  source 1..80: mol_type = other DNA
agatgttcggctgggacaccaggctgtggcccttgcagccaacatatgcctgaggccctggcatcggatggaagctactg

SEQ ID NO: 19060 - DNA, 80 bp, synthetic construct
  source 1..80: mol_type = other DNA
actagaacagcagccagggccggctcagggattgaggcgaagccttggtgcttgattctttgtcccctgaggcaggctgt

SEQ ID NO: 19061 - DNA, 80 bp, synthetic construct
  source 1..80: mol_type = other DNA
gaggattctcgcccttgtgttcctgagagggaaaaaggaaacatgtatttcctagaatttaagtaatgactggggagatg

SEQ ID NO: 19062 - DNA, 80 bp, synthetic construct
  source 1..80: mol_type = other DNA
tgagactgtacttggtgacaggaatgccccccagtctcaggggcttaacgccatctactatgtccttcttgtggcatagc

SEQ ID NO: 19063 - DNA, 80 bp, synthetic construct
  source 1..80: mol_type = other DNA
gttgaattgtgttacattcccaagggttacaatctatccacattctcaccaccacgcattattctctgttattctctggt

SEQ ID NO: 19064 - DNA, 80 bp, synthetic construct
  source 1..80: mol_type = other DNA
tccataggcaggcactctgtgctcccaaggaggagttcctgtccccattcgcagctagggacagagccagggaagccaag

SEQ ID NO: 19065 - DNA, 80 bp, synthetic construct
  source 1..80: mol_type = other DNA
cttgaggaacatgagctgacagattgacttaaatttgcacatggacatgatctgagtcactgccttgctgagtgcatggg

SEQ ID NO: 19066 - DNA, 80 bp, synthetic construct
  source 1..80: mol_type = other DNA
atgatatctctgttctacagcaggggctcagactggatgtgtgagaagagcctcagttaaggagggccatgttcgtgcgt

SEQ ID NO: 19067 - DNA, 80 bp, synthetic construct
  source 1..80: mol_type = other DNA
tgatagtgagtggtggttgtggtggtggtggtggtgatggtgaagacggtggtggtggacgtgatagggatattgatggt

SEQ ID NO: 19068 - DNA, 80 bp, synthetic construct
  source 1..80: mol_type = other DNA
ttaaacaggtcaggcagcgtccgctcagcagaagcgtgtgatgacttccccagccggctgacctcagggagggtgcacat

SEQ ID NO: 19069 - DNA, 80 bp, synthetic construct
  source 1..80: mol_type = other DNA
aaactggacatgtgtgagtaggcccaggcctggcaaatggctcagagagacacctgtgaacagctgtgtttggtggctgc

SEQ ID NO: 19070 - DNA, 80 bp, synthetic construct
  source 1..80: mol_type = other DNA
ccagatggggccaaaaatttcatgcttctgtttgaccttggttctagctgaagatttagctgtgtacacatctttaaaac

SEQ ID NO: 19071 - DNA, 80 bp, synthetic construct
  source 1..80: mol_type = other DNA
aaaatgagcacagggcctggatggacatttctccgaataagatttacagatggccccaagaagcacatgaaaagattctc

SEQ ID NO: 19072 - DNA, 80 bp, synthetic construct
  source 1..80: mol_type = other DNA
agtagagcctcccttgatccgtgttttttccctaaatgcaaagttagattatagtcccaggcaaaagcagcctccagctg

SEQ ID NO: 19073 - DNA, 80 bp, synthetic construct
  source 1..80: mol_type = other DNA
gatcagcatgctgcacaccagcatagagacaggattaacagcccagggcctggatatggctggtgagtgagccactgcca

SEQ ID NO: 19074 - DNA, 80 bp, synthetic construct
  source 1..80: mol_type = other DNA
ttttttggaagtcccaaatttcggcccttgtgctgccatcctagggaagtttttcatggtctggagctccatttgtgttt

SEQ ID NO: 19075 - DNA, 80 bp, synthetic construct
  source 1..80: mol_type = other DNA
ggtcccctctgcatccaaagatgaataatttaaacagcccagccacgtgtggaacattggaaacagtctagcacttcact

SEQ ID NO: 19076 - DNA, 80 bp, synthetic construct
  source 1..80: mol_type = other DNA
atatgtgaaatgggcagtgaagggatctgcacccagtggctgagtctgcagtgagagcctcatgatgatacacccctgtg

SEQ ID NO: 19077 - DNA, 80 bp, synthetic construct
  source 1..80: mol_type = other DNA
catggaggccccagaggagcacctgtgggattcccagactggatctgctcctgcgacagatggggtgccagggccctacc

SEQ ID NO: 19078 - DNA, 80 bp, synthetic construct
  source 1..80: mol_type = other DNA
tcaaacactaactccccatcctgtctcccccaagccctagcaatcaccatcctatgttgtgtctgtgaatttgactactc

SEQ ID NO: 19079 - DNA, 80 bp, synthetic construct
  source 1..80: mol_type = other DNA
gccttcttcaaggaagctacgcctctgtccacagcgccttcagtgattcatttttcagttatttaggtaaaaattacata

SEQ ID NO: 19080 - DNA, 80 bp, synthetic construct
  source 1..80: mol_type = other DNA
aataggcttgtcactgaggatactgcttcccctgtttccttttctttttctgttttaaagcagttcttttctagcccgtg

SEQ ID NO: 19081 - DNA, 80 bp, synthetic construct
  source 1..80: mol_type = other DNA
gagagggagtaagtggggctggaaaaatcccaaggttttgatttagcaaatgacctgcaactctctggagaagcggcagt

SEQ ID NO: 19082 - DNA, 80 bp, synthetic construct
  source 1..80: mol_type = other DNA
gagtttgtgtaaagaattaattacaacaggggattggagcaatgagggacaggctagcaaaaagcaaagagaatgccaga

SEQ ID NO: 19083 - DNA, 80 bp, synthetic construct
  source 1..80: mol_type = other DNA
tcaatattccagaagtacctcttgcatgcctgccaggggccaggtactgttctaggagctaaggatataacaatgaacac

SEQ ID NO: 19084 - DNA, 80 bp, synthetic construct
  source 1..80: mol_type = other DNA
ccttttctggattatttctggaggacaaatccgaggtcaggctcgttgaagactgtgttgtggttcctggccctgcttca

SEQ ID NO: 19085 - DNA, 80 bp, synthetic construct
  source 1..80: mol_type = other DNA
tcagggtgcctggtcctggctcttcccaaccagcacgagtgaggacgcagctgcagcaggacgtaagcacagtcatcgct

SEQ ID NO: 19086 - DNA, 80 bp, synthetic construct
  source 1..80: mol_type = other DNA
gtgggcagagccatccaggtgcccagcggctttcctcacaaccccctccagcctggggtaggaggatgcttggaacagag

SEQ ID NO: 19087 - DNA, 80 bp, synthetic construct
  source 1..80: mol_type = other DNA
aacacacatgtcacctgaggctttcctccagcccctggcactccatcgttgcccctaaggcgtcccaagtgcttacggat

SEQ ID NO: 19088 - DNA, 80 bp, synthetic construct
  source 1..80: mol_type = other DNA
ggccccaaaatgcagggtatcttaaaacaggggcttacaggttagaggtagatgcagagattctttaatttacagttggt

SEQ ID NO: 19089 - DNA, 80 bp, synthetic construct
  source 1..80: mol_type = other DNA
catactacacacttacacataccacacacacgcataccatgcaagcatatcatacacacagacaccccatacaatgcgta

SEQ ID NO: 19090 - DNA, 80 bp, synthetic construct
  source 1..80: mol_type = other DNA
taataaatattcattaaagaagatgaggcatgaggcatgaggcgtgatcccttctacccataggcgccagtgttgcacat

SEQ ID NO: 19091 - DNA, 80 bp, synthetic construct
  source 1..80: mol_type = other DNA
ctgtggaacttttggtttcaagcagctgcaagagttgccaagaggttgaaagaattcagctgcctgactccaggtcctgg

SEQ ID NO: 19092 - DNA, 80 bp, synthetic construct
  source 1..80: mol_type = other DNA
attttgggtaaacaacaagcagttttttggtataggtgtgttccatgcaacttttgcagcttctcgaaagacacacctct

SEQ ID NO: 19093 - DNA, 80 bp, synthetic construct
  source 1..80: mol_type = other DNA
agtgcagggcttgggagagggcttgtgagtacagtgaatggtccccaggccggattcactctggacttgggaaggtctga

SEQ ID NO: 19094 - DNA, 80 bp, synthetic construct
  source 1..80: mol_type = other DNA
tggggagccccgggggattaaagctggctatggcacctgcaactgcttccctgaggaggagaagtgcttctgcgagcccg

SEQ ID NO: 19095 - DNA, 80 bp, synthetic construct
  source 1..80: mol_type = other DNA
ctcggtgctgctgtctgccttctgcatccactgctaccacaagtttgcccacaagccacccatctcctcagctgagatga

SEQ ID NO: 19096 - DNA, 80 bp, synthetic construct
  source 1..80: mol_type = other DNA
cccaccagctttcctaattggtggtccccatcctggcctggctgcagcttagcctcatggcagggctctaggatgagcca

SEQ ID NO: 19097 - DNA, 80 bp, synthetic construct
  source 1..80: mol_type = other DNA
cggttctctgcacattggaacttgtccatggggcctcctttaagggtcttgccttcttcctcccctgtcatcctcacact

SEQ ID NO: 19098 - DNA, 80 bp, synthetic construct
  source 1..80: mol_type = other DNA
gccaggccccagccctgtgaacagccaggctgaatggcggtgagggagagtggttggtgtacataacaattatctgcagt

SEQ ID NO: 19099 - DNA, 80 bp, synthetic construct
  source 1..80: mol_type = other DNA
tgaagcaggtcaaccacccacatgtcatcaaattgtatggggcctgcagccaggatggtaaggccagctgcagggtgagg

SEQ ID NO: 19100 - DNA, 80 bp, synthetic construct
  source 1..80: mol_type = other DNA
gcaggaacccttgcatctgcgcaggcctctgcctccatcagcatccccagcctgcactggggcaggacccaggaggcaaa

SEQ ID NO: 19101 - DNA, 80 bp, synthetic construct
  source 1..80: mol_type = other DNA
cagtgcccttgggaagcctaggaaagataccgaagattagtggagctctaagctttttatagccctcaccccaaatcttt

SEQ ID NO: 19102 - DNA, 80 bp, synthetic construct
  source 1..80: mol_type = other DNA
ctgccaagacagccacactgcactaaggacataaatccctcatgtgtttaagtaaaagaagtgacagtaagattgtgttc

SEQ ID NO: 19103 - DNA, 80 bp, synthetic construct
  source 1..80: mol_type = other DNA
agggtcggattccagttaaatggatggcaattgaatccctttttgatcatatctacaccacgcaaagtgatgtgtaagtg

SEQ ID NO: 19104 - DNA, 80 bp, synthetic construct
  source 1..80: mol_type = other DNA
ctggccaacatgtgcatcttaaatactgtgggctgtgaataagcaattggacaacagctttccgattatataagctgact

SEQ ID NO: 19105 - DNA, 80 bp, synthetic construct
  source 1..80: mol_type = other DNA
taccccactgagggctggtgggcttcctagggggtcttataaaaatgagtgagagcagagactggtgcaatgcaagctca

SEQ ID NO: 19106 - DNA, 80 bp, synthetic construct
  source 1..80: mol_type = other DNA
atcagcaaagacctggagaagatgatggttaagaggagagtgagtgcctgggtccaattcccacaagctgaaagtggctt

SEQ ID NO: 19107 - DNA, 80 bp, synthetic construct
  source 1..80: mol_type = other DNA
cttcacatcactgtctcgcttggatgaaaacttcaagtcctgagaatgcagcgttgttcaaaacagaagcgatcactggt

SEQ ID NO: 19108 - DNA, 80 bp, synthetic construct
  source 1..80: mol_type = other DNA
attgaaaacaaactctatggtagaatttcccatgcatttactagattctagcaccgctgtcccctttgcactatccttcc

SEQ ID NO: 19109 - DNA, 80 bp, synthetic construct
  source 1..80: mol_type = other DNA
tggagtttcaagcatttttttcaagctgagacggttccttttgcatgcctcctgactcactgactcctcactggctttgt

SEQ ID NO: 19110 - DNA, 80 bp, synthetic construct
  source 1..80: mol_type = other DNA
ggtggcagactcgtttttggtagtttgttttaacttccaaggtggttttacttctgatagccggtgattttccctcctag

SEQ ID NO: 19111 - DNA, 80 bp, synthetic construct
  source 1..80: mol_type = other DNA
gcaatgacaatgaccaaggactgctacacctctgattacaattctgatgtgaaaaagatggtgtttggctcttatagagc

SEQ ID NO: 19112 - DNA, 80 bp, synthetic construct
  source 1..80: mol_type = other DNA
aaggtcattaaaccagatcatgttcctttttttgtaatcaaggtgactaagaaaatcagttgtgtaaataaaatcatgta

SEQ ID NO: 19113 - DNA, 80 bp, synthetic construct
  source 1..80: mol_type = other DNA
taagctctaagaagggagagtcttgtctgtcttgctcactgctatatctcaatattctatgacaatgactacagcgtagt

SEQ ID NO: 19114 - DNA, 80 bp, synthetic construct
  source 1..80: mol_type = other DNA
ttgctttcattaccatcatcttcttccaaggcatctgggtgagaaacaaagatgggttctgatgggtatgaatcaggctc

SEQ ID NO: 19115 - DNA, 80 bp, synthetic construct
  source 1..80: mol_type = other DNA
tattctagactctattcttggcattcaggatgttttggagagtgaagtccctgtcctcatgaagcctacattctagttca

SEQ ID NO: 19116 - DNA, 80 bp, synthetic construct
  source 1..80: mol_type = other DNA
catgaaagtaagagaggcatcaagcataacaccaaggtgtttgacctgtacaatgttgatgtcacaacaaagataggaac

SEQ ID NO: 19117 - DNA, 80 bp, synthetic construct
  source 1..80: mol_type = other DNA
gagagtgagaaagtactgtgttcaatggattggaagttcctggtggaaattgcagtagggcaagtgatgttgaaagataa

SEQ ID NO: 19118 - DNA, 80 bp, synthetic construct
  source 1..80: mol_type = other DNA
taactgggacctaagccctttctatttttctcttcattgccaaacttttaagagtgtgcacgcagtaactgctttccaga

SEQ ID NO: 19119 - DNA, 80 bp, synthetic construct
  source 1..80: mol_type = other DNA
tcggcttctttctctctgatacactaggtaacgggctccatgagaactagaagtgtattttatgtacccactgcaacaaa

SEQ ID NO: 19120 - DNA, 80 bp, synthetic construct
  source 1..80: mol_type = other DNA
aattataccatcattcactcaactgctcaggatggaaatcttgaagtcatcctgaactccttcctctcccttacccctca

SEQ ID NO: 19121 - DNA, 80 bp, synthetic construct
  source 1..80: mol_type = other DNA
gctgcagttgcttttgctaagtcacagtactcttctgagctttagtttcatttgtaaaatgaaggaagtttaattagcct

SEQ ID NO: 19122 - DNA, 80 bp, synthetic construct
  source 1..80: mol_type = other DNA
tgtccagtgtcctttcttaccctttccagcagcagagatccacaatcagaaacccattgtcttcataggtgttgatgtga

SEQ ID NO: 19123 - DNA, 80 bp, synthetic construct
  source 1..80: mol_type = other DNA
gtgaaatttcatgtgaagctgcaaaatcacccaggaaaatccaaatagcagcagatttggaaacgtgcactcaaataggg

SEQ ID NO: 19124 - DNA, 80 bp, synthetic construct
  source 1..80: mol_type = other DNA
ttgggcattaggccccttatagggtagggatgagggcagtacttctgaagtctgagagtaatttaactatgcacaaaatg

SEQ ID NO: 19125 - DNA, 80 bp, synthetic construct
  source 1..80: mol_type = other DNA
gtcaatcatttatcaaatactctgagctttcactatgtgccaggcactgtatcagggctcaggagagagaagatctttgc

SEQ ID NO: 19126 - DNA, 80 bp, synthetic construct
  source 1..80: mol_type = other DNA
ctgctgccttaaataaattgtatttaagggaatcaggctggaggcaaaggcactggttaataacagtaaacaatcaaaaa

SEQ ID NO: 19127 - DNA, 80 bp, synthetic construct
  source 1..80: mol_type = other DNA
ccctttaagccttctttcacctgtcccaccttgcattgccaactacttccagaagtaattcctttcgtatttatgctttc

SEQ ID NO: 19128 - DNA, 80 bp, synthetic construct
  source 1..80: mol_type = other DNA
tgcttaattgtctccaaggtctctggattaatctttgtaataaagttggtctctgtgcaagcgtagtaatcttcccccac

SEQ ID NO: 19129 - DNA, 80 bp, synthetic construct
  source 1..80: mol_type = other DNA
ccacccccatcacctataacctatcaacctaaacttactgggaaaattccggacatggtgtgctgaattatattcttctc

SEQ ID NO: 19130 - DNA, 80 bp, synthetic construct
  source 1..80: mol_type = other DNA
actaattataaaaccaagaattggaggtcaacatcttgccaaggttaccctcctaggcaagtcatgtctgttgaatacag

SEQ ID NO: 19131 - DNA, 80 bp, synthetic construct
  source 1..80: mol_type = other DNA
actctccacctaatagatttccccaaacaccaatccatttgccttttgccatctcatttttaagaagattttcaaatttc

SEQ ID NO: 19132 - DNA, 80 bp, synthetic construct
  source 1..80: mol_type = other DNA
gtaggtaagggaattgaggctcagaacgtttaagtaacttagaggattcacagacagtgaaatgatagagctaggttagc

SEQ ID NO: 19133 - DNA, 80 bp, synthetic construct
  source 1..80: mol_type = other DNA
atcactgctctgatgtcaagagacatgacctctcttttaatgtcaatggttacagtgaacttaatcctgtcctctgcagt

SEQ ID NO: 19134 - DNA, 80 bp, synthetic construct
  source 1..80: mol_type = other DNA
aaaagtctcccagagatacttactggatagacattttcttccagttcaggatccagagttctggcaccaactgcagaatg

SEQ ID NO: 19135 - DNA, 80 bp, synthetic construct
  source 1..80: mol_type = other DNA
ctgtcactctgtcttttagtctccttcacctttctcactacagagaattagtaggattggggactccagaatgggaaagg

SEQ ID NO: 19136 - DNA, 80 bp, synthetic construct
  source 1..80: mol_type = other DNA
ctcctgagacatctaattatatccttgctgccctgtcttctgaggtagggtcctatctttatctccctgacagatttgag

SEQ ID NO: 19137 - DNA, 80 bp, synthetic construct
  source 1..80: mol_type = other DNA
tgcatagacatgactaaaaaccaactttattgaggtataattgacctgcaataaattttacccagtttatgtgttcaatg

SEQ ID NO: 19138 - DNA, 80 bp, synthetic construct
  source 1..80: mol_type = other DNA
ctgtgattttctattcttgctccattttgcttcgtttggttaagtatgatggccacagcccccccaaactgatttcactt

SEQ ID NO: 19139 - DNA, 80 bp, synthetic construct
  source 1..80: mol_type = other DNA
atggagaggatcactcagcctaggagtccaaggctgcagtgagctatgatcgtaccactgcactccaccccaggagacag

SEQ ID NO: 19140 - DNA, 80 bp, synthetic construct
  source 1..80: mol_type = other DNA
ttttgtagagatgggggtctcattatgtatattgcccaggctagtcttttttttttttttttttttgagatggagtctcg

SEQ ID NO: 19141 - DNA, 80 bp, synthetic construct
  source 1..80: mol_type = other DNA
atgctcaaccaaagtctgttaaatgagtgtaaggcccagagcataaggcctgggagccagtaaagtgcctaataaaaaca

SEQ ID NO: 19142 - DNA, 80 bp, synthetic construct
  source 1..80: mol_type = other DNA
tactgtcctttatggtacttccaggatccagcccgggctgtcacattgcattcaggtgccattagaaagcagtctataaa

SEQ ID NO: 19143 - DNA, 80 bp, synthetic construct
  source 1..80: mol_type = other DNA
tgctggcttgtatctcaaggagttgtcaggagcaggtagagggcttgggtgggttgatcttgtcagtcactgtctttttc

SEQ ID NO: 19144 - DNA, 80 bp, synthetic construct
  source 1..80: mol_type = other DNA
gccgagggccttggatccaaggcaaaggggcctggagggtcaggggacacccgcaggggcctgacttgggagactggggg

SEQ ID NO: 19145 - DNA, 80 bp, synthetic construct
  source 1..80: mol_type = other DNA
caggaaggaaggaaggggatgggggcttctgagcccctgtccccgacgcctgctcctttctcctctttccagtcctttcc

SEQ ID NO: 19146 - DNA, 80 bp, synthetic construct
  source 1..80: mol_type = other DNA
tggtattttacagggagcatcttgtcacctgtgactaggccagacctcttggggatctggagagtccggggatctgtgct

SEQ ID NO: 19147 - DNA, 80 bp, synthetic construct
  source 1..80: mol_type = other DNA
aaacttagaccccaaagtattagcccccaaggctcctaaactcagattcaaatcttaaaacatcaagtttaaagcttgtt

SEQ ID NO: 19148 - DNA, 80 bp, synthetic construct
  source 1..80: mol_type = other DNA
cagatggtttttgaccctcaaactcagaccctgaaactcagactcatcaacttctaactacaaagctcagatcgttccta

SEQ ID NO: 19149 - DNA, 80 bp, synthetic construct
  source 1..80: mol_type = other DNA
gagggctgggaccctatgagtaggattagggaccagattccggggagctgaacccttgacttcactctcttctgtgtccc

SEQ ID NO: 19150 - DNA, 80 bp, synthetic construct
  source 1..80: mol_type = other DNA
gtgtgcacctttagtctcagctactttgtggggctgaggtgggaggatcactcgagcccagcgggtcaaggctgcagtga

SEQ ID NO: 19151 - DNA, 80 bp, synthetic construct
  source 1..80: mol_type = other DNA
gactgtaatgtccatgggagaactggggggtcctctgactccccttggctctcaccctccacagctggagtgggagccac

SEQ ID NO: 19152 - DNA, 80 bp, synthetic construct
  source 1..80: mol_type = other DNA
aatctgtagacagacagggaaaggcagagataaagaggcatggaaacagagaaatagagaaagatagagacagagaaaca

SEQ ID NO: 19153 - DNA, 80 bp, synthetic construct
  source 1..80: mol_type = other DNA
ttgtttgtttgttttttgtagagacgaggtctcattatattacacaggctggtctcaaactcctggggctcaagtgatcc

SEQ ID NO: 19154 - DNA, 80 bp, synthetic construct
  source 1..80: mol_type = other DNA
ctatcggcacattcccccatgcaagcttgtagctcgattttccaggctgctctttgttagaaaagaaattattttggggg

SEQ ID NO: 19155 - DNA, 80 bp, synthetic construct
  source 1..80: mol_type = other DNA
ccgctgccagcaggaggagtcccaggccgcccgcatgatccacagcaccaatggcctatacaaccagttcatcaagtgag

SEQ ID NO: 19156 - DNA, 80 bp, synthetic construct
  source 1..80: mol_type = other DNA
cttggccattgtgtgacctcggacaaatgcttttccctctctgcgtctcggtctccctctctgtaaaacgggtgggtctg

SEQ ID NO: 19157 - DNA, 80 bp, synthetic construct
  source 1..80: mol_type = other DNA
tggcatattagatggtaataactgttaaagagaaaaattcagcaggtaaggggtagggagtgttggggttttgcagttta

SEQ ID NO: 19158 - DNA, 80 bp, synthetic construct
  source 1..80: mol_type = other DNA
aggttatgtaataagtggttgatgaaaatactgtcacagactctcagggactccctgtatttcccctagaagcagtggtt

SEQ ID NO: 19159 - DNA, 80 bp, synthetic construct
  source 1..80: mol_type = other DNA
actgtgtcctcattgagagtccagaggttctgaacatcatccaggagaatcacatcaagtccatcatctccctcctggac

SEQ ID NO: 19160 - DNA, 80 bp, synthetic construct
  source 1..80: mol_type = other DNA
aaatattacagcctctaggtggactgtatatatatacacacactctgtagtttgccatagccctacaagttcctgttgca

SEQ ID NO: 19161 - DNA, 80 bp, synthetic construct
  source 1..80: mol_type = other DNA
gtcaaaattgccacatcttatcccgatgcgctgtcctttcctcctggcttccctccctcccagggttcttctgtagatcc

SEQ ID NO: 19162 - DNA, 80 bp, synthetic construct
  source 1..80: mol_type = other DNA
ttgaccccagcatttctaagtctctgaccatacaccttggggttctcaggatcctgactccctgaaaaggtcaacttttg

SEQ ID NO: 19163 - DNA, 80 bp, synthetic construct
  source 1..80: mol_type = other DNA
agggacctccacgtgactccagactctttccaatgacctcagattctccctaaccccacgtccttccagtaacctctgag

SEQ ID NO: 19164 - DNA, 80 bp, synthetic construct
  source 1..80: mol_type = other DNA
tcttaattcccttatgatattcctttgactctagactttcttttatgacttctaaatgacctccaggacactatgactgc

SEQ ID NO: 19165 - DNA, 80 bp, synthetic construct
  source 1..80: mol_type = other DNA
ggagctgccctagaagctgggaacctcgttgtttaacagatggagaaactgagcacagagaggcaaaggattctgtcaga

SEQ ID NO: 19166 - DNA, 80 bp, synthetic construct
  source 1..80: mol_type = other DNA
tctcaaaagaagaaagaaagaaaggactgtttttgccttccctccaagcatgtccctataggagggaatataggttaggt

SEQ ID NO: 19167 - DNA, 80 bp, synthetic construct
  source 1..80: mol_type = other DNA
gtgctgggattacagatgtgagccactacggctggccctggataattccttaattctgagaatgctaagccctcacccat

SEQ ID NO: 19168 - DNA, 80 bp, synthetic construct
  source 1..80: mol_type = other DNA
gtgcggtgggggagggaggcatggagagacagggcaggaggtagagactgagagagagaaggatggaggggacagggatt

SEQ ID NO: 19169 - DNA, 80 bp, synthetic construct
  source 1..80: mol_type = other DNA
gtcgttggagtcgtctaagtaagggatcctgaaattataggtgagcagttacacgtcctgagttcagaggtcaaggactc

SEQ ID NO: 19170 - DNA, 80 bp, synthetic construct
  source 1..80: mol_type = other DNA
aaaacaaagagagagaaaaacctcaaagttagtggtgagaggtctgagagagttccggggttagagataggggtcccaaa

SEQ ID NO: 19171 - DNA, 80 bp, synthetic construct
  source 1..80: mol_type = other DNA
agcctaggaacccaatgagtgccaaccccacctttgactctgattcctgacctctagctttgatccctaatcactaatct

SEQ ID NO: 19172 - DNA, 80 bp, synthetic construct
  source 1..80: mol_type = other DNA
ctgtgcctcactctgtccccacttcatgcatctactgtaccactcatccacccatctatccatccattcaaccaatgatt

SEQ ID NO: 19173 - DNA, 80 bp, synthetic construct
  source 1..80: mol_type = other DNA
cctgaacctgacacttcgaatgtctgtcttcatatatctctccctccctgcttccttatctctccatttctctgtgtgtc

SEQ ID NO: 19174 - DNA, 80 bp, synthetic construct
  source 1..80: mol_type = other DNA
agtgctcttctttgagtttctcttttccctccatgttaggacacaaaccacatggaagcaagtgtcagagtgatgggctc

SEQ ID NO: 19175 - DNA, 80 bp, synthetic construct
  source 1..80: mol_type = other DNA
actctgcaaaaggagttttaagtatgggaacgtccagttgaggtctgagttttggaaaggtccctattggcagtggattg

SEQ ID NO: 19176 - DNA, 80 bp, synthetic construct
  source 1..80: mol_type = other DNA
agaaaaaaagagtgaatgcagaaaccagatttataagacagaggggagaaagaggagagaaaaaagacccctaaagagtc

SEQ ID NO: 19177 - DNA, 80 bp, synthetic construct
  source 1..80: mol_type = other DNA
tgactttattcatcaaaactagtcatggagaagtgaccggattcccatccgaagcaaccacttcaaatctaggggggaaa

SEQ ID NO: 19178 - DNA, 80 bp, synthetic construct
  source 1..80: mol_type = other DNA
tggttactggttacagaatgacagagtagattgttagatggatgtagggaggttttggaagttaccccaagtgattccag

SEQ ID NO: 19179 - DNA, 80 bp, synthetic construct
  source 1..80: mol_type = other DNA
tcacaaatgtaccccccgaaatctaacttaaagggagattctgagaaggtactaaatctgctttttccctacaatggcag

SEQ ID NO: 19180 - DNA, 80 bp, synthetic construct
  source 1..80: mol_type = other DNA
attcccagaaggcgcctttaatttgggtaactcagcatccacaagcgcagagcatagcacttctagaatggattagtctg

SEQ ID NO: 19181 - DNA, 80 bp, synthetic construct
  source 1..80: mol_type = other DNA
aacaaaaattcataattgtcttaatatagttttgggatttccccaaatccaaaatatttcatagacagacagcctagtgc

SEQ ID NO: 19182 - DNA, 80 bp, synthetic construct
  source 1..80: mol_type = other DNA
tctatgccttctctcctatggaggtgctatggttttccatcagtagaatgggggtaaaaattatacctacctgatatgga

SEQ ID NO: 19183 - DNA, 80 bp, synthetic construct
  source 1..80: mol_type = other DNA
agggagcccgagtccctgacttccagactgaccactagttcccctccttgtgtcaccagtactattactccgtgagggtc

SEQ ID NO: 19184 - DNA, 80 bp, synthetic construct
  source 1..80: mol_type = other DNA
aatggcaaagagagcaacacctttttccaggtgagtccaggccacagcaatttagcgagagcatcatgtcccagcatccc

SEQ ID NO: 19185 - DNA, 80 bp, synthetic construct
  source 1..80: mol_type = other DNA
ctaagtagctgggactataggcatgcaccaccttgactagctgattttttgtgtgtattgtttgtagagatgggttttcc

SEQ ID NO: 19186 - DNA, 80 bp, synthetic construct
  source 1..80: mol_type = other DNA
tttgaaggaaattgcagacatcagatagtttcctctgttttcagtgtgtagctttaaaagataaggatgatcttaaagag

SEQ ID NO: 19187 - DNA, 80 bp, synthetic construct
  source 1..80: mol_type = other DNA
catatattttaggtggttgctctgtaccttgagtttcatttcatatgtagatttccccctccattccttcttctttccca

SEQ ID NO: 19188 - DNA, 80 bp, synthetic construct
  source 1..80: mol_type = other DNA
tcgctaattttttatgttttgtagagatggggtctcactacgttgcccaggctgctcttgaactcttaggctcaggtgac

SEQ ID NO: 19189 - DNA, 80 bp, synthetic construct
  source 1..80: mol_type = other DNA
tctgggtcccactcagtgcccctcctcaacacaaccccgggattccagactacaccccaggaatctccagacctacctca

SEQ ID NO: 19190 - DNA, 80 bp, synthetic construct
  source 1..80: mol_type = other DNA
caaaaaatagaattctgaacgtgggaggaatcccagactcacccaggaggcttctgacatgcctctttctttctttcctt

SEQ ID NO: 19191 - DNA, 80 bp, synthetic construct
  source 1..80: mol_type = other DNA
gggtggatagtgatgaaggaaatggaggaagagatggtggcttgactgatgcaggaggctcattcatctgtccctgtctg

SEQ ID NO: 19192 - DNA, 80 bp, synthetic construct
  source 1..80: mol_type = other DNA
ttcctcctgctttcctctgtcccattcttctcccacattcccaaaactccagagatacatgcatcaatcctcctctattt

SEQ ID NO: 19193 - DNA, 80 bp, synthetic construct
  source 1..80: mol_type = other DNA
atgtattaatctatctttccttccgtaggtccaataatcatctcctcccacctatgcgtccatccatacctacatccaca

SEQ ID NO: 19194 - DNA, 80 bp, synthetic construct
  source 1..80: mol_type = other DNA
atttacttcctcatgcatctatcaacccatccatcacctactcacctacctatacatcatttatccttctctcatccatc

SEQ ID NO: 19195 - DNA, 80 bp, synthetic construct
  source 1..80: mol_type = other DNA
ggaggccttgcaggccacagtgaagaaccgagactttgtcctgtaggtgatgggcatctttggcgatgaggatgtgaaac

SEQ ID NO: 19196 - DNA, 80 bp, synthetic construct
  source 1..80: mol_type = other DNA
ctcccacacggctgtccttccacagatgtgccacctgctggagtatttctgtgaccaagagctgcagcaccgtgtggagt

SEQ ID NO: 19197 - DNA, 80 bp, synthetic construct
  source 1..80: mol_type = other DNA
tttctctcgagacctctccagaagtttccctaagatttcctgacaaccctctacagtatcggtgctatgtaactattggt

SEQ ID NO: 19198 - DNA, 80 bp, synthetic construct
  source 1..80: mol_type = other DNA
tttttcttcattcttttacttttctgttcttcaggctagacaatctctatgtcctatcttcaagttcactgactgtttct

SEQ ID NO: 19199 - DNA, 80 bp, synthetic construct
  source 1..80: mol_type = other DNA
cactggggagagggcaggggtggggtgggtagccccatgcctgcggagcctctgggtcccaaagagggcatgaggacaga

SEQ ID NO: 19200 - DNA, 80 bp, synthetic construct
  source 1..80: mol_type = other DNA
cacccagccaaatccacagtatttttatagaacaagtgggattgtgacatgtgccttcaaaggtgcatggcgaagtgctt

SEQ ID NO: 19201 - DNA, 80 bp, synthetic construct
  source 1..80: mol_type = other DNA
tttgcatatccccttgggtaatgaataccctcaggatacaataacattcccttccccaacttctggcccatcctctgggt

SEQ ID NO: 19202 - DNA, 80 bp, synthetic construct
  source 1..80: mol_type = other DNA
ggctggaattacaaggcaaaagccaccatgctgggacaacatttgacaaagggcaacatggcaaagatctctgccctaga

SEQ ID NO: 19203 - DNA, 80 bp, synthetic construct
  source 1..80: mol_type = other DNA
cccagaacccactcctggcaccccgtccaggcctgccccactttccaccagctcactcattcaacaaacactccctctca

SEQ ID NO: 19204 - DNA, 80 bp, synthetic construct
  source 1..80: mol_type = other DNA
tcatggagtcattctgaggattaaatgaattaatccagtaaagtgtttgtaaaggggcagtcagtaacgttagctgctgt

SEQ ID NO: 19205 - DNA, 80 bp, synthetic construct
  source 1..80: mol_type = other DNA
catctcatcggtcacaacaagggctctggcttttaccctgagtgagaggaggccaggattctgagcagaggagggacgtg

SEQ ID NO: 19206 - DNA, 80 bp, synthetic construct
  source 1..80: mol_type = other DNA
ccagacattggctggaacccctgtggtggagagcgctacctggacttcctgcgctttgctgtcttcgtcaacggtgagga

SEQ ID NO: 19207 - DNA, 80 bp, synthetic construct
  source 1..80: mol_type = other DNA
ctagcaatgttggggacacaacagtgaccaagacagccccagggcctggtctcacagagctcccagtccaatgggggaga

SEQ ID NO: 19208 - DNA, 80 bp, synthetic construct
  source 1..80: mol_type = other DNA
tcacggtagagcagcagcagctgcttttgtttttcttgggattgtggacatatcataatccccaataccatcatcaagat

SEQ ID NO: 19209 - DNA, 80 bp, synthetic construct
  source 1..80: mol_type = other DNA
tgtattacaggaagaaagatgagggttagagaggagataagcgtgcagaccattgatatttacagaagagccaaatctgt

SEQ ID NO: 19210 - DNA, 80 bp, synthetic construct
  source 1..80: mol_type = other DNA
gggcagcgtccccgtagaaatctcttagcatccttatttgcatactaggattcccagaacattcactttgcttcattgat

SEQ ID NO: 19211 - DNA, 80 bp, synthetic construct
  source 1..80: mol_type = other DNA
tcaaaaaaaaaaaaaaaatttgcattttggatagtggaggccctcttcccaattaccatatatttgcatggggtgcagcc

SEQ ID NO: 19212 - DNA, 80 bp, synthetic construct
  source 1..80: mol_type = other DNA
atggggatgatttgagcatacaattgggactgacatttgggtttcaaggagagggaccataattcaggtttggggttcag

SEQ ID NO: 19213 - DNA, 80 bp, synthetic construct
  source 1..80: mol_type = other DNA
ctttgccttctctcaaacttggtagagtgggtagagactccgagagagtgggtttgattccttggctgtagtaagacttc

SEQ ID NO: 19214 - DNA, 80 bp, synthetic construct
  source 1..80: mol_type = other DNA
gaataataacagcgtttaccaccatggggtaatgagatgagcaccagcaagcaatgtttccgttattcgtatcttcttta

SEQ ID NO: 19215 - DNA, 80 bp, synthetic construct
  source 1..80: mol_type = other DNA
ggactcagagtggagccccaacctggggtgaagccaaagctgatagagacggggccagcaggagcagaggcggacctgag

SEQ ID NO: 19216 - DNA, 80 bp, synthetic construct
  source 1..80: mol_type = other DNA
gtgagccaccgcacccggcttgccagttgtaattttaaatagggtgttccagaaagactttgatgagaatgtgatatctg

SEQ ID NO: 19217 - DNA, 80 bp, synthetic construct
  source 1..80: mol_type = other DNA
agtttcctcacctgtgatatgggcatatgttcaccataactagccatggttctgttacttactgggtgacctggggttag

SEQ ID NO: 19218 - DNA, 80 bp, synthetic construct
  source 1..80: mol_type = other DNA
tgtctgggtgacaagaaaaaaaaaaggagttgggggaatcagatgaaagataggagaaaggtttatctcaaagccaacac

SEQ ID NO: 19219 - DNA, 80 bp, synthetic construct
  source 1..80: mol_type = other DNA
cgggactgaagggtttcccaggatgtgggactctcaggcaacttgggacaaatcgatcaccctgtccaggaaggccaact

SEQ ID NO: 19220 - DNA, 80 bp, synthetic construct
  source 1..80: mol_type = other DNA
ggtcaactgtcttcacatcctggcccgctccctggatgccaggtagggccataggcagtggcgcccactcccaccatcat

SEQ ID NO: 19221 - DNA, 80 bp, synthetic construct
  source 1..80: mol_type = other DNA
ttgggcaacatagcgagaccctgtctctactaaaaaaaaaaagaaaaatttaaagattagccaggcatggaggcacatgc

SEQ ID NO: 19222 - DNA, 80 bp, synthetic construct
  source 1..80: mol_type = other DNA
tgtgtgcctacccttcactgtatggttgaaagtatttagttttttttgttgaacttttgggtgtaagttgcacacaccag

SEQ ID NO: 19223 - DNA, 80 bp, synthetic construct
  source 1..80: mol_type = other DNA
gaaggtactataactatccccatgttacaggtagggaagctgaggctgagagagagttggtaacttgctcaagtcacaag

SEQ ID NO: 19224 - DNA, 80 bp, synthetic construct
  source 1..80: mol_type = other DNA
tacagcaagagcgaggctgcggctgtttccaccagctctgaagttattcagatttcaagtgacaccagcggtgcgcggtg

SEQ ID NO: 19225 - DNA, 80 bp, synthetic construct
  source 1..80: mol_type = other DNA
ctatggaatttattttagtgatggtgacatttgagggcatcatcaagcttggagacatagggtgaggggtatttgagcat

SEQ ID NO: 19226 - DNA, 80 bp, synthetic construct
  source 1..80: mol_type = other DNA
tggagggtgagatgggaagaatagggtttgggagactgtttaaggggggtggcaattcaatggtgtctgatgtattgcgg

SEQ ID NO: 19227 - DNA, 80 bp, synthetic construct
  source 1..80: mol_type = other DNA
ggaaggaaggaaggaagaaatggatcctcaaagcgttaggtttcctgattcagaagtttcatgtcagggccaggcacaat

SEQ ID NO: 19228 - DNA, 80 bp, synthetic construct
  source 1..80: mol_type = other DNA
caggatagggactgggtcttaggttcaggttaggggctatggctgggatcagtgttcagggactatatccaaggttaggg

SEQ ID NO: 19229 - DNA, 80 bp, synthetic construct
  source 1..80: mol_type = other DNA
tatagactcacaccaacatgctcggctaattcttgtatttttatggggtctcactatgttgcccaggttggtcttgaatt

SEQ ID NO: 19230 - DNA, 80 bp, synthetic construct
  source 1..80: mol_type = other DNA
agaaataaactacatattttaccatctgtttaatgttcacgagcagataagaataagtttggggccgggtgcagtggctt

SEQ ID NO: 19231 - DNA, 80 bp, synthetic construct
  source 1..80: mol_type = other DNA
tttcttgacttcggtgctggctacacaagtgtgttcatttgtgataattcaccaggttgatatttcttaatatgtaggtt

SEQ ID NO: 19232 - DNA, 80 bp, synthetic construct
  source 1..80: mol_type = other DNA
gagacagagaaaaaaaatttttttaatgttcatctgcatggccagatgaccctagaaaccccatccctctgactggatgt

SEQ ID NO: 19233 - DNA, 80 bp, synthetic construct
  source 1..80: mol_type = other DNA
ctgcccttctcaggtctcagagaacgaccccccaccccgagccaaggcctggaaatgcccagctagagaatacatggcgg

SEQ ID NO: 19234 - DNA, 80 bp, synthetic construct
  source 1..80: mol_type = other DNA
tgcatctttggtcttcctgtctccttgtctttttcagtctctcagtgtctttttcttgcaacttctcttgtcgcttgaac

SEQ ID NO: 19235 - DNA, 80 bp, synthetic construct
  source 1..80: mol_type = other DNA
gatgctgaggactcactgtgcccctgggatgccctgaggaccccgttcaagatattgccagggcaccacagacctaagag

SEQ ID NO: 19236 - DNA, 80 bp, synthetic construct
  source 1..80: mol_type = other DNA
ccttttgtttctctcagacccccacccccaccccagaaaaacctcttcagttcctggggtgctgggcctggaaggaaagg

SEQ ID NO: 19237 - DNA, 80 bp, synthetic construct
  source 1..80: mol_type = other DNA
agaaaggcctcaacatgcactcacccattgagtcctcccaaaaacggaaaggggacatccggcggacactgtgggaaggg

SEQ ID NO: 19238 - DNA, 80 bp, synthetic construct
  source 1..80: mol_type = other DNA
taacatgttcctggagagctacaaggctgcatggatcctgactgaagaccacagttttgaggaccgcatgatagatgacc

SEQ ID NO: 19239 - DNA, 80 bp, synthetic construct
  source 1..80: mol_type = other DNA
gccaatatggcaaaaccccgtttctacaaaaatacaataaatagccaggcttggtggtgggcacttgtaatcccatctac

SEQ ID NO: 19240 - DNA, 80 bp, synthetic construct
  source 1..80: mol_type = other DNA
cgtgcctccatgcctggctattttttttttttttttctggtagagatgggggtctcactatgttgcccaggccggtctca

SEQ ID NO: 19241 - DNA, 80 bp, synthetic construct
  source 1..80: mol_type = other DNA
gccttctttggtctctttatctctctggtgagcttccacacagatctcattggccagaaattctgacataaggccatctc

SEQ ID NO: 19242 - DNA, 80 bp, synthetic construct
  source 1..80: mol_type = other DNA
ctcccagaatggattttactggacagcatggacaacatgaccatttcttacctgtcatcatggccacacagataaaagtc

SEQ ID NO: 19243 - DNA, 80 bp, synthetic construct
  source 1..80: mol_type = other DNA
ggcttctcggaggaggggacttctgagcagaaggataaaaggagcctgccagttgaagaaaaagagaaaaatgttctacg

SEQ ID NO: 19244 - DNA, 80 bp, synthetic construct
  source 1..80: mol_type = other DNA
gtctctcttcctggaccaaaagagcagaatttgaataggaaatggttctaattctgcaacaataatgtgatatggaatat

SEQ ID NO: 19245 - DNA, 80 bp, synthetic construct
  source 1..80: mol_type = other DNA
gtgagttgtggatgtggctggaacagggagggcagaagtgagaatgtgagggggaaaggctgggctggaaagcctggact

SEQ ID NO: 19246 - DNA, 80 bp, synthetic construct
  source 1..80: mol_type = other DNA
ttcatcctggcccaaccatatgtcctagcttctgccaactcttcatttctgcttcctcttgatttcagcgcatagatggt

SEQ ID NO: 19247 - DNA, 80 bp, synthetic construct
  source 1..80: mol_type = other DNA
ccctctgcttttaccctcatttcctaccctcttccctgctaatccatttccttctgtctccttatcactctgcctttctc

SEQ ID NO: 19248 - DNA, 80 bp, synthetic construct
  source 1..80: mol_type = other DNA
acccccataatccattaacctccacggtctgaaggggggctgagggcattaccagctgcctgaatgtctgctaggtcagc

SEQ ID NO: 19249 - DNA, 80 bp, synthetic construct
  source 1..80: mol_type = other DNA
catctcctctggccagtccaattccccaaaagcaacctgccaaaaaccaatttggccaaaaatcaatttgcccaaatgga

SEQ ID NO: 19250 - DNA, 80 bp, synthetic construct
  source 1..80: mol_type = other DNA
caggactacaggcatgcatcaccatgtctggctaagttttttattttttgtagagatgagatctcactgtgttgcccagg

SEQ ID NO: 19251 - DNA, 80 bp, synthetic construct
  source 1..80: mol_type = other DNA
ataaggagaccctgtctctaccaaaaaaaaaaaaaatcatatactacagtataataaacctccaatcatatactacagta

SEQ ID NO: 19252 - DNA, 80 bp, synthetic construct
  source 1..80: mol_type = other DNA
caaggttgagaggatgagaagcacacacttcttcttttgtagttaactagagcagtacaggacagaaaagaacagaatgc

SEQ ID NO: 19253 - DNA, 80 bp, synthetic construct
  source 1..80: mol_type = other DNA
gttggtggtcaatatacaaatttgttggaaaaaactgaatgaataaatgacgctccaccacatttgacacatagcaggcc

SEQ ID NO: 19254 - DNA, 80 bp, synthetic construct
  source 1..80: mol_type = other DNA
cttttcatctccccagatttccagaactacctacggacacagacagggaacacgaccactattaacatcatcatttgcac

SEQ ID NO: 19255 - DNA, 80 bp, synthetic construct
  source 1..80: mol_type = other DNA
ggaaatgttttgcttctttatcttacttgcggcagatgacacccatatcaggcattcatgatgtaaggtccctgttgagc

SEQ ID NO: 19256 - DNA, 80 bp, synthetic construct
  source 1..80: mol_type = other DNA
atttatcagttcatattacagatccagggcttagagtgatgtcagcagaactgcctcctctttgactgcatttgcaagca

SEQ ID NO: 19257 - DNA, 80 bp, synthetic construct
  source 1..80: mol_type = other DNA
cacatgttggcaattttatgtgactcaacctaacataaataggggccatgaggcaaaactttgtattggaggtttctatg

SEQ ID NO: 19258 - DNA, 80 bp, synthetic construct
  source 1..80: mol_type = other DNA
acaaaccaaatgtccaaatgtggcaaaagataaacaattgatgaatgtggatatattaggatcccttttttttttttttc

SEQ ID NO: 19259 - DNA, 80 bp, synthetic construct
  source 1..80: mol_type = other DNA
cccactttactggctatgtaactttgagtgcatgactttctctatgtctcagtttctcttcctaaaagtagagtcacaca

SEQ ID NO: 19260 - DNA, 80 bp, synthetic construct
  source 1..80: mol_type = other DNA
tggctgcctcaggcaagagacatctctgcaagcctcactttccttgtttgtaaaatgaggataaaacagtccttgggtta

SEQ ID NO: 19261 - DNA, 80 bp, synthetic construct
  source 1..80: mol_type = other DNA
ttgaaataacttcaggtttatagagacgttgcaagaacagcacatagaatttctgaatacctttcacccacattgcccaa

SEQ ID NO: 19262 - DNA, 80 bp, synthetic construct
  source 1..80: mol_type = other DNA
aatttctttcgtcaatgtcttttctttgccaacccagaaccagggattgtatttaggtgttctgtctgttttcctccttc

SEQ ID NO: 19263 - DNA, 80 bp, synthetic construct
  source 1..80: mol_type = other DNA
ctgcacctggcccatggcttcttagtctatgggttgcagctgtgactggccatctgcacttaggtaagctcagggttccc

SEQ ID NO: 19264 - DNA, 80 bp, synthetic construct
  source 1..80: mol_type = other DNA
gtgtgtgccaccacacccggctacttttatttatttatttattttagagacggggtttgacatgttgccctagctggtct

SEQ ID NO: 19265 - DNA, 80 bp, synthetic construct
  source 1..80: mol_type = other DNA
ctacctgacattttacagctcaacatctgttacacaaagttataatctgcaactgggaaaagtgtattcattttattttt

SEQ ID NO: 19266 - DNA, 80 bp, synthetic construct
  source 1..80: mol_type = other DNA
ttacatttgtacatgttttactgcagagttccagcagatggagggaaatgtgctgaggaaggctgtagtatttgggccta

SEQ ID NO: 19267 - DNA, 80 bp, synthetic construct
  source 1..80: mol_type = other DNA
cagaaaccacattttaggttactgatttattcctggtcagtaaacagtcttgaggttatcttcattgttttcctatctgc

SEQ ID NO: 19268 - DNA, 80 bp, synthetic construct
  source 1..80: mol_type = other DNA
tccaaacaagggccacccattgcaattggctgatactttttaaaatcatctttcatctcttgcttcccctctattatctt

SEQ ID NO: 19269 - DNA, 80 bp, synthetic construct
  source 1..80: mol_type = other DNA
ttttttcacactaagtctatcagtggatagtgctgtcctagttgtagagcttcccatagtctggacctgaccaatgcgtc

SEQ ID NO: 19270 - DNA, 80 bp, synthetic construct
  source 1..80: mol_type = other DNA
taaaccggctggtggcggaaggccttctgcaggaggggacagcgaagctgagagttgaaagataccatatgactcagcga

SEQ ID NO: 19271 - DNA, 80 bp, synthetic construct
  source 1..80: mol_type = other DNA
atgtgagtacgtattgcatgcctatatcaaaatagttcatctaccccataaataaatacaactactatgtacccacaaaa

SEQ ID NO: 19272 - DNA, 80 bp, synthetic construct
  source 1..80: mol_type = other DNA
aggtgaggggttccggtgtgattatgtctccatgctctgtggtttctagagcccttcatgatttgcaaagcatgttactc

SEQ ID NO: 19273 - DNA, 80 bp, synthetic construct
  source 1..80: mol_type = other DNA
tactcaggaggctgaagcacgagactcatttgaccctgggaggtggaggctgcaatgagctgagatcgtgccactgcacc

SEQ ID NO: 19274 - DNA, 80 bp, synthetic construct
  source 1..80: mol_type = other DNA
cagttcagcggtccagaaatccagttcctgctttcgtgctccgaagcggatgagaacgaaatgatcaactgcgaagagtt

SEQ ID NO: 19275 - DNA, 80 bp, synthetic construct
  source 1..80: mol_type = other DNA
acacctcttgcacacacaccctgaggatgccaatgagccctctcagaaccctggcatgcttcatttgttcactgtccact

SEQ ID NO: 19276 - DNA, 80 bp, synthetic construct
  source 1..80: mol_type = other DNA
tatgcccatgtggccttggagcacctgtggggcagtataataataggtaacactacggtgttgttgttgtttgagacaga

SEQ ID NO: 19277 - DNA, 80 bp, synthetic construct
  source 1..80: mol_type = other DNA
gagttcgacaccagcctgaccaacacagacagaccctgtctctgcaaaaaaattttttttagaaattagcaggccagtca

SEQ ID NO: 19278 - DNA, 80 bp, synthetic construct
  source 1..80: mol_type = other DNA
ctgcgctgtcgctgctgtccgagcccccgctgacggcgccctatcctgtctgccgcccctcgcttcaggtgaaggagtcc

SEQ ID NO: 19279 - DNA, 80 bp, synthetic construct
  source 1..80: mol_type = other DNA
agaaaatgatacctgcagagccagagagagtaagaaacccagagaccaaattagagggcaggaaagaccaaaactaagcc

SEQ ID NO: 19280 - DNA, 80 bp, synthetic construct
  source 1..80: mol_type = other DNA
atgagcctcagtttcccctctgtaaaacgggaatcataatctgcctctttctggtggagggaagtgtaaaacttagatta

SEQ ID NO: 19281 - DNA, 80 bp, synthetic construct
  source 1..80: mol_type = other DNA
ggtgtcactgtcactgcctgtctcccacattggactggagccccataagggcaagtcctgattatctcatcatcccatgt

SEQ ID NO: 19282 - DNA, 80 bp, synthetic construct
  source 1..80: mol_type = other DNA
actaaaaatacaaaaaaaaaaaaaaaaaaaaattagccagccatagtggtgcatgcctgcaattccagctactcaggatg

SEQ ID NO: 19283 - DNA, 80 bp, synthetic construct
  source 1..80: mol_type = other DNA
aacagtagtgcccacttcacaggggtgtactgagaattaaacaagctcatgcaaataaagttcttagcccagatgttggt

SEQ ID NO: 19284 - DNA, 80 bp, synthetic construct
  source 1..80: mol_type = other DNA
ttgtaggaaagatattgagagcccaggtactttgattgcaggtaaatgatgggatgaattctccagggaagaggctgatc

SEQ ID NO: 19285 - DNA, 80 bp, synthetic construct
  source 1..80: mol_type = other DNA
aactccctcatctgtaaaatggaatacctcttagagctgtggggattgaaagaggataaggcaccaggcacagtggctca

SEQ ID NO: 19286 - DNA, 80 bp, synthetic construct
  source 1..80: mol_type = other DNA
gcttatagctgaggaaccaggttctggaccactgtcttgatactttgctattgaactagagttctttgggcttaaaactt

SEQ ID NO: 19287 - DNA, 80 bp, synthetic construct
  source 1..80: mol_type = other DNA
tggcccggaagctggagtttgatggcctgtacatcacggagcagcctgaggacgatgacgtgaaggggcagtgggaccga

SEQ ID NO: 19288 - DNA, 80 bp, synthetic construct
  source 1..80: mol_type = other DNA
gacaaaaaaaaaaaaacctagggtttcagtccctgcaggccctgcctcattctccccaagtcttactctttctttccata

SEQ ID NO: 19289 - DNA, 80 bp, synthetic construct
  source 1..80: mol_type = other DNA
gacagagcaagaccctatgtctgggggccaaaaaaaaaacaagtaggaattggaagtgcaatgaatcaaagcacttcaaa

SEQ ID NO: 19290 - DNA, 80 bp, synthetic construct
  source 1..80: mol_type = other DNA
aatttgtcacttggaaaactggtgaataaagggccagaatcatgaaattaaatgaaatcaaccagtatgaggaagcaggc

SEQ ID NO: 19291 - DNA, 80 bp, synthetic construct
  source 1..80: mol_type = other DNA
gaccttgggcaagaggtttttttgcctttctgagtagcacctcagtttccccatggggagatgggcatagtaagcttgct

SEQ ID NO: 19292 - DNA, 80 bp, synthetic construct
  source 1..80: mol_type = other DNA
ttattgacctttctgtacctcatactcaaagtggggtaataatacggccaaccctacagggttgttgtattatgtactac

SEQ ID NO: 19293 - DNA, 80 bp, synthetic construct
  source 1..80: mol_type = other DNA
tacacagcctgatgctctcttgtgcaggtcctggacaaacatggggacatctacgggcgggagcggattgctgagctact

SEQ ID NO: 19294 - DNA, 80 bp, synthetic construct
  source 1..80: mol_type = other DNA
acagaatgagaatccatctcaacaacaacaacaacaaaaacacaaaaaattagccaggcagacaggcacagtggctcagg

SEQ ID NO: 19295 - DNA, 80 bp, synthetic construct
  source 1..80: mol_type = other DNA
tgtgcccacagtccttcctgtacctgggctggtatatggtgatgtccctcttgggacactacaacaacttcttctttgct

SEQ ID NO: 19296 - DNA, 80 bp, synthetic construct
  source 1..80: mol_type = other DNA
ggagttggaaaccagcctgggcaacaaagcaaaaatcctgtctctataaaaaaaaatttaaacgttagctgggtgttgtg

SEQ ID NO: 19297 - DNA, 80 bp, synthetic construct
  source 1..80: mol_type = other DNA
acagtgccaggcatatgagtgctccacacctcttcgccattgtttcaatattatttgagctgaggttttttgttgttgtt

SEQ ID NO: 19298 - DNA, 80 bp, synthetic construct
  source 1..80: mol_type = other DNA
gatcataacccaaattgatgcgaacttactagagacacaggccacaatccacaattaaaagaatcatttctggggtttat

SEQ ID NO: 19299 - DNA, 80 bp, synthetic construct
  source 1..80: mol_type = other DNA
gcaaaccctcttgctttttgctttctagccgcctggtcctctttcagttcccctaggactgtgtgttttctcccaattca

SEQ ID NO: 19300 - DNA, 80 bp, synthetic construct
  source 1..80: mol_type = other DNA
tgccccactatcctggccctaacctctcagcctgtaccctccatcctggccctgacccctctgcctgtgccccccaccca

SEQ ID NO: 19301 - DNA, 80 bp, synthetic construct
  source 1..80: mol_type = other DNA
tcataggttgtgatcaggattaagtcagttcataggcgctcggtgtctggctcatatgagtgctcaataaaggcctgaga

SEQ ID NO: 19302 - DNA, 80 bp, synthetic construct
  source 1..80: mol_type = other DNA
tctctactataaatgaaaaataaaataaggtaagggtggttctgacttgtctcctgtggtcctctcaccctcaggttttt

SEQ ID NO: 19303 - DNA, 80 bp, synthetic construct
  source 1..80: mol_type = other DNA
tatgtctggaagatgtaccaagagagatgttgggatttcttcccagctggtgattgtttccgtaagcagtatgaggacca

SEQ ID NO: 19304 - DNA, 80 bp, synthetic construct
  source 1..80: mol_type = other DNA
gcctgaaggggggttaggagggaacttggtgaaagggcaaggaagagtgttctggctggggagaacagcctgtgcaaagg

SEQ ID NO: 19305 - DNA, 80 bp, synthetic construct
  source 1..80: mol_type = other DNA
tgttagtagccacctaacaataatagattcagggaaaaatcaattgattctaaaactagtgggcaggccaggtgcgttgg

SEQ ID NO: 19306 - DNA, 80 bp, synthetic construct
  source 1..80: mol_type = other DNA
aaaaaagcaacttcacagtggagagaactggctgattctaccttaaccaaatgaccgaagttaatatcaccagtaatggg

SEQ ID NO: 19307 - DNA, 80 bp, synthetic construct
  source 1..80: mol_type = other DNA
ggccaactggtgaaattgagtaggggtatgaattagaaggttgtgatgtttcagtgttgttttcttgattttgacagctg

SEQ ID NO: 19308 - DNA, 80 bp, synthetic construct
  source 1..80: mol_type = other DNA
aaaaaaaaaaaaaaaatgcagccaggtgtggtggctcatgccagtaatcctaacattttgggaggccaaggtaggaagat

SEQ ID NO: 19309 - DNA, 80 bp, synthetic construct
  source 1..80: mol_type = other DNA
ataaataaataaataaaagaattgctgggcatggtggcacatgccggtagttccagatactcaggaagctgaggtgggtg

SEQ ID NO: 19310 - DNA, 80 bp, synthetic construct
  source 1..80: mol_type = other DNA
gagattgcgccactgggcgtgccactggagccgagatctccagctgagataatttttgtatttctactgaaaatacaaaa

SEQ ID NO: 19311 - DNA, 80 bp, synthetic construct
  source 1..80: mol_type = other DNA
caggcagcgagcgcggctgggctgcggggctgcttccccgcgtcctccgggcccgggccgccctcctcccgcacagtgcg

SEQ ID NO: 19312 - DNA, 80 bp, synthetic construct
  source 1..80: mol_type = other DNA
gaggaggagtcgcctccgtggtccccgcggttcccggggctggtgccatccgtggtggtgctgtgaccgcttgcaaagcg

SEQ ID NO: 19313 - DNA, 80 bp, synthetic construct
  source 1..80: mol_type = other DNA
cctcttcactaataccttggtcacggtgtataaacctgctagtaatacagttgtctttttcatagaaaatagactataag

SEQ ID NO: 19314 - DNA, 80 bp, synthetic construct
  source 1..80: mol_type = other DNA
aagaggtgtgagatcactgttaagggaagtagaggtgaaatctttaatgggctgtatctgtgagttatgtatgctgctgt

SEQ ID NO: 19315 - DNA, 80 bp, synthetic construct
  source 1..80: mol_type = other DNA
ggtgtacaacactgcatagtagtttggatgggaatacttagccctagtttgtagaggtccaggaaggttaatggtatgaa

SEQ ID NO: 19316 - DNA, 80 bp, synthetic construct
  source 1..80: mol_type = other DNA
gaagtggtttgcagctgtaattgcaaagaatagatatagaggatggcatggagcaatcagaaggaaaaatgcataaacaa

SEQ ID NO: 19317 - DNA, 80 bp, synthetic construct
  source 1..80: mol_type = other DNA
tctatgtcacaaaatctgggatctcttgaataacagagtctgaaaagacttaacaatgacttcatccagctctgagagcc

SEQ ID NO: 19318 - DNA, 80 bp, synthetic construct
  source 1..80: mol_type = other DNA
tccaaatgcagaaagaaggaacctgctatgaaggaagtaggcaaagatagtgggggtggaagaatagaggtaagatctct

SEQ ID NO: 19319 - DNA, 80 bp, synthetic construct
  source 1..80: mol_type = other DNA
caggcatttagaaggagctaggagaagaattctctcatgtcagtagccctcttagggactacttaggttcggatccattt

SEQ ID NO: 19320 - DNA, 80 bp, synthetic construct
  source 1..80: mol_type = other DNA
catcaccatgaaggaaggaacaattcaatgtggccaatttgtttttctactatggcaagcactttttttcctttaacatt

SEQ ID NO: 19321 - DNA, 80 bp, synthetic construct
  source 1..80: mol_type = other DNA
agttacttttgagagatgctattttgatagtggcaggaccagcaacaaacctgtaccatctcagcattcaggaacaatgg

SEQ ID NO: 19322 - DNA, 80 bp, synthetic construct
  source 1..80: mol_type = other DNA
aaaggtgaagagatgatggatgtggtcatgatattgggctccaaaactcacggagtaaatggccaatggtgaagtaaatg

SEQ ID NO: 19323 - DNA, 80 bp, synthetic construct
  source 1..80: mol_type = other DNA
acccatctcttcttattttttagactatcccgttagttccctttggtcttggacatgtctgtcatgacatgtttccaagg

SEQ ID NO: 19324 - DNA, 80 bp, synthetic construct
  source 1..80: mol_type = other DNA
caagtatattggcccacattattccgctcagacaggatagctgcaattcatttgattcctggaacaatccatttagtcta

SEQ ID NO: 19325 - DNA, 80 bp, synthetic construct
  source 1..80: mol_type = other DNA
tgtcacgctcccagcccgcaccttggtaaatgatccctcattcacctctcttcagttaaacccttgagagtgccattccc

SEQ ID NO: 19326 - DNA, 80 bp, synthetic construct
  source 1..80: mol_type = other DNA
tttacagaaggaatcaagtgaaagtgaggccattaagctggcccctggtcctatatgactagtgccctcctaacaagaag

SEQ ID NO: 19327 - DNA, 80 bp, synthetic construct
  source 1..80: mol_type = other DNA
tgatacgttattatggcagcagtaggagtcgaattcaaggcacaaagctagaagtgtggatttagtgttttggagagagg

SEQ ID NO: 19328 - DNA, 80 bp, synthetic construct
  source 1..80: mol_type = other DNA
gagaccataatctaaggttgtagaggagaagtggtgattgatgttgcaagttcctaagtacaagatgggatagagatgcc

SEQ ID NO: 19329 - DNA, 80 bp, synthetic construct
  source 1..80: mol_type = other DNA
agtaacaatcaggtagcaattagaaggtgggagatagcgcctcacattttttactgtagagtgataaaaaaaaaacctgc

SEQ ID NO: 19330 - DNA, 80 bp, synthetic construct
  source 1..80: mol_type = other DNA
caagaagggccctgatattgtggataaatggagtctatttttaaggttagataaatccagcctatttttgtgggcaggga

SEQ ID NO: 19331 - DNA, 80 bp, synthetic construct
  source 1..80: mol_type = other DNA
cagcttgatgaatatttgcagtgtgaacgcagttgtgtaactaccactcacattaatgcattgaatgttaccattacctg

SEQ ID NO: 19332 - DNA, 80 bp, synthetic construct
  source 1..80: mol_type = other DNA
ccatggtgcctgaccagaattgtcttttttaaacattaacttttggggagtattttatatgatgtgaataggaatctttt

SEQ ID NO: 19333 - DNA, 80 bp, synthetic construct
  source 1..80: mol_type = other DNA
cacaagatgagctgctggaatttttaatgaaatagcatcaaatctgtagacccgtttgagaagaattaacatcttttcga

SEQ ID NO: 19334 - DNA, 80 bp, synthetic construct
  source 1..80: mol_type = other DNA
agaagagggccttcaccagaacctggccatgctggctctctaatctcacacttcccagcctccagaatggtgagaagtaa

SEQ ID NO: 19335 - DNA, 80 bp, synthetic construct
  source 1..80: mol_type = other DNA
cttcaaacattgcttctgcctcattctctctctcccttctttttgggattccgatgatagatattttgctcctttttctc

SEQ ID NO: 19336 - DNA, 80 bp, synthetic construct
  source 1..80: mol_type = other DNA
tatcataacctggaactgaagtcccccatgagaaactaacttttggtggcacgtaacatcgtattgtgtgttctgtttta

SEQ ID NO: 19337 - DNA, 80 bp, synthetic construct
  source 1..80: mol_type = other DNA
cagatccaaccatatcagtaatataaattgaatgatacaataggtgacctttgagattggcatttttcattcagcgaaat

SEQ ID NO: 19338 - DNA, 80 bp, synthetic construct
  source 1..80: mol_type = other DNA
cttttaaaagtcgaatgtcttttcatgtcgtttgcctatcttctaaatggactttataaaaaatgctgaatttcgaaaat

SEQ ID NO: 19339 - DNA, 80 bp, synthetic construct
  source 1..80: mol_type = other DNA
gctgagtttttaaacctgcagacatgtcaatttcacatcatttctctttgatggtagtgaacctccattgcattgtacta

SEQ ID NO: 19340 - DNA, 80 bp, synthetic construct
  source 1..80: mol_type = other DNA
ttccaacctgctcctaggtgagccagttgagaaaaaaatacatgtaatggtaacattgcactggagcaaaaatcttcctg

SEQ ID NO: 19341 - DNA, 80 bp, synthetic construct
  source 1..80: mol_type = other DNA
aatggtgtcaggcaagagtttaggcttcttaaattatgctttattttcaaagctactccagcttatttttattaggctat

SEQ ID NO: 19342 - DNA, 80 bp, synthetic construct
  source 1..80: mol_type = other DNA
tttatgataggatgaataacagaaaacaattaaacatttaggagaataaaggtcttatactcctggtttcaagcatttct

SEQ ID NO: 19343 - DNA, 80 bp, synthetic construct
  source 1..80: mol_type = other DNA
gccatggcaggcctggaaaaaacactataaactcttactctgtgttggggattccactgggaactggccccctggccccc

SEQ ID NO: 19344 - DNA, 80 bp, synthetic construct
  source 1..80: mol_type = other DNA
ctgtgggaggttttctagaatgtcagttataaagctacttgttgcacacataaaatggatttggaaactcgtatttaatc

SEQ ID NO: 19345 - DNA, 80 bp, synthetic construct
  source 1..80: mol_type = other DNA
tggctgttgaatacttgaaatttggcccctctgagttgagatgtgctgcaggggtaagatgcataccagatttcaaagac

SEQ ID NO: 19346 - DNA, 80 bp, synthetic construct
  source 1..80: mol_type = other DNA
aagatcaaggctaggtttcaaaaaatagattaaataaaattgtatatgtggataggctattgggcagcactgccataacc

SEQ ID NO: 19347 - DNA, 80 bp, synthetic construct
  source 1..80: mol_type = other DNA
gcgtgaatttaaaatctgagcctctaagcaacattttggaaagcctgtttcatagttctgcttatgcaggattttctgcc

SEQ ID NO: 19348 - DNA, 80 bp, synthetic construct
  source 1..80: mol_type = other DNA
gaaagtcaacaaaggtctgagctacggactcgatgtacctacatttgctttggttcaggatccacaggtttgtgcccctc

SEQ ID NO: 19349 - DNA, 80 bp, synthetic construct
  source 1..80: mol_type = other DNA
ggaaaggctaattactccaagataactgtgatttcttaatggggagaagaacttggtgggcaaagacctctttagagatg

SEQ ID NO: 19350 - DNA, 80 bp, synthetic construct
  source 1..80: mol_type = other DNA
ccttgcacactttcttctttataaatgtttatagtgacttgttgcccgttcagaattatagcctggccctgcttctggga

SEQ ID NO: 19351 - DNA, 80 bp, synthetic construct
  source 1..80: mol_type = other DNA
tgccccaaaatgctagacacagcagtggtttatttacccactgcttcttatattactggccttaccactcactgaaatgg

SEQ ID NO: 19352 - DNA, 80 bp, synthetic construct
  source 1..80: mol_type = other DNA
ggtctcagagagcctggaataaccttgccgacagagctgtattcccccaaatgctgaataatgataggaaagcaccaaat

SEQ ID NO: 19353 - DNA, 80 bp, synthetic construct
  source 1..80: mol_type = other DNA
aatgagaaagatcaggaggctgaagccacaagggtatacaacagctgtgattttagaagagtgtaattgggtgcacgtgt

SEQ ID NO: 19354 - DNA, 80 bp, synthetic construct
  source 1..80: mol_type = other DNA
tttaacatacgaattttgtaggaggagggacacaattcagtccttaacccttcttgtctcagtggacaagatttttgaac

SEQ ID NO: 19355 - DNA, 80 bp, synthetic construct
  source 1..80: mol_type = other DNA
gttttcgtgtgtgtttgtagcaactctgttacatttttttctgtttccaggttcaattccaggtttaggacatactgctc

SEQ ID NO: 19356 - DNA, 80 bp, synthetic construct
  source 1..80: mol_type = other DNA
tggaaattaatgtacatggaagacatgatactccttgactgtacttttttttttccaatcccaagtggcttggggctagc

SEQ ID NO: 19357 - DNA, 80 bp, synthetic construct
  source 1..80: mol_type = other DNA
caaaccaaacccacatgggtcccatagatctggacctctcattcttagattaaaaatagctccaaattcatggaaaggca

SEQ ID NO: 19358 - DNA, 80 bp, synthetic construct
  source 1..80: mol_type = other DNA
ggtaaatagtctaaactggtttagaaaaataagtcatgttccttttagctaatcccagtgtatcccacgtgatgctgaaa

SEQ ID NO: 19359 - DNA, 80 bp, synthetic construct
  source 1..80: mol_type = other DNA
gtttcaagaggaaggctctgttttgagaagaaggttggcatgaaagttaaaggttcagtagctactatgtcacatgtaca

SEQ ID NO: 19360 - DNA, 80 bp, synthetic construct
  source 1..80: mol_type = other DNA
tgttctttaaatcctaaacctgaactctgatttctccttcctctgagtcctatccttgccctttaaattccaggcctgtg

SEQ ID NO: 19361 - DNA, 80 bp, synthetic construct
  source 1..80: mol_type = other DNA
tcaacttgcttccttcacagcatttcttggataaatcccacatagcagaattgccttctccctccacatgcagaacctca

SEQ ID NO: 19362 - DNA, 80 bp, synthetic construct
  source 1..80: mol_type = other DNA
ggccagagagattaatcgattcttttgcttagtgaagttaacagtgatgcttttcctgtaattgagataatctgtgtgcg

SEQ ID NO: 19363 - DNA, 80 bp, synthetic construct
  source 1..80: mol_type = other DNA
tttttttgggacgggcagggaggatactgtttctccatgcaatctttgaatgcgaacatgcttaataaatattgatggac

SEQ ID NO: 19364 - DNA, 80 bp, synthetic construct
  source 1..80: mol_type = other DNA
acaatctggaagttacagaacaaccaccctcccacgtatttacaaaaagtgtaacatttcactgggatcgtgtctgaaag

SEQ ID NO: 19365 - DNA, 80 bp, synthetic construct
  source 1..80: mol_type = other DNA
agactggaaactttgagtacacaggaccacactggtttcagttctaattttcctaagtggctttgctgagggaggcaata

SEQ ID NO: 19366 - DNA, 80 bp, synthetic construct
  source 1..80: mol_type = other DNA
tcttttattgggtgacggttgagatctcctattgcttaaatcaggttaaataagagagaatgctgctctgtaagtctggc

SEQ ID NO: 19367 - DNA, 80 bp, synthetic construct
  source 1..80: mol_type = other DNA
gaatttggaaagccacttgtgccataaaatttctgaacacagaaacgggccagtgattcagtcgatattgattgattggt

SEQ ID NO: 19368 - DNA, 80 bp, synthetic construct
  source 1..80: mol_type = other DNA
gttgctgttctcggtgtgttccaagaccacagatggcaagccagtcttgatggctttttaaaaaaaatatttgagacagg

SEQ ID NO: 19369 - DNA, 80 bp, synthetic construct
  source 1..80: mol_type = other DNA
aatgtggaaactgaggcagagaggagttttgtaaatttccccaggttaagctgcagttggaagctgaactgggatatgaa

SEQ ID NO: 19370 - DNA, 80 bp, synthetic construct
  source 1..80: mol_type = other DNA
tttatgtgcttgggattcttgaggggttttccagagtcagtccccaattctgatgtttttatacgcaacactaggggtcc

SEQ ID NO: 19371 - DNA, 80 bp, synthetic construct
  source 1..80: mol_type = other DNA
tttcagtcaatcagccacttactatttattaagtatttcttccatctaagcaaggtgggggagggagagaaagagattat

SEQ ID NO: 19372 - DNA, 80 bp, synthetic construct
  source 1..80: mol_type = other DNA
aacactcagatgttttccttctagttttgatcagctgccctgagagaatgagattttaaaataatttgacaggccggcat

SEQ ID NO: 19373 - DNA, 80 bp, synthetic construct
  source 1..80: mol_type = other DNA
gcaacgtgaagaacaggggacaggttagggctacctcaggtgttggtgctgaattatcgtaactgcttctgtgtgtgtct

SEQ ID NO: 19374 - DNA, 80 bp, synthetic construct
  source 1..80: mol_type = other DNA
ccaacaccatcgcttaaatgtgctgtgccttttacaattatgtggctttgcaggtgctgttcccttgcctttttttcttt

SEQ ID NO: 19375 - DNA, 80 bp, synthetic construct
  source 1..80: mol_type = other DNA
gggaaaatgagagtagaacaggataagggggtgatggagggaatgagtggtgattttaaatgtagttatcaggctgggca

SEQ ID NO: 19376 - DNA, 80 bp, synthetic construct
  source 1..80: mol_type = other DNA
tggcaccgagcagcaggaccctggatatttttttggacatagagccaggaggatttcctcatggttctgatgagggttga

SEQ ID NO: 19377 - DNA, 80 bp, synthetic construct
  source 1..80: mol_type = other DNA
aacatatactttatatatcttaacttagaagttatagatgctgtactatgagccccacttaggagttcttgcttaataga

SEQ ID NO: 19378 - DNA, 80 bp, synthetic construct
  source 1..80: mol_type = other DNA
catgatcctagaatattctttagggtagcatttcccaaattttccagggaataagaatctcctgggctccttgcctaagc

SEQ ID NO: 19379 - DNA, 80 bp, synthetic construct
  source 1..80: mol_type = other DNA
cctttgtgtctatgtatatgtgtgttcaacagaataaccagtgtgaaacctaacctagccgaacataaccggaataacca

SEQ ID NO: 19380 - DNA, 80 bp, synthetic construct
  source 1..80: mol_type = other DNA
cactttctaaccgtggaaatgttgggttgtgccatatcctggtatgaattttctttgtggaatgataggcccatagagtt

SEQ ID NO: 19381 - DNA, 80 bp, synthetic construct
  source 1..80: mol_type = other DNA
tcgagctgctctaagaaagggaaacatttttggttcagaggacattcacagcactgtgcttgttggagtatttgtaccat

SEQ ID NO: 19382 - DNA, 80 bp, synthetic construct
  source 1..80: mol_type = other DNA
tagttggaggattaaatgagatagtatgcaaatagaggagagtaggtaagttccccctccatcactggatgtttttgcta

SEQ ID NO: 19383 - DNA, 80 bp, synthetic construct
  source 1..80: mol_type = other DNA
ttttttatccctaagtgccctaccttgcagagccctggcgtcatataactatttattaaataagcttcacggaacctcaa

SEQ ID NO: 19384 - DNA, 80 bp, synthetic construct
  source 1..80: mol_type = other DNA
tctcttttagaagactctgtcccattgtcctttaagggcatgtcacttccctggaggtcaaaatcatgtcatactagttt

SEQ ID NO: 19385 - DNA, 80 bp, synthetic construct
  source 1..80: mol_type = other DNA
ccaggaaatccttttagaaatcatactcttgagggaagaagacctaggggatagagcatgactccactgagaaatttaat

SEQ ID NO: 19386 - DNA, 80 bp, synthetic construct
  source 1..80: mol_type = other DNA
gtaatcaaggcggttgcaaaggaaacaatggcaagtgttttgtgaagcatttttttaagagagtgtgatggaaaattttc

SEQ ID NO: 19387 - DNA, 80 bp, synthetic construct
  source 1..80: mol_type = other DNA
ggtgatatatataataattcagttggagtctgaagagaagctgagaaccaggggagctgatagtgtaaatcccagtccag

SEQ ID NO: 19388 - DNA, 80 bp, synthetic construct
  source 1..80: mol_type = other DNA
tctctaggtggggaggtcagtggaggtttataaacagaggaaaatgtcatgttgtataccatataaatatggtcgtaatt

SEQ ID NO: 19389 - DNA, 80 bp, synthetic construct
  source 1..80: mol_type = other DNA
cataaaaaatgatagttcttcccactcaccttacagaaagtccttttctgtatcccatgtgacaactgtagtcattatgg

SEQ ID NO: 19390 - DNA, 80 bp, synthetic construct
  source 1..80: mol_type = other DNA
tcagtcagtctgtggtacttggttaagatggtcagagcaaactgctacagtaattgggaaaactgcatgtgtgtgtgtgc

SEQ ID NO: 19391 - DNA, 80 bp, synthetic construct
  source 1..80: mol_type = other DNA
cgtggcctgacacacggtaagtgcctgataaatgtgagcaactcttcctacattattaagcatcccatcaaattgtactt

SEQ ID NO: 19392 - DNA, 80 bp, synthetic construct
  source 1..80: mol_type = other DNA
tggcaacagaaatgataactatccaaggaggtgaggcttatgcagtttgcaaaatgcagacaaatcggcatacaccatgt

SEQ ID NO: 19393 - DNA, 80 bp, synthetic construct
  source 1..80: mol_type = other DNA
cctgccttacctgttttgggctcaacattttttatcagtgtcctgaataaggaccatagataataggcttataaaatttg

SEQ ID NO: 19394 - DNA, 80 bp, synthetic construct
  source 1..80: mol_type = other DNA
gataagagaagcagttaactaacttccttttagttaggtactccagggtactactttttgtgatggcagacacacttaag

SEQ ID NO: 19395 - DNA, 80 bp, synthetic construct
  source 1..80: mol_type = other DNA
aagcaatgctctggcagagactgaatacacgtttaatgctatagctgtctcttttcttccaaggagaaactgttttatgt

SEQ ID NO: 19396 - DNA, 80 bp, synthetic construct
  source 1..80: mol_type = other DNA
gttggcagaactacatttctttctgaaggttctaggagagaatccgttttcatgcctttttcagttcctagaggttgtta

SEQ ID NO: 19397 - DNA, 80 bp, synthetic construct
  source 1..80: mol_type = other DNA
tttggtgtgctgcctgtgactctcatccacagaggggaaagaactaagcaaagggatgacttaacaaaagctgttttgct

SEQ ID NO: 19398 - DNA, 80 bp, synthetic construct
  source 1..80: mol_type = other DNA
ctccttctccataatcctccttccttccctctttcttccacaggtgtcagacctccatctgggtctgaaggttgtctatg

SEQ ID NO: 19399 - DNA, 80 bp, synthetic construct
  source 1..80: mol_type = other DNA
acggggtcgcggccgggcagaggtgctcctcacatcccagacggggcggcggggcagaggcgctcctcacatcccagaca

SEQ ID NO: 19400 - DNA, 80 bp, synthetic construct
  source 1..80: mol_type = other DNA
gaatttttaaatcccttcagaaagttgttcaatttccctctgccagtgatagcaaagaaggtggtatagctagagtaggg

SEQ ID NO: 19401 - DNA, 80 bp, synthetic construct
  source 1..80: mol_type = other DNA
acttctgcttcatgtattgatggactaggcattttggacacatattcctgttgaaggcaaccaagaagcccagataaagt

SEQ ID NO: 19402 - DNA, 80 bp, synthetic construct
  source 1..80: mol_type = other DNA
ttgtgaattatacctttataaaactgggggaagagtaaaaaagagagtatggaggaaaatgtgaaattcaaagctagcta

SEQ ID NO: 19403 - DNA, 80 bp, synthetic construct
  source 1..80: mol_type = other DNA
gaggaatttgaagtctgtggaacactgaaggcaacttcctgtagttacaaaactcaaacccagtttaactgtatactaga

SEQ ID NO: 19404 - DNA, 80 bp, synthetic construct
  source 1..80: mol_type = other DNA
actgtgtaatttctgaagcaacattgtaaaatatattgtggcctttgccttgctctctgtttggtgacacgttctgaagg

SEQ ID NO: 19405 - DNA, 80 bp, synthetic construct
  source 1..80: mol_type = other DNA
gcagggtaagtacattgagagtaaggattgggaaaatgtcgaagtgttaaggagagaagaaacctgaaattgcatgggat

SEQ ID NO: 19406 - DNA, 80 bp, synthetic construct
  source 1..80: mol_type = other DNA
agtgggagtcatcccttagttaggaaaggtatgaaaacttgcacccttttggttgtccacgtttccgttggtggttattg

SEQ ID NO: 19407 - DNA, 80 bp, synthetic construct
  source 1..80: mol_type = other DNA
aattgagtcatagatcaagtaagtggcagggctgtgatttaaacctagataatgtggccacaaactgttagcctcaatca

SEQ ID NO: 19408 - DNA, 80 bp, synthetic construct
  source 1..80: mol_type = other DNA
ggactgcaggcacccgccaccacacctaattttttttttttttttttcatttttagtagagatgggttttcacctcctta

SEQ ID NO: 19409 - DNA, 80 bp, synthetic construct
  source 1..80: mol_type = other DNA
tgggaaagcaaagttatgtttcttagtacatcaacagttataggttggtggttaaaaaagatgctgagcaggctgggtgt

SEQ ID NO: 19410 - DNA, 80 bp, synthetic construct
  source 1..80: mol_type = other DNA
agtgcagatgttaaggcttctaatatctactgtgagatatcctttcctcaactcataatttcttggtgaggaggaagaac

SEQ ID NO: 19411 - DNA, 80 bp, synthetic construct
  source 1..80: mol_type = other DNA
ttgttcttgttcatttagttctgctagaaagaaccatggcctaggagacaagagactgtgattatttttattctccagct

SEQ ID NO: 19412 - DNA, 80 bp, synthetic construct
  source 1..80: mol_type = other DNA
gatcatagtcttacatgatattaagtagggagtgagtggtagagaggaaagatcctgttcctgagaagaagataccatga

SEQ ID NO: 19413 - DNA, 80 bp, synthetic construct
  source 1..80: mol_type = other DNA
cacaacactgatgccccaattgggggtgtctgaaataccccagcacaaaatccatttactcacagaacttatttatgttc

SEQ ID NO: 19414 - DNA, 80 bp, synthetic construct
  source 1..80: mol_type = other DNA
tccttttcagacaacttgttttgatccagtcctctgagatcttcctaatgaggcgtcccccaaattgcctatcatctcat

SEQ ID NO: 19415 - DNA, 80 bp, synthetic construct
  source 1..80: mol_type = other DNA
catttatctaaggtaaatttgaagaacacttctggggcttgggtccctgggaaggaagcaatatggtaggataaaggaga

SEQ ID NO: 19416 - DNA, 80 bp, synthetic construct
  source 1..80: mol_type = other DNA
tttggagagctttgtctttccaatgtagaccctgtaactcaactttggaggagattcctccaaatgctgtagctgctttg

SEQ ID NO: 19417 - DNA, 80 bp, synthetic construct
  source 1..80: mol_type = other DNA
gccaagtagacagaacccattatatacatgttctcaagacagactactccttaagaaagaggactcgacagcactatttg

SEQ ID NO: 19418 - DNA, 80 bp, synthetic construct
  source 1..80: mol_type = other DNA
cttgtaccactatacatgattccctggccaatagttctaaatgaaccctgtagtttagctctggagttgaacaatgagaa

SEQ ID NO: 19419 - DNA, 80 bp, synthetic construct
  source 1..80: mol_type = other DNA
ttaaaagggttttctcttccagctgccgctgtatttgggtaaacaaaaatcctgtgtaagacttcagaatctcagtaagc

SEQ ID NO: 19420 - DNA, 80 bp, synthetic construct
  source 1..80: mol_type = other DNA
aaaatctaaaattgcccttaattttataccagctttaaagtttgggagctgcaaatgccctttgttctggggatggggat

SEQ ID NO: 19421 - DNA, 80 bp, synthetic construct
  source 1..80: mol_type = other DNA
ccaagcgagtatagtttctgcaaaagcttcttatgttgggataacagttagtgatgggatgttggccaatttcaatggtg

SEQ ID NO: 19422 - DNA, 80 bp, synthetic construct
  source 1..80: mol_type = other DNA
ttttgggttttgaagccagctagacttgcatttcaatcctgtttctggctgtgtgggttttggacaagccaatctgagct

SEQ ID NO: 19423 - DNA, 80 bp, synthetic construct
  source 1..80: mol_type = other DNA
tagaatacaagctttgagaagtacatggtatggctggtcagtttacaagggtgtgttgatgagatttagcagttaggcct

SEQ ID NO: 19424 - DNA, 80 bp, synthetic construct
  source 1..80: mol_type = other DNA
tgcttctgtaacagctgcttcttgagatgtaggaattaagaggcatgtaaggaaagctagcatctggtttcatgttggat

SEQ ID NO: 19425 - DNA, 80 bp, synthetic construct
  source 1..80: mol_type = other DNA
ttaagaaattcatattcagatgcagttctacatttgctagaactgtccagagacaaaattatgcttctcccgaagggcat

SEQ ID NO: 19426 - DNA, 80 bp, synthetic construct
  source 1..80: mol_type = other DNA
tacttgaaaaggtatacggtatttagccagtgctaacttagccattgtttttgttgttgtgtgtaatgatgcagacgtca

SEQ ID NO: 19427 - DNA, 80 bp, synthetic construct
  source 1..80: mol_type = other DNA
ttgcatttctctaatcatcagtgatgttgagctttttttcacgtttgttggctgcatgaaacaaaaattaactcaagatg

SEQ ID NO: 19428 - DNA, 80 bp, synthetic construct
  source 1..80: mol_type = other DNA
gctttattaatggatgtaggacagataaaaggaacaagttggtaggggatcaaacagaagacagggtcttccctagaaag

SEQ ID NO: 19429 - DNA, 80 bp, synthetic construct
  source 1..80: mol_type = other DNA
ttccaaacactcctagtggggctggtttggtactccattgttattttatgatgacacaaataagaggctttatccaatga

SEQ ID NO: 19430 - DNA, 80 bp, synthetic construct
  source 1..80: mol_type = other DNA
gttgtttaagttcctctgtagcaggccaccattcttgtcagcaataaaggtgaagaatgccccattacagaaaagaaaat

SEQ ID NO: 19431 - DNA, 80 bp, synthetic construct
  source 1..80: mol_type = other DNA
tacatatggtggcaccctttctgagagcctgtaagtattttttatagccctaatcatgtgctgtccctcttaatcctggg

SEQ ID NO: 19432 - DNA, 80 bp, synthetic construct
  source 1..80: mol_type = other DNA
tgctctcctatactaagtggtagggatgggaccatatttgtagttctagaccagagatcaggataagccttcagtaaata

SEQ ID NO: 19433 - DNA, 80 bp, synthetic construct
  source 1..80: mol_type = other DNA
agggacggtgggaggagctggttaatgggtacaaaaatacagtttcatagaaggaataaattctggtattcaatagcaca

SEQ ID NO: 19434 - DNA, 80 bp, synthetic construct
  source 1..80: mol_type = other DNA
ctttcatattttatccttttcatatatgccttctcccgggctttgaaggaggaaattggtgatgttttcctcattagaca

SEQ ID NO: 19435 - DNA, 80 bp, synthetic construct
  source 1..80: mol_type = other DNA
attaatagttattttggtacaggatgaagtatagtctatggggcgtttatctaaggaagaagaggtgatcaaatagacag

SEQ ID NO: 19436 - DNA, 80 bp, synthetic construct
  source 1..80: mol_type = other DNA
gtggtggttgttttgttttttaatggaagggatgatgggcagtgtatccctgggtgtctgagtgtatattcatcctgcta

SEQ ID NO: 19437 - DNA, 80 bp, synthetic construct
  source 1..80: mol_type = other DNA
ccttccacactgtataaaacacccctgtcttccctgtcaagaaaattttgggggaaaaaaaaagaaaacattgtgcacag

SEQ ID NO: 19438 - DNA, 80 bp, synthetic construct
  source 1..80: mol_type = other DNA
attcttctgcttcctgtggcaaatgtgacaaccagggcatcatcagagtgagtagtggagtttgggatattctgttaatc

SEQ ID NO: 19439 - DNA, 80 bp, synthetic construct
  source 1..80: mol_type = other DNA
aaccagcagttctcccttttactgtccacctaaggaacatgccataccacattcccatcaatagcatttcctcaccagtt

SEQ ID NO: 19440 - DNA, 80 bp, synthetic construct
  source 1..80: mol_type = other DNA
agtggctgggagttaatgagactacggcttcaaattcagaaagctcatatgtaactgaaggctgggatgcagtggcttac

SEQ ID NO: 19441 - DNA, 80 bp, synthetic construct
  source 1..80: mol_type = other DNA
taaatgatttcagattttgtgctgtttattctttttttttttttttaagagacacggtctcactctgttacccaggcagg

SEQ ID NO: 19442 - DNA, 80 bp, synthetic construct
  source 1..80: mol_type = other DNA
gatgatcttaatgacccactatcagcatggtgagattcctctgtcaggccaccactgggtgtttatctacgtgtgtgttt

SEQ ID NO: 19443 - DNA, 80 bp, synthetic construct
  source 1..80: mol_type = other DNA
actgcagtgcagaaggtctcatcgagcttagatcattcgttgccttacatattggttcagagatgagaaaataaaaacat

SEQ ID NO: 19444 - DNA, 80 bp, synthetic construct
  source 1..80: mol_type = other DNA
gcatgttaggagcctagtcaggaaataagctgaatttctgtttcttaaagcaaaccccaaacaacaacaattccttcttt

SEQ ID NO: 19445 - DNA, 80 bp, synthetic construct
  source 1..80: mol_type = other DNA
taagtctatccgagtctttcctccccatgggatccaggccatttgaaacaatatggttattggtgctctgtttttgtttt

SEQ ID NO: 19446 - DNA, 80 bp, synthetic construct
  source 1..80: mol_type = other DNA
cctgccatgattgcctttttgctgggtaaaatacacttttaatttcttgctgggcttttaaaataaatacggctgaaatt

SEQ ID NO: 19447 - DNA, 80 bp, synthetic construct
  source 1..80: mol_type = other DNA
tgccaggtggtctgggtaacggcaggtgctaacagaagactggctaattataaaatacgactaagcggaaacagctttgt

SEQ ID NO: 19448 - DNA, 80 bp, synthetic construct
  source 1..80: mol_type = other DNA
accctctcagcccagtgtcttaggtaaccgttctgttgaaattttggctgatcgccacttgtactatcaaaatattaatc

SEQ ID NO: 19449 - DNA, 80 bp, synthetic construct
  source 1..80: mol_type = other DNA
gctcattatgcttcctaggcttggatccagacagacaaggttttatcattaacctagttttcatcaagggaacagtgtgc

SEQ ID NO: 19450 - DNA, 80 bp, synthetic construct
  source 1..80: mol_type = other DNA
ttttcctgcttctactggggtttgaaattgaagacaattggtttgagtcctagcactgttcctcattagctgtatgcctt

SEQ ID NO: 19451 - DNA, 80 bp, synthetic construct
  source 1..80: mol_type = other DNA
ctagtttaatatttaaacagaaggtgtatagtgaggttagaggatggtgcgtttataataaatcggtgtggcagagtttt

SEQ ID NO: 19452 - DNA, 80 bp, synthetic construct
  source 1..80: mol_type = other DNA
actcataataggcctattctggactctgctgttagaaatactccaacaatgacacaggatcaggaatcaatagtatttgt

SEQ ID NO: 19453 - DNA, 80 bp, synthetic construct
  source 1..80: mol_type = other DNA
ctgtctcaacagttgcaatttgtaaagcctatagcaggtttacttttgtgctccatagcatcagctctgagaatgttaaa

SEQ ID NO: 19454 - DNA, 80 bp, synthetic construct
  source 1..80: mol_type = other DNA
aaaatggccaaaagatgattttactgggttctggcactttgttgcactgaatagcctttgaaataaataaacccttggtt

SEQ ID NO: 19455 - DNA, 80 bp, synthetic construct
  source 1..80: mol_type = other DNA
gtaagagcacacttcccaatttaagaagcattactaactttcagtggttctctgtaagcattttcctgatcacaattcct

SEQ ID NO: 19456 - DNA, 80 bp, synthetic construct
  source 1..80: mol_type = other DNA
atttattctagatgctgtcagtgacatgtgccaaggacatcttacttcctctaatttttggcttgtcttttccattctct

SEQ ID NO: 19457 - DNA, 80 bp, synthetic construct
  source 1..80: mol_type = other DNA
tagtatcagattttacttgggatcaccccaggaaatgctttatgtttaggagactaggaataccttcagaagtccttgag

SEQ ID NO: 19458 - DNA, 80 bp, synthetic construct
  source 1..80: mol_type = other DNA
ggctgctggatgtgacttgcatttcacattttcccagtgatttgggcctgatttatctcttgattgctctctggtaaccg

SEQ ID NO: 19459 - DNA, 80 bp, synthetic construct
  source 1..80: mol_type = other DNA
accgtatctaatcctcacagtagcccacaagacaggttccgacgattattcctatttgaagacacaggaaaagtaagttc

SEQ ID NO: 19460 - DNA, 80 bp, synthetic construct
  source 1..80: mol_type = other DNA
cgagtacgtgttaaattgaattgcagtctggttggaggcagctgtggtgtggctcagcaaatgtggtcttacatttcctt

SEQ ID NO: 19461 - DNA, 80 bp, synthetic construct
  source 1..80: mol_type = other DNA
gccagacatttaggcattacaggccagcataaggagtgtggattttgattctaaatccattgagactctatcaaggggtt

SEQ ID NO: 19462 - DNA, 80 bp, synthetic construct
  source 1..80: mol_type = other DNA
aacacagagatgactaagtgaccttcccacacatgaacacaatattttgtctcatcctttgttcaatttagagactgacc

SEQ ID NO: 19463 - DNA, 80 bp, synthetic construct
  source 1..80: mol_type = other DNA
gatggactttagctatactgaagtaccatttgaggtacaatggtggacttatgaacggtctaggaggtccacagctttgt

SEQ ID NO: 19464 - DNA, 80 bp, synthetic construct
  source 1..80: mol_type = other DNA
gttgggacaagaagtgatggtgtgtggttgtgcattctcagggtaaagcaaatggcattgatcagtgctgtggaaattct

SEQ ID NO: 19465 - DNA, 80 bp, synthetic construct
  source 1..80: mol_type = other DNA
taaaaacaagtatcgtactaaggtcctgcaagagccttagtacaataatgagaaatccgcattccactgtcagtctaatg

SEQ ID NO: 19466 - DNA, 80 bp, synthetic construct
  source 1..80: mol_type = other DNA
gggttcaagtgattctcctgtgtcagcctcctgagtagctgagattacaggtctctagtagagatggggttttaccatgt

SEQ ID NO: 19467 - DNA, 80 bp, synthetic construct
  source 1..80: mol_type = other DNA
ctgttgtgggttttgttgtctggtgtagatgactgtttaatcagagaaggcattatgtcttgcagttagcagtttgaccc

SEQ ID NO: 19468 - DNA, 80 bp, synthetic construct
  source 1..80: mol_type = other DNA
ccaggactttttcatcttgcaaaactgaaattctgtacccatttaatactaattttcccttcctcccccgtcctcctccc

SEQ ID NO: 19469 - DNA, 80 bp, synthetic construct
  source 1..80: mol_type = other DNA
tgcctcagcctcccaagtagctgagattataggcacctaccaccacgcccagctaatttatttattttttatttttattt

SEQ ID NO: 19470 - DNA, 80 bp, synthetic construct
  source 1..80: mol_type = other DNA
ttgccaaacccattgtctggaagctttccccctgttttcttctaggagttttatagtttcatgtgttagtttaggtcttt

SEQ ID NO: 19471 - DNA, 80 bp, synthetic construct
  source 1..80: mol_type = other DNA
agtaggcagaacaggagtttttggaaaatattcagtatgaagatactgagcttagagaagtcaggtgatttgtttgaggc

SEQ ID NO: 19472 - DNA, 80 bp, synthetic construct
  source 1..80: mol_type = other DNA
gtatccttccgaatcccaaatccgtgggcaaggtaacacctgtttggagtttctctaaaaattacctttctctgccttta

SEQ ID NO: 19473 - DNA, 80 bp, synthetic construct
  source 1..80: mol_type = other DNA
ttccaaaaactctggaaacgagttgcatatttccactgatgtcaaaactgatgatcctcacaaagaagcacaaatatgat

SEQ ID NO: 19474 - DNA, 80 bp, synthetic construct
  source 1..80: mol_type = other DNA
gctgtaagtttccaaacatcatgctgtcttcaattgaatctttccttggcatctagaaaggtggctgaagaatagtggga

SEQ ID NO: 19475 - DNA, 80 bp, synthetic construct
  source 1..80: mol_type = other DNA
ctggtcattgtatacccttgggttagctatttgtccccttttgacctgtttcctcatcagtaaaaggaggtaatactgcc

SEQ ID NO: 19476 - DNA, 80 bp, synthetic construct
  source 1..80: mol_type = other DNA
atgtcagctctgacatatatcaaattgtcctacacttatggatctcatttgatctttgcaagtctgggccagtatcacat

SEQ ID NO: 19477 - DNA, 80 bp, synthetic construct
  source 1..80: mol_type = other DNA
gaaccaatatgattaattaagcaaattactgaaagatgcacttacgtgggtgtgataataggagcatatcatagttgatg

SEQ ID NO: 19478 - DNA, 80 bp, synthetic construct
  source 1..80: mol_type = other DNA
tggaagtattttcctttgaattccttatcgtatgctagtttgtacctctttagcatttaggagaaatgctaaaggagaaa

SEQ ID NO: 19479 - DNA, 80 bp, synthetic construct
  source 1..80: mol_type = other DNA
taacgagtgctgactcatacgatcacaaggtgaggtcccacaataggccatctgcaagctgaggaacaaggaagcccgtc

SEQ ID NO: 19480 - DNA, 80 bp, synthetic construct
  source 1..80: mol_type = other DNA
gctaggatttgaattctgccagtctaccttcaccaggctatgctgcctctttatttttaatagcctcagttttattgttt

SEQ ID NO: 19481 - DNA, 80 bp, synthetic construct
  source 1..80: mol_type = other DNA
tgcttttgtttttccctaatagttctggacagatatgttgatttgtaacatcagatgagatgcacacgtgtgagtccaga

SEQ ID NO: 19482 - DNA, 80 bp, synthetic construct
  source 1..80: mol_type = other DNA
ttcgtagagaaatgggagaaatagggctggggtagacagaaaccttaatgtaggattcaaaagatgctatttgttactat

SEQ ID NO: 19483 - DNA, 80 bp, synthetic construct
  source 1..80: mol_type = other DNA
ctaaagtaacataataacattttcttgaaaagataacctgtttgccattcttggaggcaggggaggcagaggcccagaca

SEQ ID NO: 19484 - DNA, 80 bp, synthetic construct
  source 1..80: mol_type = other DNA
ccatggactacactgttcagattcctctcaccatagattagttttccttgttcttcgacttcacataaatgaaataatac

SEQ ID NO: 19485 - DNA, 80 bp, synthetic construct
  source 1..80: mol_type = other DNA
tttatattggcggggttttaaagctagaggagtctttacctacttactcttatgtacagatctgaatatggaggtcagga

SEQ ID NO: 19486 - DNA, 80 bp, synthetic construct
  source 1..80: mol_type = other DNA
cctgaggccagtcctggattgccccagaagaaacaatttctttactccaaagaaatccaaaggagttaaaaagtgagagc

SEQ ID NO: 19487 - DNA, 80 bp, synthetic construct
  source 1..80: mol_type = other DNA
gtttgtttattcagaaaatcctcattcgggcattcaccaatctactattggacactatcccggccattgcatttttatgg

SEQ ID NO: 19488 - DNA, 80 bp, synthetic construct
  source 1..80: mol_type = other DNA
gtctcaggtattttattttagcaaaatggactgagacaccactagtagaatagctatcctctaaaacaattttcatcctt

SEQ ID NO: 19489 - DNA, 80 bp, synthetic construct
  source 1..80: mol_type = other DNA
ctaatgaacgtatttatgacctcacagagttaccttttttctgtgtgtgtgatggaaacacgtcagttctactctcttag

SEQ ID NO: 19490 - DNA, 80 bp, synthetic construct
  source 1..80: mol_type = other DNA
tcacatttgctctatccatttatccattaacagataaatgatataacaggtctttacaaattgcatatgacatatagata

SEQ ID NO: 19491 - DNA, 80 bp, synthetic construct
  source 1..80: mol_type = other DNA
gtatccatttttgaataaaaagagcctgtctttaacaaaggtctgttttttttcttgagtactcctgaaatctctccttg

SEQ ID NO: 19492 - DNA, 80 bp, synthetic construct
  source 1..80: mol_type = other DNA
gctagtacgtggtacagctgggatgagaacagagcttttcctctatttagtctaggacatttcctaccattgcaccaatt

SEQ ID NO: 19493 - DNA, 80 bp, synthetic construct
  source 1..80: mol_type = other DNA
catgtgtctttgagaacttgttgaattctttttttaacaaaaattcctactgggcttggtggctccagctactttggagg

SEQ ID NO: 19494 - DNA, 80 bp, synthetic construct
  source 1..80: mol_type = other DNA
agtagctgggattaccagcatgcaccaccacacccagctaatttttgaattttttgtataaatgcgatctccctctgttg

SEQ ID NO: 19495 - DNA, 80 bp, synthetic construct
  source 1..80: mol_type = other DNA
gatcctcgtgcctcagtctcccaggtagctgggactacatgcatgcaccatcactcctagataatttttgtatttttagt

SEQ ID NO: 19496 - DNA, 80 bp, synthetic construct
  source 1..80: mol_type = other DNA
tttgaaaaacattccaggaggaaaatatgtagcattggcaggatctgagtgagatacagtagtcccgtcctttattctca

SEQ ID NO: 19497 - DNA, 80 bp, synthetic construct
  source 1..80: mol_type = other DNA
agtaattacgttactaaggttttgttaggttacacattttaaccaattaatatggagctctcacaatgtcatttcacgcc

SEQ ID NO: 19498 - DNA, 80 bp, synthetic construct
  source 1..80: mol_type = other DNA
agaagcagggttcttacaaattggaagggctcctacaaaattggttaattgggattagactatttgtatccttgcccaag

SEQ ID NO: 19499 - DNA, 80 bp, synthetic construct
  source 1..80: mol_type = other DNA
tgtacttaggatttgtgatttgcagacgcaagctttgctgtatttgttttgctcgaagggcttactgctgtggtattcag

SEQ ID NO: 19500 - DNA, 80 bp, synthetic construct
  source 1..80: mol_type = other DNA
agaccttagcctggatattgggtggtacatcagttgggatgcttttggctgtaagtaagagatgcttatttccatttcca

SEQ ID NO: 19501 - DNA, 80 bp, synthetic construct
  source 1..80: mol_type = other DNA
atgagatagctactgaaatccagcatcagaacaagagattaccataaatttgaagaagtgtgaaaccaggtaccacagcc

SEQ ID NO: 19502 - DNA, 80 bp, synthetic construct
  source 1..80: mol_type = other DNA
cactctgtattatccatcttgcatgcatcatctctgatcctcacaaaaccttttcagagtagattattttacagttgagg

SEQ ID NO: 19503 - DNA, 80 bp, synthetic construct
  source 1..80: mol_type = other DNA
gcatggaaaacattgattagatgaaacactgaaacagctaaacctcacttccacttgtttaagacatcaagctgtttaaa

SEQ ID NO: 19504 - DNA, 80 bp, synthetic construct
  source 1..80: mol_type = other DNA
aaggaagcttggggccagtggacttgttggtgcatattaaatgggttagagagacacgttcttaatgttatggctcttca

SEQ ID NO: 19505 - DNA, 80 bp, synthetic construct
  source 1..80: mol_type = other DNA
ttcatgagggaagaacactcatggctgatttcctcttaaaggcctcaccttttaataccatcacattgtaaaatacatga

SEQ ID NO: 19506 - DNA, 80 bp, synthetic construct
  source 1..80: mol_type = other DNA
actgtagatgtgaatttagagaatggaatctaactcatcatggatgatttcctttttgcaaagcatcttgtgggacaaga

SEQ ID NO: 19507 - DNA, 80 bp, synthetic construct
  source 1..80: mol_type = other DNA
aaataaaagaggaaggcagatataagattaaaatatcaaatttattaccgacagagagcttgttcttgggaactgtcccc

SEQ ID NO: 19508 - DNA, 80 bp, synthetic construct
  source 1..80: mol_type = other DNA
ttaagtctggaatctagtgaaaagttcacatttctgttagaacagggaacggaagggttaatgatgttcaggaacggttt

SEQ ID NO: 19509 - DNA, 80 bp, synthetic construct
  source 1..80: mol_type = other DNA
gtgcccagcctgtcacatagtgtataatgacagttatgcatagagatcgaaaaatgttggtcagagggcacaaagcttta

SEQ ID NO: 19510 - DNA, 80 bp, synthetic construct
  source 1..80: mol_type = other DNA
ttgcctgacaccctgagctgctgggatggaatccagccacttgcaaccctgcactggaataagtggataattatcttact

SEQ ID NO: 19511 - DNA, 80 bp, synthetic construct
  source 1..80: mol_type = other DNA
atctctgcagcttccttctgtatgaccttgagcaagcgatttaacctttctgtgccttgctttctcatctgtaacatgga

SEQ ID NO: 19512 - DNA, 80 bp, synthetic construct
  source 1..80: mol_type = other DNA
tctcaggattcacatgctgacaggtgtttattttttcttgatcaaaacacaacagaataaaaaccagagggctttaaact

SEQ ID NO: 19513 - DNA, 80 bp, synthetic construct
  source 1..80: mol_type = other DNA
taccaaatgcagacttagcccttcccctgatagttgtcttaatagaagtcagttgtatactgggaatgtttttattttta

SEQ ID NO: 19514 - DNA, 80 bp, synthetic construct
  source 1..80: mol_type = other DNA
gcccagcattagcagtagagggtagacatggcttattaaaataaatgtcaagccttgcttggattttgttttacccacat

SEQ ID NO: 19515 - DNA, 80 bp, synthetic construct
  source 1..80: mol_type = other DNA
agacagtttctgtatggctgaacatgggggagtggaagtttctaaagggtgacatacctgagtatcagatggtacctcct

SEQ ID NO: 19516 - DNA, 80 bp, synthetic construct
  source 1..80: mol_type = other DNA
tcttgcagtttctccttgcacaagctcagctacatcagttgaacaaaactttgtgttattttggggagaggagacattta

SEQ ID NO: 19517 - DNA, 80 bp, synthetic construct
  source 1..80: mol_type = other DNA
tcgaatcttcctctatcatcccccactactcctttatcaaccctttggctgtgtctagactgaattcataatatttccca

SEQ ID NO: 19518 - DNA, 80 bp, synthetic construct
  source 1..80: mol_type = other DNA
ttctaaagcactgtgatttaacaagaggtacttggctgattttagctgaaggctcttgtcaggctcttgaggtcggatct

SEQ ID NO: 19519 - DNA, 80 bp, synthetic construct
  source 1..80: mol_type = other DNA
caaatcaatggctttcattatcccagatctaagtaggaaaggaaagggtgcacctgccctgtttcagacacttgctagtt

SEQ ID NO: 19520 - DNA, 80 bp, synthetic construct
  source 1..80: mol_type = other DNA
tctttgtgctctccctctctcctgccgccatgtaagacacacctgcttccccttccaccatgattgtaagtttccggagg

SEQ ID NO: 19521 - DNA, 80 bp, synthetic construct
  source 1..80: mol_type = other DNA
cccatctcagcctcctgagtagcaggaccacaggtgtggtccacaccagtagctaccacacctggctaatttttgtattt

SEQ ID NO: 19522 - DNA, 80 bp, synthetic construct
  source 1..80: mol_type = other DNA
ctattattattccttttgaaaatgcttctgaacttatgcaggtggagtgcccaggcttttgaagcagggttgtttgtctg

SEQ ID NO: 19523 - DNA, 80 bp, synthetic construct
  source 1..80: mol_type = other DNA
tcatcaactgtttactctatcacgttgcaaggactctgagggatagttaagatttaaatattcccagcagggagggaaga

SEQ ID NO: 19524 - DNA, 80 bp, synthetic construct
  source 1..80: mol_type = other DNA
taccatgtagaggatgctcacattgtttgctaaattgggataaggatctttaagtttccttcctactccaagatttcatg

SEQ ID NO: 19525 - DNA, 80 bp, synthetic construct
  source 1..80: mol_type = other DNA
accatcttgattctggctggtttcatctggctttggctggcttccttaccacatcctattgtattagcagggtcttgtga

SEQ ID NO: 19526 - DNA, 80 bp, synthetic construct
  source 1..80: mol_type = other DNA
catgaatattcatgaaagtcacttcagcacaggtccctctgaaatttcctacagaaaatggccttctttcattgaaaagg

SEQ ID NO: 19527 - DNA, 80 bp, synthetic construct
  source 1..80: mol_type = other DNA
cacggaactcaggaaaacacttatttacatttacgggcttattataaagactcctgcgaagggtacagatgaagagctgt

SEQ ID NO: 19528 - DNA, 80 bp, synthetic construct
  source 1..80: mol_type = other DNA
ccacattcagtgcatctttgcttccagtctgattttgatacgggagttcagaagaaagtacctgggcagatagtgagggt

SEQ ID NO: 19529 - DNA, 80 bp, synthetic construct
  source 1..80: mol_type = other DNA
agggtgagaacgcgtagggaaatgctcatttccattaaagcatataaatagagggaggttagagctgtcaaaaacaaatc

SEQ ID NO: 19530 - DNA, 80 bp, synthetic construct
  source 1..80: mol_type = other DNA
tcctgtctctgccaacagcattattgaattagctgggggttgccagtgcttcctttccctttcccatttcttttcatggg

SEQ ID NO: 19531 - DNA, 80 bp, synthetic construct
  source 1..80: mol_type = other DNA
tacacttttcttgtcatttccttttgctctccagttttaaattacacagactttcgtagagtgcccactctccctttctc

SEQ ID NO: 19532 - DNA, 80 bp, synthetic construct
  source 1..80: mol_type = other DNA
tgactaagtcatgttttgctaaaagtatcttcaacatgaactctggggttattttcttgttttttatttcccctcatcag

SEQ ID NO: 19533 - DNA, 80 bp, synthetic construct
  source 1..80: mol_type = other DNA
atctcaccaaaattggtttctgatgctgctgaaactgcatatgaccttgttcatgacctctggtgctactccaagtagct

SEQ ID NO: 19534 - DNA, 80 bp, synthetic construct
  source 1..80: mol_type = other DNA
tgatcttttttgtcttagacctgtgttaacacagacactatcatgatcagttatctgctggttccctctaagtggtctct

SEQ ID NO: 19535 - DNA, 80 bp, synthetic construct
  source 1..80: mol_type = other DNA
agtgcccaaaatagtgcctgaaatgtcacagacagccccagatatttacttttttgactccatatcgtcttcagctacta

SEQ ID NO: 19536 - DNA, 80 bp, synthetic construct
  source 1..80: mol_type = other DNA
tatcactaactgcctttcccacagtattccccatttcggtacatggtaccaccatttatccagttgttcagacctaaacc

SEQ ID NO: 19537 - DNA, 80 bp, synthetic construct
  source 1..80: mol_type = other DNA
aggaaaaacattgcaatcccagtgactagtaaaaggaaagctagagagctgggatgcaaaccctgggtgtgtctattgca

SEQ ID NO: 19538 - DNA, 80 bp, synthetic construct
  source 1..80: mol_type = other DNA
tgctcaggtatagtttgctggttcatccgttcattttcaggctggagaaaagccttcagctgaaatatctaccaattgca

SEQ ID NO: 19539 - DNA, 80 bp, synthetic construct
  source 1..80: mol_type = other DNA
cagtggttttcttttcagaattttaacatggtttgtacaatctgagtctggtataggtctttgagaatgtctaccacttg

SEQ ID NO: 19540 - DNA, 80 bp, synthetic construct
  source 1..80: mol_type = other DNA
ttccatgtgatcatatgggcacattgatcctgactatatcagttcttctgtgattggcactcgattgattgcaggattgt

SEQ ID NO: 19541 - DNA, 80 bp, synthetic construct
  source 1..80: mol_type = other DNA
tatagaaaggaaaccaaattttcatcagtagattaccatttcaaagctccctacaaagtcatcaccttcttgcctgcatc

SEQ ID NO: 19542 - DNA, 80 bp, synthetic construct
  source 1..80: mol_type = other DNA
atcattcattctttattctccaaatagaggactgaatatctactatgtgctgggtaccagggatgcggtatgaacgaggt

SEQ ID NO: 19543 - DNA, 80 bp, synthetic construct
  source 1..80: mol_type = other DNA
cagagtggagaatgacgtgagaaggtgttatagatggaggaggaagtagatcatgcaatatgtctgatggactgtgagaa

SEQ ID NO: 19544 - DNA, 80 bp, synthetic construct
  source 1..80: mol_type = other DNA
cctttggctgacattaccaaggcacactgttaatactggcctcacaggccataatctcttatgtgtcattttgtatttaa

SEQ ID NO: 19545 - DNA, 80 bp, synthetic construct
  source 1..80: mol_type = other DNA
agtgataacattgggaactggaattccaattgaacataaaggagttctaaaaggatgacctggctatggaaggatgacag

SEQ ID NO: 19546 - DNA, 80 bp, synthetic construct
  source 1..80: mol_type = other DNA
tctgtatgacataaatgtcaaaagcaatgatgggataaatgagatcaacttgtaagcacttatcaccatgcctgcaacat

SEQ ID NO: 19547 - DNA, 80 bp, synthetic construct
  source 1..80: mol_type = other DNA
caacttcccccaggctagtagcatctccgatccccttatactattcttttttttctttccatagaacttttcaccttcta

SEQ ID NO: 19548 - DNA, 80 bp, synthetic construct
  source 1..80: mol_type = other DNA
tggaaaaattctcaggacataacttagaggaccagttacacaaagcctaaacctggaaaaaaatctcggaagactggagg

SEQ ID NO: 19549 - DNA, 80 bp, synthetic construct
  source 1..80: mol_type = other DNA
tgttgtaatggaaaggcagaagcccctctaaataccacccccttgctgggatcaaattggattagaggtcatctatgtat

SEQ ID NO: 19550 - DNA, 80 bp, synthetic construct
  source 1..80: mol_type = other DNA
ccattcattcaactactattgattgaggcccttttatatacctgacattatgctagatactggggctataattctaggta

SEQ ID NO: 19551 - DNA, 80 bp, synthetic construct
  source 1..80: mol_type = other DNA
ctcaaggattttttggcttttatctttagagcaattggaaaccattgaagggttttaagccagcatgccgtatagtacag

SEQ ID NO: 19552 - DNA, 80 bp, synthetic construct
  source 1..80: mol_type = other DNA
ggttaaccctctggatcccatcagtatttggcagtgttggtctttattcttggaatagaaactagattgtgtgtgtgtgt

SEQ ID NO: 19553 - DNA, 80 bp, synthetic construct
  source 1..80: mol_type = other DNA
ccctgtctctactaagaatacaaaaaatgagcagggcatggtagcgcttgcctatagtcccagctacttgagaagctgaa

SEQ ID NO: 19554 - DNA, 80 bp, synthetic construct
  source 1..80: mol_type = other DNA
catagggtaggtgagacaaaatagtaaaagcctctggggatttgataaggcattgaacacaccagcacaatttttggttc

SEQ ID NO: 19555 - DNA, 80 bp, synthetic construct
  source 1..80: mol_type = other DNA
aaaaaaaaaaaaaaaaaaggaaataaaggcaaataaaagcattaccaggattttaaatacaaattagagtggcacctttc

SEQ ID NO: 19556 - DNA, 80 bp, synthetic construct
  source 1..80: mol_type = other DNA
tttgaaatgacatgtgtgcctgctattagaatctgttccgttcttgatgatacttggtgtcctagaaatgtgtcagacaa

SEQ ID NO: 19557 - DNA, 80 bp, synthetic construct
  source 1..80: mol_type = other DNA
gggtacaaagaactagggataagattattagcaagaacacagaaagtccttgccccatgaggtttatattctagtagaaa

SEQ ID NO: 19558 - DNA, 80 bp, synthetic construct
  source 1..80: mol_type = other DNA
ctaagtggcaagttattcctacgtatggtgtcagtaaatgtataggaggaagtgcaagagaggtgacatgatttctattg

SEQ ID NO: 19559 - DNA, 80 bp, synthetic construct
  source 1..80: mol_type = other DNA
agctgaataacaggccagaattccaaattaaagaaaaactaattttagacctggagactgcatgagaagggacaccagag

SEQ ID NO: 19560 - DNA, 80 bp, synthetic construct
  source 1..80: mol_type = other DNA
taagaaatagtaatcaaaaagagaaggtcttaagaatattatttaaaaatatgagtgttagggaagcccaaacttcctaa

SEQ ID NO: 19561 - DNA, 80 bp, synthetic construct
  source 1..80: mol_type = other DNA
aggctataccgtacatacctaggtgtataggaggctgtaccatttaggtttgtattacatacactccatgatgtacacat

SEQ ID NO: 19562 - DNA, 80 bp, synthetic construct
  source 1..80: mol_type = other DNA
tcatggccccaataacagatacaacttttacaaagtagaaacctcagaagttgcaaagagaaacgtagaaacataccaat

SEQ ID NO: 19563 - DNA, 80 bp, synthetic construct
  source 1..80: mol_type = other DNA
gccaccacgcctggcctcagtgcatatattattaaaaatgaaaatttaaatcaatgaattaaacaaccagatgaaaactg

SEQ ID NO: 19564 - DNA, 80 bp, synthetic construct
  source 1..80: mol_type = other DNA
gcatgtgcacacacacgcttcagttcaaaatcagcactttctttaaggtagtacactagcagttaaagtcaggtgtaagt

SEQ ID NO: 19565 - DNA, 80 bp, synthetic construct
  source 1..80: mol_type = other DNA
ggttataggaatatattcatctatcatatagaaaagaatatgtgctcagtcccaggaaatagaaaatatattaccttatt

SEQ ID NO: 19566 - DNA, 80 bp, synthetic construct
  source 1..80: mol_type = other DNA
tcagactagtttgagtttcctcttcaaggactgaggatgtttaaacaatgatcataagaaaagcgggctaaataaaactg

SEQ ID NO: 19567 - DNA, 80 bp, synthetic construct
  source 1..80: mol_type = other DNA
ggccttgtagatgtaacaatatcaagagctctttctgtttcttccaatttctatggcgtcactttaattaaaagtatttc

SEQ ID NO: 19568 - DNA, 80 bp, synthetic construct
  source 1..80: mol_type = other DNA
atgcatttatgctggtatccagttaaggtagagtggtgacacaaagggcaaagatgacataattgaaattcccaaaatag

SEQ ID NO: 19569 - DNA, 80 bp, synthetic construct
  source 1..80: mol_type = other DNA
agtacagaatagggattgtggttttgatgatggtgtatccattgtaataacagagaacagaactaagggtaggggaagga

SEQ ID NO: 19570 - DNA, 80 bp, synthetic construct
  source 1..80: mol_type = other DNA
aactcccaagtgttctgctgaggggtaaagtcaggtttcaaatgccatgtaaccagcacaactttatttgaaagatgaag

SEQ ID NO: 19571 - DNA, 80 bp, synthetic construct
  source 1..80: mol_type = other DNA
tccattttggcagtttatcagttcatttgactttttatatcctactgtactctccaaagaatacacagccactgtcttcc

SEQ ID NO: 19572 - DNA, 80 bp, synthetic construct
  source 1..80: mol_type = other DNA
gtgtgtatatatatattccaccatatatatacacacacacccacacacagacccacacacacatacacaccacagtatgt

SEQ ID NO: 19573 - DNA, 80 bp, synthetic construct
  source 1..80: mol_type = other DNA
ttgttgtctggttcaaataattttttgattttcatcttggtttcgtttttgacccaatgctcattcaggagcaggttatt

SEQ ID NO: 19574 - DNA, 80 bp, synthetic construct
  source 1..80: mol_type = other DNA
ctcttcctcaggaacactgattattcttaggtttggttgtttaacataatcccagacttcttggaggctttgttcatatt

SEQ ID NO: 19575 - DNA, 80 bp, synthetic construct
  source 1..80: mol_type = other DNA
cccacgcaaacagaagggccagtcgtactcccactgtgccccccaacaacagccctgagtctgtttccaggcggagggtg

SEQ ID NO: 19576 - DNA, 80 bp, synthetic construct
  source 1..80: mol_type = other DNA
tattagtcctttctcatgctgctaataaagacctgagactggataatttataaaggaaagatgtttaattgactcacagt

SEQ ID NO: 19577 - DNA, 80 bp, synthetic construct
  source 1..80: mol_type = other DNA
agaatgaactattaatctgtgcaacaacatggatgcaacgcaaaatctttaaggaaagtgacagatgcagggcactaaag

SEQ ID NO: 19578 - DNA, 80 bp, synthetic construct
  source 1..80: mol_type = other DNA
ggcctaggccaactcttgcacttgggctcatgaaaacatgcacatacgtattcatgtcaatgttattttttgtaatggca

SEQ ID NO: 19579 - DNA, 80 bp, synthetic construct
  source 1..80: mol_type = other DNA
acaaaacagcctaccaaccaacaagagatccctaaatgttcggcagtagagaaattgataaagtatagtggattcaagca

SEQ ID NO: 19580 - DNA, 80 bp, synthetic construct
  source 1..80: mol_type = other DNA
ctccacacaccaagcaattctccagcaatactaagtgttctgtaatttaactcaattttgacatcatcatctacctggag

SEQ ID NO: 19581 - DNA, 80 bp, synthetic construct
  source 1..80: mol_type = other DNA
ccatgttcatggagagactgactgtgcttggcattccttttctaattttcctagacacagccactcagtattttaaaaat

SEQ ID NO: 19582 - DNA, 80 bp, synthetic construct
  source 1..80: mol_type = other DNA
gattcaggaggcttatatgagaggatcacttaagcctaggaatttgagaatttgaacctgtaatgagttatgatggctcc

SEQ ID NO: 19583 - DNA, 80 bp, synthetic construct
  source 1..80: mol_type = other DNA
ccagtcattggatgcttagagagagaagcattgaatctatgtagaagagatagtgcaaagaccctaaggtgagaatgagt

SEQ ID NO: 19584 - DNA, 80 bp, synthetic construct
  source 1..80: mol_type = other DNA
catttagaggcagatcagaggagaatgacctgcaaagcagacacttttttgagtcttctaaaaagataaaaatctttctt

SEQ ID NO: 19585 - DNA, 80 bp, synthetic construct
  source 1..80: mol_type = other DNA
cctgagcctcccaagtagctgggactacaagcacgtgctaccatatctggctaattttttgtattttttttttttttgta

SEQ ID NO: 19586 - DNA, 80 bp, synthetic construct
  source 1..80: mol_type = other DNA
tcaaaatccttaaccttggctctattagcttcatttggatttctgtgagcttccatcagcaccaagagaccagtaccact

SEQ ID NO: 19587 - DNA, 80 bp, synthetic construct
  source 1..80: mol_type = other DNA
ggttgtaaatgtttaatatcctcctaggggcttttaggagaatatgttttcacagcacatgtggtgctgttatactccga

SEQ ID NO: 19588 - DNA, 80 bp, synthetic construct
  source 1..80: mol_type = other DNA
tcccttattctattaacatggctatcttgggactataccgtacttccttttgcaacccagttgacatgcaggtatacgta

SEQ ID NO: 19589 - DNA, 80 bp, synthetic construct
  source 1..80: mol_type = other DNA
cttacaattgcaaaccttccaagcactgtagttgataagagttcaaacagtcacgtaaccccttttctaaatacagagct

SEQ ID NO: 19590 - DNA, 80 bp, synthetic construct
  source 1..80: mol_type = other DNA
tttctgtcaaacaagcaaacactgaattaaaaatgggaaacttttacatattttgcttccctttaccatcaccttaatgg

SEQ ID NO: 19591 - DNA, 80 bp, synthetic construct
  source 1..80: mol_type = other DNA
ttcttcgagtatttgtcttttttggcatatagctgccatttatacacgtggtcacaaaccacatgatattgcatgtatat

SEQ ID NO: 19592 - DNA, 80 bp, synthetic construct
  source 1..80: mol_type = other DNA
ctagacttgcctgtaagctcatcccatttttggcaagtcccttcagcttcttttgttttctgagttctgaagtgacaata

SEQ ID NO: 19593 - DNA, 80 bp, synthetic construct
  source 1..80: mol_type = other DNA
ataaaaattaaaagcacaacgaggtatcatttcacagattggaatgtggagcaggaggaactttcactcactcctgacgg

SEQ ID NO: 19594 - DNA, 80 bp, synthetic construct
  source 1..80: mol_type = other DNA
tttcaataaaactatgagggcctagaagatgttggtttggactcagtctgcaaactctgaacatagcctacagaaatgtt

SEQ ID NO: 19595 - DNA, 80 bp, synthetic construct
  source 1..80: mol_type = other DNA
tagtccttttaatggtagaatcaagccttatttgggccttctgagtttcagttcatcgtttctactgtatcccctcttcc

SEQ ID NO: 19596 - DNA, 80 bp, synthetic construct
  source 1..80: mol_type = other DNA
ttgttagcattctgtgaaacttcagggctcctgaaatattcagtgctttgacccttagagtctgttccattccttatgat

SEQ ID NO: 19597 - DNA, 80 bp, synthetic construct
  source 1..80: mol_type = other DNA
attgtacctagggtggacacgttcctcctcttactttcaggaacgtcctactctgtctatgaagtagctgccctttcacc

SEQ ID NO: 19598 - DNA, 80 bp, synthetic construct
  source 1..80: mol_type = other DNA
atcctccagctagacataaaagttctccaattccccactagactcaggagcccagctggcttcacctactggatcccaca

SEQ ID NO: 19599 - DNA, 80 bp, synthetic construct
  source 1..80: mol_type = other DNA
cctgtcttaggtaaacagctgatttacctgtgaacatgtaattgactattatcctacttgatccttttcttttgcaactt

SEQ ID NO: 19600 - DNA, 80 bp, synthetic construct
  source 1..80: mol_type = other DNA
ttatcttatggggtctattgtgccttcagatataaactgatgacagtgtgaagtcattacagtgagacatttaaaaccta

SEQ ID NO: 19601 - DNA, 80 bp, synthetic construct
  source 1..80: mol_type = other DNA
agctccttccgtggaattcattatttcataggcaagctgttgccgcagagatgttagaacctgaatataaaatctgaata

SEQ ID NO: 19602 - DNA, 80 bp, synthetic construct
  source 1..80: mol_type = other DNA
ggagtatgtcgtaggctgaattatcctcaaagatatccagtttcgaattcagggaacctatgaatgttgccttatatgac

SEQ ID NO: 19603 - DNA, 80 bp, synthetic construct
  source 1..80: mol_type = other DNA
catgaataacgtaatggcagaatcaaatttagaaactcagcaaaaaaaaaaaaaaagctttgtgtttcaacatgaatttc

SEQ ID NO: 19604 - DNA, 80 bp, synthetic construct
  source 1..80: mol_type = other DNA
agaatttgactcctgtaaagatccagtggatctttccggttagtaacctacatgtgaatgaataagatgagtacatgtgt

SEQ ID NO: 19605 - DNA, 80 bp, synthetic construct
  source 1..80: mol_type = other DNA
aaatctctgacaggtctaacgtgatcttgagggaagtctaatttggtggtaataagtagaagggactggagatgaagaga

SEQ ID NO: 19606 - DNA, 80 bp, synthetic construct
  source 1..80: mol_type = other DNA
aggtctgatcatcttgttcctattttttatggacctggtatagtctgtgtggacttcctggatgaccaacaaccacaaac

SEQ ID NO: 19607 - DNA, 80 bp, synthetic construct
  source 1..80: mol_type = other DNA
gttgttttttcatatgcctgctgtattttttgtacctgtattcctccattcttgctttcttttgtgcagaatagtgtgcc

SEQ ID NO: 19608 - DNA, 80 bp, synthetic construct
  source 1..80: mol_type = other DNA
gtttggggccattcattatttgtttaaatgcatttttctgaccgcttctttctctcctattcttctgagactcccattac

SEQ ID NO: 19609 - DNA, 80 bp, synthetic construct
  source 1..80: mol_type = other DNA
tgtccgtggataaggaaatgtataagaagttcaggtcattttcaagtctaccaagatttacttcctgctggttcctaggt

SEQ ID NO: 19610 - DNA, 80 bp, synthetic construct
  source 1..80: mol_type = other DNA
tcaagattcttcaaccagaaaatattgtatctcctatggaagtggtgactcacctgcagtcagcaaaggaaagccctctg

SEQ ID NO: 19611 - DNA, 80 bp, synthetic construct
  source 1..80: mol_type = other DNA
tgctagtacaattcctggcaagaattccaaggtgttgaatgtctcagtctgagtctgcttggagtttctagattttatta

SEQ ID NO: 19612 - DNA, 80 bp, synthetic construct
  source 1..80: mol_type = other DNA
atctatgtgtttgtgtgaattatttttccttcttcaaggagggcatgagacaaggaactatggctgttgtggcaaaggtc

SEQ ID NO: 19613 - DNA, 80 bp, synthetic construct
  source 1..80: mol_type = other DNA
tgtctttgagtggtttgcttgcaaagttccaggtaattgtatgcacatcaacaatggctccctctcaagatatatgtgag

SEQ ID NO: 19614 - DNA, 80 bp, synthetic construct
  source 1..80: mol_type = other DNA
aagtgacattttgcctggttcatgtctctagttggtaaattaaaacaacaaccaccactttatctttcggaggacataga

SEQ ID NO: 19615 - DNA, 80 bp, synthetic construct
  source 1..80: mol_type = other DNA
ttgcgtggcagaacacgttgattaatcttcagcaggaatatggtgtatctagattctgtggcagtcatgccaatgaagta

SEQ ID NO: 19616 - DNA, 80 bp, synthetic construct
  source 1..80: mol_type = other DNA
cagtaggtttttaagtgagttaggcagatacaactctggaagccaagtagttgatggatactttggttggaaacctaatt

SEQ ID NO: 19617 - DNA, 80 bp, synthetic construct
  source 1..80: mol_type = other DNA
tgatgctgctttatttttgggaagtgggaacaaaggcctgacatgctaccatgggtataactgtacaaatttcaatgtta

SEQ ID NO: 19618 - DNA, 80 bp, synthetic construct
  source 1..80: mol_type = other DNA
cgaagtagaatccatgcaagaaccgattttaagaaacaagtggtgcttcatcatttccagaaatggagaggaattacaat

SEQ ID NO: 19619 - DNA, 80 bp, synthetic construct
  source 1..80: mol_type = other DNA
acaaaacatgggaaccagtggggtttgtgtggtctgagtaagctttgtggccttattgtgggcatcatttatccataaaa

SEQ ID NO: 19620 - DNA, 80 bp, synthetic construct
  source 1..80: mol_type = other DNA
acatatatatgttaatatatgggaaggacaagtactgctctcctacgtgcatatattgtgtagtggtaagtctgggcttc

SEQ ID NO: 19621 - DNA, 80 bp, synthetic construct
  source 1..80: mol_type = other DNA
gtatcagagtaagctgtgtctccttacattttcagagctgttattgttgctcaataaatggcagctgttgttatctgtgt

SEQ ID NO: 19622 - DNA, 80 bp, synthetic construct
  source 1..80: mol_type = other DNA
atgtgatctgtgtcactaggcctcgtgcttatgtctgttgtttaaaaccgacctttctttgagcgtttctgtgtttcatt

SEQ ID NO: 19623 - DNA, 80 bp, synthetic construct
  source 1..80: mol_type = other DNA
tactattaagtagggaagagaaactttagtgacttttgatattagactagaagcttattttacaaaagcttagtatttta

SEQ ID NO: 19624 - DNA, 80 bp, synthetic construct
  source 1..80: mol_type = other DNA
aagaaaccaatgtcaaatagctcaacggggtaccgtatattagggaaaaatgaaagtttctctcatactgctgagtattt

SEQ ID NO: 19625 - DNA, 80 bp, synthetic construct
  source 1..80: mol_type = other DNA
ttttcaagaaatcatttctttcctttcagatgaacagtgagtcaaaaagaacctcgtgttgccctgattcccaactcttt

SEQ ID NO: 19626 - DNA, 80 bp, synthetic construct
  source 1..80: mol_type = other DNA
ctgtggttctggataacttgtcgcttgcagatctacctctgtattgctcttcttgctcttcagatctattttgcgtatgg

SEQ ID NO: 19627 - DNA, 80 bp, synthetic construct
  source 1..80: mol_type = other DNA
tgaggacagcgtattttaaaatacacgttgagtgtcctttctgtctttcgggtgaattatttctggggggattgtaggac

SEQ ID NO: 19628 - DNA, 80 bp, synthetic construct
  source 1..80: mol_type = other DNA
cagactcagacatgtccagcttttatgaaaaatggagctgtagaatgtggagtagtaaaaaacttgtgttggctgggcac

SEQ ID NO: 19629 - DNA, 80 bp, synthetic construct
  source 1..80: mol_type = other DNA
aatagcatctccctttgttgtgggaatcaaataatataagtaaagtgtgtagaacaatcgtggcatgcaagaagcactat

SEQ ID NO: 19630 - DNA, 80 bp, synthetic construct
  source 1..80: mol_type = other DNA
gcaatttgttgagttcctatcgtattccagacaggcatcttcctaagccatgaatacaaaatagtgagtgtggtattatt

SEQ ID NO: 19631 - DNA, 80 bp, synthetic construct
  source 1..80: mol_type = other DNA
aaaaatgccctcttcatagtcctcattcccccctaagataaccacagctaaaagattagtatatagccatctataacttt

SEQ ID NO: 19632 - DNA, 80 bp, synthetic construct
  source 1..80: mol_type = other DNA
tgagttgcttttgtgcattctggagctagggggacaggtatgaataacaatgcctccttgctcttgagaatcttagcaat

SEQ ID NO: 19633 - DNA, 80 bp, synthetic construct
  source 1..80: mol_type = other DNA
atgacgtggtttccagactctgtcatcaaactcaataaagacgtcaatttaagcaggatgtaatttaatcacagtggcgt

SEQ ID NO: 19634 - DNA, 80 bp, synthetic construct
  source 1..80: mol_type = other DNA
ttttgggttcggtaatcctccatcctcatttgcctgacacagtccaggttaatacctgtggtcacagcataatcactatt

SEQ ID NO: 19635 - DNA, 80 bp, synthetic construct
  source 1..80: mol_type = other DNA
cgtggtgacactgtctctacaaaagataaaaaaaattagctggacatggtggctaatagccatagccagcatacctatag

SEQ ID NO: 19636 - DNA, 80 bp, synthetic construct
  source 1..80: mol_type = other DNA
ttgattcttgaggtacaggctctaaagctccagcatggatttgatgtggatggtactaatgatacagatatttaagtttt

SEQ ID NO: 19637 - DNA, 80 bp, synthetic construct
  source 1..80: mol_type = other DNA
cgtagagttccttatcactgggtgttcacattttcttatttttgtctctcattttatatagtgattatttggtatgtatt

SEQ ID NO: 19638 - DNA, 80 bp, synthetic construct
  source 1..80: mol_type = other DNA
ccctcattcttttcccctgacccccaaattgttcttattcttcttgactatttatctcccaaatgaaattacttgtggta

SEQ ID NO: 19639 - DNA, 80 bp, synthetic construct
  source 1..80: mol_type = other DNA
ctgatggagaaaagactttgtgatctcatgccgttaaagtacataatcccatatgatattacagtatggagagatgcttt

SEQ ID NO: 19640 - DNA, 80 bp, synthetic construct
  source 1..80: mol_type = other DNA
attctgtcctaaatgacagtttgacgacatacttaacaaatccctaggcaccaaggatttggggttttgttgggaagaaa

SEQ ID NO: 19641 - DNA, 80 bp, synthetic construct
  source 1..80: mol_type = other DNA
tgattactaggagagagggtgaactaaagtcttgctaagtctgaaaacctgccttcaatctactcagctcacattgaatt

SEQ ID NO: 19642 - DNA, 80 bp, synthetic construct
  source 1..80: mol_type = other DNA
atttccagacgcatacaaattgagataatttagatacaggagatggggttcttcaggcagaaaggaaatgataccagact

SEQ ID NO: 19643 - DNA, 80 bp, synthetic construct
  source 1..80: mol_type = other DNA
gtaaagttgtatgtgtggtaaagttgaatctaaagaaagctggtataactatgttaatatctgagaaaagggctgggcgc

SEQ ID NO: 19644 - DNA, 80 bp, synthetic construct
  source 1..80: mol_type = other DNA
acatggatacagttaaaactgtggatacagttaaaactgattagaggaagttattcggccctaaatacataagaagaact

SEQ ID NO: 19645 - DNA, 80 bp, synthetic construct
  source 1..80: mol_type = other DNA
ctttcaaggcagtgttgaataaagttggggaaagtggatacttttggaattaaaaatgagcttggcaaagtcacagctca

SEQ ID NO: 19646 - DNA, 80 bp, synthetic construct
  source 1..80: mol_type = other DNA
tttgaaagaagcaagcaaactttttttaaaaaagtttatggaatagttcatgtttatgtgccctaaatttgtaattaaaa

SEQ ID NO: 19647 - DNA, 80 bp, synthetic construct
  source 1..80: mol_type = other DNA
ttgctaagcttttctttgggtatttggatattctgtttgttacattattgctcctaattcttgcgccttgaagaactgtg

SEQ ID NO: 19648 - DNA, 80 bp, synthetic construct
  source 1..80: mol_type = other DNA
cttgccagagcattggagattcctagctaatagcccaagatttctgcctaagtagcattagcttcttacctaattaatga

SEQ ID NO: 19649 - DNA, 80 bp, synthetic construct
  source 1..80: mol_type = other DNA
agaaccttatgtttctggttttgcttcatctgaaatggggcatattaaagtactttccatccctagaaccacatagtttt

SEQ ID NO: 19650 - DNA, 80 bp, synthetic construct
  source 1..80: mol_type = other DNA
ttaaagtctcctcaagactgatattcctactccactttctcccaagagtgcaaaacagtgaggcttttcattattgaaat

SEQ ID NO: 19651 - DNA, 80 bp, synthetic construct
  source 1..80: mol_type = other DNA
ttgccttctagttctaaggaaatatctctgatattttctgagctaaaaaccttgaggcttagtttgccaagtgactggct

SEQ ID NO: 19652 - DNA, 80 bp, synthetic construct
  source 1..80: mol_type = other DNA
gcgcttggcattggtctttcggggagcttctatccccagaaaactctgacctgagcttctcttgctgcagacaaatgcgt

SEQ ID NO: 19653 - DNA, 80 bp, synthetic construct
  source 1..80: mol_type = other DNA
catcatcactgtctctttgagcagctgtgcatctgtttaatcacaagcccactgagttatcaaatgctgctctttacact

SEQ ID NO: 19654 - DNA, 80 bp, synthetic construct
  source 1..80: mol_type = other DNA
atcaatgtgttgcttttgatttagagaaattctctatcgagacaagctgggaaatgaagaaagccctagatacctcttct

SEQ ID NO: 19655 - DNA, 80 bp, synthetic construct
  source 1..80: mol_type = other DNA
cgctagaatgacttctgaggctattctgaaattgttgcatttgataatcctttttaatggcaagcctccaaatgtatggt

SEQ ID NO: 19656 - DNA, 80 bp, synthetic construct
  source 1..80: mol_type = other DNA
caaattaatcatcatccaaaaaattctaagacagcacgttggaatccatgctgcgtgcctgtcctataattgcccatata

SEQ ID NO: 19657 - DNA, 80 bp, synthetic construct
  source 1..80: mol_type = other DNA
gaagaaagtatctcttcacaaaccatgtgctgtaccaaaatgttaggtttttgtgtttctttgaattaaggcttaataat

SEQ ID NO: 19658 - DNA, 80 bp, synthetic construct
  source 1..80: mol_type = other DNA
tctttgagatcgtgtctatttaatgtttcctctcttttccttatgcccctacagaaattcatgatgaaggtaagacatct

SEQ ID NO: 19659 - DNA, 80 bp, synthetic construct
  source 1..80: mol_type = other DNA
taaagcatgtggacatgtcatcgaaggaatatgtaagggacagacaggaagagtagactatggttattttaggatatata

SEQ ID NO: 19660 - DNA, 80 bp, synthetic construct
  source 1..80: mol_type = other DNA
tgctttgggtttcatacggaaaaggcattaacttcttagaaccagatggatgctttcttgttgtgggagcctatttctgc

SEQ ID NO: 19661 - DNA, 80 bp, synthetic construct
  source 1..80: mol_type = other DNA
ctttacggtaaaaggagcactttctggttaacttcaagaccttgtccttcacttttaaaacattttgttttgactagtgt

SEQ ID NO: 19662 - DNA, 80 bp, synthetic construct
  source 1..80: mol_type = other DNA
cttactcagcctgaagtgagcttccccatatccagtttttcatttgacagttgtttactgagtacttaccatggcctgac

SEQ ID NO: 19663 - DNA, 80 bp, synthetic construct
  source 1..80: mol_type = other DNA
ggatgattgaagatgaggctagagatgagtgagacaaatgtctctctgtgcttctcaaagtagtctctggaccaacggca

SEQ ID NO: 19664 - DNA, 80 bp, synthetic construct
  source 1..80: mol_type = other DNA
ttcaacagcactttgcttgtctgcaagagctcttaatacattctttcctactaacgttcctttgagagcaagagagtatt

SEQ ID NO: 19665 - DNA, 80 bp, synthetic construct
  source 1..80: mol_type = other DNA
ctattaatatccccctgttgaccagaagccttaccaataccagtcaacacatattttttgtatgtattatatactgtatt

SEQ ID NO: 19666 - DNA, 80 bp, synthetic construct
  source 1..80: mol_type = other DNA
tcttgcttcaacctcctgtgtagctaggactacaggtgtgtgctaccacgcctggctaatttttaaatttattgtagaga

SEQ ID NO: 19667 - DNA, 80 bp, synthetic construct
  source 1..80: mol_type = other DNA
aatatcatttcttttaatgtgttacatcacatgaataggtcagataagaaaacttgtgatcatgttagcaagtgctggaa

SEQ ID NO: 19668 - DNA, 80 bp, synthetic construct
  source 1..80: mol_type = other DNA
ctataaccttgggagccatttctttgtagttaagagtcagaatcagaatctgcaggtcaatttgatttcacatccccatg

SEQ ID NO: 19669 - DNA, 80 bp, synthetic construct
  source 1..80: mol_type = other DNA
gattttcaggaaaacagtgagaacagtagggatagatggatgccaaattacaggtcagaataagactctgctggtacaac

SEQ ID NO: 19670 - DNA, 80 bp, synthetic construct
  source 1..80: mol_type = other DNA
gggaaatacgatacatgggatgaatgttcttatggatggagtcaggaaagaatgttctaatgaaagtttttcctagaagg

SEQ ID NO: 19671 - DNA, 80 bp, synthetic construct
  source 1..80: mol_type = other DNA
agtcagtgttttctccctgcgtcctgatttccttatgctactctgttttttcccgtagttccctacctcttctgaattcc

SEQ ID NO: 19672 - DNA, 80 bp, synthetic construct
  source 1..80: mol_type = other DNA
aggtattgggaagaaagagtgaagaagagacatgtggctcatgaggcttatgcttgacttgtgctagaagaaattgtttg

SEQ ID NO: 19673 - DNA, 80 bp, synthetic construct
  source 1..80: mol_type = other DNA
cctaaacggaagaataatgtgatgtgggtgcaaatatagcttatcaggttgttcaggcaggcttccctcataaccttgat

SEQ ID NO: 19674 - DNA, 80 bp, synthetic construct
  source 1..80: mol_type = other DNA
tcacagtgtgtgatgattgaaacaaaaatctgaaatagggcatgtggcaatttagcagataccgggttatagaaagtatt

SEQ ID NO: 19675 - DNA, 80 bp, synthetic construct
  source 1..80: mol_type = other DNA
tggaaaattcagacctcacagggccaggacttctaacatctattctacaactaactacctgagaaagtcatctaattctc

SEQ ID NO: 19676 - DNA, 80 bp, synthetic construct
  source 1..80: mol_type = other DNA
gggaataataaagaacttaactcataggggtgttacgggattaaatgctggaatccaacaaggctcgtagttctgtgaat

SEQ ID NO: 19677 - DNA, 80 bp, synthetic construct
  source 1..80: mol_type = other DNA
ttacaactccttggtgatcagtgtctattgaccgatgagcgatttttctttcactaacagcgatggttaagctaagatta

SEQ ID NO: 19678 - DNA, 80 bp, synthetic construct
  source 1..80: mol_type = other DNA
actggaaatgtagatttccaactgattttctactgatcaggttacttaatgaaacaggccaagtttttcggatctgtgaa

SEQ ID NO: 19679 - DNA, 80 bp, synthetic construct
  source 1..80: mol_type = other DNA
aaggtgatttatcgtgtcccttccatttctgagatgttgcacttctatcgtgtaatgtcttgttactcttggatcagcag

SEQ ID NO: 19680 - DNA, 80 bp, synthetic construct
  source 1..80: mol_type = other DNA
tttggaaattgcctttttaactccgtcacctattttattactgctgtaaactccttattacctaaaatcaaggtcgttgg

SEQ ID NO: 19681 - DNA, 80 bp, synthetic construct
  source 1..80: mol_type = other DNA
tgtttatatactgaggtacagcattttgtgtatgtattttactctatgagattacaagcacccttggggtggagaatgtg

SEQ ID NO: 19682 - DNA, 80 bp, synthetic construct
  source 1..80: mol_type = other DNA
aagagagtgaacgacctcttcttgatggtgacttgagaatagtatctttatgttaaagagacccgtaggatgtttaaaag

SEQ ID NO: 19683 - DNA, 80 bp, synthetic construct
  source 1..80: mol_type = other DNA
cttgaatgacaggttgaaacagatgttctctatgaacataaccaaatcagcaacgttaagtttgcattcctagaagcact

SEQ ID NO: 19684 - DNA, 80 bp, synthetic construct
  source 1..80: mol_type = other DNA
tgaatgattttttatccttacagggtatctcattggtggtgatgtcctcaggttgctgcatggacacatggacgagtgtc

SEQ ID NO: 19685 - DNA, 80 bp, synthetic construct
  source 1..80: mol_type = other DNA
aaattaagagtcatttaaccagctgcataatctcaggaaaagtccctctgagacctgggtactgggtcttaacctctgtt

SEQ ID NO: 19686 - DNA, 80 bp, synthetic construct
  source 1..80: mol_type = other DNA
gattgcaggagatggtacatgtttgctatgaaagatggagttaaactttggttacagatgagtacagtctatgagacgtc

SEQ ID NO: 19687 - DNA, 80 bp, synthetic construct
  source 1..80: mol_type = other DNA
ctgaagaggcagcatttagccagatatgattgaaaagtttgagggactctgggcatatggatgacagaatggcagagcat

SEQ ID NO: 19688 - DNA, 80 bp, synthetic construct
  source 1..80: mol_type = other DNA
cagtagagttacctttaccttcctcttcacatttagatatgtatgtgtatgtggttacctattcattctcctaaagaatg

SEQ ID NO: 19689 - DNA, 80 bp, synthetic construct
  source 1..80: mol_type = other DNA
aagtgattattatgcatagtatgcctgaatcaaggcatctcatgtaccccataaatatatatacctactacatacccaca

SEQ ID NO: 19690 - DNA, 80 bp, synthetic construct
  source 1..80: mol_type = other DNA
catagtttatatctgtgtacacaactggatgactgatatccttgtgaggatatttgtatgcctttggccaccacctagga

SEQ ID NO: 19691 - DNA, 80 bp, synthetic construct
  source 1..80: mol_type = other DNA
ctgaataaacaagtaatgcttcttgggatgctggttaggcaagtacttcttgatttgttactaggaagagactcctgaca

SEQ ID NO: 19692 - DNA, 80 bp, synthetic construct
  source 1..80: mol_type = other DNA
atcaactctaaatgggaattgcaggtgagtaattgtgggtgactgtaactatttttcagacgattcctacatgcatttta

SEQ ID NO: 19693 - DNA, 80 bp, synthetic construct
  source 1..80: mol_type = other DNA
tagagaatcacccttggttgtgaggtcccccatttatataattttgacagttcctgaaggattgttatctgccagcaatt

SEQ ID NO: 19694 - DNA, 80 bp, synthetic construct
  source 1..80: mol_type = other DNA
tattttacagaggttaattctaagccgatatgagtgactgaagcccagggaaaaacacaaactcaagaagccttgagtaa

SEQ ID NO: 19695 - DNA, 80 bp, synthetic construct
  source 1..80: mol_type = other DNA
tcttctgagatctattttaacatgaatgccggccagtcattgtgtctagactccaaaaggaagggagataatgaaatgtg

SEQ ID NO: 19696 - DNA, 80 bp, synthetic construct
  source 1..80: mol_type = other DNA
acacagcaacctcaatgaatctccaggcaattatgctgaatggaaaatatcaatccccaaaggttgcatactgtgtgatt

SEQ ID NO: 19697 - DNA, 80 bp, synthetic construct
  source 1..80: mol_type = other DNA
agttaacaggctaaaccctttgaagagaaactcagaaagatttcttgtgtcttacaccaggatcttacacaaatgataaa

SEQ ID NO: 19698 - DNA, 80 bp, synthetic construct
  source 1..80: mol_type = other DNA
tagaagaatcataggatggaaatggatcaaaaattgtacaaatctccctaaagaagaggcgtgtttggtgggacctcaaa

SEQ ID NO: 19699 - DNA, 80 bp, synthetic construct
  source 1..80: mol_type = other DNA
tcttgaagctatttaggggcccaccatgaaccacatcattagcataaactgaggtgtgatgtaatgggctcatgaataac

SEQ ID NO: 19700 - DNA, 80 bp, synthetic construct
  source 1..80: mol_type = other DNA
caggctggagtacagcggtgaaatcatggctcactgcagcctcgatgtcctggcctcaaaccatccccctgcttcagcct

SEQ ID NO: 19701 - DNA, 80 bp, synthetic construct
  source 1..80: mol_type = other DNA
aaataccaaaaagagtttctttgagtagaagaaaactatctcatatgtaactttggaggtatagaaacggaaaaaaagcc

SEQ ID NO: 19702 - DNA, 80 bp, synthetic construct
  source 1..80: mol_type = other DNA
aattatggcccctaatcagttgactttacgttaattgaaagggagattctcccagggtagtcctgaagtcttagcttcaa

SEQ ID NO: 19703 - DNA, 80 bp, synthetic construct
  source 1..80: mol_type = other DNA
gttttccttcttacagcccataacttggttatgtataccagtctactatgctcaaaactttgccttgacttttcttttac

SEQ ID NO: 19704 - DNA, 80 bp, synthetic construct
  source 1..80: mol_type = other DNA
ttacaggaaaattgagcagaaagcacagagaattctgcctcaccagttttcttgttattaacatcttgtattagtatggt

SEQ ID NO: 19705 - DNA, 80 bp, synthetic construct
  source 1..80: mol_type = other DNA
gggaatcctctccagcatttaatgttgcagtattccaggttttggccattgtaacatatgaatagtgatacctcaagttg

SEQ ID NO: 19706 - DNA, 80 bp, synthetic construct
  source 1..80: mol_type = other DNA
ttcagtactatttggggagaatgtccattgacttactgattctttgttagagatcaatgtgctatatttgtgtgggtcta

SEQ ID NO: 19707 - DNA, 80 bp, synthetic construct
  source 1..80: mol_type = other DNA
cattcttgatttggtcctgatatagaagcaacaagtttcttatgattgagtatggtgttggctgtaggcattttttgtag

SEQ ID NO: 19708 - DNA, 80 bp, synthetic construct
  source 1..80: mol_type = other DNA
agggctttgttatgttgaagaaacaaaagtagattgaaaaatgccccagctgttctttcatgtggcttttttggataagc

SEQ ID NO: 19709 - DNA, 80 bp, synthetic construct
  source 1..80: mol_type = other DNA
tcacaagagactccaaggcagacaccaagcaagaagcacctagttaagatacactgtattcctgacccatagaaacagta

SEQ ID NO: 19710 - DNA, 80 bp, synthetic construct
  source 1..80: mol_type = other DNA
ttactgggaagaatttgtacttagaataaccttaaagggcctcttcaggcagttttatgcgatcagcctgaaatatgagt

SEQ ID NO: 19711 - DNA, 80 bp, synthetic construct
  source 1..80: mol_type = other DNA
ttatttaagatcttgatattgtggtgccaattttcagtctgaaacagcccatgaagacttgattagacaaccattgacgc

SEQ ID NO: 19712 - DNA, 80 bp, synthetic construct
  source 1..80: mol_type = other DNA
gtgtgtatacacacacagacgtgcacaatgtctatattttgtcattcagtcttacttaatcagtctgagtgttatctgta

SEQ ID NO: 19713 - DNA, 80 bp, synthetic construct
  source 1..80: mol_type = other DNA
attgcaaccagcgagagagttttttaaagtcctgactccagatctgtttaatgtcattggtgagggtgcacataaggatt

SEQ ID NO: 19714 - DNA, 80 bp, synthetic construct
  source 1..80: mol_type = other DNA
agacatggtattactgctgtctgtgaggcaggataggctttcatgtgtttacataagacagaccctatagagaggaagac

SEQ ID NO: 19715 - DNA, 80 bp, synthetic construct
  source 1..80: mol_type = other DNA
ctagagacgctaagagttgcgtaagtagaacttctaaacacagcctaatgcaccaagtgtaccaaatagctcagcgttgt

SEQ ID NO: 19716 - DNA, 80 bp, synthetic construct
  source 1..80: mol_type = other DNA
tttgtattgggctttaaagacattattgatttaggataacagactctatgggtgggaatgagggctatcttactctagta

SEQ ID NO: 19717 - DNA, 80 bp, synthetic construct
  source 1..80: mol_type = other DNA
ttttattggaaatgcatatcataatgagatggaaaaagaagagacagacttctaaggcaaacaaaggaaaactcatagct

SEQ ID NO: 19718 - DNA, 80 bp, synthetic construct
  source 1..80: mol_type = other DNA
tttctccagtgagatcctatactatatatttgttgtagttgatgtggcccattcattatatattttatactgcatactct

SEQ ID NO: 19719 - DNA, 80 bp, synthetic construct
  source 1..80: mol_type = other DNA
aatcctcttagagacttcaaaggagcactggtacatatgagttctattgaatagaactgagcccagaacatcttccagat

SEQ ID NO: 19720 - DNA, 80 bp, synthetic construct
  source 1..80: mol_type = other DNA
ttttcttcataacatatctggctgtataccttttgtgctttttggccttgaattggaattatctaatatcaaatttgtca

SEQ ID NO: 19721 - DNA, 80 bp, synthetic construct
  source 1..80: mol_type = other DNA
ctgtgtggatggtacggcatttaagtcagaacaccttgagttacatttaacttcttcttactataagctttgcgactttg

SEQ ID NO: 19722 - DNA, 80 bp, synthetic construct
  source 1..80: mol_type = other DNA
gtgaggataaagcacactggaatctgtgtctcaaagatacatttatacatccattcttatatgcggaccttcatccttaa

SEQ ID NO: 19723 - DNA, 80 bp, synthetic construct
  source 1..80: mol_type = other DNA
gaaattcttagtattcaatcgcctttcccatattttgtatgctggcccaattcaagttggatttttgataacaatgttat

SEQ ID NO: 19724 - DNA, 80 bp, synthetic construct
  source 1..80: mol_type = other DNA
attttgactctccaaaaacttaactactataaagaaggctgggtgtggtggcttacacctgtaatcccagcactttggga

SEQ ID NO: 19725 - DNA, 80 bp, synthetic construct
  source 1..80: mol_type = other DNA
agaggggtgggaatttgctagtttatctactgatagcacctccgtccagaaagaaaaaagttcaacccactaaagaagaa

SEQ ID NO: 19726 - DNA, 80 bp, synthetic construct
  source 1..80: mol_type = other DNA
agtgttactaaagagtcagagacataaacacagatgcaggcatgcagacaatgaggaaaatgagaccacagagcgaatgg

SEQ ID NO: 19727 - DNA, 80 bp, synthetic construct
  source 1..80: mol_type = other DNA
tgcaggagacaaaaaaggatattgcatggtattgaagagtgcaagatagtattcgtaaaacaataaaaagtgggcaagga

SEQ ID NO: 19728 - DNA, 80 bp, synthetic construct
  source 1..80: mol_type = other DNA
tgtggtacatacaccatggaacactatgcagccacaaaaaggaatgagataatgtcctttgaagtgacatggatgaagct

SEQ ID NO: 19729 - DNA, 80 bp, synthetic construct
  source 1..80: mol_type = other DNA
ggagggtgttcaggaagcagggaccctgtcctcccacactccttggctttttaaataaaagaattgctgccattctgtga

SEQ ID NO: 19730 - DNA, 80 bp, synthetic construct
  source 1..80: mol_type = other DNA
tgtaaatattgttgaataaaacaacattttattggaagtatttttcatggctatctttccagatcaatatatatcaatat

SEQ ID NO: 19731 - DNA, 80 bp, synthetic construct
  source 1..80: mol_type = other DNA
ccacttcattcatacaggtaatttcatatgatgaagtggttgaaggcagtgaaagtgaaggtgagatttcaagagaaata

SEQ ID NO: 19732 - DNA, 80 bp, synthetic construct
  source 1..80: mol_type = other DNA
ttcaaatgagctccgaatcataacttgtagggacagaaacagaatcaataacaacaatatgttttcaattgggaacttct

SEQ ID NO: 19733 - DNA, 80 bp, synthetic construct
  source 1..80: mol_type = other DNA
tgactgtgtgtgggggggggtatcttaaagaaaagaacaaattagtgtgtgattcttgtgtaatattttacccaattttg

SEQ ID NO: 19734 - DNA, 80 bp, synthetic construct
  source 1..80: mol_type = other DNA
ctttcatctgggtttaggagttttggttttgaaattctgaaaagaaaatcaattcttgtgaacccttgcatttacctgag

SEQ ID NO: 19735 - DNA, 80 bp, synthetic construct
  source 1..80: mol_type = other DNA
tgtttcagatgttttaaaatgtacactttcacacagtgaaaataaaggtagaggtgaataacttactatgtgtcaaacaa

SEQ ID NO: 19736 - DNA, 80 bp, synthetic construct
  source 1..80: mol_type = other DNA
ctcagggaaagcctgaaccctttgaaagagctcacctggttaagtatcatccaccttggataatctctcgtttgatttac

SEQ ID NO: 19737 - DNA, 80 bp, synthetic construct
  source 1..80: mol_type = other DNA
gagtaatttggatagacatacggatgattttaactatgctagaagaattcctctgaaccgcatgctctgtattataagaa

SEQ ID NO: 19738 - DNA, 80 bp, synthetic construct
  source 1..80: mol_type = other DNA
aacatgctatgagagtacatgaatgaaaagagaaaatatccatacgcacctcttagactgaaaaagcagtgcttgcaata

SEQ ID NO: 19739 - DNA, 80 bp, synthetic construct
  source 1..80: mol_type = other DNA
tgtagataactttgtgtccaggatttagcccatctaattattttgttgcttgtggtccctgaagcatatcctctgatacc

SEQ ID NO: 19740 - DNA, 80 bp, synthetic construct
  source 1..80: mol_type = other DNA
cacccataaatagtctagacacaaaccaatttgcttgaagaaaagaccaaaaaaaaaaaatgttagaggctcactgttct

SEQ ID NO: 19741 - DNA, 80 bp, synthetic construct
  source 1..80: mol_type = other DNA
tggaaagagtatgttggaggaggaagtgctgacataaacagagatttgaaaaaaacatttggctggtgtcagaggatgga

SEQ ID NO: 19742 - DNA, 80 bp, synthetic construct
  source 1..80: mol_type = other DNA
aatatgaagtgaagaaatatacagtgccgtcttctggattctagtttagtaccgttcactttgtcctccatgctgtgaca

SEQ ID NO: 19743 - DNA, 80 bp, synthetic construct
  source 1..80: mol_type = other DNA
atttgctttcctttcctcctgtctttcttttctctgtgtgtgtgtatgcagtcagacatccacagtacagttacatagca

SEQ ID NO: 19744 - DNA, 80 bp, synthetic construct
  source 1..80: mol_type = other DNA
ccattttagtctgctggtttctttctcaggaacatggctgtctttcctcacagtgttctccctgaccttttctctacact

SEQ ID NO: 19745 - DNA, 80 bp, synthetic construct
  source 1..80: mol_type = other DNA
ctggaatacccagttttgtttggttggttgatttttggttttgccatggagttgcacacagtattgtattattgtaattt

SEQ ID NO: 19746 - DNA, 80 bp, synthetic construct
  source 1..80: mol_type = other DNA
attgttcagtgcttattattgaccagtctatgttcagaactactgtatgactggtgtgccagtgcaacgttagctttgct

SEQ ID NO: 19747 - DNA, 80 bp, synthetic construct
  source 1..80: mol_type = other DNA
tctcatactgtttggtaagtcagcagaaacgttaggaagtgttaatgagatgatttaatgtctttcttttaaataaactt

SEQ ID NO: 19748 - DNA, 80 bp, synthetic construct
  source 1..80: mol_type = other DNA
caactccaagcctcatcagatgcagtaaagcttaaatcgaatggggtatgcaccacatttttgtattttttattacttgt

SEQ ID NO: 19749 - DNA, 80 bp, synthetic construct
  source 1..80: mol_type = other DNA
tttcttctttctttcttttctttccgtctgtctctctctcctccctcctttccttccctccttccttccttccatccttt

SEQ ID NO: 19750 - DNA, 80 bp, synthetic construct
  source 1..80: mol_type = other DNA
gctgcttgtcaccttttcttggtgcattttgaagctccgttattaagtgcatacctgtttaggattttgttcttttgatg

SEQ ID NO: 19751 - DNA, 80 bp, synthetic construct
  source 1..80: mol_type = other DNA
gtagttatcatttctagtgctctttttgtgtgtgtgtgtggatctgtattttcttcaggtattgttttcttctgcatgaa

SEQ ID NO: 19752 - DNA, 80 bp, synthetic construct
  source 1..80: mol_type = other DNA
gtcactttgtcttggccaaatgtaactcacatctagttgacatgtgcaatgcttatttccagatgagattccttgttccc

SEQ ID NO: 19753 - DNA, 80 bp, synthetic construct
  source 1..80: mol_type = other DNA
tacgttctatacaacagaatgctacgcaaccagtaaaataataagacttacaaagtagcaaattgggctgagtgtggtgg

SEQ ID NO: 19754 - DNA, 80 bp, synthetic construct
  source 1..80: mol_type = other DNA
tgtatgtgtgtgtatacttctaatagtaatactcatgagcatttaagtaatatataatgtgtgtgtatacgtggaagtgt

SEQ ID NO: 19755 - DNA, 80 bp, synthetic construct
  source 1..80: mol_type = other DNA
gttttactgtttctactgtttgataaagctgaaatcaaatattccaaaatcattagcaatctttgtggaagtgatgacat

SEQ ID NO: 19756 - DNA, 80 bp, synthetic construct
  source 1..80: mol_type = other DNA
cctgtagcctatgaggttattctctgggtgagtggccgtggatactgctttttataacataacattgcacagtttctgac

SEQ ID NO: 19757 - DNA, 80 bp, synthetic construct
  source 1..80: mol_type = other DNA
gctcagccctcaccctggtcttttgcaagcactatagttctcttcatgtgggttatatcaattaagaatctcaaagtgtc

SEQ ID NO: 19758 - DNA, 80 bp, synthetic construct
  source 1..80: mol_type = other DNA
tcaacataaaccaataataacgtggactagtttcctgggagctttcacatatgccaaattgttaggctcttttacaatgc

SEQ ID NO: 19759 - DNA, 80 bp, synthetic construct
  source 1..80: mol_type = other DNA
gtccataaatggactaggtgtgatggctcatgcctgtaattccagcaatttgggaggctgaggtgggaggatcatttgag

SEQ ID NO: 19760 - DNA, 80 bp, synthetic construct
  source 1..80: mol_type = other DNA
ctatatcattctagaagataaagttcaccttgttgtcccggtatatgaggccccagttaacccttccagccttctatttt

SEQ ID NO: 19761 - DNA, 80 bp, synthetic construct
  source 1..80: mol_type = other DNA
taggtgggctatttgatatttattaaaattaaacacttgcagtttggaactttcagactaaaaggtgacatgcggctgcc

SEQ ID NO: 19762 - DNA, 80 bp, synthetic construct
  source 1..80: mol_type = other DNA
tagaaaaggcccattgcagcaaagttagcacttcagctttatccttctgagctacttatttctcaagccaatcctccctt

SEQ ID NO: 19763 - DNA, 80 bp, synthetic construct
  source 1..80: mol_type = other DNA
agggaatgaatgttatagaggatggtggccaagaagctgaagtgtccatcccaaatgttgactcatctacttcctcaaag

SEQ ID NO: 19764 - DNA, 80 bp, synthetic construct
  source 1..80: mol_type = other DNA
cagacctcagggagctctcacacacttcttatgaactttcatagactctgtgaccttgtttacacccctcttttaagaag

SEQ ID NO: 19765 - DNA, 80 bp, synthetic construct
  source 1..80: mol_type = other DNA
caagacagaatgattttctaaagatgtctgagaaatggccgctgggcaaactttcctatgaatactcattttctgaagat

SEQ ID NO: 19766 - DNA, 80 bp, synthetic construct
  source 1..80: mol_type = other DNA
tttccaggctttgaatgtaaattccaagagggatgttgtttcatttcctctgtacctccagcacctagaacaatgcttga

SEQ ID NO: 19767 - DNA, 80 bp, synthetic construct
  source 1..80: mol_type = other DNA
ctaagagtgaaagtgtagccacagaacatctcttcacatcctaacttcacatcctaacttccattctcttcacatcctaa

SEQ ID NO: 19768 - DNA, 80 bp, synthetic construct
  source 1..80: mol_type = other DNA
aacagatttcctgatatatttttgtctctttggaggaatgaatctccacttggatgaaatgttgctaatgtattgctaaa

SEQ ID NO: 19769 - DNA, 80 bp, synthetic construct
  source 1..80: mol_type = other DNA
gagatagggtctcactccatcacccagggtggagtgtagtggtgatatcatggctcatggtagccttgaccttccaggct

SEQ ID NO: 19770 - DNA, 80 bp, synthetic construct
  source 1..80: mol_type = other DNA
ttttcattcctgcttttcttactaaattctgacacggttctgtcagagaacatggtttataccatgtctgtttgcagtaa

SEQ ID NO: 19771 - DNA, 80 bp, synthetic construct
  source 1..80: mol_type = other DNA
tttggaaagaggaaacatgaaggacatctttaagtttaattgtacactgtaactgtagggtctcttccctcctgctctta

SEQ ID NO: 19772 - DNA, 80 bp, synthetic construct
  source 1..80: mol_type = other DNA
ttactattacctcccaatgtgaaattcactttccgaaattacattccttctaatgagcagtggtttgcttcagtctcaat

SEQ ID NO: 19773 - DNA, 80 bp, synthetic construct
  source 1..80: mol_type = other DNA
ggaaatttagtaaatactaacaaatggtctgtataatagtaaaatatttataggcagtcaacccgatacacacatctcta

SEQ ID NO: 19774 - DNA, 80 bp, synthetic construct
  source 1..80: mol_type = other DNA
attgtctggggtaaatacctgagattcattgtcttgcaccaagaaaattaaggacatggacacacacacaaggagtgagt

SEQ ID NO: 19775 - DNA, 80 bp, synthetic construct
  source 1..80: mol_type = other DNA
acaagatggtggcatagattacaaaaatggataaatgtttagggccaagtgtccagaatcactggaaagctacagaagac

SEQ ID NO: 19776 - DNA, 80 bp, synthetic construct
  source 1..80: mol_type = other DNA
tacatatgcatcatttttttcctctctgtaataagtctgacgttgctgaacacacactctcctcatctcgttagtgccct

SEQ ID NO: 19777 - DNA, 80 bp, synthetic construct
  source 1..80: mol_type = other DNA
atagtgttatctacccgatagggctgttagggggattaaatgattaatatttgtaaagtacataaaaaagtatttggtgg

SEQ ID NO: 19778 - DNA, 80 bp, synthetic construct
  source 1..80: mol_type = other DNA
ctgttgccaatagtgaggaaaaaaagctgatgaatatggaaaggggaaagacgtgtgagtagaaacacaaacggcaaagc

SEQ ID NO: 19779 - DNA, 80 bp, synthetic construct
  source 1..80: mol_type = other DNA
aagggactaaggctcagagaaattcaataagtgagctaacacagaaccagctcccggagccaggcagtttggcatcagta

SEQ ID NO: 19780 - DNA, 80 bp, synthetic construct
  source 1..80: mol_type = other DNA
acagagtatttctgagtttgactttttgtgtagtctgttccctgcacagttttgcagtgatgaaagtggtctctctttgg

SEQ ID NO: 19781 - DNA, 80 bp, synthetic construct
  source 1..80: mol_type = other DNA
ctttagggtggcattccacaaaaatcttagttagccagaggaataaaagaggaagtcttgtctcgtaaaacccaccaaat

SEQ ID NO: 19782 - DNA, 80 bp, synthetic construct
  source 1..80: mol_type = other DNA
ttaaagcctctgtgtgggtctgagttcagaggtgcttctctgcattgtgagtaacttagttcaatcttctcaagccaact

SEQ ID NO: 19783 - DNA, 80 bp, synthetic construct
  source 1..80: mol_type = other DNA
gggggccagcgggatggatagtgatggaatgagtgtgcactgtatgttatttgaatgtgatgaagaaatagaataactct

SEQ ID NO: 19784 - DNA, 80 bp, synthetic construct
  source 1..80: mol_type = other DNA
gctgctttgaggtacacatcttttggaagaacttgctccaggggatccatcttaaaaaattctcaggtgtttatgtcttg

SEQ ID NO: 19785 - DNA, 80 bp, synthetic construct
  source 1..80: mol_type = other DNA
ttcttctaataaaagactcttggtccatcatttttgtttgtctgttttgcaaatgcatccacgatattccctcattctgt

SEQ ID NO: 19786 - DNA, 80 bp, synthetic construct
  source 1..80: mol_type = other DNA
ttgtgcctttacagaaccctctcagatgcacaggcccagatacaaattactgcttttacacataactcagattctttccc

SEQ ID NO: 19787 - DNA, 80 bp, synthetic construct
  source 1..80: mol_type = other DNA
tacatttaaaatgtgcaattaagttattattggatatagtcgcactgttgtgctatctagtagtaggtcttactcattct

SEQ ID NO: 19788 - DNA, 80 bp, synthetic construct
  source 1..80: mol_type = other DNA
catttcatagaggtggacactggagcacagagatgttaaatagtttgctaaaaacctgcaaggacacaaaactaggcaca

SEQ ID NO: 19789 - DNA, 80 bp, synthetic construct
  source 1..80: mol_type = other DNA
gtcagcctacgtagagcactcttgccctgtggcttgtttctagtttttctatacagattctcaacaaattttgttcaacc

SEQ ID NO: 19790 - DNA, 80 bp, synthetic construct
  source 1..80: mol_type = other DNA
gtgcttgttactacaaaaggaggaataattaattcatctcagggcattggtaaagactcaccaaatgaggtaactttcaa

SEQ ID NO: 19791 - DNA, 80 bp, synthetic construct
  source 1..80: mol_type = other DNA
ttaaatggccagtaccctgagaccaaccctagtttattgctgtacaatacttaattctagtataaactctcagtactgta

SEQ ID NO: 19792 - DNA, 80 bp, synthetic construct
  source 1..80: mol_type = other DNA
tataattctttcattccataatactgttatgatctgccaagcttttaaatttgagaatctaaccataagcttcacgacta

SEQ ID NO: 19793 - DNA, 80 bp, synthetic construct
  source 1..80: mol_type = other DNA
atggttatattgtattccacgattggcaatctttttctgaaaaaggctagtgtcttagtcaagtaggactgttgtagcaa

SEQ ID NO: 19794 - DNA, 80 bp, synthetic construct
  source 1..80: mol_type = other DNA
agagacgaaaacattcagaccatagcagccagatagttactattacaggccgcgtggaccatgaggtctgttagaatcac

SEQ ID NO: 19795 - DNA, 80 bp, synthetic construct
  source 1..80: mol_type = other DNA
agcaaagacatgtcatcaatctaggtacccatccacagtaaactgcataaagaaaatgtggtacctatgcgtcatgaaat

SEQ ID NO: 19796 - DNA, 80 bp, synthetic construct
  source 1..80: mol_type = other DNA
agtcctcgttttgtaatggattggggcttggatcaaatatagattgtgacagccatagagaattgcctctgtattctatg

SEQ ID NO: 19797 - DNA, 80 bp, synthetic construct
  source 1..80: mol_type = other DNA
tcacagtgccttgtaacagtcacattgagcacagataattacatgttgtactgaatgcacctatgtagaaaaaggaagac

SEQ ID NO: 19798 - DNA, 80 bp, synthetic construct
  source 1..80: mol_type = other DNA
taccctgtctttacaaaaaaagaaaattagccagatgtggtggcatgcacctacagaggctgaggtaggaggattctttg

SEQ ID NO: 19799 - DNA, 80 bp, synthetic construct
  source 1..80: mol_type = other DNA
gcccagccccttcaatatcattttgaggtacctgctatgtgcaatcaaaaatagaatgtccaaaatgtaataaattatgc

SEQ ID NO: 19800 - DNA, 80 bp, synthetic construct
  source 1..80: mol_type = other DNA
gacatactgtatctagcagctagcctggagaaactgataacttcctcctgttttaaacagaaatgtggggtttgttgtgt

SEQ ID NO: 19801 - DNA, 80 bp, synthetic construct
  source 1..80: mol_type = other DNA
caaccacactgtgctggaaaaatggaaattgttaggaaatggatacagctggtttttttctttcgctccttttgaggagc

SEQ ID NO: 19802 - DNA, 80 bp, synthetic construct
  source 1..80: mol_type = other DNA
caagatctcatctctactaaaaataaaaaagaaaattagttgggcgtggtggcactcgcctttagtgccagttattcagg

SEQ ID NO: 19803 - DNA, 80 bp, synthetic construct
  source 1..80: mol_type = other DNA
ctaagttcagccttctgttagataatgtaatggtgggaaatcaataatttgtaaagtgtggtatgaggactcagatcata

SEQ ID NO: 19804 - DNA, 80 bp, synthetic construct
  source 1..80: mol_type = other DNA
tgtgttttgcatatttcatctaacctctgaggaatgtggttggagtcctcacagtactgtagactgctttgtacaaaggc

SEQ ID NO: 19805 - DNA, 80 bp, synthetic construct
  source 1..80: mol_type = other DNA
ccacttaacattttgtaattggagagtggcagtatttctcggaacaaggattgggctcataagcaaaagtttttagctat

SEQ ID NO: 19806 - DNA, 80 bp, synthetic construct
  source 1..80: mol_type = other DNA
tttatgtttatgagcatgtgtgtttgggagaaccttaccttcttttctttcattgtgcagtgagaagcagatgctctcgg

SEQ ID NO: 19807 - DNA, 80 bp, synthetic construct
  source 1..80: mol_type = other DNA
tgagataaaaaaatacatgaccttccttaatgttttccccccaataggttgtattgctcgtactgtaagctcaccaaacc

SEQ ID NO: 19808 - DNA, 80 bp, synthetic construct
  source 1..80: mol_type = other DNA
atcatattgaagaagaaacagagtaatcatgaatattagctatccacgtaccagttactttttctgatgtatttatacaa

SEQ ID NO: 19809 - DNA, 80 bp, synthetic construct
  source 1..80: mol_type = other DNA
ttagttcgattctcatagggaatgagcaacccagatccctcacagacacagttcacaatagggttcgcactcctatgaaa

SEQ ID NO: 19810 - DNA, 80 bp, synthetic construct
  source 1..80: mol_type = other DNA
agtcatgctgatacacagtggctttacacttggaccacaacccataggaacgaatttcacagtaatacagttgtacagtt

SEQ ID NO: 19811 - DNA, 80 bp, synthetic construct
  source 1..80: mol_type = other DNA
tgtactgcacttgaagtaatatcatacagatgtgacacacaccgatcttagagtgtagttcttaagcccccaaccttttt

SEQ ID NO: 19812 - DNA, 80 bp, synthetic construct
  source 1..80: mol_type = other DNA
tgcttccaaagtctgaacttgaattaataccatgcctccaaagcttcagttgcttagcaatcagatttttagctcctcaa

SEQ ID NO: 19813 - DNA, 80 bp, synthetic construct
  source 1..80: mol_type = other DNA
ttccttggtagtagccccatatccattaaacatcttttggttgtccccaccaacactcctttttttttttttctggtggc

SEQ ID NO: 19814 - DNA, 80 bp, synthetic construct
  source 1..80: mol_type = other DNA
ttagtttttgtgcagttttgccttactacgttattgtagttaatggggctgacaggcattattggcaggttcactgaagg

SEQ ID NO: 19815 - DNA, 80 bp, synthetic construct
  source 1..80: mol_type = other DNA
gcatgaccagaaaatgggatgcttttattaactaaatgatagttagacatttgttacaccaacaaacacttgggtaccta

SEQ ID NO: 19816 - DNA, 80 bp, synthetic construct
  source 1..80: mol_type = other DNA
cgcccgcctcggcctcccaaagtgctgggattacaggcgtgagccaccgcgcccggccagggttttcaaatattaaagga

SEQ ID NO: 19817 - DNA, 80 bp, synthetic construct
  source 1..80: mol_type = other DNA
tgattggtaggcaaacaattacagagtaaagaagtaatatttagctcttcccagggaaatcagggaaggcttccaggagg

SEQ ID NO: 19818 - DNA, 80 bp, synthetic construct
  source 1..80: mol_type = other DNA
cgttaatgccgatgcgatttaggtctctgagaagataacaaacctaattactaatgcaaggagagagaacatctttctca

SEQ ID NO: 19819 - DNA, 80 bp, synthetic construct
  source 1..80: mol_type = other DNA
attagacaagtgggcagggtaaacctcactgagaaaataagatataagcaaatgctgcaaggagctgactgagtgagcct

SEQ ID NO: 19820 - DNA, 80 bp, synthetic construct
  source 1..80: mol_type = other DNA
agcaccatatctttggttttgttttagttttttaaggagccaaagtcagctgggcatagtgactcgtgcttataatccca

SEQ ID NO: 19821 - DNA, 80 bp, synthetic construct
  source 1..80: mol_type = other DNA
cgcatttcaaattctagaatttggactcgggtatatagtcatgagctgcctaacagtgtttgactcaatgatggactgca

SEQ ID NO: 19822 - DNA, 80 bp, synthetic construct
  source 1..80: mol_type = other DNA
ttagcatgttgtgcctttgactattacatgtaatccagtgtcatacctaccagctgctggtggctgatttggttaatctt

SEQ ID NO: 19823 - DNA, 80 bp, synthetic construct
  source 1..80: mol_type = other DNA
cagatgaccctcaaatgtgaccagtgttaccaaaggttcagtttctggtttagtttttactattttccgaattccagatc

SEQ ID NO: 19824 - DNA, 80 bp, synthetic construct
  source 1..80: mol_type = other DNA
tccttgctcttctccttctcgctcttctccttcttctcctccctcttcttttttctcttcttcttcttctctttatcttt

SEQ ID NO: 19825 - DNA, 80 bp, synthetic construct
  source 1..80: mol_type = other DNA
acacagcagcctgagttcatacacacacgtgcattcattcatattttgcttaaaactgttcaatggcttcccatggaact

SEQ ID NO: 19826 - DNA, 80 bp, synthetic construct
  source 1..80: mol_type = other DNA
gccaccctatgctaacctagtctaagctaccattgtttcccacctgaaattataatatcctcccaacagatccaattgaa

SEQ ID NO: 19827 - DNA, 80 bp, synthetic construct
  source 1..80: mol_type = other DNA
ttacattcccaccaacagtgcataagagttcccttttctctgcatcctcgccaacatctgtttttttgtttgtttgtttg

SEQ ID NO: 19828 - DNA, 80 bp, synthetic construct
  source 1..80: mol_type = other DNA
attgctttggctatttggactctttcttgttccatttgaattttaggattgtttttccctaattctgtgaaaaatgacat

SEQ ID NO: 19829 - DNA, 80 bp, synthetic construct
  source 1..80: mol_type = other DNA
tgaaccatccttgtgtccctgataaaaacccacttaactcctgaaaacatgcagcctccctcccaagactgaaccaggaa

SEQ ID NO: 19830 - DNA, 80 bp, synthetic construct
  source 1..80: mol_type = other DNA
ttaagttaaatatggtgctttaatttgccaaagtatcccaaaatctggggcctcccctctcaccagcctcattataagtg

SEQ ID NO: 19831 - DNA, 80 bp, synthetic construct
  source 1..80: mol_type = other DNA
taactgggtttttacataccaaatgcctacctacagggtgcctcacatttgcttcctaacagtctgtttacttttctgca

SEQ ID NO: 19832 - DNA, 80 bp, synthetic construct
  source 1..80: mol_type = other DNA
gccattaagaaaatgaagagacaggccaccagctgggagagaatatttgtgaatcaagcacaattgtattaataggattt

SEQ ID NO: 19833 - DNA, 80 bp, synthetic construct
  source 1..80: mol_type = other DNA
catgggggacctcatgggctcgtggaaatggtgcaaagctagattgtgctgatagtcatgcaactctataaatttaataa

SEQ ID NO: 19834 - DNA, 80 bp, synthetic construct
  source 1..80: mol_type = other DNA
ttacctaaatagtcaacattgtacttgacaggtaatttttcaacactagctcccctcctgctctccttgctttgaagtcc

SEQ ID NO: 19835 - DNA, 80 bp, synthetic construct
  source 1..80: mol_type = other DNA
gggtaggtatccagttgtgggattgcagggctgaatggtagttctatttttagtttttggagaaatattcatgctgtttc

SEQ ID NO: 19836 - DNA, 80 bp, synthetic construct
  source 1..80: mol_type = other DNA
tgagagatagaggtgcaatttcattcttccgcatatggctagccattttttccagcaccatttattgaagaggttgtcat

SEQ ID NO: 19837 - DNA, 80 bp, synthetic construct
  source 1..80: mol_type = other DNA
aatcatcgctttgtccccctggcccatgctgtataggctgcctacctgttagtcacttagcaaccatcttggttatcagc

SEQ ID NO: 19838 - DNA, 80 bp, synthetic construct
  source 1..80: mol_type = other DNA
tgactttgtctctcggtctggactcacattaactacattcctggcatgtcacactgaggtactgatttgcagtgataata

SEQ ID NO: 19839 - DNA, 80 bp, synthetic construct
  source 1..80: mol_type = other DNA
cccaaaatattatgccgttatttcttactctatcaaggcaggagaaaccactcagtgccgtgggtactaaagacaaattg

SEQ ID NO: 19840 - DNA, 80 bp, synthetic construct
  source 1..80: mol_type = other DNA
tgtgtagagatttagtgcaaccaaataactcttgatggacacacagatgccttgcttttactgaagctttaaaattcaga

SEQ ID NO: 19841 - DNA, 80 bp, synthetic construct
  source 1..80: mol_type = other DNA
ctctatcagtcacctcaggcctcatgttaccccagaaaaacataaaatccaagtagaaattgtgcttttgctgtgcaaat

SEQ ID NO: 19842 - DNA, 80 bp, synthetic construct
  source 1..80: mol_type = other DNA
cctctcattttcattatcctcatcctttccaaaccactctcaggttttttggaaagtatccaaaaaaggcattattaagg

SEQ ID NO: 19843 - DNA, 80 bp, synthetic construct
  source 1..80: mol_type = other DNA
aatttggcatcattgtgtaaaattgaacatttgcacgtcttggtacccaacagttccactcatagagatataccctagag

SEQ ID NO: 19844 - DNA, 80 bp, synthetic construct
  source 1..80: mol_type = other DNA
aagaaaagaaggccactatatggagaattgagaaaacaagcatcatgctataactactcatgtatacaccaagtaaaaca

SEQ ID NO: 19845 - DNA, 80 bp, synthetic construct
  source 1..80: mol_type = other DNA
agagcaatattaatgaatttggtgggggcgggatgaaatataaacaccaatgatgccaagagcctgttttaaaaacctac

SEQ ID NO: 19846 - DNA, 80 bp, synthetic construct
  source 1..80: mol_type = other DNA
atttttcctttaaggtttaggaatgagacaatataagtcactactacttgatgtattcaataaggccagtgcagtgagac

SEQ ID NO: 19847 - DNA, 80 bp, synthetic construct
  source 1..80: mol_type = other DNA
aactttagagatacttttgtactcatgcaaaacaaacctgaaaagaatattcattgcagcatagattgcaatagcactga

SEQ ID NO: 19848 - DNA, 80 bp, synthetic construct
  source 1..80: mol_type = other DNA
taaggaggggattggaattgaggtgtaacagaaggagagcttcaagtgtattcactatttttgatacttttgcataggcc

SEQ ID NO: 19849 - DNA, 80 bp, synthetic construct
  source 1..80: mol_type = other DNA
ttatttccatccttgtcctggtgtcttgaattctacatttcaagggacttagtactgactggattagggagaacaagaca

SEQ ID NO: 19850 - DNA, 80 bp, synthetic construct
  source 1..80: mol_type = other DNA
ttgaagaatggatgattcgttgtagtttttttctttcctcctgtgcctctttttctccttcctctcaaaacaaacaagca

SEQ ID NO: 19851 - DNA, 80 bp, synthetic construct
  source 1..80: mol_type = other DNA
catctgagaggtttctaaaactactgctaggttttctgctcttcccaacacagccttagccctaatgctgtgaagctact

SEQ ID NO: 19852 - DNA, 80 bp, synthetic construct
  source 1..80: mol_type = other DNA
cctcaacgtctttaaaattgtgctctatttaaaaacgtgcttcctcctatccccctttcctactttatttttcttcatag

SEQ ID NO: 19853 - DNA, 80 bp, synthetic construct
  source 1..80: mol_type = other DNA
cagcctcccatgtattattagttcctagaatagcacctgaaagcattctactgctgaatgaatatttgacggtgaaattg

SEQ ID NO: 19854 - DNA, 80 bp, synthetic construct
  source 1..80: mol_type = other DNA
cgtttctagtagatgtgctttcagcaaaacttgctcttaatgtctctggtgtgcagtcatctgagatttctcatttgttc

SEQ ID NO: 19855 - DNA, 80 bp, synthetic construct
  source 1..80: mol_type = other DNA
ttcagtaaataaattggaggagagaaaagtctgtcggctgattctggcagaagtttctcatgatgtttgagaaagtagaa

SEQ ID NO: 19856 - DNA, 80 bp, synthetic construct
  source 1..80: mol_type = other DNA
gcacattagcataacttgtctataagtttttattgggaaagacctccttcccaccttccacctttcaaaagtacttcctc

SEQ ID NO: 19857 - DNA, 80 bp, synthetic construct
  source 1..80: mol_type = other DNA
catggcttctttattaaaaaacaaaagctacagttaattgcccatacaaacagagtttttatttaaaatggaacaaaatt

SEQ ID NO: 19858 - DNA, 80 bp, synthetic construct
  source 1..80: mol_type = other DNA
taagcgattctcctgcctcagtctctcgaatagctgggattacaggcacccgccaccacaccttgctaatcattgtattt

SEQ ID NO: 19859 - DNA, 80 bp, synthetic construct
  source 1..80: mol_type = other DNA
caaaaacacaaagattatgtggcttttcattctgatcagttattagctaaagtgaaaggaacctaggcttgctgtctggt

SEQ ID NO: 19860 - DNA, 80 bp, synthetic construct
  source 1..80: mol_type = other DNA
atcagtagatattcaggtatttgggtattaaggtattcaggattaggtattcagtacaaatttgcctgaaagagggaagg

SEQ ID NO: 19861 - DNA, 80 bp, synthetic construct
  source 1..80: mol_type = other DNA
tggaattttttgaagaagggaaagcagccttaagttcttcattgcctgaaaaccactgagggagaaccagcactaatttg

SEQ ID NO: 19862 - DNA, 80 bp, synthetic construct
  source 1..80: mol_type = other DNA
ccaccagccctcctccagaacagctgatttttgctgatttggggaataagcttgtagtggaggctagtgttttacaaaat

SEQ ID NO: 19863 - DNA, 80 bp, synthetic construct
  source 1..80: mol_type = other DNA
tctatcttgaggttagctttctaacaacagagatgtggtacacgcattatgaatcagttgctgttaggtgtgcagatacc

SEQ ID NO: 19864 - DNA, 80 bp, synthetic construct
  source 1..80: mol_type = other DNA
ttgttggcctttttactgaattgtgtttctaaaagtatattttggatagaagaaccatgtcaggtatggaaggattttct

SEQ ID NO: 19865 - DNA, 80 bp, synthetic construct
  source 1..80: mol_type = other DNA
catgaacatggtacatttgtccatttattttcatcctctttagtttctcttagcattgctttgcagttttcagactagag

SEQ ID NO: 19866 - DNA, 80 bp, synthetic construct
  source 1..80: mol_type = other DNA
tctctcttttcattcctggtaatgatagttgatgttttctctctttttatcttgatcacttctctaagggattaattgat

SEQ ID NO: 19867 - DNA, 80 bp, synthetic construct
  source 1..80: mol_type = other DNA
aaataagggaaaacactacagctcagagaatttataaccttgagtcttcaaggaaagagttaattatggtcagtatccag

SEQ ID NO: 19868 - DNA, 80 bp, synthetic construct
  source 1..80: mol_type = other DNA
cagtgtagacagggaaaatagactaaattgctaccactaccatacaatgaaagtgttaagctgaagagtcataacacagg

SEQ ID NO: 19869 - DNA, 80 bp, synthetic construct
  source 1..80: mol_type = other DNA
aaacaaaactggagatgaggacagcagtttggtgacaaaaaagaagtatagatgaggagtgttggagaccttgtctttgg

SEQ ID NO: 19870 - DNA, 80 bp, synthetic construct
  source 1..80: mol_type = other DNA
tatatcatcccgctgccttctggcctttatgttttctgataaggcattgacattaatcttttggagggtcccttgtatgt

SEQ ID NO: 19871 - DNA, 80 bp, synthetic construct
  source 1..80: mol_type = other DNA
tggcaaaaaattatgcaaatcaaatttttcatagttctggaaattaactaaaggctggccaaaatccagggagtgtttat

SEQ ID NO: 19872 - DNA, 80 bp, synthetic construct
  source 1..80: mol_type = other DNA
aacaaattgcctcagatgattttcaacaaatgtccttggagaaacaactatttgcactgggcaagctctaagtcaagtgg

SEQ ID NO: 19873 - DNA, 80 bp, synthetic construct
  source 1..80: mol_type = other DNA
actgacagttgtttgacaaggtttgattttaccgaagttatgtgaacagtgagcaatgagaatagagtggcatattctac

SEQ ID NO: 19874 - DNA, 80 bp, synthetic construct
  source 1..80: mol_type = other DNA
gcagtgcttggaggtagaccagttgggaggctttagaaaaattgtttttttgaacaaggatggtgggaataaaaattaaa

SEQ ID NO: 19875 - DNA, 80 bp, synthetic construct
  source 1..80: mol_type = other DNA
tgcctatcaaacacataaatatatcgtgtttaaaatcgagcaaagcataaggatgttcgggggagagttctgtgcctttg

SEQ ID NO: 19876 - DNA, 80 bp, synthetic construct
  source 1..80: mol_type = other DNA
agtatcatcaatgagcataagaatagcatagcattagggccaggaagaagaatattaggactcagaaactctgcattgtt

SEQ ID NO: 19877 - DNA, 80 bp, synthetic construct
  source 1..80: mol_type = other DNA
tcaaaatatatttacttaccaagtaataggcatgagaatttacccttaaccatagaaatgtttctctgattcagagactt

SEQ ID NO: 19878 - DNA, 80 bp, synthetic construct
  source 1..80: mol_type = other DNA
tgaaaactagcatttaaccagtaactagtaactctgtgcgagctattggaggcaaagtaggaagaagaggggctataaca

SEQ ID NO: 19879 - DNA, 80 bp, synthetic construct
  source 1..80: mol_type = other DNA
cttccctcttctctctcacccgtacatgtctactcatttcttatgcagagcagttcggatcttttttcttattgacttct

SEQ ID NO: 19880 - DNA, 80 bp, synthetic construct
  source 1..80: mol_type = other DNA
ttgacgcagcgattccgtatcaggagtttatctttaagctataattagtggtttgtatgaacatttaatagctacaatgc

SEQ ID NO: 19881 - DNA, 80 bp, synthetic construct
  source 1..80: mol_type = other DNA
gtgtgttatattaagaagaattatgtcattgctttgcattggcgactctgtctggtaacgtaccgattcacaatgaaggt

SEQ ID NO: 19882 - DNA, 80 bp, synthetic construct
  source 1..80: mol_type = other DNA
atgttaatattaggtagggatttagaattcccagacagctccattttgcttaggacattgcagtagaccgatatgccagc

SEQ ID NO: 19883 - DNA, 80 bp, synthetic construct
  source 1..80: mol_type = other DNA
actgtcctatctttgtatagattacagattacctgccaggggaggttgacacttgtacagtttctgtttagtggctaagt

SEQ ID NO: 19884 - DNA, 80 bp, synthetic construct
  source 1..80: mol_type = other DNA
ccaccatgcccggcctaaattttaaaaagttaagaattgagtttcttagtcacattggccaccatttaaagggctcaatt

SEQ ID NO: 19885 - DNA, 80 bp, synthetic construct
  source 1..80: mol_type = other DNA
cagtttgttgcttgtatgaagttttatattcattcatttagctagcttttgagcaggtatgaacatcatttccctaacac

SEQ ID NO: 19886 - DNA, 80 bp, synthetic construct
  source 1..80: mol_type = other DNA
gaattgtctgaaattttgtggttgaggttgctgggcttttattagaggttttgggaggacctgcgttttggtcttcaagg

SEQ ID NO: 19887 - DNA, 80 bp, synthetic construct
  source 1..80: mol_type = other DNA
gctatcccagttctggaagaggatagggttgttctataaaggtactgctaggaacaaccctatcctcttccagaactaga

SEQ ID NO: 19888 - DNA, 80 bp, synthetic construct
  source 1..80: mol_type = other DNA
agtgaggggcatgtgtggaagcagtttttagatgagcttaagtttttccatgaattcttgtctcttctcaccattggact

SEQ ID NO: 19889 - DNA, 80 bp, synthetic construct
  source 1..80: mol_type = other DNA
cggttacctcatcagaagccatttttattataagccatgctgcctaataacttagttgacacttcagcttttacccacag

SEQ ID NO: 19890 - DNA, 80 bp, synthetic construct
  source 1..80: mol_type = other DNA
ctgtctaaaagcagtgaggggatgcatgtcctaccagatagcaggatttattgtgaagctatagtcattaaaatagagtg

SEQ ID NO: 19891 - DNA, 80 bp, synthetic construct
  source 1..80: mol_type = other DNA
taagggaaagaagtcccaaaagataactatggtaggccgaataatgtcctccaaagatgttgattgatggcctactcttg

SEQ ID NO: 19892 - DNA, 80 bp, synthetic construct
  source 1..80: mol_type = other DNA
gatgataaaggtataagtatgagaggagataattactcatgttcctgataaggtgaaggggggtgtgatctcaagcacaa

SEQ ID NO: 19893 - DNA, 80 bp, synthetic construct
  source 1..80: mol_type = other DNA
atggagaaatggtctcttccttgatgacctcttgggttgggtttatctctccctgttcttttgtaccattagaatagtaa

SEQ ID NO: 19894 - DNA, 80 bp, synthetic construct
  source 1..80: mol_type = other DNA
atgtgaagcgtgtgcttgtctgctgaaagaacttaggcgctatgggctaattcttacgactgtgaggaagactgcacatc

SEQ ID NO: 19895 - DNA, 80 bp, synthetic construct
  source 1..80: mol_type = other DNA
catttcttatggcagtctgagctgaccaatacaccaccccttctactcttgcatcccctactaagctagtactattctca

SEQ ID NO: 19896 - DNA, 80 bp, synthetic construct
  source 1..80: mol_type = other DNA
aattaaaaatcaacacttgtcagaggaaggaagaaatcaggactgtgaggccaacttctatagcagaggaatccaagtac

SEQ ID NO: 19897 - DNA, 80 bp, synthetic construct
  source 1..80: mol_type = other DNA
atatggcacccaataattttgcaacccttgtccccccaccacagttgtccccagtttctgtttttgccatccatctttat

SEQ ID NO: 19898 - DNA, 80 bp, synthetic construct
  source 1..80: mol_type = other DNA
tttatcttccttttattgtagccccaaacagagatttcaagcctgtattttgcccctacatctttgggactgctagctcc

SEQ ID NO: 19899 - DNA, 80 bp, synthetic construct
  source 1..80: mol_type = other DNA
acaatgtagaacagtaacttagaaaagggattgccaaactaaggcccaaatccagctcaccacctgtttttttttttttt

SEQ ID NO: 19900 - DNA, 80 bp, synthetic construct
  source 1..80: mol_type = other DNA
tggatggttgtaagggttcaccaagatgaaacatcaggaaacattaactactaatatggagccatgtgtgctgggaattt

SEQ ID NO: 19901 - DNA, 80 bp, synthetic construct
  source 1..80: mol_type = other DNA
gagcattcgtgctaagcattatacatacaagatctaactttaaaactataaccctaaggggcaggagttacagaagatag

SEQ ID NO: 19902 - DNA, 80 bp, synthetic construct
  source 1..80: mol_type = other DNA
ggaggatttctgttactgaattcaccacctgccaacattgagtgttaggactcaaacagtatgttgtttgggccatttta

SEQ ID NO: 19903 - DNA, 80 bp, synthetic construct
  source 1..80: mol_type = other DNA
agttttaactagaaactcatcatttactcttccttgaacacagctggatatgttcttttttcctggttggtggcactgtt

SEQ ID NO: 19904 - DNA, 80 bp, synthetic construct
  source 1..80: mol_type = other DNA
cctgaagaatatcatctcatccccttgtgaaaaaaaaaatctcatctcctttccaaaaaataccatctcattgtcttgcc

SEQ ID NO: 19905 - DNA, 80 bp, synthetic construct
  source 1..80: mol_type = other DNA
ttgaaatatttcaccatctgtggcttacaagagggctatgaaccatttgccgttaatacaaacagggatattaccatgtg

SEQ ID NO: 19906 - DNA, 80 bp, synthetic construct
  source 1..80: mol_type = other DNA
agaatgacttggaagattatgatgctgattctgactttgaggttctgatgaagacagctcatggccatctagtgcccgat

SEQ ID NO: 19907 - DNA, 80 bp, synthetic construct
  source 1..80: mol_type = other DNA
atgttgcttattgttagtcctctgaaatatttcagatttttgcttagaagaacaaagccagattacagcacaagccattc

SEQ ID NO: 19908 - DNA, 80 bp, synthetic construct
  source 1..80: mol_type = other DNA
atgttatgtgtcagagaaaggaaaggccaagaacatgcaaaaaaggtgggtgacgagtataaaaacccaaacattggcca

SEQ ID NO: 19909 - DNA, 80 bp, synthetic construct
  source 1..80: mol_type = other DNA
agatttccatcagtatgacacaggctttgacttggacagagttcgcacagtaacagttactctaggagatgaaaaaggaa

SEQ ID NO: 19910 - DNA, 80 bp, synthetic construct
  source 1..80: mol_type = other DNA
tatacttgcaccatcattttttgggaaactcactttcctgccctcgggttgtaacatatgaagcataatggacttagcat

SEQ ID NO: 19911 - DNA, 80 bp, synthetic construct
  source 1..80: mol_type = other DNA
ttgacctgtcttcattaggtgtgaaatgtagagacttataagacctgattcagaacgtccactgcagtcaatggagtttt

SEQ ID NO: 19912 - DNA, 80 bp, synthetic construct
  source 1..80: mol_type = other DNA
aaagctacttcataaagttggaagaagctactgttttaccagatgaacagatatcaaaggaacacaagaaacacgcgaat

SEQ ID NO: 19913 - DNA, 80 bp, synthetic construct
  source 1..80: mol_type = other DNA
ccttagaagaaatgcgtaaggcagtgctaaagctggaagcaaaaggatggtaattactatcatgaaaacatgtaaaagta

SEQ ID NO: 19914 - DNA, 80 bp, synthetic construct
  source 1..80: mol_type = other DNA
cctttaaggacagacatagcctgaaagtgaagggatggaaaaagattttcaatgcaaatggaaactgagagtgagcagaa

SEQ ID NO: 19915 - DNA, 80 bp, synthetic construct
  source 1..80: mol_type = other DNA
taacctagaagaaatggataaattcctagatgtatacaacctaccaagactgacttatgaagaaatagaaaatctgagca

SEQ ID NO: 19916 - DNA, 80 bp, synthetic construct
  source 1..80: mol_type = other DNA
ataaatttaagaggacagaaataaatggaaagatatctcatgctgttggattggatggattggaagaattaatattatta

SEQ ID NO: 19917 - DNA, 80 bp, synthetic construct
  source 1..80: mol_type = other DNA
caacagacatatgaaaacatgctcaacatcactaatcatcagcaaagtgcaaatcaaaaccacaatattaccttattcca

SEQ ID NO: 19918 - DNA, 80 bp, synthetic construct
  source 1..80: mol_type = other DNA
ttacttctgttaaataatgacaatgccttaagcccttcagagtaaacagagtatgttccccaagcagtgttcacatagta

SEQ ID NO: 19919 - DNA, 80 bp, synthetic construct
  source 1..80: mol_type = other DNA
aaccatgccacctacaatagtggtatgtatggaatactccagtaacataaatgaaagaacaactcagttggatgggttgg

SEQ ID NO: 19920 - DNA, 80 bp, synthetic construct
  source 1..80: mol_type = other DNA
cccagcaaggggacagagtggggcaaggccagaggtgaaataccactactctgattgtttattcactgaccccgtgaggt

SEQ ID NO: 19921 - DNA, 80 bp, synthetic construct
  source 1..80: mol_type = other DNA
tagcggaaggcaagaaataactaagatccgagcagaactgaaggagatagagacacaaaaaacccttcaaaaaatcaatg

SEQ ID NO: 19922 - DNA, 80 bp, synthetic construct
  source 1..80: mol_type = other DNA
tcatactgaatgggcaaaaactggaagcattccctttgaaaactggcacaagtggccttctctccccactcctattcaac

SEQ ID NO: 19923 - DNA, 80 bp, synthetic construct
  source 1..80: mol_type = other DNA
aacaggaaacctacagaatgggagaaaatttttgcatttttgcaatcttctcatctgacaaagggctaatatccagaatc

SEQ ID NO: 19924 - DNA, 80 bp, synthetic construct
  source 1..80: mol_type = other DNA
aataggatttaacaatgaattggactaatagaatttgtagatgaatggaattcaggatctcaaggagactgagaatgaat

SEQ ID NO: 19925 - DNA, 80 bp, synthetic construct
  source 1..80: mol_type = other DNA
caagaatgttggagaagaactgaaagagacattttagtagacgccaagcgaggatggagttttctaaacaggagtggcta

SEQ ID NO: 19926 - DNA, 80 bp, synthetic construct
  source 1..80: mol_type = other DNA
ttttcattggccgactaatagctatcacaaattgaatgcatccatactggactgcttgctctcttctcttcttttccttt

SEQ ID NO: 19927 - DNA, 80 bp, synthetic construct
  source 1..80: mol_type = other DNA
agcatatcatcagtatttaaaccagtacttggtttttccccgcctattgttagagggcaataggaaagcagtttgaggat

SEQ ID NO: 19928 - DNA, 80 bp, synthetic construct
  source 1..80: mol_type = other DNA
gtgcggggcaggggtggttctaaagaaacaagatgaaatttacaaagatctaaattctttaggcaatggagtcattattc

SEQ ID NO: 19929 - DNA, 80 bp, synthetic construct
  source 1..80: mol_type = other DNA
tcagttcctcaaaaaataaaattatagcgttaacatgtgatctagcaattctactcctcgtatatacccaagagaaatta

SEQ ID NO: 19930 - DNA, 80 bp, synthetic construct
  source 1..80: mol_type = other DNA
ccgaacaaccaaaacaaacacaacatttgggaaggaattcttgtttatgaaggaaaacgttgtgtctctactgagcatgg

SEQ ID NO: 19931 - DNA, 80 bp, synthetic construct
  source 1..80: mol_type = other DNA
gccacagatccttgatacaatggaggaggaaggaggtgctagatgaatgtcaaattctatgtagaagaaaatttgtagaa

SEQ ID NO: 19932 - DNA, 80 bp, synthetic construct
  source 1..80: mol_type = other DNA
cccagttttgtaagcattagtaatgaatgttaccagtacagtccagagttcccactggacatcctcaagtccaaaaccat

SEQ ID NO: 19933 - DNA, 80 bp, synthetic construct
  source 1..80: mol_type = other DNA
acctcagcttctacagcagctgggactgtaggtatgccaccatgcccagttaatttttttttatttttagtcgaaatgag

SEQ ID NO: 19934 - DNA, 80 bp, synthetic construct
  source 1..80: mol_type = other DNA
aggggttggacactgtgactacttcagagacagcactgatagaaatggttatattgtagatggtgacacagagggtttta

SEQ ID NO: 19935 - DNA, 80 bp, synthetic construct
  source 1..80: mol_type = other DNA
ttgtagccttttcagatgattttgtggctaagctccaagacaatcaacgtttccgatacaacgaagtcatgcaagcctta

SEQ ID NO: 19936 - DNA, 80 bp, synthetic construct
  source 1..80: mol_type = other DNA
tattgagcagagaacaggtccagcctcttccagattaactctgttaaactactgttgggaaacttctgcttctggaaaga

SEQ ID NO: 19937 - DNA, 80 bp, synthetic construct
  source 1..80: mol_type = other DNA
aaggcccatttcttccaaagtatcagtagaggttatggaaggagaagtagcaagacactcttacctttctagcaaggttc

SEQ ID NO: 19938 - DNA, 80 bp, synthetic construct
  source 1..80: mol_type = other DNA
cagaaggaagtggcacagcaattttcaaatgctgaaagaagagacgatcacctcagagttctatgtactttgaaaatact

SEQ ID NO: 19939 - DNA, 80 bp, synthetic construct
  source 1..80: mol_type = other DNA
ctatcatcaaataatagatctaccaaggtttgtagactactccacccaacgacaaggtacacactcttttcaagtgttca

SEQ ID NO: 19940 - DNA, 80 bp, synthetic construct
  source 1..80: mol_type = other DNA
cataccaggaatgaaactacttatcatggcacaccctgctgacgtcaggtgataacatgggatttttttcttctcacctt

SEQ ID NO: 19941 - DNA, 80 bp, synthetic construct
  source 1..80: mol_type = other DNA
aatttcatttttagacttgggttctattctcaaaatagctcatgtgtatgcagatggagctggtcctctctatctgtggg

SEQ ID NO: 19942 - DNA, 80 bp, synthetic construct
  source 1..80: mol_type = other DNA
ggttggattgtgtgatggacacctgtggaggaataatttatgaacaatcagagattttgagcatttttgcttttgtggta

SEQ ID NO: 19943 - DNA, 80 bp, synthetic construct
  source 1..80: mol_type = other DNA
tggtggtgatggtttcacagatggatgcatgtgtccaagctcatattgcatagataaaatatgtacagttttgtttatag

SEQ ID NO: 19944 - DNA, 80 bp, synthetic construct
  source 1..80: mol_type = other DNA
gatgcccaagggttagcccaaatagcagaattgatctttgcccctaagagagtctttttggtctctactcagtgttatat

SEQ ID NO: 19945 - DNA, 80 bp, synthetic construct
  source 1..80: mol_type = other DNA
tgtatacttctggttgatccatatcctatttcagaataataagcacccttgggctgtgagtgccttgggcacagcactct

SEQ ID NO: 19946 - DNA, 80 bp, synthetic construct
  source 1..80: mol_type = other DNA
tgaaagtcagccagcatattaatactaggattaagtgcctcatcgtgcataaattggtcaccccacttaattttggtaat

SEQ ID NO: 19947 - DNA, 80 bp, synthetic construct
  source 1..80: mol_type = other DNA
cctttgtctcgtaaatgttttctaattgttatacctatagagcagtacattaactacattgataaaaatatattgtctgg

SEQ ID NO: 19948 - DNA, 80 bp, synthetic construct
  source 1..80: mol_type = other DNA
gggtagttggaaatatgaacaggaaatgataaggaagcttgtctttatctattgggccttggaaaaagaaggggtagggg

SEQ ID NO: 19949 - DNA, 80 bp, synthetic construct
  source 1..80: mol_type = other DNA
ctaatgggacagagagggaaagcaaaaaagccaattgagaaaagcaaatattagagtctttataattgtatgagcatagg

SEQ ID NO: 19950 - DNA, 80 bp, synthetic construct
  source 1..80: mol_type = other DNA
tcttgaaactggatgtccgttttaatgagttagattacttgtacctggacttcatgtatactcagtttctcttggagaat

SEQ ID NO: 19951 - DNA, 80 bp, synthetic construct
  source 1..80: mol_type = other DNA
aacgtctttgattcctgagatgctatttagtatcatctcctggagtatatagattgatatagaatgcagatttttttttt

SEQ ID NO: 19952 - DNA, 80 bp, synthetic construct
  source 1..80: mol_type = other DNA
tgttcttcagactccaccatcctccatgacacagacattggttggtttcacttaatttccaatccagattgagatttgat

SEQ ID NO: 19953 - DNA, 80 bp, synthetic construct
  source 1..80: mol_type = other DNA
atcgtagtctgcacatttgaagatctttggtatctgaagtttggcacacacatggacacacggggattgacgatgtgatt

SEQ ID NO: 19954 - DNA, 80 bp, synthetic construct
  source 1..80: mol_type = other DNA
agaaacagagagtagaatgaggttaccaggtgtaggggggagtggttggggagatgttcaaggatacaaaatttcagtta

SEQ ID NO: 19955 - DNA, 80 bp, synthetic construct
  source 1..80: mol_type = other DNA
gcactctaaggatactaagccacacatgtgtattaccagcatttagagaaactttccctgtattgtagttgcaatagcat

SEQ ID NO: 19956 - DNA, 80 bp, synthetic construct
  source 1..80: mol_type = other DNA
taaaaattcatcccctactataatgtcaagccagggaggtcagagtggtttttcctctgttgttaactgctttgtcctgc

SEQ ID NO: 19957 - DNA, 80 bp, synthetic construct
  source 1..80: mol_type = other DNA
ctctgaggagtgacggccatgttctgcgtcttgattatggtgtgttctcacagatgtctacatctctcaaagctcattga

SEQ ID NO: 19958 - DNA, 80 bp, synthetic construct
  source 1..80: mol_type = other DNA
ggttctagtccgtgagtcttgagccctgggcagatatgtttgtggcatttattaaaaagaatgtctgcttagagagagct

SEQ ID NO: 19959 - DNA, 80 bp, synthetic construct
  source 1..80: mol_type = other DNA
ttgtttacttatcttccccattctactttaggggagagtgtggaggaaaatgcaaatgtcgtggtgagattgctcattcg

SEQ ID NO: 19960 - DNA, 80 bp, synthetic construct
  source 1..80: mol_type = other DNA
gctagtgcctctggtaaagatgtaacatagggctttattgaggcacatttctaaagaaaaaaaagagttagagggcacgc

SEQ ID NO: 19961 - DNA, 80 bp, synthetic construct
  source 1..80: mol_type = other DNA
tgctttctctttcttttgaaacattcatgaaagtgacacagaggaggaggaagatgacactatccacatggggaacgcga

SEQ ID NO: 19962 - DNA, 80 bp, synthetic construct
  source 1..80: mol_type = other DNA
gagccagcgtacccagcctagattagtattttctgaaactttttgacccaaatgaaattaaagtttcgtggaataatact

SEQ ID NO: 19963 - DNA, 80 bp, synthetic construct
  source 1..80: mol_type = other DNA
aagaactgttaggatttatgttcgtcatttcctccacattatatatccagccttgggagaaatcagggtcgaagacagat

SEQ ID NO: 19964 - DNA, 80 bp, synthetic construct
  source 1..80: mol_type = other DNA
tttgtcctaattcagtaggatgttggatgacatcatgttctaaagaatgttttccgtactcaacatcccaacctctccac

SEQ ID NO: 19965 - DNA, 80 bp, synthetic construct
  source 1..80: mol_type = other DNA
gaagttattgaagacaactaaaataagtgttaaatcccaaattatactttgtttttactttatcaaatgtaaggtgtttt

SEQ ID NO: 19966 - DNA, 80 bp, synthetic construct
  source 1..80: mol_type = other DNA
ctagaaattaaaaatcttccccgcctttggcttccccatttgagacagtttcttctccttgtgcatctgtagctcatctt

SEQ ID NO: 19967 - DNA, 80 bp, synthetic construct
  source 1..80: mol_type = other DNA
gcatttaactttatgtggctgtgcattcactgcagagcttcaaccaccaatatttctttctccttttcaatgacaactca

SEQ ID NO: 19968 - DNA, 80 bp, synthetic construct
  source 1..80: mol_type = other DNA
aagatcgtgtcagtaacattcctagtgcagtacccgacaacagcacaacacatcagaactattattcttataatgtaagg

SEQ ID NO: 19969 - DNA, 80 bp, synthetic construct
  source 1..80: mol_type = other DNA
ttacattcactgccttatttcctcagcaaactcccataatagcttgagggtagtcgaagaacagaaagccatttcattga

SEQ ID NO: 19970 - DNA, 80 bp, synthetic construct
  source 1..80: mol_type = other DNA
tgctatatgggattcaataagaggttcacataactctaatttgggaggtcacagtgactcctgttaacctctgttcagta

SEQ ID NO: 19971 - DNA, 80 bp, synthetic construct
  source 1..80: mol_type = other DNA
tgttaacaagatgtgctcctctctttgctggcacagagcaccacgcttctctcattgactcattacttcatactgtgtat

SEQ ID NO: 19972 - DNA, 80 bp, synthetic construct
  source 1..80: mol_type = other DNA
aacgtatctccccctgatgaagttttgcctgtgaaagtgataatttctcaagcccctagaaagatcgtggctcatttgta

SEQ ID NO: 19973 - DNA, 80 bp, synthetic construct
  source 1..80: mol_type = other DNA
tacatcatgcttgacgctgggaaatttctcccaattattgaaatgggcatagaagttataggaatgtatacatcaacttg

SEQ ID NO: 19974 - DNA, 80 bp, synthetic construct
  source 1..80: mol_type = other DNA
aaaagatacagtctcatgctgttacccttatgcaataaaactcttttacattagagatatgtcagtgttaagccaagcaa

SEQ ID NO: 19975 - DNA, 80 bp, synthetic construct
  source 1..80: mol_type = other DNA
caaacaacctcataaagaatcctgttcaagatatagttacttgtaaaattgggcgtctggtcttcatattgcaatcagtg

SEQ ID NO: 19976 - DNA, 80 bp, synthetic construct
  source 1..80: mol_type = other DNA
aacactgtttctgaatataaaatggctaagcagttcaggaaattatgcacaaggttgataagtttccggtgcatttggac

SEQ ID NO: 19977 - DNA, 80 bp, synthetic construct
  source 1..80: mol_type = other DNA
gagtcaaagattttattctccttaagctgaaacttcagtaaatctagctgcagcttcttttctgtttgatggggttttag

SEQ ID NO: 19978 - DNA, 80 bp, synthetic construct
  source 1..80: mol_type = other DNA
taacagctgatgttcagcatgataaaacgcagcacaagatggaagggaatatcaaatgagaatttttatggaaaattcca

SEQ ID NO: 19979 - DNA, 80 bp, synthetic construct
  source 1..80: mol_type = other DNA
gcttgcccctttggggacttcttaacagatacaggtttatgtggtgatatcagtgatttctagacgattacgatttttta

SEQ ID NO: 19980 - DNA, 80 bp, synthetic construct
  source 1..80: mol_type = other DNA
taaaaaagcaacaatcaccaagagcttcaggaggaaatgatgactccgggttcagaattcaccttttaaggaaactttgg

SEQ ID NO: 19981 - DNA, 80 bp, synthetic construct
  source 1..80: mol_type = other DNA
actaggtaagtcagtaaggatctatcttatataaaaactctgctaaatactgagtgggtggagttggtgatggagaggaa

SEQ ID NO: 19982 - DNA, 80 bp, synthetic construct
  source 1..80: mol_type = other DNA
gttggcaaatggatggatttatggagaaatatattcagactcttctaaggttcagccattaatgaagccatataagctat

SEQ ID NO: 19983 - DNA, 80 bp, synthetic construct
  source 1..80: mol_type = other DNA
tggccctttacaaccggactcgtcgtatttctcagacaagccaggtaagaattcatcacggtgatgaatcaactgtttat

SEQ ID NO: 19984 - DNA, 80 bp, synthetic construct
  source 1..80: mol_type = other DNA
ccctcatttctcctgggagctaaatctgtcattattcttttcctgacccctcagctcactatgtatgtggtttacaccaa

SEQ ID NO: 19985 - DNA, 80 bp, synthetic construct
  source 1..80: mol_type = other DNA
gggcttaaatcctggtagtgctactttctaaagatgtacctttgtgtacttgatctctgtttgcctcattaagtgtgaat

SEQ ID NO: 19986 - DNA, 80 bp, synthetic construct
  source 1..80: mol_type = other DNA
gtacctagctggtatcgtgagcttgggtaaactggttaacctctgtatgctgcagttttctcatttttaaaatgaagctg

SEQ ID NO: 19987 - DNA, 80 bp, synthetic construct
  source 1..80: mol_type = other DNA
ggggtttccccttatgaaaccaccagatcttgtgagacttattcactaccacaagaacagtatggaggaaaatgccccta

SEQ ID NO: 19988 - DNA, 80 bp, synthetic construct
  source 1..80: mol_type = other DNA
gccagggtgctgtcaaaactgacccgtaagttaagtatcgctcatgagcctgttattagttatagcatatgtaacactca

SEQ ID NO: 19989 - DNA, 80 bp, synthetic construct
  source 1..80: mol_type = other DNA
ccgggccattgacatgagcaatgttacactatctagagacctgcatgtaagtactattaacttttaaaaatagtctccaa

SEQ ID NO: 19990 - DNA, 80 bp, synthetic construct
  source 1..80: mol_type = other DNA
acagaaagattaacttggctagtctaaggtctctcacctagtttggacagagattgatttagaaatcaaatctttgactg

SEQ ID NO: 19991 - DNA, 80 bp, synthetic construct
  source 1..80: mol_type = other DNA
caacttaaatatctcctatctcacccctttttatttcctatctcagcctcttttgtctggtccagctatgttactgtctc

SEQ ID NO: 19992 - DNA, 80 bp, synthetic construct
  source 1..80: mol_type = other DNA
ttgactaggtgaaaatgtagaaggggagaagattttgaaagtggggatatttcatggtgaaaggtaaagctgtgatatgg

SEQ ID NO: 19993 - DNA, 80 bp, synthetic construct
  source 1..80: mol_type = other DNA
gaggcggtccccacatctcagaggatgggcggccgggcagagacgctcctcacttcctagatgtgatggcggctgggaag

SEQ ID NO: 19994 - DNA, 80 bp, synthetic construct
  source 1..80: mol_type = other DNA
gagggagagggagagggagaagattccacatttttaattgcctatttcaaaatgctgctcagggataatatgcctgtatt

SEQ ID NO: 19995 - DNA, 80 bp, synthetic construct
  source 1..80: mol_type = other DNA
gtggtgaggtaggggaaattagtcctcgcagtctttaattctcttactgcatgtatggatctcatttttaaagaggaact

SEQ ID NO: 19996 - DNA, 80 bp, synthetic construct
  source 1..80: mol_type = other DNA
tgtagctgatttccttcagcacaagatgtctacacccatatcataaatgggaaagttgagggtggaggagcaacgtaaat

SEQ ID NO: 19997 - DNA, 80 bp, synthetic construct
  source 1..80: mol_type = other DNA
catattctataccctctgctgttcacaagtgtttgttattattgtcttctgacaactgtttgtgcttgatattattaata

SEQ ID NO: 19998 - DNA, 80 bp, synthetic construct
  source 1..80: mol_type = other DNA
ttaaaggcagtagaggcagaagagtcttatatgctctatgtattattaaaggatatggaaagttttatagtgtggtccaa

SEQ ID NO: 19999 - DNA, 80 bp, synthetic construct
  source 1..80: mol_type = other DNA
acatcaggatatagaacaacacaggctgctgagctatttgtgatggtataaacccatctattcatcctactactaagtag

SEQ ID NO: 20000 - DNA, 80 bp, synthetic construct
  source 1..80: mol_type = other DNA
catctttctcataaacaattgacttctctttcagcctgcctctacagttcaaatactatattattgctctctttgagccc

SEQ ID NO: 20001 - DNA, 80 bp, synthetic construct
  source 1..80: mol_type = other DNA
agggcaaattaggtacaagaactctgttagaggagcagatagagctgtgattgtcaatatcgtgtttattttaatttcca

SEQ ID NO: 20002 - DNA, 80 bp, synthetic construct
  source 1..80: mol_type = other DNA
cccagatcctgacttcctgcagttttttagtttgtgtcttaaattgagaagctttaactttcggtcacacgaagaggcaa

SEQ ID NO: 20003 - DNA, 80 bp, synthetic construct
  source 1..80: mol_type = other DNA
gcacgtaaatattctgtggcatgaaaataactgcatgaatcatcttcccagcattcttggtcagactttaactctgcatt

SEQ ID NO: 20004 - DNA, 80 bp, synthetic construct
  source 1..80: mol_type = other DNA
ctgttgtcttttcttcccattcaatatagcactcagagtctgttccaatcatttgaagatccaaagtttgtcctggggtg

SEQ ID NO: 20005 - DNA, 80 bp, synthetic construct
  source 1..80: mol_type = other DNA
aattggcccaaggccagcaggatgaaacatgcgtagaaatggaaagtgcactttaagaaaggccaggttaaaagaatatt

SEQ ID NO: 20006 - DNA, 80 bp, synthetic construct
  source 1..80: mol_type = other DNA
gctaagtgtaatggtggatagaaggataaaatatcactcatttcacaatctacacatagaggccggatatgcatcaccct

SEQ ID NO: 20007 - DNA, 80 bp, synthetic construct
  source 1..80: mol_type = other DNA
gtgagtgcacgcaagtagctagaatatctcaaggcaccaagttacccttaaacgtcgtgaaattgaggacacgttgaagt

SEQ ID NO: 20008 - DNA, 80 bp, synthetic construct
  source 1..80: mol_type = other DNA
atagaaaaagcgttggtaaattttacttctcccattggtatttcccaaaaaaaggagcatgtgccatttaaaattccaac

SEQ ID NO: 20009 - DNA, 80 bp, synthetic construct
  source 1..80: mol_type = other DNA
gggtggatatagaggggcgagagatttatggaaatcaagccagtcaaagttgatcttgaacaacttgtaggtcagagatt

SEQ ID NO: 20010 - DNA, 80 bp, synthetic construct
  source 1..80: mol_type = other DNA
ctacagccaagtagacacgtacatatagagctaactctacaggaagttgtgatgagtgtcagtggagacatctacagagt

SEQ ID NO: 20011 - DNA, 80 bp, synthetic construct
  source 1..80: mol_type = other DNA
cctaaaagtggattgcacaggaggggaaagagttacaatttgccctctttgaggaccttgccttctgtatctgtatttct

SEQ ID NO: 20012 - DNA, 80 bp, synthetic construct
  source 1..80: mol_type = other DNA
cttagctgttctcgttattgggaaaaatcaagctgagtgtgggtggtactatacacatggatcttcaaggttagattttc

SEQ ID NO: 20013 - DNA, 80 bp, synthetic construct
  source 1..80: mol_type = other DNA
ctttactccacattctgctcagagaattgattctttctgcgtgacatcatgttgcttttttccggctcatatatcagctg

SEQ ID NO: 20014 - DNA, 80 bp, synthetic construct
  source 1..80: mol_type = other DNA
tgtgtttcacactttcctgcatccgattttataaactgccgaagaaaatgtgaaccctttgctctctaggttttgagaca

SEQ ID NO: 20015 - DNA, 80 bp, synthetic construct
  source 1..80: mol_type = other DNA
accagctggggcaacatagcaagaccttggctctacaaaaaataaaaataaaaaattagccaggtgcagtggtgcacacc

SEQ ID NO: 20016 - DNA, 80 bp, synthetic construct
  source 1..80: mol_type = other DNA
aacatggctttattaatcaaacatctagtacagatttgccaaattattagaatctttaagtctttttttttttttttgaa

SEQ ID NO: 20017 - DNA, 80 bp, synthetic construct
  source 1..80: mol_type = other DNA
atttactttttgatttatcagctatgccagtgtggatttttccaaacagagagacccagtagcatatatgcagtgcttgt

SEQ ID NO: 20018 - DNA, 80 bp, synthetic construct
  source 1..80: mol_type = other DNA
taggcaggttgacaagtgatatccttatcatttgccattttcaaggaccagtgttgactaaagaaacagtgctttgattc

SEQ ID NO: 20019 - DNA, 80 bp, synthetic construct
  source 1..80: mol_type = other DNA
tctctggtgccgtgtacttttcctccatgtcactgatggtatgcctaccagattaatatctctcttctctcgcataaact

SEQ ID NO: 20020 - DNA, 80 bp, synthetic construct
  source 1..80: mol_type = other DNA
ttgtgttatctctaacaaggctcagattgtgcttgtgtttggtaggacacatataataaaagaaaaattggccgggtgcg

SEQ ID NO: 20021 - DNA, 80 bp, synthetic construct
  source 1..80: mol_type = other DNA
tcataattgtgagagaaatttgtaagttctggcacagtggtatttcacattgttaatagaattctgccaagattaatcat

SEQ ID NO: 20022 - DNA, 80 bp, synthetic construct
  source 1..80: mol_type = other DNA
ccttcctgttcttcctgataacgtgattgacatttctgattatggtaatctggatagctttaagaaggacaatatttaag

SEQ ID NO: 20023 - DNA, 80 bp, synthetic construct
  source 1..80: mol_type = other DNA
aaaccttagagttatccttgactgctttcccgctcacctcacattcaatccataagtaaatccttcaaatatatattctc

SEQ ID NO: 20024 - DNA, 80 bp, synthetic construct
  source 1..80: mol_type = other DNA
ttaatctttctttgttaagtgaattaatcatcaaatgaatacttctaagagttccaggagaagccccagagctggcatct

SEQ ID NO: 20025 - DNA, 80 bp, synthetic construct
  source 1..80: mol_type = other DNA
ttttagtctggtgcagtgcttttgaatgcttcttgggcatgtcagctatttgatgagacatgctttattgcttttctact

SEQ ID NO: 20026 - DNA, 80 bp, synthetic construct
  source 1..80: mol_type = other DNA
agacaccattacagaccttcacttcctactacaaatagtggcattaaggtatgaagttcagccttcggcggcttcattag

SEQ ID NO: 20027 - DNA, 80 bp, synthetic construct
  source 1..80: mol_type = other DNA
atagacaccattcttacagaaatagatctctgaattacatggacccacagagaggaccagtaaggtactggttatagaaa

SEQ ID NO: 20028 - DNA, 80 bp, synthetic construct
  source 1..80: mol_type = other DNA
gggaggctgagacaagataatcacttgaacctatgtggtggaggttgcagtgagccagtattgccactgcactccagcct

SEQ ID NO: 20029 - DNA, 80 bp, synthetic construct
  source 1..80: mol_type = other DNA
taaagcactaatggtaaagactacacttaatatgaagtttcagctgagtgtttgagtcttatgaaagcacctgctagtat

SEQ ID NO: 20030 - DNA, 80 bp, synthetic construct
  source 1..80: mol_type = other DNA
gtattgtcatgctgatttgtaataatgcttttgttcattaaaatgattaacctcttgcctatttctcctgtttttgtgag

SEQ ID NO: 20031 - DNA, 80 bp, synthetic construct
  source 1..80: mol_type = other DNA
ctaagccagatgaaggctgagaaaagaagtgtggaaagctcaaggaaagtagagaatgtctagaatgatcatctctgaga

SEQ ID NO: 20032 - DNA, 80 bp, synthetic construct
  source 1..80: mol_type = other DNA
tactccatctacaataccaagtcttcacgagaaagagcaggtaacacagaaacatgtgcagtgctttgagatatgaagct

SEQ ID NO: 20033 - DNA, 80 bp, synthetic construct
  source 1..80: mol_type = other DNA
aacattcagagggagccaaaaaggctgggcacattgatgttaagaaagaagggagttttaggaaaagggaatttggtcct

SEQ ID NO: 20034 - DNA, 80 bp, synthetic construct
  source 1..80: mol_type = other DNA
tccagctctcagtttgccaactaatgtggaagatgtttgtccaaacataccgtctttggagaaactcatggaagaaatcg

SEQ ID NO: 20035 - DNA, 80 bp, synthetic construct
  source 1..80: mol_type = other DNA
gagccaccacgtctatgtcatctttaaatgttgaagtttcaacaatattttatgccctggaaatactcatattatgaagg

SEQ ID NO: 20036 - DNA, 80 bp, synthetic construct
  source 1..80: mol_type = other DNA
ggactagaaaaatggctgaggcatgagctgtacccttaaggaagtcatgtgctggagaaggaggctttaattatgttaca

SEQ ID NO: 20037 - DNA, 80 bp, synthetic construct
  source 1..80: mol_type = other DNA
gcctcctaggtttcatgtaacagttgaggagagagaataggttcccctgaggagtttgagggaatataaaccttcttctg

SEQ ID NO: 20038 - DNA, 80 bp, synthetic construct
  source 1..80: mol_type = other DNA
aagatacaaatttatttatcctgtgtaactcatgtttgggggatgcaatagatcatccaaggtattctgaaggaaaattc

SEQ ID NO: 20039 - DNA, 80 bp, synthetic construct
  source 1..80: mol_type = other DNA
attttctgaatcttagttttcccatctttgcaatgtgcatattcatatctagttcacagaattcttgcttctagccaagt

SEQ ID NO: 20040 - DNA, 80 bp, synthetic construct
  source 1..80: mol_type = other DNA
agacctcaaaataaattcgctgcattatttaaaagccacatggacgaattccaggttctcacacatgaagtgggaagtat

SEQ ID NO: 20041 - DNA, 80 bp, synthetic construct
  source 1..80: mol_type = other DNA
gactgattataacacagtttgctcttatttgcaagaagaaaaaaggggagtaatagataagaacctctcaattttaacat

SEQ ID NO: 20042 - DNA, 80 bp, synthetic construct
  source 1..80: mol_type = other DNA
aacctcactgttcgtagcagcaaaatgtttgtcatgctgcttaccttgatggaggcttgtaaaatcagaataatgtgtgt

SEQ ID NO: 20043 - DNA, 80 bp, synthetic construct
  source 1..80: mol_type = other DNA
gccccaaaggagctgcatagtttggggaggaaataggcactaaacaaatgaacaaaaaatacccaatatgtgcgtacagg

SEQ ID NO: 20044 - DNA, 80 bp, synthetic construct
  source 1..80: mol_type = other DNA
ttgtttcactactttcactatggtaaaaatgtctttcaacctcatgctatgatacactttaccttctgttaagtaaaaca

SEQ ID NO: 20045 - DNA, 80 bp, synthetic construct
  source 1..80: mol_type = other DNA
atcccagcggtaatgatcatctgacctccagactctcagtgtttgattcctttgtctcactgccctatgtcaatatttca

SEQ ID NO: 20046 - DNA, 80 bp, synthetic construct
  source 1..80: mol_type = other DNA
cattgaatcactgaagctcgtcactgaacatgcatcgtttgacattctaaaatgagtgaattgaggggaagctgtgggag

SEQ ID NO: 20047 - DNA, 80 bp, synthetic construct
  source 1..80: mol_type = other DNA
atctcctaatgctgtccttcttgatagaggagttttagggtcttttggacgtagagaaggtgtctataagaaaatgttgg

SEQ ID NO: 20048 - DNA, 80 bp, synthetic construct
  source 1..80: mol_type = other DNA
agatccacactatatcaataggctatatcgagatttgcagcaataggaataagtgagtttacctaaggagaagagaagcg

SEQ ID NO: 20049 - DNA, 80 bp, synthetic construct
  source 1..80: mol_type = other DNA
gtaagaatattttggacagtttagatgacgtattcaggagacaggaagaaggaagagagcaaaaaaggaaacattgattg

SEQ ID NO: 20050 - DNA, 80 bp, synthetic construct
  source 1..80: mol_type = other DNA
tgtccatttttaataacatacttattctatattatttctttgaactgatatgttctacccccattaaattgcttgctttt

SEQ ID NO: 20051 - DNA, 80 bp, synthetic construct
  source 1..80: mol_type = other DNA
tttttaataattgtatatagttaaggtgtccaacaggatgtttcaatatacataagcatagtcacatgattagtgtagtc

SEQ ID NO: 20052 - DNA, 80 bp, synthetic construct
  source 1..80: mol_type = other DNA
caatttctaagcttacaaatcttgtagcaatatatagattatatattttgggagatcctggcctttgttttgttgtcttt

SEQ ID NO: 20053 - DNA, 80 bp, synthetic construct
  source 1..80: mol_type = other DNA
attatctgaaccctcacccctgccctggacagtttaataatgcaaagatatcatctaatgtagtatccttttaacttcct

SEQ ID NO: 20054 - DNA, 80 bp, synthetic construct
  source 1..80: mol_type = other DNA
ctttaatatccctctgctaatgataacatgtgactgagtcacagaggagcgtgcaaagaatattttaacttgcaaacgtc

SEQ ID NO: 20055 - DNA, 80 bp, synthetic construct
  source 1..80: mol_type = other DNA
ttctttcagaagtctaaacgtgtgggtcggagacattactgtctgggaagtacagtgctcaatggcctagagattactaa

SEQ ID NO: 20056 - DNA, 80 bp, synthetic construct
  source 1..80: mol_type = other DNA
aggaaaagggctgttgtagcctgcttccggatggcccccttatataatctgccaaggtcggaattactttattttttgta

SEQ ID NO: 20057 - DNA, 80 bp, synthetic construct
  source 1..80: mol_type = other DNA
tccagggtaccatttcagtcaccttggagttctctgagaaactatgctctttcccactctgaagtttatacaaattgcat

SEQ ID NO: 20058 - DNA, 80 bp, synthetic construct
  source 1..80: mol_type = other DNA
ccagatttcatcagtttccctttgaactacttcacattcccatccttccctccatcaccacctcttcaagtcgcttgttc

SEQ ID NO: 20059 - DNA, 80 bp, synthetic construct
  source 1..80: mol_type = other DNA
gaattccactgattcttctcatctgcactggtcttttttcacaggcggccatttatgataagtagtgcagggtttaatct

SEQ ID NO: 20060 - DNA, 80 bp, synthetic construct
  source 1..80: mol_type = other DNA
ggtttttagaaatcaacagggcagagaatgatagactgaacacaggagactgaacacatggtaaatgtggagcatgagaa

SEQ ID NO: 20061 - DNA, 80 bp, synthetic construct
  source 1..80: mol_type = other DNA
gtaagcgaagaaaatatttcactttataagcaatttgcactgctatgggaactaaattttcacacttggggtgactcagg

SEQ ID NO: 20062 - DNA, 80 bp, synthetic construct
  source 1..80: mol_type = other DNA
ttgcccatttttcttgtcttctgcagccttagtcatatgaattcaccaaagccacaaagggcaaacctctctgaagttac

SEQ ID NO: 20063 - DNA, 80 bp, synthetic construct
  source 1..80: mol_type = other DNA
gaaaattgaaggcccttctgtaaggtaagatgggacagctatttaggatccccgggatctttgctttctgatttcaggat

SEQ ID NO: 20064 - DNA, 80 bp, synthetic construct
  source 1..80: mol_type = other DNA
agaatggagtggggggctgtcaaacactgttaaaccatcatatcttgtgagaactcactcactatcgtgagaacagcatg

SEQ ID NO: 20065 - DNA, 80 bp, synthetic construct
  source 1..80: mol_type = other DNA
agcacacatatattctggtgagaaggagccaacagaataggaaagggaatcatttgtgaagtgaggtctggagtccatga

SEQ ID NO: 20066 - DNA, 80 bp, synthetic construct
  source 1..80: mol_type = other DNA
aaattgtttttatgtctgattgatgagctgaaacacatagtttaataaacactgggttaaaagataaaaggatagggctg

SEQ ID NO: 20067 - DNA, 80 bp, synthetic construct
  source 1..80: mol_type = other DNA
tagaagctcctggtttgagaataggtagaagctcttgatttaagaataggttgtttctgattgttagagttcttccttgt

SEQ ID NO: 20068 - DNA, 80 bp, synthetic construct
  source 1..80: mol_type = other DNA
actttaagagactgttgtatgtgtcttcctccaccactgcaggtcccttggaaggcatcatttatatcttacttaggttt

SEQ ID NO: 20069 - DNA, 80 bp, synthetic construct
  source 1..80: mol_type = other DNA
tttctgtattacaaacatcacttctttctgaaacaaaagagctgatgagtggttctgcacgtcctctctattatgatgag

SEQ ID NO: 20070 - DNA, 80 bp, synthetic construct
  source 1..80: mol_type = other DNA
acccatgagctctctgttagtcagatttaaatccacaatgaaagtttctgggttttgattccttagtcttctgcggagtt

SEQ ID NO: 20071 - DNA, 80 bp, synthetic construct
  source 1..80: mol_type = other DNA
ctaatgcacactgctaattattgggaataatgggagatattagaataggtagtcttaaggagcagctaagcaaaattcct

SEQ ID NO: 20072 - DNA, 80 bp, synthetic construct
  source 1..80: mol_type = other DNA
accaagcagcagaaatacgtgtaagggttggaacaatctaactttgatgagctgtagggttcttcctactatagctattg

SEQ ID NO: 20073 - DNA, 80 bp, synthetic construct
  source 1..80: mol_type = other DNA
tgatgaggaagatgacgatggtgaagaggaagtgaagagttttgaagtaagatggatctttctggatttgcctttctttc

SEQ ID NO: 20074 - DNA, 80 bp, synthetic construct
  source 1..80: mol_type = other DNA
atatcagtagccagcaatgagtctttaattaaagtggacccacaaaaacgtattagccaatgaataagctcagagcagtg

SEQ ID NO: 20075 - DNA, 80 bp, synthetic construct
  source 1..80: mol_type = other DNA
tggtgagattggaaagaagcctgcttttccattgtgctagtaatcacttcaattagtaactggagattatattccatgat

SEQ ID NO: 20076 - DNA, 80 bp, synthetic construct
  source 1..80: mol_type = other DNA
aatcatgtatatactatcagatgcagctctgatccgatggatataatggttaatggcatacaatgggcctaacacttaat

SEQ ID NO: 20077 - DNA, 80 bp, synthetic construct
  source 1..80: mol_type = other DNA
aggtgtaatgcaggacaccagatttggggatttgcgcttcctaatgagatttttttttttttagtgatctccatctgatt

SEQ ID NO: 20078 - DNA, 80 bp, synthetic construct
  source 1..80: mol_type = other DNA
agcattatgggtttttctcacctagatcaacaaagaactttgatactgcagtagaacacatttattaactatgattttat

SEQ ID NO: 20079 - DNA, 80 bp, synthetic construct
  source 1..80: mol_type = other DNA
tgctacaagaatgaatgggctgtaagatatactgccctccatggctacataatttgaactttgaatgggtttatttggtg

SEQ ID NO: 20080 - DNA, 80 bp, synthetic construct
  source 1..80: mol_type = other DNA
ataagtacactgtgtgggggcagtcatttctagggccattctggctcagaagcaaggcaagtagccaaggcttagaaaga

SEQ ID NO: 20081 - DNA, 80 bp, synthetic construct
  source 1..80: mol_type = other DNA
tcactttctctgctgaaaacaagtcagggaagcccatagataaacttttacagtgtggtgaacataaacaacacaacaca

SEQ ID NO: 20082 - DNA, 80 bp, synthetic construct
  source 1..80: mol_type = other DNA
ccaagaatagaaagaaacccatgccatggagtcttgtcagtttgatgtgaattgtcagaatatttgactccaagctttct

SEQ ID NO: 20083 - DNA, 80 bp, synthetic construct
  source 1..80: mol_type = other DNA
gtattcttagtggtcccaagttttcttcttgttcttattctctcttttgtcaggctatgccaggagagaaagaactgcat

SEQ ID NO: 20084 - DNA, 80 bp, synthetic construct
  source 1..80: mol_type = other DNA
tactggatgtacagtatgtgtgtactggtgtggttaaaacaaagaaagcccgctctcttcatggatcttctaggaaactt

SEQ ID NO: 20085 - DNA, 80 bp, synthetic construct
  source 1..80: mol_type = other DNA
gcaggtccttcagaaacaatgtaaattcctttcctgtaaccaggctgccctggtttaaaatatcttttcatctccattac

SEQ ID NO: 20086 - DNA, 80 bp, synthetic construct
  source 1..80: mol_type = other DNA
ttaaaaaaaatgagtgacctgtccagggagtttatttttaagcaaggtagtctgagatcctgtctatttcttggtccttg

SEQ ID NO: 20087 - DNA, 80 bp, synthetic construct
  source 1..80: mol_type = other DNA
gatattatcaaagatttaagaaacaaatttgccagcctcggcgagaactctctggtaacagcataaatgtctgtgttggt

SEQ ID NO: 20088 - DNA, 80 bp, synthetic construct
  source 1..80: mol_type = other DNA
aaatataaaggcacattgcatctcttattctttgggggtgactggggagatctgtatcataaatccactacttcgttgaa

SEQ ID NO: 20089 - DNA, 80 bp, synthetic construct
  source 1..80: mol_type = other DNA
gaaactatgttataactaaaccttagcagactgatcctataaaatgggggtgcacgagctttttctttaaggctggagag

SEQ ID NO: 20090 - DNA, 80 bp, synthetic construct
  source 1..80: mol_type = other DNA
attttaaatggtgggaactccacagtacagcaggtaacagcttccagtcattcatataatgtacttttcagacaaatgga

SEQ ID NO: 20091 - DNA, 80 bp, synthetic construct
  source 1..80: mol_type = other DNA
tgccttcgctatctgaaaaagattactactaaaatttagtctgcttaactgagccctttttagaacagcattgataacag

SEQ ID NO: 20092 - DNA, 80 bp, synthetic construct
  source 1..80: mol_type = other DNA
accaggagagaattaagagtaatatattacccctgacatttttggtgcttgtggtgatgtgtaaggcaactaaccctctt

SEQ ID NO: 20093 - DNA, 80 bp, synthetic construct
  source 1..80: mol_type = other DNA
agaccagcctgggtaacagggcaagactccatctctacaaaaagattaaaaaaaaaaaaaaagctaggcatggtggcaac

SEQ ID NO: 20094 - DNA, 80 bp, synthetic construct
  source 1..80: mol_type = other DNA
aaaacaaagctgaaggtcttgggatggtgacagaggaaggatcaggtattaatgacttacattaaaaggatcacctgtct

SEQ ID NO: 20095 - DNA, 80 bp, synthetic construct
  source 1..80: mol_type = other DNA
cttgacatttggatgtacaagtgcagtcaacaaaaataagtcatatggttactaaactgagttagctaccttcaagaaca

SEQ ID NO: 20096 - DNA, 80 bp, synthetic construct
  source 1..80: mol_type = other DNA
caactttttttctttttccccatttccttttctttcgactactgtaaatgtactaccctcccttcctcagtcatcactca

SEQ ID NO: 20097 - DNA, 80 bp, synthetic construct
  source 1..80: mol_type = other DNA
ggagaagaaaaatcaatcatccctcttggaagggatagaaaaggctgaaaaagcaacatctgttagtgatgtcacttgct

SEQ ID NO: 20098 - DNA, 80 bp, synthetic construct
  source 1..80: mol_type = other DNA
gctgccccttgacttattgttctttgtccctttccgggacacaaatctcttgccaaattttgcatttattgttaagtttc

SEQ ID NO: 20099 - DNA, 80 bp, synthetic construct
  source 1..80: mol_type = other DNA
ctacaacattaactaccaattaaccttccccacctttctatctgtatctgataatttgtttcactgaggttcttactgat

SEQ ID NO: 20100 - DNA, 80 bp, synthetic construct
  source 1..80: mol_type = other DNA
atcagagtctcaaggcagggagatcagtaaggatgctgatgaatggaatggatgaaaaacaataagaatttcagtgagag

SEQ ID NO: 20101 - DNA, 80 bp, synthetic construct
  source 1..80: mol_type = other DNA
taatactgaaattatctgtttatttcctgtatcttccattagactgtgaacttcttcaggttcgagattatgttcacctc

SEQ ID NO: 20102 - DNA, 80 bp, synthetic construct
  source 1..80: mol_type = other DNA
attacagtattaaaaatcttaagcctcttataacaatgaaaccaaagggatgtccttcacaatatgtaccttgagccctc

SEQ ID NO: 20103 - DNA, 80 bp, synthetic construct
  source 1..80: mol_type = other DNA
tatttgcctaaaacattctccctttcgtttcctatcctgtcgtgaatttaaacactgaggaatggacttatcagccaatt

SEQ ID NO: 20104 - DNA, 80 bp, synthetic construct
  source 1..80: mol_type = other DNA
aagtaaactgagcccttttctgaggttttctccttgccccaaaaatatttgttagtgttggatgatgcagaggaacttct

SEQ ID NO: 20105 - DNA, 80 bp, synthetic construct
  source 1..80: mol_type = other DNA
tactctgtgagggacacaactcaggtttgtgagtccccggaacttctgatgatactaaggcataaataatgttttcaagc

SEQ ID NO: 20106 - DNA, 80 bp, synthetic construct
  source 1..80: mol_type = other DNA
atctgagaactcagactggcaataatacaactgtcaacataattatctccactgtagactacctactgagagttcaggta

SEQ ID NO: 20107 - DNA, 80 bp, synthetic construct
  source 1..80: mol_type = other DNA
ggcctcttaaataatgagagccctgtacaacttttttcccctcattttatttataagctaaaccaggcacagtattttta

SEQ ID NO: 20108 - DNA, 80 bp, synthetic construct
  source 1..80: mol_type = other DNA
tattactctgggaaagatgttattgatgaacaaggacaacggaatttctccaaagctatccaagtggcaaaacaagtctt

SEQ ID NO: 20109 - DNA, 80 bp, synthetic construct
  source 1..80: mol_type = other DNA
gtatcccaggagcgtaacagttacagctgtttgagtaaataaatgactcatggccaagtacagccaaccaagagtaagtg

SEQ ID NO: 20110 - DNA, 80 bp, synthetic construct
  source 1..80: mol_type = other DNA
attttagtattcagaaaagttgtaaagatagcacagagggtttctgtatatgattcacccagctttccccaatgctgaca

SEQ ID NO: 20111 - DNA, 80 bp, synthetic construct
  source 1..80: mol_type = other DNA
cttgcacttttcctcctccctaatttatatgccattggaataccaagctgacactgaacatcgaccacaggaaaatccta

SEQ ID NO: 20112 - DNA, 80 bp, synthetic construct
  source 1..80: mol_type = other DNA
atttcagactgatttcagatggggcagaatggccccttcctgagtagtccatataagaaacacatctttcttgtcatatg

SEQ ID NO: 20113 - DNA, 80 bp, synthetic construct
  source 1..80: mol_type = other DNA
tcagcacttcaccaaaggtgggggcacttttataaggcgttcctggaagcaagacaagaaatttgattggtaaaagtgca

SEQ ID NO: 20114 - DNA, 80 bp, synthetic construct
  source 1..80: mol_type = other DNA
aatggacaaatgaaacagtcgagtccccaaacattgtacatttcacaagcttcatcttcctggccattgctcactggaat

SEQ ID NO: 20115 - DNA, 80 bp, synthetic construct
  source 1..80: mol_type = other DNA
gcctgcaaatgacaatatgcaggatatattgtcaaagatcagcagggctggatgctagtaaaagtggtaaggatacatct

SEQ ID NO: 20116 - DNA, 80 bp, synthetic construct
  source 1..80: mol_type = other DNA
gatgtaaagttgtgcagatgtaagtatgatccgtatttccagggactatagctaagcgtagtgatgtttagacacaatat

SEQ ID NO: 20117 - DNA, 80 bp, synthetic construct
  source 1..80: mol_type = other DNA
atttggccctcctttagttccataatgcttcaagtggttactatttattgccagagcagcatcctttttgtgagaataag

SEQ ID NO: 20118 - DNA, 80 bp, synthetic construct
  source 1..80: mol_type = other DNA
gtgcctatcactttttcttaacttcttcctattttctctccgtgtctgccatacatggcgtaactccacttcagttaact

SEQ ID NO: 20119 - DNA, 80 bp, synthetic construct
  source 1..80: mol_type = other DNA
tcactgattttgttagtttattttaaacaaatgcaactgctttaccaccaggtaatgttgttaatggaacgattggcaaa

SEQ ID NO: 20120 - DNA, 80 bp, synthetic construct
  source 1..80: mol_type = other DNA
atatcttgacccttatgcgaatgctcagtctgaagagcctgaagaagcagatgaaaaaagtaaaaaagatgaccgtgaag

SEQ ID NO: 20121 - DNA, 80 bp, synthetic construct
  source 1..80: mol_type = other DNA
atagagccatcattccatccatgaatatggcatattttccaagtgtctgacagacaccactgggtatcatagggaattca

SEQ ID NO: 20122 - DNA, 80 bp, synthetic construct
  source 1..80: mol_type = other DNA
aagactccagtgattgcatggaatgctgtttgtaagaggactcagggccacaattctgtctttaaaaatcactcatgtct

SEQ ID NO: 20123 - DNA, 80 bp, synthetic construct
  source 1..80: mol_type = other DNA
cagcactattcattgtcatagatctcacactattgggtcagttgtaaaaatggccccataaaaagtagacacaaataaca

SEQ ID NO: 20124 - DNA, 80 bp, synthetic construct
  source 1..80: mol_type = other DNA
tacccatctccaggggactgtgatcaacagaaaatcctacccctgattctaaaattcagaatattatcattcaccggaaa

SEQ ID NO: 20125 - DNA, 80 bp, synthetic construct
  source 1..80: mol_type = other DNA
aaggcctttattaacatgcatgtgtaatgtcacatgtatacacatatatgtgtctcctatccttttcctccatgcttatc

SEQ ID NO: 20126 - DNA, 80 bp, synthetic construct
  source 1..80: mol_type = other DNA
taactctgaataattcctaatttggtatgccataatggcttccatggctgcaggtatagttctattataggtcatggctg

SEQ ID NO: 20127 - DNA, 80 bp, synthetic construct
  source 1..80: mol_type = other DNA
acgggtcctcttgctttcactgttgttccactgctatcagttttcacatagtagctggagtgggccttccaaatcataat

SEQ ID NO: 20128 - DNA, 80 bp, synthetic construct
  source 1..80: mol_type = other DNA
gatgaacgtatctactactgctagtgaacatgtctaaacctattatgaaatactggtgcctaggcactgatatcactgtt

SEQ ID NO: 20129 - DNA, 80 bp, synthetic construct
  source 1..80: mol_type = other DNA
ttagctattctgcacacggtcatttctttcttctgcatcattggatactactgcttgaaagtaagatagtaaggcaccaa

SEQ ID NO: 20130 - DNA, 80 bp, synthetic construct
  source 1..80: mol_type = other DNA
tagaatgtaaagagttattcaggaactcctttcctcccgtttattctgttttatgggagtgcatattcttggctatttcc

SEQ ID NO: 20131 - DNA, 80 bp, synthetic construct
  source 1..80: mol_type = other DNA
tagttatatattcagccaagaaaaatctaaagactcagtgctgtccaactcttaatggtggatgtcctcaatttttgccc

SEQ ID NO: 20132 - DNA, 80 bp, synthetic construct
  source 1..80: mol_type = other DNA
tttaaaataatattcaaatacctatgatgcaggaaattatgtgatgttagccaaattcattgtaagtttacgtggcagga

SEQ ID NO: 20133 - DNA, 80 bp, synthetic construct
  source 1..80: mol_type = other DNA
atatctgtagtcaaataaataggtaaaccataatggcagctaatcctgttcctggatttcccgctatggtacctaatttg

SEQ ID NO: 20134 - DNA, 80 bp, synthetic construct
  source 1..80: mol_type = other DNA
agactcactcaggaggtatatgaaccagaggccaagaagagctgtatcccagagttggacataactgagctcacagggga

SEQ ID NO: 20135 - DNA, 80 bp, synthetic construct
  source 1..80: mol_type = other DNA
ctcataccccaaggttatggataaatatggagagttctacggccgagacagaatcagtgaattacttggcatggacaagg

SEQ ID NO: 20136 - DNA, 80 bp, synthetic construct
  source 1..80: mol_type = other DNA
ctctttatatactgctttcatggaataatatgtttctaaaccagttgagttgaatgcacctgaatttaaatgtcacacac

SEQ ID NO: 20137 - DNA, 80 bp, synthetic construct
  source 1..80: mol_type = other DNA
gtaactgtttgtaagtaagtttgacccctagcaaagtaccaagaagttcatatggcatttaacaccttgacatatggaga

SEQ ID NO: 20138 - DNA, 80 bp, synthetic construct
  source 1..80: mol_type = other DNA
gctggaatattggaaaggctgggaaagttacaatttctagcctataaatcagtggcaagttctgaaaaaatgaaaattaa

SEQ ID NO: 20139 - DNA, 80 bp, synthetic construct
  source 1..80: mol_type = other DNA
gaaggtgatgatgttttgttttccaagatcctctaagaacacatcatgaaactctaggatacagtgtcagagttggctct

SEQ ID NO: 20140 - DNA, 80 bp, synthetic construct
  source 1..80: mol_type = other DNA
catgggcccagaactctgggtgtcttaggagcattctctaagagttcaaaatcaggtcttccaagtatctttcagaacca

SEQ ID NO: 20141 - DNA, 80 bp, synthetic construct
  source 1..80: mol_type = other DNA
cacatgcacctttggcccagcttgtcacttaggtcgttactcatcttatgcccataaattttccttttcctcagtctttg

SEQ ID NO: 20142 - DNA, 80 bp, synthetic construct
  source 1..80: mol_type = other DNA
aaattttcctaaaatgccatttttcacaaaccgttatccttctcatggtactgcagtggcactcaagttcctgtggggta

SEQ ID NO: 20143 - DNA, 80 bp, synthetic construct
  source 1..80: mol_type = other DNA
taaaggattatctgaaccaaaatatgaatagcgctgggttgagaaagcctgctgcggagtaggaagtcaataaatgtttc

SEQ ID NO: 20144 - DNA, 80 bp, synthetic construct
  source 1..80: mol_type = other DNA
gacatgttctttccccccgttttgtcttaatagtccttcctctacctagcctggtatatgactatgtctgttcttggaca

SEQ ID NO: 20145 - DNA, 80 bp, synthetic construct
  source 1..80: mol_type = other DNA
aacgtttcatatttgacaaggtcatgctgactcggaagaaaactggtctaggtccagaaaatgcacttacgttccaatgg

SEQ ID NO: 20146 - DNA, 80 bp, synthetic construct
  source 1..80: mol_type = other DNA
aagcagttgcagtcaagaccataaagatgtgctgtaatcagaaaaagtacacataaagataaagcactgttagtatggtc

SEQ ID NO: 20147 - DNA, 80 bp, synthetic construct
  source 1..80: mol_type = other DNA
agcttctagtaaacacggctgtgttctcactagagcactcgccgcccatgtagatgtcacgtgtcaattgtatgtcctac

SEQ ID NO: 20148 - DNA, 80 bp, synthetic construct
  source 1..80: mol_type = other DNA
aatcaacagctgttaaagctttcatattgctttatatcgctgttctacaacctgtctctctaatattggcagctgagagg

SEQ ID NO: 20149 - DNA, 80 bp, synthetic construct
  source 1..80: mol_type = other DNA
attagctgccctcacaagctaggaataatctaaatgatcattagtagtgtcctgattaagtcagttacgataaatccata

SEQ ID NO: 20150 - DNA, 80 bp, synthetic construct
  source 1..80: mol_type = other DNA
tgagggaagctctgctgaaactcgatgttacattttgatccactgcctgttcttgagccatttatttatagcccaaatct

SEQ ID NO: 20151 - DNA, 80 bp, synthetic construct
  source 1..80: mol_type = other DNA
tgagctaccaagagtttgagtaacttgtcataagtcacacagttaggaagaggtgacactcttcaaccagtactctaagt

SEQ ID NO: 20152 - DNA, 80 bp, synthetic construct
  source 1..80: mol_type = other DNA
cctattcattcattccaggcctagggctgaagatgtgttaaggatccttcatctcctcttccatgcgctgcctttaatat

SEQ ID NO: 20153 - DNA, 80 bp, synthetic construct
  source 1..80: mol_type = other DNA
atcacttagagtagtgcgctttcaaagtacaggcttattaaaaccagcctgccagcaagaaagcagcacagaataggaaa

SEQ ID NO: 20154 - DNA, 80 bp, synthetic construct
  source 1..80: mol_type = other DNA
acctcagaatgaatctgtttaggagacggatgagggagggaagccacagactataacatcttggaaatcaacaacttcct

SEQ ID NO: 20155 - DNA, 80 bp, synthetic construct
  source 1..80: mol_type = other DNA
acagactcacattaaccagtattacataagcctgatgtacgagtcagaataccaacatgctactcattaaaagttaatgc

SEQ ID NO: 20156 - DNA, 80 bp, synthetic construct
  source 1..80: mol_type = other DNA
tgtgtggtaaaacaaattcaaacagtatgcctgagtatatggtgaaaatagtttccccttctcacagattcactgttagc

SEQ ID NO: 20157 - DNA, 80 bp, synthetic construct
  source 1..80: mol_type = other DNA
gagtgtcctaaaagtaaaaagctcaaagaacccagtcctggggcatttgttcatgaagctacagggagatgaggaagatt

SEQ ID NO: 20158 - DNA, 80 bp, synthetic construct
  source 1..80: mol_type = other DNA
cattttctccaaagtgagagagaaagtgctaggcggagtatgcagtatacacttttgtttaaaagacagcaacatgcaaa

SEQ ID NO: 20159 - DNA, 80 bp, synthetic construct
  source 1..80: mol_type = other DNA
ggtttcagactcatgaaccccagctttacaatcttgggtgggtgagccatttaaccctttaaacttctaagccagctggg

SEQ ID NO: 20160 - DNA, 80 bp, synthetic construct
  source 1..80: mol_type = other DNA
aaaacagctcaacacagtgtttctgattgtcacagtcaatgaaattatggaagcttacttataagggacttgtgaaaaaa

SEQ ID NO: 20161 - DNA, 80 bp, synthetic construct
  source 1..80: mol_type = other DNA
ctttctcctaggagtatcggatatgtagtcacgtttaccatgttctgagcattttgcaaggtagttgtacatctcccctt

SEQ ID NO: 20162 - DNA, 80 bp, synthetic construct
  source 1..80: mol_type = other DNA
gcattttaaaaagataactatggtttaaaatgtgaggcatgaagtagaaactggcaagaacagggacagggaagtgggct

SEQ ID NO: 20163 - DNA, 80 bp, synthetic construct
  source 1..80: mol_type = other DNA
cgtgtattgagtgaaccaaataatagctgcccctacatggcgagttgtgttttccttttgttttgctttctgaactctga

SEQ ID NO: 20164 - DNA, 80 bp, synthetic construct
  source 1..80: mol_type = other DNA
aaaatttgcatgtggcgttttctctgtgctggccataattgattgcaaccatacaatttatctaaatatgccctgtttat

SEQ ID NO: 20165 - DNA, 80 bp, synthetic construct
  source 1..80: mol_type = other DNA
tcctcctgtttcagccccacaagtacctgaaactacaggcatgcaccaccacacctggcttttttttgtgtttttttttt

SEQ ID NO: 20166 - DNA, 80 bp, synthetic construct
  source 1..80: mol_type = other DNA
tagcacttaacagattgccatggacaccagttgcgaagggaaatagtgccttactatatgtgggttgagctatgcagaag

SEQ ID NO: 20167 - DNA, 80 bp, synthetic construct
  source 1..80: mol_type = other DNA
ttgcaaacattggagctcttttattacaagtctgcttgttaattttagaactgtaaaaccgctctgattaaactatttaa

SEQ ID NO: 20168 - DNA, 80 bp, synthetic construct
  source 1..80: mol_type = other DNA
ccaggtcatgtaagccatttattggtttgttttaaaaatatgtattttatttatacatgaagtttggtgagaagtgctcg

SEQ ID NO: 20169 - DNA, 80 bp, synthetic construct
  source 1..80: mol_type = other DNA
tagtaaaatatttttccctgaaaaagccttttcacaagacctatgggaccacctggatcttgccccaaagaggtcctctg

SEQ ID NO: 20170 - DNA, 80 bp, synthetic construct
  source 1..80: mol_type = other DNA
ccgtgaatggggcttgcacccttgtgtcctttggttttgttaatactcttacaggaggggaagaaaaggcaactatcagt

SEQ ID NO: 20171 - DNA, 80 bp, synthetic construct
  source 1..80: mol_type = other DNA
gcctgctgacggaagaggaaggaggcatgcttcaaagagcgttgcagcaggtgcctgcggaaggctctctggataaccat

SEQ ID NO: 20172 - DNA, 80 bp, synthetic construct
  source 1..80: mol_type = other DNA
aacatgtcgtcgatgccagcctcccacttgacataagcgaagttggccatgccaaagatggagtagatgaacatgacgag

SEQ ID NO: 20173 - DNA, 80 bp, synthetic construct
  source 1..80: mol_type = other DNA
cattgtcctaggaagtgagcagatgccatcatccttatcttccagaagaggaaacagaggtgaggtaacttacccaagtt

SEQ ID NO: 20174 - DNA, 80 bp, synthetic construct
  source 1..80: mol_type = other DNA
tccctcaaaactttagataagtggttttcaggggtgagggagaggggaaatgaatggggattgactattaaatgggtaga

SEQ ID NO: 20175 - DNA, 80 bp, synthetic construct
  source 1..80: mol_type = other DNA
gtgaagatggccacaaagagcaggttgatcttggccaagatgttgattttctcaggactttggtcatctgtctccaccat

SEQ ID NO: 20176 - DNA, 80 bp, synthetic construct
  source 1..80: mol_type = other DNA
agagctcttggctctccccaccaggtgactcaggaatccggctccctgactgttctggggttccaaggatgaggctgtga

SEQ ID NO: 20177 - DNA, 80 bp, synthetic construct
  source 1..80: mol_type = other DNA
gtggggagctggtgctctacgtatctttttcttctgttggttgaagttgtcaatgatgacaccaataaagaggttcaggg

SEQ ID NO: 20178 - DNA, 80 bp, synthetic construct
  source 1..80: mol_type = other DNA
taatgtccatccagcctttaaatgttgcctgggaggaaaagacaagattaagacaatcatttaattctgtacctcgcttg

SEQ ID NO: 20179 - DNA, 80 bp, synthetic construct
  source 1..80: mol_type = other DNA
tggtactcccactgtacagacataatagaagtaaaaagcctcaagagcatagatgataatactaaaatgtaatgatgaat

SEQ ID NO: 20180 - DNA, 80 bp, synthetic construct
  source 1..80: mol_type = other DNA
tggaaaggtcagcagttcttagtctacaaaaggaggccttttcttccaaagttctgacattctgagggacaattgcagga

SEQ ID NO: 20181 - DNA, 80 bp, synthetic construct
  source 1..80: mol_type = other DNA
gaacatggtatcggttctagaactgaaagtctggggatttcccaaggagccaaatccctggagagtcctgagcctccttt

SEQ ID NO: 20182 - DNA, 80 bp, synthetic construct
  source 1..80: mol_type = other DNA
agttctccagtgctcccataagagcagagccagaaagcaggtggcatgggtactccctgtgatacccgctccccagtgag

SEQ ID NO: 20183 - DNA, 80 bp, synthetic construct
  source 1..80: mol_type = other DNA
ttgaaaaatgcatagggatctgcactaggaaaatggtgcacaggagatcactaagcacgtggttatttcctctacagcct

SEQ ID NO: 20184 - DNA, 80 bp, synthetic construct
  source 1..80: mol_type = other DNA
tctccacattctttccttcaattccaattcttggacctgtctccttcgccaaagaagccttttttggggaagaagaggca

SEQ ID NO: 20185 - DNA, 80 bp, synthetic construct
  source 1..80: mol_type = other DNA
gtgtctaacccatcaggatttcctgttggctctgccttcaaaatacatctgaagtccaagtgtttctcaccacttctact

SEQ ID NO: 20186 - DNA, 80 bp, synthetic construct
  source 1..80: mol_type = other DNA
ctgccgattccctttcccttgccttggctctgagctccccaaggtggccagcggctggtgggtgggtttccccagaagtc

SEQ ID NO: 20187 - DNA, 80 bp, synthetic construct
  source 1..80: mol_type = other DNA
tcacagctacctgatcatctagggcagcaacccagagcccctgagccagtgttcatggcttcctcctcctctggggtgac

SEQ ID NO: 20188 - DNA, 80 bp, synthetic construct
  source 1..80: mol_type = other DNA
tacaggcatgagccactgtgcctggcctaggcaccgtttctgacaacacctcccttccggggagagcagaaacaggaact

SEQ ID NO: 20189 - DNA, 80 bp, synthetic construct
  source 1..80: mol_type = other DNA
atacatatggcccactgaggcactgtagatggcacaacaggataattcaggtcccaaaatggattttgggagttgttcaa

SEQ ID NO: 20190 - DNA, 80 bp, synthetic construct
  source 1..80: mol_type = other DNA
cctggtttgtgacaccaacctgcctttaaatctcacttgcttttgtttaccataccgaagttccatgtacttcattttca

SEQ ID NO: 20191 - DNA, 80 bp, synthetic construct
  source 1..80: mol_type = other DNA
cagtgcttggcatgtaagaaatatttgagagatgttacttgtgactaaacggtttctcttaggataatacaataatagca

SEQ ID NO: 20192 - DNA, 80 bp, synthetic construct
  source 1..80: mol_type = other DNA
tggaattattttcttccttgagaatgtgaaagatctgtttttggggatgtgagaaattagattagctagtggttatcaat

SEQ ID NO: 20193 - DNA, 80 bp, synthetic construct
  source 1..80: mol_type = other DNA
gccaccgcgcccggccaggtgtttgtttttatctattttttccatttctagcactttccatatctgtaaaataggattaa

SEQ ID NO: 20194 - DNA, 80 bp, synthetic construct
  source 1..80: mol_type = other DNA
aatcaatcctcccacctcagcctcctgagaaactgggactacagacatgtgccatcatgtttggctaatttttctttttt

SEQ ID NO: 20195 - DNA, 80 bp, synthetic construct
  source 1..80: mol_type = other DNA
atatcattgacgtggttttttaacaacagagcttggctgtctaccctgattagattcaccagatgcttgccaaaactcct

SEQ ID NO: 20196 - DNA, 80 bp, synthetic construct
  source 1..80: mol_type = other DNA
ctcaacctcccaagtagcttggattacaggtgagtgccaccacactcagcaaattgttgtatttttagtagagatgggct

SEQ ID NO: 20197 - DNA, 80 bp, synthetic construct
  source 1..80: mol_type = other DNA
cagcgctccactgctgagtaggatcatgaagatgatgaatgtctcgaaccagctgtgctccacgatgtggtagcaggtct

SEQ ID NO: 20198 - DNA, 80 bp, synthetic construct
  source 1..80: mol_type = other DNA
accaccaatccataaaagctatagatgccaatcaacatggccacatgtcatccctgcctcaaggatttacagagggccta

SEQ ID NO: 20199 - DNA, 80 bp, synthetic construct
  source 1..80: mol_type = other DNA
tgtgggggctgtgaaagagctctgggaagccactggggatggggactgcatctagctgggagcaaaacggacatggggta

SEQ ID NO: 20200 - DNA, 80 bp, synthetic construct
  source 1..80: mol_type = other DNA
ttgtctgaattcttgggcatggctatgctcctacagctgccttctctcttctcttttcctttgatgaatcaatctgctga

SEQ ID NO: 20201 - DNA, 80 bp, synthetic construct
  source 1..80: mol_type = other DNA
cctcccaaagtattaaaattacaggcgtgagccaccgtgcccagcctcctgaagtcttctttggatggggagattcacag

SEQ ID NO: 20202 - DNA, 80 bp, synthetic construct
  source 1..80: mol_type = other DNA
acccccacacacaccacacacacccaggagccagagtcaatgggctcaagagaaggaacagagaagggaaatgagagaca

SEQ ID NO: 20203 - DNA, 80 bp, synthetic construct
  source 1..80: mol_type = other DNA
ctgggtggcccggacagcagagctctgggccctgtatatgtaggtgccttatacatgcaggggtgagggcccacctgctt

SEQ ID NO: 20204 - DNA, 80 bp, synthetic construct
  source 1..80: mol_type = other DNA
aatagctggaaaagaggtcaggaaggcacaggcagccttcaggcatttggactaatcatggggtcaggacatggagagct

SEQ ID NO: 20205 - DNA, 80 bp, synthetic construct
  source 1..80: mol_type = other DNA
ttggcttaaaagtaatacatattcatgtggaatatgtacagaaggtgaagaggtagcctctcccgtactatctctacgga

SEQ ID NO: 20206 - DNA, 80 bp, synthetic construct
  source 1..80: mol_type = other DNA
ctcttcctaaggtgccttctctggtatttaaattttggcttttctcagttccagaattccccacattggaaagacacaag

SEQ ID NO: 20207 - DNA, 80 bp, synthetic construct
  source 1..80: mol_type = other DNA
aatgagtaaataatgaataaataggtaagtaagtgggtaaatgaatgaatgagcaaaatgcagtgaagaggccaggcaca

SEQ ID NO: 20208 - DNA, 80 bp, synthetic construct
  source 1..80: mol_type = other DNA
gatgggtaagtgagtgcatggggggggtaggtgaaataaatgagtgagtagttagatggaaaggtgggtaaatgaataga

SEQ ID NO: 20209 - DNA, 80 bp, synthetic construct
  source 1..80: mol_type = other DNA
gtcatcacagagaaaggggggaaggtgcttaacacttactgaatgtctacgtgccaggccttgtgcttagaatggatgaa

SEQ ID NO: 20210 - DNA, 80 bp, synthetic construct
  source 1..80: mol_type = other DNA
atgcagtgggtccagccaggtaccaggcggaaggagcgcagcaccgacaagttgctcatgcgggacaggcccagctccat

SEQ ID NO: 20211 - DNA, 80 bp, synthetic construct
  source 1..80: mol_type = other DNA
ttgagaatgaggagaggaaactagtgctgctcttcagaatttagggaaacttcctctctcttctaggaacattcctgagt

SEQ ID NO: 20212 - DNA, 80 bp, synthetic construct
  source 1..80: mol_type = other DNA
atggcagggacctttccctactgtacctggaatggtaaccagcccataggtcgtcctctagtatctgttgaatagatgta

SEQ ID NO: 20213 - DNA, 80 bp, synthetic construct
  source 1..80: mol_type = other DNA
attctagttacattggactggagtggagcccaggtgtggggatttaaaaaaaaaaaaaaaacccaacaacttcccaggtg

SEQ ID NO: 20214 - DNA, 80 bp, synthetic construct
  source 1..80: mol_type = other DNA
atcctaggagaaaggttttaaccaagtccacaagctgcatgtgagtaactgcttccctttaactatgctaacactgggta

SEQ ID NO: 20215 - DNA, 80 bp, synthetic construct
  source 1..80: mol_type = other DNA
acacagtttatatctgtgatttaccaaatattgttcaattgctccccaaaatggttgtaccaaatccacactcttacaag

SEQ ID NO: 20216 - DNA, 80 bp, synthetic construct
  source 1..80: mol_type = other DNA
gcatctaatttatgaatgtgatgtgaggtagggatctaaattgattttcttccatgcagataaccattctcccagcatca

SEQ ID NO: 20217 - DNA, 80 bp, synthetic construct
  source 1..80: mol_type = other DNA
tacttggaatactgaggctgtaccccctaatattgttgaactctcgtattagttctaacagcctctctgtagattttcta

SEQ ID NO: 20218 - DNA, 80 bp, synthetic construct
  source 1..80: mol_type = other DNA
gtgtgtaggttttttctggttcaccatttttctgaatgtatagtcatatccttacggggctactcagtttcaacccctac

SEQ ID NO: 20219 - DNA, 80 bp, synthetic construct
  source 1..80: mol_type = other DNA
ggtgaccatgggtaactgaaaccatgtttccatggtttcaaaattgtggataagaggaactactgtactttctcatgcac

SEQ ID NO: 20220 - DNA, 80 bp, synthetic construct
  source 1..80: mol_type = other DNA
agaattagaatccagacattctgacttccaggagcagtctaacaacaacaacaatagcacagctatcatttgttttgagt

SEQ ID NO: 20221 - DNA, 80 bp, synthetic construct
  source 1..80: mol_type = other DNA
cctccaagatgtcctctatgatgattcccaccctcaaaagatccttctgtgtgcaggatcccttcttccttacccatgaa

SEQ ID NO: 20222 - DNA, 80 bp, synthetic construct
  source 1..80: mol_type = other DNA
tgaaacagatgaaaagacatggaaggacaggcaaggctacacagaacagagaaggctgggacagtgtggggatgtctaaa

SEQ ID NO: 20223 - DNA, 80 bp, synthetic construct
  source 1..80: mol_type = other DNA
atctaacatgctctaagataatgctaatagcaggataaagtacaatgcttacatatggctggtggggggctgtgtctttt

SEQ ID NO: 20224 - DNA, 80 bp, synthetic construct
  source 1..80: mol_type = other DNA
ggccagcttaactcacaagcaagttttaaattctcccaacttctcccctccttctttgccatctatgatagtttggttat

SEQ ID NO: 20225 - DNA, 80 bp, synthetic construct
  source 1..80: mol_type = other DNA
cctgagtattctaatagccctcatcctcatccctccccttagcagctttctatcacatgacttattgctacctgaaaata

SEQ ID NO: 20226 - DNA, 80 bp, synthetic construct
  source 1..80: mol_type = other DNA
catgtgcagtacaatgagatgattttctccttaatgagattaggaaattctattagcgctcccagctgctgacccgattc

SEQ ID NO: 20227 - DNA, 80 bp, synthetic construct
  source 1..80: mol_type = other DNA
ctggaacaggcttccccagatgatggtaatgaaggctttactagttgtgacatagttaactatcatccctctttatcacc

SEQ ID NO: 20228 - DNA, 80 bp, synthetic construct
  source 1..80: mol_type = other DNA
agagataatcctgtatcttctgggatgtctactcccctcaaatctatgtctctggagctgggagcctgaaacttaactgg

SEQ ID NO: 20229 - DNA, 80 bp, synthetic construct
  source 1..80: mol_type = other DNA
ttctagaaggtttagctggccaaaagtgtactggaatatgtggcatggggtagtgagaagaacaagtggatgcttctaat

SEQ ID NO: 20230 - DNA, 80 bp, synthetic construct
  source 1..80: mol_type = other DNA
ctcactggggccccttctgggttatggcatttccaagtcacctagtctagttgtgccaggggttcaaatagccatagcct

SEQ ID NO: 20231 - DNA, 80 bp, synthetic construct
  source 1..80: mol_type = other DNA
gcaacccagtttatgccccacagctcagtgaagctgagcttcacaaacctagtgccacgctgctggatcctgcctccgtg

SEQ ID NO: 20232 - DNA, 80 bp, synthetic construct
  source 1..80: mol_type = other DNA
gtcagggcataaatagaaaatacagtcagttgagaaaacaccaggagactcccctggcaggacaaggagacccggggtgg

SEQ ID NO: 20233 - DNA, 80 bp, synthetic construct
  source 1..80: mol_type = other DNA
tttgtcttaggcgacagttgtcaaagcatggtcctcgaaccagcatcatcagcatcaagtggaaactgcttagaaatgca

SEQ ID NO: 20234 - DNA, 80 bp, synthetic construct
  source 1..80: mol_type = other DNA
tcacaaagtcttccccagctgcagagcaagttcgcacctggatcactgaggtaaaggtccagggattcccagaccaagcc

SEQ ID NO: 20235 - DNA, 80 bp, synthetic construct
  source 1..80: mol_type = other DNA
gtgttctgttagttgcacagcctagctccctgcagaagccagcaccacatagcagaatgacagaaaagcatgtgtagaca

SEQ ID NO: 20236 - DNA, 80 bp, synthetic construct
  source 1..80: mol_type = other DNA
gacatagtggccaagggtaactcacccctttgaacatttctcatactgatgatagatttcacttctggcaagaatggttg

SEQ ID NO: 20237 - DNA, 80 bp, synthetic construct
  source 1..80: mol_type = other DNA
tagctcaatgcaggcctgggagccaccaggttccacatcaggtgcggatgtagccatctggttcaaccgatgcttccgtc

SEQ ID NO: 20238 - DNA, 80 bp, synthetic construct
  source 1..80: mol_type = other DNA
tattcaaatagctgagtgtggtttggaaaagcagtccactatcttggaaaaaatttaggttcagtgtaggccccaccgtg

SEQ ID NO: 20239 - DNA, 80 bp, synthetic construct
  source 1..80: mol_type = other DNA
ggatagcccagggcctccctcaggttttcttctggatttcaaccctcctaacataggacttcggcttgagtgccgtaagg

SEQ ID NO: 20240 - DNA, 80 bp, synthetic construct
  source 1..80: mol_type = other DNA
gacatttaatcaaaggctttgcatccagggtgtgtgacatttaaccgaaggtgtctggtatttaacaaaggacattggac

SEQ ID NO: 20241 - DNA, 80 bp, synthetic construct
  source 1..80: mol_type = other DNA
atactggtttcgcggctgtctcttctagttacagggagtgagtggaatactgtgcaggttagagagggaaccaaccgtcc

SEQ ID NO: 20242 - DNA, 80 bp, synthetic construct
  source 1..80: mol_type = other DNA
atggttaggagttgggagacttggttttagtctcagcattgcttctgattcagtctataactttgggcaagtgctaggtt

SEQ ID NO: 20243 - DNA, 80 bp, synthetic construct
  source 1..80: mol_type = other DNA
gacatgaaaagttctccctctctctgaaacctcagatgtgcctccccactctgttctcagctgatgatcaagcttcttat

SEQ ID NO: 20244 - DNA, 80 bp, synthetic construct
  source 1..80: mol_type = other DNA
acaggctacactcatgcctaggtgatctcatctggtctcctggctttaaataccatctgtatccccatagcttctaaatt

SEQ ID NO: 20245 - DNA, 80 bp, synthetic construct
  source 1..80: mol_type = other DNA
ccttcaataggtagattcagggattccaagcatcctagaaagtgagagctgaattgagcttctgataccacagcacacaa

SEQ ID NO: 20246 - DNA, 80 bp, synthetic construct
  source 1..80: mol_type = other DNA
tctcttggctgcaatttcattcttaatcatcttggaatccaggtcaccattcgcagtgggccaggggttgaaatattggt

SEQ ID NO: 20247 - DNA, 80 bp, synthetic construct
  source 1..80: mol_type = other DNA
acaactaggcagactgctttgggaagagagctgccccaacattctgttggtctcctgaaaactgcagccaaatgcagtaa

SEQ ID NO: 20248 - DNA, 80 bp, synthetic construct
  source 1..80: mol_type = other DNA
agaagttggcaggactgggaaaggcaaaagagggtagaagctgagccaagggctgccccaccgccatgggtaagttcctg

SEQ ID NO: 20249 - DNA, 80 bp, synthetic construct
  source 1..80: mol_type = other DNA
tgcctttctggtaacacggtgctgcctctgtgccctgcgggcttcgggcacccctcttttagccctggtggctcactgaa

SEQ ID NO: 20250 - DNA, 80 bp, synthetic construct
  source 1..80: mol_type = other DNA
aaaatatgcaagcaatgatgctaagagtgaatattcattgagcccttcctaggtaccagaatttgctctccgtgtccatc

SEQ ID NO: 20251 - DNA, 80 bp, synthetic construct
  source 1..80: mol_type = other DNA
tatccaggtagactcagtataatcacaggggtccttttaagcaaaagagaggcagagtgttgtgacatgaaattcaaccg

SEQ ID NO: 20252 - DNA, 80 bp, synthetic construct
  source 1..80: mol_type = other DNA
taccttttccagacacagcaatggcttagggtgacgtgtagcaagctcttgtctctctgccacttcactgctcaaaatcc

SEQ ID NO: 20253 - DNA, 80 bp, synthetic construct
  source 1..80: mol_type = other DNA
ctctctgaatgtgactgcggtaggatatggagttcagttggtttcttttatttaatcccagcaggaacacattctgcagg

SEQ ID NO: 20254 - DNA, 80 bp, synthetic construct
  source 1..80: mol_type = other DNA
tatatgaagtagtatacctcaagttaaaaaaaaatcatggagcacttacagatttctaggcctcacactggtgattctgg

SEQ ID NO: 20255 - DNA, 80 bp, synthetic construct
  source 1..80: mol_type = other DNA
cataactatttgcgaagctgccttatcacttttaggggaactataaaattcccaaggggcccagacggggtcttattcgg

SEQ ID NO: 20256 - DNA, 80 bp, synthetic construct
  source 1..80: mol_type = other DNA
attacgctgcatcactccaatggctctcctctgcaggctggagcttttttcagctgtggtttatataatttaatgctaac

SEQ ID NO: 20257 - DNA, 80 bp, synthetic construct
  source 1..80: mol_type = other DNA
gagatttagtttcaaaattatagtcacaaaaagaagggagcttttacagtccttgcccagctgttgtcacagcagaggct

SEQ ID NO: 20258 - DNA, 80 bp, synthetic construct
  source 1..80: mol_type = other DNA
cttcagcctaatcgccactcatcctctccccataagcttgactcacactaccagctgtggccttaaccctaaccccaatt

SEQ ID NO: 20259 - DNA, 80 bp, synthetic construct
  source 1..80: mol_type = other DNA
ccaaaccagcatctcaggctgcataattcctgtttttattccagaattccaaaattaaggtgattggaatatagatcacc

SEQ ID NO: 20260 - DNA, 80 bp, synthetic construct
  source 1..80: mol_type = other DNA
tcttttggtttcttaactgtcatcacttgagacatttctcagcttggagttgtcatccagatgttggcaccctagtgtac

SEQ ID NO: 20261 - DNA, 80 bp, synthetic construct
  source 1..80: mol_type = other DNA
aatagtgagcaaacacaacacactcaggcctcaaaagggcgccgctcgtccctggggaagtgtggattgagatttgtgaa

SEQ ID NO: 20262 - DNA, 80 bp, synthetic construct
  source 1..80: mol_type = other DNA
acagagtgtgcgtgtgcgggtgcaagcttacacctgcacatacgtctgttctagtaaaggtgtgtttttaatttgtatta

SEQ ID NO: 20263 - DNA, 80 bp, synthetic construct
  source 1..80: mol_type = other DNA
tggcctctggctctgacttacctgaactttgtgtcatttctgggtgtggattgggaccccagtctgccccacccttggac

SEQ ID NO: 20264 - DNA, 80 bp, synthetic construct
  source 1..80: mol_type = other DNA
cctccctctttccttctatcccacacatgcagccccctgctcctagatttagacattctccaaaattctgtgtgccctga

SEQ ID NO: 20265 - DNA, 80 bp, synthetic construct
  source 1..80: mol_type = other DNA
ccttggaatcggagcctctggaacacagcatgcaaataatattctttgccatgtaaatttatgcaaagcattgtgtggaa

SEQ ID NO: 20266 - DNA, 80 bp, synthetic construct
  source 1..80: mol_type = other DNA
ttgatatttgcacatgcttgacacacagaaagtgccaaatgaatttagttggtattgtggttattgttgttattattatt

SEQ ID NO: 20267 - DNA, 80 bp, synthetic construct
  source 1..80: mol_type = other DNA
aatgtggctactgtggactgagttgtgctattgtaaagtcacatccattttgcaggcttagtacaataaggaatgttgac

SEQ ID NO: 20268 - DNA, 80 bp, synthetic construct
  source 1..80: mol_type = other DNA
acattggtccgtccttgcacggggcctcagctaaccagctccccacaggctccgctcctttgaggctgcataggcattaa

SEQ ID NO: 20269 - DNA, 80 bp, synthetic construct
  source 1..80: mol_type = other DNA
ttgtcagcccctttacacatgcccaggtccatccacagggtatctagaatatgctgagtggcacttcgctgtcagccaag

SEQ ID NO: 20270 - DNA, 80 bp, synthetic construct
  source 1..80: mol_type = other DNA
actgtgaatacaagtcacccatctggggacgtgtccttaatttgatcataaaaggcgaggactggaagggacctgaagtc

SEQ ID NO: 20271 - DNA, 80 bp, synthetic construct
  source 1..80: mol_type = other DNA
agaagaagaaactgaagaggagagaaagaactgaagcctcagtgcatagacattctctcctgacaacaggcccagtcaca

SEQ ID NO: 20272 - DNA, 80 bp, synthetic construct
  source 1..80: mol_type = other DNA
tcattccatattgatcatcttaaaaagacacggtatgttctaggcccacggataggagagttgtgtctaaaaatagtctc

SEQ ID NO: 20273 - DNA, 80 bp, synthetic construct
  source 1..80: mol_type = other DNA
cagctcccttctatctctctcctccctcttcaaccatcaaactctttgaaagagctgtctatacatgctgtctccacgtc

SEQ ID NO: 20274 - DNA, 80 bp, synthetic construct
  source 1..80: mol_type = other DNA
gtcacttttcctttgctcttcatcaagcttgccaacccaaatttaacttgcccattcttcttctcatggtgcgccagggg

SEQ ID NO: 20275 - DNA, 80 bp, synthetic construct
  source 1..80: mol_type = other DNA
ccagtgtggaaggttatttttgttagaataagattcttgactattccggccaaaggtaaccacctctcctgtgaatgggc

SEQ ID NO: 20276 - DNA, 80 bp, synthetic construct
  source 1..80: mol_type = other DNA
caggcctacagccagggacttgtccccaacatcatttccccccatcctcatcaccaccactaacagtccccacacctctg

SEQ ID NO: 20277 - DNA, 80 bp, synthetic construct
  source 1..80: mol_type = other DNA
ctacccccatccctatctttattcttttttttttttcctgcagacccagggactcgatctttattcttttttgatgtagg

SEQ ID NO: 20278 - DNA, 80 bp, synthetic construct
  source 1..80: mol_type = other DNA
cgcgcccggcctgttgtttcccttcttttttctttttttcgtagagacaggttctcactatgttgcccaggctggtctca

SEQ ID NO: 20279 - DNA, 80 bp, synthetic construct
  source 1..80: mol_type = other DNA
atccctttgtatccatgggatgactgttgtaggatccgctgtggatatcaaactctgcagaagctcagtctcttatataa

SEQ ID NO: 20280 - DNA, 80 bp, synthetic construct
  source 1..80: mol_type = other DNA
ccggcctccagtgataatttaacacaactcataccagtatcacacaattccctggaactatgtgacaaccattattgttt

SEQ ID NO: 20281 - DNA, 80 bp, synthetic construct
  source 1..80: mol_type = other DNA
cagtcctagagattctcatccagaatgtttatggtggggcttgggaatctgaattttcatcgcatgctgtattagtttac

SEQ ID NO: 20282 - DNA, 80 bp, synthetic construct
  source 1..80: mol_type = other DNA
tttttttttagaaaaaaccctgactaatttcaaatgaccagtctttgagtttgctgactctttctgctgcttgatcaggt

SEQ ID NO: 20283 - DNA, 80 bp, synthetic construct
  source 1..80: mol_type = other DNA
cttcactagtcagcatggatagagattccaagggcctctcaatcctttactgaggatgtgtcttttctggacttgcggat

SEQ ID NO: 20284 - DNA, 80 bp, synthetic construct
  source 1..80: mol_type = other DNA
ctgctgcccttttctgttagcacttagattcaaacaaaacagaaacctgatccccccaaaagtccgaacattatacatac

SEQ ID NO: 20285 - DNA, 80 bp, synthetic construct
  source 1..80: mol_type = other DNA
ttcctgagcctctgtttccttggctataaagtggggacaatatcagcataatttcttttcttttttcagggggatagggt

SEQ ID NO: 20286 - DNA, 80 bp, synthetic construct
  source 1..80: mol_type = other DNA
gatatttactactgggccacaggtactgggtatgataagcagcataatgtgaaaataggacagtttaggctgatttgagt

SEQ ID NO: 20287 - DNA, 80 bp, synthetic construct
  source 1..80: mol_type = other DNA
atgtgttttctacttcttgatccaggacagccatatttcagcccggaaaaagtgtgtggaagtgcatacccctcctttgt

SEQ ID NO: 20288 - DNA, 80 bp, synthetic construct
  source 1..80: mol_type = other DNA
atacagattttgtgaacataggttttagtttttcttgagtgaatactcaggagaaggatttgctgggtcatgtggtaagt

SEQ ID NO: 20289 - DNA, 80 bp, synthetic construct
  source 1..80: mol_type = other DNA
gaggatcacttgagcccaggagttcagagactgcaatgacctatgatcacgccactgcatttcagcctgggcaagagtga

SEQ ID NO: 20290 - DNA, 80 bp, synthetic construct
  source 1..80: mol_type = other DNA
attcgagggtcacaatgttttttcttctgttaaatagaaacacttctaccgccagctcttagtgtacaagatcgggtagt

SEQ ID NO: 20291 - DNA, 80 bp, synthetic construct
  source 1..80: mol_type = other DNA
atctattgacctgtcttccactaattctttccttgatgatgtcaaatctcatgatgggcctgttgaaaccattctgcata

SEQ ID NO: 20292 - DNA, 80 bp, synthetic construct
  source 1..80: mol_type = other DNA
tgtgcccagcctgtgtctgtggttttatacactcatgctagcccacacttggcttttaacaattcattgcaaattttagt

SEQ ID NO: 20293 - DNA, 80 bp, synthetic construct
  source 1..80: mol_type = other DNA
tttccaactttctactttcttgggggaagccaaaacctctttgatcttatgttgattgtcacatgaaaacagagccctca

SEQ ID NO: 20294 - DNA, 80 bp, synthetic construct
  source 1..80: mol_type = other DNA
agcatgggtaatatgtaaaccattgggagcagctgttccaataaaacgacttgcaaatataggctcacacagtttgccac

SEQ ID NO: 20295 - DNA, 80 bp, synthetic construct
  source 1..80: mol_type = other DNA
ggcacactgcttaggagtcaacatcttcatcattgggctttctttaaaacgtgcactttgtaatttgaaagagaattatt

SEQ ID NO: 20296 - DNA, 80 bp, synthetic construct
  source 1..80: mol_type = other DNA
taaactgaagctttcttctccttataggttgccatcattttcttgatctctgcaatagctttccctggattcagaccctt

SEQ ID NO: 20297 - DNA, 80 bp, synthetic construct
  source 1..80: mol_type = other DNA
ctctgaagttcacacaagaatctgacttctagggaggtggctgggtggagtgggagggagaattttcactgtatatcctt

SEQ ID NO: 20298 - DNA, 80 bp, synthetic construct
  source 1..80: mol_type = other DNA
ggtttccaggcaaaaaataagtgaattctacagcttggatttcatgttttcaaacacacagtgtgatctttttttacggc

SEQ ID NO: 20299 - DNA, 80 bp, synthetic construct
  source 1..80: mol_type = other DNA
ctggcgccagcctctagagctgtgcgtcaaataaacttctttataaaattacccagtctgaaattctgtgatagtaccac

SEQ ID NO: 20300 - DNA, 80 bp, synthetic construct
  source 1..80: mol_type = other DNA
ctctgggagtgcagaggaaagggaattcactcagcttagatgcctcatctccatactctttaattcttgtccatctttca

SEQ ID NO: 20301 - DNA, 80 bp, synthetic construct
  source 1..80: mol_type = other DNA
ctacaagtcttatgttacaaatcctatgagagggagagggggagcctctgaccaccaggcaaacggaaatacattttaaa

SEQ ID NO: 20302 - DNA, 80 bp, synthetic construct
  source 1..80: mol_type = other DNA
tcaatctgcccaacaagtcccaaacacaaaccggactttctgagtttggaaacaacagaaatggattaaaaacagcaaaa

SEQ ID NO: 20303 - DNA, 80 bp, synthetic construct
  source 1..80: mol_type = other DNA
gtcgccctatgttccccaggctgaaaattatagcttatttaaaaaatgatggagcctctctgaacctattttggtttggg

SEQ ID NO: 20304 - DNA, 80 bp, synthetic construct
  source 1..80: mol_type = other DNA
actctgacttgcaggccactgtgctgaccctcactatcttgatggtgacagactgggcacacttactaggactccccttt

SEQ ID NO: 20305 - DNA, 80 bp, synthetic construct
  source 1..80: mol_type = other DNA
ttcattttgcccccagtgagggaacagttctgacttagtggtcactttttaaagcccaggcaatttacatactggtttct

SEQ ID NO: 20306 - DNA, 80 bp, synthetic construct
  source 1..80: mol_type = other DNA
ctcgtccactctatgccaggcagaagccagactcttttcctttgtcatgaatatatgcaaagattacaaaaggaaaaatg

SEQ ID NO: 20307 - DNA, 80 bp, synthetic construct
  source 1..80: mol_type = other DNA
atggcttgagttccaaaaactactctatgaccatgtggcaaccttgaggttagaagccacatgccaagtatggcactgga

SEQ ID NO: 20308 - DNA, 80 bp, synthetic construct
  source 1..80: mol_type = other DNA
tgccgccatgtgcggcgaattcaaaaaaattctttgtaggttgggtgaagtggctcacacctggaatcccagcactttgg

SEQ ID NO: 20309 - DNA, 80 bp, synthetic construct
  source 1..80: mol_type = other DNA
cccagtcggttatcactttcataagactagaaaagacagtaagactctccttctcctgtaaatcttagaaagagtgtaag

SEQ ID NO: 20310 - DNA, 80 bp, synthetic construct
  source 1..80: mol_type = other DNA
tcggtcttcactgcaccctgtgcaatttttgctatacctgagaaccacctgaatcaactttctttaaagtatctcttggg

SEQ ID NO: 20311 - DNA, 80 bp, synthetic construct
  source 1..80: mol_type = other DNA
atagaatgctcctgaaggaaagtaaactcagaaaccagaacttgcaccatggttagaattttggatgcatttacccaaga

SEQ ID NO: 20312 - DNA, 80 bp, synthetic construct
  source 1..80: mol_type = other DNA
cccacaggattgctggaggtgagttaatacacacgagatctttacagcagcatctgacatataaatcatagtttaactat

SEQ ID NO: 20313 - DNA, 80 bp, synthetic construct
  source 1..80: mol_type = other DNA
gactcagtctgtccacattctttgcctctgtttaccagggtcttggaaattctttttcatgatctgaggctcttatatat

SEQ ID NO: 20314 - DNA, 80 bp, synthetic construct
  source 1..80: mol_type = other DNA
ctgcagatcatactgggacagagaaaaatattaaaaagtcaaagtcctctctttaagctgtttcatgctaaatttcctaa

SEQ ID NO: 20315 - DNA, 80 bp, synthetic construct
  source 1..80: mol_type = other DNA
agtgtatagaaatccaatttttgtttttttaacagtacttacaggcttttttctaggtaagcagggttttacatatataa

SEQ ID NO: 20316 - DNA, 80 bp, synthetic construct
  source 1..80: mol_type = other DNA
ttgttgcccaggctggtctccaactcccaggctcaagcaattctcctgcttcaggccaggcacagtggctcacacctgca

SEQ ID NO: 20317 - DNA, 80 bp, synthetic construct
  source 1..80: mol_type = other DNA
aaacaatcatgttacctgtgactacagttagtttaatttcttcctttccaagcttacatatgccttctacttcttttact

SEQ ID NO: 20318 - DNA, 80 bp, synthetic construct
  source 1..80: mol_type = other DNA
acctgtttagagttactattgtgcaactttatgtaatgcaagaatcctgctacattattataggtctatttacctgctgt

SEQ ID NO: 20319 - DNA, 80 bp, synthetic construct
  source 1..80: mol_type = other DNA
atagctcatagcagcctcaagttcctaagctcaagctgtcttcctgcttcagcatcccaagtagctaggactacaggtat

SEQ ID NO: 20320 - DNA, 80 bp, synthetic construct
  source 1..80: mol_type = other DNA
caacatggcgaaaccccaactctactacaaaaattagacggtgtgtgacgcgcgcctgtagtcccagctactcaggaggc

SEQ ID NO: 20321 - DNA, 80 bp, synthetic construct
  source 1..80: mol_type = other DNA
ccaactgttagtcccgttacttcccataccaacttggacttgtcctcagcaaaatcatgtaagagtaaaatggtaatttg

SEQ ID NO: 20322 - DNA, 80 bp, synthetic construct
  source 1..80: mol_type = other DNA
gctgagtatttgaaaattttgtctatttaagaaggttatatatcaattaatgctacctcattaacagcacttacttgtca

SEQ ID NO: 20323 - DNA, 80 bp, synthetic construct
  source 1..80: mol_type = other DNA
cagaaatagaaaactaacacgccagtccaatttttaacattttaaccacatccctaccttgtccattcaaggcaagtttc

SEQ ID NO: 20324 - DNA, 80 bp, synthetic construct
  source 1..80: mol_type = other DNA
gaaagtacagggagctctggatgaatacagcagagacttcaatgagtgaagagtcagagaaggcttcctcacatgtcatc

SEQ ID NO: 20325 - DNA, 80 bp, synthetic construct
  source 1..80: mol_type = other DNA
attttgtaaactgacatgaacatctaatgccaccttgtggtatttgggaggaagtgagaggaaagattcctgaaggtatc

SEQ ID NO: 20326 - DNA, 80 bp, synthetic construct
  source 1..80: mol_type = other DNA
ctccagcctgggtgacagagtgagacgctgtttcaaagaaacaaaacaaaacaaaaagaagaaaataatactgagactcc

SEQ ID NO: 20327 - DNA, 80 bp, synthetic construct
  source 1..80: mol_type = other DNA
accagaatactgacagtgctagtcaagataggggacattcccataagcacaggatcactaacattgcccttttatagccc

SEQ ID NO: 20328 - DNA, 80 bp, synthetic construct
  source 1..80: mol_type = other DNA
tgcccggcctttattttttatttttatagacacatggtctagctttattgcccaggctggagatcatggctcactgcagc

SEQ ID NO: 20329 - DNA, 80 bp, synthetic construct
  source 1..80: mol_type = other DNA
taaagcctgatttagtattgtcagtgggcaacaggcattaggctctatcaagctgggtatcagaaccacaaggcctgtgg

SEQ ID NO: 20330 - DNA, 80 bp, synthetic construct
  source 1..80: mol_type = other DNA
caatatttggtggggcaaagggggtttaccagaatgaaagaagattctgaaatcaaaatcaccagagtggtcatggttct

SEQ ID NO: 20331 - DNA, 80 bp, synthetic construct
  source 1..80: mol_type = other DNA
ctgagtaaaatacaaggtgcaggcttgctgaaaagtgtgattggtgatgcttgaaatccaagctctatcacttacaagct

SEQ ID NO: 20332 - DNA, 80 bp, synthetic construct
  source 1..80: mol_type = other DNA
aagctcattatcaatcatcaatttaatactgagaggatgtcagcttgaggctctggtaggctgtcttcttcctctatctc

SEQ ID NO: 20333 - DNA, 80 bp, synthetic construct
  source 1..80: mol_type = other DNA
aggtccgtattattatatgacctttagagtcagaaacactgagaggatactagtgaaactgtggtgacactgctttaagg

SEQ ID NO: 20334 - DNA, 80 bp, synthetic construct
  source 1..80: mol_type = other DNA
aaaataacttcaaggtcagccacccatgggtcctacgatttcgagagcgtatttagacatttagcttcggagagagagat

SEQ ID NO: 20335 - DNA, 80 bp, synthetic construct
  source 1..80: mol_type = other DNA
ttggaattagtgtttaaaagctgaggatcattatagtcattaagtgtatccatacagtatcattttgagttgtgcagcgc

SEQ ID NO: 20336 - DNA, 80 bp, synthetic construct
  source 1..80: mol_type = other DNA
aatgccaagaaaggtatatttttcattagtggtaatctgaagctctcgtggaaaggacacctccatttctcataagggat

SEQ ID NO: 20337 - DNA, 80 bp, synthetic construct
  source 1..80: mol_type = other DNA
ttttgaaatatgtgtaccttgtggagctattgacatatgcattacatctttgtgggggaacacttgaaatctattcttag

SEQ ID NO: 20338 - DNA, 80 bp, synthetic construct
  source 1..80: mol_type = other DNA
tgtcatggcttttgaatatatgctctctattttgtatgttctctaaacagttcagggaccagctagagatgaacaaccag

SEQ ID NO: 20339 - DNA, 80 bp, synthetic construct
  source 1..80: mol_type = other DNA
ggtactatggatccaaaatattttgatagtttgagctcaaagtctagcagggagataaatagattaattattaaaccaca

SEQ ID NO: 20340 - DNA, 80 bp, synthetic construct
  source 1..80: mol_type = other DNA
tttcctagctgttaatgataggattgggtgatgccatcatatggggggggtggtgaaagaaaagaaatcaaggatgactt

SEQ ID NO: 20341 - DNA, 80 bp, synthetic construct
  source 1..80: mol_type = other DNA
agtttctgtgagggccttgtagaaagtttacattgatatttgtctgggaaacaatagcgctagacagagagggcacgcca

SEQ ID NO: 20342 - DNA, 80 bp, synthetic construct
  source 1..80: mol_type = other DNA
attttgggttatggagggtttcagattctggattttccacagtaggggtgctcaacctgtaccgtgtaaactttggatca

SEQ ID NO: 20343 - DNA, 80 bp, synthetic construct
  source 1..80: mol_type = other DNA
ctgaccttttaaattcatccgtttgtagtagatatttgctaaagctaagctatatggttgcagttaccagtgggcttatt

SEQ ID NO: 20344 - DNA, 80 bp, synthetic construct
  source 1..80: mol_type = other DNA
tacgacagtgggcagttgtagacagttgactgaaacttaagtaattgtggtgactatttatggtttgtgtgtatgtgtgt

SEQ ID NO: 20345 - DNA, 80 bp, synthetic construct
  source 1..80: mol_type = other DNA
cagttgattttcagatttttcatttgtcccaaataatatatttcatagaaatataatcagctaggcatggtggttcatgc

SEQ ID NO: 20346 - DNA, 80 bp, synthetic construct
  source 1..80: mol_type = other DNA
tgaatattttttaaatatacttgccctgccacccaacaagaagttgtgctttcattgccagacctgtgtattgggtgggt

SEQ ID NO: 20347 - DNA, 80 bp, synthetic construct
  source 1..80: mol_type = other DNA
tgatgcaatcacagctcactgcagcttctacctccctgggctcagaagatcctcccacctcagcctcccgagtaactggg

SEQ ID NO: 20348 - DNA, 80 bp, synthetic construct
  source 1..80: mol_type = other DNA
agtgtcactctggctctcctaggctcctgcttccctaacaaaaccttttctaaaaagatactgcaaattttttttttttt

SEQ ID NO: 20349 - DNA, 80 bp, synthetic construct
  source 1..80: mol_type = other DNA
cctcacttttactcaaccaaaatactgctatgtagatgaggtgaacccttcagggtagagggagatgacataaggattat

SEQ ID NO: 20350 - DNA, 80 bp, synthetic construct
  source 1..80: mol_type = other DNA
agctgggattacagacatgaacctccatgcccggctaatttttgtcttttagtaagagatgaggttttgccatgttgtcc

SEQ ID NO: 20351 - DNA, 80 bp, synthetic construct
  source 1..80: mol_type = other DNA
tagacattcctgctcaaaaagtgagaaaatggaaggaaaaaaggagtctctggttctaaccaggtttgaaattcagccag

SEQ ID NO: 20352 - DNA, 80 bp, synthetic construct
  source 1..80: mol_type = other DNA
tgacagtaaatatctttttttttttttttttctgagacagagtctcacactattgccagggctgcaatgcagtggcgcag

SEQ ID NO: 20353 - DNA, 80 bp, synthetic construct
  source 1..80: mol_type = other DNA
caccgtgctcagcttgctttttatttaacagctcttccctcagtctgtttctttcctttcacattttactataaagagca

SEQ ID NO: 20354 - DNA, 80 bp, synthetic construct
  source 1..80: mol_type = other DNA
tttatttacccatttataaattgatggacgtttgagctgtttccactttttggctattagaaataatgctgctatgacca

SEQ ID NO: 20355 - DNA, 80 bp, synthetic construct
  source 1..80: mol_type = other DNA
cagaaccagcaatgctacattgagttcttcagtcacatcatgctgaccctgcttccgtcatctcatttcttctttgactc

SEQ ID NO: 20356 - DNA, 80 bp, synthetic construct
  source 1..80: mol_type = other DNA
tgttttatgatttatgcatttttggcaggaatacccctgcggtaatgctatacttctgtcagtacattgtatcaggaggc

SEQ ID NO: 20357 - DNA, 80 bp, synthetic construct
  source 1..80: mol_type = other DNA
taatcctgtttgtagaaactggacatgccactaaaacagaaggaggctaataagtgatcttatttcttgcttctcaatcg

SEQ ID NO: 20358 - DNA, 80 bp, synthetic construct
  source 1..80: mol_type = other DNA
acatcttgattttctatactagactcttacctaatgttcaaacagggcctagtgaagaagacttgtctttgctccatggt

SEQ ID NO: 20359 - DNA, 80 bp, synthetic construct
  source 1..80: mol_type = other DNA
ttgtgcaatctgtttcacactcttgtcatcaattagcataaaattgttcatcccagttaggaggctgactgtgtcagaat

SEQ ID NO: 20360 - DNA, 80 bp, synthetic construct
  source 1..80: mol_type = other DNA
gttttcttccatcagtgttatacctggagaaatagagggacccaggttgtattacagtgattgctttctttctttttctt

SEQ ID NO: 20361 - DNA, 80 bp, synthetic construct
  source 1..80: mol_type = other DNA
ttgacccatgtttctccttgcgaaaggagttttgagttataatcatttttttttttctcagccctatcagtgatgcagtc

SEQ ID NO: 20362 - DNA, 80 bp, synthetic construct
  source 1..80: mol_type = other DNA
acttggctgtttcattggccctagtctccgcctcctttgaaactcagcacttgatttagagggaacagtaagtctcttaa

SEQ ID NO: 20363 - DNA, 80 bp, synthetic construct
  source 1..80: mol_type = other DNA
catatttttacttttttagctttcctttatttagccttatagcatactttgctctcctacccccaccaaaaacagaaaca

SEQ ID NO: 20364 - DNA, 80 bp, synthetic construct
  source 1..80: mol_type = other DNA
gaaatgctccaatgcactattagcacatactcaacaagacttctgttccaagttgatagtcctgggacctttgctggcaa

SEQ ID NO: 20365 - DNA, 80 bp, synthetic construct
  source 1..80: mol_type = other DNA
cagtggctctagtgtagggatcctgtatttaaggaactgctgatgagacattggcaggaattatctgaatctaagcctct

SEQ ID NO: 20366 - DNA, 80 bp, synthetic construct
  source 1..80: mol_type = other DNA
gcctgggagacagagcgagactccgtctcaaaaaataaaataaaataaaaaattagcctggaatggtggcatgcatctat

SEQ ID NO: 20367 - DNA, 80 bp, synthetic construct
  source 1..80: mol_type = other DNA
tttgcttactgtgctccagccacactggtgtttgaactcattggaacaggcaaaattatttcctacctgagaggcattgc

SEQ ID NO: 20368 - DNA, 80 bp, synthetic construct
  source 1..80: mol_type = other DNA
agccaaatctgcgtcttttattagactgtaaagtcttcaaagagtggatactctatctatcttatttaccattcataccc

SEQ ID NO: 20369 - DNA, 80 bp, synthetic construct
  source 1..80: mol_type = other DNA
gaaattcctttatggaaaggcatagggattggaaatctcccggatcattggatgattatgacgaggtctgtttctttttt

SEQ ID NO: 20370 - DNA, 80 bp, synthetic construct
  source 1..80: mol_type = other DNA
gacagaagataaggctagaaagtgggccaaatggtgaaggactttgactgccatgctgtagaccatgaaaagccattaaa

SEQ ID NO: 20371 - DNA, 80 bp, synthetic construct
  source 1..80: mol_type = other DNA
tctgtatatgaattgtacaattagcttgaatggatataagaatggtcctgcatgttttgggtagtctttaaaaacagtca

SEQ ID NO: 20372 - DNA, 80 bp, synthetic construct
  source 1..80: mol_type = other DNA
accttgaaaaagttatttgtcaccacacctgccaccaagcctcagtatttttgtccacaaatttggataatacctttttt

SEQ ID NO: 20373 - DNA, 80 bp, synthetic construct
  source 1..80: mol_type = other DNA
aatattcagtgtttattctctagagtccaaaggagagaggcattgaacctggaaggcacaaattatccagtcagtggaga

SEQ ID NO: 20374 - DNA, 80 bp, synthetic construct
  source 1..80: mol_type = other DNA
aaaatgcttctcagaaatgctttactttacctcagtacgtgagtactcttgacctcaagagaggttgtggggaagcagat

SEQ ID NO: 20375 - DNA, 80 bp, synthetic construct
  source 1..80: mol_type = other DNA
ccctcataataatctgagaaacaggagtatcttcatttaagagcttaagaaactgaagtggccgaggtgggtgggaggcc

SEQ ID NO: 20376 - DNA, 80 bp, synthetic construct
  source 1..80: mol_type = other DNA
tggtgctcctaagtcaaggtaaatacctaacacttttgttttattagtttgttagatccaaacagcttatttatttctta

SEQ ID NO: 20377 - DNA, 80 bp, synthetic construct
  source 1..80: mol_type = other DNA
tgatgtgggtactcttttttgcttccccaaaatattttttggtgattatgggaaacaactggcctcttctttttttcttt

SEQ ID NO: 20378 - DNA, 80 bp, synthetic construct
  source 1..80: mol_type = other DNA
ccaattcatctgttttttcttttgtcatttatgattttggtgtcatctgtgaaaccactgcctaatccaagatcatgaag

SEQ ID NO: 20379 - DNA, 80 bp, synthetic construct
  source 1..80: mol_type = other DNA
tcatattagttgtaacttatgagcagctgtgacaagctacttggttttctcctcaggggtctctctttttggcatgtcgg

SEQ ID NO: 20380 - DNA, 80 bp, synthetic construct
  source 1..80: mol_type = other DNA
gtgttacctggcagtcctgctggtggtgtagctgagcaatggtataggcctcacagatacttgcagggtctcattgggaa

SEQ ID NO: 20381 - DNA, 80 bp, synthetic construct
  source 1..80: mol_type = other DNA
tagattggaaactgtccatgttgcctcctatgtgacctcatcgtctgctcaaaactggtttctaaaattagccaggtatg

SEQ ID NO: 20382 - DNA, 80 bp, synthetic construct
  source 1..80: mol_type = other DNA
catagccttagagacaagcactttctggatttcagtctggtccaatagacagtttaatggaataaaaaaaatgagagact

SEQ ID NO: 20383 - DNA, 80 bp, synthetic construct
  source 1..80: mol_type = other DNA
aatatccctaagacacaagagagtcaaaattagtgttttgttaaatgtggggctgggggcatggtagctcatgtctgtaa

SEQ ID NO: 20384 - DNA, 80 bp, synthetic construct
  source 1..80: mol_type = other DNA
aatgagaccccgttctccacaaaaaggagaaaatatatgttttttaatgaagtttatttatatataaaatatataaatat

SEQ ID NO: 20385 - DNA, 80 bp, synthetic construct
  source 1..80: mol_type = other DNA
caccacacaatagaacctgattttctgtcattggaataagtggataataggttccatactgtgggttttgagaagggtaa

SEQ ID NO: 20386 - DNA, 80 bp, synthetic construct
  source 1..80: mol_type = other DNA
gatttccagaaaagcctcttaattttatgctttctcatcgaagtaatgtaccctttttttctgaaactgaattaaatact

SEQ ID NO: 20387 - DNA, 80 bp, synthetic construct
  source 1..80: mol_type = other DNA
aaataccgaaatcacagcaatgaccactgtagtctaggggtccagatgtttacccgaaggtatatttcacttgctgtgag

SEQ ID NO: 20388 - DNA, 80 bp, synthetic construct
  source 1..80: mol_type = other DNA
tcactaatggtcatgcctttagcaggacttcctacctgtaggggggactcttgtgtccaactttgtcaaatgaagaccta

SEQ ID NO: 20389 - DNA, 80 bp, synthetic construct
  source 1..80: mol_type = other DNA
atgtagcctgtcaaactgaatttctgatctcccctaatctgttcctcctgcactcttgccccatctgaattaatggcatt

SEQ ID NO: 20390 - DNA, 80 bp, synthetic construct
  source 1..80: mol_type = other DNA
atttttactgtatttgtttgctgttgtgcctctagagcctagaactactctctggtacgtgacatatagcactcagtaaa

SEQ ID NO: 20391 - DNA, 80 bp, synthetic construct
  source 1..80: mol_type = other DNA
ccgtgcccagcctaaaggggttttaattatctggttttgtaggactggttaggagaatgagttgttgttgttgatgttgt

SEQ ID NO: 20392 - DNA, 80 bp, synthetic construct
  source 1..80: mol_type = other DNA
taataatacaaaaattaagctgggcgtggtggcacacgcctttagtcccagctacttgggagactgaggcagaagaaccg

SEQ ID NO: 20393 - DNA, 80 bp, synthetic construct
  source 1..80: mol_type = other DNA
ctggcagttacaacaaaaagttaaccttagagttaccatctgactcggcgatctacttttaggtgtatacccaagagaac

SEQ ID NO: 20394 - DNA, 80 bp, synthetic construct
  source 1..80: mol_type = other DNA
cctattatatttcatataaaattcagattccttatcatgaccttcaagaccctatgcaaccgacccctgccttcctctga

SEQ ID NO: 20395 - DNA, 80 bp, synthetic construct
  source 1..80: mol_type = other DNA
acatacacacgcaaaaggctatacagaatcccctaaagaagcaaacagtgacagtggagtggcaaatggagacattgcat

SEQ ID NO: 20396 - DNA, 80 bp, synthetic construct
  source 1..80: mol_type = other DNA
tctgaatatacagaagttccatttaagggcaagtttccctgtagatgtatcaaaatactaccaactgtaaattgagattt

SEQ ID NO: 20397 - DNA, 80 bp, synthetic construct
  source 1..80: mol_type = other DNA
tgctgtcttctatcaatatagagtaactgggactaagcacattttactcaccaaggaccttactgggaagctgaggcaaa

SEQ ID NO: 20398 - DNA, 80 bp, synthetic construct
  source 1..80: mol_type = other DNA
tcagaactgtgctttagaaataatttgggtaccattaggtgggttaataagctagaggtagaaggacatgtgaggggata

SEQ ID NO: 20399 - DNA, 80 bp, synthetic construct
  source 1..80: mol_type = other DNA
taggttttgctgacagctatgtaaagaatggatttgtgggaggtaagcatggaaacagattattttagtgacccagaaaa

SEQ ID NO: 20400 - DNA, 80 bp, synthetic construct
  source 1..80: mol_type = other DNA
ttacagaccactgcacccggccaaaacatattatttagtttgcaaaaagaaatcttctggagccagaccaaagtaagtct

SEQ ID NO: 20401 - DNA, 80 bp, synthetic construct
  source 1..80: mol_type = other DNA
tgaaactccatcccccccaaaagaaaaactgatatttatctgaaaaagcagagagcagagcaatgtgtgtatcttgcctt

SEQ ID NO: 20402 - DNA, 80 bp, synthetic construct
  source 1..80: mol_type = other DNA
agcttcagaacggtgtctatgagattaaaatacccaaatggtcatttccaatgtggttctaactctaactttcatcagtg

SEQ ID NO: 20403 - DNA, 80 bp, synthetic construct
  source 1..80: mol_type = other DNA
taagaagtaaattgcaatatcatcaggcctatgtataaaacttaaaaacgtaaaactaagggaggctgggcgcggtggct

SEQ ID NO: 20404 - DNA, 80 bp, synthetic construct
  source 1..80: mol_type = other DNA
ggaggtagtttgggagaaaccaagcagtatgaaacagtcttgacaaaaccaatgtccttcctcttatccacccttctacc

SEQ ID NO: 20405 - DNA, 80 bp, synthetic construct
  source 1..80: mol_type = other DNA
tcctcttcatcaggaaggggaaatagggcagctagatttagattggagcagtatttaacagctaaaaaggaagcagacaa

SEQ ID NO: 20406 - DNA, 80 bp, synthetic construct
  source 1..80: mol_type = other DNA
gagagagagatgcataagtcataaataccaaaatacaagaaaacatcttgctttaaagtgacaatatgcacaataggagg

SEQ ID NO: 20407 - DNA, 80 bp, synthetic construct
  source 1..80: mol_type = other DNA
acatctggtggctaattttgtatgtttagtagagacggggtttctttatgttgatcaggctggtctcggaactcccgacc

SEQ ID NO: 20408 - DNA, 80 bp, synthetic construct
  source 1..80: mol_type = other DNA
aaatgacagaattccagaagaaagcatggaaaatttcaggtgtatttcagaggtggacagattagttaaaaaaattaacg

SEQ ID NO: 20409 - DNA, 80 bp, synthetic construct
  source 1..80: mol_type = other DNA
gcctccgcatctccacatccctggagccccattgacattccctatccacagctgctacccatggaaatgcaagcagcctt

SEQ ID NO: 20410 - DNA, 80 bp, synthetic construct
  source 1..80: mol_type = other DNA
tgtgttctgcttccatctcctcacaaagctgtgcgaacagatgtgagttaagggcatgtgctttgatgttgataatttta

SEQ ID NO: 20411 - DNA, 80 bp, synthetic construct
  source 1..80: mol_type = other DNA
cagggtgatttgtttccatgtggcaaagcagttttgaaagtttcatggctcttttggatagttggtcaccacatattata

SEQ ID NO: 20412 - DNA, 80 bp, synthetic construct
  source 1..80: mol_type = other DNA
tttgtatagggtgagaggcggggggagtgtctagtctcatttttctgcatatggatgtccagttttcccagcaccattta

SEQ ID NO: 20413 - DNA, 80 bp, synthetic construct
  source 1..80: mol_type = other DNA
tgagttttttggtggagtctttaggtttttctatatataagatcatgtcatctgcaaacagacaatttggcttcctcctt

SEQ ID NO: 20414 - DNA, 80 bp, synthetic construct
  source 1..80: mol_type = other DNA
tgttggtaaggatgtgaagcaactggaacccttgtgcaatgttggtgggaatgtgaaatactgtgagctctgtggaaaac

SEQ ID NO: 20415 - DNA, 80 bp, synthetic construct
  source 1..80: mol_type = other DNA
agatttcctgcttctcatccagtctctccttcaccggaggttgcacccttttcccccaactccaaaaaaagaaaaatcac

SEQ ID NO: 20416 - DNA, 80 bp, synthetic construct
  source 1..80: mol_type = other DNA
caaggctgcaggtacagattttaaaggaggattcaaccatccagctatcagacagaaagcagaaccaaaggaaatcctca

SEQ ID NO: 20417 - DNA, 80 bp, synthetic construct
  source 1..80: mol_type = other DNA
acttttaggctcgtcaatttgtggtcacagtacagctggaatggcttcaagtaccacattctcctttgattgattcaaag

SEQ ID NO: 20418 - DNA, 80 bp, synthetic construct
  source 1..80: mol_type = other DNA
gtttcctgtcctccctcatttctgtttaacagagatactaaccatagaatcattggattcttaaaaaaatgaggaacaaa

SEQ ID NO: 20419 - DNA, 80 bp, synthetic construct
  source 1..80: mol_type = other DNA
tattggacttatagctccacatagctggggaggcctcataatcacagtggaaggcaaggaggggcaagtcacatctcaca

SEQ ID NO: 20420 - DNA, 80 bp, synthetic construct
  source 1..80: mol_type = other DNA
tgctaaatttgtggccagggcacctcctccctttcccccaaactggtttcatctccctcgaagctggtttctctccctca

SEQ ID NO: 20421 - DNA, 80 bp, synthetic construct
  source 1..80: mol_type = other DNA
ggttcctttcttctccctcttcacgtcaatgtactttggttgtctaaaatgcgttgaaagccttattttctgtactttat

SEQ ID NO: 20422 - DNA, 80 bp, synthetic construct
  source 1..80: mol_type = other DNA
cttgggcgacagagcaagactctgtctcaaaaaaaaaaaaaaaaaaaaagacaccagaagctcacagacttgatggacag

SEQ ID NO: 20423 - DNA, 80 bp, synthetic construct
  source 1..80: mol_type = other DNA
aaataatccttgcagtgttacaacagtgtgcccgtgtagagaactgttttgcaaagagctcgatcaatgatgtcatcttt

SEQ ID NO: 20424 - DNA, 80 bp, synthetic construct
  source 1..80: mol_type = other DNA
cttctctatcaggagatccagcaacaaacaccctgttatgtaaatttctttcaaagataaattcgaaagcccctccattc

SEQ ID NO: 20425 - DNA, 80 bp, synthetic construct
  source 1..80: mol_type = other DNA
ggcggagggatctgcgcatcaaagctagcgaggcgagcgaagtttggccgggggttggactttccttcccggaggcggca

SEQ ID NO: 20426 - DNA, 80 bp, synthetic construct
  source 1..80: mol_type = other DNA
ttgacagattccttcttcgttctttctttgccttcgggattagcatttttatcgagtatttttagactcggttgtgccag

SEQ ID NO: 20427 - DNA, 80 bp, synthetic construct
  source 1..80: mol_type = other DNA
acttcagaggaggtggtgtgatgtgatggtcagagagacctgggatttggttccagctctggttgttaattcttctgtat

SEQ ID NO: 20428 - DNA, 80 bp, synthetic construct
  source 1..80: mol_type = other DNA
tccaaagtcctgctgagactttggaagcctaagacgtgtgaacgctttggatgattctgagagttcaagccaacctgccc

SEQ ID NO: 20429 - DNA, 80 bp, synthetic construct
  source 1..80: mol_type = other DNA
ccagtttataagaatggaatcaaagcatttgccgctgaatgagagttggtgtgtgagcgttatatgaggaataaggagct

SEQ ID NO: 20430 - DNA, 80 bp, synthetic construct
  source 1..80: mol_type = other DNA
gcctgtgagaagcttacacatcagtaagggaaacatgaatagggcattatttgagtatctaactgctatctctttctcat

SEQ ID NO: 20431 - DNA, 80 bp, synthetic construct
  source 1..80: mol_type = other DNA
caagggttatccaaaggaagctttttggactgcagtatgatgttgggaactttttggtacatggggatagttccctataa

SEQ ID NO: 20432 - DNA, 80 bp, synthetic construct
  source 1..80: mol_type = other DNA
cagtacagccattattctgcgtgagctccttaatgaaataaataagaccaagcagggcttgcttcaaattggaatcagct

SEQ ID NO: 20433 - DNA, 80 bp, synthetic construct
  source 1..80: mol_type = other DNA
aaacaaatctatagcatactatccactgttggttatctaagacccttcctataaacagcagcctgccacagtggcaactg

SEQ ID NO: 20434 - DNA, 80 bp, synthetic construct
  source 1..80: mol_type = other DNA
gcgcccggccacatacaaacattttaaaagctcccagttgcacgcatctagttgatcagtgaatgacagatctttcttaa

SEQ ID NO: 20435 - DNA, 80 bp, synthetic construct
  source 1..80: mol_type = other DNA
taggactccagtattaagaaacactgtgtatggctttgcctttgaaacctacagagttatgaatctggtcccttttgctg

SEQ ID NO: 20436 - DNA, 80 bp, synthetic construct
  source 1..80: mol_type = other DNA
tgccagtatcgatcataatacatagtagatgcttagtaaacgctcatttttcctttccaaggggaaatttggcagatgat

SEQ ID NO: 20437 - DNA, 80 bp, synthetic construct
  source 1..80: mol_type = other DNA
tggctgggcaaggggtgcaggggcatgaaggaattggctagagcttggacttgtggcctggggactctacttgggtgtgc

SEQ ID NO: 20438 - DNA, 80 bp, synthetic construct
  source 1..80: mol_type = other DNA
tatagtgaaggtcaaacaaaatatttgggagcctagaggaagaacaggtctatttctggaggtatcagaaggcttcacag

SEQ ID NO: 20439 - DNA, 80 bp, synthetic construct
  source 1..80: mol_type = other DNA
cagcttggtggtggtggtggtggtttaagttgctgggtttttaaaagattgagtttcatgtccaaggactgattctactt

SEQ ID NO: 20440 - DNA, 80 bp, synthetic construct
  source 1..80: mol_type = other DNA
tacttatgtatttatgtttacagaggaggaggctgaagcattgaggggtcagtggcagaacaggaatcttaactctggtc

SEQ ID NO: 20441 - DNA, 80 bp, synthetic construct
  source 1..80: mol_type = other DNA
attaactggagtatgagttagggaacatttggctatgctgatgtctactactgaagggaaaggaggtggaggtcaaggtc

SEQ ID NO: 20442 - DNA, 80 bp, synthetic construct
  source 1..80: mol_type = other DNA
cccaacaaatagcttcaatcataagagggcttattacttccactaagaaggctagaagcaggaaagtcaggcatcagaag

SEQ ID NO: 20443 - DNA, 80 bp, synthetic construct
  source 1..80: mol_type = other DNA
gcctcctccctcaggggaaattttctaaagtttctcactgtgttctagcttcaaaaccatatgcagtttaattgcatgtt

SEQ ID NO: 20444 - DNA, 80 bp, synthetic construct
  source 1..80: mol_type = other DNA
tttaaccacggctgtggaccagtggtctcagatgtttaccatcgcctgtttataagagggaagtgtggtcatatttctat

SEQ ID NO: 20445 - DNA, 80 bp, synthetic construct
  source 1..80: mol_type = other DNA
agtcaacttgacttcctgggtgttggtcttctcttctacaaaatgacaagcttgaagggagaatctgaaagaatctgtgt

SEQ ID NO: 20446 - DNA, 80 bp, synthetic construct
  source 1..80: mol_type = other DNA
aaacctgggttagactctgtgctaatggcttttttcatgaacctcagacagccggaaagtatattctttgaggattatga

SEQ ID NO: 20447 - DNA, 80 bp, synthetic construct
  source 1..80: mol_type = other DNA
ggattaaacaggcccttacaaatgcccacacttttttcatgaaactaagttagaggccttagccaactccagcatacctt

SEQ ID NO: 20448 - DNA, 80 bp, synthetic construct
  source 1..80: mol_type = other DNA
gagtggaatgggacacatggatcaaggaacgtggacctgagcaagcaaaagcaagtcactcgggtcccactatcacattg

SEQ ID NO: 20449 - DNA, 80 bp, synthetic construct
  source 1..80: mol_type = other DNA
agctgattgacagctcagatgtgatcactccgtctcaactagaagaataaaaataaaaaccttgagctggagcggagagg

SEQ ID NO: 20450 - DNA, 80 bp, synthetic construct
  source 1..80: mol_type = other DNA
agagagcccagtaggctcagaaggaaggtccctcagcaccctggcccacacagttccagggagaccccaaataaagcatt

SEQ ID NO: 20451 - DNA, 80 bp, synthetic construct
  source 1..80: mol_type = other DNA
tccctcagaaaagaatgaattcttttccaactgatgtcactgggaaagggggacaccactactttcctgcgtactgcact

SEQ ID NO: 20452 - DNA, 80 bp, synthetic construct
  source 1..80: mol_type = other DNA
gtaacccgtgacagcagtaagcctctcgatctgttgtttgcagtgtttcagctaaaatattataaacagaccaccaaact

SEQ ID NO: 20453 - DNA, 80 bp, synthetic construct
  source 1..80: mol_type = other DNA
ttgcataagcatttttatgcttattgctgtaatcagtgtgtcagtcaaacgggaaggaggaactacatcaggtatttagc

SEQ ID NO: 20454 - DNA, 80 bp, synthetic construct
  source 1..80: mol_type = other DNA
ctgtgcccctttaggcccaagcctgcccttgctcttaacctcttaatgggtttcttctttcttctgttaaacagctaaaa

SEQ ID NO: 20455 - DNA, 80 bp, synthetic construct
  source 1..80: mol_type = other DNA
aagggtggctggattgtgactgtcacgctcctggcatcagatgatactggtagcaagctagggtcgtctgtgcactttgc

SEQ ID NO: 20456 - DNA, 80 bp, synthetic construct
  source 1..80: mol_type = other DNA
tatattacttctaatgtggccagggccgagctgaagatcataattatgtgagatctgctttacaggcatttagggaaatg

SEQ ID NO: 20457 - DNA, 80 bp, synthetic construct
  source 1..80: mol_type = other DNA
ctcatctggtcctgaggtgggtgagcattaaacccagatcctttttgtgtttcagtattggatcctttggccgtcatatc

SEQ ID NO: 20458 - DNA, 80 bp, synthetic construct
  source 1..80: mol_type = other DNA
gtcttggttgtagaaagaaggcgatgacattctaagaaacatcaacgaccaaagaaccccatcatatcctttattactca

SEQ ID NO: 20459 - DNA, 80 bp, synthetic construct
  source 1..80: mol_type = other DNA
tggctctgttgatagagataaaaagttgaggaatttcagaggctacaaacatactcttgttgaaggtgctttgggggtct

SEQ ID NO: 20460 - DNA, 80 bp, synthetic construct
  source 1..80: mol_type = other DNA
tctaagtagttcttcaggctgtgctctagaagttactggaatgaaagaaaaattgtagtgtttgaaggtcttcaaggatc

SEQ ID NO: 20461 - DNA, 80 bp, synthetic construct
  source 1..80: mol_type = other DNA
gccttagagaaagtggctgtgacttctgcattcctgggaatacactgacatgagaagaagtagccgctcttgttcacagt

SEQ ID NO: 20462 - DNA, 80 bp, synthetic construct
  source 1..80: mol_type = other DNA
tagtactacagtctgtgaatgatttacttagcaattaattcaaaagcatattccactctacaatggaatattttttgagc

SEQ ID NO: 20463 - DNA, 80 bp, synthetic construct
  source 1..80: mol_type = other DNA
atgtcactgacttagtttctgataggtttgtattgggtaggaaagaaaggaatgggacatttacgtgtacactgaggcag

SEQ ID NO: 20464 - DNA, 80 bp, synthetic construct
  source 1..80: mol_type = other DNA
cttatggagttggtgtaagcatctgcatgagatgatggacgttaaagtgctttgttagctgttgagactcttactgaaat

SEQ ID NO: 20465 - DNA, 80 bp, synthetic construct
  source 1..80: mol_type = other DNA
ggaagatctggatataccatgtttctgtaggcatgatacgtggtcccttagcttggtatttaaagttctttggaagtgac

SEQ ID NO: 20466 - DNA, 80 bp, synthetic construct
  source 1..80: mol_type = other DNA
gactgtattgaagactgcatgatgatcaggagagagtgagggatgagaaagagtttggaaaacagcagaacacgatgcaa

SEQ ID NO: 20467 - DNA, 80 bp, synthetic construct
  source 1..80: mol_type = other DNA
gcctttatcgtggcccccagtaagtgataaatattcgtactaatttggggcagtgtcctttttccagctgttttcccatg

SEQ ID NO: 20468 - DNA, 80 bp, synthetic construct
  source 1..80: mol_type = other DNA
gagtagctgcctctgtttggtggtggggactcaggcaggatgggtagggaggggtaggggaacaagatcatggcgcacct

SEQ ID NO: 20469 - DNA, 80 bp, synthetic construct
  source 1..80: mol_type = other DNA
aagagagccctttctaattcctccccttcatcttaactctatccccaatacactctctcacagagactgttcttttcctt

SEQ ID NO: 20470 - DNA, 80 bp, synthetic construct
  source 1..80: mol_type = other DNA
tctctcccacccagggctcagcacagtacctggaacagtcaagccctcaataaatgtttactgagtgcattaaaaaaaaa

SEQ ID NO: 20471 - DNA, 80 bp, synthetic construct
  source 1..80: mol_type = other DNA
ggtctgtgaaaatcactggaattgaaaatgaccatgctttgcccaaaaaggttgagaatccccactctgatgatactaga

SEQ ID NO: 20472 - DNA, 80 bp, synthetic construct
  source 1..80: mol_type = other DNA
ttttgtctcacaattgagttcttgttgacgaagaccagttattattcgtcttcgtgtctctggagtctagcacctagcac

SEQ ID NO: 20473 - DNA, 80 bp, synthetic construct
  source 1..80: mol_type = other DNA
gtgaatgaaataattcattctgtgcttgagtgtctaagacccagggggtttaggaataattaggatactggctgtaccct

SEQ ID NO: 20474 - DNA, 80 bp, synthetic construct
  source 1..80: mol_type = other DNA
cgtagatacacagaaaaactgtacacagataatacagaaagttccagtgtacccctgacccagatgtccgtaatgttaac

SEQ ID NO: 20475 - DNA, 80 bp, synthetic construct
  source 1..80: mol_type = other DNA
atttgcatttccctattggctaatgatattgatcatctctccttgtgctttttggcatttgtgttttttgtttgtttgtt

SEQ ID NO: 20476 - DNA, 80 bp, synthetic construct
  source 1..80: mol_type = other DNA
gctttttgtgttgtatctaagaaactgttgcttaatccagggtcacaaaaatttactcccttgcattcttctaagagttt

SEQ ID NO: 20477 - DNA, 80 bp, synthetic construct
  source 1..80: mol_type = other DNA
gattgtttaaaaaaatgtccccacctccaatattttcagggactgaaatataagcatatttctcccatagatcctaggaa

SEQ ID NO: 20478 - DNA, 80 bp, synthetic construct
  source 1..80: mol_type = other DNA
actttgacttcatcctcccctccttccacctgccagtacccagtctttatctaaatttagggggcttgagaggccattct

SEQ ID NO: 20479 - DNA, 80 bp, synthetic construct
  source 1..80: mol_type = other DNA
agataatgtctggttaaccaccctcctggagtcatggcaaggctgatacagattcagtggcattaactcatttgttcatt

SEQ ID NO: 20480 - DNA, 80 bp, synthetic construct
  source 1..80: mol_type = other DNA
gcagctgtgattattatgggtatcattcctagtggttctgcaattagtcttgacagtaagtgctgcaggacttcagacaa

SEQ ID NO: 20481 - DNA, 80 bp, synthetic construct
  source 1..80: mol_type = other DNA
cctgctgggaagtcctccaagctcttgtgaaagagatgtggtttgtcgagcatggattttcaaactttctttatagagag

SEQ ID NO: 20482 - DNA, 80 bp, synthetic construct
  source 1..80: mol_type = other DNA
agacttgggtccaaaggtgtgtcatttttataccagactagaatcgggtgaggggagatgtaaagagatcactattgtca

SEQ ID NO: 20483 - DNA, 80 bp, synthetic construct
  source 1..80: mol_type = other DNA
gaagaacagccccatttagggaatgcagggagagacagaggaaaagcaagatggtgcacagtgacattgaaggtgagtga

SEQ ID NO: 20484 - DNA, 80 bp, synthetic construct
  source 1..80: mol_type = other DNA
atgacctggagttggggaggggtatcaaggataacaagtcttatacacatgccatgctgtttctttggatcaatagatgg

SEQ ID NO: 20485 - DNA, 80 bp, synthetic construct
  source 1..80: mol_type = other DNA
cttgcatgttttcaggcagggcatgattgtatctgtaacataataatatgtaagaatgtgtacttcttagcctttgcaga

SEQ ID NO: 20486 - DNA, 80 bp, synthetic construct
  source 1..80: mol_type = other DNA
tcattaaaattaaatacaattacaaatgctgtccctcagtcacaccagccgcatttcaagtgcacgggtaggctagtggc

SEQ ID NO: 20487 - DNA, 80 bp, synthetic construct
  source 1..80: mol_type = other DNA
tgggcaacagagtgagaccctgtctcaaaaaaaaaaaaaaaaaaaaaaatcagccaggcgcagtggctcacacctgtaat

SEQ ID NO: 20488 - DNA, 80 bp, synthetic construct
  source 1..80: mol_type = other DNA
gtgtgtcctgctttccaactttcggatatgctgtagaatagactgaaacaaatcactggaaaataggttgttgtcgattt

SEQ ID NO: 20489 - DNA, 80 bp, synthetic construct
  source 1..80: mol_type = other DNA
gacctgagcttggtgaatttacctggcatctgagcctggcctgaacaattcagaaacctcatttcatcagtcttggagtc

SEQ ID NO: 20490 - DNA, 80 bp, synthetic construct
  source 1..80: mol_type = other DNA
cagaaactgtatgctcgacacacactccctgagtccttagggaattgcgtagtttttttcttttcttttctgggttcatc

SEQ ID NO: 20491 - DNA, 80 bp, synthetic construct
  source 1..80: mol_type = other DNA
tgagcagtagggtcatcgtggtggtcagtttttccactgccatcaaatgggatccatttagctctcagacagacaaggta

SEQ ID NO: 20492 - DNA, 80 bp, synthetic construct
  source 1..80: mol_type = other DNA
ttttcagccttgctaatgtgttcctctgaaaaaatatcttatcaggccctcagatatccaccagttctccctttccaact

SEQ ID NO: 20493 - DNA, 80 bp, synthetic construct
  source 1..80: mol_type = other DNA
cacctcagactcctaagtagctgggactgcaggtgcacgccaccacacccagctagtttttaaatatattttttagtaga

SEQ ID NO: 20494 - DNA, 80 bp, synthetic construct
  source 1..80: mol_type = other DNA
cattcttctttatcatactgagtctgaagttgatgtgtcctttatacttgtggcacatctcagtttgcactgtccacatt

SEQ ID NO: 20495 - DNA, 80 bp, synthetic construct
  source 1..80: mol_type = other DNA
ttgcacactccatatcagaatctaatgcctgatgatctgaggtggaacagtttcgtcctgaaacatcccccccaaccctc

SEQ ID NO: 20496 - DNA, 80 bp, synthetic construct
  source 1..80: mol_type = other DNA
tttgagtgtgtttgttttgttttacttttaggagcaatcacagtgctcctgttgctgaatggtggctgatgtctgttgca

SEQ ID NO: 20497 - DNA, 80 bp, synthetic construct
  source 1..80: mol_type = other DNA
aaaagcactgggcagaaggtctcagtcaaatgcacctgcagttattagctatgtgacttgggcataatgccacctgtgag

SEQ ID NO: 20498 - DNA, 80 bp, synthetic construct
  source 1..80: mol_type = other DNA
cagaggaaaaccatgtcccatttgtcctgtttgagcactatcaggcctatagccataatcttttacaccgtaacataact

SEQ ID NO: 20499 - DNA, 80 bp, synthetic construct
  source 1..80: mol_type = other DNA
gctgctctgtgaatgaaattggcctggggttaatgagtggtgaatgtgtgtcagtgtttggtatttgcagcaggagctct

SEQ ID NO: 20500 - DNA, 80 bp, synthetic construct
  source 1..80: mol_type = other DNA
tctgggacagaaaggggtcaaaacaccctttttcattgttaagattagataatttgagagccaaaacttcttgcagggtg

SEQ ID NO: 20501 - DNA, 80 bp, synthetic construct
  source 1..80: mol_type = other DNA
agatacattaaagattgtgccatcttgagctcccagggtcatctgaacctttcatgtgaggaaacacatcccagagtcag

SEQ ID NO: 20502 - DNA, 80 bp, synthetic construct
  source 1..80: mol_type = other DNA
gttttgtcattttttttcccagtagatgttcctatttggttcacagatataaacacttgaaccaggtgatatcagcactg

SEQ ID NO: 20503 - DNA, 80 bp, synthetic construct
  source 1..80: mol_type = other DNA
gagaaaataggaggtactagaattcggacttctaggaagggctgtattgtccttatcatcagaatccctccctcccgtcc

SEQ ID NO: 20504 - DNA, 80 bp, synthetic construct
  source 1..80: mol_type = other DNA
cctttgagagactgaagtgtcggaaatgcatttagacacagattgtgccttatattagctctccgttgccccataaaatg

SEQ ID NO: 20505 - DNA, 80 bp, synthetic construct
  source 1..80: mol_type = other DNA
taaaaggccctgggaaatgttaactgatcaaaaatgctgggtaagtagaattattatttcaccctgaccaacttcagtca

SEQ ID NO: 20506 - DNA, 80 bp, synthetic construct
  source 1..80: mol_type = other DNA
acaggacagtgagagtgaaagggaacgctattaataatgacaccaggtcaacacatgcgaacccaactgtcctgaacaaa

SEQ ID NO: 20507 - DNA, 80 bp, synthetic construct
  source 1..80: mol_type = other DNA
tttcattacctggaaagtccgataccttgagtccaccccccatacacccattagactcctgagtcttaaatctgctctgg

SEQ ID NO: 20508 - DNA, 80 bp, synthetic construct
  source 1..80: mol_type = other DNA
tggtaacggcagaggctgctggcatcttaagacattcaaaaaccactgtgctaagtaacagtggagatatattgatctca

SEQ ID NO: 20509 - DNA, 80 bp, synthetic construct
  source 1..80: mol_type = other DNA
gtctattggagcaaaatatgtctaggcttttgcttgcttttttcattttcaaatccatatttccatcagaattttagagt

SEQ ID NO: 20510 - DNA, 80 bp, synthetic construct
  source 1..80: mol_type = other DNA
aaatagtgatttaactatataaatatagtttgctaccatgtttgctatgtgccaggcttgatggtgcttgtagggcacag

SEQ ID NO: 20511 - DNA, 80 bp, synthetic construct
  source 1..80: mol_type = other DNA
cttactgtgtgtaagaaaaatcagtaagcctctgataaatagtcaaagactgtcagaaaagggaccttggaaatatctgg

SEQ ID NO: 20512 - DNA, 80 bp, synthetic construct
  source 1..80: mol_type = other DNA
gtgttaactccttaatgaggctgaagtagacatggtaaaactagttgtggaaagagatcctataaagcaaaactgaggac

SEQ ID NO: 20513 - DNA, 80 bp, synthetic construct
  source 1..80: mol_type = other DNA
agcctgtttgagaattcagtgattcacttcccgtcgtcaactcttgtttaacgttcccctccattgttaccaaacaatcc

SEQ ID NO: 20514 - DNA, 80 bp, synthetic construct
  source 1..80: mol_type = other DNA
taacctgcagaaagagtcaaagttctgaagttttctctctcatcctttctgtttgttgctccatgtacagtagggaagag

SEQ ID NO: 20515 - DNA, 80 bp, synthetic construct
  source 1..80: mol_type = other DNA
tcagaaacacacagaagtcacttcatcataccaggcctttggtgctaaatgatgatgaatttgaagagtgtgggacagtg

SEQ ID NO: 20516 - DNA, 80 bp, synthetic construct
  source 1..80: mol_type = other DNA
aacgttagcaattgctgtcatgcaaatgctgcattttttgcatgtaaaggtacctctttacctccatggtccttaaacta

SEQ ID NO: 20517 - DNA, 80 bp, synthetic construct
  source 1..80: mol_type = other DNA
agagtcctgtaataagaattgtttgttttgtgaagttgaactaatagtgaggtttgccggcagataagacttgagaaatt

SEQ ID NO: 20518 - DNA, 80 bp, synthetic construct
  source 1..80: mol_type = other DNA
ttcctttccctctaaagttagagtttttgaaaaatatttgatttttttaaattgacaaataattgtccatattcatggga

SEQ ID NO: 20519 - DNA, 80 bp, synthetic construct
  source 1..80: mol_type = other DNA
cccatcagaacgttgccaagggctgtgagtatgctgaatgggtccatgagtgatctcttaaaaaaacataaaccattgtc

SEQ ID NO: 20520 - DNA, 80 bp, synthetic construct
  source 1..80: mol_type = other DNA
cagcctgcaggatccctttatccagtgagttactgagtgagaagtgctgggtaaacgcttgctctgaggtgtaaattgct

SEQ ID NO: 20521 - DNA, 80 bp, synthetic construct
  source 1..80: mol_type = other DNA
ttggtttccccctagactggcagcattcatgcccaaagcactagatattgtccatttataagttcagatgaaaattgagt

SEQ ID NO: 20522 - DNA, 80 bp, synthetic construct
  source 1..80: mol_type = other DNA
gaaaaaattgtcttgctgttcttaacctaccaaagcaggcaagtagacgcacatgtgttttacacacgtcattggaagaa

SEQ ID NO: 20523 - DNA, 80 bp, synthetic construct
  source 1..80: mol_type = other DNA
gtaattgcaggtgagtgaacacggggatagtagggtagcttgattgctgttcaaagggaaagagatggggaggatatgaa

SEQ ID NO: 20524 - DNA, 80 bp, synthetic construct
  source 1..80: mol_type = other DNA
gtctgtcccttctgctcacattccactggccaatgcaagtcaatagtctaccccaaagtcacgggacaagaaaatacatg

SEQ ID NO: 20525 - DNA, 80 bp, synthetic construct
  source 1..80: mol_type = other DNA
ggctgggccagggagaagagtgggtcataaatagaccattttctgcaaccaagtatatttatggtaacatcagctcagaa

SEQ ID NO: 20526 - DNA, 80 bp, synthetic construct
  source 1..80: mol_type = other DNA
taagatgtgccttattatccacacggcattgtggtgagaatgatctgagataaggaacacagaagccttgtgaacattca

SEQ ID NO: 20527 - DNA, 80 bp, synthetic construct
  source 1..80: mol_type = other DNA
tgtatatacctatgaaaccaccatagcagtaagagaatatacataacctttacccccaaaaaagtttccaagtgcacctt

SEQ ID NO: 20528 - DNA, 80 bp, synthetic construct
  source 1..80: mol_type = other DNA
tatggttttttagctttttaagaaacttccaaatgtttgagggatgaatatcccaattacccagatttgatcattacaca

SEQ ID NO: 20529 - DNA, 80 bp, synthetic construct
  source 1..80: mol_type = other DNA
cggtctgattttttttttattattattaagtgctttttggtgtggtatctgagaaatcattgtctatcccaaaaagtcac

SEQ ID NO: 20530 - DNA, 80 bp, synthetic construct
  source 1..80: mol_type = other DNA
tacttatccagggctgggtttggggagtatctgctgtgatagagaataataacgctaatttgtgggtgtttatgaagcac

SEQ ID NO: 20531 - DNA, 80 bp, synthetic construct
  source 1..80: mol_type = other DNA
gctctctctcatgatcccctctccagtccttctggccttcattctgttcttccgacctcaccatgttttccactttccac

SEQ ID NO: 20532 - DNA, 80 bp, synthetic construct
  source 1..80: mol_type = other DNA
tctcatcatccagatcacctggggatttcacaaagggaaagattctgatttagtaggttggggtaggcgctgagaatgta

SEQ ID NO: 20533 - DNA, 80 bp, synthetic construct
  source 1..80: mol_type = other DNA
tcttctttggatcactgtagtcctcatatctgtgcctaaagaactctcattgtcttccccagccctgtcccctctccaca

SEQ ID NO: 20534 - DNA, 80 bp, synthetic construct
  source 1..80: mol_type = other DNA
gagggtctgcggtgcacttgggggtgcggggactttggtgctggtctggcatcgacactgagccacctctgctctgtctc

SEQ ID NO: 20535 - DNA, 80 bp, synthetic construct
  source 1..80: mol_type = other DNA
ctttgccgtcattgaacttgcaacctaactgctgagtgaggacacgtcccttagagacaacaaataataacacctggtct

SEQ ID NO: 20536 - DNA, 80 bp, synthetic construct
  source 1..80: mol_type = other DNA
gcatagaagagggtccgagctgctcacagatgatgggggagattgacaggacagtcagtagtcactgggccatctcgtgt

SEQ ID NO: 20537 - DNA, 80 bp, synthetic construct
  source 1..80: mol_type = other DNA
cttcgacctcccaaagtgctgggattacaccgcacctggctgaggttgtgcaattcctgagagaccgaaagagactcgca

SEQ ID NO: 20538 - DNA, 80 bp, synthetic construct
  source 1..80: mol_type = other DNA
gatgatattatcctcattttatacctgaggaaaaaattaaggctcatagaagttaaacggcttagccaaactcacgtagc

SEQ ID NO: 20539 - DNA, 80 bp, synthetic construct
  source 1..80: mol_type = other DNA
agcaggatgctgctctggaaaagtgtccactgttttatttttgaaggctgataccatgtgagttctttttttctggaggt

SEQ ID NO: 20540 - DNA, 80 bp, synthetic construct
  source 1..80: mol_type = other DNA
tgcagtttggtgcaaagccacggacagccatgcagactccagccccctgacatttatagacctgtttcagatatacttat

SEQ ID NO: 20541 - DNA, 80 bp, synthetic construct
  source 1..80: mol_type = other DNA
tggactggtttttgtgcccatttgcttccagaccttgactgacagcgtcagatgaagaaactcatcatttggaatattag

SEQ ID NO: 20542 - DNA, 80 bp, synthetic construct
  source 1..80: mol_type = other DNA
ttgagagtttgctgtttactgttattcggagtgcttcctgcatgttaacctgatctttataactttataaggcagaagcg

SEQ ID NO: 20543 - DNA, 80 bp, synthetic construct
  source 1..80: mol_type = other DNA
gacagctcttcctctggaggaggctgagataaatgctttcgagaaatggtagcagagctgggagaatgcatttgagaggg

SEQ ID NO: 20544 - DNA, 80 bp, synthetic construct
  source 1..80: mol_type = other DNA
gggccctgcagagatgcaaaatgagatttaagaagaggccttggatttggcatcagggtttcaagggggagcttttaggg

SEQ ID NO: 20545 - DNA, 80 bp, synthetic construct
  source 1..80: mol_type = other DNA
cgggggcaagttgccccgtgagtcagggttaggattctgggtgagactccacgctgacaggcccggcttcccctctgctt

SEQ ID NO: 20546 - DNA, 80 bp, synthetic construct
  source 1..80: mol_type = other DNA
tgaatctcttgcacatgtttttaataggcatcccttaatccaagtgttgccttctgggttttattctgttttctttttct

SEQ ID NO: 20547 - DNA, 80 bp, synthetic construct
  source 1..80: mol_type = other DNA
tgcttttgcagtaactataacctcatggttatcccatttatagccgccttctttccagagtcctttttgtttctctggta

SEQ ID NO: 20548 - DNA, 80 bp, synthetic construct
  source 1..80: mol_type = other DNA
tcagctttattgtagctttattgtcttctagtgtaccacagtgattgtacggactacaaaactgaggttacagaaggagg

SEQ ID NO: 20549 - DNA, 80 bp, synthetic construct
  source 1..80: mol_type = other DNA
aagacatctggcaatatccgcagcctttttttattgccacaacttgagagggtgttatggatgtatactactagcaccta

SEQ ID NO: 20550 - DNA, 80 bp, synthetic construct
  source 1..80: mol_type = other DNA
tgggacaaatacagattttctttcagaagggtttgtgtccgagccaccccaacagccggcatctagataagtgtggaaaa

SEQ ID NO: 20551 - DNA, 80 bp, synthetic construct
  source 1..80: mol_type = other DNA
gacacccaatgacccagtagcccaccctgtgtccacagacctgcagccagttacctactgcgagccggccttctggtgct

SEQ ID NO: 20552 - DNA, 80 bp, synthetic construct
  source 1..80: mol_type = other DNA
tacgcatcacttggtttgcttatgaagttatcaagcttagaggattttacgatccagaatcacaactgtcagaacttaga

SEQ ID NO: 20553 - DNA, 80 bp, synthetic construct
  source 1..80: mol_type = other DNA
gcaccctgcagaactaaagccagaaaaaatggggagtggttggaggaaggggacagtagtgggaataggaggcaggacag

SEQ ID NO: 20554 - DNA, 80 bp, synthetic construct
  source 1..80: mol_type = other DNA
gcaatccactcacctcagcctcccaagcagctaggactacaaggatatgccactatgcccagttaattaaaaaaaaaatg

SEQ ID NO: 20555 - DNA, 80 bp, synthetic construct
  source 1..80: mol_type = other DNA
ggtagagagaaggcccatttagctgttgggatggatcagggaagtcttcatggaggagaaacatccggatcctgaaggat

SEQ ID NO: 20556 - DNA, 80 bp, synthetic construct
  source 1..80: mol_type = other DNA
ttccgatcgttgacctcatttagtcctcaccagttattctctggctctataagtaaggagacgctttgagagacaagttc

SEQ ID NO: 20557 - DNA, 80 bp, synthetic construct
  source 1..80: mol_type = other DNA
gtactgagtgtggagtgtgtggcaaatgcatcacacaccatgtgtccctggagctgtataaatgaggctggtctaggggg

SEQ ID NO: 20558 - DNA, 80 bp, synthetic construct
  source 1..80: mol_type = other DNA
agtccgggaagggaggaggagatttgggtagttataaaggaacaaaattttctcgctgagaaatgacttttttagagtcc

SEQ ID NO: 20559 - DNA, 80 bp, synthetic construct
  source 1..80: mol_type = other DNA
atccaggagtgaccagtggagcaatcaaagtggtcagacctcaaaagaacttacaactatgttatggcctgaagagatca

SEQ ID NO: 20560 - DNA, 80 bp, synthetic construct
  source 1..80: mol_type = other DNA
agaattatatcagcacattgggaaccgaaggcatgcggacactgttggcgctttgtaaaaaacacccctcaatcagacag

SEQ ID NO: 20561 - DNA, 80 bp, synthetic construct
  source 1..80: mol_type = other DNA
aggcttggggaaaatggccatgcaggaggtggagaaaattggaactctactcaacccattgttgtcaaggaagaagaaat

SEQ ID NO: 20562 - DNA, 80 bp, synthetic construct
  source 1..80: mol_type = other DNA
aatgtttggtttatatattttctttaaaaatcctgggctggcacattgactgggaaacctgagtgagacccagcaactgc

SEQ ID NO: 20563 - DNA, 80 bp, synthetic construct
  source 1..80: mol_type = other DNA
cagctctgagacccaggaaccaaatattccattttggcttctgctagagcagtcatggttcctctcctaaaagccatggg

SEQ ID NO: 20564 - DNA, 80 bp, synthetic construct
  source 1..80: mol_type = other DNA
gtatattaaaacacttttttaaaggacagttgaaaagggcaagaggaaaccagggcagttctagaggagtgctggtgact

SEQ ID NO: 20565 - DNA, 80 bp, synthetic construct
  source 1..80: mol_type = other DNA
agcatctcccatggggaggtgatggtggggagatgatgggctaaacaggcaacttttcaaaaacacagctatcatagaaa

SEQ ID NO: 20566 - DNA, 80 bp, synthetic construct
  source 1..80: mol_type = other DNA
attgtacccctattgttaaagatttgtgtcctctcattccctctcttcctcttgtaagtgcccttctaataaacttttca

SEQ ID NO: 20567 - DNA, 80 bp, synthetic construct
  source 1..80: mol_type = other DNA
ggaggacagttttgaaaggggatgctgtgtcctcagctcctttctcaagctgggcaagtttagaaaatagaatatatagc

SEQ ID NO: 20568 - DNA, 80 bp, synthetic construct
  source 1..80: mol_type = other DNA
accttctccccagagctgtcgactggctgttgaaggccaatttttgtgcctacgcaggtcctcaacacagaacaaaacaa

SEQ ID NO: 20569 - DNA, 80 bp, synthetic construct
  source 1..80: mol_type = other DNA
gcgcggcgctgaggaggggcggcctggccgggacgcctcggggcgggggccgaggagctctccgggccgccggggaaagc

SEQ ID NO: 20570 - DNA, 80 bp, synthetic construct
  source 1..80: mol_type = other DNA
taacctgaaaggtttatttgctggtgcagaggctttaaaaagccctgttgaagattgatagctgtttcccttcaaaaacc

SEQ ID NO: 20571 - DNA, 80 bp, synthetic construct
  source 1..80: mol_type = other DNA
cgagcgattgtgtgtgaattctttttctgtattccccttcagtttttctttctccccgcaaattaaggagcgagaattaa

SEQ ID NO: 20572 - DNA, 80 bp, synthetic construct
  source 1..80: mol_type = other DNA
gccactgcgcctgtcctataacagcatttaatacagttttgtaaaattatcacattttgggctttttgttcaacagttga

SEQ ID NO: 20573 - DNA, 80 bp, synthetic construct
  source 1..80: mol_type = other DNA
ttggaaaacttgtaaatgtgttgaattcatctttttattgcttttttactcccaatgtttagggcaacggtcttttcttc

SEQ ID NO: 20574 - DNA, 80 bp, synthetic construct
  source 1..80: mol_type = other DNA
ccatctcacacatctaacttaacgggtcttttgaaagtattgccacatttgctttgcttctgtgtctgtctctttctttt

SEQ ID NO: 20575 - DNA, 80 bp, synthetic construct
  source 1..80: mol_type = other DNA
atctattttttagagacaggttgcccaggatggagtgcagtaacatcatcatagccctctataaccttcaacttctgggt

SEQ ID NO: 20576 - DNA, 80 bp, synthetic construct
  source 1..80: mol_type = other DNA
agcctagctgacagagcgagactgtctcaaaaaaacaaaaaaagttttataaaatgtatttttcagttatcagttattaa

SEQ ID NO: 20577 - DNA, 80 bp, synthetic construct
  source 1..80: mol_type = other DNA
tggccaagagttcgagaccctgtttctacaataacatataaaaattaggtgtagtggcatgtagttctagctgctcagga

SEQ ID NO: 20578 - DNA, 80 bp, synthetic construct
  source 1..80: mol_type = other DNA
tgggaatccagctgtctcctattaagctaggcattaagagaaatttgtgaagatgtaaaacagtgttactctgattcctg

SEQ ID NO: 20579 - DNA, 80 bp, synthetic construct
  source 1..80: mol_type = other DNA
tggggagattctccttggaaaatcagactgctgttttacaaatggagaaatacatgctggtacacaaaaactgatgtcca

SEQ ID NO: 20580 - DNA, 80 bp, synthetic construct
  source 1..80: mol_type = other DNA
aggaaaaacaacaggcagataacaagaatcagctgtctcttcttgctaactctttacctctcataactcttgactgcatc

SEQ ID NO: 20581 - DNA, 80 bp, synthetic construct
  source 1..80: mol_type = other DNA
aaaagaagatatatgagctgtcctatcccttctcctgccatttaaggacatatgtagaaatggagcctttgtcagtctaa

SEQ ID NO: 20582 - DNA, 80 bp, synthetic construct
  source 1..80: mol_type = other DNA
caaccgtgcctttgttgccaggctggtcctgagcttaagtgatccaaccatgtcggcctcttaaagtgctgggattacag

SEQ ID NO: 20583 - DNA, 80 bp, synthetic construct
  source 1..80: mol_type = other DNA
ttactatgggcttcctgtttttgtatctgtagtgctttgtatatacagtgtttgttgaattggtcaatttatgtttccca

SEQ ID NO: 20584 - DNA, 80 bp, synthetic construct
  source 1..80: mol_type = other DNA
caggctgtagtgcagtggcacaatcacagctcaccaaggccttgacctcccaaggctcaggtgatcttccagtctcagct

SEQ ID NO: 20585 - DNA, 80 bp, synthetic construct
  source 1..80: mol_type = other DNA
cttttgcaaagcttcccaaggctaggtaattgagtggaattgatactttaacaaaggtcttcagaagaggaagagatttt

SEQ ID NO: 20586 - DNA, 80 bp, synthetic construct
  source 1..80: mol_type = other DNA
tccaaagtacctgtgccattttgtaatcccagcaccaaggagtgagggtccaatttctcggcttcttcaatacttactat

SEQ ID NO: 20587 - DNA, 80 bp, synthetic construct
  source 1..80: mol_type = other DNA
ccaacaagtaatgatgcctgtctgagcattgtgcatagtttgatgtgccatagacaaggtggagagagtgaaacatttgc

SEQ ID NO: 20588 - DNA, 80 bp, synthetic construct
  source 1..80: mol_type = other DNA
ttcactgttagcaaatgtttcattggtcacatttttcaggtagaacttcataatacagctcccttgcttaaataaatctt

SEQ ID NO: 20589 - DNA, 80 bp, synthetic construct
  source 1..80: mol_type = other DNA
acgaacgagttgtatcacctggaattggtaagtagactttgctttcatcctaagaaacataaagggaaaaggatctcaat

SEQ ID NO: 20590 - DNA, 80 bp, synthetic construct
  source 1..80: mol_type = other DNA
gcactcttttgtattttttcagtcttgttacattttgagtaaataaatcaaggctactttaaagcatatgcccatcacag

SEQ ID NO: 20591 - DNA, 80 bp, synthetic construct
  source 1..80: mol_type = other DNA
gagggcagttagtagtagtttagcaccttttttgtttgtagaattttagaggtgggtcagaaatactaggtgaccttaac

SEQ ID NO: 20592 - DNA, 80 bp, synthetic construct
  source 1..80: mol_type = other DNA
ggtgatgataaagaacacagacctaaggtgggcccagtggtttcagcttttttgtcacctatagagaatatattctttga

SEQ ID NO: 20593 - DNA, 80 bp, synthetic construct
  source 1..80: mol_type = other DNA
ggcaatacatggtccataaatcaaaatactataaaaaggtatacagtgaaaagaagtgctcccacccctgcccccattcc

SEQ ID NO: 20594 - DNA, 80 bp, synthetic construct
  source 1..80: mol_type = other DNA
tttgtggtctactaattgactgctttaagaagagaacctactgttagttcagtggattgttaagttctggagtagtgtta

SEQ ID NO: 20595 - DNA, 80 bp, synthetic construct
  source 1..80: mol_type = other DNA
ttgctggaggctgttgaaacatagactagcttcaaatttgagagtcagattgattgataaaatatatctcatgctgttac

SEQ ID NO: 20596 - DNA, 80 bp, synthetic construct
  source 1..80: mol_type = other DNA
gctaggttcaggtttttgggggcatgatcatatgacctggttctgttacttattttcacagtaaccaaaggtttgatagt

SEQ ID NO: 20597 - DNA, 80 bp, synthetic construct
  source 1..80: mol_type = other DNA
tgaatttctgtgcctttgtcaatgcttactaaagtgacttcattttgactgtgttgtttcctgaggttgaatcctattca

SEQ ID NO: 20598 - DNA, 80 bp, synthetic construct
  source 1..80: mol_type = other DNA
ttgatactttgagcaatggtgacatgttactctcttccatctgattatactcccatttagaaaagaatgaggtgatgcca

SEQ ID NO: 20599 - DNA, 80 bp, synthetic construct
  source 1..80: mol_type = other DNA
ataagatgacatctatgaatgtaccatgttaatgtcttcttgttcctctaggtcagcctgccagtatactggggggcagc

SEQ ID NO: 20600 - DNA, 80 bp, synthetic construct
  source 1..80: mol_type = other DNA
ctggcatgattgggaggaataccctacagataacatgtagtttcaggtagaataggagcattgttcatatggcttagtaa

SEQ ID NO: 20601 - DNA, 80 bp, synthetic construct
  source 1..80: mol_type = other DNA
taaaaatggaatttttgttgtcttttctttagggcctgttcacaatgagcttgcattccagcctcccatttccaatcatc

SEQ ID NO: 20602 - DNA, 80 bp, synthetic construct
  source 1..80: mol_type = other DNA
ttttacttgtttatttttgagagagggcctggctctgttgcccaaactggagtgcagtggcatgatctcagattactaca

SEQ ID NO: 20603 - DNA, 80 bp, synthetic construct
  source 1..80: mol_type = other DNA
cataccggaataatacaggaagttcccccattgtactcattcctcagtttcagccattatcaagtaatgaccaatcttgt

SEQ ID NO: 20604 - DNA, 80 bp, synthetic construct
  source 1..80: mol_type = other DNA
tggcccttttaaagtgatgaatacatccctaaacagtctagtaatctggctttacttgtttttttttttttttttttttt

SEQ ID NO: 20605 - DNA, 80 bp, synthetic construct
  source 1..80: mol_type = other DNA
agacactcagtgaagacacttagtgtatcactggtttttatgttctaagcataatgaaatatatgtaaacaaatatttat

SEQ ID NO: 20606 - DNA, 80 bp, synthetic construct
  source 1..80: mol_type = other DNA
tttctactgtgtatgcagtgcctagaaagatccctagatactctgtagatatctgttaaatgagttaaaacaggaaagcc

SEQ ID NO: 20607 - DNA, 80 bp, synthetic construct
  source 1..80: mol_type = other DNA
tgtttgggtcaactctccaatgtccacaggacagaagccattgagagagcaaggtattgattgtatagtcagatagttac

SEQ ID NO: 20608 - DNA, 80 bp, synthetic construct
  source 1..80: mol_type = other DNA
taacctctaagccattctgcctaatagaattttctgtgatgaagaaaatgatttatatttgcactgtccagttcggtagc

SEQ ID NO: 20609 - DNA, 80 bp, synthetic construct
  source 1..80: mol_type = other DNA
gttgtcaaaagaattgaaatctgggtggaaggaatggaaaaatgttttatatattaaataataagaaattgtgtttaagt

SEQ ID NO: 20610 - DNA, 80 bp, synthetic construct
  source 1..80: mol_type = other DNA
tttctgtgtgagtaactcataaaatactcctgtgtaactcacaaatctatacagacttctgaaaaacataatcgcggtgc

SEQ ID NO: 20611 - DNA, 80 bp, synthetic construct
  source 1..80: mol_type = other DNA
atcagcccaactcagctcccaaagtgcaaggattgcaggtgtgagccactacgcctggccttttgttgttattttttaat

SEQ ID NO: 20612 - DNA, 80 bp, synthetic construct
  source 1..80: mol_type = other DNA
agatacattgtgacttatttatattttggtacagatggcctttgaaaagcccccaaggtgtgagacaagtcatcacttga

SEQ ID NO: 20613 - DNA, 80 bp, synthetic construct
  source 1..80: mol_type = other DNA
agttatcagattttcacaggagatgatattattggggtaaattgtatgtagatagcatgcacccctggaaggagtgccca

SEQ ID NO: 20614 - DNA, 80 bp, synthetic construct
  source 1..80: mol_type = other DNA
atatacccttttaactatcacccccaaatctccatttccattagctctagacaaccactattctacgctctttgtagatt

SEQ ID NO: 20615 - DNA, 80 bp, synthetic construct
  source 1..80: mol_type = other DNA
tgcatttaagccttgtcaaaggaaaatggcaaaatttgactcctggttgtaaaagacaatatcctaaagatgttgtcagt

SEQ ID NO: 20616 - DNA, 80 bp, synthetic construct
  source 1..80: mol_type = other DNA
gtgctgggattacaggagagagccactgtgcctggccaagagaaaaagcgagaacttttaagatacaacatcaaaggcat

SEQ ID NO: 20617 - DNA, 80 bp, synthetic construct
  source 1..80: mol_type = other DNA
gataatgatgtgtcagtgtaaattcattgattgtaacaattgtgccactgtagtggggatgttgatagtggcggaaggtt

SEQ ID NO: 20618 - DNA, 80 bp, synthetic construct
  source 1..80: mol_type = other DNA
tccttttagatagggagtatagccacatggttcagaaattaaagtgatttaaaaacagtggacattgagcagccttgctt

SEQ ID NO: 20619 - DNA, 80 bp, synthetic construct
  source 1..80: mol_type = other DNA
aaggacagtaatagctgacccacttcgaactagataaaagatacagaggcgtgtggcagccaaagccatcatgatgttga

SEQ ID NO: 20620 - DNA, 80 bp, synthetic construct
  source 1..80: mol_type = other DNA
ggtttcacactgatggggaattttttactgcagagttaaactcctgactatagacttttatgatggaaacacgtggcacc

SEQ ID NO: 20621 - DNA, 80 bp, synthetic construct
  source 1..80: mol_type = other DNA
tcttccaaatcttttctgttaggtctgtcagctgctgctggaattggtgttgatgaccttcgtcgcttatgcatactcag

SEQ ID NO: 20622 - DNA, 80 bp, synthetic construct
  source 1..80: mol_type = other DNA
gatgaagtatacttttcccctgttaaacagtagttgtattcttctgtatttctaggcacaaggttggttgctaagaagcc

SEQ ID NO: 20623 - DNA, 80 bp, synthetic construct
  source 1..80: mol_type = other DNA
tagctatagaaacacttgtgtgatgatagtcctccttatatcacctggaatgaacacagcttctactgccttgctcagaa

SEQ ID NO: 20624 - DNA, 80 bp, synthetic construct
  source 1..80: mol_type = other DNA
ctcaaagagtctcaaaatgttgaatttcagtgcaagctgaatgagagatgagccatgtacacccaccgtaagacctcatt

SEQ ID NO: 20625 - DNA, 80 bp, synthetic construct
  source 1..80: mol_type = other DNA
tttgatggtaactggttaatagttactcaccattttatgcagagtcacattagttcacaccctttctgagagccttttgg

SEQ ID NO: 20626 - DNA, 80 bp, synthetic construct
  source 1..80: mol_type = other DNA
ctctttctgattcttcatttctgactgcctaggcaaggaaaccagataaccaaacttactagaacgttctttaaaacaca

SEQ ID NO: 20627 - DNA, 80 bp, synthetic construct
  source 1..80: mol_type = other DNA
ggttacatagtatgcccttaagacttaattttaaccaaaggcctagcaccaccttaggggctgcaataaacacttaacgc

SEQ ID NO: 20628 - DNA, 80 bp, synthetic construct
  source 1..80: mol_type = other DNA
gttctgttcaatgcattggacatgtgatttaagggaaaagtgtgaatgcttatagatgatgaaaacctggtgggctgcag

SEQ ID NO: 20629 - DNA, 80 bp, synthetic construct
  source 1..80: mol_type = other DNA
ggcaacagcaaagcatcacgctgagcgccgggaccttctgagtgcaggcggtgggcgaagccccgagtcacacacaccca

SEQ ID NO: 20630 - DNA, 80 bp, synthetic construct
  source 1..80: mol_type = other DNA
agctgctaggttgttcagacaactcaatggacagacagtgcctaatagaatttaaccactacgaatatttccaaatgaaa

SEQ ID NO: 20631 - DNA, 80 bp, synthetic construct
  source 1..80: mol_type = other DNA
gtccatggcgtcactgaagtggatgttcaatgagaaaataataaggatgaatgctgcagttggagttcaagagaggaggc

SEQ ID NO: 20632 - DNA, 80 bp, synthetic construct
  source 1..80: mol_type = other DNA
gcgctcaagcaatcctccccagtcagcctcctaagtagctgggactacaggtatgcaccaccatgcctggccaatttttt

SEQ ID NO: 20633 - DNA, 80 bp, synthetic construct
  source 1..80: mol_type = other DNA
cccctcctgcctctctcctcttttctttcccaatcaggcccttcctggtgtgcagaagggaaagctgattccacagcagc

SEQ ID NO: 20634 - DNA, 80 bp, synthetic construct
  source 1..80: mol_type = other DNA
ctctctgtttctctgtctctctctttgtctctgtctctctgtctctgtctctgtgtccctctgtctctctgtttgtctct

SEQ ID NO: 20635 - DNA, 80 bp, synthetic construct
  source 1..80: mol_type = other DNA
ggtggggctagcggtgtactggatggggtgaggcacagggaccgaatttcagatcagaaggctcatctggtagtcagact

SEQ ID NO: 20636 - DNA, 80 bp, synthetic construct
  source 1..80: mol_type = other DNA
ataaataaataaaccttgtttgtagtgaagaggtctcactgggttacccaggctaatcttgaactcctggcttcaagtga

SEQ ID NO: 20637 - DNA, 80 bp, synthetic construct
  source 1..80: mol_type = other DNA
ttctgctgcgtcccacggggacttggggaaaacttggactccccagccccagccctggcatcattttttttttttttttg

SEQ ID NO: 20638 - DNA, 80 bp, synthetic construct
  source 1..80: mol_type = other DNA
tacctcctttggaagccttttgtgagaatttggtaagttctggtatgtgttaagtgtttggagtggggcttggggtatgg

SEQ ID NO: 20639 - DNA, 80 bp, synthetic construct
  source 1..80: mol_type = other DNA
actttgcctttatggggaaaagatgatgccataagccccaaatctcatctgcccatcatcttaacagccctggcaggagt

SEQ ID NO: 20640 - DNA, 80 bp, synthetic construct
  source 1..80: mol_type = other DNA
ctgcactccagcctgggcaacacagtgagactctccttctcaaaaaaaaaaaaaaataggccaggcatggttgctcacgc

SEQ ID NO: 20641 - DNA, 80 bp, synthetic construct
  source 1..80: mol_type = other DNA
caccaccacacccggctaattttttgtattttcatttgtttgtttatttgtttgtttgttttgagatggagtctcactct

SEQ ID NO: 20642 - DNA, 80 bp, synthetic construct
  source 1..80: mol_type = other DNA
attacaggtgtgagccactacacccagcctcttttttttctttttctttttgagacagggtttcgctttgccatgcaggc

SEQ ID NO: 20643 - DNA, 80 bp, synthetic construct
  source 1..80: mol_type = other DNA
gagggaaccagtcctgatgagggaagattaaaggacagtggggctggggatggtggcccacacctgtgtttgcagcactt

SEQ ID NO: 20644 - DNA, 80 bp, synthetic construct
  source 1..80: mol_type = other DNA
caagagcaaaactccatctcaaataaataaataaataataaaaaaataaaaaataaagagggtgggcatgatggctcaag

SEQ ID NO: 20645 - DNA, 80 bp, synthetic construct
  source 1..80: mol_type = other DNA
gatccagtgatccacccaccttagcctcccaacatgctgggattacaggtgtgagctactgtgtccggcccaaattgtct

SEQ ID NO: 20646 - DNA, 80 bp, synthetic construct
  source 1..80: mol_type = other DNA
tggttaactgctgtttttgtcaagatgggttattactatgttgcccaggctggtttcaaactcctgtcctcaactgactc

SEQ ID NO: 20647 - DNA, 80 bp, synthetic construct
  source 1..80: mol_type = other DNA
ctagcctgggcaacagagcaagactccgtttcaaaaaaaaaaaagggaataaatgtcatgttacatatattttatgagaa

SEQ ID NO: 20648 - DNA, 80 bp, synthetic construct
  source 1..80: mol_type = other DNA
ctggcggccacagcggtccgcgcagaccgccggccccttttctatccgcgaccggatacctggcaggggtctaggaaaga

SEQ ID NO: 20649 - DNA, 80 bp, synthetic construct
  source 1..80: mol_type = other DNA
caggatctgtgtgtttggggggagtcatgggtgggtaggagagatgacaggtgacagcctggaggaagagatggagggag

SEQ ID NO: 20650 - DNA, 80 bp, synthetic construct
  source 1..80: mol_type = other DNA
cctcacctagaacctgggcccctgcaactgtaacctgtggcactcactgtaagcccggacttcacctgaaaccccagtcc

SEQ ID NO: 20651 - DNA, 80 bp, synthetic construct
  source 1..80: mol_type = other DNA
ccacctgggacctgggcctctcccatctgtaacccaggccctcacctagaacctgggacctctgaacctggaacccagcc

SEQ ID NO: 20652 - DNA, 80 bp, synthetic construct
  source 1..80: mol_type = other DNA
gaacctgcagtttggtgaggatgagagaatgcaaagaaagcattttccccaggactaccataaatagtcataagcatcac

SEQ ID NO: 20653 - DNA, 80 bp, synthetic construct
  source 1..80: mol_type = other DNA
atatctacgagttcggtggggattcatacaacagtgcatctcattcccgaccgtgtcttatctttgatgacagggtcatc

SEQ ID NO: 20654 - DNA, 80 bp, synthetic construct
  source 1..80: mol_type = other DNA
gctgcgagctaccgcgcctggcccctagtttttgtactttttgtagagattggttttcaccatgttgcccaggctggtct

SEQ ID NO: 20655 - DNA, 80 bp, synthetic construct
  source 1..80: mol_type = other DNA
tagcaactctatgtttaaacttttgactcttttccaaaggggttgccccgcttatgagaattctggtttctccacatcct

SEQ ID NO: 20656 - DNA, 80 bp, synthetic construct
  source 1..80: mol_type = other DNA
gccagtgagatattttatttgtgccctttttttttttttttgagaccgagtctcactgtgttgcccaggctgcagtgcag

SEQ ID NO: 20657 - DNA, 80 bp, synthetic construct
  source 1..80: mol_type = other DNA
gtcagtgtggagggaagtgtctctgttgggtccgggtgctctgtgggactctgaggaaaagctcgcaccaggtagatgct

SEQ ID NO: 20658 - DNA, 80 bp, synthetic construct
  source 1..80: mol_type = other DNA
ggcagcacagcacacttgtaggaattagtatcaacagtacatcttgcgttttttaagatgctgcattttttaacattttg

SEQ ID NO: 20659 - DNA, 80 bp, synthetic construct
  source 1..80: mol_type = other DNA
aggcacggggctagcacaggagggttcaatattttcaaccttatcaagccatattttggcaactcttgtttttcacgaga

SEQ ID NO: 20660 - DNA, 80 bp, synthetic construct
  source 1..80: mol_type = other DNA
cagacgtttgcggggaggggggcgcctgccgggccccggcgaccaccttgggggtcgcgggccggctcggggggcgccca

SEQ ID NO: 20661 - DNA, 80 bp, synthetic construct
  source 1..80: mol_type = other DNA
gaagaagtaagtatggcttgctggggtcggggccgggccgggccagtcacggtgctgatggttctgtcttccttccttct

SEQ ID NO: 20662 - DNA, 80 bp, synthetic construct
  source 1..80: mol_type = other DNA
tatctgctgggctaggcctcgagggactggcaaggacaccctgcgcagggcaccatgaccttggaaggaggtccggggag

SEQ ID NO: 20663 - DNA, 80 bp, synthetic construct
  source 1..80: mol_type = other DNA
tggacccgggtagaaggtgtggccagtgccttgagtcagtggagcagttgcctgtgcctggtctctgtgagatgggttgg

SEQ ID NO: 20664 - DNA, 80 bp, synthetic construct
  source 1..80: mol_type = other DNA
atgaggggtgagccctgtcccttcctggtcactgtctgccatcaggagctgccccgcttacagctgtgattcaggagcca

SEQ ID NO: 20665 - DNA, 80 bp, synthetic construct
  source 1..80: mol_type = other DNA
taaaaatagaaaaactagccaggtgtggtggcacatgccaataatcccagctacttcatctgaggtcaggagttcaagac

SEQ ID NO: 20666 - DNA, 80 bp, synthetic construct
  source 1..80: mol_type = other DNA
cacctgttgcaaaacactgtgctttcgtatcttttctttctacctgtttggaaatgtgaaaatcactgctgccgtaggaa

SEQ ID NO: 20667 - DNA, 80 bp, synthetic construct
  source 1..80: mol_type = other DNA
ctgggattacaggtatgagccactgcttcgccacgttcacctttatttacttatttatttatttttgagacggagtctcg

SEQ ID NO: 20668 - DNA, 80 bp, synthetic construct
  source 1..80: mol_type = other DNA
ctgctttggtgcacgtgtgctcagccggcgtccctctagaatccttgagggccttgtttcagccacatcaggagggattc

SEQ ID NO: 20669 - DNA, 80 bp, synthetic construct
  source 1..80: mol_type = other DNA
tgaagtgtccccgttgaggtggaggcagggcagggcgccttcggtgagggcgagtcctcctgtgcccgtttccccatctg

SEQ ID NO: 20670 - DNA, 80 bp, synthetic construct
  source 1..80: mol_type = other DNA
gggactggtgcactgggagggaaaggtgagccaaggcttcctgcaagaggcagccctgagctgggggtggggaaggctgg

SEQ ID NO: 20671 - DNA, 80 bp, synthetic construct
  source 1..80: mol_type = other DNA
aatgggatcctgtcatcccagcgttttccgaggccgaggtgggcagatgacttgagcctagtagttcaaacgagaccagc

SEQ ID NO: 20672 - DNA, 80 bp, synthetic construct
  source 1..80: mol_type = other DNA
cttccacgcccacccactgggtgtgaggaccttgctcctcgtcatttttgtttttgtttaattttttcttttatgagaca

SEQ ID NO: 20673 - DNA, 80 bp, synthetic construct
  source 1..80: mol_type = other DNA
agcctggacgcgtggcccctgcagggccctttcccacagcactgtgaactcacagcttctctctagggaagggaggaggt

SEQ ID NO: 20674 - DNA, 80 bp, synthetic construct
  source 1..80: mol_type = other DNA
ccctgtgcccagagcaagagccagaagtggtcctgaggctggggctgtgttccctgagccacgcggtcaggggccctggg

SEQ ID NO: 20675 - DNA, 80 bp, synthetic construct
  source 1..80: mol_type = other DNA
tgtggcccacaggaaaatgagacctgtggacatccggggccctgccagacgtggctcggccggacgagggtggccactgc

SEQ ID NO: 20676 - DNA, 80 bp, synthetic construct
  source 1..80: mol_type = other DNA
cagccgctagggggtgcttactttatggaaatgtaactcatacggcagatggtggttcacccgtgtgaagtgcagcctgg

SEQ ID NO: 20677 - DNA, 80 bp, synthetic construct
  source 1..80: mol_type = other DNA
tctgtcagggagaccgcctgtgcgcggggtcccccttaggagcgtccaggtatcacccagggcctgacaacagaggctgg

SEQ ID NO: 20678 - DNA, 80 bp, synthetic construct
  source 1..80: mol_type = other DNA
gacacaggcctcagggtggaggggacatctgtcaggcttggagtcaggtcagcctgcctgctcctagaggacatggctga

SEQ ID NO: 20679 - DNA, 80 bp, synthetic construct
  source 1..80: mol_type = other DNA
gaagcctctcggccggcgccgcagtagtgcctgaggaggagctcagggccttagcgtaggggcggcccacattggcagcc

SEQ ID NO: 20680 - DNA, 80 bp, synthetic construct
  source 1..80: mol_type = other DNA
gctgccctggggtgaggtgcctgggaggagagcaggggctgggccacctttttcatgaccctgctaagcccactgtgggt

SEQ ID NO: 20681 - DNA, 80 bp, synthetic construct
  source 1..80: mol_type = other DNA
gctgagtcagccactggtccattctcggagctggggctctgcactgggcacatgagctctggggcagcccggggcggcct

SEQ ID NO: 20682 - DNA, 80 bp, synthetic construct
  source 1..80: mol_type = other DNA
tcggggcctggtgtctggccagcgtgctggtcatggaggcctacgtgtggcggggctctgggggggcgtgccgtcctcac

SEQ ID NO: 20683 - DNA, 80 bp, synthetic construct
  source 1..80: mol_type = other DNA
gttgacttcgcagccccgggcggagccttcccgggcgggcgtgggaggagggaggcggcctccatgcactttatgtggag

SEQ ID NO: 20684 - DNA, 80 bp, synthetic construct
  source 1..80: mol_type = other DNA
tttatttgggtttttagtgacacctcaggattattatacagcagtgtcagacacagctcaaagtaatgatgactgctccc

SEQ ID NO: 20685 - DNA, 80 bp, synthetic construct
  source 1..80: mol_type = other DNA
ctagggaggtggggcgaggcgaggtttgctggggtgaggcagcggcgcggccgggccgggccgggccacaggcggtggcg

SEQ ID NO: 20686 - DNA, 80 bp, synthetic construct
  source 1..80: mol_type = other DNA
acttcgttagcagctgaactgagacactagaagctaaaatacacagcctcagtgttagcaactaaaatgcagtgaaagta

SEQ ID NO: 20687 - DNA, 80 bp, synthetic construct
  source 1..80: mol_type = other DNA
tattaacttgaataacacagtgcactcttttccaccagaagtagcacaagaagcgttcatgtattcaagtaacagtagtg

SEQ ID NO: 20688 - DNA, 80 bp, synthetic construct
  source 1..80: mol_type = other DNA
aacagtttgtgttgtccatttctactgcctgtgctgctacttaactctacttgaatgcgttataggtacccagaggacaa

SEQ ID NO: 20689 - DNA, 80 bp, synthetic construct
  source 1..80: mol_type = other DNA
attatcacttcaatttacagatgaaaaaacgactcaggtgaatttcttagggtggcacaggggcagaacagagacaggaa

SEQ ID NO: 20690 - DNA, 80 bp, synthetic construct
  source 1..80: mol_type = other DNA
gcagatgctggcatatttctcagggattttttaatgctttgtcccatagaactagcttgaggaaaagttttggagtcttc

SEQ ID NO: 20691 - DNA, 80 bp, synthetic construct
  source 1..80: mol_type = other DNA
tgcctgggcaggcagaattgacacaattttgctcagattggaacctagttcatatctatgaaagaagaccctctttgttt

SEQ ID NO: 20692 - DNA, 80 bp, synthetic construct
  source 1..80: mol_type = other DNA
ggcagtcttgcttttgaaaaaattgatgctgaggaaatatgactacagactcagtactagcaaccacagggactgcttta

SEQ ID NO: 20693 - DNA, 80 bp, synthetic construct
  source 1..80: mol_type = other DNA
tagctgtaaagaggtggagtacagaaattcagagtgactccatgaaagaaaaaagaatgactccaagcttttttaggctg

SEQ ID NO: 20694 - DNA, 80 bp, synthetic construct
  source 1..80: mol_type = other DNA
agctcaatgtaaggaatgactctctaccatagctgtcaaaatggaacattgtaaggtagtatgttccctgtcaccctgga

SEQ ID NO: 20695 - DNA, 80 bp, synthetic construct
  source 1..80: mol_type = other DNA
ttatcttttggtgtgtctccatttgatacacttcatcagagtactgctaccaaaggcagagccagacatttaccttcaaa

SEQ ID NO: 20696 - DNA, 80 bp, synthetic construct
  source 1..80: mol_type = other DNA
tccccagggaaaaggcaaaaacgaatggctttttctgcgagaaactaggactaatatagatatttgggagcactgaacat

SEQ ID NO: 20697 - DNA, 80 bp, synthetic construct
  source 1..80: mol_type = other DNA
aagtcttaagggaaaactctgcgaggaccaacaggctcagaattagctgtgcattgcaaacagatggtgtgtccctgagg

SEQ ID NO: 20698 - DNA, 80 bp, synthetic construct
  source 1..80: mol_type = other DNA
caaagtattgggattacagcgtgagccaccgtgcccggccttcaattttttgctttaagttagaatcctgtttgcttact

SEQ ID NO: 20699 - DNA, 80 bp, synthetic construct
  source 1..80: mol_type = other DNA
atttctgacttactacactcagacttctaatacaatgttgagaagtagtgatggatatctctttcttatttgtgatttca

SEQ ID NO: 20700 - DNA, 80 bp, synthetic construct
  source 1..80: mol_type = other DNA
ccttctctaccacagttctgttttgtatgtcattcccctagcccaggatgatcagccactttcatttacgttcattatta

SEQ ID NO: 20701 - DNA, 80 bp, synthetic construct
  source 1..80: mol_type = other DNA
tttcagggcctggggtaaggcaaagtgtgcacatctgctctgtatattaaaatatcccctcaactcattgaagtggaaca

SEQ ID NO: 20702 - DNA, 80 bp, synthetic construct
  source 1..80: mol_type = other DNA
ttttgacaagcttactttgatattactgctgcaaggtagccccaggagggttgaattgagaagaactgagtattttgagg

SEQ ID NO: 20703 - DNA, 80 bp, synthetic construct
  source 1..80: mol_type = other DNA
gctggagagggccagtaacaagggttgaaaaaggaaagagtattcaagcgtatgcataaaaagactacgggtaggttgtg

SEQ ID NO: 20704 - DNA, 80 bp, synthetic construct
  source 1..80: mol_type = other DNA
tggtgaagtgaatacaagtcaaacatcccaatctgaaattcaaaaccttttgagcacaccaacatgatgccacaagtgga

SEQ ID NO: 20705 - DNA, 80 bp, synthetic construct
  source 1..80: mol_type = other DNA
ggattctacagtggaattttgtcactacttttgggaagaagtttacctttggtggcctacgaataaaaaccacattggca

SEQ ID NO: 20706 - DNA, 80 bp, synthetic construct
  source 1..80: mol_type = other DNA
gtttttccctaaacgatcttgccgtatcacataacagcagtcttgtagtcaatcaagactgacttcaagtggtgaaatgg

SEQ ID NO: 20707 - DNA, 80 bp, synthetic construct
  source 1..80: mol_type = other DNA
ttttactctttcttttacaatgaccatgaaacttatgctgtgtgtagtgtgccacaaggacatttggcctgaaggggatc

SEQ ID NO: 20708 - DNA, 80 bp, synthetic construct
  source 1..80: mol_type = other DNA
catgagtaaagaggatttaggagagaattatgacaatgtccttcggtggtagttttaatgctttgtgggtcacagactcc

SEQ ID NO: 20709 - DNA, 80 bp, synthetic construct
  source 1..80: mol_type = other DNA
ctgacaaaattggtaccatgtgacccaaggcctcaggcatacagaaatattcttatcagggagaatattccaaaggttca

SEQ ID NO: 20710 - DNA, 80 bp, synthetic construct
  source 1..80: mol_type = other DNA
ttggaagcaaaaaacttcaggaaaaaacctgggtccaaatgttgctacatttccttgggcttccacgtgtatgtggttct

SEQ ID NO: 20711 - DNA, 80 bp, synthetic construct
  source 1..80: mol_type = other DNA
tatgtgttgtttaagaaggtggttccagggtggacttcctctgaggtctgttatacctaaaaggatagataaaagcaaac

SEQ ID NO: 20712 - DNA, 80 bp, synthetic construct
  source 1..80: mol_type = other DNA
gctcccctgtggtaagggttggtcggactacaatatctttgtgactttgatgaaagcatctgcagttataatgtggcaaa

SEQ ID NO: 20713 - DNA, 80 bp, synthetic construct
  source 1..80: mol_type = other DNA
acctgtaaaaggtgaaaaaaaaaaacaggttcagattttctgcttaaatatcaaagggcaaatggaacatttttacgatc

SEQ ID NO: 20714 - DNA, 80 bp, synthetic construct
  source 1..80: mol_type = other DNA
tattagtgacctgatgtgataagtggggaaggtcctatgatattggcggcagttggccttgtaatgatggctgaagaata

SEQ ID NO: 20715 - DNA, 80 bp, synthetic construct
  source 1..80: mol_type = other DNA
tttgttgatatttgtggcatcagaagtagatgagctaattgtcagagtcatcccaaggtggattttggcatagcagtgct

SEQ ID NO: 20716 - DNA, 80 bp, synthetic construct
  source 1..80: mol_type = other DNA
cttctatagaatttggccatatgtattcaataagagagctctctccttgactactaggacacacacaggctcgcactgga

SEQ ID NO: 20717 - DNA, 80 bp, synthetic construct
  source 1..80: mol_type = other DNA
attccctccaaacctatccaggcagaagccatcttctggtgaataatagcagaaaatgccatctgtttcccttctattca

SEQ ID NO: 20718 - DNA, 80 bp, synthetic construct
  source 1..80: mol_type = other DNA
tgtaaagctgtggagtccctgtttcccttttgaagttttctctcaaacagttctaaaggtacagaagagtagagcagaga

SEQ ID NO: 20719 - DNA, 80 bp, synthetic construct
  source 1..80: mol_type = other DNA
cctccttataaacacaaacagttatttatagttatactgctaactactttacaggaggtggggagggtagagcaagagga

SEQ ID NO: 20720 - DNA, 80 bp, synthetic construct
  source 1..80: mol_type = other DNA
actgctttgccacatatatcctctctctgattgcccaagctgcttccctaaaaatgtgtcattcatttccctctaccttt

SEQ ID NO: 20721 - DNA, 80 bp, synthetic construct
  source 1..80: mol_type = other DNA
ctcagatagctgtttccttttaatctcttcctgaccagtaggatgtttcaatatggactattgaccttattaatggggag

SEQ ID NO: 20722 - DNA, 80 bp, synthetic construct
  source 1..80: mol_type = other DNA
atttccaatatgtagaaaagcagagtagttacagtgatccctcatcgtccagcttcaacagttgtcaggtcactgccaat

SEQ ID NO: 20723 - DNA, 80 bp, synthetic construct
  source 1..80: mol_type = other DNA
tagttctcattttcgtttctgcctttatcaccatttatttcctcccccaactcttaaaacaaccttttctttatttactg

SEQ ID NO: 20724 - DNA, 80 bp, synthetic construct
  source 1..80: mol_type = other DNA
gcatgcaaataagctagtgatgtgcctatatcaaggaaaagcaagggtgcgagtttggtcagaatcagtttataaagttc

SEQ ID NO: 20725 - DNA, 80 bp, synthetic construct
  source 1..80: mol_type = other DNA
tcttgcgtctttgtgaactgtgtacacaatctgtcactaaagcttgtcatttcttgttgaaactcactttcagttttgtc

SEQ ID NO: 20726 - DNA, 80 bp, synthetic construct
  source 1..80: mol_type = other DNA
gcagtgagcagacatcatgccactgcactcccagctgagtaatagagagagaccctgtctcagaaaaaaaaacaaaaaca

SEQ ID NO: 20727 - DNA, 80 bp, synthetic construct
  source 1..80: mol_type = other DNA
tgttgtagcacgtatgagtacttcagtcattttgatggctaagtaatacttcagtgtatggatatggcatatgtcatata

SEQ ID NO: 20728 - DNA, 80 bp, synthetic construct
  source 1..80: mol_type = other DNA
ctgaagccagagttacctgacttaaaaagatgcctgctgatgaaaggttgcccttccagaaaatatcattaggcatgtta

SEQ ID NO: 20729 - DNA, 80 bp, synthetic construct
  source 1..80: mol_type = other DNA
cacagcattttttcaaactactgtcttggccttggagacagctggagagccagcagcattagtctattcaaattgcatgt

SEQ ID NO: 20730 - DNA, 80 bp, synthetic construct
  source 1..80: mol_type = other DNA
tagttctttagaatggacagctgcttgagaggctcacctaggaagctgtttctagcatgtacctgggtgtcaaacttatt

SEQ ID NO: 20731 - DNA, 80 bp, synthetic construct
  source 1..80: mol_type = other DNA
ctcagggaagtggcttgtggatacagatgtggatgagatagagaaagctgtaatctctgttccacatacctactttagta

SEQ ID NO: 20732 - DNA, 80 bp, synthetic construct
  source 1..80: mol_type = other DNA
gatgaattttatttaacctctccttaattgctagctgttactattacaatattggtgaagcagagcatattcctccaggt

SEQ ID NO: 20733 - DNA, 80 bp, synthetic construct
  source 1..80: mol_type = other DNA
ttaatttgggaggtcaattgttctacctcactgagagggaacagaaggatattgcttccttttgcagcagtgtaataaag

SEQ ID NO: 20734 - DNA, 80 bp, synthetic construct
  source 1..80: mol_type = other DNA
gatgtgcaagaaagtcacatttgttatgtatgtaggagtaaacgttcggtggatcctctgtctttgtaactgaggttaga

SEQ ID NO: 20735 - DNA, 80 bp, synthetic construct
  source 1..80: mol_type = other DNA
tttaaaaacatcatgggaaaaatgcttagaggttactattttgactacaaagttgagtttttttctgtagttaccataat

SEQ ID NO: 20736 - DNA, 80 bp, synthetic construct
  source 1..80: mol_type = other DNA
taattctgctgtaataatgatagtgctcaagaagtgccttgagttggtgtacagtgccatggccatcaagaatcccagat

SEQ ID NO: 20737 - DNA, 80 bp, synthetic construct
  source 1..80: mol_type = other DNA
tttgtgaactgaatatcatgaaccatgttttgatacccctttttcacgttgtgccaacggaatagggtgtttgatatttc

SEQ ID NO: 20738 - DNA, 80 bp, synthetic construct
  source 1..80: mol_type = other DNA
gttgcctttgggtcagcacatttgttagtctcctgggggtgaaaacttggcttacaagagaactggaaaaatgatgagat

SEQ ID NO: 20739 - DNA, 80 bp, synthetic construct
  source 1..80: mol_type = other DNA
actcgcgcgcacggagcgacgacacccccgcgcgtgcacccgctcgggacaggagccggactcctgtgcagcttccctcg

SEQ ID NO: 20740 - DNA, 80 bp, synthetic construct
  source 1..80: mol_type = other DNA
cttcttggcccggagtttttggaaacaagtttcaagaaaataatcgatttccaaaagaaagttagctggctccactgacg

SEQ ID NO: 20741 - DNA, 80 bp, synthetic construct
  source 1..80: mol_type = other DNA
gttagactttttgcagctatgatccaaataacagtatctgcagctgtggtctgggtaaccgagtatttgggcaagtcata

SEQ ID NO: 20742 - DNA, 80 bp, synthetic construct
  source 1..80: mol_type = other DNA
ttgttagttaggttctgtttacaaggataaggtttatgatttgcaaattccagacccaatagttcacgagtcactttcat

SEQ ID NO: 20743 - DNA, 80 bp, synthetic construct
  source 1..80: mol_type = other DNA
gataccatctcagatgaataagacagacctggtctttgccattgaatttaacagctgggagcatgttataagtaaagaaa

SEQ ID NO: 20744 - DNA, 80 bp, synthetic construct
  source 1..80: mol_type = other DNA
tgcttcacatcccaccacagcccacattttcccagtctatttgtgtcactacacatacacacaatgtgagcaatttaggc

SEQ ID NO: 20745 - DNA, 80 bp, synthetic construct
  source 1..80: mol_type = other DNA
gagtagcgtggatattatttaggtctgatgcaaaccaccaaagcagttttaaatagggtgcaggggaaacatacttcctg

SEQ ID NO: 20746 - DNA, 80 bp, synthetic construct
  source 1..80: mol_type = other DNA
gtgtagtcagtttagtctacttatggcctcctgcttagactcttaagggttccctagcatctgtgttttgtttgtaggtt

SEQ ID NO: 20747 - DNA, 80 bp, synthetic construct
  source 1..80: mol_type = other DNA
aaccacccatttctgtggaaggactatgaacattgtaggagttctaaagttgtacctggtcttccaagacattgaaaaga

SEQ ID NO: 20748 - DNA, 80 bp, synthetic construct
  source 1..80: mol_type = other DNA
actaatttcccaataatcatagtagctaccacttattgaggtcttgctactgcacggatcatgctgagtacttcaggtgt

SEQ ID NO: 20749 - DNA, 80 bp, synthetic construct
  source 1..80: mol_type = other DNA
ataatcataactcactgcagccttggagtcctaggttcaagcagtcctctagagtagctcggactaaaggcatgcaccac

SEQ ID NO: 20750 - DNA, 80 bp, synthetic construct
  source 1..80: mol_type = other DNA
aggctgtctttcttcccactggggctcattttccttctatacagtgacaagaattggactaaataagatttccagtattt

SEQ ID NO: 20751 - DNA, 80 bp, synthetic construct
  source 1..80: mol_type = other DNA
aatattctcagaaaagacagaatttgcaacagattggcagttttcagactgctgttttaggcaggggagtagctgccgca

SEQ ID NO: 20752 - DNA, 80 bp, synthetic construct
  source 1..80: mol_type = other DNA
tgtacactttcacaaggtccccaggtgattcctgtacacatagcagtttgaaaaacactgctgtaatagcattaaagcat

SEQ ID NO: 20753 - DNA, 80 bp, synthetic construct
  source 1..80: mol_type = other DNA
tcactgcattaatcatgtttacctcattaggcatttactcacagattgccttgacatatgtaggccctaattcattctgg

SEQ ID NO: 20754 - DNA, 80 bp, synthetic construct
  source 1..80: mol_type = other DNA
ctccaccctttgaaataacgcctggtctaaatgttactttttctagtgggccttccttgattatccatcccactgtgatt

SEQ ID NO: 20755 - DNA, 80 bp, synthetic construct
  source 1..80: mol_type = other DNA
agagaccaggcaaagtcataaagtaaatcacaccatctcacgcaggacaattttttgtcactcctgccttttctctttat

SEQ ID NO: 20756 - DNA, 80 bp, synthetic construct
  source 1..80: mol_type = other DNA
atgggccactgcacctgaccagaattttaatattcttaagtcttaatattctgtggcacttattggaaatggttgaaata

SEQ ID NO: 20757 - DNA, 80 bp, synthetic construct
  source 1..80: mol_type = other DNA
tctaaattgaactgtcctgaagttttaagaaaatgaaatgatcagactcagcagttcaagattgtgttggttgatagcag

SEQ ID NO: 20758 - DNA, 80 bp, synthetic construct
  source 1..80: mol_type = other DNA
cttgttcttgcctcgaacattaaaagcccaatttaagactggagaatttcttctttgagggttttgtccacccatcataa

SEQ ID NO: 20759 - DNA, 80 bp, synthetic construct
  source 1..80: mol_type = other DNA
caaaatatagagaagaacagaacaagaagtgttttgagtagcagaacacgactcacacagacatctaatatttagtcaaa

SEQ ID NO: 20760 - DNA, 80 bp, synthetic construct
  source 1..80: mol_type = other DNA
taaggaactatttcccttcttaacttctttgctaggttatctaaagggagatatgctttctcacatttgtttccttgaac

SEQ ID NO: 20761 - DNA, 80 bp, synthetic construct
  source 1..80: mol_type = other DNA
gagcaaatacaggcctatctaaaagcatacctcacagtaaagatggttaaaaaccaaaaccggaggaggcagagtactct

SEQ ID NO: 20762 - DNA, 80 bp, synthetic construct
  source 1..80: mol_type = other DNA
aattttggaaaatgccttctttttcctaggcctccctcatagacattttcctgacaagtccccacttcaggtttcagaaa

SEQ ID NO: 20763 - DNA, 80 bp, synthetic construct
  source 1..80: mol_type = other DNA
cgttcaggtaatttcttagcacctataatcacagtgggacagattaaattacttgtacttttccattcctgtgctttgga

SEQ ID NO: 20764 - DNA, 80 bp, synthetic construct
  source 1..80: mol_type = other DNA
tcagaagccgaggaacgcaggtccttttgaatttctttagatcagtgttgtcctataggactttctgcaatgatgaaagt

SEQ ID NO: 20765 - DNA, 80 bp, synthetic construct
  source 1..80: mol_type = other DNA
acaagattctatcaacatgtcagcagataagtacagcgcgagggtctgagaacaatggtagatgcttgtaattttagaag

SEQ ID NO: 20766 - DNA, 80 bp, synthetic construct
  source 1..80: mol_type = other DNA
acatattttgtatggcagccaaacagactaagttaccaaccttagtgggattgctaggacttggaaaggagtagcctttt

SEQ ID NO: 20767 - DNA, 80 bp, synthetic construct
  source 1..80: mol_type = other DNA
tctccactgcaacctgctgccattcccagcatggtgaattctcctccagtagaagtcatatagcaatgttttataattaa

SEQ ID NO: 20768 - DNA, 80 bp, synthetic construct
  source 1..80: mol_type = other DNA
aggaaatggaggtttcaagaagttaagtggcccacagctaatacatgtaagagcctgaattcacactcaagtttttacct

SEQ ID NO: 20769 - DNA, 80 bp, synthetic construct
  source 1..80: mol_type = other DNA
ggatggtgtgggcccactgtttccaagtcttttttatttctttaagtggaattagaaaaccagttttgcatgtgaaatct

SEQ ID NO: 20770 - DNA, 80 bp, synthetic construct
  source 1..80: mol_type = other DNA
tgttgtaaaactccgtcagtcgtgtatcattatcttgcctctatcagtctgtgccatttaccaatgttttgaccatcacc

SEQ ID NO: 20771 - DNA, 80 bp, synthetic construct
  source 1..80: mol_type = other DNA
gcacaagtgctagaattctgaaatactgcctttggcaacaatgtgtagatatttccacctgcaagagtcattttaaatgt

SEQ ID NO: 20772 - DNA, 80 bp, synthetic construct
  source 1..80: mol_type = other DNA
aaaattgatgcttttgagcttatctctttattttctgcccacatggtggtctccctattaggtattgtttctccacttct

SEQ ID NO: 20773 - DNA, 80 bp, synthetic construct
  source 1..80: mol_type = other DNA
caataaaagcaataacaacaaaacagaaatggtggtgtgtcaaccagggttccagttgcaagcagatggcaccctcaaat

SEQ ID NO: 20774 - DNA, 80 bp, synthetic construct
  source 1..80: mol_type = other DNA
ggtatgcatttttaatctgcatttcacttgttagcaatgaggttgacatgcttcgcttttagagcttattctctggtgat

SEQ ID NO: 20775 - DNA, 80 bp, synthetic construct
  source 1..80: mol_type = other DNA
agtatctgactcggaaatgctgcaggcaattaaaaacctcctttcagagaacatgtctttcaattctgggcccatatggt

SEQ ID NO: 20776 - DNA, 80 bp, synthetic construct
  source 1..80: mol_type = other DNA
gtaggcagtgagtgtggggaaaatgtgagataaaatggggaaggtggtatgacctagagtgaaggttttgatattactca

SEQ ID NO: 20777 - DNA, 80 bp, synthetic construct
  source 1..80: mol_type = other DNA
atgttgaagttgggttagggtttgctatagggttaattaggtgggttttgtatcgttgtttagaggaatatctttattcc

SEQ ID NO: 20778 - DNA, 80 bp, synthetic construct
  source 1..80: mol_type = other DNA
ctctccctacatccttcttccctttctctccctttctttcttctaatggtccttttttcttttccctgttgattgtgttc

SEQ ID NO: 20779 - DNA, 80 bp, synthetic construct
  source 1..80: mol_type = other DNA
tagagctcttggtctgggagacactgagaatttcaaaatagcttgttacctaaaaataaacttcctgaaatgaacttgag

SEQ ID NO: 20780 - DNA, 80 bp, synthetic construct
  source 1..80: mol_type = other DNA
aagaggtggcatttgatcagagatcagaaaagtgacaggaagctaaacaaaggtaatagcaagtgaaaggcctgaggagg

SEQ ID NO: 20781 - DNA, 80 bp, synthetic construct
  source 1..80: mol_type = other DNA
tcaaccaccccaacccctcaccacccctcaccacggtacaatggattttattacaaattgcatacaccagataattctaa

SEQ ID NO: 20782 - DNA, 80 bp, synthetic construct
  source 1..80: mol_type = other DNA
tgtttttttagtcagaaattctggttatattattcatataaccattgggatagatatgacttctttctctcagctcagaa

SEQ ID NO: 20783 - DNA, 80 bp, synthetic construct
  source 1..80: mol_type = other DNA
tgcataactctgaagggtagagggaggatccataacatttgcaaggcaggcagacttgtgctcagcataagtttagacat

SEQ ID NO: 20784 - DNA, 80 bp, synthetic construct
  source 1..80: mol_type = other DNA
agccatcatcccatggctagttgatgcagagaaacaaattcctggttattttgccataatgtggtacatctttgaaggac

SEQ ID NO: 20785 - DNA, 80 bp, synthetic construct
  source 1..80: mol_type = other DNA
ttccttcttaggcctctataagcgtcacaaggaaaagagaccatgcctttctgtgggcacagcataccttcgttttatta

SEQ ID NO: 20786 - DNA, 80 bp, synthetic construct
  source 1..80: mol_type = other DNA
agtatgttcatgagggagcagagggaggtagatagagaggtgatacccttttccaagagagccaaaatgttcttttgttc

SEQ ID NO: 20787 - DNA, 80 bp, synthetic construct
  source 1..80: mol_type = other DNA
ctcgcttccaatgaatctcttcactctaggagaaagaatgacgagaacataacactagagacagtttgccatgaccccaa

SEQ ID NO: 20788 - DNA, 80 bp, synthetic construct
  source 1..80: mol_type = other DNA
gcctccatctttgaagttcagcgtttactcagcttgaaaggaaggcatacactattccctcaatttttaataagaagaga

SEQ ID NO: 20789 - DNA, 80 bp, synthetic construct
  source 1..80: mol_type = other DNA
gcactactaaactattctcctcctgaaaaggatgtaagcatatggatttccgtgtaccttctccaacactgggaatggat

SEQ ID NO: 20790 - DNA, 80 bp, synthetic construct
  source 1..80: mol_type = other DNA
agatcaccttttaaaagaaggcctaggctaagccaaaggaattaatctctgacagtagaatacccaggcatgtttactag

SEQ ID NO: 20791 - DNA, 80 bp, synthetic construct
  source 1..80: mol_type = other DNA
atattcagagaaaacatactgtcgctgtgcagggagctcagccctttccaagcatgacctcatttaatcttatagccacc

SEQ ID NO: 20792 - DNA, 80 bp, synthetic construct
  source 1..80: mol_type = other DNA
ccctcccagtctctgaagattccctcctgccagaacattttgtgtagaattctaaggaaatcagagtctatccctgtact

SEQ ID NO: 20793 - DNA, 80 bp, synthetic construct
  source 1..80: mol_type = other DNA
aaacaacccacaagtgcctttcacataagtgattagggtaatcgcagttctgtacttgccaaagggattcattccctctt

SEQ ID NO: 20794 - DNA, 80 bp, synthetic construct
  source 1..80: mol_type = other DNA
taatagtgtggttctaagaagagttggcctgaatcagttcattcttgggttgtttgctaagattgtctgctgaaggtggg

SEQ ID NO: 20795 - DNA, 80 bp, synthetic construct
  source 1..80: mol_type = other DNA
tggtggtggtgtgtttgcttttttatcagtcttaacccatgggaggctgcacaacttacataagaggctacctgttctgt

SEQ ID NO: 20796 - DNA, 80 bp, synthetic construct
  source 1..80: mol_type = other DNA
aggccaacccctgatagagatattcatggtttttgtgtttctctctcaaatgctaactaccagaaaagcttagagtcaaa

SEQ ID NO: 20797 - DNA, 80 bp, synthetic construct
  source 1..80: mol_type = other DNA
tttttgttgtgaaccagccttggttagaaagcacacttggaattcatcaatatggccctatgtctggccaaggaaataat

SEQ ID NO: 20798 - DNA, 80 bp, synthetic construct
  source 1..80: mol_type = other DNA
ccatgtctttcattttccaggccccatcctattcgaaatacctgtttcttccaccaggctgatgtagttatgcttaggct

SEQ ID NO: 20799 - DNA, 80 bp, synthetic construct
  source 1..80: mol_type = other DNA
aagccagggagagagagaggatgtattctggtgacctaacaggtattgtgaataatgaatatgcttttccaaagcgatct

SEQ ID NO: 20800 - DNA, 80 bp, synthetic construct
  source 1..80: mol_type = other DNA
aaggtcctggcatttattgggcgctatatgctgggcaggctgattttagggtctgataaatctgtcagactttagagtct

SEQ ID NO: 20801 - DNA, 80 bp, synthetic construct
  source 1..80: mol_type = other DNA
gggcacacttagaataacgaggtgacaagttattctttatgtaacatgccaacaaaatttttaaaggtacagaaaatgat

SEQ ID NO: 20802 - DNA, 80 bp, synthetic construct
  source 1..80: mol_type = other DNA
ggggtggccagcaaaattatattttctgacctgaccagtggttacaagagtgttgatcttatagtaattcactaagccag

SEQ ID NO: 20803 - DNA, 80 bp, synthetic construct
  source 1..80: mol_type = other DNA
tcctttggagtgattgaaaagtaaacaatttgtcttataacttgagtatgcatgtgcgcacacacatgcacacgcgcgtg

SEQ ID NO: 20804 - DNA, 80 bp, synthetic construct
  source 1..80: mol_type = other DNA
gttgtccatgtgcagcacaacaaatcaagccaggcagatctcccattggcactagttaccaacttcctagagaaacccat

SEQ ID NO: 20805 - DNA, 80 bp, synthetic construct
  source 1..80: mol_type = other DNA
aaatatactcctttagacacattatacaagaattgccaatgtcagtcggtggatggctgtaaaatcacttagtccaggct

SEQ ID NO: 20806 - DNA, 80 bp, synthetic construct
  source 1..80: mol_type = other DNA
acatcccaaagcttccttccagccctggttgctattgttagagtttttcaccacctctttgaagtttcaagattgacaga

SEQ ID NO: 20807 - DNA, 80 bp, synthetic construct
  source 1..80: mol_type = other DNA
atttctgattataagacattccatgtagttacagacacagagaccggagacaagtgggtacttcaagcaaacacattcat

SEQ ID NO: 20808 - DNA, 80 bp, synthetic construct
  source 1..80: mol_type = other DNA
aaagtatcagatgctgaagtagctatgtagactggggtatataacctggggttcatcatcatgagccaggaaaatttagg

SEQ ID NO: 20809 - DNA, 80 bp, synthetic construct
  source 1..80: mol_type = other DNA
cagatggatgacacataaagcaatagaattctgcatgtttgcccaatgaaagcagcccagcacaagctcccagtgaacta

SEQ ID NO: 20810 - DNA, 80 bp, synthetic construct
  source 1..80: mol_type = other DNA
aaataagacagttttccaagtttttctaggcctctcttaagcagtgacatttaagctgaagtttgaaggaagagcagggg

SEQ ID NO: 20811 - DNA, 80 bp, synthetic construct
  source 1..80: mol_type = other DNA
ttggaagacagagaaggacatcttctcagacatcaatctgaagcatgagaacatactccagttcctgacggctgaggagc

SEQ ID NO: 20812 - DNA, 80 bp, synthetic construct
  source 1..80: mol_type = other DNA
ctaagaaactattggaaggtgattggaaatcaccacaacatcccttataaatgatgagcccagtgttttcacacagtgga

SEQ ID NO: 20813 - DNA, 80 bp, synthetic construct
  source 1..80: mol_type = other DNA
ggatgttattgaaaaatgtgatgacataagtcatggggttagataaggcagctctggggtttggcacttccttattttgg

SEQ ID NO: 20814 - DNA, 80 bp, synthetic construct
  source 1..80: mol_type = other DNA
tattgaggaaggccgtcttcttactgcttaagcctgcaagactgattaggagacctacttttctcctgaaaagctggctt

SEQ ID NO: 20815 - DNA, 80 bp, synthetic construct
  source 1..80: mol_type = other DNA
agtctccttgaccttgtgagagttcctcagtcgatttttgtcttttatgaccttgacacttgtaaaaagtttaagacagt

SEQ ID NO: 20816 - DNA, 80 bp, synthetic construct
  source 1..80: mol_type = other DNA
cactgagaataattttatgcttgaaagctttgacagttccaaaatgaatctttagccgggtatgagttgtatcagagaca

SEQ ID NO: 20817 - DNA, 80 bp, synthetic construct
  source 1..80: mol_type = other DNA
gtcttagtttcagaggcttttcttttacattcaaaaggtcctttggaaagtacacgaagcctgaagacagatggattccc

SEQ ID NO: 20818 - DNA, 80 bp, synthetic construct
  source 1..80: mol_type = other DNA
aaaaaaaagaggtatggtccacctcaactgtgtgcagaaggatgatgggatgcaagtctccagtgaaaacagctaatcta

SEQ ID NO: 20819 - DNA, 80 bp, synthetic construct
  source 1..80: mol_type = other DNA
gactctgtagctcacaggccttagtattcctggtatactgctagcctggccaatggagaacgtatttaaaatagtagcta

SEQ ID NO: 20820 - DNA, 80 bp, synthetic construct
  source 1..80: mol_type = other DNA
gtttaaaaagcagtgtctttctttgagagacaggaagtctagtgaagagccagtattttagggacaggtaatgaacaaag

SEQ ID NO: 20821 - DNA, 80 bp, synthetic construct
  source 1..80: mol_type = other DNA
acgcttcattttcctggatttcaagggagcacagtctggaaagcagatatgaaaactcgggggtactgctttggggaaaa

SEQ ID NO: 20822 - DNA, 80 bp, synthetic construct
  source 1..80: mol_type = other DNA
aggtggttcttgttataggttagccaggtgtaacattttctctggactcagcccacacactcctgaacttgctttttatg

SEQ ID NO: 20823 - DNA, 80 bp, synthetic construct
  source 1..80: mol_type = other DNA
ttttttcctgtgtcaaaatgcatctcacattccttaagaagcatttagggcaatgttgctccaagtgtggtctttggcag

SEQ ID NO: 20824 - DNA, 80 bp, synthetic construct
  source 1..80: mol_type = other DNA
aaataggacatttttcagaagttaaagaaaggtcagcctaaatcatgcacacactgcagatccccatccgtactcctaat

SEQ ID NO: 20825 - DNA, 80 bp, synthetic construct
  source 1..80: mol_type = other DNA
agattaggacttggaatgaattggctctgcgtttatagtctcaaggacaaagactttgtctttgttctcaaggactatca

SEQ ID NO: 20826 - DNA, 80 bp, synthetic construct
  source 1..80: mol_type = other DNA
ggcaccaactgcagctgctacataagccaaaacaattgaagatggaaggtctgtggactgtaccttatctaaggaacaat

SEQ ID NO: 20827 - DNA, 80 bp, synthetic construct
  source 1..80: mol_type = other DNA
ccagttaggtgagaaaaataagcaggtgaatatattaaataaaatatggtatatgcacgaatagagccctgcccaggata

SEQ ID NO: 20828 - DNA, 80 bp, synthetic construct
  source 1..80: mol_type = other DNA
ttctgtactgaaatttgctcaactgaaattctttaccccttaaaggataacttttcgtaccctttcctcccaggttgccc

SEQ ID NO: 20829 - DNA, 80 bp, synthetic construct
  source 1..80: mol_type = other DNA
tgctacttactcctgggccttcacgtcaggagtttatatttgattccctctggattccaaatgttttcttctgggaatct

SEQ ID NO: 20830 - DNA, 80 bp, synthetic construct
  source 1..80: mol_type = other DNA
gcaaattcagataagaaacagaaacaacaaatcaggcacaatcgggaagacaaatggagcaggaagtctggtctgtgcca

SEQ ID NO: 20831 - DNA, 80 bp, synthetic construct
  source 1..80: mol_type = other DNA
aactacagagacagtacaaaatcagtggctgccagaaatttaggggaatggagggagggatgaataagtggaatgcaggg

SEQ ID NO: 20832 - DNA, 80 bp, synthetic construct
  source 1..80: mol_type = other DNA
actcagtcagcacatgttaaatgcacaggcacttttggaccctgcttgcactcactatagcaacaaggtcagcaggccac

SEQ ID NO: 20833 - DNA, 80 bp, synthetic construct
  source 1..80: mol_type = other DNA
cacattgcacttgcttttgcaaaataatcattccctgcctagcacttctcttctggccatggaactaagtacagtggcac

SEQ ID NO: 20834 - DNA, 80 bp, synthetic construct
  source 1..80: mol_type = other DNA
agagaggatttgaatgtgggacacaaaggtcccatttgcagttagaaaatttgtgtccacaaggacaagaacaaagtatg

SEQ ID NO: 20835 - DNA, 80 bp, synthetic construct
  source 1..80: mol_type = other DNA
tgcattgtttgtcttttacataaataaaatgtttattagattgaataaagcaaaatactcaggtgagcatcctgcctcct

SEQ ID NO: 20836 - DNA, 80 bp, synthetic construct
  source 1..80: mol_type = other DNA
gcactgctctctcccccagcaaaaaagccaagaattttccccaaagcttatggtgaggaacctgtgtgtgtgtgtgtggt

SEQ ID NO: 20837 - DNA, 80 bp, synthetic construct
  source 1..80: mol_type = other DNA
accacctcttcctgtgtcccagggtcctctccttgcggcccttcacatcccatggcttctcgtgtgcgggcccctcttcg

SEQ ID NO: 20838 - DNA, 80 bp, synthetic construct
  source 1..80: mol_type = other DNA
tgcctctcctagtaagattcattacctatggtttcaaagaaagtgcagtttctagggagtgaaggaacacgtgaaataca

SEQ ID NO: 20839 - DNA, 80 bp, synthetic construct
  source 1..80: mol_type = other DNA
tgacaaactatcagtgtcaggatggcagagggaaagagaaagaagaggaaggccaaagacatggggagtgaataaaaagt

SEQ ID NO: 20840 - DNA, 80 bp, synthetic construct
  source 1..80: mol_type = other DNA
agacccagagcaaacaaggtgaccagagtgatggctgagcaagaaagtcccagcagcacactgcaagaccagagtacatt

SEQ ID NO: 20841 - DNA, 80 bp, synthetic construct
  source 1..80: mol_type = other DNA
ggaaagagtacattatagaaaaccagtggacctccggttctgagagcagggatacttggatgaccctaaaggcagagtct

SEQ ID NO: 20842 - DNA, 80 bp, synthetic construct
  source 1..80: mol_type = other DNA
gttccttcttcactcatgtcaggtctgagcttcaaatgccattttagagagctgtgagcttccttgtggaatttctagca

SEQ ID NO: 20843 - DNA, 80 bp, synthetic construct
  source 1..80: mol_type = other DNA
tctttccaacaggactagcctaagtgcaggattctacttcactgtgtatgccatgcccttctaaccatttttaaagacac

SEQ ID NO: 20844 - DNA, 80 bp, synthetic construct
  source 1..80: mol_type = other DNA
aaatgttggcagggcacggtggctcacacctgtaatcccacactttgggaggccaaggcgggcaaaacacctgaggtcag

SEQ ID NO: 20845 - DNA, 80 bp, synthetic construct
  source 1..80: mol_type = other DNA
ttggacagtgccaacgtgcacacgtcaagggcataaatgaaggaaaaggaagaggctgaaagaaaagacacagcactcaa

SEQ ID NO: 20846 - DNA, 80 bp, synthetic construct
  source 1..80: mol_type = other DNA
agttcttcttttatttaggccatgggtcaccaagtgatttaggaaaatttggaaagggctggcaagactcaggctatata

SEQ ID NO: 20847 - DNA, 80 bp, synthetic construct
  source 1..80: mol_type = other DNA
agttggagtaagaaaagtaatatgtgcaggcttcaaggagcctgtattgtttctttggctggatggtgagcacaaggatg

SEQ ID NO: 20848 - DNA, 80 bp, synthetic construct
  source 1..80: mol_type = other DNA
accaaggcctactaaagccagactaagggcctaccctacaagtatgacaatatgatagagagaagagacttttgacctaa

SEQ ID NO: 20849 - DNA, 80 bp, synthetic construct
  source 1..80: mol_type = other DNA
gcccttgatcttccagtggctgctgtcaattgtgattcacctgacttctactccccaacttcctcattctccaaagatgc

SEQ ID NO: 20850 - DNA, 80 bp, synthetic construct
  source 1..80: mol_type = other DNA
cagtacctaccaaataaagatgctgtttaggaggaaaaaagcaggcatggggtgtgcttagcataatgtcaaaatgtggc

SEQ ID NO: 20851 - DNA, 80 bp, synthetic construct
  source 1..80: mol_type = other DNA
tggcctggcccgaataatttcttagaaagggtaaatacacatgtgaacaaagaagaacctgcaccaagaatttacttttt

SEQ ID NO: 20852 - DNA, 80 bp, synthetic construct
  source 1..80: mol_type = other DNA
tttttctgagccacagctaagcacaccccatgcagtgctagatttcggagatctagctttctagatctgatgggtctagt

SEQ ID NO: 20853 - DNA, 80 bp, synthetic construct
  source 1..80: mol_type = other DNA
agcagaatcctaaaatagcagcagtccggattaacatggctgtgaggagtaggtgcttagctgaataacatcagaattaa

SEQ ID NO: 20854 - DNA, 80 bp, synthetic construct
  source 1..80: mol_type = other DNA
cccactgttcctcaccagtcagcaggccccagggctgggatggtgctgctcagcccagtcacgggcttctcggctgccgg

SEQ ID NO: 20855 - DNA, 80 bp, synthetic construct
  source 1..80: mol_type = other DNA
gctgttccctcaaggcctcttctccctgcaactagcctttctcgggaaactatttaagcccaacattcattcaacaagca

SEQ ID NO: 20856 - DNA, 80 bp, synthetic construct
  source 1..80: mol_type = other DNA
ctttcatctctccaggtttatgtagcctcatggatcagttactgtgatatttaagggagactgcttagcacagtgcctga

SEQ ID NO: 20857 - DNA, 80 bp, synthetic construct
  source 1..80: mol_type = other DNA
cctatgtggtgattcactcacctaatgtttccaaatggcatggaaagtcaagacgacttctggattcatggacatctggt

SEQ ID NO: 20858 - DNA, 80 bp, synthetic construct
  source 1..80: mol_type = other DNA
agggctagcactgccctcagaaagctcagccactgtttgctgaatttaattaaaaatacatctctaataacctctttgta

SEQ ID NO: 20859 - DNA, 80 bp, synthetic construct
  source 1..80: mol_type = other DNA
agcaaaggcgatgaacccggaggctggatttggtaatcaagggcctagattttaaaaagagaaaggaggatactgagtta

SEQ ID NO: 20860 - DNA, 80 bp, synthetic construct
  source 1..80: mol_type = other DNA
cagtaggaagaagtctccctgggaaagcaggaatctgggttccagtccttactctccacttgctagacctcagttttcca

SEQ ID NO: 20861 - DNA, 80 bp, synthetic construct
  source 1..80: mol_type = other DNA
ctttatttttttggtttctttgattctgtttgaagcttttgtctgatccaaactatggggtccatcttccggctgtgaaa

SEQ ID NO: 20862 - DNA, 80 bp, synthetic construct
  source 1..80: mol_type = other DNA
agcccaaagggcagggctgggccccttggtgtaaggccagtgcgggcagatttcagctcaggatgggagagcgctttcct

SEQ ID NO: 20863 - DNA, 80 bp, synthetic construct
  source 1..80: mol_type = other DNA
cattttgttaatggtttgccatgggtgggaggacaatcaggacaggctttccagaggcagcggcatttgttcaggcttct

SEQ ID NO: 20864 - DNA, 80 bp, synthetic construct
  source 1..80: mol_type = other DNA
tgtctgctgagtagactctgctgagacagtccttcctcaagcagactccggctagtagtagacatgtggtggctcagtgc

SEQ ID NO: 20865 - DNA, 80 bp, synthetic construct
  source 1..80: mol_type = other DNA
aacctggcttcccaggggcagacactaagtcagagcctcacgactttcctggacacagacaccttggtcaatgtcaggag

SEQ ID NO: 20866 - DNA, 80 bp, synthetic construct
  source 1..80: mol_type = other DNA
gtttcatgtatactttgtacacatcgcctgaaggtgattttatacaatgcaacccgtcacatggggtcaagtgtgggatt

SEQ ID NO: 20867 - DNA, 80 bp, synthetic construct
  source 1..80: mol_type = other DNA
tttgttcctattattagatcctcagcagccatctgtcccattagcctccagcttgtggtggtgcttgggcctcaccaact

SEQ ID NO: 20868 - DNA, 80 bp, synthetic construct
  source 1..80: mol_type = other DNA
cttaggacagtatcaaataaatggtgagtgataaatgtgacctgtttttgttgttacggactctgagagagggcccgatt

SEQ ID NO: 20869 - DNA, 80 bp, synthetic construct
  source 1..80: mol_type = other DNA
tgccctgtgctctgccagatgggcagaaggacttagccctataggaggcttgcccccactccgtctggcctgttcagaaa

SEQ ID NO: 20870 - DNA, 80 bp, synthetic construct
  source 1..80: mol_type = other DNA
tacagttgggaaaacaggcccgggaagggaaggactctccctgagcctttctttggacagctgaattgtgctcagaaaga

SEQ ID NO: 20871 - DNA, 80 bp, synthetic construct
  source 1..80: mol_type = other DNA
aattcctcatgaatttagctggattctgggctttatcctattggaccaatagtctgtgagattcttgaggagaggccaat

SEQ ID NO: 20872 - DNA, 80 bp, synthetic construct
  source 1..80: mol_type = other DNA
ttggcagcatgtgcaccaggttggtgttcaccagctcatgtcttccccacatctcttcttgccagtaagcagctttggtg

SEQ ID NO: 20873 - DNA, 80 bp, synthetic construct
  source 1..80: mol_type = other DNA
agattaaagaaacgattaagagaaaaggttggaagctttatactaaatgggctccttcatggtgacgccccgtcaaccac

SEQ ID NO: 20874 - DNA, 80 bp, synthetic construct
  source 1..80: mol_type = other DNA
gccgacttcaaaagtgttcttaaaacgaaagataatgttaagaaaaatttgaaagctttggaaaaccaaatttgtaatat

SEQ ID NO: 20875 - DNA, 80 bp, synthetic construct
  source 1..80: mol_type = other DNA
cacagggtccctaggcctggaatctgagactgccctcctgtacagctcggcttgagtgtgggtcagggtcagaggtcaag

SEQ ID NO: 20876 - DNA, 80 bp, synthetic construct
  source 1..80: mol_type = other DNA
acatgtgtgatagggattctcaccatttttctgctcttctgtcagctgctctacctagaaaggaaagggaatctcaaggc

SEQ ID NO: 20877 - DNA, 80 bp, synthetic construct
  source 1..80: mol_type = other DNA
ctgcccaggagtgagggaggctgagggaggggttcccctggggacagctggccatgccaggatgtccttgctctggggtt

SEQ ID NO: 20878 - DNA, 80 bp, synthetic construct
  source 1..80: mol_type = other DNA
ccaccccagccctacccagccctgtccctcaccgcagccttgtagatgtcatccatgctggcggctcacaggacagcttg

SEQ ID NO: 20879 - DNA, 80 bp, synthetic construct
  source 1..80: mol_type = other DNA
caggcatgagccaccacgcccaaccttcttttgttgttatttattgttaatctcttactgtgtctaatttagaaatgaaa

SEQ ID NO: 20880 - DNA, 80 bp, synthetic construct
  source 1..80: mol_type = other DNA
tgcctcgaaggtcaaagatcttctgagtcagatctgcaatctgggggcacacgagggggtgggtacttctccttccattt

SEQ ID NO: 20881 - DNA, 80 bp, synthetic construct
  source 1..80: mol_type = other DNA
tgcagccaaaagcagctgcaaggggtcaggcagagaccaagtcccagccatctcaccctaccccgaaggtacccgagctg

SEQ ID NO: 20882 - DNA, 80 bp, synthetic construct
  source 1..80: mol_type = other DNA
ggcctggacttcagggtctgagggaggaggggctgagggcctcgattccagggtctgagggaggaggggctggggactgg

SEQ ID NO: 20883 - DNA, 80 bp, synthetic construct
  source 1..80: mol_type = other DNA
tataattgggtaaggacagccatattggacgcctgggtcccgagcagaagaggggatagaggctgtactgctgaattccg

SEQ ID NO: 20884 - DNA, 80 bp, synthetic construct
  source 1..80: mol_type = other DNA
cattcccatccaccaatctgggtctcttcctttggataggcacttcccatctatccctaagcaagtccgagggcaacgga

SEQ ID NO: 20885 - DNA, 80 bp, synthetic construct
  source 1..80: mol_type = other DNA
ggaccgtcagtctcctccgggctgcttgagactccccgaggacactgagataaagggcgaggacacagactaaatatact

SEQ ID NO: 20886 - DNA, 80 bp, synthetic construct
  source 1..80: mol_type = other DNA
cttacactttctggttatcgttgatcctgtttcggagaacattgatctgcaagaaaagtgggaaggacaaagagcaacgc

SEQ ID NO: 20887 - DNA, 80 bp, synthetic construct
  source 1..80: mol_type = other DNA
cctggtgtctgttcacctaagaccctcattagtgcacataggactccgaaagactgtgagcttgaggctcagcctaattg

SEQ ID NO: 20888 - DNA, 80 bp, synthetic construct
  source 1..80: mol_type = other DNA
agaaaggagttggcccgacctgctggggcccagctctggtcccaccaaacttgccatgggaaaatatgtgaggcagtcct

SEQ ID NO: 20889 - DNA, 80 bp, synthetic construct
  source 1..80: mol_type = other DNA
gggtggcctagtcctgagctagggactaagctggaaatctaagaaaatgttttgattccttcactacctagagaaaatca

SEQ ID NO: 20890 - DNA, 80 bp, synthetic construct
  source 1..80: mol_type = other DNA
gtccactgactgagaaatgactgcgtgattgaatgaggtcctgattcccaaatgtgaggtctcgtcatccccttaagctg

SEQ ID NO: 20891 - DNA, 80 bp, synthetic construct
  source 1..80: mol_type = other DNA
cggcctccaagggcctccactttcaaccagctccacggacgtgcacaccagggtacctgcagtgacccacctccaacatt

SEQ ID NO: 20892 - DNA, 80 bp, synthetic construct
  source 1..80: mol_type = other DNA
tctttgagagaaacgagctcctcctcctctttcttcctgttctcaaagtgagcctcgatcagcgcctgcaactcattcag

SEQ ID NO: 20893 - DNA, 80 bp, synthetic construct
  source 1..80: mol_type = other DNA
tgtggagctgaaatgagataccgcagtgcacaagaggccaggaagggggaaggcactgggcaaataaatggatctgggat

SEQ ID NO: 20894 - DNA, 80 bp, synthetic construct
  source 1..80: mol_type = other DNA
gaacttcacacaaagccttctctcactcaccagttctgggcaaagcaattttgcttctcttgtgcttcacagtgacaagg

SEQ ID NO: 20895 - DNA, 80 bp, synthetic construct
  source 1..80: mol_type = other DNA
ggtcaacgtttgttgattgggcaatcaatggttgaatcttagtcaataggagagtcaggtgcacatgggaaagcctgttc

SEQ ID NO: 20896 - DNA, 80 bp, synthetic construct
  source 1..80: mol_type = other DNA
cctctctgaagcctggagatgccttttatttgatccctgcaggagtcttacctcaaaatgatccttctagaaagtgtgaa

SEQ ID NO: 20897 - DNA, 80 bp, synthetic construct
  source 1..80: mol_type = other DNA
actccgtccctgccgcctactcacaccccccagcccccagaacagggcccctggacaaggaggctgcacttgggacagca

SEQ ID NO: 20898 - DNA, 80 bp, synthetic construct
  source 1..80: mol_type = other DNA
agagccttggcctccttcttactaagacagaggcccctaaagagcagagagtgggggacaattctcttccatcaaatttc

SEQ ID NO: 20899 - DNA, 80 bp, synthetic construct
  source 1..80: mol_type = other DNA
tgcaagctcagaatcatgacaaatcttcatgccgagataagacgtctcagatcactgagcaatttcatactcacaatcgc

SEQ ID NO: 20900 - DNA, 80 bp, synthetic construct
  source 1..80: mol_type = other DNA
aagagaagagagaagaggtgggtcagtttcgaaccaggctgtctttgatccaaatgagtacacacgtttacgcttacctt

SEQ ID NO: 20901 - DNA, 80 bp, synthetic construct
  source 1..80: mol_type = other DNA
tacaacccaggggtacaggagtggaaaggaaatggctatatctctcctcggggtgcccaaaacacacacagctacttcta

SEQ ID NO: 20902 - DNA, 80 bp, synthetic construct
  source 1..80: mol_type = other DNA
tgccctcgggagaaactaggcaccgtgtgtaaacgctcgttattaaagacaactgtgtactagtctttaattatgtcaat

SEQ ID NO: 20903 - DNA, 80 bp, synthetic construct
  source 1..80: mol_type = other DNA
ttccaagggagagaatggacagggtgatgtgagagtgaggctaaagtgaggcgggagaagaatccaaatgatgctcagga

SEQ ID NO: 20904 - DNA, 80 bp, synthetic construct
  source 1..80: mol_type = other DNA
agggagaaaattctcagaggaaccgtgcatggccagcctgggcgcatagcttctagctttctctctcctctcctactctg

SEQ ID NO: 20905 - DNA, 80 bp, synthetic construct
  source 1..80: mol_type = other DNA
gcaacctgatcctctcagattccacttttgcagagagaaggaagattcgccctctaagacatgggtcagaaaaggaattt

SEQ ID NO: 20906 - DNA, 80 bp, synthetic construct
  source 1..80: mol_type = other DNA
caacctgtcctctgaagtgtggcctccaccaggaggggccatggacttctgcggacacaggcagactctgggtaaatatg

SEQ ID NO: 20907 - DNA, 80 bp, synthetic construct
  source 1..80: mol_type = other DNA
ggtcttctgcatacaggctctgtgccattccttctttgtgtgtgccattcctattacacatttcttaatgtttattgcta

SEQ ID NO: 20908 - DNA, 80 bp, synthetic construct
  source 1..80: mol_type = other DNA
ccactctaaccagaaagaggtatatttactagtgattttcttccttttttgttcctcttgaatgcactaaaaccagagta

SEQ ID NO: 20909 - DNA, 80 bp, synthetic construct
  source 1..80: mol_type = other DNA
tgtgcctgccttggcctcccaagcgctggaattacaggcgtgagccaccgtgcccggccagtttttaatttttttaaata

SEQ ID NO: 20910 - DNA, 80 bp, synthetic construct
  source 1..80: mol_type = other DNA
ctgccttggcctcacaaaatgtttggattataggtgtggccacctctttttttttttgagactgactctggctctgtcgc

SEQ ID NO: 20911 - DNA, 80 bp, synthetic construct
  source 1..80: mol_type = other DNA
acctgtagtcccagctacttgggaggctatggcaggagaatcacttgaaccgggaggcagagatcacgccactgcactcc

SEQ ID NO: 20912 - DNA, 80 bp, synthetic construct
  source 1..80: mol_type = other DNA
atgggacgggaacttgaacacgaccagagggaaagaagtcaccaagtaggaccagagaggttagagtatatagtgtagca

SEQ ID NO: 20913 - DNA, 80 bp, synthetic construct
  source 1..80: mol_type = other DNA
ctgaaagaggcgggtctggatctcctggggagagtgtttggcattccctagtaagaaagagaaaaaaaaaaggtggtctt

SEQ ID NO: 20914 - DNA, 80 bp, synthetic construct
  source 1..80: mol_type = other DNA
gtatcctgccactttctgatggagcagatggccaccctggaggctcagccttgctaaatcagacatttaaatcccgtaat

SEQ ID NO: 20915 - DNA, 80 bp, synthetic construct
  source 1..80: mol_type = other DNA
ccctcaagggggtcaagttctagaccccatgtaataaaaggtggtttcaaggccagatgtacattatttcattaaccctc

SEQ ID NO: 20916 - DNA, 80 bp, synthetic construct
  source 1..80: mol_type = other DNA
cacaccccatgcaaatatgtttactgagcacctcagagtattagtgtgtattagtctcgtaatcttcccttaccccattt

SEQ ID NO: 20917 - DNA, 80 bp, synthetic construct
  source 1..80: mol_type = other DNA
cgctcacgcccacggatctgcagcaacagaggagggggagaagtaagtatatacacagtacctgagttaaaagatggttc

SEQ ID NO: 20918 - DNA, 80 bp, synthetic construct
  source 1..80: mol_type = other DNA
aggctgaggtggaaggattgattgagcccaggggtttgataccagcatgggcaacgtagcaagaccttgacttcacagaa

SEQ ID NO: 20919 - DNA, 80 bp, synthetic construct
  source 1..80: mol_type = other DNA
cagagcaagatgctgtctccattaaaaataaaataaaagtaggctaggcaggccgggtgcggtggctcacgcctgtaatc

SEQ ID NO: 20920 - DNA, 80 bp, synthetic construct
  source 1..80: mol_type = other DNA
agaagccacaggttaagaggtcccaaagccagagaaaagaaaactgagtgggagcagtaaggagattccccgccggggat

SEQ ID NO: 20921 - DNA, 80 bp, synthetic construct
  source 1..80: mol_type = other DNA
ttcaactgtgcaatagttaaacccatttactttgcacatctcatggggttatagggaggtcaaataagcagcaggagaaa

SEQ ID NO: 20922 - DNA, 80 bp, synthetic construct
  source 1..80: mol_type = other DNA
ggagcttattttcaaaagccaaggaatacacgtggatgaagaaaaagaaaagttctgcatccccaggagagatgctgagg

SEQ ID NO: 20923 - DNA, 80 bp, synthetic construct
  source 1..80: mol_type = other DNA
gagagggacttccaaccttcccaccactaaatccccaagacttcctaaatgtgcaccctattcccaactcccttcctgta

SEQ ID NO: 20924 - DNA, 80 bp, synthetic construct
  source 1..80: mol_type = other DNA
tgcacctgcttgggctcaataaatgtgaataacacacaagcctgttatatgagaggttaagagagcgagaaagagcaagg

SEQ ID NO: 20925 - DNA, 80 bp, synthetic construct
  source 1..80: mol_type = other DNA
ccactgcacccggccaatttttgagtttttttgtagaggcagggtttcactatgttgcccaggcaggatgctctctttct

SEQ ID NO: 20926 - DNA, 80 bp, synthetic construct
  source 1..80: mol_type = other DNA
gctgggcacacagtaagagctcaacaaaggttagctctttctgcaattgttctatttcacttgttctatattattattct

SEQ ID NO: 20927 - DNA, 80 bp, synthetic construct
  source 1..80: mol_type = other DNA
aggagtcccagaaccaagcccctacagatagagggataactatattgccctgtaacctgcaaccctgctatatttattta

SEQ ID NO: 20928 - DNA, 80 bp, synthetic construct
  source 1..80: mol_type = other DNA
cttcctttctaatcgttattttttttctttccttttttttttttttttttgacatggaattttgctcttgtcgcctaggc

SEQ ID NO: 20929 - DNA, 80 bp, synthetic construct
  source 1..80: mol_type = other DNA
agccactgtacccggccaacgcctggctatttttttaatattttaatagagacgaggtttcaccatctttgtcaggctgg

SEQ ID NO: 20930 - DNA, 80 bp, synthetic construct
  source 1..80: mol_type = other DNA
aaactaggttaagtttcctttccctagtttgctaggaggttggttggtttgtaatcatgcatatgtgttgaatatcatta

SEQ ID NO: 20931 - DNA, 80 bp, synthetic construct
  source 1..80: mol_type = other DNA
ccttttttctatattaccaggtttggtttgctaaaattggttagctgttgcatgtctatgctaacaggaatattggtcta

SEQ ID NO: 20932 - DNA, 80 bp, synthetic construct
  source 1..80: mol_type = other DNA
caagtggagacagaataactggatttccatacaggaaagataccagagactgactcctacacctcacaccataaacaatt

SEQ ID NO: 20933 - DNA, 80 bp, synthetic construct
  source 1..80: mol_type = other DNA
atgtttatagcagctttatttcataaccgcaaatgggaaacaactcaaaaggccatcaaaaggacggatatacaatcgat

SEQ ID NO: 20934 - DNA, 80 bp, synthetic construct
  source 1..80: mol_type = other DNA
ggggagggattgaggtttgcatcaaaacaaatacccctgcctttgcaaaggccataactaagtaatccagaaaaagaaat

SEQ ID NO: 20935 - DNA, 80 bp, synthetic construct
  source 1..80: mol_type = other DNA
catcatctacacccaggtctcccaacaatgcaactcctatgatgatccctctagccaagcttccatcccactcaccccca

SEQ ID NO: 20936 - DNA, 80 bp, synthetic construct
  source 1..80: mol_type = other DNA
agaagttcgttgacttttgactggggagaaaggaaccttaaacttggggaggagaagggagtcctggagttgttacctaa

SEQ ID NO: 20937 - DNA, 80 bp, synthetic construct
  source 1..80: mol_type = other DNA
agatgagctggtgtcactgcaaaagaaactcaagggcaccgaagatgaactggacaaatactctgaggctctcaaagatg

SEQ ID NO: 20938 - DNA, 80 bp, synthetic construct
  source 1..80: mol_type = other DNA
gaaagtcaagccaaaggaccaacttcttttcacaccgttggattccattctaaaagctaattaagcctagaggcccaatt

SEQ ID NO: 20939 - DNA, 80 bp, synthetic construct
  source 1..80: mol_type = other DNA
ggagcccgtaggaatattgaagaagttagtgaagaaatgctatacagtcatttgttgattaatgaagggggataaggtct

SEQ ID NO: 20940 - DNA, 80 bp, synthetic construct
  source 1..80: mol_type = other DNA
catttaaaaaatacccaagtgattccaacctacagacaaggatgagaaaactctcctaaactcttgtataatgacatcgg

SEQ ID NO: 20941 - DNA, 80 bp, synthetic construct
  source 1..80: mol_type = other DNA
ataattctcatagcagccccatggggaaagtactattattattcccacttttacagatgacgcccagagaagacaggtaa

SEQ ID NO: 20942 - DNA, 80 bp, synthetic construct
  source 1..80: mol_type = other DNA
tttctggggtggtggctttcagtcgtgtctgtgcgtccccgggaggtgcactttgcgctgctggcttgctttactctgag

SEQ ID NO: 20943 - DNA, 80 bp, synthetic construct
  source 1..80: mol_type = other DNA
taaaaacaagaactttggacccagactgtcagaacttgaatcctgtctccactacttactagcagtgggcaagttactta

SEQ ID NO: 20944 - DNA, 80 bp, synthetic construct
  source 1..80: mol_type = other DNA
cctttctgagtagtatccagcaaacaaggagacagggagttgtggccagaaggttcttaattagtaacatgattaaatca

SEQ ID NO: 20945 - DNA, 80 bp, synthetic construct
  source 1..80: mol_type = other DNA
aaatctgatttgggataatattatactatggtggggtgggcatgcccttgatttctatatagtaccatgttggggtgggg

SEQ ID NO: 20946 - DNA, 80 bp, synthetic construct
  source 1..80: mol_type = other DNA
ggagtaaatgttccgtgtccttatgtgagcttcctattacccattagcattgttttatgaagttttcaattttatatcct

SEQ ID NO: 20947 - DNA, 80 bp, synthetic construct
  source 1..80: mol_type = other DNA
tgtgggaattgctgatctggacaatgcctagggatccttctagctaaaaaattgagaccctattttttggatttacaggg

SEQ ID NO: 20948 - DNA, 80 bp, synthetic construct
  source 1..80: mol_type = other DNA
tttgtttgccctttgtttttgcttccgctttgagtctcccccccaccctcaaaaggaatagaattttactggaaaatgaa

SEQ ID NO: 20949 - DNA, 80 bp, synthetic construct
  source 1..80: mol_type = other DNA
gagcagcttacagttcaatgacaaagacagggctgtgtgtagagaaatttgttatcctattaccatgggtccctaagtgt

SEQ ID NO: 20950 - DNA, 80 bp, synthetic construct
  source 1..80: mol_type = other DNA
ccatgtgaaagagcgtttgctaatgatctgtctgtctgatgagaattgtgtgtatagatttgtgtatacacaaatatgga

SEQ ID NO: 20951 - DNA, 80 bp, synthetic construct
  source 1..80: mol_type = other DNA
agacatgtaaaggagaaatgtcagggatacaagttggccctttcactcctactgaccacagagcaattgtgcatttttta

SEQ ID NO: 20952 - DNA, 80 bp, synthetic construct
  source 1..80: mol_type = other DNA
gcagtctggtaatgttagacttcggagtaaaggggacttggggatcatttagtcccttagttttacaaatgagaaaagta

SEQ ID NO: 20953 - DNA, 80 bp, synthetic construct
  source 1..80: mol_type = other DNA
gagttcattcacagtgaacagagagaaatgtgtctcttttttccacctttagctctggaaattgttgtttcctggtttgg

SEQ ID NO: 20954 - DNA, 80 bp, synthetic construct
  source 1..80: mol_type = other DNA
ctatgctcacaagttttgatctgcttcagaggctcccttcctctctctggttcttccactaaatacaaatttgattttgt

SEQ ID NO: 20955 - DNA, 80 bp, synthetic construct
  source 1..80: mol_type = other DNA
taacagccaagtccgacagctggaagaacaattaagaataatggatcagaccttgaaagcattaatggctgcagaggata

SEQ ID NO: 20956 - DNA, 80 bp, synthetic construct
  source 1..80: mol_type = other DNA
ccatgtaaaacaataggcaagaaagcagagaatgtattgcagtgtgccatttgatatcagaggttccattacctcctaag

SEQ ID NO: 20957 - DNA, 80 bp, synthetic construct
  source 1..80: mol_type = other DNA
gggaatgatgtggtgattgtggtcttgtttttagaagaacccatcttcttccaagtatgaattcaaagtaaggatttagg

SEQ ID NO: 20958 - DNA, 80 bp, synthetic construct
  source 1..80: mol_type = other DNA
tttttgtttcaatttacttaaaacaaaacgcacgcctcctgcattggccacctgctgcggcaccaaccccttcatgcatt

SEQ ID NO: 20959 - DNA, 80 bp, synthetic construct
  source 1..80: mol_type = other DNA
atctgaggataaggaaattggcatgatccaatacagctttaacagtggtactacaaaagatcatctcttttacttttaag

SEQ ID NO: 20960 - DNA, 80 bp, synthetic construct
  source 1..80: mol_type = other DNA
cctcatttgtaaatgagggggtggagcagatcatctgtctctaaggtctttttcagtgctaaaatgtggtgattctttgg

SEQ ID NO: 20961 - DNA, 80 bp, synthetic construct
  source 1..80: mol_type = other DNA
ccttacttgggaggacctggctaactaatgaaaggctcatgatgaatggttctgtagctgtcccatattactaggaagtt

SEQ ID NO: 20962 - DNA, 80 bp, synthetic construct
  source 1..80: mol_type = other DNA
agggcaggtcaggagtagcccaaggtatgcatgtgcaagaggaaaacttgataaactcaagtttatcaagaaattgttga

SEQ ID NO: 20963 - DNA, 80 bp, synthetic construct
  source 1..80: mol_type = other DNA
gggtaggtctgttagcttttcaagatcatgaagtatttttaggtccaagttgtcaccagcattcaaagccaccgtgcatc

SEQ ID NO: 20964 - DNA, 80 bp, synthetic construct
  source 1..80: mol_type = other DNA
cctgcattcccaaatctattgccagaaaccatgtatggctcagctcacaaagtggtttagtgaggtataagaggaacatt

SEQ ID NO: 20965 - DNA, 80 bp, synthetic construct
  source 1..80: mol_type = other DNA
attaaatgtacctatgcttgggcaaaatagcttttgaaaacaggaactcatgccagaagcccctggttgtctgaaaggta

SEQ ID NO: 20966 - DNA, 80 bp, synthetic construct
  source 1..80: mol_type = other DNA
tcctggttcaaatgtgccatttcccgggttgatgctgccacactttgtagagagtttagcaacacagtgtgcttagtcag

SEQ ID NO: 20967 - DNA, 80 bp, synthetic construct
  source 1..80: mol_type = other DNA
ttggaagatctataactattttattagacggtaatatataaacaaatgacagttcagataatatttttaaagtgctatga

SEQ ID NO: 20968 - DNA, 80 bp, synthetic construct
  source 1..80: mol_type = other DNA
ttatacacttccaggatgtcccacataccccataaagagagtcattaatctggttcatgtgacactggctttcgtggtgt

SEQ ID NO: 20969 - DNA, 80 bp, synthetic construct
  source 1..80: mol_type = other DNA
ccatgtctaaagctcagagatattttgagctctaaaagagtatcacaagaaatttatagcagtctgtagtacaactatta

SEQ ID NO: 20970 - DNA, 80 bp, synthetic construct
  source 1..80: mol_type = other DNA
cagactgtgtgtgtgtgttttataatgtcacagagaggtggtgccaacatctagaagttttatttgcccttactttagag

SEQ ID NO: 20971 - DNA, 80 bp, synthetic construct
  source 1..80: mol_type = other DNA
cacaaggagaaatggaaatccattgctaaaagtagaagggcccatcaatgacaggctgccttccagctgcttatcagaag

SEQ ID NO: 20972 - DNA, 80 bp, synthetic construct
  source 1..80: mol_type = other DNA
ggcactttagtaatttcctgcacaaaaacatccaaaaagcactggagaatcaagagacgtcatttcttcagacaaatatc

SEQ ID NO: 20973 - DNA, 80 bp, synthetic construct
  source 1..80: mol_type = other DNA
attttagtcaaaataatcccaaatttggagggacatatgtttttcgtgatcatccttgccatgaaagtagagcagcagcc

SEQ ID NO: 20974 - DNA, 80 bp, synthetic construct
  source 1..80: mol_type = other DNA
tgtgtgttttctcaaagcactattttccacattgttggttaattttgggcactggcaaagaatttatacttcgttggcta

SEQ ID NO: 20975 - DNA, 80 bp, synthetic construct
  source 1..80: mol_type = other DNA
attctacagatggagaaattttgtcctggaaatactttatgaagttcgtacatctggagatcgcaggttttcctgactgt

SEQ ID NO: 20976 - DNA, 80 bp, synthetic construct
  source 1..80: mol_type = other DNA
ttatagaatttaggaaagttaaggtaaatggtttcacgcatacagcctagataaagagatcagtgtctacccacacaatt

SEQ ID NO: 20977 - DNA, 80 bp, synthetic construct
  source 1..80: mol_type = other DNA
attgtatgcttgaaactttctaagagagtagatcttaaatgttctcaccacacagacacacacacacacacacacataca

SEQ ID NO: 20978 - DNA, 80 bp, synthetic construct
  source 1..80: mol_type = other DNA
ttaccactagaaaaataaatacaaatggaaggaataaagacctcagtgtcttcagattctatattctgatccagcatcaa

SEQ ID NO: 20979 - DNA, 80 bp, synthetic construct
  source 1..80: mol_type = other DNA
gatatttgctggggataatgaaaagttcaattctctatgggttgaactgtggtgctaggccagtcatgcagttgcaaatg

SEQ ID NO: 20980 - DNA, 80 bp, synthetic construct
  source 1..80: mol_type = other DNA
aatgagaactgagcaaaggggacaaaccctttataaaaccctcagatctcctgagaacgtactcactattgtgagaatag

SEQ ID NO: 20981 - DNA, 80 bp, synthetic construct
  source 1..80: mol_type = other DNA
gcttacatagaaacagattccagaggaatcagagatagcagtgaatccatcctcctatccaagcagttgtctgcactata

SEQ ID NO: 20982 - DNA, 80 bp, synthetic construct
  source 1..80: mol_type = other DNA
tcattctcagcaagcaatcttatcttggttctacattttattctctagagcggtggctttcacttttttcttcacagaat

SEQ ID NO: 20983 - DNA, 80 bp, synthetic construct
  source 1..80: mol_type = other DNA
tcaacatcaagaccctcactctttcctctaaactattctatctttacttgcaaagcactttgctctgtgccctggaggaa

SEQ ID NO: 20984 - DNA, 80 bp, synthetic construct
  source 1..80: mol_type = other DNA
tcttatccacaaagaagtagataatgtagaaaacaaaactggatggccccactgaggaatagcacagaagagtaggaaag

SEQ ID NO: 20985 - DNA, 80 bp, synthetic construct
  source 1..80: mol_type = other DNA
accagcagtctattttgatttgtgcagtttcaagaaatcctcgtaagtaaacatgtggaatccttagtcatagatgcaaa

SEQ ID NO: 20986 - DNA, 80 bp, synthetic construct
  source 1..80: mol_type = other DNA
tacacaacctttctctggagtttagcaaaaggggtgatcagagtggtgagtatgatcactggcacatattaaggagactt

SEQ ID NO: 20987 - DNA, 80 bp, synthetic construct
  source 1..80: mol_type = other DNA
ctgggtttagaggaagtaaaggaaatcttcaaatagaattgacccttctgtcccagggaaattaaaataaaaaactaacc

SEQ ID NO: 20988 - DNA, 80 bp, synthetic construct
  source 1..80: mol_type = other DNA
tgtgtgtgactacaaccaaaatcacctccaaaaaatacctttgttctcctcctttatagtgacactccccctctgtccct

SEQ ID NO: 20989 - DNA, 80 bp, synthetic construct
  source 1..80: mol_type = other DNA
cccaatttgtaaaaaacacaaggcctttgttggatatgtagtcttttccacagagcacacatttttaattttgagatggt

SEQ ID NO: 20990 - DNA, 80 bp, synthetic construct
  source 1..80: mol_type = other DNA
cgccctgacaccctactaccttttgaaactcacttactaattccagtttttgtgtttatacaggttttagatttgctaca

SEQ ID NO: 20991 - DNA, 80 bp, synthetic construct
  source 1..80: mol_type = other DNA
aaaattaccatgtaagtcaagattagatgtgttggaatttagatgttttcatattcctctcttgtttagaaggggttttc

SEQ ID NO: 20992 - DNA, 80 bp, synthetic construct
  source 1..80: mol_type = other DNA
gttcacaagataaacactgaacacatttcaaagaaaacacttttcctgtgattactacacaattaaattggagttcggtt

SEQ ID NO: 20993 - DNA, 80 bp, synthetic construct
  source 1..80: mol_type = other DNA
tgtatcagaaactacataataaagtatttttaaagaacaaaatagactggaataatttatattagtaagagggataggaa

SEQ ID NO: 20994 - DNA, 80 bp, synthetic construct
  source 1..80: mol_type = other DNA
tgaaattactgaaaattttcaatttgggaaaatataatcaataaaaataggttatacttttatttattcatcattatata

SEQ ID NO: 20995 - DNA, 80 bp, synthetic construct
  source 1..80: mol_type = other DNA
cttcccgcagcattgtttgccttttaagaatgtattttatcatcccttggttttatttcacattttgcctttgggcaagt

SEQ ID NO: 20996 - DNA, 80 bp, synthetic construct
  source 1..80: mol_type = other DNA
caccatggtcactaaggagggagagggaaggcaggccattttcacacagccaaaatcaaagcaacaactgttacaccaga

SEQ ID NO: 20997 - DNA, 80 bp, synthetic construct
  source 1..80: mol_type = other DNA
gagggttggaaagggttagaaaatctatttaacgaaataatggatgaaaacacctcaagtctagcaagacacttggacat

SEQ ID NO: 20998 - DNA, 80 bp, synthetic construct
  source 1..80: mol_type = other DNA
agaaacataggactatgtgaaaagaccaaacctatgtttaattgcggtatttaaagtgacggggagaatggaaccaagtt

SEQ ID NO: 20999 - DNA, 80 bp, synthetic construct
  source 1..80: mol_type = other DNA
tgctattttaaatatatgatgcacccaatacaggagcacccggattgataaagcaagttcttagaaacctacaaagagac

SEQ ID NO: 21000 - DNA, 80 bp, synthetic construct
  source 1..80: mol_type = other DNA
aatgagttctttggcagcagtgagaatgaagacacaatgtaccagaatctctggaacacagataaagcagtgtttagagg

SEQ ID NO: 21001 - DNA, 80 bp, synthetic construct
  source 1..80: mol_type = other DNA
aggtataaggccagcatcatcctgataccaaaatctggcagagacataacagaaaaaaaaaaaaagaaaatttcaggcca

SEQ ID NO: 21002 - DNA, 80 bp, synthetic construct
  source 1..80: mol_type = other DNA
tattctggtcaagctaccacagactttcttcacagaattagaaaaactactttagatttcatatggaaccagaaaagagc

SEQ ID NO: 21003 - DNA, 80 bp, synthetic construct
  source 1..80: mol_type = other DNA
ctcaatctacaaggtcagcattaccctgataccaaaaccagacaaggacacacaaagaaataaaactcccaaccaatatc

SEQ ID NO: 21004 - DNA, 80 bp, synthetic construct
  source 1..80: mol_type = other DNA
agggggaagaatagaatgtcctagccggaacaatcaaaacaagagaaagaaataaatagaatgtcccagccagaacaatg

SEQ ID NO: 21005 - DNA, 80 bp, synthetic construct
  source 1..80: mol_type = other DNA
tcatatactcagaaaaccaccttattaaacaatcattccatgatgtctctgatcatttattttaatatggatcacagaaa

SEQ ID NO: 21006 - DNA, 80 bp, synthetic construct
  source 1..80: mol_type = other DNA
tagaatttctatctgtacctggatcctgatattctagagaatctattctgggagctgtggtttatactataggagataca

SEQ ID NO: 21007 - DNA, 80 bp, synthetic construct
  source 1..80: mol_type = other DNA
gcctcccgagtagctggtattacaggtgtgagttactatgcctggctgattctttgaatatcttggttaatctattttat

SEQ ID NO: 21008 - DNA, 80 bp, synthetic construct
  source 1..80: mol_type = other DNA
ctctatccttgggctgctgtgattggcagaaaactttctcttgtatttgcagcagcgtaatagaatactgaagtacgaat

SEQ ID NO: 21009 - DNA, 80 bp, synthetic construct
  source 1..80: mol_type = other DNA
aatatcagcaaaatagatcattctctttttaagaaaaaaatgtctgcattgtgcatgctggcatttgcctattttgtgtc

SEQ ID NO: 21010 - DNA, 80 bp, synthetic construct
  source 1..80: mol_type = other DNA
aaaaacggcagcattttgattcagtttatactttgctcatcaatggcagaacaaactgatgcttatttgcatgggttggc

SEQ ID NO: 21011 - DNA, 80 bp, synthetic construct
  source 1..80: mol_type = other DNA
tggtatctcagtggttttgatttgcatttctctagtgactggtgatgatgagctttttaaaatatgtttgccttcttttg

SEQ ID NO: 21012 - DNA, 80 bp, synthetic construct
  source 1..80: mol_type = other DNA
tgagcaaccacgcccggcatgtttaaatctttaatccatcttgagttaatttttgtataaggcataaggaaggtgtccag

SEQ ID NO: 21013 - DNA, 80 bp, synthetic construct
  source 1..80: mol_type = other DNA
ttatgtgatggattacatttattgatatgtgtaggttgaaccagccttgcatcccagggatgaagctgacttgattgtgg

SEQ ID NO: 21014 - DNA, 80 bp, synthetic construct
  source 1..80: mol_type = other DNA
ttcagtagtaatatgaaaagaagtctgtagttttaatttagtagtaacaggtagagtctgctttcagttctaaattcctg

SEQ ID NO: 21015 - DNA, 80 bp, synthetic construct
  source 1..80: mol_type = other DNA
ccttttgggaagtcattatgcctgttctgtagaacagaatatctggaatttgagcagctaagggattttctaaatgttat

SEQ ID NO: 21016 - DNA, 80 bp, synthetic construct
  source 1..80: mol_type = other DNA
tgcctatgctcatacagaaccatgctttcttcttgttccttcagtaaacttacagattaatatttctaagtataacctgg

SEQ ID NO: 21017 - DNA, 80 bp, synthetic construct
  source 1..80: mol_type = other DNA
ttttattgtgcttcgcttaattgcaattctcaggtatcacattttttacaagttgacagtttgtagcaaccctgtatgat

SEQ ID NO: 21018 - DNA, 80 bp, synthetic construct
  source 1..80: mol_type = other DNA
ttaaggaatgaagccacctgcgtaacgtaaaagtataagatgaagcatcaaatgccgatacagaagctgcagaaagttat

SEQ ID NO: 21019 - DNA, 80 bp, synthetic construct
  source 1..80: mol_type = other DNA
ttcataaggctgtaggtgtcatatatagtgactcatctgatagatccgtgcaaagtaaattgaaagtcttctggaatgga

SEQ ID NO: 21020 - DNA, 80 bp, synthetic construct
  source 1..80: mol_type = other DNA
ggtctgaatgaaacctgcaatacccccgaggtatgccaggacaatgacatctaattttccttgaattgcattttttgaat

SEQ ID NO: 21021 - DNA, 80 bp, synthetic construct
  source 1..80: mol_type = other DNA
cgtaaagacattctatttttttccaatataacatgtcttctaaaatatattaactaaaaacgttaactgtgtcatcgtac

SEQ ID NO: 21022 - DNA, 80 bp, synthetic construct
  source 1..80: mol_type = other DNA
atggagccactgcactccagcctggagagagagattttgtctcaaaaaaaaaaaaagaagtaacagtgattacctctgga

SEQ ID NO: 21023 - DNA, 80 bp, synthetic construct
  source 1..80: mol_type = other DNA
caatctgtggattctttggcaaatatttcttatttatatatttgcaagtgatcctcagtttacccaagaggcatgcccca

SEQ ID NO: 21024 - DNA, 80 bp, synthetic construct
  source 1..80: mol_type = other DNA
tagagtcattcatttgtgctatatagcctaaaccacttatatgtattcctaagctgtgtcacacgttcacctttgggtct

SEQ ID NO: 21025 - DNA, 80 bp, synthetic construct
  source 1..80: mol_type = other DNA
gggcttggctgtggagaatggaggcaagcacatggcatattgatgagtacaaaccatggaaaaaataactgtttagtatt

SEQ ID NO: 21026 - DNA, 80 bp, synthetic construct
  source 1..80: mol_type = other DNA
taatattttatgttctgttgatcattctctaaggcagactttaaagttatataaccatatccctctctatggagcttcca

SEQ ID NO: 21027 - DNA, 80 bp, synthetic construct
  source 1..80: mol_type = other DNA
cagagaatttaaagagcatggtggtgtaactgaagtaaaagagttgttcctacaagacaatgcatttgatgtacgctcag

SEQ ID NO: 21028 - DNA, 80 bp, synthetic construct
  source 1..80: mol_type = other DNA
ctctggtgggaagggaagactagttgtctagttacatctcactggttaagttctcagcacaaaaaaaaattctgaagatg

SEQ ID NO: 21029 - DNA, 80 bp, synthetic construct
  source 1..80: mol_type = other DNA
atcacaagagcaactatattcaagcttatgatcagttgccaggtaagttctggtgagaattcaggggctgaggtactact

SEQ ID NO: 21030 - DNA, 80 bp, synthetic construct
  source 1..80: mol_type = other DNA
aaccttagaaatgtctccagaaacctagagtctctgttgagatttatttaaggccattttctaggtgttttagtctaggg

SEQ ID NO: 21031 - DNA, 80 bp, synthetic construct
  source 1..80: mol_type = other DNA
gaccacgcgataatagaggcagagattgaagtcatatatcttcacaccaagaaacaccgaagattgccagaaaacaccag

SEQ ID NO: 21032 - DNA, 80 bp, synthetic construct
  source 1..80: mol_type = other DNA
ttactgatttgaaaattctcagcctatctagacagtgtgccatggagatagagccaaggttgtggttggacaaacttttg

SEQ ID NO: 21033 - DNA, 80 bp, synthetic construct
  source 1..80: mol_type = other DNA
gtaaatagggttattgcagatgtaattagttaagatgtggtcatggggcagtagggtgggtatttaatccaatatgactg

SEQ ID NO: 21034 - DNA, 80 bp, synthetic construct
  source 1..80: mol_type = other DNA
gaaccatgtaaatttctcagatatttcacctatgcaaatagaggtttttctagaaatgggtagcatagagaaatatatat

SEQ ID NO: 21035 - DNA, 80 bp, synthetic construct
  source 1..80: mol_type = other DNA
tgtacgtgtttgtttattgagcatgcatataacatacgtggaggtttaggcttgacttctttgcctagaaaaaagtaaaa

SEQ ID NO: 21036 - DNA, 80 bp, synthetic construct
  source 1..80: mol_type = other DNA
ttctggagatgtgtggaaggtgacattaagtcatcagaagagcactgaacagcatatacacacaaataaactacttgagg

SEQ ID NO: 21037 - DNA, 80 bp, synthetic construct
  source 1..80: mol_type = other DNA
gacagtggtcatgtgtatctatcattgaatgcagggaattggtgcgattcctaatacatggtgataagataggctctcat

SEQ ID NO: 21038 - DNA, 80 bp, synthetic construct
  source 1..80: mol_type = other DNA
aggacacctgcctattcccacaaagctgtccaattataaaatttggtttccgagttagttgtctacatgccatgtcctat

SEQ ID NO: 21039 - DNA, 80 bp, synthetic construct
  source 1..80: mol_type = other DNA
gcatataacacatataaagatcttcactggaaaaacttttatttaggtgatcttataaagactcattaagtaagtccatt

SEQ ID NO: 21040 - DNA, 80 bp, synthetic construct
  source 1..80: mol_type = other DNA
ataaataaaatgcactaactcttgccccccccccaaaaattggtaccaattctgttgacattattcgacaagacagagaa

SEQ ID NO: 21041 - DNA, 80 bp, synthetic construct
  source 1..80: mol_type = other DNA
caaacaaatggaaacatatcacatgctcatggatggatagaatcagtattgtgaaaatgaccagggtagaatcaatatgt

SEQ ID NO: 21042 - DNA, 80 bp, synthetic construct
  source 1..80: mol_type = other DNA
cacagacatggttatagcagcagaattcacaattgcaaaaacatggaatcaccccaaatgctcatcaaccaatgagttga

SEQ ID NO: 21043 - DNA, 80 bp, synthetic construct
  source 1..80: mol_type = other DNA
ttaaaaaaacacacacacacatcaggtttcacaaactcttcagcatgtgggggagtgttgtgtgtctgtgttttcccact

SEQ ID NO: 21044 - DNA, 80 bp, synthetic construct
  source 1..80: mol_type = other DNA
tctactgagacatcaatagataaagctaaaaacagagcatgcttgtgttgatcatggtatgtcaacttttcaatcccaat

SEQ ID NO: 21045 - DNA, 80 bp, synthetic construct
  source 1..80: mol_type = other DNA
gctcctcaaaaaaactagaattaccatattcagcaattttcagctagtttacagcaatttcacgtctgttatatccaaag

SEQ ID NO: 21046 - DNA, 80 bp, synthetic construct
  source 1..80: mol_type = other DNA
aggcctagctaaaacagggcctcagtgaaagcagctttcaatcagacacttccactagcgtgccatgtcaatttaccatt

SEQ ID NO: 21047 - DNA, 80 bp, synthetic construct
  source 1..80: mol_type = other DNA
cattttatctagtgtgtttctttagctctatctacaggcattgtgatatgtgttgtgtctagcatgctttgaaattggct

SEQ ID NO: 21048 - DNA, 80 bp, synthetic construct
  source 1..80: mol_type = other DNA
ggagtgagactctgtcaaaaaaaatgtattttcttttccaagaaagcatataataaaagagtaattttatatgaagaggg

SEQ ID NO: 21049 - DNA, 80 bp, synthetic construct
  source 1..80: mol_type = other DNA
tcggcccatggatcttgatttttgttttgtattacctctttttgtcatggtgtgctagaggcagcatcaatggccatgtt

SEQ ID NO: 21050 - DNA, 80 bp, synthetic construct
  source 1..80: mol_type = other DNA
tgaatcacgatgtcactgttcatcctgtttgctcccctagttactatgatccagtatgggtgggaacataactctatagt

SEQ ID NO: 21051 - DNA, 80 bp, synthetic construct
  source 1..80: mol_type = other DNA
ggtcactgtccattatttcataagacccacgaataccagaagtaagctagcaatagggttgattccggcaggaatcaagg

SEQ ID NO: 21052 - DNA, 80 bp, synthetic construct
  source 1..80: mol_type = other DNA
caagaagcagttacagaaaatgaatcttacccttctgcagtccgttaagattaaggaggagtatctaatctttgaggggg

SEQ ID NO: 21053 - DNA, 80 bp, synthetic construct
  source 1..80: mol_type = other DNA
gaggtgataggtatcttaattaagttgattgactctttctacaatgcatccataaatcagaacatcacattgtacctcat

SEQ ID NO: 21054 - DNA, 80 bp, synthetic construct
  source 1..80: mol_type = other DNA
catatattcaataagaagaccattagggggatgcaagaaaatatcataaggactttaatgggatgcttcaatcagtttag

SEQ ID NO: 21055 - DNA, 80 bp, synthetic construct
  source 1..80: mol_type = other DNA
attcagtaaacatttagtatgtgctaagcacttcagtctcccaagaatttttggccaatcaggcttacctatcaattgaa

SEQ ID NO: 21056 - DNA, 80 bp, synthetic construct
  source 1..80: mol_type = other DNA
agatgtcctttctcttttttgctacatttcaacataccatgcccatttactaagactcagctcactcttcatctttctct

SEQ ID NO: 21057 - DNA, 80 bp, synthetic construct
  source 1..80: mol_type = other DNA
gggtcttagggaaaaaaatgagacaataagaaatgggcccctactatgatataagacctgggagatcctgttcttgtttg

SEQ ID NO: 21058 - DNA, 80 bp, synthetic construct
  source 1..80: mol_type = other DNA
ttcccataaagtacataagcaagaaaatcagtctgaagaaagctcaaaaagttcaaattatggcttttggaggagtctca

SEQ ID NO: 21059 - DNA, 80 bp, synthetic construct
  source 1..80: mol_type = other DNA
caaaatagcgcacaatttcaaattttccacctttcctcctaccccattcatctctgtttatattgagaatagaattgtag

SEQ ID NO: 21060 - DNA, 80 bp, synthetic construct
  source 1..80: mol_type = other DNA
cgtttaatgatctttgcattgatacatttcttgagtgtttaggttattcacctatacatcctcaaaggctagcaaggcct

SEQ ID NO: 21061 - DNA, 80 bp, synthetic construct
  source 1..80: mol_type = other DNA
attttgaattagccaagtttgtggcaagagagaagcttgatgtttttctttctggagataagggcagtactgaatgtcta

SEQ ID NO: 21062 - DNA, 80 bp, synthetic construct
  source 1..80: mol_type = other DNA
agaccaaggataaagacatgtttaccgctagaaagtcatgggcaggtgggatagtttgttgatgaaattcgaggttagat

SEQ ID NO: 21063 - DNA, 80 bp, synthetic construct
  source 1..80: mol_type = other DNA
aacacaggtttctgataattttaaatcaatggaccaaataaaattgtacataaagaaactgatggatccatgaaactgct

SEQ ID NO: 21064 - DNA, 80 bp, synthetic construct
  source 1..80: mol_type = other DNA
atgttggaacaagattccttattattatgagactcttacacccctcaaggctgcctttttcattgactggataatggcat

SEQ ID NO: 21065 - DNA, 80 bp, synthetic construct
  source 1..80: mol_type = other DNA
actctaggactaattttgtccacctctgtcactcaccaatgggagctggctaaactttctcgaaaaacaatacataaaat

SEQ ID NO: 21066 - DNA, 80 bp, synthetic construct
  source 1..80: mol_type = other DNA
ctactgaaaatgctctccaaacattcacaggatgacagggtttttggtaatatgtattggctttgtctcactcatcttac

SEQ ID NO: 21067 - DNA, 80 bp, synthetic construct
  source 1..80: mol_type = other DNA
tttttctcaggtttgaagaactctctttcctttgtcttctactctggacctctcgcctcataaatacaaaacccagcctg

SEQ ID NO: 21068 - DNA, 80 bp, synthetic construct
  source 1..80: mol_type = other DNA
ctcattcctgtctctaggctagctcctaaatatagctaccatactgaaactgggccaagtagaaagcatcatttctgttt

SEQ ID NO: 21069 - DNA, 80 bp, synthetic construct
  source 1..80: mol_type = other DNA
ttttgtagcctctcttgctactattgtgatgaactgaagttttgtgggtagctgcttaaaatgctgtgtgacattaatct

SEQ ID NO: 21070 - DNA, 80 bp, synthetic construct
  source 1..80: mol_type = other DNA
aactctactgttctgtgcaaatgcaattgggtttatgaccaggactgactttatctagaaatatactaacccccaaggac

SEQ ID NO: 21071 - DNA, 80 bp, synthetic construct
  source 1..80: mol_type = other DNA
gaagatgtcatctttgttagaggaaaaagccatgaaagccatcaagcttgaatcagaatgtttctgttggaggaaactgt

SEQ ID NO: 21072 - DNA, 80 bp, synthetic construct
  source 1..80: mol_type = other DNA
gctataggaatggctcctctctctaacttcctagggaacccttcactaatatcatttccttgtagccatctttcgatagc

SEQ ID NO: 21073 - DNA, 80 bp, synthetic construct
  source 1..80: mol_type = other DNA
cagaaataagactccacacctacaactatctgatctttgacaaaactgacaggattccctattcaataaatggtgctggg

SEQ ID NO: 21074 - DNA, 80 bp, synthetic construct
  source 1..80: mol_type = other DNA
agtcatgaaaaagaacaagatcatgtcctttgcagtgacacagatggaacaagggccattatccttaggaaactaatgca

SEQ ID NO: 21075 - DNA, 80 bp, synthetic construct
  source 1..80: mol_type = other DNA
acattttcccatattctatgatattcatccactcaaccttcatcactagccttgagtgcccagctaatctcttgacttct

SEQ ID NO: 21076 - DNA, 80 bp, synthetic construct
  source 1..80: mol_type = other DNA
acatctccttgtatgtaaatcttacaaaatatccttacctgctttggacatcttttcatcttttttagtttcaggttctg

SEQ ID NO: 21077 - DNA, 80 bp, synthetic construct
  source 1..80: mol_type = other DNA
acagttttcctccctccaaacagcagaaaaaactgacttcatagttggaatacctactgagcataaactatgtataaggg

SEQ ID NO: 21078 - DNA, 80 bp, synthetic construct
  source 1..80: mol_type = other DNA
tcccaaggtctggatagaatgatcttggtctccttcttagttctgtttccgaagtatggctaatttgaatatttggattt

SEQ ID NO: 21079 - DNA, 80 bp, synthetic construct
  source 1..80: mol_type = other DNA
atactcaaggcaggaattgatatgtgagaaagtggcaacggattttctaagttgagcagctcttttattaggctacttga

SEQ ID NO: 21080 - DNA, 80 bp, synthetic construct
  source 1..80: mol_type = other DNA
ctctaaccctagtagcatataaacttcatgagtcctgggatgatttttttattttccctaatacatgatagtgcttagac

SEQ ID NO: 21081 - DNA, 80 bp, synthetic construct
  source 1..80: mol_type = other DNA
tcgaatggtgccaggtacaaagcaaacggtggaggtcaatcatttcactgatattttaaactacttttctcgcacttttc

SEQ ID NO: 21082 - DNA, 80 bp, synthetic construct
  source 1..80: mol_type = other DNA
cttctgctgcagacacaatgctttgtggtccggataaatataactgtgaaaaagacaagatttcactgcctttgagtttg

SEQ ID NO: 21083 - DNA, 80 bp, synthetic construct
  source 1..80: mol_type = other DNA
cagggaatatgtcttttcatctttggagcctcactgcctagaatagccacagaacattatgtgaacactcaaaaattgtt

SEQ ID NO: 21084 - DNA, 80 bp, synthetic construct
  source 1..80: mol_type = other DNA
ggacattaaacacataaaatgggccacagggcattctctcttttcagcacagaataaatgcatacattgtccctgcctta

SEQ ID NO: 21085 - DNA, 80 bp, synthetic construct
  source 1..80: mol_type = other DNA
ttctcagtgcttggatacaatacttttgtatagctaatgcttgcagagaaaatcctggccccctcaactacttttgaaaa

SEQ ID NO: 21086 - DNA, 80 bp, synthetic construct
  source 1..80: mol_type = other DNA
ctggaactttggggacaaaactccacctttttatgttaatcactggacactggaatatttatggtctctagatgtagcaa

SEQ ID NO: 21087 - DNA, 80 bp, synthetic construct
  source 1..80: mol_type = other DNA
aagagatatagagtcttatattctaagcatgtccttttctagtatcccatctcaaagtcccatctcacttcagtgtagca

SEQ ID NO: 21088 - DNA, 80 bp, synthetic construct
  source 1..80: mol_type = other DNA
tcctacatttagggcttcatttctgggctcgctgttatgttctctcagtgtgcgttcctatacccgtactatttccatat

SEQ ID NO: 21089 - DNA, 80 bp, synthetic construct
  source 1..80: mol_type = other DNA
aacatatggaaaggcatgtaatggcagaaaatcctgactagccaacacaacttgttcttcattccttctctcacccagaa

SEQ ID NO: 21090 - DNA, 80 bp, synthetic construct
  source 1..80: mol_type = other DNA
gaaaatgcacttccatattcctggaaaatgagagttaaaaagccagagtccttgtctccactacatgattactgaatcag

SEQ ID NO: 21091 - DNA, 80 bp, synthetic construct
  source 1..80: mol_type = other DNA
tgaggatttagctaatgcatcttcttcaacatgatatatgttgcccctgtccccatcactaatatctctaacgatgaaat

SEQ ID NO: 21092 - DNA, 80 bp, synthetic construct
  source 1..80: mol_type = other DNA
tctccataccacttccaaccccaatccatgcttatgtaagctcaccagaaatccttctcttatcaataaaaaaatcccag

SEQ ID NO: 21093 - DNA, 80 bp, synthetic construct
  source 1..80: mol_type = other DNA
aataactgaatatgcaaaaggcagatcaatgtggcttcacatttcattgtataatattacctttttcctttagggaagct

SEQ ID NO: 21094 - DNA, 80 bp, synthetic construct
  source 1..80: mol_type = other DNA
agcccctttttctattcccaccatattatttgggtgaaaatacagagactgtgatggtggtgcttgtaaatggagatgcc

SEQ ID NO: 21095 - DNA, 80 bp, synthetic construct
  source 1..80: mol_type = other DNA
tccacagacttctctgaggaatctctaactacccaaggaagtgaggaggatattaaatctgacaaaaaagtgaagagatt

SEQ ID NO: 21096 - DNA, 80 bp, synthetic construct
  source 1..80: mol_type = other DNA
atcagggatagggttgaatgccacaaggaagataaccaatatcatgggtcactaacaggattttctgttttctggatggt

SEQ ID NO: 21097 - DNA, 80 bp, synthetic construct
  source 1..80: mol_type = other DNA
gccccaacctttcttttgagctgctttcatagtgaacaataacatgtggttcaagtattcctgtgatataagtgcagact

SEQ ID NO: 21098 - DNA, 80 bp, synthetic construct
  source 1..80: mol_type = other DNA
acttttggacttcctccaaacaattaccacacctttaaaggcaaactcttcaccttctcatttacatttcatattatttc

SEQ ID NO: 21099 - DNA, 80 bp, synthetic construct
  source 1..80: mol_type = other DNA
gtgtgacctctgcagttctggtttacatatttgcaaaggggatgcagctaatgtactgtgttctcaataatatatatttc

SEQ ID NO: 21100 - DNA, 80 bp, synthetic construct
  source 1..80: mol_type = other DNA
tgggctcagtgaaggatgtaagaaagtatgtagtactgaggcagaacttgacaagggaaagaaattagacccacaaacat

SEQ ID NO: 21101 - DNA, 80 bp, synthetic construct
  source 1..80: mol_type = other DNA
ttaagctgagaatggttcttagagttcttacttggcttacagtaggataattttccctcacctgagatacaaaatgtaaa

SEQ ID NO: 21102 - DNA, 80 bp, synthetic construct
  source 1..80: mol_type = other DNA
aaaagacaagacaaaagactgaaatagtggaaagtcttataacagaggatatcagccctagagttctttcctgacacaag

SEQ ID NO: 21103 - DNA, 80 bp, synthetic construct
  source 1..80: mol_type = other DNA
aacttataacgcacatcatcacacagcatcaaaaaagaaaataaaattgtctcacaacatcttgtggttgcttcctaata

SEQ ID NO: 21104 - DNA, 80 bp, synthetic construct
  source 1..80: mol_type = other DNA
ttctggttcaatttcataattactaggttttgaggctgtgtgcctcggctgcaagcattggagtattcatatatacacac

SEQ ID NO: 21105 - DNA, 80 bp, synthetic construct
  source 1..80: mol_type = other DNA
ccttgcaaatcatatgtctgaagcagggactaggtagcctaacacatactcgaaattccacaactatctgttgaatgagt

SEQ ID NO: 21106 - DNA, 80 bp, synthetic construct
  source 1..80: mol_type = other DNA
atttatgattacagcaaaactaatcagaaagtgcggagttcctgtacattctttctgtaacagactgaacgtgtcccttc

SEQ ID NO: 21107 - DNA, 80 bp, synthetic construct
  source 1..80: mol_type = other DNA
ctccacctattcacccttctctcctccccaaaccctagtaaccactgagtttttaactttctccatacttttgccttttc

SEQ ID NO: 21108 - DNA, 80 bp, synthetic construct
  source 1..80: mol_type = other DNA
attgtgttaaatctgtagctcaatttaggaagaattggcagcttgacaatactaagtcattgtatcaatgaatatggagt

SEQ ID NO: 21109 - DNA, 80 bp, synthetic construct
  source 1..80: mol_type = other DNA
aaataaaagccgatgctatttcaacaaaccagaaactgttctttgtgttgtgcttaccagaatgacagagtgtctctcct

SEQ ID NO: 21110 - DNA, 80 bp, synthetic construct
  source 1..80: mol_type = other DNA
gccaaacttgttcctgccattgtaccaatgaatttgcaaaattttgctaagagaatatagtacgtactgaaaaactgaca

SEQ ID NO: 21111 - DNA, 80 bp, synthetic construct
  source 1..80: mol_type = other DNA
agcgctaactccaagttaagaatttttgatcatggaatgcaatgtaaagtcttgaaatgagaatgcagattctctgtctg

SEQ ID NO: 21112 - DNA, 80 bp, synthetic construct
  source 1..80: mol_type = other DNA
caatcccatcaatgtctgaatcacatgaatcaaatattgcatggcagaaagcagacctctatgagaaattaatgttaaca

SEQ ID NO: 21113 - DNA, 80 bp, synthetic construct
  source 1..80: mol_type = other DNA
aagagaagaatctgataaggtggatgaggacagtgatagatttacaaagcttgcaatagcacttgggttttgcctggtgt

SEQ ID NO: 21114 - DNA, 80 bp, synthetic construct
  source 1..80: mol_type = other DNA
tgtttggtactattattagtgtgggtgttttatatctagtcaatcttcttttgatatactgtggctatgaaaacaaccta

SEQ ID NO: 21115 - DNA, 80 bp, synthetic construct
  source 1..80: mol_type = other DNA
aaaatgcattaactattttataccattatgatttataacactgaaatttcagacctcttgggagaatggttgaagtcata

SEQ ID NO: 21116 - DNA, 80 bp, synthetic construct
  source 1..80: mol_type = other DNA
tagaattccacttgacaggactatgattaatctacttgcattccaggttattgctggagtcatttagtgtcttgtaaatg

SEQ ID NO: 21117 - DNA, 80 bp, synthetic construct
  source 1..80: mol_type = other DNA
gcaaaccatgtgactgtgaagcaagggagatgttaaactaaaagcaaataaatatgtatgaacctcacagatcacacctg

SEQ ID NO: 21118 - DNA, 80 bp, synthetic construct
  source 1..80: mol_type = other DNA
aatagctagaacttctccagaatttcaggcaccagcaataggactctggaagcacaagaaatctaagtagggaaaggatg

SEQ ID NO: 21119 - DNA, 80 bp, synthetic construct
  source 1..80: mol_type = other DNA
cttgatttctaaagcagttatgtttcatttgacattttatgcagaaaacttgctagtcactcagttgtagcaattttcct

SEQ ID NO: 21120 - DNA, 80 bp, synthetic construct
  source 1..80: mol_type = other DNA
ttttctattctctggaaaatttgatgtaagattggtgctaattttttcttaaatgtttgaaataattcaccagtgaaacc

SEQ ID NO: 21121 - DNA, 80 bp, synthetic construct
  source 1..80: mol_type = other DNA
tcaacgatgggttcataatttctggcacacatattaaatagagaaggctagtcccttaaagtgctatgttttttgttgct

SEQ ID NO: 21122 - DNA, 80 bp, synthetic construct
  source 1..80: mol_type = other DNA
tatcacccatgggggctctgatgtatgccctttattagcagtattagcaggtacttttttttttttatggagttttgcat

SEQ ID NO: 21123 - DNA, 80 bp, synthetic construct
  source 1..80: mol_type = other DNA
caaggcatgtctaaagatgaagttggaaaaggatataggagccagttcttggggcactctatatgccattttaacaagct

SEQ ID NO: 21124 - DNA, 80 bp, synthetic construct
  source 1..80: mol_type = other DNA
gcaactgagaaatctagtaacataaggatggaagcattctgttggcttagcaatgatgatgtcatcagcattggctggag

SEQ ID NO: 21125 - DNA, 80 bp, synthetic construct
  source 1..80: mol_type = other DNA
attttttattcccagccaactatcttcatcatcatttctcatatacttcactccctctttcctcattcaatttgtcaccc

SEQ ID NO: 21126 - DNA, 80 bp, synthetic construct
  source 1..80: mol_type = other DNA
ctcttccaatctcataactaatgccctagtccaggtcctaacacttttcactacattgttgagaatctttctaatctgcc

SEQ ID NO: 21127 - DNA, 80 bp, synthetic construct
  source 1..80: mol_type = other DNA
tatcttaaaaacaaaaaaaaatacttgcttattctactcacatgtgaaaggctagaggtggaccagttgtaaagtatgct

SEQ ID NO: 21128 - DNA, 80 bp, synthetic construct
  source 1..80: mol_type = other DNA
tgctaattaccaaattttggccaaccaaagggaaccagctgttcaaactgtgtccaaaagaggcaaaggtcaagctgtaa

SEQ ID NO: 21129 - DNA, 80 bp, synthetic construct
  source 1..80: mol_type = other DNA
cattttgaagcaaacaagtttaacccacatttcacttaatactaatgagcaatgtcaattccagaatatgacaccgcatt

SEQ ID NO: 21130 - DNA, 80 bp, synthetic construct
  source 1..80: mol_type = other DNA
tagttaaagtttcatttgttcgattcctaatctcttaaggcagtatgttgcactagaatgctctccagatgatggggatc

SEQ ID NO: 21131 - DNA, 80 bp, synthetic construct
  source 1..80: mol_type = other DNA
agcatttaaaagggcttctttgtttagcttttaatcatggttgagtctgctaaaagttgtttaatactgattgcaagcaa

SEQ ID NO: 21132 - DNA, 80 bp, synthetic construct
  source 1..80: mol_type = other DNA
aaactgataaccaaatttcccctatgaatcagtcaagactattcctactgtgagtccccctccctacttacctcagttac

SEQ ID NO: 21133 - DNA, 80 bp, synthetic construct
  source 1..80: mol_type = other DNA
tgacctccttggcctcctcaattcagaaaactagaaactccacttctctggcaatttccaactatatttgtaccctcaga

SEQ ID NO: 21134 - DNA, 80 bp, synthetic construct
  source 1..80: mol_type = other DNA
ttcaaatgtggatcacatttatgagatcacttagcactggccagtaatattaccacagacccaataaagttgctttctca

SEQ ID NO: 21135 - DNA, 80 bp, synthetic construct
  source 1..80: mol_type = other DNA
tgtagttgattaactttaactgctgtctagcattccaatgtttggtctacaaactatggatttattctcctgccagtgga

SEQ ID NO: 21136 - DNA, 80 bp, synthetic construct
  source 1..80: mol_type = other DNA
gtctctttttttccgtcctattgggaaatttgtttatatctacaccaataccattctaccctttataatacaatatctgg

SEQ ID NO: 21137 - DNA, 80 bp, synthetic construct
  source 1..80: mol_type = other DNA
gcatgctggttcaggcctatagatcttcccggagacttctgccatttccatgccagagtatttaaactgagtcaaaaaaa

SEQ ID NO: 21138 - DNA, 80 bp, synthetic construct
  source 1..80: mol_type = other DNA
acataactttcgatgtggaagcatggagtgctcttctttagcatcgcaccagtaatctgaaaggttttcattttcttgaa

SEQ ID NO: 21139 - DNA, 80 bp, synthetic construct
  source 1..80: mol_type = other DNA
tagcagctgagtaaaaattctcctgctgtatgacttcaatgccaaaatacatttttagttgggaaaatggctggtcacct

SEQ ID NO: 21140 - DNA, 80 bp, synthetic construct
  source 1..80: mol_type = other DNA
caccagtacttgtttacctctaacctctcaaaaaatatataagcacattgatgtcacgcatagaactgaggactgactta

SEQ ID NO: 21141 - DNA, 80 bp, synthetic construct
  source 1..80: mol_type = other DNA
tgaaaagaatgagttcacttcataaattattcaaattgatggttttaatttttgaactacagctagttactgctaagttg

SEQ ID NO: 21142 - DNA, 80 bp, synthetic construct
  source 1..80: mol_type = other DNA
ctttaaaaatgaataataaatgtggattcaaacctgtagttttccgtggtttgtggtagggtgagactacagttgggccc

SEQ ID NO: 21143 - DNA, 80 bp, synthetic construct
  source 1..80: mol_type = other DNA
gcattaataaacactggacatgagtattcggaatccagcaacagtggtcttactcacctgagtgttctttctttggtgac

SEQ ID NO: 21144 - DNA, 80 bp, synthetic construct
  source 1..80: mol_type = other DNA
tagcacatttcacgtggactgcctcttctaagaatcttcttacatggaagaaatagctgttaagctaagacaaaggcttt

SEQ ID NO: 21145 - DNA, 80 bp, synthetic construct
  source 1..80: mol_type = other DNA
aaataaagtcccctcaatcttatcagaaagctgaaaaatagctgtgctaatttgttcattatataggatagctcatggtg

SEQ ID NO: 21146 - DNA, 80 bp, synthetic construct
  source 1..80: mol_type = other DNA
tgtgaaagacatacattaagttattgagcttgactgaattgttagcacacagtcttaatagtgttaaagcaacagtggat

SEQ ID NO: 21147 - DNA, 80 bp, synthetic construct
  source 1..80: mol_type = other DNA
tctaggaggcacaggtatacttgccaaatgaattattcaagaccgaaaggaagaaatcagttcctaattgatgccagtct

SEQ ID NO: 21148 - DNA, 80 bp, synthetic construct
  source 1..80: mol_type = other DNA
agttaacttgaaactttcatttgttcaatctaagtcagtccaggtgaattatgttgcactgtctttgaataatcaataca

SEQ ID NO: 21149 - DNA, 80 bp, synthetic construct
  source 1..80: mol_type = other DNA
ttatgtaacaataataatcagtgccagtaacattgtggtgaaggtaatgtcccacttccgtagatgtataagctagaaac

SEQ ID NO: 21150 - DNA, 80 bp, synthetic construct
  source 1..80: mol_type = other DNA
tgaagagaacatggtcatgtaggaataaattcaacctaaagtttgggggaaatgtgggaacacagagaagatgaaacatg

SEQ ID NO: 21151 - DNA, 80 bp, synthetic construct
  source 1..80: mol_type = other DNA
gttcaatccgtcattcactcatctgtagcagtgtctcaagtaaggcctattatgttcataagtgatgccagatgaaaatg

SEQ ID NO: 21152 - DNA, 80 bp, synthetic construct
  source 1..80: mol_type = other DNA
tgagtcctgaatattactggtgcgtgcatagaatatatatttgttcagaaatgtgcaaaccaaggaaatgtgctcatcct

SEQ ID NO: 21153 - DNA, 80 bp, synthetic construct
  source 1..80: mol_type = other DNA
cttggtcatgaccttgccttgatgtacgcttaataggcagttaggaaagacgattcagaaaaagaatttaaaaactttaa

SEQ ID NO: 21154 - DNA, 80 bp, synthetic construct
  source 1..80: mol_type = other DNA
tttcagtcttgctgcctacaaggagtgttttatatgttttttagctggtcatggacactggatctcttgaatctacaaaa

SEQ ID NO: 21155 - DNA, 80 bp, synthetic construct
  source 1..80: mol_type = other DNA
gaacactttaatcacctttgaattctggcttcctctgtgctgatatttatccaattctggaccatgaatctaaatctgga

SEQ ID NO: 21156 - DNA, 80 bp, synthetic construct
  source 1..80: mol_type = other DNA
actctctaaagaaagacaaaatgaaacaacataaaattaccccctcgaaggagctctggtcaatgaattgctctgaacgc

SEQ ID NO: 21157 - DNA, 80 bp, synthetic construct
  source 1..80: mol_type = other DNA
ttaagccgagttccattacggcatgtgttctctctttggcattttaatatcactaggtgtctacctcatcattgcaccta

SEQ ID NO: 21158 - DNA, 80 bp, synthetic construct
  source 1..80: mol_type = other DNA
taaaataaacatatctaagaaagatctatggaggatttgcaaagacgcgaatgatatgcagttctgctttgatgtgtccc

SEQ ID NO: 21159 - DNA, 80 bp, synthetic construct
  source 1..80: mol_type = other DNA
attggcttgaggaactcaccctgacctgcattttcatgtattaaaaaaccaaaggtaataatatttgtcctgcctttcta

SEQ ID NO: 21160 - DNA, 80 bp, synthetic construct
  source 1..80: mol_type = other DNA
cttaccttgtgctgcaatttttacagtcccttgtttggtttcagaagcttttcccggctcttggaatgaaaaaaacataa

SEQ ID NO: 21161 - DNA, 80 bp, synthetic construct
  source 1..80: mol_type = other DNA
attcactttcattcattcatccatcacatgtttagcaataattatgtgtggacacgaagttaggtggatatgtagtagtt

SEQ ID NO: 21162 - DNA, 80 bp, synthetic construct
  source 1..80: mol_type = other DNA
ggtcattctacaatgtctacctgcaaaagaaagatttcaatggaggaaaatctcgggatcatagcagtatcatgtttgtc

SEQ ID NO: 21163 - DNA, 80 bp, synthetic construct
  source 1..80: mol_type = other DNA
gataatgagcccaccgtttccaacacctactacagtatttcatctgtactgcctccactacacatattctaatgaaaatt

SEQ ID NO: 21164 - DNA, 80 bp, synthetic construct
  source 1..80: mol_type = other DNA
gcccactgacctccacagtacagatttccatttcaatgtgaaatcatataattatttactcgtacaacttcccttcctac

SEQ ID NO: 21165 - DNA, 80 bp, synthetic construct
  source 1..80: mol_type = other DNA
ctggccgaccgttcttattttcttaggtaagaaaactaaatatagaaaagttgaatggcttttccacagatcaggagtta

SEQ ID NO: 21166 - DNA, 80 bp, synthetic construct
  source 1..80: mol_type = other DNA
gggaaacatcaatcagaataatgagcatttccccctcatggcattatctagctgtctggatagaatgtgtgagaatgaca

SEQ ID NO: 21167 - DNA, 80 bp, synthetic construct
  source 1..80: mol_type = other DNA
atagggagcacacaacctagatccctagcatgagcaattgacaatagggttcaagctcctatgagaatctaaagcccccg

SEQ ID NO: 21168 - DNA, 80 bp, synthetic construct
  source 1..80: mol_type = other DNA
atggagaattctaaatcaagcagcccaaggaagaattcagaggctatttctaagcaaacgctttctggtacacttagtcc

SEQ ID NO: 21169 - DNA, 80 bp, synthetic construct
  source 1..80: mol_type = other DNA
agaagtaaaacacatgaaataagcagaaggccattggcctgaggctgtcttcacattgtgagttcctacataatgaactg

SEQ ID NO: 21170 - DNA, 80 bp, synthetic construct
  source 1..80: mol_type = other DNA
actgaaattaagagcgtgaacaatttttcccagagacagatgaacagaaggcttcagactaccatcctatcaagaaatat

SEQ ID NO: 21171 - DNA, 80 bp, synthetic construct
  source 1..80: mol_type = other DNA
aaatagcaggaatacacagctgtttcctagaaggacagtactctgatcaatgatgacaccttgcagagcacaaggaagag

SEQ ID NO: 21172 - DNA, 80 bp, synthetic construct
  source 1..80: mol_type = other DNA
ctcccatggactgttctttagttcacgtttgtgtcatggttctaagagttcaaatgctttaactgtcagctcacatgcta

SEQ ID NO: 21173 - DNA, 80 bp, synthetic construct
  source 1..80: mol_type = other DNA
aaaggaagggtgcagtagaggttaccgtgataaattctcagaccaaaaagtttagtaattctcatctttcaaccaggctc

SEQ ID NO: 21174 - DNA, 80 bp, synthetic construct
  source 1..80: mol_type = other DNA
taaaaagtctttgcattaattactgcacttgatctgtatcattactttgtaagataggccactaggcctggactaaactg

SEQ ID NO: 21175 - DNA, 80 bp, synthetic construct
  source 1..80: mol_type = other DNA
tctgtccctttctatgcttgcttttgctgttcagagacatgtttctatctctcctcctaagctgcacactcccataaaat

SEQ ID NO: 21176 - DNA, 80 bp, synthetic construct
  source 1..80: mol_type = other DNA
tcccaacactgtgctcacaatacttcatcatcaaaatctctgaatttcattgaagcatctcactatacatggtactaatt

SEQ ID NO: 21177 - DNA, 80 bp, synthetic construct
  source 1..80: mol_type = other DNA
agtcagaaaggtcacgctttgaatcttggctttgccatttcatattttccttgagcatgcttaagttttcaaaggctcat

SEQ ID NO: 21178 - DNA, 80 bp, synthetic construct
  source 1..80: mol_type = other DNA
tttctatgcccaatcacataaagtaaaacagaacaccatgcattttctccccttttgcaagcacctagcatcaggacaat

SEQ ID NO: 21179 - DNA, 80 bp, synthetic construct
  source 1..80: mol_type = other DNA
acccaatactaatataatgaacggccaaatttgatatttacaagcagaagagtgcctggtgtgtagctgttattcaataa

SEQ ID NO: 21180 - DNA, 80 bp, synthetic construct
  source 1..80: mol_type = other DNA
ccttctggctggttaatttcatgttgttagcttcaaattggccttggtggaattacgtacaccacggaaatcagcaaaca

SEQ ID NO: 21181 - DNA, 80 bp, synthetic construct
  source 1..80: mol_type = other DNA
tctttatcaacagactgtaggctcagctgggaacttaccaaactcggatatgtagcttttagtaacttctatgaataaat

SEQ ID NO: 21182 - DNA, 80 bp, synthetic construct
  source 1..80: mol_type = other DNA
attacttaggagtattttaagcacttaaggtgaagctttggttctttatagtgagcttgaattgatgacttcatagcctg

SEQ ID NO: 21183 - DNA, 80 bp, synthetic construct
  source 1..80: mol_type = other DNA
ttcacattgccatgatattctgagattcattgcttgagggaggctgtccatggaatatattggatattagtaagcagttg

SEQ ID NO: 21184 - DNA, 80 bp, synthetic construct
  source 1..80: mol_type = other DNA
accttgacaagatcgctgtaacgttagaaccattagagtctttccagagaaggaaactaaggctcatccatagaacttgc

SEQ ID NO: 21185 - DNA, 80 bp, synthetic construct
  source 1..80: mol_type = other DNA
tactgtatgaaactattttcacaaatgtgtgtgcagctcactcctttcttcatccaagtctctgttcagatagcatctcc

SEQ ID NO: 21186 - DNA, 80 bp, synthetic construct
  source 1..80: mol_type = other DNA
cacagagtgcaatttggttttactttcagctaactgagataggaatggctttccgtgttcagttccagggatacaaatta

SEQ ID NO: 21187 - DNA, 80 bp, synthetic construct
  source 1..80: mol_type = other DNA
gttgccctccagcaactcagtaggaaaaagactaaaaaaatccatttgtgctcacatcatcaaatacgtcttcagctgtt

SEQ ID NO: 21188 - DNA, 80 bp, synthetic construct
  source 1..80: mol_type = other DNA
gagctgagaggctaaaaaaagaaactgatagatccagtttctctgaaagaagcatttcctagggatttacaagcagaagc

SEQ ID NO: 21189 - DNA, 80 bp, synthetic construct
  source 1..80: mol_type = other DNA
accttgggtgatactactgagtacctcctgcctcccaagtgctaatggtcattgaaactttgacaatcgttttagaatca

SEQ ID NO: 21190 - DNA, 80 bp, synthetic construct
  source 1..80: mol_type = other DNA
ctaggtgctagatactcagtgtcgaaaaaaacagaatggactcacttttttttctctagcctaaagattacttaagtaac

SEQ ID NO: 21191 - DNA, 80 bp, synthetic construct
  source 1..80: mol_type = other DNA
tggctcctacctataatcctagaactttggaaggtgtaggcaggagacctgcttaagtttaggagtttgataccagcctg

SEQ ID NO: 21192 - DNA, 80 bp, synthetic construct
  source 1..80: mol_type = other DNA
tgtgtgtttccttcaaggggctattaggaaaaaattagtaaaaaggtgtaacaggaataaattatggattactatgtagc

SEQ ID NO: 21193 - DNA, 80 bp, synthetic construct
  source 1..80: mol_type = other DNA
aaataaatcatcttccttttttcctttttacttaaagactatggacagcactctggcctaacttgggtcatgggcccaca

SEQ ID NO: 21194 - DNA, 80 bp, synthetic construct
  source 1..80: mol_type = other DNA
aaaccgtgagttctattggaaatggaagaaatttcgtcaaataacaaatgattacaaatggcaagcatgtgtgattagga

SEQ ID NO: 21195 - DNA, 80 bp, synthetic construct
  source 1..80: mol_type = other DNA
atgaggagtttagctgtaaaggggatctgagaaatcaggcagcaacctgagaaggatgtgctgtcaataacaggatattt

SEQ ID NO: 21196 - DNA, 80 bp, synthetic construct
  source 1..80: mol_type = other DNA
atacatatttttagagggaagacagcccaagtggtttaccacattccgctgataggcttatatcacatgttcaagccatg

SEQ ID NO: 21197 - DNA, 80 bp, synthetic construct
  source 1..80: mol_type = other DNA
ataggagagtagatcaaagttagaaacatggctttgatgttctctgtttcctgatttccatattacacatccacatttct

SEQ ID NO: 21198 - DNA, 80 bp, synthetic construct
  source 1..80: mol_type = other DNA
agagaggtaaatctcctgatgatattgtgtgacctctgcatcaagctaaactcaaagccagtttactccagaatagtagt

SEQ ID NO: 21199 - DNA, 80 bp, synthetic construct
  source 1..80: mol_type = other DNA
ggatccctagagaggctgcagttgagggagatatcactttgatgtttttaaagctttacttgcactgaaaggaaaatctt

SEQ ID NO: 21200 - DNA, 80 bp, synthetic construct
  source 1..80: mol_type = other DNA
acgtgcccatggtcccagctacacaggaggctgaggtgagagtatctcttgatcccaggaggttgaggcagcagtgaggc

SEQ ID NO: 21201 - DNA, 80 bp, synthetic construct
  source 1..80: mol_type = other DNA
tattgccttgtaattgtggagcctcactaagtcaaggctgggaaatactgattaaaccaggtctaatgtgtactagattt

SEQ ID NO: 21202 - DNA, 80 bp, synthetic construct
  source 1..80: mol_type = other DNA
cctgaccaattcaccaccacaaagatgtttcagtgtaaagctctaatggggtattgtaaatgaatgatccttaaagagct

SEQ ID NO: 21203 - DNA, 80 bp, synthetic construct
  source 1..80: mol_type = other DNA
ttaataaagtccaaacacctatacatgttcctgcatattctgactcctagtacaaaccacactccccttcccccacacat

SEQ ID NO: 21204 - DNA, 80 bp, synthetic construct
  source 1..80: mol_type = other DNA
tacaattgtaactatgaaaaggccaacccaagagcaatgggtcatcttagctttggcctgtttctcttgtgtgtctatat

SEQ ID NO: 21205 - DNA, 80 bp, synthetic construct
  source 1..80: mol_type = other DNA
tgtgatttaccagtgtcatacggtagaagcccatttatcactgaatagagtttaagccttaggtttgtcatgtcggcata

SEQ ID NO: 21206 - DNA, 80 bp, synthetic construct
  source 1..80: mol_type = other DNA
ggaattttgtgtaatcaaaagtaaaaatgacaagcatacaaacagaaaactggctccaagaaagacaacactagctgaat

SEQ ID NO: 21207 - DNA, 80 bp, synthetic construct
  source 1..80: mol_type = other DNA
catacattattactacttagaaaaggaaagattttcactaaaatgccgtctaacccagcctgccctccccagacggttcc

SEQ ID NO: 21208 - DNA, 80 bp, synthetic construct
  source 1..80: mol_type = other DNA
gggacatttacaagccacttttcagtttcacaacccataaagcctttctcaaggaactgagagccatccctttgaaatgt

SEQ ID NO: 21209 - DNA, 80 bp, synthetic construct
  source 1..80: mol_type = other DNA
gtatagagaaatcttaaatcagccataagtcatgtcaaatatgaataaggtagcaccttcataacagactagtggcttag

SEQ ID NO: 21210 - DNA, 80 bp, synthetic construct
  source 1..80: mol_type = other DNA
ctcaaagttaatgtttacaaaacactgtgtaaagtgcctggctcacagtaaatgtgtaacgttgtagactgctaatactg

SEQ ID NO: 21211 - DNA, 80 bp, synthetic construct
  source 1..80: mol_type = other DNA
agacatataatttataaagaacccctttcatgatttctagagataatctaatgtctcagggaaaaatgtattcacacttt

SEQ ID NO: 21212 - DNA, 80 bp, synthetic construct
  source 1..80: mol_type = other DNA
ttccatctctttctcattggtttgccattttgtttgtaacagctagagaagaattagagcatttaagcccattgatgttc

SEQ ID NO: 21213 - DNA, 80 bp, synthetic construct
  source 1..80: mol_type = other DNA
cactgtcaccttgttttcttagagtggcagagattggcctggaacccagctcacaatatgaccatggaaaattttacata

SEQ ID NO: 21214 - DNA, 80 bp, synthetic construct
  source 1..80: mol_type = other DNA
atcatcttgcatttattttctaattttcctgggaatgggtaacctaaaaagagttgcaaatatcgatggcatgttgtctg

SEQ ID NO: 21215 - DNA, 80 bp, synthetic construct
  source 1..80: mol_type = other DNA
ggtattttattctctttgaagcaattgtgaatgggagttcactcatgatttggctctctgtttgtctgttgttggtgtat

SEQ ID NO: 21216 - DNA, 80 bp, synthetic construct
  source 1..80: mol_type = other DNA
agattcaacttcttcctggtttagtcttgggagagtgtatgttagacctaaaaccataaaaaccctagaagaaaacctag

SEQ ID NO: 21217 - DNA, 80 bp, synthetic construct
  source 1..80: mol_type = other DNA
ctaaaaagaaaaaattagccaggtggcgtggtggtgggcacctgtagccccagctgctccggaggctgaagcagaagaac

SEQ ID NO: 21218 - DNA, 80 bp, synthetic construct
  source 1..80: mol_type = other DNA
agcacgtgttattataaatgccagctgaaggaactgaggtacagtcatagctcatgtcttgcagatgcagttgagaactc

SEQ ID NO: 21219 - DNA, 80 bp, synthetic construct
  source 1..80: mol_type = other DNA
tgcactttggtgcaggaggccaaccagcacaataatagagcattaaaccacaaaagctaagaaccctcacagagtccatt

SEQ ID NO: 21220 - DNA, 80 bp, synthetic construct
  source 1..80: mol_type = other DNA
cagccaagaattttgtatccagtgaaactaagcatcatatatgaaggaaagatgaagtctttttcagacaaacaaatact

SEQ ID NO: 21221 - DNA, 80 bp, synthetic construct
  source 1..80: mol_type = other DNA
gcaagcagaggtagctattcttatatcagacaagaaaaacagacaagaaaaaccttaaaccaacagcagtaaaaagagac

SEQ ID NO: 21222 - DNA, 80 bp, synthetic construct
  source 1..80: mol_type = other DNA
acaaaaaaaagtccaggaccagttggattcacagaattctaccagacattccaagaagaattggtgccaatacttttgac

SEQ ID NO: 21223 - DNA, 80 bp, synthetic construct
  source 1..80: mol_type = other DNA
acactgctgaaagcaattatagacaacacaaacaaatggaaacacatcccacgcttatggatggatataatcaatcttgg

SEQ ID NO: 21224 - DNA, 80 bp, synthetic construct
  source 1..80: mol_type = other DNA
aaatcaaaaccacaatgaaacaccaccttactcctgcaagaatggccataataaaaaaaataaaaaaacagtagtggcat

SEQ ID NO: 21225 - DNA, 80 bp, synthetic construct
  source 1..80: mol_type = other DNA
taaaagtctacacatcttataacctgtgaggaaatgggctcaggaaagatgacgaatgtggccaacttcacaggtcatat

SEQ ID NO: 21226 - DNA, 80 bp, synthetic construct
  source 1..80: mol_type = other DNA
aaagagagaagaaaagaggagcgagacgggagaaggaaaaggagatgctatattttatttttccactcagtgcttttgca

SEQ ID NO: 21227 - DNA, 80 bp, synthetic construct
  source 1..80: mol_type = other DNA
atgctgagttcaggcttatttgaactgatgcactacatgagagattttaccgtctcttatggattaaaacaaactagtaa

SEQ ID NO: 21228 - DNA, 80 bp, synthetic construct
  source 1..80: mol_type = other DNA
cattcctggtcttcagagtaaatacctcttgatactgaacagtcaagacagacagatgcccctatctatcttggcagctg

SEQ ID NO: 21229 - DNA, 80 bp, synthetic construct
  source 1..80: mol_type = other DNA
ctactaaatcctactagtaaatatcatctggcagatgaggaaacccagtctttcagagattaagggaactaataaaaatc

SEQ ID NO: 21230 - DNA, 80 bp, synthetic construct
  source 1..80: mol_type = other DNA
caatatctatatctccctcatttgtaaactcctgactcatatattcagttgtccactgcagattaccacttatgtggatc

SEQ ID NO: 21231 - DNA, 80 bp, synthetic construct
  source 1..80: mol_type = other DNA
ctaacacttaattgccattttaggataatggaaatagactgagccttggtaggagacacctggctttcaattccagttat

SEQ ID NO: 21232 - DNA, 80 bp, synthetic construct
  source 1..80: mol_type = other DNA
ctgtatctatacaaattcaactaacttactctttatggctcaatgaaagacttgaggtttcacttgataaccttgcctca

SEQ ID NO: 21233 - DNA, 80 bp, synthetic construct
  source 1..80: mol_type = other DNA
ttctgtttaaccgctgaggattctgagaaatacagttcttgaggtaacaggttagcagagatgctgaaaaacatttgatg

SEQ ID NO: 21234 - DNA, 80 bp, synthetic construct
  source 1..80: mol_type = other DNA
atgtggggacaacacagaaatccaagaaaggcaagaccaatttcaaggcactaaataagtggactgagacaagaagtaca

SEQ ID NO: 21235 - DNA, 80 bp, synthetic construct
  source 1..80: mol_type = other DNA
caaatgacacatccttttccaagtgacagattgctaagcaaaatatttgctacttggtgttttatgagcctctgctagga

SEQ ID NO: 21236 - DNA, 80 bp, synthetic construct
  source 1..80: mol_type = other DNA
cctttctagggtggctgtgatctgaggaagacctccatttgtactgttgtaaaaaattaatgatttagctttaattactg

SEQ ID NO: 21237 - DNA, 80 bp, synthetic construct
  source 1..80: mol_type = other DNA
aagcttgttctgtcggtaagggaggtggaatggctgggctttgtcctacacaatgtagaagtaggaattggaaaaaaaaa

SEQ ID NO: 21238 - DNA, 80 bp, synthetic construct
  source 1..80: mol_type = other DNA
atgggcatgtgtaacttctaaaatctcactgacaactagatattatcaaatgtcagcagacctgccttactgaaagtttt

SEQ ID NO: 21239 - DNA, 80 bp, synthetic construct
  source 1..80: mol_type = other DNA
tagatcgatatcttcatagaatggtgcctgttgagtctcagctgctttctaccctgtcatatacctcggtgaatagtagt

SEQ ID NO: 21240 - DNA, 80 bp, synthetic construct
  source 1..80: mol_type = other DNA
tttagtataaagactgcatgcttaggagtcacatgggtattaagcgatagcttcagatctgtcacttagaagctgtgtac

SEQ ID NO: 21241 - DNA, 80 bp, synthetic construct
  source 1..80: mol_type = other DNA
tttttctctaccatctaatagagattttatgtcatagaccctcattggattttcctggaagtacggagagttacatccag

SEQ ID NO: 21242 - DNA, 80 bp, synthetic construct
  source 1..80: mol_type = other DNA
tcaaatttgcctattaaacaaagacctctccaactgggaataatctgaagaagttcaggagtttgtgtgaggtgggcagg

SEQ ID NO: 21243 - DNA, 80 bp, synthetic construct
  source 1..80: mol_type = other DNA
ttaggctgctcatgtgactttggatttgtcctaagggcaatagtaagcctttgaactgctttagcatgataggattttaa

SEQ ID NO: 21244 - DNA, 80 bp, synthetic construct
  source 1..80: mol_type = other DNA
tgcctcttgcattatgtagttttcactttgctggagtacttgtatagaagatcaccagtgaagaagccagagatggttta

SEQ ID NO: 21245 - DNA, 80 bp, synthetic construct
  source 1..80: mol_type = other DNA
cgagtcaaagaaaggggtgacggacagcacctggaaaatcgggtcactcccacccgaatactgcgcttttccgacaggct

SEQ ID NO: 21246 - DNA, 80 bp, synthetic construct
  source 1..80: mol_type = other DNA
aaccaagttggaaaacacactgcaggatattatccaggagaacttccccaatctagcaaggcaggccaacgttcagattc

SEQ ID NO: 21247 - DNA, 80 bp, synthetic construct
  source 1..80: mol_type = other DNA
ataggctcaaaataaaaggatggaggaagatctaccaagcaaatggaaaacaaaaaaaggcagggattgcaatcctagtc

SEQ ID NO: 21248 - DNA, 80 bp, synthetic construct
  source 1..80: mol_type = other DNA
aatttaagagaaagcaggaaagatccaaaattgacaccctaacatcacaattaaaagaactagaaaagcaagagcaaaca

SEQ ID NO: 21249 - DNA, 80 bp, synthetic construct
  source 1..80: mol_type = other DNA
ggccgtatttcaaaataataagagctatctatgacaaacccacagccaatatcatactgaatgggcaaaaactggaagca

SEQ ID NO: 21250 - DNA, 80 bp, synthetic construct
  source 1..80: mol_type = other DNA
agaacaaagctggaggcatcacactacctgacttcaaactatactacaaggctacagtaaccaaaacagcatggtactgg

SEQ ID NO: 21251 - DNA, 80 bp, synthetic construct
  source 1..80: mol_type = other DNA
acaaatcaaaaccacaatgagataccatctcacaccagttagaatggcaatcattaaaaagtcaggaaacaacaggtgct

SEQ ID NO: 21252 - DNA, 80 bp, synthetic construct
  source 1..80: mol_type = other DNA
aataaaaaaaaagaaaaatgttcaccaaaaaaaaaaaaacctaatataagattaaattttttacctccattttattttcc

SEQ ID NO: 21253 - DNA, 80 bp, synthetic construct
  source 1..80: mol_type = other DNA
atgctctcagaggacccagtgtatgctttatccactgcttctgtggttctcaatacatttgtttatttacaagtttgttt

SEQ ID NO: 21254 - DNA, 80 bp, synthetic construct
  source 1..80: mol_type = other DNA
aatggatgacttgccaaattcatccaactgacttacaactaggacccaagtatgcggagtcccagtgcagtgctcttata

SEQ ID NO: 21255 - DNA, 80 bp, synthetic construct
  source 1..80: mol_type = other DNA
taaggcggttgtttaccaacgaagttttcacaatgcatattcctgaatatgggtacattgaatacgtcatagcctctcaa

SEQ ID NO: 21256 - DNA, 80 bp, synthetic construct
  source 1..80: mol_type = other DNA
cctagaacttagcacagtacctgacataccattagcactcagtaccacacgtgttacatctacttttattgtcctcatgt

SEQ ID NO: 21257 - DNA, 80 bp, synthetic construct
  source 1..80: mol_type = other DNA
acagtacacactgcttatccagtgtctgccaagaggctatttataatcacataaaaataatattcctttgggagaaaatc

SEQ ID NO: 21258 - DNA, 80 bp, synthetic construct
  source 1..80: mol_type = other DNA
aaaactacatctaattttattaccacttcctcccctatttgggatgaaaaaaatggccaaataaataggaaacaatacta

SEQ ID NO: 21259 - DNA, 80 bp, synthetic construct
  source 1..80: mol_type = other DNA
ttatggaaatggttagaaagagtcctattctctattttgtatccactaggccacacaaataaaccttagaacagcactgg

SEQ ID NO: 21260 - DNA, 80 bp, synthetic construct
  source 1..80: mol_type = other DNA
ttctctcattgtagcctaattctgtatgctgcctgcagtctactcatgcatgcagcaaacctgtctttgttaattctgag

SEQ ID NO: 21261 - DNA, 80 bp, synthetic construct
  source 1..80: mol_type = other DNA
aatttttttctctcctattcattccatggcttcaaccattttctcttttatttgctcctgaaatccttgtgcagctcatt

SEQ ID NO: 21262 - DNA, 80 bp, synthetic construct
  source 1..80: mol_type = other DNA
tgcagtagatagtagaacaaaggctaggagacatcagatggctactatgggcaaaatgagtctggtatgttatttgttga

SEQ ID NO: 21263 - DNA, 80 bp, synthetic construct
  source 1..80: mol_type = other DNA
ctagatccactccatcttttttgacagcaggaatcacagatgtttctcctctgaatcttaaaacatttagagttcgtatt

SEQ ID NO: 21264 - DNA, 80 bp, synthetic construct
  source 1..80: mol_type = other DNA
tcaggctttatttcctttcgttggacttttccttgttgatctttttaatttcattctctccaaacgatcttgtacaacat

SEQ ID NO: 21265 - DNA, 80 bp, synthetic construct
  source 1..80: mol_type = other DNA
atagtgttgactgaagtattacatcatcattcaagaagatataaaagaagcctggagacatctttttttttttgagacac

SEQ ID NO: 21266 - DNA, 80 bp, synthetic construct
  source 1..80: mol_type = other DNA
gttgactgtgggttactgaaactgcaaatagcaaaatcatggataagaggacacgactgtattctcatctagttagccct

SEQ ID NO: 21267 - DNA, 80 bp, synthetic construct
  source 1..80: mol_type = other DNA
agatgaatacactgaaggctcatagatgataactgatgagctgtttgtttctttctgaagatatttcccatttgaagtat

SEQ ID NO: 21268 - DNA, 80 bp, synthetic construct
  source 1..80: mol_type = other DNA
ataaagaggtctgtgaaccatgtgatttcttccttacagaaatttgtctctttaacttgggtgactctgcccagaaaccc

SEQ ID NO: 21269 - DNA, 80 bp, synthetic construct
  source 1..80: mol_type = other DNA
taagatggtccctataattgaagtgaggattatccctgaccctaggatagtgcatattcaccattcacaacagaaaatca

SEQ ID NO: 21270 - DNA, 80 bp, synthetic construct
  source 1..80: mol_type = other DNA
gtctgaacttaggactttttagagtatgtttgcatatgcctttagaagggctctctctgtgcggtcgttaacaaaatcat

SEQ ID NO: 21271 - DNA, 80 bp, synthetic construct
  source 1..80: mol_type = other DNA
aagtagctgggacaatgggtgcataccgccatgcccagataatttttataattttttttgccagttgcagtggctcatgc

SEQ ID NO: 21272 - DNA, 80 bp, synthetic construct
  source 1..80: mol_type = other DNA
tactagaaaaggatggagttaagaattatcactgtatttctgtccaaagccttgtctttccaccatatcacactaccttc

SEQ ID NO: 21273 - DNA, 80 bp, synthetic construct
  source 1..80: mol_type = other DNA
attccttatatggagagatattagcacatattttacatttcaactgacttcatttgcaataggccatgcagtgactgaaa

SEQ ID NO: 21274 - DNA, 80 bp, synthetic construct
  source 1..80: mol_type = other DNA
tggagcagcagaatgtcttttccaaaagactatcaggagaactaacctctttgcaacctgttaggtggcctctgaataaa

SEQ ID NO: 21275 - DNA, 80 bp, synthetic construct
  source 1..80: mol_type = other DNA
agtttctgatcccaggacctgggaaccctatgattgggaaagacataaggttaaggtagaaggtattttctcttttctag

SEQ ID NO: 21276 - DNA, 80 bp, synthetic construct
  source 1..80: mol_type = other DNA
acagtataaccagtatttacaaagcatttattaaatacattaggtagtattggtaatctagagatgatttaatgtataca

SEQ ID NO: 21277 - DNA, 80 bp, synthetic construct
  source 1..80: mol_type = other DNA
ttaagaaacctgtaatgaggatggggcacatgtggtccagtactctataacagattcacattagctatactttctctgcc

SEQ ID NO: 21278 - DNA, 80 bp, synthetic construct
  source 1..80: mol_type = other DNA
aattgatggcaattgttctcaatactgagacttgctttagcaattgcaattgtttagctgataaaatcacatttgtgctt

SEQ ID NO: 21279 - DNA, 80 bp, synthetic construct
  source 1..80: mol_type = other DNA
tcaagagaaaaaagatgaaaatacagtacgagtgcattgcaaatttcatttcttgtgccttatgaggaaaaattaatttc

SEQ ID NO: 21280 - DNA, 80 bp, synthetic construct
  source 1..80: mol_type = other DNA
tatatgattccaacatgtaccccttcacaaactccttaggaattgctgtcattttgggggaccactttcctccaaagagt

SEQ ID NO: 21281 - DNA, 80 bp, synthetic construct
  source 1..80: mol_type = other DNA
ttttttaaggcaatagtaacttagcatgtcaacaaggaggcatttgtagcatgcaggggatggatgtacaggaatttctg

SEQ ID NO: 21282 - DNA, 80 bp, synthetic construct
  source 1..80: mol_type = other DNA
tcttgactttggtaccctaaatgatgatttcaggctaagccaagataatatcagaaggtcccattgagagaatgaaaatg

SEQ ID NO: 21283 - DNA, 80 bp, synthetic construct
  source 1..80: mol_type = other DNA
cactcaggggattttcttcttcctataaatcatttctaaacctcctttgctggtttctgctctttcctgcagtaaactca

SEQ ID NO: 21284 - DNA, 80 bp, synthetic construct
  source 1..80: mol_type = other DNA
agatagtttgatctatctgtcttccctaccagacagacagtgcttaggggcaggaattctattattatttttgtatcacc

SEQ ID NO: 21285 - DNA, 80 bp, synthetic construct
  source 1..80: mol_type = other DNA
gcctcttcctctatggaagctgtggagatgagtaacactgagcaaaataactttgaattctgcaaaataagtatgtaaac

SEQ ID NO: 21286 - DNA, 80 bp, synthetic construct
  source 1..80: mol_type = other DNA
cagcaagcagtatgcaacagagcaagaaacatgctgtgttctatgcaagtgcctccagaaatcacagctcttcaaaggga

SEQ ID NO: 21287 - DNA, 80 bp, synthetic construct
  source 1..80: mol_type = other DNA
tgagactgaagtcctagttaacactttgtttgccaccttgtaagattgtgaaacagaggcctgagctaagccatgcccag

SEQ ID NO: 21288 - DNA, 80 bp, synthetic construct
  source 1..80: mol_type = other DNA
cacttgcatttatgaaacaggagaaacaaaataaaattacatttatttattttaatttaatcttgaaagtaaattcatgt

SEQ ID NO: 21289 - DNA, 80 bp, synthetic construct
  source 1..80: mol_type = other DNA
ccaatgtcctaaagtgtttccccaatgttttcttcaagtagtttcatagtttcaggtcttacgtttaagtctttaattca

SEQ ID NO: 21290 - DNA, 80 bp, synthetic construct
  source 1..80: mol_type = other DNA
gtcacctaggctttgtgttttactagaggctagaggaaagaattggctttaatgcttattgaacttggaggcagaattca

SEQ ID NO: 21291 - DNA, 80 bp, synthetic construct
  source 1..80: mol_type = other DNA
ttcaatgttaaagtctaggcattaagacttagcaagcttgttgaaaatcagatctactctttctcaagtcattatttcaa

SEQ ID NO: 21292 - DNA, 80 bp, synthetic construct
  source 1..80: mol_type = other DNA
agcagattatttcattgagtcagaatacacagagcctagtgctaataattctgcttaacccaatatcagacaagaaatgg

SEQ ID NO: 21293 - DNA, 80 bp, synthetic construct
  source 1..80: mol_type = other DNA
cacacatatcattaggagaaatgggcagtgagtgtgaacagttacacatgatatatacattgctaaaaaccatatttgaa

SEQ ID NO: 21294 - DNA, 80 bp, synthetic construct
  source 1..80: mol_type = other DNA
ggaaaacatacaataaagctctggaaggatgcatgtaaaattcacatgagtggtctactgtatgtgggtttggcatgaaa

SEQ ID NO: 21295 - DNA, 80 bp, synthetic construct
  source 1..80: mol_type = other DNA
tttgatattggatgaatgcttgaaatatgaggatgaaaatatagagacataattttctgatcttgaagcaaagaactatc

SEQ ID NO: 21296 - DNA, 80 bp, synthetic construct
  source 1..80: mol_type = other DNA
ctagtaagagattaggagggaaaaggggaagagaccaatttccagttcagaagttgaagcaggatgtctcttttgggcat

SEQ ID NO: 21297 - DNA, 80 bp, synthetic construct
  source 1..80: mol_type = other DNA
tgattggaaagacccacaggggaacacctaatctgtgtctctgtctctgtaaggaatgaggactcacccaccttggacag

SEQ ID NO: 21298 - DNA, 80 bp, synthetic construct
  source 1..80: mol_type = other DNA
tgctctgtgtttttgtttttgaccctggcagtcaccaggcagactatgtctttttctcaagtatatcagagctcataatc

SEQ ID NO: 21299 - DNA, 80 bp, synthetic construct
  source 1..80: mol_type = other DNA
ctgtggataagaaaatatgctcataagagtccgtgacagaccaggaaaagaatgtagttatctaattgctaaaccaggac

SEQ ID NO: 21300 - DNA, 80 bp, synthetic construct
  source 1..80: mol_type = other DNA
tttaatgtatttgattgcattttgacttttgagcctcaccatcagctaaatcccttgtcagcctatgactccaatcctgc

SEQ ID NO: 21301 - DNA, 80 bp, synthetic construct
  source 1..80: mol_type = other DNA
aggttgccaaaccccaaactacatctctcctcgaggacatctctgtgaagtacttactacacgtggtataattgtgtatt

SEQ ID NO: 21302 - DNA, 80 bp, synthetic construct
  source 1..80: mol_type = other DNA
tagttagatcgacatatacccacaattaaaatatgttgtcaaagtgcttggaagagcaaaagctggggtggaacagcatg

SEQ ID NO: 21303 - DNA, 80 bp, synthetic construct
  source 1..80: mol_type = other DNA
ctgctgaaagagacaaaaaggtctatggcagggacaagctttggtgttgaaagagaacaagaagtctatggcaggaacta

SEQ ID NO: 21304 - DNA, 80 bp, synthetic construct
  source 1..80: mol_type = other DNA
agggaatgatggcactacattggccatacacaaactgtgtcctattgtcaaggtgactaagctcttcacatatagtaaga

SEQ ID NO: 21305 - DNA, 80 bp, synthetic construct
  source 1..80: mol_type = other DNA
acctattgagtattatgttgaatatttgggtgatggacacactagaagagctcaatccccatcattatgaaacataccca

SEQ ID NO: 21306 - DNA, 80 bp, synthetic construct
  source 1..80: mol_type = other DNA
gcagtaaaagtagtttagggttgttacaggaacttgggatgacacatcttatatttgttcagcctatgatgagacagata

SEQ ID NO: 21307 - DNA, 80 bp, synthetic construct
  source 1..80: mol_type = other DNA
actcaaaactactccattgtggttaactcattctgcctgttccccaggggccatttatatgagtcacaatttagttaatg

SEQ ID NO: 21308 - DNA, 80 bp, synthetic construct
  source 1..80: mol_type = other DNA
tagcttccaccataacgaatatcttttgtcatcccacaaaacacaccagcttgagcataatgaatctttttggtctcaga

SEQ ID NO: 21309 - DNA, 80 bp, synthetic construct
  source 1..80: mol_type = other DNA
ttagtcaatccgtactcaagagctgtgtccaacttctgtgatcaaaggaattaagaaccgaaaaaaggaaagagaacagt

SEQ ID NO: 21310 - DNA, 80 bp, synthetic construct
  source 1..80: mol_type = other DNA
tttcttacatgacctctgccatgaggtcatataatgactctgcatttctacaccaaagattgtaaagatattgcatgaca

SEQ ID NO: 21311 - DNA, 80 bp, synthetic construct
  source 1..80: mol_type = other DNA
actctaagctatgtttataatcagcatttggcattacatttaaccaataattactgcaagcagatatgacacatttcata

SEQ ID NO: 21312 - DNA, 80 bp, synthetic construct
  source 1..80: mol_type = other DNA
gactttgccaaatgtctcctacagggcaaaatgaatcctagttgagaaccactgctctaaacttacatgataaccagagt

SEQ ID NO: 21313 - DNA, 80 bp, synthetic construct
  source 1..80: mol_type = other DNA
cctattatattactactagacaggtctaaggcacgtctaatcccagggggagcaaaggacctttacaaaactttaggtca

SEQ ID NO: 21314 - DNA, 80 bp, synthetic construct
  source 1..80: mol_type = other DNA
tcagtctcacagggaaagcctcattttttattttcctgattctgcacttcagccttagaacaaactaagacaacctcact

SEQ ID NO: 21315 - DNA, 80 bp, synthetic construct
  source 1..80: mol_type = other DNA
gtcctttgcaattaggtggatgtccaatgtctctgaaaaggtgttaagtctcagcaccagatgctagttggaatcataag

SEQ ID NO: 21316 - DNA, 80 bp, synthetic construct
  source 1..80: mol_type = other DNA
cttactagctgtgtgaacttcatttcctcatccataaaataagattaacagtagtgtctaccagataggattatatgggg

SEQ ID NO: 21317 - DNA, 80 bp, synthetic construct
  source 1..80: mol_type = other DNA
tagagcactgaaaagctaaattgtaattatattaaggacattaagcatgtttttaacattgctttatttcaaaatttata

SEQ ID NO: 21318 - DNA, 80 bp, synthetic construct
  source 1..80: mol_type = other DNA
aaagaatgcctctcattatgttttctctagatacctcacaagcaccagataaaataaaatgccttcttacattatttccc

SEQ ID NO: 21319 - DNA, 80 bp, synthetic construct
  source 1..80: mol_type = other DNA
ttgatgatgtgctagataagactgatgtgtctgtacatgagaattatctggggagattttaaaacatattcctgagctac

SEQ ID NO: 21320 - DNA, 80 bp, synthetic construct
  source 1..80: mol_type = other DNA
ttagaataccattgtggagatgttacaaattcaactatttaaggcttgacccctacagattgttatttagcaaatcggag

SEQ ID NO: 21321 - DNA, 80 bp, synthetic construct
  source 1..80: mol_type = other DNA
ttggattttggtctctcatgagcaaaagagttctaattaagacatcacttgaatctgacacacaaagttgagaaccattg

SEQ ID NO: 21322 - DNA, 80 bp, synthetic construct
  source 1..80: mol_type = other DNA
ttagcaactacctggagaagtgactggatcctaaatctcctttgatctcgccctcctcagcctttttcattttgagccaa

SEQ ID NO: 21323 - DNA, 80 bp, synthetic construct
  source 1..80: mol_type = other DNA
ataaacctatagcccataaggccaccatggtcctaaaattaaagatcagtttctcctgtccaaaaaactaaatatgcata

SEQ ID NO: 21324 - DNA, 80 bp, synthetic construct
  source 1..80: mol_type = other DNA
cattagtctttgggaatgtggtaagcaaatagtacatgttctcttccaccagctcattgcttggctcatagaaaacactt

SEQ ID NO: 21325 - DNA, 80 bp, synthetic construct
  source 1..80: mol_type = other DNA
gaaagtgaggtgctaacagatccatgatgtataccctggtgtgaaaaatattgcttaaaagcacacttccagatgtgcaa

SEQ ID NO: 21326 - DNA, 80 bp, synthetic construct
  source 1..80: mol_type = other DNA
aatcaatactgcaaccctgagattagtcgactacaccattattccataccaaattaaaaactgcaaacttcaaccataaa

SEQ ID NO: 21327 - DNA, 80 bp, synthetic construct
  source 1..80: mol_type = other DNA
gttcactctctatgggaaatcagctataaatctcttgaagtttatagacaaatctagaatctctaaacctggatttgatg

SEQ ID NO: 21328 - DNA, 80 bp, synthetic construct
  source 1..80: mol_type = other DNA
atcatgggtgtcattttctgggccatttctaaggctacagaattctcccctcattcctcaaattccagctcatattggtc

SEQ ID NO: 21329 - DNA, 80 bp, synthetic construct
  source 1..80: mol_type = other DNA
agagcacataggttagttgcataattgttaggacatttagaatgtgtccttctattctacaccaccatttggtccaataa

SEQ ID NO: 21330 - DNA, 80 bp, synthetic construct
  source 1..80: mol_type = other DNA
acccagagtgcaaataaaccctatgttatggatgttcaggaatggaagaaataatttcagcacatattgtatgggacagc

SEQ ID NO: 21331 - DNA, 80 bp, synthetic construct
  source 1..80: mol_type = other DNA
agtcattggaagatttgagcagaaagatgaagtgatttgacttcctttactgtgttgaagtttgaaagggtgccaggctg

SEQ ID NO: 21332 - DNA, 80 bp, synthetic construct
  source 1..80: mol_type = other DNA
gataatgtactttcactctttgcaccccattttactacactccagagagtttcatgtgagcaagaaatggccgtttgaat

SEQ ID NO: 21333 - DNA, 80 bp, synthetic construct
  source 1..80: mol_type = other DNA
tcaggttacatagtaagtgatggagccacgttttacacccattttaggccatcaaaacaagattcttaactattgtgcta

SEQ ID NO: 21334 - DNA, 80 bp, synthetic construct
  source 1..80: mol_type = other DNA
tttgacccttctttatttttcatatcctgagaaacattggcacacaatggttacaagcttgggttctgagttcagactga

SEQ ID NO: 21335 - DNA, 80 bp, synthetic construct
  source 1..80: mol_type = other DNA
ctcaaacccaaatgattaaccccaaccttaatgctacccttatgctttccttccaaggaaagaacaactaagaggtggag

SEQ ID NO: 21336 - DNA, 80 bp, synthetic construct
  source 1..80: mol_type = other DNA
ctgtatggtagtactcaatatgagcttggctaagcaaagcagagatttctcttttacaacaattattgagcactgattat

SEQ ID NO: 21337 - DNA, 80 bp, synthetic construct
  source 1..80: mol_type = other DNA
cttcactgatgttagaactgccgtttttaattttgtcatcacggtggaagagatttcaacctcttagagccaaatgcctt

SEQ ID NO: 21338 - DNA, 80 bp, synthetic construct
  source 1..80: mol_type = other DNA
ggttgaaattttctggagtctcttatctttagctcaatgaacactcctcaaagcatgatgacattaaaagttgggttaat

SEQ ID NO: 21339 - DNA, 80 bp, synthetic construct
  source 1..80: mol_type = other DNA
tcactctctctccttatgacttctggataataccaatattagactaaaatgaccagtctgtccctctcctctagagagtt

SEQ ID NO: 21340 - DNA, 80 bp, synthetic construct
  source 1..80: mol_type = other DNA
ttctcccttagcctgtgttctcaaagacctcttcaactcacacctgacctaaaatctaaatgccttattttcttctgtac

SEQ ID NO: 21341 - DNA, 80 bp, synthetic construct
  source 1..80: mol_type = other DNA
ctgaagactgacactgcccgatcacctcaaaaggctcctggaccatcacagatgctttgggtaactctcacagtggaggg

SEQ ID NO: 21342 - DNA, 80 bp, synthetic construct
  source 1..80: mol_type = other DNA
tatactctcctatcctcaatacctccctccacaatccattattctgttctggatctcaaacatgctttctttactattcc

SEQ ID NO: 21343 - DNA, 80 bp, synthetic construct
  source 1..80: mol_type = other DNA
tccagcctcacaggcccattctattctgtcatcatttcataacctcttccatgtaggttacaagccactagtccgccttt

SEQ ID NO: 21344 - DNA, 80 bp, synthetic construct
  source 1..80: mol_type = other DNA
tgacctgcatgtacacatccagatagccagttcctgccttaactgatgacattccaccacaaaagaagtgaaaatgtccg

SEQ ID NO: 21345 - DNA, 80 bp, synthetic construct
  source 1..80: mol_type = other DNA
catttgaatagtcatattgtagctccaatccttgcttttcaatatctgaggcatgggcattttccctctgctttaaaaaa

SEQ ID NO: 21346 - DNA, 80 bp, synthetic construct
  source 1..80: mol_type = other DNA
gtgcagtggcgcaagctcaactcagtacaacatccgcctgctgggctcaagtgattctcccacctcaggctcttgccttt

SEQ ID NO: 21347 - DNA, 80 bp, synthetic construct
  source 1..80: mol_type = other DNA
agcctgacaaaccgtgcacctgcttaactgggctaagcgccaagaaaagaaaaaaagtcaggaaaattaatttccaagag

SEQ ID NO: 21348 - DNA, 80 bp, synthetic construct
  source 1..80: mol_type = other DNA
aatcattcttctttgaggagagaactaaagtcaatgtggataacagagcgatcatacaccttggtttgtgtctgatgtcc

SEQ ID NO: 21349 - DNA, 80 bp, synthetic construct
  source 1..80: mol_type = other DNA
tcatggcttcacggcatttacctacttttctaaacttccagagagtaactgacagttgccctgactttctggccttccaa

SEQ ID NO: 21350 - DNA, 80 bp, synthetic construct
  source 1..80: mol_type = other DNA
aagaaaagaagttcatttggctcacacttctgcagtctgtacagaagcatggtgctggcatctactcagcttctggtaag

SEQ ID NO: 21351 - DNA, 80 bp, synthetic construct
  source 1..80: mol_type = other DNA
tgtgtcccataacctgggaacactgatatgaggggtggggtcccaaggaattgggcagctctaccgttgtggttttgcag

SEQ ID NO: 21352 - DNA, 80 bp, synthetic construct
  source 1..80: mol_type = other DNA
ttttactgcttagatatttcttccagcagatacactacatcattactctcaggtccgtacttctacagatccctagggca

SEQ ID NO: 21353 - DNA, 80 bp, synthetic construct
  source 1..80: mol_type = other DNA
cttcttgaggtctgtggcatagccatctcctgacacaaagaatacacatttgattgctgaatgagtaaaattccataatg

SEQ ID NO: 21354 - DNA, 80 bp, synthetic construct
  source 1..80: mol_type = other DNA
cagcacttttccgggggatttgggcacagatccatttttgctgtctatcacagttgtggttgtagatgcatttcctaatc

SEQ ID NO: 21355 - DNA, 80 bp, synthetic construct
  source 1..80: mol_type = other DNA
tatagctttgagaatacatgcacgtatttgaaagttagtatcttttaaaaattgtgcatgccagtagttttgttacctta

SEQ ID NO: 21356 - DNA, 80 bp, synthetic construct
  source 1..80: mol_type = other DNA
gtagctgtagtttcttttagaatgtgtccaataataattgaaagattttagcctttgtgctctttgaagacagggtggaa

SEQ ID NO: 21357 - DNA, 80 bp, synthetic construct
  source 1..80: mol_type = other DNA
aacccttcaaacagctatgtacacaggatgcttgtagtataagtgcagtttataagataatttttaagtattggagaaag

SEQ ID NO: 21358 - DNA, 80 bp, synthetic construct
  source 1..80: mol_type = other DNA
ctgctttgtataccgaaactcaaggagtaattttactgagatttgatatgaatgagttgaatcctggtcacattgtaaaa

SEQ ID NO: 21359 - DNA, 80 bp, synthetic construct
  source 1..80: mol_type = other DNA
aagtagggatctcacttaatggccatgcgactctttcctatagagtaaaaggagggattgcttatataatggatctaaag

SEQ ID NO: 21360 - DNA, 80 bp, synthetic construct
  source 1..80: mol_type = other DNA
ggttccatttctagtcccaccactagaaaaagaaattcacttaatggaacagtggattgagtgaaattcacttaatggaa

SEQ ID NO: 21361 - DNA, 80 bp, synthetic construct
  source 1..80: mol_type = other DNA
aaatttatacttccaccaacagtgtataagtgttcccttttctttgcggcctcacatctgttattttttgactttttaat

SEQ ID NO: 21362 - DNA, 80 bp, synthetic construct
  source 1..80: mol_type = other DNA
ggtcgtaggtatggggccttatttttgtgccctatattctgttccattggtctatgtgactgtttttgtatgagtaccat

SEQ ID NO: 21363 - DNA, 80 bp, synthetic construct
  source 1..80: mol_type = other DNA
taatgagttggagaggagtgcctctgatgtggttaggctcaatgtccctacccaaatctcatcttaaattgtaatcccta

SEQ ID NO: 21364 - DNA, 80 bp, synthetic construct
  source 1..80: mol_type = other DNA
aaaacctcttgccttctaatgacattgttatagattaacttcctctttgttgtcctggtttgcttagaacagatgacaga

SEQ ID NO: 21365 - DNA, 80 bp, synthetic construct
  source 1..80: mol_type = other DNA
atctaactcctcttccaagatttacctcagatgtcaactccttgacaatatttccttaatcttttgacctgaactctact

SEQ ID NO: 21366 - DNA, 80 bp, synthetic construct
  source 1..80: mol_type = other DNA
agttacaggcaaaaccaataatcaatacatgtaccctatacattggttcagttcagaagagtgagacaactcgaaatggg

SEQ ID NO: 21367 - DNA, 80 bp, synthetic construct
  source 1..80: mol_type = other DNA
tgaaggcccctatctataaataccattacattaagggtaaggatttcaacatgaaagttttatcgggcagggctgaatgc

SEQ ID NO: 21368 - DNA, 80 bp, synthetic construct
  source 1..80: mol_type = other DNA
actttacctagccccagcattcctcctactaaattgtcccattgtcattgaattgcaaacccactgaaacagaaaagcct

SEQ ID NO: 21369 - DNA, 80 bp, synthetic construct
  source 1..80: mol_type = other DNA
gatgatctgtcactgtctccaatcgcccccaggtgggactgtccagttacagggaacacacttcagagtttctaccaatt

SEQ ID NO: 21370 - DNA, 80 bp, synthetic construct
  source 1..80: mol_type = other DNA
taaattggcactttctttagtgactccagaattaatgctattaccacaattgtgtagaaaacaaatccatagagtatttt

SEQ ID NO: 21371 - DNA, 80 bp, synthetic construct
  source 1..80: mol_type = other DNA
ctggccccttcacactgcttaacatttcagtttttactaagcaggagagcagtcattttattaagcattcccaagataaa

SEQ ID NO: 21372 - DNA, 80 bp, synthetic construct
  source 1..80: mol_type = other DNA
ccagtgaaactgaaaatcatcacacaagccagatttctggaggtatatatgactttctgagaaatattccatcatttcag

SEQ ID NO: 21373 - DNA, 80 bp, synthetic construct
  source 1..80: mol_type = other DNA
ttgtagaggaaattgattccttctcaaattccagatgtagctgaaaactgaaatcatccaagggatggcttctggtcata

SEQ ID NO: 21374 - DNA, 80 bp, synthetic construct
  source 1..80: mol_type = other DNA
gcttattaaatttatcaattaatcctgagaaattctaagttgtgaaaggatcaaaccccattctctagcaagaaggcctg

SEQ ID NO: 21375 - DNA, 80 bp, synthetic construct
  source 1..80: mol_type = other DNA
tcttttaaatcaaaagctacaatgattaagcttagtgaggaagccatgttcaaagctgagctaggccaaaagctaggcct

SEQ ID NO: 21376 - DNA, 80 bp, synthetic construct
  source 1..80: mol_type = other DNA
taccttgtctatgctctatcagtggaacaacagttttttaatctatcagtggaatgacaaatcctgcatgacagcacgtc

SEQ ID NO: 21377 - DNA, 80 bp, synthetic construct
  source 1..80: mol_type = other DNA
gtcagcagacatcaacatcaaggcaagacactttaccagcaaaaagattatgacttgctgaaggctttgatgtttgttag

SEQ ID NO: 21378 - DNA, 80 bp, synthetic construct
  source 1..80: mol_type = other DNA
tttcatattgcattttgtctattgtctatgcgttcctcccacagtggcagagttgagcaagagtgatatagaccatacag

SEQ ID NO: 21379 - DNA, 80 bp, synthetic construct
  source 1..80: mol_type = other DNA
agcttcagttctttcaggaagccatggatatatgcctccgagatgagataaatgtccttcctggatgtttccagaatacc

SEQ ID NO: 21380 - DNA, 80 bp, synthetic construct
  source 1..80: mol_type = other DNA
gcaggaagctttattatgggaaagggatggggacataatctgagggaacagaaatagtggtagctgttctcagtttttct

SEQ ID NO: 21381 - DNA, 80 bp, synthetic construct
  source 1..80: mol_type = other DNA
taatggagaatcaatggtgatctttgccatggctccagttactccacatgccccattggtgctaattggtaaaaggagtt

SEQ ID NO: 21382 - DNA, 80 bp, synthetic construct
  source 1..80: mol_type = other DNA
ataaaactaaaaaatgagtttgaagagcaaagaggggtaccccaactcagctgactccaggagttaccctatctcaatgt

SEQ ID NO: 21383 - DNA, 80 bp, synthetic construct
  source 1..80: mol_type = other DNA
gctgatttagtcttagtcttatctcagaggccacaggaaaaatgtcaacacttgatttttatctttctaatcaaacccaa

SEQ ID NO: 21384 - DNA, 80 bp, synthetic construct
  source 1..80: mol_type = other DNA
aaagcttaaagaatgaaagaagcctacattcatgacattgcaggtctattcacattgccggaggcaaagacacttgtagc

SEQ ID NO: 21385 - DNA, 80 bp, synthetic construct
  source 1..80: mol_type = other DNA
ttttaatttgagaggtaagctgtcatcattgtgactcttgtaacaaagtagccaggtggtatgttgccttctatcctcat

SEQ ID NO: 21386 - DNA, 80 bp, synthetic construct
  source 1..80: mol_type = other DNA
cctattaagcctcctattttgtttttgatggttagcatcactgagtaaaattttcaagtttaagtttcagtggcatgggc

SEQ ID NO: 21387 - DNA, 80 bp, synthetic construct
  source 1..80: mol_type = other DNA
actgaaagaatcttgagggttctcttcttacaaaacaatttgaaaacactgcaaagctttcagacacagtcacaagtggt

SEQ ID NO: 21388 - DNA, 80 bp, synthetic construct
  source 1..80: mol_type = other DNA
aagcccagcccagacttatactttcaaaatagcttttactatgaagaagtgccaataaggtgtcaactatactccaaaat

SEQ ID NO: 21389 - DNA, 80 bp, synthetic construct
  source 1..80: mol_type = other DNA
aaggaatgaatcactgagcaaaaatatgatcatttctgtattgtttatactcatgaaaaaaaaatggaagcaggctgggc

SEQ ID NO: 21390 - DNA, 80 bp, synthetic construct
  source 1..80: mol_type = other DNA
tctattcctagctccttctactgtatctagctaaaaaaggaggcactcggtatatgattgttcagtggatggatgatata

SEQ ID NO: 21391 - DNA, 80 bp, synthetic construct
  source 1..80: mol_type = other DNA
ttaagtttatttgagcaccaaagtgggactcctagagtctaaatacatctaggagagcagatcagatcctaaaaatgtgc

SEQ ID NO: 21392 - DNA, 80 bp, synthetic construct
  source 1..80: mol_type = other DNA
caagcacagaatcaaggctggcattccatctaattagtttggtggagatttttggatcagtcagaacctttgctttatct

SEQ ID NO: 21393 - DNA, 80 bp, synthetic construct
  source 1..80: mol_type = other DNA
aatcttaacaggagagatttaggagaggacatcttttaagtgcagtggctgttcacatgcctgatcatcatgtatcacag

SEQ ID NO: 21394 - DNA, 80 bp, synthetic construct
  source 1..80: mol_type = other DNA
taagcatggagacagcttgcagtgccttgtagagagaaatgtgttcagaagtgtcaaacctaatacaagacaccagatga

SEQ ID NO: 21395 - DNA, 80 bp, synthetic construct
  source 1..80: mol_type = other DNA
aggaaaatttaggggaattcctttaaggcaatggtctgggaaaacattttatggaaaagaccacaaaagcacaggaaaca

SEQ ID NO: 21396 - DNA, 80 bp, synthetic construct
  source 1..80: mol_type = other DNA
tttgaatattcccaacaaaaagaaatgataaatatttgatgtgatgaacatgctaattaccctgatttgatcattataca

SEQ ID NO: 21397 - DNA, 80 bp, synthetic construct
  source 1..80: mol_type = other DNA
ttgttttccttcctgaatattttcttttaatactcctcatcaaaggtatgtctacattctgccctttaaataacatccag

SEQ ID NO: 21398 - DNA, 80 bp, synthetic construct
  source 1..80: mol_type = other DNA
gaaagaataatcttgttcgtcaatgtatcattagttgtcacaatcatgagctctgtgaccttgataaaggaactcctttt

SEQ ID NO: 21399 - DNA, 80 bp, synthetic construct
  source 1..80: mol_type = other DNA
ccagataattcagggtcctctctcccgctcgaggttcttaataaaaccacatctgcaaattctcttttccaggtaaggta

SEQ ID NO: 21400 - DNA, 80 bp, synthetic construct
  source 1..80: mol_type = other DNA
tctctttcattatgggcctgcctccaggctgctttaattttttcacagcatagtttcaaaagcaggtatcccaaaccagc

SEQ ID NO: 21401 - DNA, 80 bp, synthetic construct
  source 1..80: mol_type = other DNA
acactgaggcagagttaggctttccacctcagtaaaacctccttccgttaaattgaatattgaataatttctgagagctt

SEQ ID NO: 21402 - DNA, 80 bp, synthetic construct
  source 1..80: mol_type = other DNA
aaaaacaggacgtttctaggagacacccacaaggtcaccctttctccacattttccaattagatttaaacaatccagttt

SEQ ID NO: 21403 - DNA, 80 bp, synthetic construct
  source 1..80: mol_type = other DNA
tgagaatctttttaaatgaaagttatagtgcatatgcctggctctctggcctccccttccaactccttaacctcttctgc

SEQ ID NO: 21404 - DNA, 80 bp, synthetic construct
  source 1..80: mol_type = other DNA
agtaaaagaaatgtaatccaccttgaggtttgctatttagcttgtgtaaaactctatcgggcaattttgcaaagcactct

SEQ ID NO: 21405 - DNA, 80 bp, synthetic construct
  source 1..80: mol_type = other DNA
attcttcaaatgttaacataagttctcctcctttatgtcagtccctgaccaaccaaatccatccattctcctagcttctt

SEQ ID NO: 21406 - DNA, 80 bp, synthetic construct
  source 1..80: mol_type = other DNA
tagaggttcaaataatgggagaacactcagatgggatgacagggaactaggaaacataataactgttaaaaacgaatcag

SEQ ID NO: 21407 - DNA, 80 bp, synthetic construct
  source 1..80: mol_type = other DNA
aaatatagttagaaagaataatatctagcatttgatagcacaatagtgactacagtcaacagtaattcattgtacattta

SEQ ID NO: 21408 - DNA, 80 bp, synthetic construct
  source 1..80: mol_type = other DNA
tgcagtgagccaagactgtgccagtgcatgccgaactagacactggctcaaaagaaaaaaaaacaacaacaaaaaagtca

SEQ ID NO: 21409 - DNA, 80 bp, synthetic construct
  source 1..80: mol_type = other DNA
ttgatagagcacaggcaaagtaaatttattgtaattctttagagccctggaattgtcataatggtaaaccagcattggct

SEQ ID NO: 21410 - DNA, 80 bp, synthetic construct
  source 1..80: mol_type = other DNA
aacaatggtcacagatcaccgaaacagacataccaataacgaaaacatttgaaatactgtgagaattaccaaaatgtgac

SEQ ID NO: 21411 - DNA, 80 bp, synthetic construct
  source 1..80: mol_type = other DNA
agtttgaaatactaagagtttttccttcttttgtttttctcaacacttcagtaacctgtgtcagggaggggagaatgatg

SEQ ID NO: 21412 - DNA, 80 bp, synthetic construct
  source 1..80: mol_type = other DNA
ggcaggtgggaactggagacagcaaaaacttaaccttgacaaatcttcctagaactttaagtaaaatggagcctgaactc

SEQ ID NO: 21413 - DNA, 80 bp, synthetic construct
  source 1..80: mol_type = other DNA
ccaagagtggttgagtagtggagatagtgcctgaaccccaatttctgacttaagtaaaactccatgcacttactactcta

SEQ ID NO: 21414 - DNA, 80 bp, synthetic construct
  source 1..80: mol_type = other DNA
caatcctaccccacccacaccccaactactttcttcttgggcatattatttagaagcaaatttcaaatatcacatcacct

SEQ ID NO: 21415 - DNA, 80 bp, synthetic construct
  source 1..80: mol_type = other DNA
aggtttgattgttacagaagcagtgaaacgtgattcggctaatggtaaggaaagaattccacacatagtgcaataattct

SEQ ID NO: 21416 - DNA, 80 bp, synthetic construct
  source 1..80: mol_type = other DNA
ctctcctaatttcccatgaccatgagacagtcatataatctgtatgagccttgtcttcccaaaacttgagatgagaacag

SEQ ID NO: 21417 - DNA, 80 bp, synthetic construct
  source 1..80: mol_type = other DNA
ttgatgttcagataacatagatcctatgaactgttaaggcccggaagtggaaaatgaccatcacccaagaattagatggt

SEQ ID NO: 21418 - DNA, 80 bp, synthetic construct
  source 1..80: mol_type = other DNA
cacacacacacacaaacaagatttaaaggggctgggtttaaatgttggtaatgctggtcttgagcaagtcacataacatt

SEQ ID NO: 21419 - DNA, 80 bp, synthetic construct
  source 1..80: mol_type = other DNA
actagtggggcctttggtatagcagagaacagtttccacatgcaaaatttaagagaaatctctttttgctcccccaatat

SEQ ID NO: 21420 - DNA, 80 bp, synthetic construct
  source 1..80: mol_type = other DNA
ttctgaaaagtgattactgattcttcctagtgcaaaatgcgtggctgcctctttcataagccaaagtacttgctacacag

SEQ ID NO: 21421 - DNA, 80 bp, synthetic construct
  source 1..80: mol_type = other DNA
acatcctcccctcaacaactgctagagttttatctttcccaacaaatataccagaaactatgtgtgctgttgcaaatggg

SEQ ID NO: 21422 - DNA, 80 bp, synthetic construct
  source 1..80: mol_type = other DNA
ttttgaaaatccatcaaagttctatcagatgcagatctgtgtgtttattcacctgcagggactccggagctcatttgctc

SEQ ID NO: 21423 - DNA, 80 bp, synthetic construct
  source 1..80: mol_type = other DNA
tttgttcacgttttccttttctaaaacggaaccaggaaactagactgtattgggttttaagctttcctttggacaaagct

SEQ ID NO: 21424 - DNA, 80 bp, synthetic construct
  source 1..80: mol_type = other DNA
tcacaatagtaccagcattcaagcaaacaccaaataaataagaggtagtgggggaagaagagacaagagctttcccaaag

SEQ ID NO: 21425 - DNA, 80 bp, synthetic construct
  source 1..80: mol_type = other DNA
gttctgtgccaacaatatgcaagttaacactgattgaccatcattccttagctgtgttcatgatgagtctcattgtagtc

SEQ ID NO: 21426 - DNA, 80 bp, synthetic construct
  source 1..80: mol_type = other DNA
tagtcccaaggtcatgaatcagttctttgttcctacctttcttctgctgcttcagctgcttctgctttttcttcttcaag

SEQ ID NO: 21427 - DNA, 80 bp, synthetic construct
  source 1..80: mol_type = other DNA
actatgcgaacatatacatatacaaaacaccaagtgaaaatacgccactatccagttatcatttcagtccagtggtaccg

SEQ ID NO: 21428 - DNA, 80 bp, synthetic construct
  source 1..80: mol_type = other DNA
ggaaagattttcttgctgaggaataggaagagatgctctcctcttctgtggggacatcattgtgtctgcctgtcatatct

SEQ ID NO: 21429 - DNA, 80 bp, synthetic construct
  source 1..80: mol_type = other DNA
aacattacctgaggctatttataaagtgacttaaaacttctgcctcgacaccactggtgaggcactaattaatgtaagat

SEQ ID NO: 21430 - DNA, 80 bp, synthetic construct
  source 1..80: mol_type = other DNA
ggaatcagctaggagcacactatttcaatgttaaggcaaaataaaccagtcccatgggttcacagtccctgacataatgg

SEQ ID NO: 21431 - DNA, 80 bp, synthetic construct
  source 1..80: mol_type = other DNA
gaatgccttagctcaacggctctactttcttgggccctcagaatttgatgtcttagttttaaaaagtaagttatggttga

SEQ ID NO: 21432 - DNA, 80 bp, synthetic construct
  source 1..80: mol_type = other DNA
tgattgtatctagcttgttctttctgcagactaaccttccacatctggatgtccttctcttgtaacttcaactgatcttt

SEQ ID NO: 21433 - DNA, 80 bp, synthetic construct
  source 1..80: mol_type = other DNA
agcagagggagggtggcagaaatgccttttacagatggttcaatcaagcccccttcccatgtgttgttagcttaacaaac

SEQ ID NO: 21434 - DNA, 80 bp, synthetic construct
  source 1..80: mol_type = other DNA
tagtcaaacacactgagagccgttttcaaccctgtctgttgaaatatacagggagtacactctgttgtaaagctatgtca

SEQ ID NO: 21435 - DNA, 80 bp, synthetic construct
  source 1..80: mol_type = other DNA
cagctgcctcaaggtgggagtgtgaagaatgattcttgttcctctcttacactttctgtacttcacaataaaatggacca

SEQ ID NO: 21436 - DNA, 80 bp, synthetic construct
  source 1..80: mol_type = other DNA
ataggtcccagactaaaccacccatcttgttacctcaagagaagaaaaatccagcaagcctgtgagcaatggcacaaaat

SEQ ID NO: 21437 - DNA, 80 bp, synthetic construct
  source 1..80: mol_type = other DNA
tctgtcattcagaagatggtgttgtctgtgtagacatggtcttgcagaatccattctctcttcctgaaaagataagtatc

SEQ ID NO: 21438 - DNA, 80 bp, synthetic construct
  source 1..80: mol_type = other DNA
aaaaataaatttagtgagaagaatggaacatttttgccatctctttaatatatggcttcatgaaagacagctggattctc

SEQ ID NO: 21439 - DNA, 80 bp, synthetic construct
  source 1..80: mol_type = other DNA
cactgcgcccagcctgctttgtactttgaatgtactttttacctatgcatgattctgcaacgtatcatacattggacact

SEQ ID NO: 21440 - DNA, 80 bp, synthetic construct
  source 1..80: mol_type = other DNA
aaaaaaaaaaaaaaaatcaagagagtaggtttgacctgctgggttccccacaagagttctgccaaagcagagttttggaa

SEQ ID NO: 21441 - DNA, 80 bp, synthetic construct
  source 1..80: mol_type = other DNA
agtagcctgggaagttaataaagtacatcagcagtggcaaaggaatgctaagtcatccacgaggtttatatccatggcca

SEQ ID NO: 21442 - DNA, 80 bp, synthetic construct
  source 1..80: mol_type = other DNA
tatgaggtagagtctggaagtcaaatacttaaacccattttctttcttaagtgttggagacacgtcaccaactctgttgg

SEQ ID NO: 21443 - DNA, 80 bp, synthetic construct
  source 1..80: mol_type = other DNA
actaggtgtagcctcaaaatggaaaaatgaaacataagctatgcagcagagcagcaggcagggaaaaatgtcctttggaa

SEQ ID NO: 21444 - DNA, 80 bp, synthetic construct
  source 1..80: mol_type = other DNA
ataaccctttggttgaactttgggttatttcttctttccattacaagctgtgctgtgctgaacactgttgtatgtcttga

SEQ ID NO: 21445 - DNA, 80 bp, synthetic construct
  source 1..80: mol_type = other DNA
aagtgggggaagagacacaaaggaacttttgggatgatggaagtgttctttattatgattgggatttttgtcaaaactta

SEQ ID NO: 21446 - DNA, 80 bp, synthetic construct
  source 1..80: mol_type = other DNA
catcagagatttgcattttttttccaagtttacagaaaacagcacagcaacactaagggcactccataggtttaccttaa

SEQ ID NO: 21447 - DNA, 80 bp, synthetic construct
  source 1..80: mol_type = other DNA
tataacttttactaatgaaatgcaaagaatccaccaggattattcctcatcttccagaagagctcccttctggagcactc

SEQ ID NO: 21448 - DNA, 80 bp, synthetic construct
  source 1..80: mol_type = other DNA
ggacttcctgaactgatcattctaaatctctgttctgctcatattaccaagctctatcctttggttctgctttctattta

SEQ ID NO: 21449 - DNA, 80 bp, synthetic construct
  source 1..80: mol_type = other DNA
cccaagcaacagctcttttctcaccagaaacctggattattctctatagagaataaaacaaggagtacctggataaagta

SEQ ID NO: 21450 - DNA, 80 bp, synthetic construct
  source 1..80: mol_type = other DNA
gtatttgtgtatctagacatatctgaacctaggaaaggtacggtaaagatgtggtggtataatctcgcagaaccactatc

SEQ ID NO: 21451 - DNA, 80 bp, synthetic construct
  source 1..80: mol_type = other DNA
ccaggctttgcctcctagtcaactagcttttcaaaacaaagcaatacctacagtaaaactacaaagaaaagcaagagaat

SEQ ID NO: 21452 - DNA, 80 bp, synthetic construct
  source 1..80: mol_type = other DNA
tgagtgcttccaagtggactgattctgtaagtagaacatctatattcccaaatatacctcaacagggattacctcctaga

SEQ ID NO: 21453 - DNA, 80 bp, synthetic construct
  source 1..80: mol_type = other DNA
tatctatgtatattcccacctcactccaaagacaggaagagtggttttctaaaatgcaaacaaatccgaacacaccagac

SEQ ID NO: 21454 - DNA, 80 bp, synthetic construct
  source 1..80: mol_type = other DNA
cactgggataacccaaagattccaaatttcacatgcttacagcttctgatccctttgatagagctctgctacctgccgat

SEQ ID NO: 21455 - DNA, 80 bp, synthetic construct
  source 1..80: mol_type = other DNA
ccttaggatgccctattgatagcagttggatgaaaacaaaaggagctgcttttcaacaaaacacaggagcactgctctgt

SEQ ID NO: 21456 - DNA, 80 bp, synthetic construct
  source 1..80: mol_type = other DNA
tcctattttttctgaattaaatgcatgtttttataataccctgccaatgtgactccttgggacccacctctagggataat

SEQ ID NO: 21457 - DNA, 80 bp, synthetic construct
  source 1..80: mol_type = other DNA
aaggtcaaattcaagattttaaaaaccacgttagcaaacaaaacactgctgcatttggcctgacaaaaggcagccagttt

SEQ ID NO: 21458 - DNA, 80 bp, synthetic construct
  source 1..80: mol_type = other DNA
ttctattcaaagtatgggttgaaagatgggtacctatgggccaaatcatcactatacaattatagtactggaaatgtaag

SEQ ID NO: 21459 - DNA, 80 bp, synthetic construct
  source 1..80: mol_type = other DNA
gtgctgggattacaggcgtgagccgccacacctggccctttattgcttttttaattacaaaaaataatccatatctactg

SEQ ID NO: 21460 - DNA, 80 bp, synthetic construct
  source 1..80: mol_type = other DNA
atttggagggtgggagagtcagggaggaaagaatttgaaactggattcatggggttcactgcatgattcttacttcatgt

SEQ ID NO: 21461 - DNA, 80 bp, synthetic construct
  source 1..80: mol_type = other DNA
tctagcataaactggggatcatttctctgttttagcatatacctctcatctgagacatctaattgcacacccaaatacca

SEQ ID NO: 21462 - DNA, 80 bp, synthetic construct
  source 1..80: mol_type = other DNA
cttctgcaagaatgccaaatttaaattagccatgaccccaaaaactgccaggtattaacttgctatcatctatattctta

SEQ ID NO: 21463 - DNA, 80 bp, synthetic construct
  source 1..80: mol_type = other DNA
ctaaaacacattagaaacacgttttggcaacaagtttttctctctggttccaaaatcctactgtcggccgcgttggtggt

SEQ ID NO: 21464 - DNA, 80 bp, synthetic construct
  source 1..80: mol_type = other DNA
aatattatctttagtggccacatacagtgcacagtacagtgctgtagatgatgctagtcatattcagagggcatgacctt

SEQ ID NO: 21465 - DNA, 80 bp, synthetic construct
  source 1..80: mol_type = other DNA
ttgtttgtttttaattgagacagagtctcgctccatcactcaggctgcagtgcaatggcacaatcttggcccactgcaac

SEQ ID NO: 21466 - DNA, 80 bp, synthetic construct
  source 1..80: mol_type = other DNA
aaattacagttcagtgatcagttaagtcactaagaggaaattccatccgtggaaatgccggcgcctcaacatttatgaag

SEQ ID NO: 21467 - DNA, 80 bp, synthetic construct
  source 1..80: mol_type = other DNA
acactcataatcattggaagcacgtgcctctccccgtctacatttctgaacagctggttgctggaaaattctttatattg

SEQ ID NO: 21468 - DNA, 80 bp, synthetic construct
  source 1..80: mol_type = other DNA
taccacaacccaattaaataagcttgattgattactgaacatgcctccttcactaggagttatatccagggagagaccgc

SEQ ID NO: 21469 - DNA, 80 bp, synthetic construct
  source 1..80: mol_type = other DNA
cttgaaccaagttcttaaatgtacgaccatggccaaagtcaaactagtggactgaggaactctctaacaattaaaatcgc

SEQ ID NO: 21470 - DNA, 80 bp, synthetic construct
  source 1..80: mol_type = other DNA
tactgcactaaaaatgataatggtactaaattggtagcaattttatgttggtatgtcaaaggctacctactattctactc

SEQ ID NO: 21471 - DNA, 80 bp, synthetic construct
  source 1..80: mol_type = other DNA
caattttttatccataaaaattcaaggacaattcagacacaggtccaggcatggatagactattttattatcaggtacag

SEQ ID NO: 21472 - DNA, 80 bp, synthetic construct
  source 1..80: mol_type = other DNA
ggtggggccttctaggtaattctgacgtccactaaaggttcagaaccactggtctaggaaaaagaaggatgaaggtaaaa

SEQ ID NO: 21473 - DNA, 80 bp, synthetic construct
  source 1..80: mol_type = other DNA
aggcaacttactctaagcctgcttcctcttcctatcctgcctcttaaggctgtaagaagttaatggggtatcagacatgt

SEQ ID NO: 21474 - DNA, 80 bp, synthetic construct
  source 1..80: mol_type = other DNA
caagcaaacagccacagattttaacgctattaagtacacttttctttcacgccttcagctacttaaatgacaaaaccaat

SEQ ID NO: 21475 - DNA, 80 bp, synthetic construct
  source 1..80: mol_type = other DNA
agtaagactgttaagtttcatctcacgaatgaaaccaggcatgcacagaaggcatcatattacaccacaacagtagcagt

SEQ ID NO: 21476 - DNA, 80 bp, synthetic construct
  source 1..80: mol_type = other DNA
aggccagctttgatcaaataacagataaatttaagagtcatatctttggagtcagtcagatcccagcagttccagtcctg

SEQ ID NO: 21477 - DNA, 80 bp, synthetic construct
  source 1..80: mol_type = other DNA
ttcccctcccgccaagcgtctctaccctgccctccgcacctagcgtgaacctgtcaccccaccaagtgagggactgacga

SEQ ID NO: 21478 - DNA, 80 bp, synthetic construct
  source 1..80: mol_type = other DNA
ggagacagcttgaaaatcagaacgccttattccgtttcctgctgaaacaaggctttaagtcctccaagcctcagtttctt

SEQ ID NO: 21479 - DNA, 80 bp, synthetic construct
  source 1..80: mol_type = other DNA
ccttgagcagtgaacaacctttataaccatacgtctagagccacgaaggcttaggagggaggtgaaaattgaactgatga

SEQ ID NO: 21480 - DNA, 80 bp, synthetic construct
  source 1..80: mol_type = other DNA
accggaagtgcgggtcgcgcttccggcggcgtcccggggccaggggggtgcgcctttctccgcgtcggggcggcccggag

SEQ ID NO: 21481 - DNA, 80 bp, synthetic construct
  source 1..80: mol_type = other DNA
atcttggtgacctggttcaggcacacttgagttactattcagatgttgatgaaagaaagcccatcttatagatgaggcct

SEQ ID NO: 21482 - DNA, 80 bp, synthetic construct
  source 1..80: mol_type = other DNA
cagttgtgaaaaaaaattgcacattctcaactcctcgggatggagcagtaaagcccctcagtaaatcttttttttttttt

SEQ ID NO: 21483 - DNA, 80 bp, synthetic construct
  source 1..80: mol_type = other DNA
agtttgcactgttttaggggaatttagctttcatcgtagtgatggggaagctactggaaatgccccgaatacaaccttga

SEQ ID NO: 21484 - DNA, 80 bp, synthetic construct
  source 1..80: mol_type = other DNA
ggtattgggcgacctcacggacatagaaatatttattttgggcaaacattgccagactttcctgatgacttgtggacagg

SEQ ID NO: 21485 - DNA, 80 bp, synthetic construct
  source 1..80: mol_type = other DNA
ctacaggcatgcagcaccacgcctggctaagttttgtattttttgtcgtgacagggtctcactgtgttgcccaggctagt

SEQ ID NO: 21486 - DNA, 80 bp, synthetic construct
  source 1..80: mol_type = other DNA
ctcgcctgtaaacagatggtcactgcaccttcctcttatgggatgttctggggatcatatgaggcagttctcgcagagtg

SEQ ID NO: 21487 - DNA, 80 bp, synthetic construct
  source 1..80: mol_type = other DNA
tctttaaggtcatcaaggattacccttccaacgaagaccttcacgaaaggctggaggttttcaaggccctcacagacaat

SEQ ID NO: 21488 - DNA, 80 bp, synthetic construct
  source 1..80: mol_type = other DNA
ttacctcgacgagtacatcgcaaggatggttcagtaagaaaagaattgagatcctgttctgataatggtcctaagttcag

SEQ ID NO: 21489 - DNA, 80 bp, synthetic construct
  source 1..80: mol_type = other DNA
gggcgcctccatgtggagatgtagctcagggtggatgacagcatcaatgacccacagtgacagggacgtcaggtgcttcc

SEQ ID NO: 21490 - DNA, 80 bp, synthetic construct
  source 1..80: mol_type = other DNA
agttcaacagaatatccacacccagctcagtgcctgccccatgctcggacgtcctccagcggtgctccccaactacttag

SEQ ID NO: 21491 - DNA, 80 bp, synthetic construct
  source 1..80: mol_type = other DNA
tactgaggtcttagcgtggtcactgactcccccacctccctgagtagtttttgctgtggctttccttcttggctgtgatt

SEQ ID NO: 21492 - DNA, 80 bp, synthetic construct
  source 1..80: mol_type = other DNA
cttttttttttttttgagaaggagttctgctctttctgcttggctgactgcaatctccgcctcccggattcaagtgattc

SEQ ID NO: 21493 - DNA, 80 bp, synthetic construct
  source 1..80: mol_type = other DNA
ttctggagttggcagtggaggggtgaacgctgcctcgggggtagccgttctcttgctgttggcggctctgttttgtcaag

SEQ ID NO: 21494 - DNA, 80 bp, synthetic construct
  source 1..80: mol_type = other DNA
cttccaccggagacaggtctgatttttccagacgtggtgcatcgtttaggccccagacaggaatatgcagtaggtgagcc

SEQ ID NO: 21495 - DNA, 80 bp, synthetic construct
  source 1..80: mol_type = other DNA
ggagctgtgtgaccagaacgagttccacgggtctcaggagagatactttgaactggtggagagatgtgcggaccagaggc

SEQ ID NO: 21496 - DNA, 80 bp, synthetic construct
  source 1..80: mol_type = other DNA
gggctatttctccgtgggcgggctgtctctgttgtgcacgtgctcccgcagagccgggctctgcctgggacttcggtcct

SEQ ID NO: 21497 - DNA, 80 bp, synthetic construct
  source 1..80: mol_type = other DNA
ttttacctgcttctgtgaaaactcacgctgtcctcagcacagcacgcacacacacgcatattcacgcatgcacaggcaca

SEQ ID NO: 21498 - DNA, 80 bp, synthetic construct
  source 1..80: mol_type = other DNA
attttggtttctgcacagtcactcgggtataaagggcatctttgcttttgagcaataaagatgaaggccgggcacagtgg

SEQ ID NO: 21499 - DNA, 80 bp, synthetic construct
  source 1..80: mol_type = other DNA
gtccgtttaatatttgcagctgttttgttgagatttaatttacatatcatgcaatttacccattcacagtgaacagttca

SEQ ID NO: 21500 - DNA, 80 bp, synthetic construct
  source 1..80: mol_type = other DNA
cttggctcactgcaaccttcgcctcttgggttcaggcgattctcctacctcagcctcctgagcatctcgtattacaggca

SEQ ID NO: 21501 - DNA, 80 bp, synthetic construct
  source 1..80: mol_type = other DNA
tgggagaactgagaacctttctgcttctgcagagggaaggaaagaggttctgttgcccttacttggaactccagccctgg

SEQ ID NO: 21502 - DNA, 80 bp, synthetic construct
  source 1..80: mol_type = other DNA
gaagccttgctgatagcagacagtctattaatgtacagctcgtgtgttttatgtattctgtgtttttacagtgaagtaag

SEQ ID NO: 21503 - DNA, 80 bp, synthetic construct
  source 1..80: mol_type = other DNA
gctgggatttacaggcatgcaccaccacacctggctaatttttttttttttttgagacagtcttgctctgtcgcccaggc

SEQ ID NO: 21504 - DNA, 80 bp, synthetic construct
  source 1..80: mol_type = other DNA
ctgcgttttcacctcctgcgccgtggtgagctgcgtcctctctctgcagaccaagctgtacaccctgcctgcaagccacg

SEQ ID NO: 21505 - DNA, 80 bp, synthetic construct
  source 1..80: mol_type = other DNA
gctgggcctccggtgtcaccaggacagagcctgtgtctgtgttgggatgtgggtgtgtgcacatcagcaggtggcctttt

SEQ ID NO: 21506 - DNA, 80 bp, synthetic construct
  source 1..80: mol_type = other DNA
agtccctgcgctataaagtgctcatctttacttccccttgcagtgtggaccagctgtgctctgctctctgctccatggta

SEQ ID NO: 21507 - DNA, 80 bp, synthetic construct
  source 1..80: mol_type = other DNA
gcccccgtcccagtcgcattcttccacacctctctttgacatggccctccgggacgaggagctggtgtcctagagattct

SEQ ID NO: 21508 - DNA, 80 bp, synthetic construct
  source 1..80: mol_type = other DNA
cccactgctggagttcctgtccagtgagtccccgccctgcctgcgcatgcacccgagaggttcgggctgtgtaacctgtg

SEQ ID NO: 21509 - DNA, 80 bp, synthetic construct
  source 1..80: mol_type = other DNA
gtgcctgtagtcccagctactcaggaggctaaggcaggaggcaggagaatctcatgaacccaggaggtggagcttctagt

SEQ ID NO: 21510 - DNA, 80 bp, synthetic construct
  source 1..80: mol_type = other DNA
ccagcccccttctcatctcaggtttaatcagtacatcgtgtgtctggcccatcacgtcatagccatgtggttcatcaggt

SEQ ID NO: 21511 - DNA, 80 bp, synthetic construct
  source 1..80: mol_type = other DNA
gccagcctctgtgttcttgtttgcatttcatttgaacggctttctcctcctgtcccccaccttcctgcccgagctatttt

SEQ ID NO: 21512 - DNA, 80 bp, synthetic construct
  source 1..80: mol_type = other DNA
ttttcgtattctctagaatggacgtttttcttcgggctttcttctcaacaaggtttattttttgttgtagctgaaaggga

SEQ ID NO: 21513 - DNA, 80 bp, synthetic construct
  source 1..80: mol_type = other DNA
cgtttcgccaggaggccgtaacctagtgctcccgtgggcttcggtgagggggatgtcggtctctagcctcctgagtctgc

SEQ ID NO: 21514 - DNA, 80 bp, synthetic construct
  source 1..80: mol_type = other DNA
gcccttctctgctccagcgagccgtggtctgactgcaggacaggttctgggtccctccctgtggccctgggttcactgag

SEQ ID NO: 21515 - DNA, 80 bp, synthetic construct
  source 1..80: mol_type = other DNA
ggggcaggggcctgtggcgaaccaagtgacttccatggcagagagttgccctccccgcctggaggctgcaagtccgagac

SEQ ID NO: 21516 - DNA, 80 bp, synthetic construct
  source 1..80: mol_type = other DNA
caggccaaaggtgctgccgcctccgcagggaacaccagctggctgatgagcctggagaacccgctcagccctttctcctc

SEQ ID NO: 21517 - DNA, 80 bp, synthetic construct
  source 1..80: mol_type = other DNA
ggtggcctgagtctccatggtgacatcagctgagctgcagactctgatgggtggcagctgtttagggggaagcccacccc

SEQ ID NO: 21518 - DNA, 80 bp, synthetic construct
  source 1..80: mol_type = other DNA
atgcaggagaggcctgtgtcggggtcacgtgcaggccttcccagcgtcctccctgcccgctcggtggatggcagcagtaa

SEQ ID NO: 21519 - DNA, 80 bp, synthetic construct
  source 1..80: mol_type = other DNA
gcagagaaagtgccaggcatcaaccccaggtgggcctcttgcttccgggcggggctcctgacacctctcctgcgggaacc

SEQ ID NO: 21520 - DNA, 80 bp, synthetic construct
  source 1..80: mol_type = other DNA
gccccacagagctcaacactgccgggtcccctacagcatgaagtgctcattgagctctgtgccaggtgctgctctgagtg

SEQ ID NO: 21521 - DNA, 80 bp, synthetic construct
  source 1..80: mol_type = other DNA
gtgtggtgaggacggccagttcacctactgctggcacgatgacatcatgcaaggtacggcctggcgcctacccgctcctg

SEQ ID NO: 21522 - DNA, 80 bp, synthetic construct
  source 1..80: mol_type = other DNA
gtgccgagatggggtgcacggctcacttcatggctgggcagacggattcggacgtgtggctgcagacaccctgggggccc

SEQ ID NO: 21523 - DNA, 80 bp, synthetic construct
  source 1..80: mol_type = other DNA
ggtgcaccctccgtcccatagcaaagcccctgcacagactccagccgagcccacacctggctatgaggtgggccagcgga

SEQ ID NO: 21524 - DNA, 80 bp, synthetic construct
  source 1..80: mol_type = other DNA
tgggcgcaggcccctcagccctagtgaaaatagtgacatacaaaaatatacacattttaacaccatataaattactgaca

SEQ ID NO: 21525 - DNA, 80 bp, synthetic construct
  source 1..80: mol_type = other DNA
ttttgaggtgcagatagcttgctttattttgttgttactatctcaaggaggtccaacaattataactaacaattgaattt

SEQ ID NO: 21526 - DNA, 80 bp, synthetic construct
  source 1..80: mol_type = other DNA
agagtataagggcacaggccctcttaaatggatcgaatatgtatattcacagtggcagagtcagatccaaattcattccc

SEQ ID NO: 21527 - DNA, 80 bp, synthetic construct
  source 1..80: mol_type = other DNA
ttggctgtccctctttcacatggaatttaataaggcttcttagagttttctgtgcttgaaagagaggcaaaaaaacgatc

SEQ ID NO: 21528 - DNA, 80 bp, synthetic construct
  source 1..80: mol_type = other DNA
ttcagtacccatttcacatcagtggcaccagcaatgttggcttttaaaaccagtctttgaccttcgtttatgctcatctg

SEQ ID NO: 21529 - DNA, 80 bp, synthetic construct
  source 1..80: mol_type = other DNA
tagcaactgtgaaggtttaggcaagtagtgccattttgtatattcactgactttattcttaaatattcctgggagcaggg

SEQ ID NO: 21530 - DNA, 80 bp, synthetic construct
  source 1..80: mol_type = other DNA
ttttgcaatctctttagaagcttctgctttcaggaactgagtaatctttggtggggcagagactgggaggtgctgaactt

SEQ ID NO: 21531 - DNA, 80 bp, synthetic construct
  source 1..80: mol_type = other DNA
aagcttccatctcagatgttttcttaaatgatgaaacagcatacgcctctgttcttgtcagctcagggaaaacagatctg

SEQ ID NO: 21532 - DNA, 80 bp, synthetic construct
  source 1..80: mol_type = other DNA
acttgtactagcttcagccttcgttgggatgtgataggttgaatacctgaagtcttttcttgtttcctccaccttgacat

SEQ ID NO: 21533 - DNA, 80 bp, synthetic construct
  source 1..80: mol_type = other DNA
ctctataataacccgtgtcttcaggcaaagtgtccctgatgtgcagagcataataatccaagccttcatggataatttca

SEQ ID NO: 21534 - DNA, 80 bp, synthetic construct
  source 1..80: mol_type = other DNA
catgcgagatttcctctctttcactaacaaccggtcaacaaaatccatggcttcaatgctaatctctttgaatgcttcct

SEQ ID NO: 21535 - DNA, 80 bp, synthetic construct
  source 1..80: mol_type = other DNA
aatttggccatgtatgtcttctttgaggatgtttcaacacaacgatggacaattccaaactcaccacgcccaagatcttc

SEQ ID NO: 21536 - DNA, 80 bp, synthetic construct
  source 1..80: mol_type = other DNA
attgggacatcagatttgggagtgatgggttctgatatttcactccattcactttccccacctagattttcacatttcac

SEQ ID NO: 21537 - DNA, 80 bp, synthetic construct
  source 1..80: mol_type = other DNA
gagttcttcaatagagcttcgatcacaattggtcctgtaggtttgtctggtttatctgttgggggaaaatacaattgtgg

SEQ ID NO: 21538 - DNA, 80 bp, synthetic construct
  source 1..80: mol_type = other DNA
tttgtggtaacatccttcatttctttgcgtattcctggggcctctccagctgaacaatatgaaagataatattaagtgac

SEQ ID NO: 21539 - DNA, 80 bp, synthetic construct
  source 1..80: mol_type = other DNA
agactgtctatattcaacccagtatccaagaatttctttaccaccatcacattcaggtttctcccactgtagagtgacac

SEQ ID NO: 21540 - DNA, 80 bp, synthetic construct
  source 1..80: mol_type = other DNA
ggactgttgggacttcctatcaccctgaccttgatgtagacagccttcttgccacatttattttccagaaccaggtcata

SEQ ID NO: 21541 - DNA, 80 bp, synthetic construct
  source 1..80: mol_type = other DNA
gaaaattttattcattttatcagctaaaaatacttaacattttttcactttcctttctcttaaatgtgcttcatttgtaa

SEQ ID NO: 21542 - DNA, 80 bp, synthetic construct
  source 1..80: mol_type = other DNA
ggtgggtaccaagtaagtgtcatgccatcacgggaaacatcaaatatctgtaatgtttctgggggtccaggaatacctgc

SEQ ID NO: 21543 - DNA, 80 bp, synthetic construct
  source 1..80: mol_type = other DNA
gataactttaatggtttctgaagtagttccggtaacattcttcaattcaagtgtgtattctccagtatctctgatagtgg

SEQ ID NO: 21544 - DNA, 80 bp, synthetic construct
  source 1..80: mol_type = other DNA
aatttcccaagttatagtcacagaatctcttgatacttccttaactttcactgaaggacagggaccaggagtatctgaaa

SEQ ID NO: 21545 - DNA, 80 bp, synthetic construct
  source 1..80: mol_type = other DNA
atccacaactcttggagcagaaggtggtccaggggtatctgtggaatttaaaaagtgagatgcagatattaggcaaataa

SEQ ID NO: 21546 - DNA, 80 bp, synthetic construct
  source 1..80: mol_type = other DNA
tgaggagcattgtatttatgtatgattcttggagctcacatgatggttctctgcatgagatgaagttggaagcttcgctg

SEQ ID NO: 21547 - DNA, 80 bp, synthetic construct
  source 1..80: mol_type = other DNA
tgtaatcgggcatccagttcggctttgggtggagctgtcagtaggcaaaacagatatgaatgaatatctgagagtttatt

SEQ ID NO: 21548 - DNA, 80 bp, synthetic construct
  source 1..80: mol_type = other DNA
gtgcataagttctgaactgatattccagtccttctactaaaccagttactttgtagttgcactctaagcatggcactttg

SEQ ID NO: 21549 - DNA, 80 bp, synthetic construct
  source 1..80: mol_type = other DNA
gattggtacgtcaatggtaaatgggcttcctgctttgcaagttataagctgattggtaattccagtgaggtcagcagtgg

SEQ ID NO: 21550 - DNA, 80 bp, synthetic construct
  source 1..80: mol_type = other DNA
tgttttcacacatgcctctgcattcaccttgtgccagtctcctaagtcggccttacacatttcaataatatacccaatta

SEQ ID NO: 21551 - DNA, 80 bp, synthetic construct
  source 1..80: mol_type = other DNA
ttagtttaatggcagtgtaactttgggcttcacatttatcctcaattagtgcccaggcaagtctgctggtttcccgtttt

SEQ ID NO: 21552 - DNA, 80 bp, synthetic construct
  source 1..80: mol_type = other DNA
ggtagaaagacataattcatccacttagcaaccttgggtaatttgtttctgttaccattttacaggccaggggccaaatg

SEQ ID NO: 21553 - DNA, 80 bp, synthetic construct
  source 1..80: mol_type = other DNA
gaattggtaatccagaccttctaccagtccagtggctctatattctcttccagagattggtgatgtattaactttttgcc

SEQ ID NO: 21554 - DNA, 80 bp, synthetic construct
  source 1..80: mol_type = other DNA
taacctcaatttcacatgtcttacttatgccagcgtgggaccacgtctgttcacctttacctttcctttctacaacatat

SEQ ID NO: 21555 - DNA, 80 bp, synthetic construct
  source 1..80: mol_type = other DNA
caataacagaagttctgagagccacatccaggtcaatctctggtgcctctgtagacataaaatggatacatacagtgaat

SEQ ID NO: 21556 - DNA, 80 bp, synthetic construct
  source 1..80: mol_type = other DNA
tacaacggaatcagattccagtggctcgccaattccatatttgttcacggctcggacccggaagatgtattcatttcctt

SEQ ID NO: 21557 - DNA, 80 bp, synthetic construct
  source 1..80: mol_type = other DNA
tataggccactcttctatctcagatggggtagaaagactgtgagttgtgcagggacttaagcaccttttacatgtgtttt

SEQ ID NO: 21558 - DNA, 80 bp, synthetic construct
  source 1..80: mol_type = other DNA
gtttcccttctataagatggctaatatgagggctgtgagaactaagggaaagaattcatgaaaattcctcaataaatgtt

SEQ ID NO: 21559 - DNA, 80 bp, synthetic construct
  source 1..80: mol_type = other DNA
agcattcctagcaaagacacggaattcatactgggaattctgagtcaagccagagatgatgaattgagtttcagtaacat

SEQ ID NO: 21560 - DNA, 80 bp, synthetic construct
  source 1..80: mol_type = other DNA
aatttcggtattaaatctcatggttgccttaagggggacaccatctcttgataaggtcactttgggaagtggttttccag

SEQ ID NO: 21561 - DNA, 80 bp, synthetic construct
  source 1..80: mol_type = other DNA
ttgattttagtcttcctttttacataacccattttgcttctgaaccaaccaaggctcccacaagctatgtcattacatgc

SEQ ID NO: 21562 - DNA, 80 bp, synthetic construct
  source 1..80: mol_type = other DNA
caaataaaggttcttcttctctttcctttgctatctgagggtcagagctatcactggggtcactagcaccaaccttattg

SEQ ID NO: 21563 - DNA, 80 bp, synthetic construct
  source 1..80: mol_type = other DNA
acttggttactttacaggatgtcatctgtaactctccttcacatattgtccatgcaaggtggcttgtttcacgtttttct

SEQ ID NO: 21564 - DNA, 80 bp, synthetic construct
  source 1..80: mol_type = other DNA
cggaactgatactcacttcctgttgtcaggcgaactattttaatggatgttcttgcaactgcttgtgaaactatgtgcca

SEQ ID NO: 21565 - DNA, 80 bp, synthetic construct
  source 1..80: mol_type = other DNA
ttcaaccacataaccagtaattttgctgccaccatcactttctggtttctcccacttaattgtagctgtattacgggtca

SEQ ID NO: 21566 - DNA, 80 bp, synthetic construct
  source 1..80: mol_type = other DNA
cgcagatccgttaatgttttcttgttgcacttggtccatctaacgccttccttatctcgtttttcaagaatgtagccctc

SEQ ID NO: 21567 - DNA, 80 bp, synthetic construct
  source 1..80: mol_type = other DNA
gctggctttcatccagcggccatcaggtagatctttcttttctacaatataacctgttattttgctaccaccatcatagg

SEQ ID NO: 21568 - DNA, 80 bp, synthetic construct
  source 1..80: mol_type = other DNA
tagttgcttatttggcagccaccagtataggctggaggttcccaagatatgactacaaagtctgcactaacttcatcaaa

SEQ ID NO: 21569 - DNA, 80 bp, synthetic construct
  source 1..80: mol_type = other DNA
tgtggtggtcctggagtgtcaagaactttcacagttacaaaagcagactttgatccactgctgttttccaacttaagaat

SEQ ID NO: 21570 - DNA, 80 bp, synthetic construct
  source 1..80: mol_type = other DNA
cctggtctatctaatacttttacatttactgggaatgacttagaacctgcaacattggaagctcttaaaatatactgccc

SEQ ID NO: 21571 - DNA, 80 bp, synthetic construct
  source 1..80: mol_type = other DNA
tcggcaaatattctaaattggtattctgtaccagttttcagtttggtcactttgagtgtagttctagcaacagtagcaga

SEQ ID NO: 21572 - DNA, 80 bp, synthetic construct
  source 1..80: mol_type = other DNA
ctctaaagtaataactgcaaccttcttggagctgatcgattttccaagaattcttatggcagttagttacaacagcagca

SEQ ID NO: 21573 - DNA, 80 bp, synthetic construct
  source 1..80: mol_type = other DNA
ggcatcttgtccatctaatgccttctttatcccgtttctcaagaacatatccaagaatttcactaccaccatcagatgct

SEQ ID NO: 21574 - DNA, 80 bp, synthetic construct
  source 1..80: mol_type = other DNA
gattcaccagcatgaaccacgattgtgtctttgtattttggatccatacttattcgtggtggatctacctcatctctagc

SEQ ID NO: 21575 - DNA, 80 bp, synthetic construct
  source 1..80: mol_type = other DNA
agtacagtgaaagtattgaacaggagtttgaaggctggtggaatgacaagatctttggcgatcactggcacactcagttg

SEQ ID NO: 21576 - DNA, 80 bp, synthetic construct
  source 1..80: mol_type = other DNA
ccaagtccttcggaattcatggcatagatgcggatcttatattcctgattctctgtgaggccagtgatagtatacgaagt

SEQ ID NO: 21577 - DNA, 80 bp, synthetic construct
  source 1..80: mol_type = other DNA
aaatgtgtttagcaaagccaccaggattagtcgctgtaagggtataggcaccactatcccttcttgttgaatctttgttt

SEQ ID NO: 21578 - DNA, 80 bp, synthetic construct
  source 1..80: mol_type = other DNA
ccatatctattctgagcttttacacggaactgatactctaatccagtagtaaggcgggtggctttataggtagtacgtat

SEQ ID NO: 21579 - DNA, 80 bp, synthetic construct
  source 1..80: mol_type = other DNA
ttagtggtggctgtggaataagatttccgtgttgcttcacgtttctctacaatgtagtttgttatacgtgagcctccatc

SEQ ID NO: 21580 - DNA, 80 bp, synthetic construct
  source 1..80: mol_type = other DNA
tgcggatttgaaggtggtcctggaggatctgagaaagaaacaaagacacaaaagtatatattcagagtttggcttttggg

SEQ ID NO: 21581 - DNA, 80 bp, synthetic construct
  source 1..80: mol_type = other DNA
tctgagtgatatctgatggtctaatgtcttttcctgccttggaccaacttgattttggaaggggtttgccaagaatgcta

SEQ ID NO: 21582 - DNA, 80 bp, synthetic construct
  source 1..80: mol_type = other DNA
attcatattcaagaccttcagttaatcctgtcactttaaagtctctcatccttatcggagtcttgttagctctcttccac

SEQ ID NO: 21583 - DNA, 80 bp, synthetic construct
  source 1..80: mol_type = other DNA
tggcaatcgtacactataagagttgtgttaaccgcagatgactcaacactgactctagtgtcagttgctagaggatcttc

SEQ ID NO: 21584 - DNA, 80 bp, synthetic construct
  source 1..80: mol_type = other DNA
ttttgtaccacatagtttatgatggggcttccgccatcaataatgggaggctcccaggtaacataagcagagtctttgga

SEQ ID NO: 21585 - DNA, 80 bp, synthetic construct
  source 1..80: mol_type = other DNA
ggataagcaaatagaagaaataagaagaagggaaattaagatggagagcccaccagtcacatacttagggagatggtgga

SEQ ID NO: 21586 - DNA, 80 bp, synthetic construct
  source 1..80: mol_type = other DNA
ttctttctataataggttttctgttgaccttagtccagttaacagcctgggtttcccgcttttcaagcaaatagccagtg

SEQ ID NO: 21587 - DNA, 80 bp, synthetic construct
  source 1..80: mol_type = other DNA
taagcttaatggtggctgatttagaaccacttgaattttcagcagtaatggtatagtctcctgagtccttccggttcacg

SEQ ID NO: 21588 - DNA, 80 bp, synthetic construct
  source 1..80: mol_type = other DNA
cttggtgacatcaataacctcaggtttcccaggaggatctaaaacaaaaagaggtacactcaccatttatcttaccagca

SEQ ID NO: 21589 - DNA, 80 bp, synthetic construct
  source 1..80: mol_type = other DNA
ctcgtgcattctttggttcactaggaacacctggagatgaagacaaggaagatgtcagtttctacattaagtaacaaact

SEQ ID NO: 21590 - DNA, 80 bp, synthetic construct
  source 1..80: mol_type = other DNA
taagtttcttctggtggagagctatactggtgcaaattaatgcttgtattaccaccaattttttttaatatatactttaa

SEQ ID NO: 21591 - DNA, 80 bp, synthetic construct
  source 1..80: mol_type = other DNA
aaactgactccaacagcatttctggccgctactctaaatttgtatttctttccttcctttaggccagtgacaacaaggct

SEQ ID NO: 21592 - DNA, 80 bp, synthetic construct
  source 1..80: mol_type = other DNA
ttacatggaagcttgttttcttaacttctggggtaacggtcgaccatgtctttctgtctgcctcacgtttctccacgata

SEQ ID NO: 21593 - DNA, 80 bp, synthetic construct
  source 1..80: mol_type = other DNA
actctgaaattggttggtggaccaggtggctctgaaagtaaaatatacatatagttaactactactagtgatacttcaat

SEQ ID NO: 21594 - DNA, 80 bp, synthetic construct
  source 1..80: mol_type = other DNA
ccgtaactacatatttacccccatcacttcgctttgctttagtaagagaaaatttagatgaatcagcacgggtatcaatc

SEQ ID NO: 21595 - DNA, 80 bp, synthetic construct
  source 1..80: mol_type = other DNA
ggaatctgtactcatttccttcaattagtccaggtaccctaaaggcacattgcctaatgagttcatctttattaatcctg

SEQ ID NO: 21596 - DNA, 80 bp, synthetic construct
  source 1..80: mol_type = other DNA
cacgtgtctttccttgtatcttgtttctcaacaatataatttatcacagggcttcctccatcatccttaggtggctgcca

SEQ ID NO: 21597 - DNA, 80 bp, synthetic construct
  source 1..80: mol_type = other DNA
accatcatccagtggttctttccaagtaaggtaacatgaatctttcctaatttcactgacttccagatctctaggtggcc

SEQ ID NO: 21598 - DNA, 80 bp, synthetic construct
  source 1..80: mol_type = other DNA
catgactcaggggtgtgattggctcttctccactcttcatctccaactttctggtactcaacaatataacccagaatctt

SEQ ID NO: 21599 - DNA, 80 bp, synthetic construct
  source 1..80: mol_type = other DNA
aataagacttaccaacaacattaacttgacagaaacctttcctagagcctgtactgttctccacaaccacacagtatttg

SEQ ID NO: 21600 - DNA, 80 bp, synthetic construct
  source 1..80: mol_type = other DNA
caggacgctctggtacagctgcgaatataagtataggaattgtggtagaaaaaaatgtcacattaagaatgtagtaggat

SEQ ID NO: 21601 - DNA, 80 bp, synthetic construct
  source 1..80: mol_type = other DNA
atggacccatgccaatactattttcagccgcaattcggaaaaagtaggcttttccttgaatgagaccctggacagtagca

SEQ ID NO: 21602 - DNA, 80 bp, synthetic construct
  source 1..80: mol_type = other DNA
tttatttctggatgaccagtggatcaacaagcagcataggaggccccaaatttcagaatgactttgaggaggttgcaaat

SEQ ID NO: 21603 - DNA, 80 bp, synthetic construct
  source 1..80: mol_type = other DNA
acaataattgtcttctttctttctccggcttcatttttggcaagaagagaatagacgccttgatggctcctctggcagtt

SEQ ID NO: 21604 - DNA, 80 bp, synthetic construct
  source 1..80: mol_type = other DNA
aaataagatttaaaaaaaaggaatggtttccaggcttaccaattggatctctagcagtcgctgggtctgatggcagactt

SEQ ID NO: 21605 - DNA, 80 bp, synthetic construct
  source 1..80: mol_type = other DNA
gacccaccatcatctttaggtggaaaccaagatagtgtcatttgatctgctgaaacagattcaaattttatgggtcccac

SEQ ID NO: 21606 - DNA, 80 bp, synthetic construct
  source 1..80: mol_type = other DNA
tctcagcagttgctaagaaaatgactggttactttctgtcccttttgaggagcatgcagagaaattgctttagcctctga

SEQ ID NO: 21607 - DNA, 80 bp, synthetic construct
  source 1..80: mol_type = other DNA
ccatcaatagtcctcttctcaataacatagcctttgatcctgtctcctccatcgtcgtctggcatcttccatgaaagtct

SEQ ID NO: 21608 - DNA, 80 bp, synthetic construct
  source 1..80: mol_type = other DNA
agctttcactctgaatctgtacttcctgagctctttcagattaggcaccacacattcacaggtagttataagtttgtctg

SEQ ID NO: 21609 - DNA, 80 bp, synthetic construct
  source 1..80: mol_type = other DNA
agtaaacctttgaacacaaactaatcttaatgccctttagggacaggatcagtgtctacaataatcccataacaatcctt

SEQ ID NO: 21610 - DNA, 80 bp, synthetic construct
  source 1..80: mol_type = other DNA
ggctctgaactggtatttaacgccttcaagcaaacgaggaacattaaattccacgcctttcaatcccactttggttattg

SEQ ID NO: 21611 - DNA, 80 bp, synthetic construct
  source 1..80: mol_type = other DNA
gtttttcaattacagtttcatttttggaccattcaatcttaggcattggaaggcctgtcacatctgcagggatgtggaca

SEQ ID NO: 21612 - DNA, 80 bp, synthetic construct
  source 1..80: mol_type = other DNA
tatgaacatactttgagtcatgttgcctcacatgtgggttcaaaatatggtggaaagaggatgtatgtaatgctgctgaa

SEQ ID NO: 21613 - DNA, 80 bp, synthetic construct
  source 1..80: mol_type = other DNA
ctctataaacacaatgaaaccttctcttttacctagtggatcaactgcaagaattggtcctatttcaacaggagggccac

SEQ ID NO: 21614 - DNA, 80 bp, synthetic construct
  source 1..80: mol_type = other DNA
gaccttgatcatcttctctgtgcagcgtgaccattcatttgtgccaaccaactgcttatcaacaaaatagccaacaattt

SEQ ID NO: 21615 - DNA, 80 bp, synthetic construct
  source 1..80: mol_type = other DNA
aaggggtggttcccatttacaaaggactgaggtctttctgatatcttcaaatacaaagttgattggtggtcccggtgtat

SEQ ID NO: 21616 - DNA, 80 bp, synthetic construct
  source 1..80: mol_type = other DNA
aagtgctatttcatcacctcgtttcacttctaggcttgttctcagaatgactttgggggcatctatagtgatcataacca

SEQ ID NO: 21617 - DNA, 80 bp, synthetic construct
  source 1..80: mol_type = other DNA
agggctggggggaatgcagaaaatgttactatccctggttaagaacactatgggaaaatgtgaagctgtgcaattaaaaa

SEQ ID NO: 21618 - DNA, 80 bp, synthetic construct
  source 1..80: mol_type = other DNA
attgggcgagaattaactctcatccatttctcagtgcctactggacacatttcaacatggtatcctatgataggacttcc

SEQ ID NO: 21619 - DNA, 80 bp, synthetic construct
  source 1..80: mol_type = other DNA
taagtgcgagagcacttattgtcacaaagattaagtgcaagagcatactaaaggtgtctttggccagcacagagtcctca

SEQ ID NO: 21620 - DNA, 80 bp, synthetic construct
  source 1..80: mol_type = other DNA
agttgatttgcttggttttccaggtccagcaagattttcagccaacacacggaatctgtattttttcttattagtgagac

SEQ ID NO: 21621 - DNA, 80 bp, synthetic construct
  source 1..80: mol_type = other DNA
tgttttctgcagcaactctgaagatgtactctttattggggattaatttggtggccttgaagtttgtatccttgacggtg

SEQ ID NO: 21622 - DNA, 80 bp, synthetic construct
  source 1..80: mol_type = other DNA
gcaggcagtacattcagcagcacctttaaaaatcagacagatacaccggcagcataggattctcaatgaaaaaagacaaa

SEQ ID NO: 21623 - DNA, 80 bp, synthetic construct
  source 1..80: mol_type = other DNA
ctgattaggtcaactaaggtattctagtggaataagaagtgtgaccaccagggaaataaatatttactttccacttctag

SEQ ID NO: 21624 - DNA, 80 bp, synthetic construct
  source 1..80: mol_type = other DNA
ccaaagtagctatgtgctattccccgatctaaaaataaaatatctatttaccaaatgcatcgtcagcggtgagaggacca

SEQ ID NO: 21625 - DNA, 80 bp, synthetic construct
  source 1..80: mol_type = other DNA
gtaattatttcccttttttgatgggcttaccaattggatcagcaactttgacgaagggtgtggctgcacttggttttcca

SEQ ID NO: 21626 - DNA, 80 bp, synthetic construct
  source 1..80: mol_type = other DNA
tcagctgtcttgatttttggtgcagctagtgagaaagataacatgtgaacgctttcgactattaaacgtagccaagctac

SEQ ID NO: 21627 - DNA, 80 bp, synthetic construct
  source 1..80: mol_type = other DNA
tcaccctggacaacaaccatgttatttcttagccattggacttccaccttatctttattgagttctgctaaaaagacaac

SEQ ID NO: 21628 - DNA, 80 bp, synthetic construct
  source 1..80: mol_type = other DNA
actctgtatgagacacggttgtcaaaaggcacttcttcaccatttttggtccacttcagtgttacattgagacgattcac

SEQ ID NO: 21629 - DNA, 80 bp, synthetic construct
  source 1..80: mol_type = other DNA
tttataccaaatcacttctgcgccaggtttggagacttcacaaaccagttttatagtgtctgtttcactaacttcaatgt

SEQ ID NO: 21630 - DNA, 80 bp, synthetic construct
  source 1..80: mol_type = other DNA
ccttagacattatgcagactaacttcttggatgtgtaaactaaggctcagacttgaagaaacttgccaatggtagttaat

SEQ ID NO: 21631 - DNA, 80 bp, synthetic construct
  source 1..80: mol_type = other DNA
gtgagtccttcccaagatgaccattcttgagcaataagattctgagacaaatgctgtctaataggtttgaaaatatgctc

SEQ ID NO: 21632 - DNA, 80 bp, synthetic construct
  source 1..80: mol_type = other DNA
aacacataaaggatcaggttaggtcagtgtcaatactagaagttgccaagaaatgcagttaggccaagaagggcatgcaa

SEQ ID NO: 21633 - DNA, 80 bp, synthetic construct
  source 1..80: mol_type = other DNA
ctagcttgataataattcttcctccagctggcttttgaaaatctaggatgtgcaataaaaacaatagagatggaaggagg

SEQ ID NO: 21634 - DNA, 80 bp, synthetic construct
  source 1..80: mol_type = other DNA
ctaggtggcctttcacattgaaattgcccaggccagtttctgtttacatttgtggtcttttttgcatatgcgtagatata

SEQ ID NO: 21635 - DNA, 80 bp, synthetic construct
  source 1..80: mol_type = other DNA
taattgagagtggccaaaaaacataataaggaaaaataacagctaggagggggtagttaaatatgcccttggaacagagc

SEQ ID NO: 21636 - DNA, 80 bp, synthetic construct
  source 1..80: mol_type = other DNA
acagcttgtttttgcttgtttggttattgtagttttgaaggcgaaaatttttacataaaatgagtattaaagttcggaat

SEQ ID NO: 21637 - DNA, 80 bp, synthetic construct
  source 1..80: mol_type = other DNA
tgttgtttctggggacaaaacatatagatcaatttaggcaaattgtattgtgggcctatctgaataatcccttagttttt

SEQ ID NO: 21638 - DNA, 80 bp, synthetic construct
  source 1..80: mol_type = other DNA
ggcaaagacagaggaagagacattagaaagagcaaagaataaggaacatacaagtgaaggtggaagaactccagaaaaag

SEQ ID NO: 21639 - DNA, 80 bp, synthetic construct
  source 1..80: mol_type = other DNA
aggcgacagttgtgcaaaacaagggagtgtattttgccttcttccttaatttcacaatcctgtaccaacaaaacagaaaa

SEQ ID NO: 21640 - DNA, 80 bp, synthetic construct
  source 1..80: mol_type = other DNA
ataaccccaatgcttcaagagtgaaactcatggaaatttccttaccctcaatgtcaagttttcctgaggtcttatctgtc

SEQ ID NO: 21641 - DNA, 80 bp, synthetic construct
  source 1..80: mol_type = other DNA
agcacagtgagtttagcttctgaactcatccccatagcttctactctaatttgggaggtgtcatcaatagacaggtcttt

SEQ ID NO: 21642 - DNA, 80 bp, synthetic construct
  source 1..80: mol_type = other DNA
aattctgaaagaagtggacagtggatgaagtcagaatacgtttccattgatgacccttgatcaatgcaggggtgtatcag

SEQ ID NO: 21643 - DNA, 80 bp, synthetic construct
  source 1..80: mol_type = other DNA
gctgtgctgtggagctcagctccttgacttgagcttttatctgagatatatcatccaatgtcacttctttcatttccaat

SEQ ID NO: 21644 - DNA, 80 bp, synthetic construct
  source 1..80: mol_type = other DNA
taaaagccccataccttttactgtcaaaatggcagttgtaattgcattaagggcctggtagaggacttcaccagcttggt

SEQ ID NO: 21645 - DNA, 80 bp, synthetic construct
  source 1..80: mol_type = other DNA
agattttatacctccaagtgtcagctttgcagggtatctttttccttcaatttccactgcatactcagcaatatcttctg

SEQ ID NO: 21646 - DNA, 80 bp, synthetic construct
  source 1..80: mol_type = other DNA
cgaactctgattctgtcaagatgatgtctttgatttctttcacaaacttcagtggcacagcctttagctggtaggtgaac

SEQ ID NO: 21647 - DNA, 80 bp, synthetic construct
  source 1..80: mol_type = other DNA
atgacttctatggataatcacatttccaggaaggcatattctgagactgaagagctcaagctaaactgccaacatattta

SEQ ID NO: 21648 - DNA, 80 bp, synthetic construct
  source 1..80: mol_type = other DNA
atttctctgtcaaactattatggacatttctaaatgttattcccggggcctatgcacatctcactgtggaatgtaacaaa

SEQ ID NO: 21649 - DNA, 80 bp, synthetic construct
  source 1..80: mol_type = other DNA
tttgaagcttcatgggattcttatatgtatacccttacagggtctctgcctgtctccttagtttttatcagccccaaaca

SEQ ID NO: 21650 - DNA, 80 bp, synthetic construct
  source 1..80: mol_type = other DNA
tcaggtaacttatttagcaactgagtaatcattagccaattgcataggagagtgagatggtaaagaaaattaagccatat

SEQ ID NO: 21651 - DNA, 80 bp, synthetic construct
  source 1..80: mol_type = other DNA
aatagcactcaaagttactttgtttctatctagatagagggtctattctgagacaagtctgtgggagaaacagctccaac

SEQ ID NO: 21652 - DNA, 80 bp, synthetic construct
  source 1..80: mol_type = other DNA
tactataccgcttttcagaacaacttcttcctttggttcaggtttacgttccggaagtaatttgcgaactttcttttcac

SEQ ID NO: 21653 - DNA, 80 bp, synthetic construct
  source 1..80: mol_type = other DNA
atgctattttatagagcagcctcttttgctattatggccctcatagatttgaatggtgaaagaaaggaacacgtggtgat

SEQ ID NO: 21654 - DNA, 80 bp, synthetic construct
  source 1..80: mol_type = other DNA
tttctgaaatgtgagttccgtacccctcagagaatgacttagagccagtgagaagagagtgacatgaaagtcctaaggaa

SEQ ID NO: 21655 - DNA, 80 bp, synthetic construct
  source 1..80: mol_type = other DNA
gtcttatgctggaagactgtggtttgaagatacataggtctgtatagggaaagtgcatatctaagattatatctagataa

SEQ ID NO: 21656 - DNA, 80 bp, synthetic construct
  source 1..80: mol_type = other DNA
cctttacaaagatgatgagaaatacagcaaaggcaccaataacaacaacaaacaaagcatccagacaagccacagttgac

SEQ ID NO: 21657 - DNA, 80 bp, synthetic construct
  source 1..80: mol_type = other DNA
acagggggagtctcttttctaccaatggttatagatgctttttcttcatatattatttcctcaggagtctcttcaacttt

SEQ ID NO: 21658 - DNA, 80 bp, synthetic construct
  source 1..80: mol_type = other DNA
ctgccgccacggatcttgtccaactcttaaagaccttaaataattgcaatgggtctttactatttagtagctgaaattgc

SEQ ID NO: 21659 - DNA, 80 bp, synthetic construct
  source 1..80: mol_type = other DNA
tgaacttaatcttttcttgccgtgtgtttctgcagcccttttgtattcacttgctatgtgtaatcacttcctgtctgtat

SEQ ID NO: 21660 - DNA, 80 bp, synthetic construct
  source 1..80: mol_type = other DNA
atgtgggaccaaattctgtgggtccaaagttttatgtgtagaaataacttttgttcttaatgtagtcagatttcaggcaa

SEQ ID NO: 21661 - DNA, 80 bp, synthetic construct
  source 1..80: mol_type = other DNA
gagttaggaaggaagaagaacaaagcttaaattagaaatagtcgcaagtggcaaggtcattaatcaccggtctcacgtgt

SEQ ID NO: 21662 - DNA, 80 bp, synthetic construct
  source 1..80: mol_type = other DNA
ggaacaacctccttgggcacctcgggcactataaaagatattagtagttgtttaagctcatggtttcaatgaaatgtgaa

SEQ ID NO: 21663 - DNA, 80 bp, synthetic construct
  source 1..80: mol_type = other DNA
acgcttaaactcaatgacaaatacctttaacaggtgggacttcaggctttttaggaggagccgagggcactttcttttca

SEQ ID NO: 21664 - DNA, 80 bp, synthetic construct
  source 1..80: mol_type = other DNA
tagagctatggagactactagcaaaatatacagcagaggaattggatcttctgaagcttaaggtcaaatgacaagtacct

SEQ ID NO: 21665 - DNA, 80 bp, synthetic construct
  source 1..80: mol_type = other DNA
tcttttagttagaagctataaagggggaatatcgactccacatttacccaagcaaatacaacttgtgagatcggcggaca

SEQ ID NO: 21666 - DNA, 80 bp, synthetic construct
  source 1..80: mol_type = other DNA
accttcttttctgggacagctgcctttggcacctctgggactttaaagatattagtattttcattattagacaaagtaaa

SEQ ID NO: 21667 - DNA, 80 bp, synthetic construct
  source 1..80: mol_type = other DNA
aagaacaaagctggaggcgtcacgctactgtattacaaggctacagtaaccaaaacagcatggtactggtaccaaaacag

SEQ ID NO: 21668 - DNA, 80 bp, synthetic construct
  source 1..80: mol_type = other DNA
tcattcataggtgggaattgaacaatgagaacacatggatacaggaagggggacaccacacaccggagtgtgttgtgagg

SEQ ID NO: 21669 - DNA, 80 bp, synthetic construct
  source 1..80: mol_type = other DNA
gggaggagccttaggaactttcttttctgggacaacttcttgagcttcaggcacttgaaagatattagtagttttagact

SEQ ID NO: 21670 - DNA, 80 bp, synthetic construct
  source 1..80: mol_type = other DNA
acttgtgagatcggcggacacttctatacagtctttccccagggccccccgactgacaatgtgtaatgatacctaccttt

SEQ ID NO: 21671 - DNA, 80 bp, synthetic construct
  source 1..80: mol_type = other DNA
gggagcctctggcacttaaaagatattagtaaagttacatgtggagctatggagactactagcaaaatatacagcagagg

SEQ ID NO: 21672 - DNA, 80 bp, synthetic construct
  source 1..80: mol_type = other DNA
ttctggttttttgattggtgccttgggaattttcttttctgggacaacttcttgagcagcttcaggcacttgaaagatat

SEQ ID NO: 21673 - DNA, 80 bp, synthetic construct
  source 1..80: mol_type = other DNA
attatgaagaccactagaaaaatattttccagagcagaagagatacatcatctgaagcctaaaatcagtgacaaatacct

SEQ ID NO: 21674 - DNA, 80 bp, synthetic construct
  source 1..80: mol_type = other DNA
aagaccactggaaaaaatatcttcaagagcaaaagaatgagatctgaagcctaaggtcagtggcaactacctttaacagg

SEQ ID NO: 21675 - DNA, 80 bp, synthetic construct
  source 1..80: mol_type = other DNA
cttcaggctttctgagaggaaccacaagcgttttcttttcagggacaatttcttggagagcttcaggcactttaagaaat

SEQ ID NO: 21676 - DNA, 80 bp, synthetic construct
  source 1..80: mol_type = other DNA
tctaataaatgaaggaaggaatggcaggatgaacgatacctttagtgggaggtatttcaatttcaaggggagcagccatg

SEQ ID NO: 21677 - DNA, 80 bp, synthetic construct
  source 1..80: mol_type = other DNA
tacactgactcaactatctttcatgtgtataagctaaaggtattttttccctctgttgtctcttgagtgactcactggga

SEQ ID NO: 21678 - DNA, 80 bp, synthetic construct
  source 1..80: mol_type = other DNA
gttatataccttttgctagtttgggttttgtcttttgaggttgagtcacaagtactttttcttctaggactgcttcttca

SEQ ID NO: 21679 - DNA, 80 bp, synthetic construct
  source 1..80: mol_type = other DNA
tgaacaacaagaaagttgagtttcaacaggaaattttttagattaaaaaaaatggaagcgggtctggtgtagtggctcat

SEQ ID NO: 21680 - DNA, 80 bp, synthetic construct
  source 1..80: mol_type = other DNA
aaaccaagaattatttcatgttctgattagcatcactgtatacctttagctggtggaacttcaggctttttcagaacagc

SEQ ID NO: 21681 - DNA, 80 bp, synthetic construct
  source 1..80: mol_type = other DNA
ggaactctgggctcttcaggaacacgtactttttcttctaccacaattttcttaggcacctccggtactttaaagataat

SEQ ID NO: 21682 - DNA, 80 bp, synthetic construct
  source 1..80: mol_type = other DNA
tgcagataacttatttgtgctatggcttgtcttcacagtatgctagaatacaggtgccattaacaatacttcacttcctt

SEQ ID NO: 21683 - DNA, 80 bp, synthetic construct
  source 1..80: mol_type = other DNA
actgaataaaggattgcatgcaacaatacacgaaaatccaggatctttccaaaaatacctttagctgggggaacagcttc

SEQ ID NO: 21684 - DNA, 80 bp, synthetic construct
  source 1..80: mol_type = other DNA
tctattagctgaggagtctactatgacagggacagcataatctaactgcttaagagcactgtctgaagcattaagtgaat

SEQ ID NO: 21685 - DNA, 80 bp, synthetic construct
  source 1..80: mol_type = other DNA
gaacaccaggaattttaaatgttcaatccttaaaagcggttatacctctaggtggtgccacctcttcaacttcctctatg

SEQ ID NO: 21686 - DNA, 80 bp, synthetic construct
  source 1..80: mol_type = other DNA
agttatctaccttcaactggtagaacttcctcttctttagggagaatgattcgtttttcttccaccttcttaggcacctc

SEQ ID NO: 21687 - DNA, 80 bp, synthetic construct
  source 1..80: mol_type = other DNA
gaatagcaatacctttggcagggggagcctcctctttcttgggaatgaccactttcttctctgtcactttcttcttaatt

SEQ ID NO: 21688 - DNA, 80 bp, synthetic construct
  source 1..80: mol_type = other DNA
aatagctgagcccattaagactgatattagcatccccaatttacaggaaaataacttcaggctcaggttggttaaaggac

SEQ ID NO: 21689 - DNA, 80 bp, synthetic construct
  source 1..80: mol_type = other DNA
cttcaggtacaaattcttcttcctcaggtacatattcttcttcgggaggaacttcctcttcctcaggtggaatttcctct

SEQ ID NO: 21690 - DNA, 80 bp, synthetic construct
  source 1..80: mol_type = other DNA
tgtatgtgagtatacatagatgtgagttttttcccccaagtactctaagtgatgaaattatgtaccttttgcaggtggag

SEQ ID NO: 21691 - DNA, 80 bp, synthetic construct
  source 1..80: mol_type = other DNA
tatggctcaccaagttatgctgcatgggtgaattatcatgctattccactgatggattataaggatgtaccttttgctgg

SEQ ID NO: 21692 - DNA, 80 bp, synthetic construct
  source 1..80: mol_type = other DNA
aaccctcttgggcttcatgggcacttgaaatatgaagtataaggaaattttattgtcagtaaaaggccacccagccaatg

SEQ ID NO: 21693 - DNA, 80 bp, synthetic construct
  source 1..80: mol_type = other DNA
tcaaaagaggcatcagaaaagatcacaatcgaggaaggaaatcattatacctttagcagcgggttcagtcacctgctctt

SEQ ID NO: 21694 - DNA, 80 bp, synthetic construct
  source 1..80: mol_type = other DNA
ttttatctacagtatagccatagcctattgaagtaggcaagaatcagagatccaagcagaacaagctcatattgcccttt

SEQ ID NO: 21695 - DNA, 80 bp, synthetic construct
  source 1..80: mol_type = other DNA
ggttttgagtttgcagttttgctcatacctgtgatgtattcttcatgctcttcatatcgttcatactcccgctcctcgta

SEQ ID NO: 21696 - DNA, 80 bp, synthetic construct
  source 1..80: mol_type = other DNA
acctatgttacatgaatagtttcttcacctcacttctaagacattttccttagctctattggtacaatgtagaaaattca

SEQ ID NO: 21697 - DNA, 80 bp, synthetic construct
  source 1..80: mol_type = other DNA
acaaggcacacacacaaaaacatcacaagtaatactctacccaaagacaccattgtcacccaccaacatataaacagtat

SEQ ID NO: 21698 - DNA, 80 bp, synthetic construct
  source 1..80: mol_type = other DNA
aaggagacaagctaacatagggataaaactaattaaagagtcagcataccttcagctggctcagcttccactctcttaga

SEQ ID NO: 21699 - DNA, 80 bp, synthetic construct
  source 1..80: mol_type = other DNA
atgcagtggtgtaatcacagctcactgtaacctcgaactcctgggttcaaatgatcctcctgcatcagcctcctgagtag

SEQ ID NO: 21700 - DNA, 80 bp, synthetic construct
  source 1..80: mol_type = other DNA
tgtgttcagggcttcagactcacaaatatggcattgactcctggaatgtaatgaggtaatatattttcttgctcatttta

SEQ ID NO: 21701 - DNA, 80 bp, synthetic construct
  source 1..80: mol_type = other DNA
aagtgtggccactttcaaaattataacattttcgggactcatccacttccttcgaatgattcaaggccaacatagacaca

SEQ ID NO: 21702 - DNA, 80 bp, synthetic construct
  source 1..80: mol_type = other DNA
gggacgggtttcttaggcagagctggcactttagagacattatgcacttttagaaatttaatgtgatctcattgaagccc

SEQ ID NO: 21703 - DNA, 80 bp, synthetic construct
  source 1..80: mol_type = other DNA
agaacataggcacatgcacaaatctttatgtagtacattaatgttgttatggattatctatgcatcagcaaaattatcca

SEQ ID NO: 21704 - DNA, 80 bp, synthetic construct
  source 1..80: mol_type = other DNA
agtttgagaaagagagaagcatatttgattcaggaagaaaatagaaacattgcaaagtcaggccaagggaacactattca

SEQ ID NO: 21705 - DNA, 80 bp, synthetic construct
  source 1..80: mol_type = other DNA
tctggcacgggtttcttgggaacctcaggaactttaaagatacaattgttgaaataatgtggaatattctagtcaccttc

SEQ ID NO: 21706 - DNA, 80 bp, synthetic construct
  source 1..80: mol_type = other DNA
tgtcttaaatgtttaacaatttgggtgggatggagggggtggagccttgatctatagtgcttgcagatttccgatttcca

SEQ ID NO: 21707 - DNA, 80 bp, synthetic construct
  source 1..80: mol_type = other DNA
atgtctacacgatcacaaattagacaacaagagggataaaaatctgcctaaaacccttccatttgagcccccacattcca

SEQ ID NO: 21708 - DNA, 80 bp, synthetic construct
  source 1..80: mol_type = other DNA
agatgtatacctttcacttcaataacttcttcctgtactggagtccgggaaggtttttgtggaacaatcttctttgaaac

SEQ ID NO: 21709 - DNA, 80 bp, synthetic construct
  source 1..80: mol_type = other DNA
ttcttagtgctaggatttgaagcaggatcaagcagagatgcaacaaggcagtaaaagtaaaacttgaacttctgcattag

SEQ ID NO: 21710 - DNA, 80 bp, synthetic construct
  source 1..80: mol_type = other DNA
ttatcaaatggacacaccttctattattccatgagagctccagtttgcagaacccctagtttcttccagtggaatagttt

SEQ ID NO: 21711 - DNA, 80 bp, synthetic construct
  source 1..80: mol_type = other DNA
gatgtttcacaaatgaccactcagaaaagtctgaatgatgaatgatgccttgtgtttccatattttccttctttatggag

SEQ ID NO: 21712 - DNA, 80 bp, synthetic construct
  source 1..80: mol_type = other DNA
tagctgttggatttctgggcaagaccttctttaaattttcatccagaaataaccagaatacactggtgttgtcattggtt

SEQ ID NO: 21713 - DNA, 80 bp, synthetic construct
  source 1..80: mol_type = other DNA
ggaggaagagtaacaagtgggtttaaagtcctttgttgtgcagctgttataccttaaccacggttcctaatcatacttga

SEQ ID NO: 21714 - DNA, 80 bp, synthetic construct
  source 1..80: mol_type = other DNA
taaaacattatttaacttctcaagtttcacagtgagtaccaaacttagccatgttgatactaccagtcaaagaacaaatc

SEQ ID NO: 21715 - DNA, 80 bp, synthetic construct
  source 1..80: mol_type = other DNA
aatctgttgtctaatttagttgagaagctttgggacacaaatactacaacttctctactgagtatttgagaggagcaatt

SEQ ID NO: 21716 - DNA, 80 bp, synthetic construct
  source 1..80: mol_type = other DNA
taggcatggttgggattggaactctggagtcaggaatatctggaaagggacatgtaataagcatagagagactgagaaca

SEQ ID NO: 21717 - DNA, 80 bp, synthetic construct
  source 1..80: mol_type = other DNA
cctgaagttgtatttctggctctctgtcagttctgttggtcctttgtaccatgttacaatggcatcatcaaaggacactt

SEQ ID NO: 21718 - DNA, 80 bp, synthetic construct
  source 1..80: mol_type = other DNA
gctttctagaagaggctggaggggagggtcttatatgtataacagtaccataaagtcttagaaatcacagtactctggtg

SEQ ID NO: 21719 - DNA, 80 bp, synthetic construct
  source 1..80: mol_type = other DNA
aatggtcaatttatggactttgtgttccacttctgttttatgtctaccttggggtttaaggattctgccatttctgaacc

SEQ ID NO: 21720 - DNA, 80 bp, synthetic construct
  source 1..80: mol_type = other DNA
tgatgctatatatgaaggagcataccagtctatgtgtctcttcttcttggctttgcttgagcagttcaaatgcttgaaga

SEQ ID NO: 21721 - DNA, 80 bp, synthetic construct
  source 1..80: mol_type = other DNA
attttttgttctttaatactttccactggggctggttgactgtggatgcggaacccacttatatggagggctgattgtac

SEQ ID NO: 21722 - DNA, 80 bp, synthetic construct
  source 1..80: mol_type = other DNA
gccttaggaggttggcagtttgataagtaagtactgcagaattctctttctatgtaagggtgggttacagaagataaagc

SEQ ID NO: 21723 - DNA, 80 bp, synthetic construct
  source 1..80: mol_type = other DNA
ctttgccatatagcacactattaattctctcaaacctgtgtacagcggtgtttttgctgaaccctgaaaatgaagggctt

SEQ ID NO: 21724 - DNA, 80 bp, synthetic construct
  source 1..80: mol_type = other DNA
cttactacctgtgcactgtgagataactaaccagatcataagagttggtaattaattccaggctgctctaggaggttagt

SEQ ID NO: 21725 - DNA, 80 bp, synthetic construct
  source 1..80: mol_type = other DNA
ttataggttgggaaccagccacacgtccctcaagtttgaaagaattcccttctgtttcttctactgtctctgagagtctt

SEQ ID NO: 21726 - DNA, 80 bp, synthetic construct
  source 1..80: mol_type = other DNA
tgggttcttcccctctaatagtagagcagaaagacaaggtttcaggctcaatatctggaccatgtcagtttactgaaata

SEQ ID NO: 21727 - DNA, 80 bp, synthetic construct
  source 1..80: mol_type = other DNA
ttctggagcaaaagtatcactctgagaccaaccctaatgcacagtaggtgcaaaacagtatgaaaaccaataaagcaatt

SEQ ID NO: 21728 - DNA, 80 bp, synthetic construct
  source 1..80: mol_type = other DNA
ataaatctagaagagcagtctgacaaaccttttatgtagagatgtgttgtacaagaagccttgccagcttcattgctaac

SEQ ID NO: 21729 - DNA, 80 bp, synthetic construct
  source 1..80: mol_type = other DNA
gaggagccggatagaccatttgtctctttcaattttcttgtgaatgaaggaggaacggttcggtctgaatgatacaaaac

SEQ ID NO: 21730 - DNA, 80 bp, synthetic construct
  source 1..80: mol_type = other DNA
agaaaatacagatcctggtgagtgtgtgccttgtatctgtgataacatcatctttttactaaccgagaacggatagcgtg

SEQ ID NO: 21731 - DNA, 80 bp, synthetic construct
  source 1..80: mol_type = other DNA
acattatcttgtacttcttgccgctcctaagttctctcttgtctttataccaagaaacgtgaaatgggggagtgccctga

SEQ ID NO: 21732 - DNA, 80 bp, synthetic construct
  source 1..80: mol_type = other DNA
cagagataatagcatgtatctgtcagtggaagccctctgaggtccacggggaatgagaatttgattactgtcttgtatat

SEQ ID NO: 21733 - DNA, 80 bp, synthetic construct
  source 1..80: mol_type = other DNA
caccctcctatattttaagatactgaaaatgtaaaagagatcttgctccttcactctaacaagtaccttgtacacccagc

SEQ ID NO: 21734 - DNA, 80 bp, synthetic construct
  source 1..80: mol_type = other DNA
gtctgccttgcatgaatactctcccacatcactgtgatccactttgttgattactaaggaagcaacgttatttttgaatt

SEQ ID NO: 21735 - DNA, 80 bp, synthetic construct
  source 1..80: mol_type = other DNA
agtgcttttgctccttaaaaaaagggagctaagactaaacatgaagacaaaataaagaaactccagggaaggcaggcacc

SEQ ID NO: 21736 - DNA, 80 bp, synthetic construct
  source 1..80: mol_type = other DNA
ttccagtcactacacactctaatgcaaaaggatttccagtagtgacagtcatgggttcgggcttctctatgattcttgct

SEQ ID NO: 21737 - DNA, 80 bp, synthetic construct
  source 1..80: mol_type = other DNA
tactggagaaggcttctgggtgaaaacaggaggtgctaccagaaaaaaggagataaacaatgagaacacttgcttactat

SEQ ID NO: 21738 - DNA, 80 bp, synthetic construct
  source 1..80: mol_type = other DNA
aaagtcatggaatgataccttttacactgagctgagctgagcacatgtctttgccaacatcattggttgcttggcaagta

SEQ ID NO: 21739 - DNA, 80 bp, synthetic construct
  source 1..80: mol_type = other DNA
tattaaaaacaagtgtggccacattgtttgtaaagtaggtcctgtattcaggagttggccgtaatttggtatctcctttg

SEQ ID NO: 21740 - DNA, 80 bp, synthetic construct
  source 1..80: mol_type = other DNA
acgcatgtgtaattgcccatatctgaggaatccagagaattcaactgcaatgtgcagacattatctgaaaatgtggtttg

SEQ ID NO: 21741 - DNA, 80 bp, synthetic construct
  source 1..80: mol_type = other DNA
tctctactatcacattcactaagattgtttctcccagtgagatggttatgttagggtgctctctctctcgactttaaagt

SEQ ID NO: 21742 - DNA, 80 bp, synthetic construct
  source 1..80: mol_type = other DNA
cactttctctaatcacttcttccttctctttaagccactggacaaaaataggctgggcgccttctatggatgcttgtaat

SEQ ID NO: 21743 - DNA, 80 bp, synthetic construct
  source 1..80: mol_type = other DNA
cagacacttggaagtcatcacaacatccgtgatctaagtcttccatttcagcaaatgattactgcaataattgtcttaaa

SEQ ID NO: 21744 - DNA, 80 bp, synthetic construct
  source 1..80: mol_type = other DNA
cacaagcaacatcgtagtacaagagtcgctaccaacatcattggtaacatggcaagtatactgtccagtcttagaagcat

SEQ ID NO: 21745 - DNA, 80 bp, synthetic construct
  source 1..80: mol_type = other DNA
caccttgaaagtgtactgaccgctgtcctgcttcattactgactgaattctaaaactggccacgttattttcaaaactca

SEQ ID NO: 21746 - DNA, 80 bp, synthetic construct
  source 1..80: mol_type = other DNA
acgtcactatattttactacctccacaggcttcagctctctgataaaggtggggggttctaaagattcaaaaggaagaca

SEQ ID NO: 21747 - DNA, 80 bp, synthetic construct
  source 1..80: mol_type = other DNA
gtaagttcttgataagtggaaataaaatttgccaacctttgactgtcagatgcccactgcattggttgtgccctgcctta

SEQ ID NO: 21748 - DNA, 80 bp, synthetic construct
  source 1..80: mol_type = other DNA
ccagggtcagttcttggccatctttaaaccatttggctgtaatctccttagtccctgaaaatttaacctgcaaagtggct

SEQ ID NO: 21749 - DNA, 80 bp, synthetic construct
  source 1..80: mol_type = other DNA
atttgcaaaccatgttattttaattggaggggtaccagttactttgcaggctagctgggtggcatctcccttctttaaca

SEQ ID NO: 21750 - DNA, 80 bp, synthetic construct
  source 1..80: mol_type = other DNA
gcaatgtctcgatctgtgtgttgcacaagaagggagaaaaggtcaatatagaagagtgctcagtgattgactttaggcca

SEQ ID NO: 21751 - DNA, 80 bp, synthetic construct
  source 1..80: mol_type = other DNA
agggtaacggtttgtcctcctagtgcaatcaaatcatctactttctttacaaaggttggaggttctagttaaggaaagag

SEQ ID NO: 21752 - DNA, 80 bp, synthetic construct
  source 1..80: mol_type = other DNA
cattcactgcttcacatgagtaactcccactgtcttcaacttttacatccgtaatatcaagtatagcctcagaattgaca

SEQ ID NO: 21753 - DNA, 80 bp, synthetic construct
  source 1..80: mol_type = other DNA
tcaatgatgatcaactctgcttggcagatgtctgctccaaacttgttggaagccttacaagaataaactcctctatcttg

SEQ ID NO: 21754 - DNA, 80 bp, synthetic construct
  source 1..80: mol_type = other DNA
ttaagtgataagaagattgaagtagttttgtaatgtctttctaaccctcatgtcaactgcctggaaattcttatatggct

SEQ ID NO: 21755 - DNA, 80 bp, synthetic construct
  source 1..80: mol_type = other DNA
cgtgcccagccgtcttatttttaaattagtaaaaatgcctagagagaatcctagttttcagtcctatactagctccctgt

SEQ ID NO: 21756 - DNA, 80 bp, synthetic construct
  source 1..80: mol_type = other DNA
gtgagatggattacagcagtttaaggcaagtgactggaaaatgagaaagatcattgaaggcaaaagaagacaataagctt

SEQ ID NO: 21757 - DNA, 80 bp, synthetic construct
  source 1..80: mol_type = other DNA
cattcaaggcctcacagacatactctccttgatggtcttcggtatttactttgtcgatgactagcgtatatgtattttga

SEQ ID NO: 21758 - DNA, 80 bp, synthetic construct
  source 1..80: mol_type = other DNA
cccggcagatttgaattttcaggtttaatctctgctcttctggaataccagaaagcaagctttccttagaaagaaggtcc

SEQ ID NO: 21759 - DNA, 80 bp, synthetic construct
  source 1..80: mol_type = other DNA
gagggtcattgacaatgaaagttccagagccattagggttatgaatgatagtgtaataaacactggtgcaaagctgcttg

SEQ ID NO: 21760 - DNA, 80 bp, synthetic construct
  source 1..80: mol_type = other DNA
ttcggcgctatgaagtccttcttcctcggcagacagaaaagaactagaaaactctgtatggggaaaaatgattattattt

SEQ ID NO: 21761 - DNA, 80 bp, synthetic construct
  source 1..80: mol_type = other DNA
tttctgttctagcatataagcattagaagacaggactcaagtgtctgctggctgtaaaaatactggagaaactcatctat

SEQ ID NO: 21762 - DNA, 80 bp, synthetic construct
  source 1..80: mol_type = other DNA
gttatggtggctcaaacagataattcaaaattttttttgtgagggaggcaggggaggcctggctgctctgcctattttct

SEQ ID NO: 21763 - DNA, 80 bp, synthetic construct
  source 1..80: mol_type = other DNA
ttgcttattttgcaaatgtctaggtgaaccctgcccacaaagagcacaattggtcccttgaagccagtgagaattaaagc

SEQ ID NO: 21764 - DNA, 80 bp, synthetic construct
  source 1..80: mol_type = other DNA
attcacagctctgcacctgtatgttgcactatcagaaagacagacatttcgaattttaagagtgtgacttcccttctcct

SEQ ID NO: 21765 - DNA, 80 bp, synthetic construct
  source 1..80: mol_type = other DNA
ctacatttgcaaagctctttgcttcccctatgatgtttacagcatgacacatgtactctcccccttctcctttttgaatg

SEQ ID NO: 21766 - DNA, 80 bp, synthetic construct
  source 1..80: mol_type = other DNA
gtggggtataaaactgatctaactcagatatttcttcactggttgtacttcccacaccaatggaaatgtcagactcagga

SEQ ID NO: 21767 - DNA, 80 bp, synthetic construct
  source 1..80: mol_type = other DNA
ccagagctggatctcctatatgagaatacatttgttttagatcaaatacaatgttctcagtgtcagcaggatgttggatt

SEQ ID NO: 21768 - DNA, 80 bp, synthetic construct
  source 1..80: mol_type = other DNA
cacaaatctgggaattttttctctagaaggtatgcaacgcacctgctctttctggtctatttgctcaatagtctcaaggc

SEQ ID NO: 21769 - DNA, 80 bp, synthetic construct
  source 1..80: mol_type = other DNA
ttctgtgtctccagagggaggaactggtgggttagtttttaacaaatgaagatttgtttggccctcttgactcatagatg

SEQ ID NO: 21770 - DNA, 80 bp, synthetic construct
  source 1..80: mol_type = other DNA
tttttctagcctcccttaaacgttgcaacttcactttggtctccttgtccaggaaactttcacctacattaagccaacct

SEQ ID NO: 21771 - DNA, 80 bp, synthetic construct
  source 1..80: mol_type = other DNA
ggagcttgtagatgatattctacttgcatatcttttagcagccatggatttgtggtctatgtcttcagaatctgaaaagg

SEQ ID NO: 21772 - DNA, 80 bp, synthetic construct
  source 1..80: mol_type = other DNA
gatgacaacttctcctaatatacacttttggaaatgactgcaaacataaagttgaatttggctgataaattttaaataca

SEQ ID NO: 21773 - DNA, 80 bp, synthetic construct
  source 1..80: mol_type = other DNA
agtcttcagtccacgtggtatcctgtcagtagactttattcccttgttctcagtttcttacggtttttggcatgaagtta

SEQ ID NO: 21774 - DNA, 80 bp, synthetic construct
  source 1..80: mol_type = other DNA
tcacctacaggacttgtagacaacacctccaaataaatagtgactctgtgtgattactgtgctagccagcagctgtagtg

SEQ ID NO: 21775 - DNA, 80 bp, synthetic construct
  source 1..80: mol_type = other DNA
cagatgtgaaaataaagaggagataagaattgttgaacctcttgctattaaaacaattaaactgaaatttaccacagtat

SEQ ID NO: 21776 - DNA, 80 bp, synthetic construct
  source 1..80: mol_type = other DNA
gtggactctttagcacattccttagatagctcagtgctttctgcaatttgtgaaagggatgcagtatggcacaactgtgt

SEQ ID NO: 21777 - DNA, 80 bp, synthetic construct
  source 1..80: mol_type = other DNA
gttatggactgaccacagtatgcaataaaacaaacagcagagactctcattagtaacagtgggactgagaggtatacagc

SEQ ID NO: 21778 - DNA, 80 bp, synthetic construct
  source 1..80: mol_type = other DNA
attcttgagaggaggatgaatatagctcgctggtgtacagacctgaaacggtctagcttttgtgaaatcaaaattgtgtc

SEQ ID NO: 21779 - DNA, 80 bp, synthetic construct
  source 1..80: mol_type = other DNA
tgggcttgtagttgccttctgggacaggaaatgagaaaaatctccacttttggtttgcagaaaaatcaatcaaaaagaga

SEQ ID NO: 21780 - DNA, 80 bp, synthetic construct
  source 1..80: mol_type = other DNA
tccatcaaaatatatacatataaagaaaatgaaatcttgacactacaacttgtcagctgtgtggccttggaaatgtcatt

SEQ ID NO: 21781 - DNA, 80 bp, synthetic construct
  source 1..80: mol_type = other DNA
aaaccacttgcttctagcacatgaagcattattgcaagttttgatgacttggagatgttgttttctcatcataggatgcc

SEQ ID NO: 21782 - DNA, 80 bp, synthetic construct
  source 1..80: mol_type = other DNA
cttaaggcaatacctggccagaggaagttctgtaaatatttttagtcccagtggtatgaaactatgtgagttggcaagtt

SEQ ID NO: 21783 - DNA, 80 bp, synthetic construct
  source 1..80: mol_type = other DNA
agttatgacttgaagtggttccacatatattgtctcattctaccaagatcagattcctgggatgaggaaattggctggtg

SEQ ID NO: 21784 - DNA, 80 bp, synthetic construct
  source 1..80: mol_type = other DNA
gacagaatgtttttcccatgtaattatttgtaagtattggcaatgacaccttttgttcttaaacctacctgttccagaaa

SEQ ID NO: 21785 - DNA, 80 bp, synthetic construct
  source 1..80: mol_type = other DNA
cagaacttggggcggttcaggagctaggagtaaatgttgacaaatagcccatgaaaaagtgtaaaaacacaagagagcat

SEQ ID NO: 21786 - DNA, 80 bp, synthetic construct
  source 1..80: mol_type = other DNA
ggttccatttttctcttgcatctaggttagactcaaaacaaggtcagcttgagattcagccttaagatttctaatgagga

SEQ ID NO: 21787 - DNA, 80 bp, synthetic construct
  source 1..80: mol_type = other DNA
cagctgcatggaggaaaggagctgccccaaagagacaattatttcatccttaaatgtttgcttcttatttactaataagg

SEQ ID NO: 21788 - DNA, 80 bp, synthetic construct
  source 1..80: mol_type = other DNA
tagacaatacctgaacctcctttttaatacttcggatgcgaacatctctgccttctacaaagagttttgcagttgacacg

SEQ ID NO: 21789 - DNA, 80 bp, synthetic construct
  source 1..80: mol_type = other DNA
ccaaggacttttctattgtctcccctgtagacctaagcaaccaccaatctacatctctatagatttgtgtatcttggaca

SEQ ID NO: 21790 - DNA, 80 bp, synthetic construct
  source 1..80: mol_type = other DNA
ccaccctgcccacccaatcaaggatttttgagtggtcagcaaagtgtaggatatagaatatcaatgaatctactgaatat

SEQ ID NO: 21791 - DNA, 80 bp, synthetic construct
  source 1..80: mol_type = other DNA
tggaacagtgtcatgggaaacactaacttcaaaggcaacagtggcattttccaaggctgtcacatcctttggctttttaa

SEQ ID NO: 21792 - DNA, 80 bp, synthetic construct
  source 1..80: mol_type = other DNA
cagatgttttggaggtggccaccttgtaggtatattctccaatgtcatctaatttggtggcagcaatgataagtctcctt

SEQ ID NO: 21793 - DNA, 80 bp, synthetic construct
  source 1..80: mol_type = other DNA
caatggtaggtactttaaaaacactgggtgaaatcacagaggagttcatagtttattcctgtttccacacatttaaaaca

SEQ ID NO: 21794 - DNA, 80 bp, synthetic construct
  source 1..80: mol_type = other DNA
atcactcctcgtaagaatttaggttaataaatataccaacctgccacagtaagttttccagatgtcatattttctcccgc

SEQ ID NO: 21795 - DNA, 80 bp, synthetic construct
  source 1..80: mol_type = other DNA
tcctccttggttacatccttgaccgtgaggttctgacgtccacgacgagatgtaattgtatatttgccattggatttaag

SEQ ID NO: 21796 - DNA, 80 bp, synthetic construct
  source 1..80: mol_type = other DNA
gacattttcatcttccacaagtacacagctgtaatcttcagcatcagacgtatcaatggtcagtatggagaggaagtgaa

SEQ ID NO: 21797 - DNA, 80 bp, synthetic construct
  source 1..80: mol_type = other DNA
tgcgcagctcttccgactcttcaggcactttttcatgggtaattctttcagcccttttcaacttcacaacttctttggtt

SEQ ID NO: 21798 - DNA, 80 bp, synthetic construct
  source 1..80: mol_type = other DNA
gaaaaatggtttctgttgtttctctttgtcatagagatcaccttcttcccattgctcttggccatatcgcaaatggaggg

SEQ ID NO: 21799 - DNA, 80 bp, synthetic construct
  source 1..80: mol_type = other DNA
ctgctcactgaacgtggagagagagatctgcaaaacaaagacacacaatactttcgtgaggcataaagaaaactcagcaa

SEQ ID NO: 21800 - DNA, 80 bp, synthetic construct
  source 1..80: mol_type = other DNA
aaaacaatttacatactaaataacccaaattattacaagtcttacctgattctgctcactggctctagtgtgggaatgta

SEQ ID NO: 21801 - DNA, 80 bp, synthetic construct
  source 1..80: mol_type = other DNA
aagtttttagctgggagaagaatctagaggactttttggtttgtttgttttaatctgcattatggtcatctttcccagtg

SEQ ID NO: 21802 - DNA, 80 bp, synthetic construct
  source 1..80: mol_type = other DNA
aatccaaccagccattacaattgtagaaagaattttatattagcagtcagttttggggggatctaccacggaggacttcc

SEQ ID NO: 21803 - DNA, 80 bp, synthetic construct
  source 1..80: mol_type = other DNA
ttctgtgggtaaaataattggacttatctgtgagtggatctgtggtataaaattcaatgaccctaaacatatgactaagc

SEQ ID NO: 21804 - DNA, 80 bp, synthetic construct
  source 1..80: mol_type = other DNA
tctatattcagccatcaaaatacctgtatccagtggttagaggaacaccagattttttccagtatacatggggctttggg

SEQ ID NO: 21805 - DNA, 80 bp, synthetic construct
  source 1..80: mol_type = other DNA
ttatgcatttcaactgccacaaaatggccttttaatcaggactccagaaatagtagtagagaaactaatatttatataat

SEQ ID NO: 21806 - DNA, 80 bp, synthetic construct
  source 1..80: mol_type = other DNA
ttcacctcaacgccagcttcactcttgtaagtatctggtgtgtcagcgaaggggaactgtggcaagggtgtgggctctgc

SEQ ID NO: 21807 - DNA, 80 bp, synthetic construct
  source 1..80: mol_type = other DNA
ctaatccagagctatttgattccacaatccaacccgaccaccatacagtaccacctctccatcttgctatattgagtata

SEQ ID NO: 21808 - DNA, 80 bp, synthetic construct
  source 1..80: mol_type = other DNA
tgctacagcttcagccttttttccaacgtccacctggagacaaggtttccagaattaatacataggaatatcgagatcag

SEQ ID NO: 21809 - DNA, 80 bp, synthetic construct
  source 1..80: mol_type = other DNA
gagatttttctgagatggaattgggtctttagtgatcatgggctttatccagggcttccttttaggaagacacaaacaat

SEQ ID NO: 21810 - DNA, 80 bp, synthetic construct
  source 1..80: mol_type = other DNA
ttctcgaaaaagatgtatttgtttttgtttaatagtgaatccttctctagtcattggcggtgtggctggttcagcagatt

SEQ ID NO: 21811 - DNA, 80 bp, synthetic construct
  source 1..80: mol_type = other DNA
gtattaatgtattataataggggatttcacacttggaacaacaatagtcacctttccatgggtaacttggatttgttctt

SEQ ID NO: 21812 - DNA, 80 bp, synthetic construct
  source 1..80: mol_type = other DNA
acctcttgatactaaatcttgttctttgactttgggtgtggcaactatgactttaggtacaactgttttcctagtttcct

SEQ ID NO: 21813 - DNA, 80 bp, synthetic construct
  source 1..80: mol_type = other DNA
cgataaaatgtcagatttccatttcaggggcctacacttgtgcttaatacatagactgctttcctgaggaatgggcttct

SEQ ID NO: 21814 - DNA, 80 bp, synthetic construct
  source 1..80: mol_type = other DNA
ggcatgatatctatcatccatttatgtatgttctagaaagttcatagatgtgccctaaactgttctgtagacaatctcct

SEQ ID NO: 21815 - DNA, 80 bp, synthetic construct
  source 1..80: mol_type = other DNA
tgcgtatgtagggggacagttttctctatttgcctctttgccattctcaaatatctcatcactgaaacacaggatctcaa

SEQ ID NO: 21816 - DNA, 80 bp, synthetic construct
  source 1..80: mol_type = other DNA
caaatgcgaggtgggacattatcctggatttatgacactgttccagctatgaatcaagtgtcatgtttgttttgagaaaa

SEQ ID NO: 21817 - DNA, 80 bp, synthetic construct
  source 1..80: mol_type = other DNA
cctccaatttatacagactgagtttcatggcagaaatccagttggagaaactagaatgtgaaataaggaaaaacaaaacc

SEQ ID NO: 21818 - DNA, 80 bp, synthetic construct
  source 1..80: mol_type = other DNA
ctgggggggttagaggatgtcaaataggtgttataagaagaaaggtttctgtaatcaaaatgcttgtgccactcttgact

SEQ ID NO: 21819 - DNA, 80 bp, synthetic construct
  source 1..80: mol_type = other DNA
ctgcctttgaaatataacaaaaaccaagttagaataatgtgtggtttccactaactgaagaaaagcaaagagacatgtgc

SEQ ID NO: 21820 - DNA, 80 bp, synthetic construct
  source 1..80: mol_type = other DNA
aattaatttgtggatgatttttaatgcatttagtgcatttattggttatttgtcgtaagtgttgcaaacattcccccaga

SEQ ID NO: 21821 - DNA, 80 bp, synthetic construct
  source 1..80: mol_type = other DNA
cttggatctctttctggactctctgttttgttcccctggtgtatttttctattcatttaccaataccatactgttctgat

SEQ ID NO: 21822 - DNA, 80 bp, synthetic construct
  source 1..80: mol_type = other DNA
tattcagtaacttcttggtttacctcctttgtcacctgctacatttttgagtgcatgaaacttacacgggaggagggcag

SEQ ID NO: 21823 - DNA, 80 bp, synthetic construct
  source 1..80: mol_type = other DNA
acctgtgggaagggaaagatgaatgtttgggagggggcacaatgacccattttaaaagagattctgttaattctgactac

SEQ ID NO: 21824 - DNA, 80 bp, synthetic construct
  source 1..80: mol_type = other DNA
gcaatgacagcaagaatgggagccaggagattacagaaggctttctcaccaccatattttattttatttgctttgttttg

SEQ ID NO: 21825 - DNA, 80 bp, synthetic construct
  source 1..80: mol_type = other DNA
tggttataaataattcagcctccagtagacccttctgtagtttaagagctgcatctacctctgcccatagctttttctgg

SEQ ID NO: 21826 - DNA, 80 bp, synthetic construct
  source 1..80: mol_type = other DNA
acaagtgcaatcagtaaaaacattgtaacatggacaagcaatttctcataagagactaatccaaacctagtcttccagaa

SEQ ID NO: 21827 - DNA, 80 bp, synthetic construct
  source 1..80: mol_type = other DNA
tgataccatgcatttttttgaaccatccataaactgagttatgaggaagaaaaagaaggcaaaaaagagatgaacttcct

SEQ ID NO: 21828 - DNA, 80 bp, synthetic construct
  source 1..80: mol_type = other DNA
gcttgagttgtcatctttctaggcactctgaaaaagaagagaaaataaattagggtgtcccagctaagggtcactctgga

SEQ ID NO: 21829 - DNA, 80 bp, synthetic construct
  source 1..80: mol_type = other DNA
agacggcatacggtgctttctatttcttaacatttcttcatactgtaactgtgcagtaaatgttgttactgctgaagtaa

SEQ ID NO: 21830 - DNA, 80 bp, synthetic construct
  source 1..80: mol_type = other DNA
gatcttacattcctattgtctaggtaaattttattgccttagcacttgctcttcacaggcctttgtctaactggggctga

SEQ ID NO: 21831 - DNA, 80 bp, synthetic construct
  source 1..80: mol_type = other DNA
cctgttcccttcccccataaaacaaaccaaatggacctgtcaatcatgacagcagatgaggaaatttatctcaagcataa

SEQ ID NO: 21832 - DNA, 80 bp, synthetic construct
  source 1..80: mol_type = other DNA
tacttaagtggtggtatctgtattggtggcaccatttccacccccatagatggcatctgctataattctatttgattgct

SEQ ID NO: 21833 - DNA, 80 bp, synthetic construct
  source 1..80: mol_type = other DNA
cagtggggaggagccacacagataatcccaaacagctgataattcaaatgtaatgcctacttaatttggaatgcatggca

SEQ ID NO: 21834 - DNA, 80 bp, synthetic construct
  source 1..80: mol_type = other DNA
ttgagttatagaggcggaaaaagctacactgggaatgtgggaggcaagaaattgttgcttacaatttaaaagacttattg

SEQ ID NO: 21835 - DNA, 80 bp, synthetic construct
  source 1..80: mol_type = other DNA
cttaaaaaagaaataagttggacttctgaaggcctgtggcaggaatctataaacctgattagatctaaccaccagcaaat

SEQ ID NO: 21836 - DNA, 80 bp, synthetic construct
  source 1..80: mol_type = other DNA
tcaatgtggaagctattgctggttattgttgttatttgaatagccctttctacacctttagccacacagttcctgcctgg

SEQ ID NO: 21837 - DNA, 80 bp, synthetic construct
  source 1..80: mol_type = other DNA
cctttttctcttctgctatgtgaggtcatagcaagaaggccttttctatgagaaaagtgcccttgttagatatacaatct

SEQ ID NO: 21838 - DNA, 80 bp, synthetic construct
  source 1..80: mol_type = other DNA
caggtccttatttctcacttattctattggatttagcctcttaaccgttcatttctgcctccaatccaagtccacctcaa

SEQ ID NO: 21839 - DNA, 80 bp, synthetic construct
  source 1..80: mol_type = other DNA
aataaagaaaaaaaaaaagaacaagagattaagacaaaacaggaacagaggaaaggccatgtggagacaggaggaagatg

SEQ ID NO: 21840 - DNA, 80 bp, synthetic construct
  source 1..80: mol_type = other DNA
taagtttaaaaaacagtaagctttgaaaaagataaaagtaagtcctggcatccagaagctggcctttgtaataaatgatg

SEQ ID NO: 21841 - DNA, 80 bp, synthetic construct
  source 1..80: mol_type = other DNA
aataaaacaataactttaaacgtggctcctgggtggtagaccaggctcattccctgagtaaatcattggttttcatattc

SEQ ID NO: 21842 - DNA, 80 bp, synthetic construct
  source 1..80: mol_type = other DNA
taagatacacatgtgtaatattttcgttctctttttctttatctcttttctatttctctctccctcctcccttccttcct

SEQ ID NO: 21843 - DNA, 80 bp, synthetic construct
  source 1..80: mol_type = other DNA
tttgtaaaggcgacttttatcaagactcttgaatagagtcatcttgtgaaattccactttcctcacatataagggagaaa

SEQ ID NO: 21844 - DNA, 80 bp, synthetic construct
  source 1..80: mol_type = other DNA
atcctacagtgtataggacaaccccccaaacacacagaattatctagtcccaaatgtcaaccttgtatcaaggttgaaaa

SEQ ID NO: 21845 - DNA, 80 bp, synthetic construct
  source 1..80: mol_type = other DNA
tggtgtgtttttttaaggttgggggaggggttgtagttactcagacaagattctgataagttcacgctcagggtggtttt

SEQ ID NO: 21846 - DNA, 80 bp, synthetic construct
  source 1..80: mol_type = other DNA
ttcccagttatttcatcactcaacaaagccacaactgcatgaaagggctttaagcctgggacttttgggggtgaataaga

SEQ ID NO: 21847 - DNA, 80 bp, synthetic construct
  source 1..80: mol_type = other DNA
ataattcacaggcaaggaacatgagggtcaaagattttagtggcctaaatcctcagagttcttctgtagcaaagctagga

SEQ ID NO: 21848 - DNA, 80 bp, synthetic construct
  source 1..80: mol_type = other DNA
agtaacattttaagaggagtaatacagaatactccaattctttaaaacaagtgctcccttctctatgaatacaagattga

SEQ ID NO: 21849 - DNA, 80 bp, synthetic construct
  source 1..80: mol_type = other DNA
agtctgtttgagccaacctgcaaagtttcagattggtggaaaaagaaatatttctccatgtgtccacatatgaaaaggaa

SEQ ID NO: 21850 - DNA, 80 bp, synthetic construct
  source 1..80: mol_type = other DNA
gctaatggcactggcgccattagcatgaggtgtttttctaacctgatcacatcatatatcacctgggcattttatgtatt

SEQ ID NO: 21851 - DNA, 80 bp, synthetic construct
  source 1..80: mol_type = other DNA
gtactttgtatatccatttataagtcctggatggggtctttacagtgctctactgtttatactactatatttacaaggcc

SEQ ID NO: 21852 - DNA, 80 bp, synthetic construct
  source 1..80: mol_type = other DNA
tgacatgtcgcaactagatttcaggtttccataatgtctgcaaccaacatatggaaaaggggcaatttcttacagcctgc

SEQ ID NO: 21853 - DNA, 80 bp, synthetic construct
  source 1..80: mol_type = other DNA
ctctcgtttttaagttttcttttattctgcttgctataggcttaaaccacttttctttctctagtttcctaaggtgacag

SEQ ID NO: 21854 - DNA, 80 bp, synthetic construct
  source 1..80: mol_type = other DNA
gaagatgaaaagttactgatggactgaaatgtactagggtgatcccttcaaatcagcaaggaagctgaggtattctagca

SEQ ID NO: 21855 - DNA, 80 bp, synthetic construct
  source 1..80: mol_type = other DNA
aatgaataaaaatgcattttaaaaggcaccttctggagctgcattcacttgaatcaaaggctgaccctgcagggttggca

SEQ ID NO: 21856 - DNA, 80 bp, synthetic construct
  source 1..80: mol_type = other DNA
aaaaaggccaaaatcacagctgtgtgcttcctgtttttgaggttgaattcatgcacaactgataacattcaaatctcatc

SEQ ID NO: 21857 - DNA, 80 bp, synthetic construct
  source 1..80: mol_type = other DNA
tcccctctcctccctctaaaaaggggagaaaaacaagctaggtttatctttgtttacctttggcaacaattcaattcaaa

SEQ ID NO: 21858 - DNA, 80 bp, synthetic construct
  source 1..80: mol_type = other DNA
tctcttgatcctggtctcaccatgtgatacacccacttcgccttccgccaataattggaagcttcctgaggccctcacca

SEQ ID NO: 21859 - DNA, 80 bp, synthetic construct
  source 1..80: mol_type = other DNA
tgggaccagactctttatgcagtaaagagccacagacaattgtgagcaagacaccttataaccaggttttagaaagaatc

SEQ ID NO: 21860 - DNA, 80 bp, synthetic construct
  source 1..80: mol_type = other DNA
aaaaggtgagaagggaggagaaagtaaggattgaaaaattacctcttgggtacaacgttcactgttccggtgatgggtac

SEQ ID NO: 21861 - DNA, 80 bp, synthetic construct
  source 1..80: mol_type = other DNA
tcctttatgaaactgtgaaagctccgagccaaaagctttgtctttcttcattcttgcatctttagtacatatcacaatgc

SEQ ID NO: 21862 - DNA, 80 bp, synthetic construct
  source 1..80: mol_type = other DNA
tatgttttcattgctctggggcaaatacctaaattgctgggtcatggggtaaatgtatgtgtagacattttttagaagct

SEQ ID NO: 21863 - DNA, 80 bp, synthetic construct
  source 1..80: mol_type = other DNA
cataatctggagcactctaaggaagggtagaaaaatccatgttcttgctagtacaggacttagagtcttaaaaattagag

SEQ ID NO: 21864 - DNA, 80 bp, synthetic construct
  source 1..80: mol_type = other DNA
cagtggcctctgttactcaagggttcttaccccagtcaaagggtgttctactgcaagtagttcttaagagagaaaattca

SEQ ID NO: 21865 - DNA, 80 bp, synthetic construct
  source 1..80: mol_type = other DNA
cttagcaactgggtaacaaatggaggttggcaaagcccagctgattagcattcttttttagtcaaaagatcagagttatc

SEQ ID NO: 21866 - DNA, 80 bp, synthetic construct
  source 1..80: mol_type = other DNA
cctgccatctagtggcaaaatgagacaaaaagaacaccaaactgtaccagcatccttgtatctataaggaggagaacaag

SEQ ID NO: 21867 - DNA, 80 bp, synthetic construct
  source 1..80: mol_type = other DNA
catcaatagaggcaaaacatcaggggccttgaaattcagcagcaagtctcagcatattggtccaaaggacaagtgcaatt

SEQ ID NO: 21868 - DNA, 80 bp, synthetic construct
  source 1..80: mol_type = other DNA
tttaggatccatagagggaagggattctgaaaaacacagttcctaacatagccagaggtgactgtggaacaatccagcac

SEQ ID NO: 21869 - DNA, 80 bp, synthetic construct
  source 1..80: mol_type = other DNA
cctctcatgccagatgatcaagccactcttgggcctgatacatttttaacatttccagttttgcaagggattcactgctt

SEQ ID NO: 21870 - DNA, 80 bp, synthetic construct
  source 1..80: mol_type = other DNA
ctacatgctaaatgctgtcattatcaatatagagaatgtagttaaacttccacagtgggcacaggtgaagatttcactgc

SEQ ID NO: 21871 - DNA, 80 bp, synthetic construct
  source 1..80: mol_type = other DNA
ttaaaaagagcctggcaccagccctttctctcctgctccctcgctggccatgggatctctgcacacaccagctccccttc

SEQ ID NO: 21872 - DNA, 80 bp, synthetic construct
  source 1..80: mol_type = other DNA
ttttattgaggcaattaaaagttagaagagaagaaatggctgtgtaaaaataggagcagatagaaaatgagaatggccgg

SEQ ID NO: 21873 - DNA, 80 bp, synthetic construct
  source 1..80: mol_type = other DNA
aggaagcattagctcagagaaatgagaaatctctgtatgtagtagatgatgcaaaccatgctaaaataaacacatataat

SEQ ID NO: 21874 - DNA, 80 bp, synthetic construct
  source 1..80: mol_type = other DNA
tcaggtggaagatttgaggagatacaaggataaaggggataaatagtatataggagacaaagaacaagacttggctgaaa

SEQ ID NO: 21875 - DNA, 80 bp, synthetic construct
  source 1..80: mol_type = other DNA
tcaagccctagactgaaggaacacatgaagtaaaattgatggctttgaatggaaaatcccagccaagaatccaaccgaac

SEQ ID NO: 21876 - DNA, 80 bp, synthetic construct
  source 1..80: mol_type = other DNA
ggtttcgagtatataacctttgttcctgacacactctccaaacaggaggcttcacttgctcaaggacagttatgctagac

SEQ ID NO: 21877 - DNA, 80 bp, synthetic construct
  source 1..80: mol_type = other DNA
aacttcaatgtcatattagaacattttggaactactgatccatacatgaatgctgttcctctcctcattcacagtcaggt

SEQ ID NO: 21878 - DNA, 80 bp, synthetic construct
  source 1..80: mol_type = other DNA
gcatagttaggaaaggtggggaccaagtttcatatttcatggtattaacagacacaacaaaactctctttccttgaccca

SEQ ID NO: 21879 - DNA, 80 bp, synthetic construct
  source 1..80: mol_type = other DNA
tgcacagacatgttccacttactcactcatgtaaacttcttaaaaactcggcaatgaattaccatatggagctccaagta

SEQ ID NO: 21880 - DNA, 80 bp, synthetic construct
  source 1..80: mol_type = other DNA
atggcccaacctcactcctggttattagttgcatctaagacaatggctttcaaactttagcatcagaatcatctggaggg

SEQ ID NO: 21881 - DNA, 80 bp, synthetic construct
  source 1..80: mol_type = other DNA
actgttctcgcggtagtgaataagtctcatgagatctggttttataagaggtttcccctttcccttggctctcattctct

SEQ ID NO: 21882 - DNA, 80 bp, synthetic construct
  source 1..80: mol_type = other DNA
gtgaactccaaatgctatacttgaactcacatgctgaatctccatctccaacctgatttcctccaagctccatctcctag

SEQ ID NO: 21883 - DNA, 80 bp, synthetic construct
  source 1..80: mol_type = other DNA
ccatatgattaacagggaaggtttgcattcagttggcagttgtggaaacagaaagtaagagatgagggaaatattttgga

SEQ ID NO: 21884 - DNA, 80 bp, synthetic construct
  source 1..80: mol_type = other DNA
ataagggttatacatgaattaaatgaatgttttgagggcacgatcaagaccacgttgttgcttttcccttaagcaagctt

SEQ ID NO: 21885 - DNA, 80 bp, synthetic construct
  source 1..80: mol_type = other DNA
ggaggctcagaatcacagtttcattagaaatctcagaaacggactcactaaccaagctcacaaatgctaaagcataagta

SEQ ID NO: 21886 - DNA, 80 bp, synthetic construct
  source 1..80: mol_type = other DNA
tttgtataaagatgtaatttttttctcatccagtaatcacaggtttcctgaattctgctcacagacatcaaggatctgtg

SEQ ID NO: 21887 - DNA, 80 bp, synthetic construct
  source 1..80: mol_type = other DNA
tggggttccccacctcatgaggtagagtgctctatgggtaataaccctgaattactagataggtttatgttcttacttac

SEQ ID NO: 21888 - DNA, 80 bp, synthetic construct
  source 1..80: mol_type = other DNA
ctaggttctggattttcctccattcctagtgccacagcactcatgccattaatttcttcttccatccccatcaacttgaa

SEQ ID NO: 21889 - DNA, 80 bp, synthetic construct
  source 1..80: mol_type = other DNA
atttctgcatagcattccatggtgtgtgtatgccacattttctttattcaatttatcattgatgggcatttgggttgatt

SEQ ID NO: 21890 - DNA, 80 bp, synthetic construct
  source 1..80: mol_type = other DNA
cggggggaaggcggggggtggataaaagaagcccaaaggaaacctgccaaatagattcttttaaaaaataccttaaaaat

SEQ ID NO: 21891 - DNA, 80 bp, synthetic construct
  source 1..80: mol_type = other DNA
atttgcttaccattaatcaaacccccgaggcttattcacctcaaggggagctgacaaagttgaattattcaacctgcaaa

SEQ ID NO: 21892 - DNA, 80 bp, synthetic construct
  source 1..80: mol_type = other DNA
cacctaaaacactacaagcttcttctcccagagctctcactttgactccagactacctacatttaatctttaattctcta

SEQ ID NO: 21893 - DNA, 80 bp, synthetic construct
  source 1..80: mol_type = other DNA
tcattttagattattgtggccaacagatcacagtgggtagtgttatgacgaagggagggtcacagttactacagttacag

SEQ ID NO: 21894 - DNA, 80 bp, synthetic construct
  source 1..80: mol_type = other DNA
tacaagagatgattcttagtttcaacagggtgcagtgctgaaacgcgtgcacagtagattttgcttcggttatgaaagaa

SEQ ID NO: 21895 - DNA, 80 bp, synthetic construct
  source 1..80: mol_type = other DNA
acttgtattaataagtcggccaggaggaaaagaatctgctgtcaatcatggcttctggttctcacagtcatctctacttt

SEQ ID NO: 21896 - DNA, 80 bp, synthetic construct
  source 1..80: mol_type = other DNA
atgcatagaaatatgtgagggaggaaaaaattacccccaagaatgttagtgcacgcagtcacacagggagaagactattt

SEQ ID NO: 21897 - DNA, 80 bp, synthetic construct
  source 1..80: mol_type = other DNA
ctgtgttatactgagtagggaagctcattaattgtcgacacttacgttcctgataatgggatcagtgtgtaattcttgtt

SEQ ID NO: 21898 - DNA, 80 bp, synthetic construct
  source 1..80: mol_type = other DNA
aggcatctgtctgtagttaatatggatcacccaaaacccaaggcttttgcctaatgaacactttggggcacctactgtgt

SEQ ID NO: 21899 - DNA, 80 bp, synthetic construct
  source 1..80: mol_type = other DNA
tggagaagtgcagagttagaacagctgtggccacttgcatccaatcatcaatcttgaatcacagggactctttcttaagt

SEQ ID NO: 21900 - DNA, 80 bp, synthetic construct
  source 1..80: mol_type = other DNA
tttgtagaagggatatacaaagtggaaatagacaccaaatcttactggaaggcacttggcatctccccattccatgagca

SEQ ID NO: 21901 - DNA, 80 bp, synthetic construct
  source 1..80: mol_type = other DNA
caaacagttatacatggacccagtccccctgccttctccttaatttcttaagtcatttgaaacagatggctgtcatggaa

SEQ ID NO: 21902 - DNA, 80 bp, synthetic construct
  source 1..80: mol_type = other DNA
ggtggtcatagtagatttaccaagggaaaatggaaacttttattaggagctcttaggcctcttcacttcatggatttttt

SEQ ID NO: 21903 - DNA, 80 bp, synthetic construct
  source 1..80: mol_type = other DNA
acaggagacttgccttcctactatggttccatcagaatgtagactgggacaatacaataattcaagtctggtttgctcat

SEQ ID NO: 21904 - DNA, 80 bp, synthetic construct
  source 1..80: mol_type = other DNA
cagtggacctgaaggacgagggatgggatttcatgtaaccaagagtattccatttttactaaagcagtgttttcacctca

SEQ ID NO: 21905 - DNA, 80 bp, synthetic construct
  source 1..80: mol_type = other DNA
tgagacctggagtcttgggagaggatgcttaaaaggtgattttacccctaggaatatgggggcactgaaatttttttttt

SEQ ID NO: 21906 - DNA, 80 bp, synthetic construct
  source 1..80: mol_type = other DNA
caaggatcccgatctttcttccttgagggtggtgtacttaatacacttttacaccagacttctaatgttagatgaagaac

SEQ ID NO: 21907 - DNA, 80 bp, synthetic construct
  source 1..80: mol_type = other DNA
gtgctgcacccatagagacctcgtcttaaaaaaagaaaataacattacttttgaaggtacttaatgcactgaattgtaca

SEQ ID NO: 21908 - DNA, 80 bp, synthetic construct
  source 1..80: mol_type = other DNA
agcactgatttgagaagtcagtggctttttctctttagtttgcagggtttgctgtgatttgtaatcacgtacttgaccta

SEQ ID NO: 21909 - DNA, 80 bp, synthetic construct
  source 1..80: mol_type = other DNA
gaagtgatgtatttgtacgttatgtgttaaaggtgttatggtgtctcaaaagcactttgggctcttaagagacaagcgaa

SEQ ID NO: 21910 - DNA, 80 bp, synthetic construct
  source 1..80: mol_type = other DNA
atcagggtaaaccctaataaactgatgttcctgtgggtaaaaaaaacctcactaaagaccagcagtgtgtggtggctcct

SEQ ID NO: 21911 - DNA, 80 bp, synthetic construct
  source 1..80: mol_type = other DNA
aaatttgccttatagaataccctcgagtacgtttccagtgagtgtaaaataggaattgggatacccaattcagttgtact

SEQ ID NO: 21912 - DNA, 80 bp, synthetic construct
  source 1..80: mol_type = other DNA
cagcccaccattttatttgttcataattctgtagtccaggctgggctcagctaggcagttactctgctggtggtagtcgt

SEQ ID NO: 21913 - DNA, 80 bp, synthetic construct
  source 1..80: mol_type = other DNA
tttctttaacctaaagtgagatccatcagtagtacaggtagttgttggcaaagcctcttgttcgttccttgtactgagac

SEQ ID NO: 21914 - DNA, 80 bp, synthetic construct
  source 1..80: mol_type = other DNA
atttttgttggggggtgggagaggggaccttaaaatgtgtacagtgaacaaatgtcttaaagggaatcatttttgtagga

SEQ ID NO: 21915 - DNA, 80 bp, synthetic construct
  source 1..80: mol_type = other DNA
atgtttgtgggtatttcttggcatgcatctttaattccttatcctagcctttgggcacaattcctgtgctcaaaaatgag

SEQ ID NO: 21916 - DNA, 80 bp, synthetic construct
  source 1..80: mol_type = other DNA
aaatcagagtgaagtgaatgagacactccagttttccttctactccgaatttcaactgattttagctcctcctttcaaca

SEQ ID NO: 21917 - DNA, 80 bp, synthetic construct
  source 1..80: mol_type = other DNA
acaccgtctcaaaaaaaaaaacaaaaaacaaaaattatccaggtgtggcggtgggcgcctgtgaggcaggcgaatctctt

SEQ ID NO: 21918 - DNA, 80 bp, synthetic construct
  source 1..80: mol_type = other DNA
atgcaggttacaattttaagtgttatcatcaatatcttgtaagatcaacacccagtgatgcatctagtacttatacagtc

SEQ ID NO: 21919 - DNA, 80 bp, synthetic construct
  source 1..80: mol_type = other DNA
tttttcttcagctgcttgaaatgcatgagctttaaaagttgcctggcagaactacatcctgctttccaggttagcagcct

SEQ ID NO: 21920 - DNA, 80 bp, synthetic construct
  source 1..80: mol_type = other DNA
agtgggagataaagaatgagtcaagttgggggaaatgtctgagcaattcataattaaggggaaaaacgtttgtttcagtc

SEQ ID NO: 21921 - DNA, 80 bp, synthetic construct
  source 1..80: mol_type = other DNA
cttggggagtgtgacagccgtgtcaaagggactataacactttgccaccgaattatgagctcaggactaagttaaagaag

SEQ ID NO: 21922 - DNA, 80 bp, synthetic construct
  source 1..80: mol_type = other DNA
tattaacgctctttccaaaggtagaaaatatgcaacaaaggtggtgctatttttattatgaatcacaccagccttgcaga

SEQ ID NO: 21923 - DNA, 80 bp, synthetic construct
  source 1..80: mol_type = other DNA
aataatgaaaaataaatgtgaagaaaagtttacgcacttgttttacctgtatgagtcctggtgtgggtcttcaggtggtc

SEQ ID NO: 21924 - DNA, 80 bp, synthetic construct
  source 1..80: mol_type = other DNA
tgtaaaatgggtccaataatccaacaactttaaaggatttatgaccttcacataaagggctcagcccagagcctggcata

SEQ ID NO: 21925 - DNA, 80 bp, synthetic construct
  source 1..80: mol_type = other DNA
tcttctgcaatgcctgcttggaaactgcatgggccaatttcccttccttccctcattacgacatttattccaggctgtct

SEQ ID NO: 21926 - DNA, 80 bp, synthetic construct
  source 1..80: mol_type = other DNA
gaaaatattgctctctttcaagggggactgtaggattgttaaataccaacctgccctcatcttctgcaaggaagagtttc

SEQ ID NO: 21927 - DNA, 80 bp, synthetic construct
  source 1..80: mol_type = other DNA
ttctttggaccatctcttctaaaatttcacaatgatcttgcccatcgacctcctaaaaccatctgatgactatattccca

SEQ ID NO: 21928 - DNA, 80 bp, synthetic construct
  source 1..80: mol_type = other DNA
tcatcactactgagcaaccagaagtggctgttgagatgaaacctacatgaaatggctgtcccagagcctctgcaaaagaa

SEQ ID NO: 21929 - DNA, 80 bp, synthetic construct
  source 1..80: mol_type = other DNA
ttgccctgcactgaaaggtcattttcttttttggaagaataaatgctgcagtgacatacaacacaacattgatgttaata

SEQ ID NO: 21930 - DNA, 80 bp, synthetic construct
  source 1..80: mol_type = other DNA
atgaaatggagagaataacagtacccacctcataagtgtgtattgcagatgaaatgaagggggaaaggccacaaatagac

SEQ ID NO: 21931 - DNA, 80 bp, synthetic construct
  source 1..80: mol_type = other DNA
aggtccaagcggttaattcaagcccaattagcttaaatacaaaagctgcacagcccgccctggagaagtcaaatggagca

SEQ ID NO: 21932 - DNA, 80 bp, synthetic construct
  source 1..80: mol_type = other DNA
aagcttcacgttaagtgcactgaatttgtcggcacctcatgactcagtttttaccagatagcaccaaaaaagtgatgacg

SEQ ID NO: 21933 - DNA, 80 bp, synthetic construct
  source 1..80: mol_type = other DNA
gccttgaactgggggagttgggaaggcaaagaaaatgactgctgaaaacgtcctaaaattgtggtaatggtcatacaact

SEQ ID NO: 21934 - DNA, 80 bp, synthetic construct
  source 1..80: mol_type = other DNA
caaagaacatatgcccttctgacccttagaatgtgtttgtcaggagaaagaggctgtgtctgccttcctttcaattactt

SEQ ID NO: 21935 - DNA, 80 bp, synthetic construct
  source 1..80: mol_type = other DNA
ttcccaatgtagtgtgcccagaacaccaagtacaacgtactggcatctgatgtggtagcaattctctctaaataagtttt

SEQ ID NO: 21936 - DNA, 80 bp, synthetic construct
  source 1..80: mol_type = other DNA
cagggagaagggatttatgagtccttggccaagatagtcaggaagatcacaggaattgacagcaaggtgtcatgaggcta

SEQ ID NO: 21937 - DNA, 80 bp, synthetic construct
  source 1..80: mol_type = other DNA
ctcaaatattcctataggggccaagtaagacaagtaaaatgaaggcgaccctaaagaatgagacgatattgaactcacag

SEQ ID NO: 21938 - DNA, 80 bp, synthetic construct
  source 1..80: mol_type = other DNA
ctcttttctccagcgggatgaatgaaattaggcatgctgaaggttttaaaggtgaactggggtagagggaaaggactagg

SEQ ID NO: 21939 - DNA, 80 bp, synthetic construct
  source 1..80: mol_type = other DNA
tcatataacacaaattgtgagccctcttcccgctaaaaacacgtacattgagatttggctcaggaaaaacaaaaaaacaa

SEQ ID NO: 21940 - DNA, 80 bp, synthetic construct
  source 1..80: mol_type = other DNA
aaaaaagaaacccaaatcgaatcaagcctctaggaaatacaggggaggccaggcgcggtggatcatgcctgtaatcccag

SEQ ID NO: 21941 - DNA, 80 bp, synthetic construct
  source 1..80: mol_type = other DNA
gaagtcactttcatatgcacttatcagatcttatttggggaatgaatagatactggattatccacattcagagctgctgg

SEQ ID NO: 21942 - DNA, 80 bp, synthetic construct
  source 1..80: mol_type = other DNA
cgagcctggcagaaagaactcttataaattaatattgttactagatgatctatcccagcttctggctaaagccagcccca

SEQ ID NO: 21943 - DNA, 80 bp, synthetic construct
  source 1..80: mol_type = other DNA
agatcaatgttcttctacctagaggttatgatcttttcttgggcagatgacaggcagaaggataaatggtgagtagaggg

SEQ ID NO: 21944 - DNA, 80 bp, synthetic construct
  source 1..80: mol_type = other DNA
cccattcttcgttctggttggcagggttaacagacctcaggccaagtccaatgcaaggcaataataaagaaaaaaaactc

SEQ ID NO: 21945 - DNA, 80 bp, synthetic construct
  source 1..80: mol_type = other DNA
gtttctccattttgcaggatattttcttcagaagagacaaaacagaggccaacagggtaggagaggcttgttcggaaatc

SEQ ID NO: 21946 - DNA, 80 bp, synthetic construct
  source 1..80: mol_type = other DNA
aaaagtgaggcaaactgtgggtcatgacacatcagtgggttgtaaaatcaatctagtacatcacaatcagcattttaaaa

SEQ ID NO: 21947 - DNA, 80 bp, synthetic construct
  source 1..80: mol_type = other DNA
acatatatattgtgtttgtttgttttgttttgttttgtggaagggtctcactctatcgcccaggctggaatgcagtggcc

SEQ ID NO: 21948 - DNA, 80 bp, synthetic construct
  source 1..80: mol_type = other DNA
ttcacaatcatgttctgtctatccttgctatttagcttggggaaggttatcaagttctgaggagaggagaaaggagaaaa

SEQ ID NO: 21949 - DNA, 80 bp, synthetic construct
  source 1..80: mol_type = other DNA
cataattttttacattgttttccaggggcatgttgatgagaaatgctactccctccattttgtccccagcatgtgtatga

SEQ ID NO: 21950 - DNA, 80 bp, synthetic construct
  source 1..80: mol_type = other DNA
tgttctatgctactgcccatctcttcacacttggtagaaaatgaaaagtgagctctttcaatggtgaaagcaagtcccac

SEQ ID NO: 21951 - DNA, 80 bp, synthetic construct
  source 1..80: mol_type = other DNA
gattatgagggtctgaaaagtcagagtgatgggtgataaatggtctaaaaagcaaggatgtgacaagcagaagaaagacg

SEQ ID NO: 21952 - DNA, 80 bp, synthetic construct
  source 1..80: mol_type = other DNA
aaatcatggcagagtccatctgactctcatataataactctgaaaattatttggaactccttagtggtgggtacacagga

SEQ ID NO: 21953 - DNA, 80 bp, synthetic construct
  source 1..80: mol_type = other DNA
ttggccctcagaaggcaaatcttctcaaatacaaggtctatgtcttacgtatatgactttttctagtgtgtactgtactg

SEQ ID NO: 21954 - DNA, 80 bp, synthetic construct
  source 1..80: mol_type = other DNA
aacaataatacagacaagagtctggaggtgaaagagaatatgctcaagggagcatcatgacctactcagtctctagaaaa

SEQ ID NO: 21955 - DNA, 80 bp, synthetic construct
  source 1..80: mol_type = other DNA
ttctcgacctctgcacaaaaagaaaggaagaaaaaaagcctcagctgttatctagatgagaactcctccactcttcaaac

SEQ ID NO: 21956 - DNA, 80 bp, synthetic construct
  source 1..80: mol_type = other DNA
gggaaagggctagaatgcctaaaagaaacaatcagtgtgcatgggaatatttttcaaacgcagtgcacagaacttttcaa

SEQ ID NO: 21957 - DNA, 80 bp, synthetic construct
  source 1..80: mol_type = other DNA
ggcagtgataacctgttgtgtccttcagagagtcactaggtagattaaataagtcaacacttgtaaagtgcttacagtgg

SEQ ID NO: 21958 - DNA, 80 bp, synthetic construct
  source 1..80: mol_type = other DNA
acctgcctcaacgagtagtcaaaagggttaaatgggtaaactgagtgaaccatttaacgtcatgcacagcaacatatagt

SEQ ID NO: 21959 - DNA, 80 bp, synthetic construct
  source 1..80: mol_type = other DNA
ctcagagggtcaaatgcaacaaggcaaacaaaatacaagcaagctttccccagaaagtcccaaactttagagagaaaaaa

SEQ ID NO: 21960 - DNA, 80 bp, synthetic construct
  source 1..80: mol_type = other DNA
cacaagaagaatggcaatggccccgctgccagttttgctagggaaggagattcacctcagagaataggtgcgaatcctgc

SEQ ID NO: 21961 - DNA, 80 bp, synthetic construct
  source 1..80: mol_type = other DNA
tgctgctccccggcccccgccccaacttccagccccgtgcgggctggtgtgcgccgcagttactaggcaaccctatcgca

SEQ ID NO: 21962 - DNA, 80 bp, synthetic construct
  source 1..80: mol_type = other DNA
cccagtcttgtcctttaaatacagtgccattggggtaatgatttctaaggtccttttagatgtcctcctttgcctaattt

SEQ ID NO: 21963 - DNA, 80 bp, synthetic construct
  source 1..80: mol_type = other DNA
gagctgtaaatcaggggcccgcgcaccaactttcattaattactcggagccagttaaatggcctggtcttaaaaatggga

SEQ ID NO: 21964 - DNA, 80 bp, synthetic construct
  source 1..80: mol_type = other DNA
ggcgagcacgtttgggcttccacagacttccttttgaaacctgaggcctggccttctttgaggcctatagatgagcttac

SEQ ID NO: 21965 - DNA, 80 bp, synthetic construct
  source 1..80: mol_type = other DNA
aggctgaaaacgatgactgcagctgcactgtgattggggaaaacctgtcccccaacaaaataccctctcctgtgtgaccg

SEQ ID NO: 21966 - DNA, 80 bp, synthetic construct
  source 1..80: mol_type = other DNA
atttaaaatatgaacatgcttgtgaagttttgggcggttgtgagtgggtaccaacaattgcccctgcctgtgcaccatgg

SEQ ID NO: 21967 - DNA, 80 bp, synthetic construct
  source 1..80: mol_type = other DNA
actaaaaagataatggcgtagtagtattttgtgccccaggggcatggattcgatggtttctcaaccgcctccaaatagca

SEQ ID NO: 21968 - DNA, 80 bp, synthetic construct
  source 1..80: mol_type = other DNA
acttctgtattaccatacgcgggagctatccacggacacgacgctgttccagaaagccatttagttactggaggtgcatg

SEQ ID NO: 21969 - DNA, 80 bp, synthetic construct
  source 1..80: mol_type = other DNA
cggatgacgcctggctgggcggaggaggaccgaagggcccgtagcgacaggctccggctgtgccagtgaactggccggaa

SEQ ID NO: 21970 - DNA, 120 bp, synthetic construct
  source 1..120: mol_type = other DNA
ttaccagtagcctatttcagatttattaaaaaacacataggtaacgagtcagagctttggctaggaatgatttggaaaagaactgaaggcataattccacaggacattcacagttgtgtg

SEQ ID NO: 21971 - DNA, 120 bp, synthetic construct
  source 1..120: mol_type = other DNA
aggatggagccaccgatccagacagagtatttgcgctccggaggggcaatgatctgtcagtcaagatgaaaaagaatggtcattaatgtcatcattagtgcagtcgttagtgcggtagga

SEQ ID NO: 21972 - DNA, 120 bp, synthetic construct; identical to SEQ ID NO: 2
  source 1..120: mol_type = other DNA

SEQ ID NO: 21973 - DNA, 120 bp, synthetic construct
  source 1..120: mol_type = other DNA
caacacgatacactttctgtagaaacaaaccctagcctattcaaaggagaagttttaattgtgctaggacttagtatacaaatgtgtttccacgtggtgaagtgaactaccacttttcac

SEQ ID NO: 21974 - DNA, 120 bp, synthetic construct
  source 1..120: mol_type = other DNA
gcatgctcatgtttcttaaataaatgaatggtttaggcacagagaacagtgaaaactggctaaccagtttaatctttatcttctgagcatttacttcttaatacaaagtactgatattta

SEQ ID NO: 21975 - DNA, 120 bp, synthetic construct
  source 1..120: mol_type = other DNA
acagaggctgagaaagtttaagtaactggcccaggtaacaccggttatatcagtgtcagatctgatattcaaacctgggttctcccaggtggttttatgttttggtttggttttaaaaat

SEQ ID NO: 21976 - DNA, 120 bp, synthetic construct
  source 1..120: mol_type = other DNA
tggtaggaggtgtttggatcacgtgggtggatctctcatgaatggcttaggacatctccttggtgataagtgagctcttcttccgagttcacatgaaatctggttatttcaaagtgtgtg

SEQ ID NO: 21977 - DNA, 120 bp, synthetic construct; identical to SEQ ID NO: 6938
  source 1..120: mol_type = other DNA

SEQ ID NO: 21978 - DNA, 120 bp, synthetic construct
  source 1..120: mol_type = other DNA
tcttggttctctatactatctcattacatcggggcccagagtttcacattaatttctattcaagaaaccaagtttagagaactaggaactgcccaactctagcaatagcctctttctgtt

SEQ ID NO: 21979 - DNA, 120 bp, synthetic construct
  source 1..120: mol_type = other DNA
gtaagagctgatcagaatggcatccaagaaacacaaacgctgttggaaaacagtctctcttctctcatgctgaagtcttttagggcaggactagccagagcctatcatggagagagaaag

SEQ ID NO: 21980 - DNA, 120 bp, synthetic construct
  source 1..120: mol_type = other DNA
taatttgtttaaatacccacgtgtgtgaactgcactagaattgcccctctacttcctgtgacatgggtcagagggtcccaagtgtggccttctgacttcagagagtgataataacctttg

SEQ ID NO: 21981 - DNA, 120 bp, synthetic construct; identical to SEQ ID NO: 6939
  source 1..120: mol_type = other DNA

SEQ ID NO: 21982 - DNA, 120 bp, synthetic construct
  source 1..120: mol_type = other DNA
aaatgtgttacatgcatgatgcactatttttgtgtcgagaaaaacaacaaaatgcatattttaaagagagatgagcatgtggggagctctgttgactttgactgcagctactgaaagtag

SEQ ID NO: 21983 - DNA, 120 bp, synthetic construct
  source 1..120: mol_type = other DNA
tgtaaaatatgagatttgtgtccattacctacccctaaaacccacaattgcatgtcaccaaaatacagtctctgaagagttcttatctgtggttatagggctgacactgctggcggcatt

SEQ ID NO: 21984 - DNA, 120 bp, synthetic construct; identical to SEQ ID NO: 6940
  source 1..120: mol_type = other DNA

SEQ ID NO: 21985 - DNA, 120 bp, synthetic construct
  source 1..120: mol_type = other DNA
ggtcttgttatgctctatgtcttcctgcctgccttctaatgaggaaggcctgctgcagcatcctgaggtgtgggctacaacaggtatcactgattttttaatagactcactactcactcc

SEQ ID NO: 21986 - DNA, 120 bp, synthetic construct
  source 1..120: mol_type = other DNA
ccccagcccccaaagctaatggggctggattatcagggaaacttactctattttttatcctgttggaaaaggctcatttttccaatcttgctaacattttttttgggtgggggtgggggt

SEQ ID NO: 21987 - DNA, 120 bp, synthetic construct
  source 1..120: mol_type = other DNA
ctagtgatatctgataattattgaatgcttgcttttgccaggcagtgggctaagtgctctttatctatctcctgtaattctcacagccatcctaggacataagtaatattacagtctccg

SEQ ID NO: 21988 - DNA, 120 bp, synthetic construct
  source 1..120: mol_type = other DNA
ccctctcagagcctgcctctgtaaacaactatgcaaacctgtctctccaagacaatgtgaatgtaggaacagactcactttgagtgctcttctatttttctctcccccagcattcccaaa

SEQ ID NO: 21989 - DNA, 120 bp, synthetic construct; identical to SEQ ID NO: 6941
  source 1..120: mol_type = other DNA

SEQ ID NO: 21990 - DNA, 120 bp, synthetic construct
  source 1..120: mol_type = other DNA
tttccgatggtgatcacttgcccatcaggcaactcgtaactcttctcaagggaggatgaggatgcggcagtggccatctcattttcaaagtccagagctacataacacagtttctccttg

SEQ ID NO: 21991 - DNA, 120 bp, synthetic construct
  source 1..120: mol_type = other DNA
gccatcaaaaaatgtgtcagttcaatattctgcaatccaaaatccacaatgataatgacgtagtagggccaccagggaaccacctctgttcctaggacagtgtctcatgcatagtaggcc

SEQ ID NO: 21992 - DNA, 120 bp, synthetic construct
  source 1..120: mol_type = other DNA
actctgtgttataattattttatgacagaaagtttgttatattgtattttcagttaaccaggatatcttatgctgaatcagctcctcaggggcctcacaattttcaaaaagtctgagatc

SEQ ID NO: 21993 - DNA, 120 bp, synthetic construct; identical to SEQ ID NO: 6942
  source 1..120: mol_type = other DNA

SEQ ID NO: 21994 - DNA, 120 bp, synthetic construct
  source 1..120: mol_type = other DNA
caagtggagactttaacattggcagggttcaagtctcaagcctcaaatttggagcataaaataagcctcaggcatgttcagaaacctaaatgtttggacaataccaaattgctaagggga

SEQ ID NO: 21995 - DNA, 120 bp, synthetic construct
  source 1..120: mol_type = other DNA
ctgtgttagctattaataagtatcactgttaatagctaacaattattgaatgcttactctatgtcaagtattccacatgcgttcttccatttaatactgataacaatcatgtgatatagg

SEQ ID NO: 21996 - DNA, 120 bp, synthetic construct; identical to SEQ ID NO: 6943
  source 1..120: mol_type = other DNA

SEQ ID NO: 21997 - DNA, 120 bp, synthetic construct
  source 1..120: mol_type = other DNA
gatagtgaggatggtcctggaagttactgagcaacacactgctcccctctcccccttatctcccacaggcctcaccagtagtaacgaaggaatagccacgctcagtcaggatcttcatga

SEQ ID NO: 21998 - DNA, 120 bp, synthetic construct
  source 1..120: mol_type = other DNA
ggagacaattgggcgtgataagtcaccatggcagctggcatgtggttacttgctggacaagtagagggaagccttgggggagagggaatttccgagcctcttatttaaaaagagaaaaca

SEQ ID NO: 21999 - DNA, 120 bp, synthetic construct
  source 1..120: mol_type = other DNA
agaaaaaagttctgctagaaatatgagatcaagggcttattttgaacactagaagaagatcttttagggctgggttcagccgtgtccattctaactcaactccagtccgtcacccccacg

SEQ ID NO: 22000 - DNA, 120 bp, synthetic construct
  source 1..120: mol_type = other DNA
atacatggctgggacattgaaagtctcaaacataatctgcaaagcaatccaaagagctgagttagtgaaggtgcccatctgacaaagaatggtcaggagagcacacctggttgatggatg

SEQ ID NO: 22001 - DNA, 120 bp, synthetic construct; identical to SEQ ID NO: 6944
  source 1..120: mol_type = other DNA

SEQ ID NO: 22002 - DNA, 120 bp, synthetic construct
  source 1..120: mol_type = other DNA
gaacttttaaatctgaagctcaggctggctaggtttagccccatttctgtgatttgtctgaggttctatttaatctattccacttttttatgtagttactgggtcaatgctaaccctaga

SEQ ID NO: 22003 - DNA, 120 bp, synthetic construct
  source 1..120: mol_type = other DNA
gattagaaccaagcccctccaggtcacttgtgagaagtttgtgcatcaggagatgtccgtgggtcttcatttctccatctgtaagacccttcctactctattaaccagaatgtctgacat

SEQ ID NO: 22004 - DNA, 120 bp, synthetic construct; identical to SEQ ID NO: 6945
  source 1..120: mol_type = other DNA

SEQ ID NO: 22005 - DNA, 120 bp, synthetic construct
  source 1..120: mol_type = other DNA
tgtagtcaatataatcatagttcctgcttcacattgctagaacttaaagagacaatgaatgtaaaatgctgagcccagtacttgaccataacaagtatagaattgacactagacgttgtt

SEQ ID NO: 22006 - DNA, 120 bp, synthetic construct
  source 1..120: mol_type = other DNA
ttggatgtttattaggaaccatgatacacatctgtcatttcacctcattaatgttcacatcaatccttggaaaaatgatagtattaatattactcccaacttatagacaaggaaactgag

SEQ ID NO: 22007 - DNA, 120 bp, synthetic construct
  source 1..120: mol_type = other DNA
ttgaagtgacttctccttagacattataacttaaacgtggccccttctcagtgaaatcttttaaatttcctattgcttttggaggcaaagggctggtccctgcaggaaggatgcaagtac

SEQ ID NO: 22008 - DNA, 120 bp, synthetic construct
  source 1..120: mol_type = other DNA
tccccagaccccacagtgttgtgtgctggggtagcatacttacttgagtcattttctcccggttggccttggggttcaggggtgcctccgtgagcagggtgggatgctcttcaggggcaa

SEQ ID NO: 22009 - DNA, 120 bp, synthetic construct; identical to SEQ ID NO: 6946
  source 1..120: mol_type = other DNA

SEQ ID NO: 22010 - DNA, 120 bp, synthetic construct
  source 1..120: mol_type = other DNA
ggcaagtttttaacccttctcagcttcagtctcatgattggtaatagggagatgaaaataattagtgtgtacctcatcgggtctttgtgtaaataaataaggtaaccctcgagttattgt

SEQ ID NO: 22011 - DNA, 120 bp, synthetic construct
  source 1..120: mol_type = other DNA
gaatgtatatatgaataaatgacgcttacttgaaaacctaattgacacttttaatgcttctagagaagttgccctttgcagtgtacatgaagaagagaacagggctctctgactcttgcc

SEQ ID NO: 22012 - DNA, 120 bp, synthetic construct; identical to SEQ ID NO: 6947
  source 1..120: mol_type = other DNA

SEQ ID NO: 22013 - DNA, 120 bp, synthetic construct
  source 1..120: mol_type = other DNA
ctttaaaagcacgaaaattctccaccagagccaggaatatgagattcactcaaaatcaaaacagagcaaaacaagaactgctggtgaaagcttacaaattagcaaaaccaagattagctt

SEQ ID NO: 22014 - DNA, 120 bp, synthetic construct; identical to SEQ ID NO: 4
  source 1..120: mol_type = other DNA

SEQ ID NO: 22015 - DNA, 120 bp, synthetic construct
  source 1..120: mol_type = other DNA
acctactgatatgaaatttttgtagaaagatagagcttggagcattactgctgataaattctaacaacattatgtatttttcttttaagtgataaattgtgtgcgtagtagtagtagtga

SEQ ID NO: 22016 - DNA, 120 bp, synthetic construct
  source 1..120: mol_type = other DNA
atgtttaatgaccaaacatcaaaatcttagaatttagctcttcttctcattagctcttttattaagtgtctgggagataaggcctcatgtaatgcaacacagataaataatttttaaaat

SEQ ID NO: 22017 - DNA, 120 bp, synthetic construct; identical to SEQ ID NO: 6948
  source 1..120: mol_type = other DNA

SEQ ID NO: 22018 - DNA, 120 bp, synthetic construct
  source 1..120: mol_type = other DNA
tgagcaacagatgattaattccctgcagtggcaaagggctactcttctcatctacagaactatcatcctttaattagttaataaaacctaataggcaaggacatttttttccttttcttt

SEQ ID NO: 22019 - DNA, 120 bp, synthetic construct
  source 1..120: mol_type = other DNA
tgggactacagttgcatgccaccacacactgttaattaaacctttttttttttttttttttcagtagaaacagggttttgctatgttgctcaggctggtctcaaactcctggcctcaagt

SEQ ID NO: 22020 - DNA, 120 bp, synthetic construct; identical to SEQ ID NO: 6949
  source 1..120: mol_type = other DNA

SEQ ID NO: 22021 - DNA, 120 bp, synthetic construct
  source 1..120: mol_type = other DNA
attttaggatttttttttcttttttttttaaattttattattattatactttaagttttagggtacatgtgcacaacgtgcaggtttgttacatatgtatacatgtgccatgttggtgtg

SEQ ID NO: 22022 - DNA, 120 bp, synthetic construct
  source 1..120: mol_type = other DNA
ccggtgtgtgatgttccccttcctgtgtccatgtgttctcgttgttcaattcccacctatgagtgagaacatgcggtgtttggttttttgtccttgcgacagtttgctgaggatgatggt

SEQ ID NO: 22023 - DNA, 120 bp, synthetic construct
  source 1..120: mol_type = other DNA
ataacccagaatgaacattaacaagtaaaagtacagttgagcaatgtgagccagttatttccccagcagtagtgtggtgttctgtatcagagaacacagggattatgcatcctgagggcc

SEQ ID NO: 22024 - DNA, 120 bp, synthetic construct; identical to SEQ ID NO: 6950
  source 1..120: mol_type = other DNA

SEQ ID NO: 22025 - DNA, 120 bp, synthetic construct
  source 1..120: mol_type = other DNA
ggagatgttgggggaaagtcaactttactttgtatttttatctcctatgttccttgatgagcttttttagggcagagatcatgtctgtcttgtccatcactatagcaaattgcatggcac

SEQ ID NO: 22026 - DNA, 120 bp, synthetic construct
  source 1..120: mol_type = other DNA
aagaatatgagcattattttctaactattataagcaaaagcattgcatctacaaataaccacttgaggcttgatttctaatggataagttcataccaatcaactgttaagacatttgcct

SEQ ID NO: 22027 - DNA, 120 bp, synthetic construct
  source 1..120: mol_type = other DNA
atggacccataaaatagcggcttgtgcagaatatctccactgcataaagatcaatgaattcagacagactgcattcattgggagaggtttctattatttattctcatgaatatatcccaa

SEQ ID NO: 22028 - DNA, 120 bp, synthetic construct
  source 1..120: mol_type = other DNA
ttacacataatgtgtaaaattaccatgcggctgtccaaatatattttgttgacaggtaatattatgtaaaattgcatttggtatcgatgcttgctttcatctaacatcagccctgtatgg

SEQ ID NO: 22029 - DNA, 120 bp, synthetic construct; identical to SEQ ID NO: 6951
  source 1..120: mol_type = other DNA

SEQ ID NO: 22030 - DNA, 120 bp, synthetic construct
  source 1..120: mol_type = other DNA
ttcctcacctgatgtctgggacgtcccacaatggatgggaaaacagccctgggagcatcgtccccagcaaagccggccttacagagcccagagccattgtcacacaccaaggcagtgctg

SEQ ID NO: 22031 - DNA, 120 bp, synthetic construct
  source 1..120: mol_type = other DNA
tgggtttgggggccctcctctgtgtcctagtgctatcctctgacccttatctaatatagcatgtatctggaagtactttagttacactataagctttcagtaagctgaaactctgacttc

SEQ ID NO: 22032 - DNA, 120 bp, synthetic construct; identical to SEQ ID NO: 6952
  source 1..120: mol_type = other DNA

SEQ ID NO: 22033 - DNA, 120 bp, synthetic construct
  source 1..120: mol_type = other DNA
tttactttaccctcagagaagctttgaaataaaattttctgagaaggtgctttaaattttaggggctgcaattatccaccgttaataaaagtcactgttaagctaacagtccaacaagtg

SEQ ID NO: 22034 - DNA, 120 bp, synthetic construct
  source 1..120: mol_type = other DNA
cattgtaaatctcattaaaaatgtattttttatgcattgcaaaaagattaatcatatttaccaagatgttgactgaggttattatgaagtggtgggttttataggtgtttttaattattt

SEQ ID NO: 22035 - DNA, 120 bp, synthetic construct
  source 1..120: mol_type = other DNA
aattagaaaggctggagcagcctatcaacttacaaatttgagaaattgaaggcatattagaggacattttcatccaatgctctcattttcacaaataagaaaatcaggaagtgattgctc

SEQ ID NO: 22036 - DNA, 120 bp, synthetic construct; identical to SEQ ID NO: 6953
  source 1..120: mol_type = other DNA

SEQ ID NO: 22037 - DNA, 120 bp, synthetic construct
  source 1..120: mol_type = other DNA
acttccttagcagtgcttcatgtaaaataactctttgcaaagaacataaaactgcaattgagatgacatattttaaagtcaaggcatgtaatattatcttcaactgacaaggaaaccaag

SEQ ID NO: 22038 - DNA, 120 bp, synthetic construct
  source 1..120: mol_type = other DNA
ccaggctccaacagttaaaagctgtgtgatttcagttatttaacatctctaaaccacaatttccttactataaaacagtaatgatatcaggacatacctcatggagttcttatagagatt

SEQ ID NO: 22039 - DNA, 120 bp, synthetic construct
  source 1..120: mol_type = other DNA
ctctttgtttctaacctttgctttctttccacactgctccaggcttagaataaaaataatcaacgtgtggattccacttgcaagaatggacatgggactcatgaatggcttgccctttcc

SEQ ID NO: 22040 - DNA, 120 bp, synthetic construct; identical to SEQ ID NO: 6954
  source 1..120: mol_type = other DNA

SEQ ID NO: 22041 - DNA, 120 bp, synthetic construct
  source 1..120: mol_type = other DNA
ataaaacatttcaaattaggatggtctctgaaaatgggaaggtatggttaccatgaatgctgggatatttttaataactgttttgttgggcagtgatggcttgggaggaggggttgacta

SEQ ID NO: 22042 - DNA, 120 bp, synthetic construct
  source 1..120: mol_type = other DNA
aggagcactgtcattgaagaagtcactgtgtccccggaaagagtcagctcagtggtttacagctcctctctaacctgaatgagcagttcggtttggagcaaagcatttcctaattaggta

SEQ ID NO: 22043 - DNA, 120 bp, synthetic construct
  source 1..120: mol_type = other DNA
cagctcattggtcttgaaacacaaaccatatttagtcatgaaacacaaaatgctaggaaaatctcagcatgaaaactccagtctgggctgaagctgccaaaccttgatttgcagtgaaac

SEQ ID NO: 22044 - DNA, 120 bp, synthetic construct; identical to SEQ ID NO: 6955
  source 1..120: mol_type = other DNA

SEQ ID NO: 22045 - DNA, 120 bp, synthetic construct
  source 1..120: mol_type = other DNA
atacagcccagtgaaagaaaacccctacaacaaatcagaaccagaaagaaatctgagtttccagtgcctaaatacaaataaatgtataacttactgcacacagctaacctgcatacctgt

SEQ ID NO: 22046 - DNA, 120 bp, synthetic construct
  source 1..120: mol_type = other DNA
tctttaacgttagatcattaaagccaaaagctacaatcattttagtagtacaatcttcattcagaaatatcagtgcatgaacccagccaaatccctgcagatgatgtcttattataccgg

SEQ ID NO: 22047 - DNA, 120 bp, synthetic construct
  source 1..120: mol_type = other DNA
ggttatatagccccttggcctgctctcctcccacttgcttcccaaacaaggagcaaagacagacttgagcctgtcgttcagtctaacacaaccatatagggacctcagcacaaaactctc

SEQ ID NO: 22048 - DNA, 120 bp, synthetic construct
  source 1..120: mol_type = other DNA
gaaatgcccagagacactgagctagggtaatgggcagatgcaggcatggtttgcacattccacagaggatgccagcttgctatcatgctggaatttcaggccatttcctaataaactgag

SEQ ID NO: 22049 - DNA, 120 bp, synthetic construct; identical to SEQ ID NO: 6956
  source 1..120: mol_type = other DNA

SEQ ID NO: 22050 - DNA, 120 bp, synthetic construct
  source 1..120: mol_type = other DNA
agcctgtcaaagaagtagtttggaaaagaaaggagattgttcaaaggaagcctctgtagccctcctctctgcccactaacctccttgacaggaagtagagagaccaggtgatatggtttg

SEQ ID NO: 22051 - DNA, 120 bp, synthetic construct
  source 1..120: mol_type = other DNA
aaagtgagtgagttctcacgatatctgatggttttataaggcagttttccctgctcttgcttgctctctctcgcctgctgccatgtaagacacgcctcttccccttttgccatgagttta

SEQ ID NO: 22052 - DNA, 120 bp, synthetic construct
  source 1..120: mol_type = other DNA
tgaccctctcatttctcaaagatataagccctcatctcaagcatcaatgaatagcttcagtgattttatatttgtctactaggttctcactaaactcataaagaaatatttttgtgggta

SEQ ID NO: 22053 - DNA, 120 bp, synthetic construct; identical to SEQ ID NO: 6957
  source 1..120: mol_type = other DNA

SEQ ID NO: 22054 - DNA, 120 bp, synthetic construct
  source 1..120: mol_type = other DNA
aacaggatttctctatactgctcgggatttgtctagcttttaccaaccagaaaacacggccattagaatgttaaaatataaaatctacacagtacaacataaagttgggcatttggggtt

SEQ ID NO: 22055 - DNA, 120 bp, synthetic construct
  source 1..120: mol_type = other DNA
ctgtgtagtccttgcgatctttatgaagtgactgttcatctaaacaccaaagagaagagtttttgcattcacttttatgattcttacatcatttctaccattagtgtacatccaaagctc

SEQ ID NO: 22056 - DNA, 120 bp, synthetic construct; identical to SEQ ID NO: 6958
  source 1..120: mol_type = other DNA

SEQ ID NO: 22057 - DNA, 120 bp, synthetic construct
  source 1..120: mol_type = other DNA
gaagaagaaggaaagaaagaaaaacagtagtgtcggataacttggttgcagttcagggacactataaaataaattccaagctaaagaacatatccaacaatcatttccagacacgttgtt

SEQ ID NO: 22058 - DNA, 120 bp, synthetic construct
  source 1..120: mol_type = other DNA
cgtataatattgatgtctggtaaggaaaatgattttctgctggtgccgaaaaattgggctgtagaaattgtttttttctagactgatcatatgcattggctattttgttcagttcataaa

SEQ ID NO: 22059 - DNA, 120 bp, synthetic construct
  source 1..120: mol_type = other DNA
agtctacgctggcacaatggccatcctgccacatctgcagggatttgccaggctctgctctgttcctcatttgagcataattaatattctttatgggaaatttgactggacactttctat

SEQ ID NO: 22060 - DNA, 120 bp, synthetic construct
  source 1..120: mol_type = other DNA
tgaggatgtgaggaaggaatgcagtgacaattggccctcagaccttgactttgtgtaaaggcaaacattttggatcaatacacgggggttatgattcagagttgaaattccaaagctatc

SEQ ID NO: 22061 - DNA, 120 bp, synthetic construct; identical to SEQ ID NO: 6959
  source 1..120: mol_type = other DNA

SEQ ID NO: 22062 - DNA, 120 bp, synthetic construct
  source 1..120: mol_type = other DNA
gaggtcagaagtccaaaacaggttttcaatgggctaaaatcaaggcattccttctggaagctcttgtgggggtctatgtctttgtattttctagtctctagagtccacttgactcatggc

SEQ ID NO: 22063 - DNA, 120 bp, synthetic construct
  source 1..120: mol_type = other DNA
aactctctttctgacactaatcctcctgtctccctcttagaaggaccttcgtgaatatattgggctctaatggataatcgaggatagttcaacataatcttcccattttaagattatcga

SEQ ID NO: 22064 - DNA, 120 bp, synthetic construct; identical to SEQ ID NO: 6960
  source 1..120: mol_type = other DNA

SEQ ID NO: 22065 - DNA, 120 bp, synthetic construct
  source 1..120: mol_type = other DNA
atttctggaagccaggaagtccaggatcaaggtgccagcatctggtgagggccttcttgatgtgccatcccatggtggaagaaaaggtgaacctgctcccacaagtcctatttatagtgg

SEQ ID NO: 22066 - DNA, 120 bp, synthetic construct
  source 1..120: mol_type = other DNA
aagatcgtagcagacacttaagacacggtacacaagtcttatcttaggaaagggatcagaaaactgtaaagctacatgcccatgatcctgtaatggccaactaggaaagtggaataaact

SEQ ID NO: 22067 - DNA, 120 bp, synthetic construct
  source 1..120: mol_type = other DNA
gtcagattgcagaatagcacctgttagatttaggagacagaacaacttttagcattctctttgtcaccaaagataacttgagaaattaggtttaactatgaagaacagagagctttaaaa

SEQ ID NO: 22068 - DNA, 120 bp, synthetic construct; identical to SEQ ID NO: 6961
  source 1..120: mol_type = other DNA

SEQ ID NO: 22069 - DNA, 120 bp, synthetic construct
  source 1..120: mol_type = other DNA
gtcttgctctgtcacccaggctggagtgcagtggtgcgacctcggctcactgcaacaaccgcctaccgggttcaagtgattctcctgcctcagcctcccaagtagctggaattacaggca

SEQ ID NO: 22070 - DNA, 120 bp, synthetic construct
  source 1..120: mol_type = other DNA
gggattacagacgtgactccctacccacttctacccaactaattttggttaagggtgcctcctctgtttatccatactactttgtgtttgcctctctcgtagcactcactatattgttct

SEQ ID NO: 22071 - DNA, 120 bp, synthetic construct
  source 1..120: mol_type = other DNA
aatgcttagcaaatggtcaaggatattctgaagtgagggcaaataaaaataagtcaactaatagttatcagacaatgctatgagctatttgctctacatacataaactcatttaatcctc

SEQ ID NO: 22072 - DNA, 120 bp, synthetic construct; identical to SEQ ID NO: 6962
  source 1..120: mol_type = other DNA

SEQ ID NO: 22073 - DNA, 120 bp, synthetic construct
  source 1..120: mol_type = other DNA
ctgccccagcttcctagtgattgaagctctccttcacaaaagactttggatctacaggatgaccaaggttcctggtgtacccgacgggtttcctcggtcctcggggggaagggaggatat

SEQ ID NO: 22074 - DNA, 120 bp, synthetic construct
  source 1..120: mol_type = other DNA
cctttggagaagaccacaaacaagccatttataccaatggtattgaccagcgttgtccaacagaacttattgcaatgacggaaatattcaacatcagtgctgtccaatacagtaactact

SEQ ID NO: 22075 - DNA, 120 bp, synthetic construct
  source 1..120: mol_type = other DNA
ggagtaataagttttaaatttggctgcaactgaaattgcctaaggggcttaaaaaatcccaatgcacaggctacactctagatcaattaaatcagagcatctgagatgggacacagatgt

SEQ ID NO: 22076 - DNA, 120 bp, synthetic construct; identical to SEQ ID NO: 6963
  source 1..120: mol_type = other DNA

SEQ ID NO: 22077 - DNA, 120 bp, synthetic construct
  source 1..120: mol_type = other DNA
ttatacatttttaaggaatcttcagaattcattctgatttcctcagcttttacttaatgttccttttttgttcaaggataccatgctgcatttaagtcaagtctctttagccatgtcctc

SEQ ID NO: 22078 - DNA, 120 bp, synthetic construct
  source 1..120: mol_type = other DNA
gattagactgaaatcacatgtttttgagaaaaagaccctagaggtaagttgctattctcatcccttgatatcaagacaagatgctaccaggatgacttatcactatagatgttcatctta

SEQ ID NO: 22079 - DNA, 120 bp, synthetic construct
  source 1..120: mol_type = other DNA
gttacacttcacccccttgaggacagagtatttatataaattatccagaataaaaatctatttttgatacaatcctcaatgattcttattcataacaaaatttgggaatcactcagacaa

SEQ ID NO: 22080 - DNA, 120 bp, synthetic construct
  source 1..120: mol_type = other DNA
ttagtctagaaaccagatcactgctcctctaaacgcaaaacagtgaataaacatagaattgttgatattaccaccgagtgttttggagttggaatccagcatattggaggagaaaaaagc

SEQ ID NO: 22081 - DNA, 120 bp, synthetic construct; identical to SEQ ID NO: 6964
  source 1..120: mol_type = other DNA

SEQ ID NO: 22082 - DNA, 120 bp, synthetic construct
  source 1..120: mol_type = other DNA
cacagaaagtctctgttctctggatccctgcttggctttggtaaagctacagttagagactcaacctcttggtttctcagaacattaattagtgcattgttcaattttagtaatcaagga

SEQ ID NO: 22083 - DNA, 120 bp, synthetic construct
  source 1..120: mol_type = other DNA
tgatgtgaggtagaagagtgagcgtctttcatgttccctgtgaaaatataagtagcactcatgggttatgtctacagagaaatagatttccttcaccttcacctagaaacataagttaaa

SEQ ID NO: 22084 - DNA, 120 bp, synthetic construct
  source 1..120: mol_type = other DNA
tactatgtagaaaatgtgaagagacttttaagtatcctttaattctttcactttccatcctcttgatatagtatgagtgacaccttgccaactgtctgggatgtcactgctcatctctgt

SEQ ID NO: 22085 - DNA, 120 bp, synthetic construct; identical to SEQ ID NO: 6965
  source 1..120: mol_type = other DNA

SEQ ID NO: 22086 - DNA, 120 bp, synthetic construct
  source 1..120: mol_type = other DNA
ctgacattctatgcagtcttccctttgtccttattctctgatggtgtttgctaggtttcaatgaaaaggtactaggctttattattcagtgaaaatcacaaaccttagtgtttactgatg

SEQ ID NO: 22087 - DNA, 120 bp, synthetic construct
  source 1..120: mol_type = other DNA
taatctatattccaaaatctaagacaagttttgcaaattcagatgcctattggggcaaggatgactgaaaaggccaagtggtacttctgataaacagaggacctaggtctcctgcaaggg

SEQ ID NO: 22088 - DNA, 120 bp, synthetic construct
  source 1..120: mol_type = other DNA
atggcaattaactaacatttttaaaaaaggacaacaggctaaatcaatgtttgctgtgggtcttcagtttgtaaattctgatctacaaacaataaccaatccaatcacagctccagtgct

SEQ ID NO: 22089 - DNA, 120 bp, synthetic construct; identical to SEQ ID NO: 6966
  source 1..120: mol_type = other DNA

SEQ ID NO: 22090 - DNA, 120 bp, synthetic construct
  source 1..120: mol_type = other DNA
tcataagtgtattactctgttctcatgctgctaataaagacataacctgagactgggtaacttataaaggaaagaggtttaatggactcacagttccacatggctgaggaggcctcacaa

SEQ ID NO: 22091 - DNA, 120 bp, synthetic construct
  source 1..120: mol_type = other DNA
tatatatatatatatatatatataatatttttttttttgcaaaaaggcacatggatgaagctggaacgcccctttatgaaaccatcagatctcatgagacttattcactgtcacgagaac

SEQ ID NO: 22092 - DNA, 120 bp, synthetic construct; identical to SEQ ID NO: 6967
  source 1..120: mol_type = other DNA

SEQ ID NO: 22093 - DNA, 120 bp, synthetic construct
  source 1..120: mol_type = other DNA
actaggaaagggatgactagaatctcatgagaattttaaattttttacactcaccttattttatttagtcaagacattttttgtccctctcctagaggtcactctgggaagttcagcagt

SEQ ID NO: 22094 - DNA, 120 bp, synthetic construct
  source 1..120: mol_type = other DNA
cagccaaatgccattctcattggaggctagtgaagaaggtgagttgacaagcttgggcattaccattttgggtcaaaaaagaagtaggttctggagtaatcaaactaatatccgtgtttg

SEQ ID NO: 22095 - DNA, 120 bp, synthetic construct
  source 1..120: mol_type = other DNA
tcctcttttagctagactaaaaggctctttcctactttggcgtctaattttgtattcctagttttcctaacaggccctacctaagtttagttctatattagtttactttactttggttta

SEQ ID NO: 22096 - DNA, 120 bp, synthetic construct
  source 1..120: mol_type = other DNA
atattttgcattgtatgggaggaaaaaagaattctctctctattcttccgaattcttatctggaacccctgcaaaaaaaggcagatgaaaaagaaaaaagcgaacagaagtttattaaca

SEQ ID NO: 22097 - DNA, 120 bp, synthetic construct; identical to SEQ ID NO: 6968
  source 1..120: mol_type = other DNA

SEQ ID NO: 22098 - DNA, 120 bp, synthetic construct
  source 1..120: mol_type = other DNA
gccatcttcaggcaagcaagggcctaaggtcatccctggtgatcaacctttgtccttcttggtagagagggaaggagggacacctttataagtgtatgtcctgcttttaagcaaataggg

SEQ ID NO: 22099 - DNA, 120 bp, synthetic construct
  source 1..120: mol_type = other DNA
catatcttgtaccaactggtctccttccctgtttgcagctgtacaaattaaggtattatgaaagcatggtcattcaaaggaggcacccgttctgctgctcctttgtaactttcttttgcc

SEQ ID NO: 22100 - DNA, 120 bp, synthetic construct
  source 1..120: mol_type = other DNA
cagccctgtgtattctatttccagagccggggatagcttcccttttcttcttctgccaaatcatgtttctgccttattttaaaagtctactcaaaattcatctacagcaaaccttcttag

SEQ ID NO: 22101 - DNA, 120 bp, synthetic construct; identical to SEQ ID NO: 6969
  source 1..120: mol_type = other DNA

SEQ ID NO: 22102 - DNA, 120 bp, synthetic construct
  source 1..120: mol_type = other DNA
atttcaggattattataacataaaagccttgccctattttccttaagcagcacgcggctgcctagtgtacttgccttaggaggtcaaacacattaggtataccaacatatcgaccaccaa

SEQ ID NO: 22103 - DNA, 120 bp, synthetic construct
  source 1..120: mol_type = other DNA
agcacagattttcccagggattgctgagcaaagagccccttactaaagaaacagcagactccatggaagagtgtcaattttatgatccactgctggtttgggctgatttgcttttaacta

SEQ ID NO: 22104 - DNA, 120 bp, synthetic construct
  source 1..120: mol_type = other DNA
tttttccactccagtccttgaaaatggtgagttagagcagagtttcctaaagcatggcctgaatttacggaaccatggtcaacagaatcacttgggcaatttgttaaaatgtattaggtt

SEQ ID NO: 22105 - DNA, 120 bp, synthetic construct; identical to SEQ ID NO: 6970
  source 1..120: mol_type = other DNA

SEQ ID NO: 22106 - DNA, 120 bp, synthetic construct
  source 1..120: mol_type = other DNA
ctgcattctattttaggccctgcctctgattgtctgtgtggctttgaagagttcactaagccctttggccctcattttgtaatctataagtgtgtgggcctattattttaatatcctgtc

SEQ ID NO: 22107 - DNA, 120 bp, synthetic construct
  source 1..120: mol_type = other DNA
tctgtgaggtaataagcagaagaggttgatagtttcacaaaaggaaagcatgacttagacagagtgcctaaaattctgtcccgggaaccatgatctcctcatctactggctgtctgtgtt

SEQ ID NO: 22108 - DNA, 120 bp, synthetic construct; identical to SEQ ID NO: 6971
  source 1..120: mol_type = other DNA

SEQ ID NO: 22109 - DNA, 120 bp, synthetic construct
  source 1..120: mol_type = other DNA
acttattttagcttcagacatactttagcccctagaaaagaaagtgaacaggaagagaccctcgagatatctttggatgcatcaagaattttaaaagctgcaacttggaattcaaagcat

SEQ ID NO: 22110 - DNA, 120 bp, synthetic construct
  source 1..120: mol_type = other DNA
atgataaaaggcatcatcaggtaggggcaagagtatggactctggaggtaggttggattcatatcccagttttcaacaatttattttgagtcccttggcaaatcatctagcatctcacct

SEQ ID NO: 22111 - DNA, 120 bp, synthetic construct
  source 1..120: mol_type = other DNA
agcactaacccatgcttacatgcattttatgacaatccacgttacctaagcccaaattattacctgcaacgcagcttggcaaccttcaaacactaaccaaatcaggtatcagagcccttg

SEQ ID NO: 22112 - DNA, 120 bp, synthetic construct; identical to SEQ ID NO: 6972
  source 1..120: mol_type = other DNA

SEQ ID NO: 22113 - DNA, 120 bp, synthetic construct
  source 1..120: mol_type = other DNA
taaaagtccttttttttttctgtaacatataacagtaattagagttttctacttgtgaccttaaggtgtgttgtcatggtcttgacatttctgcagaagtaaactattcaattcagtagt

SEQ ID NO: 22114 - DNA, 120 bp, synthetic construct
  source 1..120: mol_type = other DNA
ttgactaaccagacacctaattatgttttgagtggtcctatctatgcatttaatgaatgttcttattttgtagccagcatatgtaatacaggtgattcctttcagcgatgggagctggac

SEQ ID NO: 22115 - DNA, 120 bp, synthetic construct
  source 1..120: mol_type = other DNA
ctcataatggagcaattaaaaccatgtttgttttcctgaatccatgacaacaataactttatcccaaaaccagctgtgaatgttggtaacacgggcactctgctgacctgaaggaatgca

SEQ ID NO: 22116 - DNA, 120 bp, synthetic construct
  source 1..120: mol_type = other DNA
aataccactccagagaaccttgactttataagggaaggcagcttctgaatcactgaaagccttttcctccttaattctcactggctggcctggaatgaggctctgctaaaaatgttagag

SEQ ID NO: 22117 - DNA, 120 bp, synthetic construct; identical to SEQ ID NO: 6973
  source 1..120: mol_type = other DNA

SEQ ID NO: 22118 - DNA, 120 bp, synthetic construct
  source 1..120: mol_type = other DNA
caagacaaacacttttataagtaggatcttgattattgaggcaagaagtataatcttaagcagtgagaatgggggaaattggaacacattgttattcccataggatcagcatagatttcc

SEQ ID NO: 22119 - DNA, 120 bp, synthetic construct
  source 1..120: mol_type = other DNA
tttggaagaagtgagtatttccacattctgctatgccttagggcatcagctgtgcccaaactcatgcttgtaaggctgaatggtcactctgcttttgatgtctctatttgaaaaagccta

SEQ ID NO: 22120 - DNA, 120 bp, synthetic construct; identical to SEQ ID NO: 6974
  source 1..120: mol_type = other DNA

SEQ ID NO: 22121 - DNA, 120 bp, synthetic construct
  source 1..120: mol_type = other DNA
cagcctagggaagggacactgattgttcaccatcatatcccagtatctagcacagtgcctaagggataggaggggctcagtaaatatctcttgcaaggatgttgttaaattgtaaactct

SEQ ID NO: 22122 - DNA, 120 bp, synthetic construct
  source 1..120: mol_type = other DNA
aaaaattgctcatggcagacgtcagatgtaaccacactgataactggaaagaaaaatgaatttagatgggttttagagatagaacaatgtttctaatattcaagcagtccataaatccct

SEQ ID NO: 22123 - DNA, 120 bp, synthetic construct
  source 1..120: mol_type = other DNA
tctttggacgtttccatctcaagaaacagctcttcaatctctcccttgtattccaccttccagaaccacccagaaattccagtaaagtcttattgacctgattgtctgtcctcttcgctg

SEQ ID NO: 22124 - DNA, 120 bp, synthetic construct; identical to SEQ ID NO: 6975
  source 1..120: mol_type = other DNA

SEQ ID NO: 22125 - DNA, 120 bp, synthetic construct
  source 1..120: mol_type = other DNA
tgttgtggggtggggagagcggggagggatagcattaggagatatacctaatgtaaatgacaagttaatgggtacagcacaccaacatggcacgtgtatacatatgtaacaaacctgcac

SEQ ID NO: 22126 - DNA, 120 bp, synthetic construct
  source 1..120: mol_type = other DNA
aatgtctgaactcatgtctgacattcagattcctccgcccaaaggcaataaataaaataatactaagatgtaaaggcaaaccttgtcttctgtcatgatctacagatggcacaaataata

SEQ ID NO: 22127 - DNA, 120 bp, synthetic construct
  source 1..120: mol_type = other DNA
agcatttgagctggaaaaggcagatatttttcttgacctcacttttcctaaagttcacaacttctgctacttaaatgagtatctcatctctaagtgtgtgaagtaacagatgatgtatct

SEQ ID NO: 22128 - DNA, 120 bp, synthetic construct; identical to SEQ ID NO: 6976
  source 1..120: mol_type = other DNA

SEQ ID NO: 22129 - DNA, 120 bp, synthetic construct
  source 1..120: mol_type = other DNA
tcttttgctgctcttttttgttgctatctttttgtaactaataggacacgtgtaagactataatacaaacaggagtcctagcatgtaatggctttagcaatttgtgcaatatccctcttt

SEQ ID NO: 22130 - DNA, 120 bp, synthetic construct
  source 1..120: mol_type = other DNA
aattggtgttcagagggtgatgctctgatggtgagcagatctacagtttgcctaacagtttatttaagccaaatttatagtttctgaagcgctagaaggctgctgtccaaggggactact

SEQ ID NO: 22131 - DNA, 120 bp, synthetic construct
  source 1..120: mol_type = other DNA
aaggagctgggactacaggctcacaccaccacgcccagttaatttttgtatttttagtagagacagggtttcaccatgttggccaggatggtctcaatctcttgaccttgtgatccaccc

SEQ ID NO: 22132 - DNA, 120 bp, synthetic construct; identical to SEQ ID NO: 6977
  source 1..120: mol_type = other DNA

SEQ ID NO: 22133 - DNA, 120 bp, synthetic construct
  source 1..120: mol_type = other DNA
tctctttcttctctcctgccttcttttatattgtttaattttttttctaaatttcattgtaatttatctattagctttttaactatatcttttggcattatttttacaaagttgctctag

SEQ ID NO: 22134 - DNA, 120 bp, synthetic construct
  source 1..120: mol_type = other DNA
tacccttgttcatcccattataatgtatattataagcctcatacaatggtatgatttttactttttctctgcgttgtttctagttaactatatgtgctatcaaagtgagaccccatttat

SEQ ID NO: 22135 - DNA, 120 bp, synthetic construct
  source 1..120: mol_type = other DNA
tgtgtttatatgtgagggccaatctattgaaaagaaacactgcagaatactaaagcaaaattgaaaccatttagagtttgtagttgttttattttaaaagctaaccttgtaagtacttag

SEQ ID NO: 22136 - DNA, 120 bp, synthetic construct; identical to SEQ ID NO: 6978
  source 1..120: mol_type = other DNA

SEQ ID NO: 22137 - DNA, 120 bp, synthetic construct
  source 1..120: mol_type = other DNA
agttcccgatgaaaacaactctttcttgttagccattatctctgcctttcctttctaaagaaaaacacgtcatttcatcttgattatcagtttctcaagtactcatggatgtgaggccag

SEQ ID NO: 22138 - DNA, 120 bp, synthetic construct
  source 1..120: mol_type = other DNA
ctaacctcaaagggccctcattaatttacagacatttgaataacacccatattcatttctgctactgaaccaaagccttttccaaaaaaatcatctagcaaactgtttttgccaggccaa

SEQ ID NO: 22139 - DNA, 120 bp, synthetic construct
  source 1..120: mol_type = other DNA
tcactgcaacctccacctcccaggttcaagcgattctcatgcctcagcctcccgagtagcgaggactacaggcgtgcaccaccacgcccagctaatttttgtatttttagtagagatggg

SEQ ID NO: 22140 - DNA, 120 bp, synthetic construct; identical to SEQ ID NO: 6979
  source 1..120: mol_type = other DNA

SEQ ID NO: 22141 - DNA, 120 bp, synthetic construct
  source 1..120: mol_type = other DNA
aactaaattcctacccaattagttgaaaaatatgaaaaaagcaattgctagagaatgcaatttattaaatgttggtggtcttttaaaaaatgaattcctcttgtagccagtgagatcagt

SEQ ID NO: 22142 - DNA, 120 bp, synthetic construct
  source 1..120: mol_type = other DNA
gagccaccatgcctggctagttaatggttattaagtaatacaaacatttctgtgaattccaccagatcattgactttggcatagttcacttaagactttgtttgataaaataaatctctt

SEQ ID NO: 22143 - DNA, 120 bp, synthetic construct; identical to SEQ ID NO: 37
  source 1..120: mol_type = other DNA

SEQ ID NO: 22144 - DNA, 120 bp, synthetic construct; identical to SEQ ID NO: 6980
  source 1..120: mol_type = other DNA

SEQ ID NO: 22145 - DNA, 120 bp, synthetic construct
  source 1..120: mol_type = other DNA
gcagcgtgtgcatttgaatgaggtattagctccatgcagaaaaattagttgagaaggacaatagtactgtcatactttttaaaaactgaaagtacctgaaagtgtttgtttttttcttat

SEQ ID NO: 22146 - DNA, 120 bp, synthetic construct
  source 1..120: mol_type = other DNA
tatcagcaaataaatgtgtgggctctgggcttaggaaaatggggccctgactacttttccactggatcgtaagttccatgagagtaggatttttttttttcaatgttggtcaatgctgcg

SEQ ID NO: 22147 - DNA, 120 bp, synthetic construct
  source 1..120: mol_type = other DNA
cttttgaggctcacctccattgaatctgtcctctatgcttagattcggggagtttttagtgcactatcagtatacagtactactcccattgtgttataccataatactatgcagtgagat

SEQ ID NO: 22148 - DNA, 120 bp, synthetic construct
  source 1..120: mol_type = other DNA
aggcaaggtcaaatgacccagccactgaatcttatgtcccatcccgattaggacccaaccatacattactattatcaattagttatagtgataatataatgtgtaatacaggggtgtcca

SEQ ID NO: 22149 - DNA, 120 bp, synthetic construct; identical to SEQ ID NO: 6981
  source 1..120: mol_type = other DNA

SEQ ID NO: 22150 - DNA, 120 bp, synthetic construct
  source 1..120: mol_type = other DNA
agtacattaattacatttgaatagtccttccattgtactgaactaattcaagtgttttgaccctaaaattttgtagttctatagcaaaaacccacttcctttccactaaattgaaaatga

SEQ ID NO: 22151 - DNA, 120 bp, synthetic construct
  source 1..120: mol_type = other DNA
ttcataattaagaagctatgatagaaataaagtgttgaacagaatttcttgaaagtatttttactaaataaaaccaaatgtaaaggtccaggtgctgggtagagttgaagtttgaaaatt

SEQ ID NO: 22152 - DNA, 120 bp, synthetic construct; identical to SEQ ID NO: 6982
  source 1..120: mol_type = other DNA

SEQ ID NO: 22153 - DNA, 120 bp, synthetic construct
  source 1..120: mol_type = other DNA
tttgttgccattgcttttggtgttttagacatgaagtccttgcccatgcctatgtcctgaatggtaatgcctaggttttcttctagggtttttatggttttaggtctaacatttaagtct

SEQ ID NO: 22154 - DNA, 120 bp, synthetic construct; identical to SEQ ID NO: 6983
  source 1..120: mol_type = other DNA

SEQ ID NO: 22155 - DNA, 120 bp, synthetic construct
  source 1..120: mol_type = other DNA
agttagaatggcaatcattaaaaagtcaggaaacaacaggtgctggagaggatgtggagaaataggaacacttttacactgttggtgggactgtaaactagttcaaccattgtggaagtc

SEQ ID NO: 22156 - DNA, 120 bp, synthetic construct
  source 1..120: mol_type = other DNA
gtttattgcagcattattcacaatagcaaagacttggaaccaacccaaatgtccaacaatgatagactggattaagaaaatgtggcacatatacaccatggaatactatgcagccataaa

SEQ ID NO: 22157 - DNA, 120 bp, synthetic construct
  source 1..120: mol_type = other DNA
aacaatgagatcacatggacactggaaggggaatatcacactctggggactgttgtggggtggggggaggggggagggatagcatcgggagatatacctaatgctagatgacgagttagt

SEQ ID NO: 22158 - DNA, 120 bp, synthetic construct; identical to SEQ ID NO: 6984
  source 1..120: mol_type = other DNA

SEQ ID NO: 22159 - DNA, 120 bp, synthetic construct
  source 1..120: mol_type = other DNA
cggctccagctcaccctacttcagggaactgaagatgtctaggtgtctgggtcaccctgagagggggagtttattaaaatgaatcctctcttctacaaattcatgctaaattgttccacg

SEQ ID NO: 22160 - DNA, 120 bp, synthetic construct
  source 1..120: mol_type = other DNA
attaataggaactaatattcatcaagaatttactgtttctggcactgcatagcatcttttctatgaattacctcctttcatcctcctaataagcatataaagtttattctgttaatattt

SEQ ID NO: 22161 - DNA, 120 bp, synthetic construct
  source 1..120: mol_type = other DNA
ctttagcttctactaagctggttttaatgggttatgatgttgtgtatgagcgtagggatctggggaggagagataaggaagggaagaaagtgagtactgagacaaaaaagcagaaaaaaa

SEQ ID NO: 22162 - DNA, 120 bp, synthetic construct
  source 1..120: mol_type = other DNA
ttcacaaggagaagatgccagcattcaggacagatgagagtctggccaaataattgtcaggaacccttaaaatgtaggctactcatcttgggatgattttaaacagtaataagtgtaggc

SEQ ID NO: 22163 - DNA, 120 bp, synthetic construct; identical to SEQ ID NO: 6985
  source 1..120: mol_type = other DNA

SEQ ID NO: 22164 - DNA, 120 bp, synthetic construct
  source 1..120: mol_type = other DNA
taaagcacctacaaaggctttggggtagatcctggcaaaatggaataatagaagatatagttcttacgttcaaagagcttccaagctatttatggagcttgacagatgcagaaaaaggca

SEQ ID NO: 22165 - DNA, 120 bp, synthetic construct
  source 1..120: mol_type = other DNA
ctacttttcccacccttctggtctggacagaaatgaaatagttcagttttaggcacgataagaattcaaggtggtgagtggaacatgagcaggaattaaacataatgcactttaaatgta

SEQ ID NO: 22166 - DNA, 120 bp, synthetic construct
  source 1..120: mol_type = other DNA
agcatcaggacgctgaacataaccacagtggaggtgacagggaagcaacagccagggataaataagagccagaactgtggtgtctggtgagccaaaagagagacgcatttcacaggcaaa

SEQ ID NO: 22167 - DNA, 120 bp, synthetic construct
  source 1..120: mol_type = other DNA
tccatggtacaaagtaggtactcgtaagtattcgtttagttaaggaaaattgttgggatcttagacttaagctcaaagcctccattcaaagaaagtggccaaaatgtcccccctctggag

SEQ ID NO: 22168 - DNA, 120 bp, synthetic construct; identical to SEQ ID NO: 6986
  source 1..120: mol_type = other DNA

SEQ ID NO: 22169 - DNA, 120 bp, synthetic construct
  source 1..120: mol_type = other DNA
gaggaagtcagcacaagcaaagggcaggcccagcaatatccaagagagagcggggccagtccacagggtgttcagtgtggagcctccagacctgtgtcctaactcgagctctgccacata

SEQ ID NO: 22170 - DNA, 120 bp, synthetic construct
  source 1..120: mol_type = other DNA
ttaggtgaggatcaaatgagacattgtgtgcataaagcacttttcctgtgcagttaaacccttgataaatattagccacttattaaccatcgggttaagagagaaatgactttttttttt

SEQ ID NO: 22171 - DNA, 120 bp, synthetic construct
  source 1..120: mol_type = other DNA
taaatttcattttgggtgaggtctagactagtatccgtggaaaggaaggcaaattgaagaggtatgatcctaggacagaggaagaaccaaggtcaaaacagggacatttcccaattcaat

SEQ ID NO: 22172 - DNA, 120 bp, synthetic construct; identical to SEQ ID NO: 6987
  source 1..120: mol_type = other DNA

SEQ ID NO: 22173 - DNA, 120 bp, synthetic construct
  source 1..120: mol_type = other DNA
tgaatcaggaaagttattctttccctgtaggtgtgggtatgagaattaaataagttagtatatataaaagggtctaacacatagtgagtgcttgattaactggtatgtgttagttcaaga

SEQ ID NO: 22174 - DNA, 120 bp, synthetic construct
  source 1..120: mol_type = other DNA
atattgtgcacacaataagaagacctacctcccaagatttttatgagcattgaatgaaatcatatttataaaacccactaaatggtacctggctcatactaagtgatctaaatgaagagg

SEQ ID NO: 22175 - DNA, 120 bp, synthetic construct
  source 1..120: mol_type = other DNA
ttttttgaaatgaggaaaggaagacataaatggcagaatatgtggtacagaactgtaagatacatgtcccacgacagaaataaaaaaggcagagattcactgaggggggaattcatggac

SEQ ID NO: 22176 - DNA, 120 bp, synthetic construct
  source 1..120: mol_type = other DNA
ttcttgataggaaaatgtatttatgtagtcaagtaagacttgtttctgctaagtaaaaattcagcctaagcagtgtaatatgaagctaaatggagactggatacaaatatgtttataatg

SEQ ID NO: 22177 - DNA, 120 bp, synthetic construct; identical to SEQ ID NO: 6988
  source 1..120: mol_type = other DNA

SEQ ID NO: 22178 - DNA, 120 bp, synthetic construct
  source 1..120: mol_type = other DNA
gattatctttatttcaatccaatttgcatggctatgtgagctatgattcttagaggagtgaacataaacagcaaaaattcttacttagcagacttacccagtgcaagaaagagttccctt

SEQ ID NO: 22179 - DNA, 120 bp, synthetic construct
  source 1..120: mol_type = other DNA
ttgtacttacttagggagtttacatcttgatgataaggccactgaggtaactaaagaggaaatggattcagcataggctttggaagttcacttctgttacctagtaactgtgtgactttg

SEQ ID NO: 22180 - DNA, 120 bp, synthetic construct
  source 1..120: mol_type = other DNA
aaaaaacacacacacacacacacacacaaatgttctggacattatataagcattagatattactgatatcttatttttgtttatttttaaatgtctgtccctttaaaccattcctttcaa

SEQ ID NO: 22181 - DNA, 120 bp, synthetic construct; identical to SEQ ID NO: 6989
  source 1..120: mol_type = other DNA

SEQ ID NO: 22182 - DNA, 120 bp, synthetic construct
  source 1..120: mol_type = other DNA
gttaaactataggaagttataacatcgggagaatttctaacaactgcaaagtgttctgatatgtaataaattgccttgagaaatagtaggagccagtgctggaaggagtcaagctaaggc

SEQ ID NO: 22183 - DNA, 120 bp, synthetic construct
  source 1..120: mol_type = other DNA
tgagtaggaatggattacaccccacagtcatgaagggccttaaatgatagtagcacactagtgtcatatgtcaagtggcaaatgacactagcaccaaatgtgattctgcatttaagttct

SEQ ID NO: 22184 - DNA, 120 bp, synthetic construct; identical to SEQ ID NO: 6990
  source 1..120: mol_type = other DNA

SEQ ID NO: 22185 - DNA, 120 bp, synthetic construct
  source 1..120: mol_type = other DNA
ttctggaaagtttaaaaaatatggtattcttcatggagaagccaagatgttaggctgcaggcagtgcttatgctctctagcctagtgaggaggaaagcagtataggtaaataaaatgaca

SEQ ID NO: 22186 - DNA, 120 bp, synthetic construct
  source 1..120: mol_type = other DNA
aaatccaagtttatctcccagaatctatctgggcatatcattactgttggaaagacttatgtttaccaggtgagaaaactgatgctgagaggggttaaatattatgcacagcttctcaca

SEQ ID NO: 22187 - DNA, 120 bp, synthetic construct
  source 1..120: mol_type = other DNA
atccaaatcaaaactctttctccccattgtcctttctcagttgaactagatgttaataccactattgtattagtcgactaacattgccttctgcagaaaaccacctatgtctcctttcta

SEQ ID NO: 22188 - DNA, 120 bp, synthetic construct
  source 1..120: mol_type = other DNA
tgtcccctcagccttttctaacagggaaaggctggtgccctggtaaagagtcccccacccccatcccactccctggcactagatgggcttgggagacaatgactgcccctccctcatgct

SEQ ID NO: 22189 - DNA, 120 bp, synthetic construct; identical to SEQ ID NO: 6991
  source 1..120: mol_type = other DNA

SEQ ID NO: 22190 - DNA, 120 bp, synthetic construct
  source 1..120: mol_type = other DNA
aagtagactacagaaatggcaaaatagattgaagttgaagaaacattgccttaagctaagcccactcaggatgaaattttatctgcccccaaatcaacatctcttgaaaagtggtcccta

SEQ ID NO: 22191 - DNA, 120 bp, synthetic construct
  source 1..120: mol_type = other DNA
aattggattaagaagccagggcccacagaacagatgttttcaccctactaacccaattgctgtctgctttttagttgccacagtctaaacattctttaatgcattgtctttttcagtcat

SEQ ID NO: 22192 - DNA, 120 bp, synthetic construct; identical to SEQ ID NO: 6992
  source 1..120: mol_type = other DNA

SEQ ID NO: 22193 - DNA, 120 bp, synthetic construct
  source 1..120: mol_type = other DNA
ggaaggaagtggtacaggaaggaagtagtgcaggaaggaagaagtataggaaggaagtagtggaggaaggaagtagtacaggaaaagtggttgtaagccatttaacttactttttttcat

SEQ ID NO: 22194 - DNA, 120 bp, synthetic construct
  source 1..120: mol_type = other DNA
tttaatcctgtaggaaataatatgttctccaggaggtgacaatgtctatatgattagattcacagattacctatccaaatctaagatctccgtcctctctcttcctttcccaagaaccca

SEQ ID NO: 22195 - DNA, 120 bp, synthetic construct
  source 1..120: mol_type = other DNA
ctttgtcacttggccactgtgggctctgacgccctctagtgacagaaaaattctttggtagaagaagtaatatccctagatagcagtctacagaattgtttaagcaattatctttacttg

SEQ ID NO: 22196 - DNA, 120 bp, synthetic construct; identical to SEQ ID NO: 6993
  source 1..120: mol_type = other DNA

SEQ ID NO: 22197 - DNA, 120 bp, synthetic construct
  source 1..120: mol_type = other DNA
catcagtttcacatctcacatatttctacttcaaatccaatgaaaaagaaagggtttgtgtcccagtgtttccagtaaagatcccaaaatctactccaactgaatgtgatgtgctgattg

SEQ ID NO: 22198 - DNA, 120 bp, synthetic construct
  source 1..120: mol_type = other DNA
cactgtgatggttaattttatgtatcaaattagctaggccatggcacttggctatttagtcaaacactatcttagatgtttctgtaaagcaatgttttggatgggattaacatttaaatc

SEQ ID NO: 22199 - DNA, 120 bp, synthetic construct
  source 1..120: mol_type = other DNA
cagcagacggcctttggacttgaactataactttttcatgggtctccagcctgttggccaatgctaaagttttggacttgccagcctctacaatcacgtgagccaactcctatctatctt

SEQ ID NO: 22200 - DNA, 120 bp, synthetic construct
  source 1..120: mol_type = other DNA
tattaccagaaggaagaagaaggagaaaggcaggataaacagtcatggatatacactatagctgggagttattaaaatcaacttattgcaatttagtaaaaacaatttggttgacaacat

SEQ ID NO: 22201 - DNA, 120 bp, synthetic construct; identical to SEQ ID NO: 6994
  source 1..120: mol_type = other DNA

SEQ ID NO: 22202 - DNA, 120 bp, synthetic construct
  source 1..120: mol_type = other DNA
cccagaacaccagcattcattaggtgttcattcaatagattcttcaaaggattccaaaggcaaagaagtttggggaacagtatatataattacccaaccctttgacattagcatactaag

SEQ ID NO: 22203 - DNA, 120 bp, synthetic construct
  source 1..120: mol_type = other DNA
ttgaggataattagacgtacgtgggcagagggtaggggaagggggtatggcatagaaagagcaggaccttgggagcaagaatatctaagtttaattcctgactctgctatttattaacta

SEQ ID NO: 22204 - DNA, 120 bp, synthetic construct; identical to SEQ ID NO: 6995
  source 1..120: mol_type = other DNA

SEQ ID NO: 22205 - DNA, 120 bp, synthetic construct
  source 1..120: mol_type = other DNA
aaaaaatttgcagagataatacagagaatgcccatataccatcctccttatcccacttctttttgtgtctattagatgctcagagtgtgtgcacaaggctggcacgcccagggtcttcct

SEQ ID NO: 22206 - DNA, 120 bp, synthetic construct
  source 1..120: mol_type = other DNA
aacctaacctagatttgagggcccaaacaggctccagaagaaaatgtcaactgagaggaagcctgaaggatgaacagtgggctaagcaaagggttattaatgtgttattaatgggttgaa

SEQ ID NO: 22207 - DNA, 120 bp, synthetic construct
  source 1..120: mol_type = other DNA
tgtgtccagtctggaactgcatccaaattcaggttcagtaatgatgtcattatccaaacataccttctgtaaaattcatgctaaactacctaagagctatctaccgttccaaagcaatag

SEQ ID NO: 22208 - DNA, 120 bp, synthetic construct; identical to SEQ ID NO: 6996
  source 1..120: mol_type = other DNA

SEQ ID NO: 22209 - DNA, 120 bp, synthetic construct
  source 1..120: mol_type = other DNA
ccacaacatggacagcccagtcaaatgccccgcaagtctttctctgagtgactccagcaattagccaaggctcctgtacccaggcaggacctctgcgctctgagctccattctccttcaa

SEQ ID NO: 22210 - DNA, 120 bp, synthetic construct
  source 1..120: mol_type = other DNA
gaatgcccatttgtgcaacgaaccctgactccttcctcaccctgacttctccccctccctacccgcgcgcaggccaagttgctgaatcaatggagccctccccaacccgggcgttcccca

SEQ ID NO: 22211 - DNA, 120 bp, synthetic construct
  source 1..120: mol_type = other DNA
cgagtgacttggctggagcctcaggggcgggcactggcacggaacacaccctgaggccagccctggctgcccaggcggagctgcctcttctcccgcgggttggtggacccgctcagtacg

SEQ ID NO: 22212 - DNA, 120 bp, synthetic construct
  source 1..120: mol_type = other DNA
gggataggcaaagtggggcgggcgcgggacgcgtgcgggattgcggcggcagcggcgcacgcgggcacctgggagcggcgggctgctgcgggaggcgttggagactggctcccgggggct

SEQ ID NO: 22213 - DNA, 120 bp, synthetic construct; identical to SEQ ID NO: 6997
  source 1..120: mol_type = other DNA

SEQ ID NO: 22214 - DNA, 120 bp, synthetic construct
  source 1..120: mol_type = other DNA
aatattagaagcacaaacaaattgcacgtgtgtaaacaaactgtacaatgattgatgaaagatgagggaaggtggtttggaagactccaagaagcataataccgtcatcctgactggaag

SEQ ID NO: 22215 - DNA, 120 bp, synthetic construct; identical to SEQ ID NO: 59
  source 1..120: mol_type = other DNA

SEQ ID NO: 22216 - DNA, 120 bp, synthetic construct
  source 1..120: mol_type = other DNA
tggaatttctccacttacctagagtgtaatttggcaacaagctaaatgtgtagtggagcctagcccaaaagttgggagctttaaaaatgtattcaaagattttgttgcgtgtgtgtgtgt

SEQ ID NO: 22217 - DNA, 120 bp, synthetic construct; identical to SEQ ID NO: 6998
  source 1..120: mol_type = other DNA

SEQ ID NO: 22218 - DNA, 120 bp, synthetic construct
  source 1..120: mol_type = other DNA
gtacatagtggtgcctccagataagacattgttggcatacaggtccttgcggatatcaatgtcacacttcatgatgctattgtaagttgtttcatggatgccagcagattccatacctgg

SEQ ID NO: 22219 - DNA, 120 bp, synthetic construct
  source 1..120: mol_type = other DNA
catttgtctctgaaacatatgttcccctataagacacactgcagggtggaatgggtgcctcacagttaatccacaatacaatgccaagaaaggagcaactgtgcttagcacctgtttcaa

SEQ ID NO: 22220 - DNA, 120 bp, synthetic construct
  source 1..120: mol_type = other DNA
ccttatggaaagcattgcttaggaaggatatttgttgacatataagtgcccagttattaatatgagtaggaatgttattgcatttaatgatgaggaacttggaaagtccagctacttggt

SEQ ID NO: 22221 - DNA, 120 bp, synthetic construct; identical to SEQ ID NO: 6999
  source 1..120: mol_type = other DNA

SEQ ID NO: 22222 - DNA, 120 bp, synthetic construct
  source 1..120: mol_type = other DNA
ccaatagtgatgacttggccatcaggcagttcatagctcttctccagggaggaggaagaggcagctgtggccatctcattctcaaaatccagggcgacatagcacagcttctctttaatg

SEQ ID NO: 22223 - DNA, 120 bp, synthetic construct
  source 1..120: mol_type = other DNA
ctgtggcagatgagacacacacactcaccagtggtgacaaaggagtagccacgctcagtgaggatcttcatgaggtagtcagtgaggtcccgaccagccagatccagacgcatgatggca

SEQ ID NO: 22224 - DNA, 120 bp, synthetic construct
  source 1..120: mol_type = other DNA
ctgctctagccacggcaaagcccgcttccaatcttggctaagagatgctagcaatgggcattgatccagataaaattagattccttacacacaaagaataaaaatgcgcatcaggaatac

SEQ ID NO: 22225 - DNA, 120 bp, synthetic construct; identical to SEQ ID NO: 7000
  source 1..120: mol_type = other DNA

SEQ ID NO: 22226 - DNA, 120 bp, synthetic construct
  source 1..120: mol_type = other DNA
tgttaactctttctcttagcacagaccttgctagggaatgggaggaaagggattatccctttttcaactgggggatctgattcacagcaaggtcggtgacttgggaatgtgattcatcag

SEQ ID NO: 22227 - DNA, 120 bp, synthetic construct
  source 1..120: mol_type = other DNA
ttgaaggtctcaaacatgatctgagtcatcttctcccggttggccttggggttcagcggggcctctgtgagcagggtggggtgctcctcgggagccacacggagctcattgtagaaggtg

SEQ ID NO: 22228 - DNA, 120 bp, synthetic construct
  source 1..120: mol_type = other DNA
cccatacccaccataactccctatgagaagaaaaaatgagaaaatcatgctctcaccatgtcaggaatataatcagtgtcttgtccatttatatctaactgcccaagtcaaggaacatat

SEQ ID NO: 22229 - DNA, 120 bp, synthetic construct; identical to SEQ ID NO: 7001
  source 1..120: mol_type = other DNA

SEQ ID NO: 22230 - DNA, 120 bp, synthetic construct
  source 1..120: mol_type = other DNA
cagcctgtccagagctgttctggagtcattcaccagctctgaggactaagctctcctgcttggcagcctgtctggccaggcatgtgacaaacccagagagcatggcatgtcttttaacaa

SEQ ID NO: 22231 - DNA, 120 bp, synthetic construct
  source 1..120: mol_type = other DNA
ctgtgaacatgagagaggaatgtggatttggtcctggttggttgggagaggtgatattgttagaagttttaaacaggactgaaaagagaggacaaggaagaaaatgaagtgtataaggca

SEQ ID NO: 22232 - DNA, 120 bp, synthetic construct
  source 1..120: mol_type = other DNA
ttggggttttgtggagtattgcttgccttggcttggatttgaagtcaatcagccttctcttaatttggcctaaagagttcatcgaacaagagggtcaggtgagagccatttcctagatcg

SEQ ID NO: 22233 - DNA, 120 bp, synthetic construct; identical to SEQ ID NO: 7002
  source 1..120: mol_type = other DNA

SEQ ID NO: 22234 - DNA, 120 bp, synthetic construct
  source 1..120: mol_type = other DNA
agaagccgcggaggagactggggacagagaagggcagaggaatccacccaggctccctggccaggagttccagctagggtgccaggtgcaaggagggacccaagaaacccagccccttag

SEQ ID NO: 22235 - DNA, 120 bp, synthetic construct; identical to SEQ ID NO: 64
  source 1..120: mol_type = other DNA

SEQ ID NO: 22236 - DNA, 120 bp, synthetic construct
  source 1..120: mol_type = other DNA
tggccaggtggcggcgcggggctggcgtccggcgcggcccgcggaccaggcgaggagtgaacgcggagggccgggcgctgactcaccgtcggcggggcgggtcggctcggctccggcggc

SEQ ID NO: 22237 - DNA, 120 bp, synthetic construct; identical to SEQ ID NO: 7003
  source 1..120: mol_type = other DNA

SEQ ID NO: 22238 - DNA, 120 bp, synthetic construct
  source 1..120: mol_type = other DNA
cggctgtgggtccggaccccacgggacccctatgggacccccacaggacccccacggcctgagtccaaggcccgccccctcggggaggcggatgtgggaggcccggcccgggtgcgggcc

SEQ ID NO: 22239 - DNA, 120 bp, synthetic construct
  source 1..120: mol_type = other DNA
ctgggcaataaggaaacggtttattaggagggagtggtggagctgggccaggcaggaagacgctggaataagaaacatttttgctccagcccccatcccagtcccgggaggctgccgcgc

SEQ ID NO: 22240 - DNA, 120 bp, synthetic construct
  source 1..120: mol_type = other DNA
cggtccgccgaaggctagcgccccgccacccgcagagcgggcccagaggtgagtcgaggtccgcggacgggaccgggtggcgggcggcctgacccccgcttcagtgggcccttccttcgg

SEQ ID NO: 22241 - DNA, 120 bp, synthetic construct; identical to SEQ ID NO: 7004
  source 1..120: mol_type = other DNA

SEQ ID NO: 22242 - DNA, 120 bp, synthetic construct
  source 1..120: mol_type = other DNA
atcagtccttccagctgttgcttgaggaatctgacactatcactccaacctaggagtctcaccctaggcgcgcatggtcagtcacctccttgccacgaccttccttcaggatccaggcca

SEQ ID NO: 22243 - DNA, 120 bp, synthetic construct
  source 1..120: mol_type = other DNA
ataatggacagttgctctcactctctctatgtatggccagcttctggctgagtcagggtctgtcctaatacctgtcctctcacctgtccccccatttcattggtttgttagaaatagcta

SEQ ID NO: 22244 - DNA, 120 bp, synthetic construct; identical to SEQ ID NO: 7005
  source 1..120: mol_type = other DNA

SEQ ID NO: 22245 - DNA, 120 bp, synthetic construct
  source 1..120: mol_type = other DNA
aacccaggtctccatgctccagagcccacaccctaacctctgtgctacactgtgctgcctccatggtctgcctgagacctgaaaatccaggcatcacctggatgttccactgcatcaccc

SEQ ID NO: 22246 - DNA, 120 bp, synthetic construct
  source 1..120: mol_type = other DNA
ttgtgcttgatatggcgcttctccagccctgtgaagatcactgctgtgctgagccactgccgttgatgggagtaggttttatcaatccttcaggtgtgctagggagaaaaacattgataa

SEQ ID NO: 22247 - DNA, 120 bp, synthetic construct
  source 1..120: mol_type = other DNA
agtgagaccctatctctactaaaaataaaactgggcatggtgctgcacccctgtagtcccttgggacttgggaggctgaggtgggaggatcacttgagcccaggagttcaaggctacagt

SEQ ID NO: 22248 - DNA, 120 bp, synthetic construct; identical to SEQ ID NO: 7006
  source 1..120: mol_type = other DNA

SEQ ID NO: 22249 - DNA, 120 bp, synthetic construct
  source 1..120: mol_type = other DNA
ccaaacaactggaggaataacaatgaccaaggaatgatttattatcagcaatttaagtttattaagacacgctcagtgactatggacaagaaactgaacatctctgagcctcactttccc

SEQ ID NO: 22250 - DNA, 120 bp, synthetic construct
  source 1..120: mol_type = other DNA
ttagctaacgtttgaaattagtttaacgtctgtaatttctggccaacaatagtgatgcttctgtcagcaggagatctttcacaaagttttgcttagaagtgaaaggatcctgccaggccc

SEQ ID NO: 22251 - DNA, 120 bp, synthetic construct
  source 1..120: mol_type = other DNA
tccagttaaaaattggacagtcccaattttactccatcacattcccaggattagaccatagatgggttctgcagatgcagacagcctcgctccacagtgtcaccacgtcccagctttggt

SEQ ID NO: 22252 - DNA, 120 bp, synthetic construct; identical to SEQ ID NO: 7007
  source 1..120: mol_type = other DNA

SEQ ID NO: 22253 - DNA, 120 bp, synthetic construct
  source 1..120: mol_type = other DNA
gatcctagaggaatgccggattttagccttattgttagccactttttcctttccacctcaaaccctctcctttgcagctttctgggctagcaaaggctgccaaggatggcttcctgctag

SEQ ID NO: 22254 - DNA, 120 bp, synthetic construct
  source 1..120: mol_type = other DNA
gtcaggcagaggctggggacacagctgcagcagcccagggctctgtttcctcccccagcctgggcctctggggcagaggaagcccaggcaggaaggccaggcctgccaccagccagagag

SEQ ID NO: 22255 - DNA, 120 bp, synthetic construct
  source 1..120: mol_type = other DNA
ccagccctgtcaggctcaccatgtcatgccaaaggacagtctccctgccttgtgccctgcctgaggatccagtccccagacacacacctgcacatgctccaccattcagaaagtcctgtt

SEQ ID NO: 22256 - DNA, 120 bp, synthetic construct; identical to SEQ ID NO: 7008
  source 1..120: mol_type = other DNA

SEQ ID NO: 22257 - DNA, 120 bp, synthetic construct
  source 1..120: mol_type = other DNA
cagagaggtttctctacacctggcatgaccctgccccgtccgagctttgcatggttgttatagccctgagggctcagacatgggctgccaccactggatagggacagagcgaagagagca

SEQ ID NO: 22258 - DNA, 120 bp, synthetic construct
  source 1..120: mol_type = other DNA
ctcttctgtaaaacaaggagctggattttgtgattcacaggatgtccacctagaattctgtcatgtgggtgtcccaggcacaaggaactaagggtagcaaggaactaagggcatatttaa

SEQ ID NO: 22259 - DNA, 120 bp, synthetic construct
  source 1..120: mol_type = other DNA
ttgattcctgttcctggcttggcaggaccctgaatggcaggaagcgaagacaggagcctgtttatgtttgaggcagccagggctgggggggcattgagaaagggtaggcaggggtggaag

SEQ ID NO: 22260 - DNA, 120 bp, synthetic construct; identical to SEQ ID NO: 7009
  source 1..120: mol_type = other DNA

SEQ ID NO: 22261 - DNA, 120 bp, synthetic construct
  source 1..120: mol_type = other DNA
acttcatggctcttactccacctctcttgctcctctctgcagggaccatgaccttgggctcccccaggaaaggccttctgatgctgctgatggccttggtgacccagggtgagtactggg

SEQ ID NO: 22262 - DNA, 120 bp, synthetic construct
  source 1..120: mol_type = other DNA
acagtgaggctccattagactcagtccccagctaccccagccctcctttgctctcctcttgatccagacctgcaggctggagctctgtcagactagggtggaagcctatatgtggggtgg

SEQ ID NO: 22263 - DNA, 120 bp, synthetic construct
  source 1..120: mol_type = other DNA
ttttcagagtgtcagctgctctgaggggagggttctgagggaaggatgactgaggatgaaagtaagagaccaaagcttcaaggtgtttgtctgaggggtcagacgagagggacagtagga

SEQ ID NO: 22264 - DNA, 120 bp, synthetic construct; identical to SEQ ID NO: 7010
  source 1..120: mol_type = other DNA

SEQ ID NO: 22265 - DNA, 120 bp, synthetic construct
  source 1..120: mol_type = other DNA
cctcctttcctctcatgctctggccaataaaggggctgggggcgggggagcgggtgggcaggactctgggatctaactggcagagtggtctggcccgaggtggggggagctgacctagtg

SEQ ID NO: 22266 - DNA, 120 bp, synthetic construct
  source 1..120: mol_type = other DNA
ctgggtgtcctgggcctgtggcatgtccgacggaggcaggagaagcagcgtggcctgcacagcgagctgggagagtccagtctcatcctgaaagcatctgagcagggcgacagcatgttg

SEQ ID NO: 22267 - DNA, 120 bp, synthetic construct
  source 1..120: mol_type = other DNA
gtgacccagcaggtcccaggtcgaggatagagaagggggctgtggctggttgtggcagcctctcagtggcctctccgtacccccaggacctcctggacagtgactgcaccacagggagtg

SEQ ID NO: 22268 - DNA, 120 bp, synthetic construct; identical to SEQ ID NO: 7011
  source 1..120: mol_type = other DNA

SEQ ID NO: 22269 - DNA, 120 bp, synthetic construct
  source 1..120: mol_type = other DNA
tcaagatggggggctcttccagggctctgtgtgcccagtgtgtaaccctcaccttcccctctggccatcaggaaaaggccgctatggcgaagtgtggcggggcttgtggcacggtgagag

SEQ ID NO: 22270 - DNA, 120 bp, synthetic construct
  source 1..120: mol_type = other DNA
ccaggcctggggctttgcccccctgcactcagggctcaagtttgcagacctccagacattaacagaaccctgaaggactctcagcccacctgcagcatcaacctctttttttaatttaat

SEQ ID NO: 22271 - DNA, 120 bp, synthetic construct
  source 1..120: mol_type = other DNA
ttcagcctcttgagtagctgggaccacaggcatgtgccaccatgcccagctaacttttttattttttgtagagacgaggtctccctatgtttcccagactggtctcaaattcctaggctc

SEQ ID NO: 22272 - DNA, 120 bp, synthetic construct; identical to SEQ ID NO: 7012
  source 1..120: mol_type = other DNA

SEQ ID NO: 22273 - DNA, 120 bp, synthetic construct
  source 1..120: mol_type = other DNA
ccccatctggctctgaggctagctgtgtccgcggcatgcggcctggcgcacctgcacgtggagatcttcggtacacagggcaaaccagccattgcccaccgcgacttcaagagccgcaat

SEQ ID NO: 22274 - DNA, 120 bp, synthetic construct
  source 1..120: mol_type = other DNA
ggtgaccatgattagcacttgaaaatttagaggtgcatgttgtttcagttctcctccgcaagaccccacgagttgtctgaacacccttttcaaacccagattccttccaccataccatcc

SEQ ID NO: 22275 - DNA, 120 bp, synthetic construct
  source 1..120: mol_type = other DNA
atctcgctgggttcttgggaacctagagagcactacacaagcaaagagtacctggggccatggttctctctgtggccactgccttccagcccatctccgtgcacgtctccatctgccttc

SEQ ID NO: 22276 - DNA, 120 bp, synthetic construct
  source 1..120: mol_type = other DNA
gggcagcgattacctggacatcggcaacaacccgagagtgggcaccaagcggtacatggcacccgaggtgctggacgagcagatccgcacggactgctttgagtcctacaagtggactga

SEQ ID NO: 22277 - DNA, 120 bp, synthetic construct; identical to SEQ ID NO: 7013
  source 1..120: mol_type = other DNA

SEQ ID NO: 22278 - DNA, 120 bp, synthetic construct
  source 1..120: mol_type = other DNA
actttacatgtattatttaattctttggtatggacaaggcagtggtattgcttagtggctaagagcataggcttggaatcagacttcctgggttctattcctgatcttgccatgaccgtg

SEQ ID NO: 22279 - DNA, 120 bp, synthetic construct
  source 1..120: mol_type = other DNA
attcaagaccagcctggccaacatggcgaaaccctgtctgtactaaaaatacaaaaattagctggctgtggtggcacacacctgtaatcccagctactcgggaggctgaggcaggagaat

SEQ ID NO: 22280 - DNA, 120 bp, synthetic construct
  source 1..120: mol_type = other DNA
atgagaataaaaatagcttccagttgttgagataatctaagtatttagaacagtatctagagctaaatattagtggctgttattgttgtagatagaatgagtgcctgacatcatattgtc

SEQ ID NO: 22281 - DNA, 120 bp, synthetic construct; identical to SEQ ID NO: 7014
  source 1..120: mol_type = other DNA

SEQ ID NO: 22282 - DNA, 120 bp, synthetic construct
  source 1..120: mol_type = other DNA
cattgtcaacctttgaggaggctgtccatggtgagggacttccaggagtcgtgacaggttggggacaatcctcaggatatggctggagccctgcttcttggggacaaggatgtcctcatt

SEQ ID NO: 22283 - DNA, 120 bp, synthetic construct
  source 1..120: mol_type = other DNA
atttgtcctcggtggtcatcaactgaaaacagaggctgtggtgtcaccggtcccttggggagactcacgaggtgcttagattcctcaagactccgggcatgaattgccagagtgggctct

SEQ ID NO: 22284 - DNA, 120 bp, synthetic construct; identical to SEQ ID NO: 7015
  source 1..120: mol_type = other DNA

SEQ ID NO: 22285 - DNA, 120 bp, synthetic construct
  source 1..120: mol_type = other DNA
gaaacaggatggggcacggggctgtctgcggctccaccggcattgttttcagaaagctcctactaaaaactgtgaacttgggataccaagaggagggggtcagtgctggctgcaggagtc

SEQ ID NO: 22286 - DNA, 120 bp, synthetic construct
  source 1..120: mol_type = other DNA
ttaaatcctagccctgtcacttactatctgttgatcttagacaagtttcttaaactctctggccttcatttcttggcttataaagtggagctcatagtattacctacctcatagggctgc

SEQ ID NO: 22287 - DNA, 120 bp, synthetic construct
  source 1..120: mol_type = other DNA
gggtggaaggcagctgagggaagactggaacaaggctggcctaggaatccgagatgggtttgagtcttgcctctgccattactagctgtggaaccttgggccccccttctctgagcatca

SEQ ID NO: 22288 - DNA, 120 bp, synthetic construct; identical to SEQ ID NO: 7016
  source 1..120: mol_type = other DNA

SEQ ID NO: 22289 - DNA, 120 bp, synthetic construct
  source 1..120: mol_type = other DNA
agctttgaggacatgaagaaggtggtgtgtgtggatcagcagacccccaccatccctaaccggctggctgcagacccggtgaggcctctgctgggactaggatggcgtggggtggtggct

SEQ ID NO: 22290 - DNA, 120 bp, synthetic construct
  source 1..120: mol_type = other DNA
ctccctgcccccagggccatctggtcattctgggattttaagaaccttcaccttccctgtgaaaagtcagaggctatctgtggctctgtgtgtgtgtgtgtgtgtgtgtgtgtgtgtgtg

SEQ ID NO: 22291 - DNA, 120 bp, synthetic construct
  source 1..120: mol_type = other DNA
ccccagtagctaggtgtagtgcacaccaccacacctggctaatttttaaaattttttgtagagacaaggtcttttatgttgctcaggcttatctcaaactcttgggctcaagtgatcctc

SEQ ID NO: 22292 - DNA, 120 bp, synthetic construct
  source 1..120: mol_type = other DNA
tttctcaaaacacttcacttgtacaaagacacacacacgtatatcaacacatacaagcgtgaatatccttctgaacatacactcacagaaatatacacatgcgcatatatgccagactgt

SEQ ID NO: 22293 - DNA, 120 bp, synthetic construct; identical to SEQ ID NO: 7017
  source 1..120: mol_type = other DNA

SEQ ID NO: 22294 - DNA, 120 bp, synthetic construct
  source 1..120: mol_type = other DNA
ccctgggcccagccatggctgatggaggggctggaagacactgccctctgcactggggtcttaggctgtggatggggatgtgggagcccccaggcttgaagaatcggccccttcctatgg

SEQ ID NO: 22295 - DNA, 120 bp, synthetic construct
  source 1..120: mol_type = other DNA
tttctcactctactctcttcctcttccattttttatttttttgtcatcctctgttctctctctcaccacttgtctttcctctcgctctcctttccaatgctctcatctccctcctctcat

SEQ ID NO: 22296 - DNA, 120 bp, synthetic construct; identical to SEQ ID NO: 7018
  source 1..120: mol_type = other DNA

SEQ ID NO: 22297 - DNA, 120 bp, synthetic construct
  source 1..120: mol_type = other DNA
gtggggggcagtggatggtgccctatctgggtagaggtagtgtgagtgtggtgtgtgctggggatgggcagctgcgcctgcctgctcggcccccagcccacccagccaaaaatacagctg

SEQ ID NO: 22298 - DNA, 120 bp, synthetic construct
  source 1..120: mol_type = other DNA
ggacaggatgcaaaagaggctccagagtcagagtgccaagccagggaatcccagtcccagactcagagcccgggcctgcactttgccccctgcccttgatcaaccccactgccccaccag

SEQ ID NO: 22299 - DNA, 120 bp, synthetic construct
  source 1..120: mol_type = other DNA
tggatttgtatctcagctccatgatgccttgggctttctgtctcctcaacaagagtgcagcttgctgaatgtcagctgcctgagagagctggggcctgacttactagggcattaaatcct

SEQ ID NO: 22300 - DNA, 120 bp, synthetic construct; identical to SEQ ID NO: 7019
  source 1..120: mol_type = other DNA

SEQ ID NO: 22301 - DNA, 120 bp, synthetic construct
  source 1..120: mol_type = other DNA
gagtagctgggattacaggcacatgccaccatgcctggctaattttgtatatttagtagaaacagggtttcaccatgctggccatgctggtctcgaactcctgacctcaggtgttccacc

SEQ ID NO: 22302 - DNA, 120 bp, synthetic construct
  source 1..120: mol_type = other DNA
cttctttagctctagttctctgacacttcagcctatatcacagctaacttcttcagtctcatctattccttatgctccagcccctggcaatttgcctcaagatgggggtttgaaaataac

SEQ ID NO: 22303 - DNA, 120 bp, synthetic construct
  source 1..120: mol_type = other DNA
cttttgaccacaagccagcccctcgccctctctgtggcatagtcttctctgccccaggactgcagggcggcttcctccaaggcttccaaggctcaaaagaaatttggctccatccaagaa

SEQ ID NO: 22304 - DNA, 120 bp, synthetic construct; identical to SEQ ID NO: 7020
  source 1..120: mol_type = other DNA

SEQ ID NO: 22305 - DNA, 120 bp, synthetic construct
  source 1..120: mol_type = other DNA
ctgctgtaatgacccagagtagcctccccaggccggcatcttatgtgtgtcttccaccatcctcatggtggcacttttctaggcctgtctcccagcattgtgcaaggctcggaagagaac

SEQ ID NO: 22306 - DNA, 120 bp, synthetic construct
  source 1..120: mol_type = other DNA
aatcatctccctcttgaaggattttatttctactgggttttggaacaaactcctgctgagaccccacagccagaaactgaaagcagcagctccccaaagcctggaaaatccctaagagaa

SEQ ID NO: 22307 - DNA, 120 bp, synthetic construct
  source 1..120: mol_type = other DNA
tgagtgcaggaaggtgttccagggtcgaaattacacttctcgtacctggagacgctgtttgtgggagcactgggctcatgcctggcacacaataggtctgcaataaaccatggttaaatc

SEQ ID NO: 22308 - DNA, 120 bp, synthetic construct; identical to SEQ ID NO: 7021
  source 1..120: mol_type = other DNA

SEQ ID NO: 22309 - DNA, 120 bp, synthetic construct
  source 1..120: mol_type = other DNA
gggtccggtcgcccctttgcccgcttctgtaccaccctcagttctcgggtcctggagcaccggcggcagcaggagctgcgtccggcaggagacgaagagcccgggcggcgctcgtacttc

SEQ ID NO: 22310 - DNA, 120 bp, synthetic construct
  source 1..120: mol_type = other DNA
ctgtggctctcttctctccatgtctcaccctctcccctccccgcactccccattcaggcctccagttggcccctggctttgcaggtcctccattctcacgcagtggatgggggtcgcgac

SEQ ID NO: 22311 - DNA, 120 bp, synthetic construct
  source 1..120: mol_type = other DNA
tcgtttggaccctcttgcttcctctaaaagttttaaactctctgcctgggaaaatacctgatagcccggcatgtggagttacaaagaaagggctgttatccaaaggccggtgaattttgt

SEQ ID NO: 22312 - DNA, 120 bp, synthetic construct; identical to SEQ ID NO: 7022
  source 1..120: mol_type = other DNA

SEQ ID NO: 22313 - DNA, 120 bp, synthetic construct
  source 1..120: mol_type = other DNA
tgcctactgacgtcttagaattccatgttgtacaagccctttgtttctatttagaaaggactaaaatggagaaaagctttttaagttcaaaacttcttaaattgcttgtattctcgattg

SEQ ID NO: 22314 - DNA, 120 bp, synthetic construct
  source 1..120: mol_type = other DNA
aaaactgtcctaaataacgtagtaccttgccagagtctaagtgcaaaatgtgggatcaaagcggtagtggaggaagttgccatggctaatttttccatctttccctggatggaagggttg

SEQ ID NO: 22315 - DNA, 120 bp, synthetic construct
  source 1..120: mol_type = other DNA
tttcttgaagttatgctagatgttctccaaagttgttaagcacaaactatgcctgctgtattagaattgtatgttaaaaatttttaacgtgtgggttataaatagcctggcagatttgtt

SEQ ID NO: 22316 - DNA, 120 bp, synthetic construct; identical to SEQ ID NO: 7023
  source 1..120: mol_type = other DNA

SEQ ID NO: 22317 - DNA, 120 bp, synthetic construct
  source 1..120: mol_type = other DNA
gggcagtagcaaagcaggggttgctgagccccaatcagtggctcactgcttctggcaaaatgatttgtagctctgtatcaaaaaacatctgaccacaaactctttaaaacctctcacttt

SEQ ID NO: 22318 - DNA, 120 bp, synthetic construct
  source 1..120: mol_type = other DNA
caaaaaaaaatacaaaaataagccaggcatggtggtgcatgcctgtgattccagctacttgggaggctgaggcaggaggattgttggagcccgggatgtggaggttgcagtgagccaaga

SEQ ID NO: 22319 - DNA, 120 bp, synthetic construct; identical to SEQ ID NO: 7024
  source 1..120: mol_type = other DNA

SEQ ID NO: 22320 - DNA, 120 bp, synthetic construct
  source 1..120: mol_type = other DNA
gatattggtcagtttttatgccagttggtgctctctgctgggtctctagtgttgtgttccttttcttctcatttcctcaggtttttatagcaaataacttaatctcttcctttgctgaga

SEQ ID NO: 22321 - DNA, 120 bp, synthetic construct
  source 1..120: mol_type = other DNA
cctccagatgtgtccatgtaccctttcccatctttctttctctagaaactgtccattttcacttcctgtccaccttcttcagcctctccctctctagcctacatagatgcttgtatcttc

SEQ ID NO: 22322 - DNA, 120 bp, synthetic construct
  source 1..120: mol_type = other DNA
atagtaggaagaacattgacttttgagcaagatagaacttttgatctgggtttttgaagtcttttaaaaccactttagtagctgtgtaactgtgggtatgttactattcagatttcattc

SEQ ID NO: 22323 - DNA, 120 bp, synthetic construct; identical to SEQ ID NO: 7025
  source 1..120: mol_type = other DNA

SEQ ID NO: 22324 - DNA, 120 bp, synthetic construct
  source 1..120: mol_type = other DNA
cctcctggcagatcagtggcggcattagattctcatagtagtgccaaccttgttttgaactgcacatgcaagggatcagggttgcatgttctttatgagaatctaactaatgcctgatga

SEQ ID NO: 22325 - DNA, 120 bp, synthetic construct
  source 1..120: mol_type = other DNA
cagttgtgaaatatactgtcttctgtagtcataaaacgatctagatttcttggcttttctgcattatacttcctgattctgtatttctcaggaagtttcttcacattttccttttatcag

SEQ ID NO: 22326 - DNA, 120 bp, synthetic construct
  source 1..120: mol_type = other DNA
ctgcagtgagctatgattgggccactgcacttcagtctgggtgacagaacgagaccccatctcaaaaaaacaaaaaaacccaaagagatgttttggctcttgcaattggcaagtacatag

SEQ ID NO: 22327 - DNA, 120 bp, synthetic construct
  source 1..120: mol_type = other DNA
ttgccaccaatgatgttcatattatagccccttcatttatttccaaagaaagagagaaggccacttctcctagccttttcccaagaatcctaagctctagtttgattaaacaaacataga

SEQ ID NO: 22328 - DNA, 120 bp, synthetic construct; identical to SEQ ID NO: 7026
  source 1..120: mol_type = other DNA

SEQ ID NO: 22329 - DNA, 120 bp, synthetic construct
  source 1..120: mol_type = other DNA
atatatactaccctaagtttaactcatactaaactgagtcagtttgatctcttcaccaaccctcacctagtgtgtgtgtgcacatatatgttttgttgtttgtgagaccgacggggtttc

SEQ ID NO: 22330 - DNA, 120 bp, synthetic construct
  source 1..120: mol_type = other DNA
catctcagcccttagcctcctgagtaactaggactacaggtgtgcatcaccacacccagcccttttttttttttttttaagcgaccggggcttgctgtattccccaggctggtgtcaaac

SEQ ID NO: 22331 - DNA, 120 bp, synthetic construct; identical to SEQ ID NO: 7027
  source 1..120: mol_type = other DNA

SEQ ID NO: 22332 - DNA, 120 bp, synthetic construct
  source 1..120: mol_type = other DNA
ctggctaacatagtgaaaccccatctctactaaaaataaaaaaattagccgggtatggtggcaggcgcctgtaatccccactactcaggaggctgaggcaggagaatcacttgaacccag

SEQ ID NO: 22333 - DNA, 120 bp, synthetic construct
  source 1..120: mol_type = other DNA
agtattccatggttagtttagctgtgctatgatttcatcaaggattcaggtgctttccatctttatgcttggctatccttagcatgcttaactttgggctcagactttgccatcatggtt

SEQ ID NO: 22334 - DNA, 120 bp, synthetic construct
  source 1..120: mol_type = other DNA
tgccgctgctttaattacgaggaggctgggaaaatgaatatgtggcatttcagtctaggaagagggtaagcaaatggctgattagaagaaaacagatggtgtcaatgacagtattgtatg

SEQ ID NO: 22335 - DNA, 120 bp, synthetic construct
  source 1..120: mol_type = other DNA
cgttcagtcactcaggctggagtgcagtggcttgatctcagctcagtgcaacctctacctcttgggttcagcgattctcctgcctcagcctcccaagtagctggcgcctgccaccacacc

SEQ ID NO: 22336 - DNA, 120 bp, synthetic construct; identical to SEQ ID NO: 7028
  source 1..120: mol_type = other DNA

SEQ ID NO: 22337 - DNA, 120 bp, synthetic construct
  source 1..120: mol_type = other DNA
tgtttaagactgtgttaagtacatttaagcatatctgttggagctactgcaagaaacaggtatgttatatgtaacaactattgaaatagagttgtggttccccttggggatgggagatgt

SEQ ID NO: 22338 - DNA, 120 bp, synthetic construct
  source 1..120: mol_type = other DNA
cagaattgtcctttcaaaaataccagtagtgcccctgcacatgtatacactgaagttagcaaatgctttgccttttgaaagaattcagagattgatctatattcttacattgcaagtgac

SEQ ID NO: 22339 - DNA, 120 bp, synthetic construct; identical to SEQ ID NO: 7029
  source 1..120: mol_type = other DNA

SEQ ID NO: 22340 - DNA, 120 bp, synthetic construct
  source 1..120: mol_type = other DNA
atatcacactctatgggtattatttttctgtcccatgcattactctaccttgtcttaattattgtattcttaatgtctaaatgtctggaatactgtctggcatagtagtgtatgataact

SEQ ID NO: 22341 - DNA, 120 bp, synthetic construct
  source 1..120: mol_type = other DNA
tgaggtaccccttggggatgggagatgtttagaaatttaagaacgcctcattccttcatcagttatttttgaatcctgaattatgtacattgtactcctaccactaaagcatgtatatga

SEQ ID NO: 22342 - DNA, 120 bp, synthetic construct
  source 1..120: mol_type = other DNA
gaagcctgctgtaggcagatagtgtggcaacattgagtgggaacaaaacagagcctgtgttgtctgagcttaaattttagtgggggacatagtcaataaatattatatatgtacacatac

SEQ ID NO: 22343 - DNA, 120 bp, synthetic construct; identical to SEQ ID NO: 7030
  source 1..120: mol_type = other DNA

SEQ ID NO: 22344 - DNA, 120 bp, synthetic construct
  source 1..120: mol_type = other DNA
attttgatacgtgtataaaatgtgtaatgatcaagtcggggtatttagagtacctgtcatcttgagcgtttatcatttctttgtgttgggaggaaaggtttttaattattaattcaatgt

SEQ ID NO: 22345 - DNA, 120 bp, synthetic construct
  source 1..120: mol_type = other DNA
ctgtggtccttttaatggctgcaggaaaagattcccttttcatatctgacgtaggttatttgtaccttttccttttccttattagtttcaccagagatcagtagtctttccagagaaccg

SEQ ID NO: 22346 - DNA, 120 bp, synthetic construct
  source 1..120: mol_type = other DNA
cttgtttttaaatatgttcataaagttaaacattcccctctaagcgccattttagctagttctattactagttttgatacatagtattttttggtacatagtatttttataattcactta

SEQ ID NO: 22347 - DNA, 120 bp, synthetic construct; identical to SEQ ID NO: 7031
  source 1..120: mol_type = other DNA

SEQ ID NO: 22348 - DNA, 120 bp, synthetic construct
  source 1..120: mol_type = other DNA
gattgtggatttgagtatttcccttgtagttctctaatcttttataaatttgaggctatgctattagatgcatagaaatgtgtaatagctatatcttctcagtgactcaacattatcaag

SEQ ID NO: 22349 - DNA, 120 bp, synthetic construct
  source 1..120: mol_type = other DNA
ctattctcagatgatgcactttaattctacttacttgcagcccttctcatatagttatttttgtttgtttgtttgttgttgttgttgttttgagacagggtctcgctgtgttgcccaggc

SEQ ID NO: 22350 - DNA, 120 bp, synthetic construct
  source 1..120: mol_type = other DNA
tttttttgtactttgagtagatacggggtttcaccatgtttgctaggctggtcttgaagtcccggcctcccagaatgctgggattacaggtatgagccaccgtgcccagcccctactcat

SEQ ID NO: 22351 - DNA, 120 bp, synthetic construct; identical to SEQ ID NO: 7032
  source 1..120: mol_type = other DNA

SEQ ID NO: 22352 - DNA, 120 bp, synthetic construct; identical to SEQ ID NO: 212
  source 1..120: mol_type = other DNA

SEQ ID NO: 22353 - DNA, 120 bp, synthetic construct
  source 1..120: mol_type = other DNA
ttttctttttctttttttttttttttttttttttttttttgcttctttttgacctcaaggcattgttctggatattgcttcagacttatcttcaaagttcacattttttttttcacctat

SEQ ID NO: 22354 - DNA, 120 bp, synthetic construct
  source 1..120: mol_type = other DNA
aatatttaagtgtggcctttatccccttgaatgtagtaagcatagttatttttcagtttgtgtctgataattccaatgttgggaagtctctaggaagctgattcagttgtgttgtagaaa

SEQ ID NO: 22355 - DNA, 120 bp, synthetic construct
  source 1..120: mol_type = other DNA
gtgtgagaacatcttaatgaaatttcaaatctttaactttcctgggccacccagatgagttgaaactgacttcagtccatggtttccttctggttccttctttatttctaggttgcagcc

SEQ ID NO: 22356 - DNA, 120 bp, synthetic construct; identical to SEQ ID NO: 7033
  source 1..120: mol_type = other DNA

SEQ ID NO: 22357 - DNA, 120 bp, synthetic construct
  source 1..120: mol_type = other DNA
gactaacttgttcagaaagactggaaatttctacattagccattcctttgtgttagggctcctttgatggtgcaaattagatacctggaaaaggtagactttaagctatggttgcctttt

SEQ ID NO: 22358 - DNA, 120 bp, synthetic construct
  source 1..120: mol_type = other DNA
aggaattatgtaagcaaatagaatgtaatgtgaacatttttgaagtgggactgtatggaggagggagaatgtactaaactgaggagggactgcagacaaatttgtcttttagtatttttg

SEQ ID NO: 22359 - DNA, 120 bp, synthetic construct
  source 1..120: mol_type = other DNA
acctctgctttctaggttcaagcaattctcctgcctcagccctccgagtagctgggattacaggtgtgcaccaccacgcccggctaatttttttttttaatttttagtagaggtggggtt

SEQ ID NO: 22360 - DNA, 120 bp, synthetic construct; identical to SEQ ID NO: 7034
  source 1..120: mol_type = other DNA

SEQ ID NO: 22361 - DNA, 120 bp, synthetic construct
  source 1..120: mol_type = other DNA
ggtgatcctcccacctcagcctcccaaagttctgggattacagttgtgcgccactgcgcccagccaattttcaataaaaattctggcaaatctctctatgccatgtaggtgtcatgattt

SEQ ID NO: 22362 - DNA, 120 bp, synthetic construct
  source 1..120: mol_type = other DNA
tgttgaatatggaagccaaacagatacattagaaattcttctaggcaaactaagctatggtagtctacataaattggtgttcttctgtgatggaggagtgttaaaaatttagtataacat

SEQ ID NO: 22363 - DNA, 120 bp, synthetic construct
  source 1..120: mol_type = other DNA
ttgtatgaaaacctagaattcttatgtgtttactgtttacttatttttttctctttgctagaagaaaatactaagtcaaagattcctattatagttccttctctttcctgctatgttaga

SEQ ID NO: 22364 - DNA, 120 bp, synthetic construct; identical to SEQ ID NO: 7035
  source 1..120: mol_type = other DNA

SEQ ID NO: 22365 - DNA, 120 bp, synthetic construct
  source 1..120: mol_type = other DNA
cctgctaggcagtattggatatcctttgatgtttatagttgtgaatttaaagtgaaaccagctagctttgttagctggttttccccctttcctctataataagctgctctggtacaggca

SEQ ID NO: 22366 - DNA, 120 bp, synthetic construct
  source 1..120: mol_type = other DNA
agtgtaaagatgaaagtaacggatggtgaaaaatgatgagagcatttttgattggattggagaacacagtaagtaaggtgagggaatgttgaatttggagatagtataatgaactagagg

SEQ ID NO: 22367 - DNA, 120 bp, synthetic construct
  source 1..120: mol_type = other DNA
agcctggccaacatagtgaaactccatctctagtaaaaatacaaaaattagccaggcatggtggcgtgtgcctgtaatcccagctactcgagaggctgaggcatgagaatcacttgaacc

SEQ ID NO: 22368 - DNA, 120 bp, synthetic construct; identical to SEQ ID NO: 7036
  source 1..120: mol_type = other DNA

SEQ ID NO: 22369 - DNA, 120 bp, synthetic construct
  source 1..120: mol_type = other DNA
tagagggtacacagttgggtatcatgtcagaagatcttgggtgtttaagaaaggaggagaaatggtttggaagtgataattggatgcaaggagcatatcttttgcctccctctacaccag

SEQ ID NO: 22370 - DNA, 120 bp, synthetic construct
  source 1..120: mol_type = other DNA
aaatctcctaatgttttaagaaagtttacgaatttgtgttgggctgcattcaaagccatcctgggccatgcagccctggggacaaatttgctctagacccttcagtatcctattcctatc

SEQ ID NO: 22371 - DNA, 120 bp, synthetic construct
  source 1..120: mol_type = other DNA
aagagtttgaagttacaggggagttcgttgattaatttattgtacattcatctattgtattttagtacagtagtactaaagtaatacactgttcggttttgtgagttacataaatttcca

SEQ ID NO: 22372 - DNA, 120 bp, synthetic construct; identical to SEQ ID NO: 7037
  source 1..120: mol_type = other DNA

SEQ ID NO: 22373 - DNA, 120 bp, synthetic construct
  source 1..120: mol_type = other DNA
gtcctagcctctggaacttctgattggcttcaagttgggtttcccactaccccctctttggagtcgattaatttgctggagcacctcacagaactcagggaaacacttgcttatatttac

SEQ ID NO: 22374 - DNA, 120 bp, synthetic construct
  source 1..120: mol_type = other DNA
acgtgttcagctatatggaagctgtctgaaccctgtcctcttggctttttatggaggcctcattgcataggtatgattgacaaccatgtagaaatgtgtttggacaaaaagtgcgtgatc

SEQ ID NO: 22375 - DNA, 120 bp, synthetic construct; identical to SEQ ID NO: 7038
  source 1..120: mol_type = other DNA

SEQ ID NO: 22376 - DNA, 120 bp, synthetic construct
  source 1..120: mol_type = other DNA
caaaaaataaaaaaattagttgggcatggtggtgcagccttgtggtgccagctactcagaaagctgagatgggagaattgcttgagcctgtgaggcggaggttgcagtgagccaagatta

SEQ ID NO: 22377 - DNA, 120 bp, synthetic construct
  source 1..120: mol_type = other DNA
tgtggtattcaggttttcttttgtgggaggggaaaacatgaagagaatagtagttcaaaaatttaaacatctgtcatggtcccataggaataatgtgttgaccggaatgatgatgtccca

SEQ ID NO: 22378 - DNA, 120 bp, synthetic construct
  source 1..120: mol_type = other DNA
caggaacatttcatctccttttattgctctagtataagagttttcttccttaccttaccattactgcccccactgctactctttgccaagcaattaaagtggaaattccctgcttctaaa

SEQ ID NO: 22379 - DNA, 120 bp, synthetic construct; identical to SEQ ID NO: 7039
  source 1..120: mol_type = other DNA

SEQ ID NO: 22380 - DNA, 120 bp, synthetic construct
  source 1..120: mol_type = other DNA
tactagatacctgggacagtgcttgtatagttatgaagaagaaaaagcttgttgttcagaagctcatagtctaatggagagaaatagatattagttgagttggtactttgggagcatgga

SEQ ID NO: 22381 - DNA, 120 bp, synthetic construct
  source 1..120: mol_type = other DNA
atattctgcagctatttgggtacctactttggaccaggcgcaatactagaatacatttgagaatacaattatgacatacaagagtcttgtcctcaaacagcttttagtgagaaagagcaa

SEQ ID NO: 22382 - DNA, 120 bp, synthetic construct
  source 1..120: mol_type = other DNA
ttgggagaggtcatctaaattgggtcctgtaaaatgggtccacattatctaggtgaaaaagcagatgtaagaaccttccagtaaatgaaatggtatagtgatttggtggtgagtgcacag

SEQ ID NO: 22383 - DNA, 120 bp, synthetic construct; identical to SEQ ID NO: 7040
  source 1..120: mol_type = other DNA

SEQ ID NO: 22384 - DNA, 120 bp, synthetic construct
  source 1..120: mol_type = other DNA
cctagcctccccagttacagacacgtgccaccacacccagctaatttgtatttttagtagagacagagtttcactatgttggccaggctgttctcaaactactgacctcaggtggtccac

SEQ ID NO: 22385 - DNA, 120 bp, synthetic construct
  source 1..120: mol_type = other DNA
atttaaacagtaagagagtgccactcggttctgttccccagaggaagtcactgttgtttcttgagtgttcaagcagcatattcttaatatcagaatagtgttagaaacaaaacagtttca

SEQ ID NO: 22386 - DNA, 120 bp, synthetic construct
  source 1..120: mol_type = other DNA
accccatctctacaaaaacatacaaaaaaaaaaaatagctgggctcagtagtgcaggcctgtagtcccaggtacttgggaggctgagttgggaggatcacctgagcccaggaggttgagt

SEQ ID NO: 22387 - DNA, 120 bp, synthetic construct; identical to SEQ ID NO: 7041
  source 1..120: mol_type = other DNA

SEQ ID NO: 22388 - DNA, 120 bp, synthetic construct
  source 1..120: mol_type = other DNA
cacacagacgggcaggtgcagaagccggggcaagtgcccctgggctccggccccctggcagcatccaggggtgggagcctgcagctcctgaagcccaagtgggcatgtgttacagtgagc

SEQ ID NO: 22389 - DNA, 120 bp, synthetic construct
  source 1..120: mol_type = other DNA
agattcaggttgtacacggacttgaaggatgaatgcatgggttttatcgagttgtggaggtggctctcagtgagatggatggggagctggaagggggatggagtgggaagatgatcttcc

SEQ ID NO: 22390 - DNA, 120 bp, synthetic construct
  source 1..120: mol_type = other DNA
ttcttttctctgctgtgctgttttgctgttcttctgcttctccatttgtctccttgtggagcagggggtttggggtttttaatgggcacaggataaggggacatggcagaccagaaggca

SEQ ID NO: 22391 - DNA, 120 bp, synthetic construct; identical to SEQ ID NO: 7042
  source 1..120: mol_type = other DNA

SEQ ID NO: 22392 - DNA, 120 bp, synthetic construct
  source 1..120: mol_type = other DNA
tacatttattagattgtcctgattttcttttctctcttctctctgagaacataatattaaataggcattatgaacgcctatattaggtgactcattctcctaatgcttaaaatgagtcta

SEQ ID NO: 22393 - DNA, 120 bp, synthetic construct
  source 1..120: mol_type = other DNA
aagaggtttccaatttgattgacatagtccagtaatgctagatagattttttttttttcattttacttaatagtaagttgggacccttgcaaacacttatcttcggacattcagagtgaa

SEQ ID NO: 22394 - DNA, 120 bp, synthetic construct
  source 1..120: mol_type = other DNA
attttaaaagcttatattttctctttcaaggtaagaatttggtaatattggtataagaacaaaagtcttttgacccaaggctttggtttcaagttctaaatgccattactatgccctata

SEQ ID NO: 22395 - DNA, 120 bp, synthetic construct
  source 1..120: mol_type = other DNA
ggcattttaggacatcttaaatattaaataaatgatcattttgatcttgttttcttgggaaaaagactttaaaaaaatcatcctatgtgctactctttcttgaatccacatgcataagca

SEQ ID NO: 22396 - DNA, 120 bp, synthetic construct; identical to SEQ ID NO: 7043
  source 1..120: mol_type = other DNA

SEQ ID NO: 22397 - DNA, 120 bp, synthetic construct
  source 1..120: mol_type = other DNA
aaaacattatgagatttttttgcaattttttttttttaagctcatcagctgtcgatagtgttactgtgttttttgttgttgttgttttgagacagagtctctctctgttgctcaggctgg

SEQ ID NO: 22398 - DNA, 120 bp, synthetic construct
  source 1..120: mol_type = other DNA
ttttttgtatttttagtagagacggggtttcaccatgttggccaggctgctcttgaactcctgacctcaaatgatccgcccacctcagcctcccaaagtgctgggaatacaggcgtgagc

SEQ ID NO: 22399 - DNA, 120 bp, synthetic construct
  source 1..120: mol_type = other DNA
atccctggaaaacactgcataccttgaaattgaagttttaaccgattaggacatgttaagaatttagaaaaataaagttcttacgcacagttttttctaaatcttttgttaattgggtaa

SEQ ID NO: 22400 - DNA, 120 bp, synthetic construct; identical to SEQ ID NO: 7044
  source 1..120: mol_type = other DNA

SEQ ID NO: 22401 - DNA, 120 bp, synthetic construct
  source 1..120: mol_type = other DNA
cacaatattgaaatctctgccctgaaaaattcctaaacatccttgaagtctagttctgttactactttctctctgaaatcttttttgattacctagctggaaacgatctaatctcccatt

SEQ ID NO: 22402 - DNA, 120 bp, synthetic construct
  source 1..120: mol_type = other DNA
attattgtatcatctacattcatacattgaacaaaaagcaccaagcactgttatagatgcgagggaaagagcagtgcaggagaatcttggttcttgtcttcatgggatttatattccact

SEQ ID NO: 22403 - DNA, 120 bp, synthetic construct; identical to SEQ ID NO: 7045
  source 1..120: mol_type = other DNA

SEQ ID NO: 22404 - DNA, 120 bp, synthetic construct
  source 1..120: mol_type = other DNA
gattacactgggaagccaatgaacagtttgaagtttttaagggctcatgtcattacattgggtctacccaggataatctcatgattttaaggtcagctaactaataaacttaattttatc

SEQ ID NO: 22405 - DNA, 120 bp, synthetic construct
  source 1..120: mol_type = other DNA
atttagtatcttacaagggcagtgaaacagaactaacttagggtagctgagttgttgagtcatcacagtttttctgatttattttgcctttactaatatgcccactccttggcattacct

SEQ ID NO: 22406 - DNA, 120 bp, synthetic construct
  source 1..120: mol_type = other DNA
ctgcatttaaagaaattttgttccagatattttccagagagatctgtattttctcatggataaaaatttatgggtggattcattgtagattctaaaaggacattttcaaatctgtttgag

SEQ ID NO: 22407 - DNA, 120 bp, synthetic construct; identical to SEQ ID NO: 7046
  source 1..120: mol_type = other DNA

SEQ ID NO: 22408 - DNA, 120 bp, synthetic construct
  source 1..120: mol_type = other DNA
tgaatatatgaaaatgcctaacgtaatgtttgccactggtttagaagcatatttatcatgaaactgatgaagtttagtgaacctaattgcatggccctttctaaggcccttgcaggagca

SEQ ID NO: 22409 - DNA, 120 bp, synthetic construct
  source 1..120: mol_type = other DNA
accacaaaatctgaatctgcctttggccacaggttaagtgagaaatgttaatttctctctcctctaatgttgtgacttcagttagtgtcgaacctagaagtacttaacttaaaaaaaatg

SEQ ID NO: 22410 - DNA, 120 bp, synthetic construct
  source 1..120: mol_type = other DNA
acatgatgttttatctctctctgcttttctctgtgtacatacgcaatttattttttaaaagctagtttatatcatattaaacagacaatattctgcattttcacataatatatggattat

SEQ ID NO: 22411 - DNA, 120 bp, synthetic construct
  source 1..120: mol_type = other DNA
tagtacaagtaatgccaaattacaaatctttgtaggggtatctgtacataggataatttcttttaattgggcttgcttgagtataagaattgcctttgtccattttctgctactataaca

SEQ ID NO: 22412 - DNA, 120 bp, synthetic construct; identical to SEQ ID NO: 7047
  source 1..120: mol_type = other DNA

SEQ ID NO: 22413 - DNA, 120 bp, synthetic construct
  source 1..120: mol_type = other DNA
aatattattttaaaatatcattgcctatttttatagtactcttgtgtttatttctatttctttgatcatttgatatactaaaacattcttctgggtttttttggttttgttttgttttgt

SEQ ID NO: 22414 - DNA, 120 bp, synthetic construct
  source 1..120: mol_type = other DNA
actacaggcatgtgccacctcgcctggctaagttttgtatttttagtagagacagggtttcgccatgttggccaggctggtctcaaactcctggcctcaagtgatctgcccaccttggcc

SEQ ID NO: 22415 - DNA, 120 bp, synthetic construct
  source 1..120: mol_type = other DNA
ggaaagctttttgacaggaagaagtaagtttctttctcctgtaagcaagtcctgaggctgtataacactccaaattaaaaggctatttcaaaatggtttccctactgtagtgcagtggga

SEQ ID NO: 22416 - DNA, 120 bp, synthetic construct; identical to SEQ ID NO: 7048
  source 1..120: mol_type = other DNA

SEQ ID NO: 22417 - DNA, 120 bp, synthetic construct
  source 1..120: mol_type = other DNA
aacacctatgtagaaaacattgtgatatacaccatgagatatgagacaaaatcaggtgagggctcttcccttgggattttaatagtcaggaatgggataagaggtgtatacacacaggta

SEQ ID NO: 22418 - DNA, 120 bp, synthetic construct
  source 1..120: mol_type = other DNA
gggaaaaggagatgaattgattctaggtgggttgctggattacttcatgggaatttatgtttaagccaaaccatgatttgggccagtagagcaattaatcatcctttactttaaaaaatt

SEQ ID NO: 22419 - DNA, 120 bp, synthetic construct; identical to SEQ ID NO: 7049
  source 1..120: mol_type = other DNA

SEQ ID NO: 22420 - DNA, 120 bp, synthetic construct
  source 1..120: mol_type = other DNA
gcttcctagtccccagaatctatgaatatgttaggttatgtgacaaaagggaattaaaatggctaatgaggtaactttaaaataggaagatcatcctggattattgacgtgggccaaatg

SEQ ID NO: 22421 - DNA, 120 bp, synthetic construct
  source 1..120: mol_type = other DNA
gcaaggtcagtcctgcagaatgagaaagactcagtccaccattgcttgctctgaagatggaagtgaagtgctatgaaccataaaatacagtggatctgtagaagccagaaaggataagga

SEQ ID NO: 22422 - DNA, 120 bp, synthetic construct
  source 1..120: mol_type = other DNA
taggacatttaatacgcctaggaactattttattgtaggaagactaattaacatgacctcagggcactccatgactaaactccaaactgtctctgttccactgtcagcagtagaaagaca

SEQ ID NO: 22423 - DNA, 120 bp, synthetic construct; identical to SEQ ID NO: 7050
  source 1..120: mol_type = other DNA

SEQ ID NO: 22424 - DNA, 120 bp, synthetic construct
  source 1..120: mol_type = other DNA
agctgtgcttatgccactgcactccagcctgggtgacagagcaagacctcgtccctgaaaaaatgggagatggttaggtggatggatagacagacagacatatagataaagatagacacg

SEQ ID NO: 22425 - DNA, 120 bp, synthetic construct
  source 1..120: mol_type = other DNA
catgaaaaatacagaaccagttaggcacacatctaacttatctcttcttaggcttttccatcgtaccataactaactataagatccgaacactgaaaggtttctaaatctgagctttatt

SEQ ID NO: 22426 - DNA, 120 bp, synthetic construct
  source 1..120: mol_type = other DNA
tctaaggtcttcggtaaagagagacgattaagtttatcagtaaagcaccagagtcaattaaggcgactgaaaggagcactaattttaattcattttacactagttaatattgtcaatatt

SEQ ID NO: 22427 - DNA, 120 bp, synthetic construct
  source 1..120: mol_type = other DNA
tcttgctttgtcactgaggctggagtacagtggtgtgatctcggctcactgcagcccccacctcccaggtccaagagattctcatgcctcagcctcccaagtagctggggaatgtaatat

SEQ ID NO: 22428 - DNA, 120 bp, synthetic construct; identical to SEQ ID NO: 7051
  source 1..120: mol_type = other DNA

SEQ ID NO: 22429 - DNA, 120 bp, synthetic construct
  source 1..120: mol_type = other DNA
ctagagtagctaggaccacaggcgcgtgtcaccacagctggctaatttttttgtattcttggtagaaatgaggtttcgccatgttgcccatgctggtctccaactcctgagctcaagtga

SEQ ID NO: 22430 - DNA, 120 bp, synthetic construct
  source 1..120: mol_type = other DNA
catcttcaatcaaatagagatggcaggagctttattctgagctatgtgcaaacttgataagacaaggtaatgcttcagtaattttccatgctgaaatttggcccagtatactttgattat

SEQ ID NO: 22431 - DNA, 120 bp, synthetic construct
  source 1..120: mol_type = other DNA
aaatgtttaacttggctttcttttagatttgaagcatagtgactaatgaacatataatggtcgtagctttctttacaactatgtcatttaagtcactgatgaatatctatgatacatgca

SEQ ID NO: 22432 - DNA, 120 bp, synthetic construct; identical to SEQ ID NO: 7052
  source 1..120: mol_type = other DNA

SEQ ID NO: 22433 - DNA, 120 bp, synthetic construct
  source 1..120: mol_type = other DNA
caaatatgaagggaaattgtttctaaatatatttaaacttttaatagaacagtagtatgccatcagtgtggaaataactcacttgttaaataaatatttggggtgtatttgctgtatatc

SEQ ID NO: 22434 - DNA, 120 bp, synthetic construct
  source 1..120: mol_type = other DNA
attgcttttctaatatatacattttttaatcaaatggaattgcctcaaatatgctatttaatagcttgcttcttttcatactatttgaaaattaagaaacgattataatatgcttcattt

SEQ ID NO: 22435 - DNA, 120 bp, synthetic construct
  source 1..120: mol_type = other DNA
accccgtctctactaaaaatacaaaacttagctgggcatgatggcacgtgcctgtagtcccagctacttgggaggctgaggcaggagaatcgcttgaacccgggaggtggaggttgcagt

SEQ ID NO: 22436 - DNA, 120 bp, synthetic construct; identical to SEQ ID NO: 7053
  source 1..120: mol_type = other DNA

SEQ ID NO: 22437 - DNA, 120 bp, synthetic construct
  source 1..120: mol_type = other DNA
acttctgttcccgttttatacagcaggaaattgaaacactgagaggttaagtaactaaagttacagagctagagtgacaggagtaaagcttcaactcaggcaacccagacttccagagtt

SEQ ID NO: 22438 - DNA, 120 bp, synthetic construct
  source 1..120: mol_type = other DNA
aattattcattgtaattcatttaatattattgtttctctgtgctgcaaaaatcatagcaatcgagatgtaatttattactctccctcccacctccggcatcttgtgctaatccttctgcc

SEQ ID NO: 22439 - DNA, 120 bp, synthetic construct
  source 1..120: mol_type = other DNA
gtgcggttgggcggggccctgtgccccactgcggagtgcgggtcgggaagcggagagagaagcagctgtgtaatccgctggatgcggaccagggcgctccccattcccgtcgggagcccg

SEQ ID NO: 22440 - DNA, 120 bp, synthetic construct; identical to SEQ ID NO: 7054
  source 1..120: mol_type = other DNA

SEQ ID NO: 22441 - DNA, 120 bp, synthetic construct
  source 1..120: mol_type = other DNA
gagaaaagctgtttttgaagccagaaggggtttttgtttttataatgccatttgacagagtggaataacagtatctaaggaaacgggtagaggacaacaaagaatggagcatattcatgg

SEQ ID NO: 22442 - DNA, 120 bp, synthetic construct
  source 1..120: mol_type = other DNA
agtggaaagagctactggggatgagagaaagaggaggaggcaggtactgcagagcgtgagtggtggtgttggttggtgaaatactggtcaccagtagtgtgcctgcttttgtaaaacatc

SEQ ID NO: 22443 - DNA, 120 bp, synthetic construct; identical to SEQ ID NO: 7055
  source 1..120: mol_type = other DNA

SEQ ID NO: 22444 - DNA, 120 bp, synthetic construct
  source 1..120: mol_type = other DNA
tcttaataaattatgtatgaaacagtggatcttttcttttgttagtgaagcttttatgccattaattaggtcattcaagagcaaaccactttacaacgtaaattactttgtcaaaaatta

SEQ ID NO: 22445 - DNA, 120 bp, synthetic construct
  source 1..120: mol_type = other DNA
aacactgaataaatatttaagatattaattcagtgtgcaaatattttaaattaaagcaacatggcttttcttctagatgtatttctgtttagtgagtactcatgagatatactcttgata

SEQ ID NO: 22446 - DNA, 120 bp, synthetic construct
  source 1..120: mol_type = other DNA
tgccacacctccccactccctgaacaaggatggcagtggctttgtaaagccctccagggtcagtgacagtgtctcttaaataatgtttatgtaatagaaagtcttaagatgacctattat

SEQ ID NO: 22447 - DNA, 120 bp, synthetic construct; identical to SEQ ID NO: 7056
  source 1..120: mol_type = other DNA

SEQ ID NO: 22448 - DNA, 120 bp, synthetic construct
  source 1..120: mol_type = other DNA
ttccaaatgacatttaacagctaatattactcagttctttgaattccattagcatagtgtttgagagtctataaaactattatttttacataaattaccttttaccattttaacagctca

SEQ ID NO: 22449 - DNA, 120 bp, synthetic construct
  source 1..120: mol_type = other DNA
ctataaaactataatgccttttattacatacatacaaaataatatataacagaggtaatttgaaaaacagtgtaagtcactgacaaattattcaaaaaatgaaaaggcaatcctacttgg

SEQ ID NO: 22450 - DNA, 120 bp, synthetic construct
  source 1..120: mol_type = other DNA
atcatatgaacacatttaagtagaacagtgttagattgagatgtttttctgaattaaataagaaataaagaactaaagtttatttcattcctcttgtagtatatctaatctatgactgac

SEQ ID NO: 22451 - DNA, 120 bp, synthetic construct; identical to SEQ ID NO: 7057
  source 1..120: mol_type = other DNA

SEQ ID NO: 22452 - DNA, 120 bp, synthetic construct
  source 1..120: mol_type = other DNA
gtggtctcgaactcgtgagctcaaatgatcctcccacctcagcctcccaaagtgctgggatttacaggtgtgagccaccatgaagtttttccatttgcattaattgctctgtagatttta

SEQ ID NO: 22453 - DNA, 120 bp, synthetic construct
  source 1..120: mol_type = other DNA
gatctcccttctcccccttttcttgtattagaatctgaaacctacctatgcagcacataaaatgggatagagtattatggttcagaaaagatgggtaatagtttaggaaatatattcact

SEQ ID NO: 22454 - DNA, 120 bp, synthetic construct
  source 1..120: mol_type = other DNA
aaacactgctttggctactcctaggatatttaaagatttatataatctaagatatcctctaatttagaagaatatggtggattgctgtttgaaacactgctttttcataaaatctgctta

SEQ ID NO: 22455 - DNA, 120 bp, synthetic construct
  source 1..120: mol_type = other DNA
acatcatcagttgatacaaggtaagccttctcccctttattctcacaccctgcacccactcttcttgtgtgtttaatatgcataaattcttgagaaatagcatcattttgtgagtctgtt

SEQ ID NO: 22456 - DNA, 120 bp, synthetic construct; identical to SEQ ID NO: 7058
  source 1..120: mol_type = other DNA

SEQ ID NO: 22457 - DNA, 120 bp, synthetic construct
  source 1..120: mol_type = other DNA
tagccatgtgtcagaatttctttcctttttaggtctaaatgatgttccattgcatgtatatgccacattttgttcattcatctgtcagtggacacttcaggttgtttccaccttttgtct

SEQ ID NO: 22458 - DNA, 120 bp, synthetic construct
  source 1..120: mol_type = other DNA
actgtttttaagatctatccattttactttatgtccatctagtttgtgatgctaactctgctctatagtattctatagtacctatcactgttcctccagtgaaggccgtaagttttctcc

SEQ ID NO: 22459 - DNA, 120 bp, synthetic construct
  source 1..120: mol_type = other DNA
ctgtggggcaagaattcaggaatgtcttagttggatggtctgactgaggcaggatctcttatgaagtagcagtcacgatgtcagtcacagatacagtcatctgaagggcttgactagact

SEQ ID NO: 22460 - DNA, 120 bp, synthetic construct; identical to SEQ ID NO: 7059
  source 1..120: mol_type = other DNA

SEQ ID NO: 22461 - DNA, 120 bp, synthetic construct
  source 1..120: mol_type = other DNA
gcccaccaaagagaggaattaggatccacctcttaaaggagtagggtcaaagaatttatgatatattttaagatcattacatcgaccagtgaaacagtttcactggatttatccctagga

SEQ ID NO: 22462 - DNA, 120 bp, synthetic construct
  source 1..120: mol_type = other DNA
acaaatgtattatcttgcagtcctggagatcagacacggttttcactggaccaaaatcaagatatcagtggctctgcgtctcctctagagattctattgaagaatccattttcttgcttt

SEQ ID NO: 22463 - DNA, 120 bp, synthetic construct
  source 1..120: mol_type = other DNA
ccatcttcagtgccagcagcattctaaatctctctctgaatctgaccctctgctgctcttgtcacatattcttctctgacccttctgcctccttcttaaaagaacctttgtgattacatt

SEQ ID NO: 22464 - DNA, 120 bp, synthetic construct; identical to SEQ ID NO: 7060
  source 1..120: mol_type = other DNA

SEQ ID NO: 22465 - DNA, 120 bp, synthetic construct
  source 1..120: mol_type = other DNA
aacgttaaagcaacacagccttattaaatttctctttgtatcttttagactcgttataacaccagttctgtgggcgctttgttgaaacttgatctgtcattgtcttaccagtcattgaac

SEQ ID NO: 22466 - DNA, 120 bp, synthetic construct
  source 1..120: mol_type = other DNA
ttttccctctgttgcgcaggctagagtagcttctgggctcaagcagtcctcccaactgagcctcccaagtagctaggattacaaacatgtgccaccacagctgactaatttttaattttt

SEQ ID NO: 22467 - DNA, 120 bp, synthetic construct
  source 1..120: mol_type = other DNA
acacctgtaacatatctttttatgaaacacagttcaacccataacactcccttaatacttggtaccttgtgaataataagatacctaaatatggtaccttgtggataacaaggcatattg

SEQ ID NO: 22468 - DNA, 120 bp, synthetic construct; identical to SEQ ID NO: 7061
  source 1..120: mol_type = other DNA

SEQ ID NO: 22469 - DNA, 120 bp, synthetic construct
  source 1..120: mol_type = other DNA
agacatcaggaaggttttgtgtaagaaactgagctgggccttaaaggatgaggatatattataacagcagaggaaaaaaggatgtggtattcagaaaggggaggaggtataaacaaaaat

SEQ ID NO: 22470 - DNA, 120 bp, synthetic construct
  source 1..120: mol_type = other DNA
gaacaccagacagaagttatacagtctttgagagcatgagcattaaaaacaagtacagatttgaattctggcataggctcttgatatgtgttcttagggaagttatctactgttttggag

SEQ ID NO: 22471 - DNA, 120 bp, synthetic construct
  source 1..120: mol_type = other DNA
atcaggctttctgaatttcacatatcaaatacataaaaaataagggcatatataggatttaaataatatgctggtcagttatagaactttatatacttttccttttaaaacatttttagt

SEQ ID NO: 22472 - DNA, 120 bp, synthetic construct
  source 1..120: mol_type = other DNA
ctcaaaaagccttatatacctaacaattgagacagatctttgaagtatcccctagatcaaagaggaaatcaagatggaagtcatgagttatctggaaataaagaggggaacacttcatac

SEQ ID NO: 22473 - DNA, 120 bp, synthetic construct; identical to SEQ ID NO: 7062
  source 1..120: mol_type = other DNA

SEQ ID NO: 22474 - DNA, 120 bp, synthetic construct
  source 1..120: mol_type = other DNA
ggctggtctcaaactcctgaccttgacctgcctcgcaaagtatggggattacacgcgtgagccaccacgccagcctttcactttaaataactattaaaaataacaaagtaaaccaaagga

SEQ ID NO: 22475 - DNA, 120 bp, synthetic construct
  source 1..120: mol_type = other DNA
taaaaagtttaaaggaataaaaggcaaacagaacatcagtgagaaaagataccttcagataaagaatttttaaatgacagaatatatacaactctgacaatacatttgaaaaactagagg

SEQ ID NO: 22476 - DNA, 120 bp, synthetic construct; identical to SEQ ID NO: 7063
  source 1..120: mol_type = other DNA

SEQ ID NO: 22477 - DNA, 120 bp, synthetic construct
  source 1..120: mol_type = other DNA
aaagcataaaacatgaacaactggggtttatttcaggaatggaggataggtcaacattcaaaaatcttataactgactgcatcaagaaattaaaagagaaacgatatgattatacaaaaa

SEQ ID NO: 22478 - DNA, 120 bp, synthetic construct
  source 1..120: mol_type = other DNA
gccattcttattaaaatcgagaataagatagtttattcgacattttaaagtttcaagctaacaataaaacgtgaaaaagaagtgaggtacaaatgcaggaaagaagagtcacaagtatca

SEQ ID NO: 22479 - DNA, 120 bp, synthetic construct
  source 1..120: mol_type = other DNA
ttatatatactagcaatatttgtttttctttctttcttttattaagagaaggggtcacactgcattacccaagctggtctcactcaagtgatcctccagccccagccttccaaagtgctt

SEQ ID NO: 22480 - DNA, 120 bp, synthetic construct; identical to SEQ ID NO: 7064
  source 1..120: mol_type = other DNA

SEQ ID NO: 22481 - DNA, 120 bp, synthetic construct
  source 1..120: mol_type = other DNA
cagttatccatatgaaacacaataaagttagaccactacactcatgccatacacagcaataaaaatgccttatgaattaaagatctaaatgtaaagtaaaatttcttattcaagctagtg

SEQ ID NO: 22482 - DNA, 120 bp, synthetic construct
  source 1..120: mol_type = other DNA
gtaacaagtttctggaagatgaagaaatcgtgggaattaaaatggatcactgaaaagaaatcaaggattctaagacttcctagttctctgttctttccaacatggcaggttggaaattta

SEQ ID NO: 22483 - DNA, 120 bp, synthetic construct
  source 1..120: mol_type = other DNA
tctatttatgtgtttggggctgcttttgtgctacagctacaaagtcaagtagttgcaacagaaatcatacgacccacaaagccttataatatttattatctggcccttacagaaaatgct

SEQ ID NO: 22484 - DNA, 120 bp, synthetic construct; identical to SEQ ID NO: 7065
  source 1..120: mol_type = other DNA

SEQ ID NO: 22485 - DNA, 120 bp, synthetic construct
  source 1..120: mol_type = other DNA
gttgactggaagtgtggatagtagacatcttattcctgattttaaagagaatgtctgtaacatttcactatgaagaatgaagtttatagctgggtgtggagcgcctgtaatcccagcagt

SEQ ID NO: 22486 - DNA, 120 bp, synthetic construct
  source 1..120: mol_type = other DNA
gaacctgggaggttacagtgagcccagatcatgccactgcactccagcctgggcaacagagcaagactccatctatttaaaaaacaaaaaaaagaatgaggtttacaaaattagctgggc

SEQ ID NO: 22487 - DNA, 120 bp, synthetic construct
  source 1..120: mol_type = other DNA
cagaaaaaaagaatgaagtttgctttagctctgacagtttccctcctatttccaggtttttatggaaagttttttctttgtctaagatggtttttctttagtattttaatgtagcgagtg

SEQ ID NO: 22488 - DNA, 120 bp, synthetic construct
  source 1..120: mol_type = other DNA
acacatataaatgatcttatattgcactctactcgcattcctggaataaactcagctttgttctgctgtagtttctttactgtatgttattgtattctgcttcctgataatctcgtttag

SEQ ID NO: 22489 - DNA, 120 bp, synthetic construct; identical to SEQ ID NO: 7066
  source 1..120: mol_type = other DNA

SEQ ID NO: 22490 - DNA, 120 bp, synthetic construct
  source 1..120: mol_type = other DNA
cccgtgttcaagcgattcacctgcctcagcctccggaggcgctgggactacaggcacatgccaccatgcccggctaatttttgtatttttagtagaggcggggtttcaccatgttggcca

SEQ ID NO: 22491 - DNA, 120 bp, synthetic construct
  source 1..120: mol_type = other DNA
cctggtccaattttttaatagttgtagaactattaaggtttttctgttgcttcttgaatcaattccccctccctagaatctttaatatgtttggaggttgttttctttttcctgtctcta

SEQ ID NO: 22492 - DNA, 120 bp, synthetic construct
  source 1..120: mol_type = other DNA
agtggcgcgatctcggctcactgcatcctccacctcccaggttcaagctagtctctcacctcagcctcccaagtagctgagattacaggcatatgccaccacgcctggctaatttttgta

SEQ ID NO: 22493 - DNA, 120 bp, synthetic construct; identical to SEQ ID NO: 7067
  source 1..120: mol_type = other DNA

SEQ ID NO: 22494 - DNA, 120 bp, synthetic construct
  source 1..120: mol_type = other DNA
gatattttttatccttatgcactcctttatttttactggaagaggagggaccacatgaggcattagtgatgagcattctttttttttttcttggcttttgcctgttttttatgtttgttt

SEQ ID NO: 22495 - DNA, 120 bp, synthetic construct
  source 1..120: mol_type = other DNA
gaaactttcccatttgtttgaagtaccctaagaatctcctttattactcctagtctagtaacggacatcattactttagagaactctacttggccctctgtgtgtcttacacccattaaa

SEQ ID NO: 22496 - DNA, 120 bp, synthetic construct; identical to SEQ ID NO: 7068
  source 1..120: mol_type = other DNA

SEQ ID NO: 22497 - DNA, 120 bp, synthetic construct
  source 1..120: mol_type = other DNA
ttaattttaaataactttggacttacagaagagttggaaaaatagtacagagagtttctatataccttttacagattccccagatgattaacatcttatatatctgtactacaattatca

SEQ ID NO: 22498 - DNA, 120 bp, synthetic construct
  source 1..120: mol_type = other DNA
tttcaattttttaaatgtctagctgcagaaaataaacaaaagctttatatagtatttttactgggactgtaaaatttataagttagcttagggagaaatggcatttttatgttgctgaat

SEQ ID NO: 22499 - DNA, 120 bp, synthetic construct
  source 1..120: mol_type = other DNA
aatgggatcttttctttcatttatcttctgtctggtttctctcccctataaatgaatgatttctgtatattttgtactatactgtattgccaaattatattattataataatatttcatc

SEQ ID NO: 22500 - DNA, 120 bp, synthetic construct; identical to SEQ ID NO: 7069
  source 1..120: mol_type = other DNA

SEQ ID NO: 22501 - DNA, 120 bp, synthetic construct
  source 1..120: mol_type = other DNA
tttcatctcttttgggatcagttctgatagattatatcttctagtaaattattttgggttttcaaatttgtttgcatagagttgagcagagtcatcttttatgattcttttgctttcctg

SEQ ID NO: 22502 - DNA, 120 bp, synthetic construct
  source 1..120: mol_type = other DNA
aaagcagctccattaatgtaaaaaagaagtgatctcaaacttctgaaaataataatcctccacatttaattctgattatcttttgccagcctgaaattttttgcttccttgctttaattt

SEQ ID NO: 22503 - DNA, 120 bp, synthetic construct
  source 1..120: mol_type = other DNA
atcttaactgcagaaaaacaaattgagaggtttgcatgctctcagtaaagtgaaagattgggaggttttccccatttcatggtgtgtggcagctgtaatgtgatcacacaagtttcaaat

SEQ ID NO: 22504 - DNA, 120 bp, synthetic construct
  source 1..120: mol_type = other DNA
gtatggctgcagcatcctaaaacaatataaggttgggtattcttccatgaaacttgttattttttccataaagttagattctttctagagcagaaagaactttaatgattgggaatctgg

SEQ ID NO: 22505 - DNA, 120 bp, synthetic construct; identical to SEQ ID NO: 7070
  source 1..120: mol_type = other DNA

SEQ ID NO: 22506 - DNA, 120 bp, synthetic construct
  source 1..120: mol_type = other DNA
gtgctgggtattttcagacctgcttattaaaaagatgtaaaacaaaataatgatcactcctgtggatttttcctttatttttgagatgtctcctttggctgcattacttcttcacccctt

SEQ ID NO: 22507 - DNA, 120 bp, synthetic construct
  source 1..120: mol_type = other DNA
ttgagatgtctcctttggctgcattacttcttcaccccttgcccattgatcagaggaggggtcttaactatgggtgaaccctatatcttactgaagaggttatgttacatgtatattttc

SEQ ID NO: 22508 - DNA, 120 bp, synthetic construct
  source 1..120: mol_type = other DNA
aatgaattaaaatgaaagggcaaagattaaatcatgaccaggcctgaaattaacacacaagactcaatttttttcaaccaaagacttttgtaggtgatccctgcctgcaggactcccctt

SEQ ID NO: 22509 - DNA, 120 bp, synthetic construct; identical to SEQ ID NO: 7071
  source 1..120: mol_type = other DNA

SEQ ID NO: 22510 - DNA, 120 bp, synthetic construct
  source 1..120: mol_type = other DNA
agaatgtggatctcctgaatcttacttggttaatcttaatataactcctagcattctataattcttcctaaagtcctcttacctggctatcttttgtatcttctttgtctctcctcttct

SEQ ID NO: 22511 - DNA, 120 bp, synthetic construct
  source 1..120: mol_type = other DNA
gtatcttttggcctcagtttgagcacagcagatcccaagaccacatatgccatagcataggctattatagtcaaccttttgaataaatgtgattgaactttatgttagtaattcttattt

SEQ ID NO: 22512 - DNA, 120 bp, synthetic construct
  source 1..120: mol_type = other DNA
tgtgtaagattagccttttatcaaataaaaagtgtgaaatggaatatgtaatctcattaatccattctggctctaaaattctgtgactatcagataaaattcagaaataaaatagtatta

SEQ ID NO: 22513 - DNA, 120 bp, synthetic construct
  source 1..120: mol_type = other DNA
gaaggcaaatgtattcagacacaactaaagttctctcttctattttaatttcatttatcttgaactaagactccactgtttcatcctcttagatgctgctacttgaacaatattgttttg

SEQ ID NO: 22514 - DNA, 120 bp, synthetic construct; identical to SEQ ID NO: 7072
  source 1..120: mol_type = other DNA

SEQ ID NO: 22515 - DNA, 120 bp, synthetic construct
  source 1..120: mol_type = other DNA
agacactttacttaaaagtgtattttaaattaagcaataatatgtaaactctttcttgcaaaagttagcatttatatttttaaataagatatattgaattcattcagtgaatcatataaa

SEQ ID NO: 22516 - DNA, 120 bp, synthetic construct
  source 1..120: mol_type = other DNA
tagcctcatgattttagaatatgccttgaatattaagtgtagccttcctccccaactccctcagatcttgccaccccttaagtgctgcagtgataggtgatcaagaaaatcaggataccc

SEQ ID NO: 22517 - DNA, 120 bp, synthetic construct; identical to SEQ ID NO: 7073
  source 1..120: mol_type = other DNA

SEQ ID NO: 22518 - DNA, 120 bp, synthetic construct
  source 1..120: mol_type = other DNA
atattacttccaccgggtgtgatggctcaggcctgtaatcccagctcttagtgaggcagaggcaggaggatagcttgagccaaggagctcgagacctgcctgggcaatatagcaagaccc

SEQ ID NO: 22519 - DNA, 120 bp, synthetic construct
  source 1..120: mol_type = other DNA
ttcactactcttattccttactaatttcctattctatcctagtttttttcctatgcatttcaaggtttcccttattctccagacttttgtgtgtcactgaggtaactgtttctgcttctc

SEQ ID NO: 22520 - DNA, 120 bp, synthetic construct
  source 1..120: mol_type = other DNA
cccagcaatgacagacatccaatatacctacttcaaatcccttgggaaataaggtagactataaacaaacattttattctttccacaaactatgggtgacctaaaaagacttgcattagt

SEQ ID NO: 22521 - DNA, 120 bp, synthetic construct; identical to SEQ ID NO: 7074
  source 1..120: mol_type = other DNA

SEQ ID NO: 22522 - DNA, 120 bp, synthetic construct
  source 1..120: mol_type = other DNA
gtggaatatctagttgatcatttatatgtgtggtataatacaagttgagtatcccttacccaaaattgcttcaggccagaagtgttttggattttatattttttcagatttttaaatact

SEQ ID NO: 22523 - DNA, 120 bp, synthetic construct
  source 1..120: mol_type = other DNA
cttcaaattttcggatttagaatgctcaacctatatacatcaggaatagtggcacttcagatatacctgaaaccaaccataaattttattttactcagcatgtgcttcaacagacatctt

SEQ ID NO: 22524 - DNA, 120 bp, synthetic construct
  source 1..120: mol_type = other DNA
tatttattttgtcttagaatattgttttgtgtagacacttttgaaaccattggcacttcctactgtggattaaaattaatccacacaatggttatttctcccaaaatcacttgctagact

SEQ ID NO: 22525 - DNA, 120 bp, synthetic construct; identical to SEQ ID NO: 7075
  source 1..120: mol_type = other DNA

SEQ ID NO: 22526 - DNA, 120 bp, synthetic construct
  source 1..120: mol_type = other DNA
aaccggattacttaaagtctaaaatttatgtagtagtaccatctagtggcaaaagaggacactgctttgctatttgattatatgtgtctttgtagcagccagggaaataagtgtttatgg

SEQ ID NO: 22527 - DNA, 120 bp, synthetic construct
  source 1..120: mol_type = other DNA
aagttgtatgatgcctgagctttattttaaaaataagtctgaggcagaggggtggaaatagaggaagtggatatgggtgtagatgagataaaactgaccatgaattgataattattgatg

SEQ ID NO: 22528 - DNA, 120 bp, synthetic construct
  source 1..120: mol_type = other DNA
aaaatagagattacatggaatttagatgatatgaaatcagataaatgcagaattatagctaatcttaaaaaaagttgtgtagtgtattttttactccatggctagagccctccccccaac

SEQ ID NO: 22529 - DNA, 120 bp, synthetic construct; identical to SEQ ID NO: 7076
  source 1..120: mol_type = other DNA

SEQ ID NO: 22530 - DNA, 120 bp, synthetic construct
  source 1..120: mol_type = other DNA
ttcttgtcgcccaggctggagtgcagtggcacaattttggctcactgcagcctccacctcctgggctcccagagtagctgggattacaggtccctaccgccacgcccggctaatttttgt

SEQ ID NO: 22531 - DNA, 120 bp, synthetic construct
  source 1..120: mol_type = other DNA
cagcctacctagagctctttaattgactttaaaatactgagtatagcaacaaggtaaatatggcattttagagataaaaagctgaaagatggcatggtgtaggaagaattatctataggc

SEQ ID NO: 22532 - DNA, 120 bp, synthetic construct
  source 1..120: mol_type = other DNA
ccgagatcaacatttcagaatgtattttgaagatgtaattatcaagtgtacttatatctggtaatgaaaagcatctttaattatgatatactgaaataaataaaagtgggtcaagtagca

SEQ ID NO: 22533 - DNA, 120 bp, synthetic construct
  source 1..120: mol_type = other DNA
agaccgagtcttgctctgtcaccaggctggagtgcagtgacatgatcttggctgtctgcaacctccgcctcccgggttcaagctaatctcctgcctcagcctcccgagtagctgggacta

SEQ ID NO: 22534 - DNA, 120 bp, synthetic construct; identical to SEQ ID NO: 7077
  source 1..120: mol_type = other DNA

SEQ ID NO: 22535 - DNA, 120 bp, synthetic construct
  source 1..120: mol_type = other DNA
gcaattgtattccattttcttttaaaaactcttcaaaatcaagggcctcttctaggttgtatgcagtatgcagcccccaagaaatctgtcccactcaaaaactagaaaacactggataaa

SEQ ID NO: 22536 - DNA, 120 bp, synthetic construct
  source 1..120: mol_type = other DNA
agaaccctttctagataagctgagattactggtaattttcttcctggggtatattgattctgggtacagattgagattcatcattggcacaagcaggaggacttcactgggagaaagaaa

SEQ ID NO: 22537 - DNA, 120 bp, synthetic construct
  source 1..120: mol_type = other DNA
gagatactagcatttagaggagctctaaatgcatggctcatttttaccatgagatattggccgagtcttgtagtgcaggagacttgggatagactagaaacgcagaatgttagcaggcga

SEQ ID NO: 22538 - DNA, 120 bp, synthetic construct; identical to SEQ ID NO: 7078
  source 1..120: mol_type = other DNA

SEQ ID NO: 22539 - DNA, 120 bp, synthetic construct
  source 1..120: mol_type = other DNA
gtcagattttgatactgtatagggtaagaagttaactgctgaggagatggagaactttcatattttctatctgaatatagagagacacactcaaggaactgggaaaaccaaaccagttag

SEQ ID NO: 22540 - DNA, 120 bp, synthetic construct
  source 1..120: mol_type = other DNA
ctcccaggttcacaccattcttctgcctcagcctcccaagtagctgggactacaggcacctgccaccatgcctggctaattttttgtatttttagtagagacggggtttcactgtgttag

SEQ ID NO: 22541 - DNA, 120 bp, synthetic construct; identical to SEQ ID NO: 7079
  source 1..120: mol_type = other DNA

SEQ ID NO: 22542 - DNA, 120 bp, synthetic construct
  source 1..120: mol_type = other DNA
tgtcttgaaaaaaagaaaaatgaacagatagaaaattttgacagagaattggagtctataattaaaaggaatcaaatagatattctagaactgaaaaatatatttgaaattaacattgga

SEQ ID NO: 22543 - DNA, 120 bp, synthetic construct
  source 1..120: mol_type = other DNA
acaaaaaagacaaaacaatggcttctagaagaaaacataggtaatagcttcttgtcctgggagtaggcaaagatgtcttaaacagaatgccaaagcaccatatatagaaagaaatttgat

SEQ ID NO: 22544 - DNA, 120 bp, synthetic construct
  source 1..120: mol_type = other DNA
agacctcattaaaactaagaactcttgttcatcaaaagactcgagtgtgcttctagaagaaaacataggataatcttatctatgtggccttgggtgggcaaaatttcttaggacacacaa

SEQ ID NO: 22545 - DNA, 120 bp, synthetic construct
  source 1..120: mol_type = other DNA
tatatctgaccaaaggctcagttcagaatatattaagtaattccttcagaatatataaatcccacaaaccagtaacaaaaagacaatccagtttttaaaatgtgacccagggacttgaaa

SEQ ID NO: 22546 - DNA, 120 bp, synthetic construct; identical to SEQ ID NO: 7080
  source 1..120: mol_type = other DNA

SEQ ID NO: 22547 - DNA, 120 bp, synthetic construct
  source 1..120: mol_type = other DNA
cagactggtaacagcccagatgcccctttaagaggagaaaggatagataaattgggctgtatttatacagtggactgctacatactatacaacatttaaaaacaatgaactgataaggca

SEQ ID NO: 22548 - DNA, 120 bp, synthetic construct
  source 1..120: mol_type = other DNA
gaagccagaatagtggttacctctaggaaatgaagattggtaaaaggagcttgagggaaccctctggggtgctagaaatgtattttcacctagatagtgattacatgggtgtgaaaattc

SEQ ID NO: 22549 - DNA, 120 bp, synthetic construct; identical to SEQ ID NO: 7081
  source 1..120: mol_type = other DNA

SEQ ID NO: 22550 - DNA, 120 bp, synthetic construct
  source 1..120: mol_type = other DNA
cttatttacctttatgcttatagctatcaatagatttctaacaatgtgtacagaaatttttaaaaatagaactttattacaagttgagtatattcactattttattaaattaggaagtgt

SEQ ID NO: 22551 - DNA, 120 bp, synthetic construct
  source 1..120: mol_type = other DNA
atttgatgacatcatattttgcaggttttttttttctgtgtaatttattgtcatcttacgtcagattatgtattttacagttgcatagtattccattgtaggtacagctaaaaaatgcta

SEQ ID NO: 22552 - DNA, 120 bp, synthetic construct
  source 1..120: mol_type = other DNA
gaaaaaattagatgtatgtccaatgatgtacgaaggattttttatttttaaacttttaaatctttgtaacttttctaaaaacaagtaggattttttctaatacatattgtttaaaaagta

SEQ ID NO: 22553 - DNA, 120 bp, synthetic construct; identical to SEQ ID NO: 7082
  source 1..120: mol_type = other DNA

SEQ ID NO: 22554 - DNA, 120 bp, synthetic construct
  source 1..120: mol_type = other DNA
aaaccccgtctctactatactaaaaaaaaaaaaaaaaaattagccgggcgtggtggcgggagcctgtagtcccagctactggggaggctgaggcaggagaatggcgtgaacttgggaggc

SEQ ID NO: 22555 - DNA, 120 bp, synthetic construct
  source 1..120: mol_type = other DNA
ctctgacagctctgtgcaaggttgagccacttgggaaattattttcatagtttaggtagggttaataacaagatagtggcagtaagaatatgaaagagatagctgtaagagagctaatag

SEQ ID NO: 22556 - DNA, 120 bp, synthetic construct
  source 1..120: mol_type = other DNA
gctttattggtacaaaatgttagttcagttctggacatttagatgtatggtacctgtcatacagatgtaaagcatccatcagttggttggaaaagtgagtctgaagtttgcaagtgaagt

SEQ ID NO: 22557 - DNA, 120 bp, synthetic construct; identical to SEQ ID NO: 7083
  source 1..120: mol_type = other DNA

SEQ ID NO: 22558 - DNA, 120 bp, synthetic construct
  source 1..120: mol_type = other DNA
cctttcaaactccaacatagtctattattttgaaggtcagatactaaggctatttattaaaaggaattctggggtttgggggcgatttctttgtttctgtttttttagctgaggtctcac

SEQ ID NO: 22559 - DNA, 120 bp, synthetic construct
  source 1..120: mol_type = other DNA
ccactcatggtttttgtttgtttgtttttttaattttgtagggacagagtctcgctatgttgttcaggctggtctcaaactcctggactcaagtgaccttcctgccttagcctcccaaag

SEQ ID NO: 22560 - DNA, 120 bp, synthetic construct
  source 1..120: mol_type = other DNA
acagattacttttcttataggggaacgttccatttagttacaaagttgcaaatgttcaaatattttgtcttgcattcaggaaacctgattggccaaagaactatgctaggagctagaatg

SEQ ID NO: 22561 - DNA, 120 bp, synthetic construct
  source 1..120: mol_type = other DNA
cagaaaaactggtagaaaatgaaaatttccaacattctttgagaaaaaatgatcaagaaagggattacatgggaaagaagaaaagcatcaaaagtcaagaagtagtgaacatacagtcat

SEQ ID NO: 22562 - DNA, 120 bp, synthetic construct; identical to SEQ ID NO: 7084
  source 1..120: mol_type = other DNA

SEQ ID NO: 22563 - DNA, 120 bp, synthetic construct
  source 1..120: mol_type = other DNA
ataatgaataataggtaatatatataaggtgcgtgctttgagagtgatctgaatttttttctcagcatacttaaatgtcaagaaatacagaatcatgtcttgaagttatttagaatttca

SEQ ID NO: 22564 - DNA, 120 bp, synthetic construct
  source 1..120: mol_type = other DNA
ttaaaaaggtgttttaaaataattttttaagctcaaattgtcatctttaggtgtgtagatccaagtacagcttctctcgatttgggtgttggtatcagttttcttggtatgttagcctta

SEQ ID NO: 22565 - DNA, 120 bp, synthetic construct; identical to SEQ ID NO: 7085
  source 1..120: mol_type = other DNA

SEQ ID NO: 22566 - DNA, 120 bp, synthetic construct
  source 1..120: mol_type = other DNA
cttgataataattgaagccagacagagaaattacttttggattctaaaatattatttagaggaagtctaaggaagtacattttatctaattttcctttaacacactccttatttttaccc

SEQ ID NO: 22567 - DNA, 120 bp, synthetic construct
  source 1..120: mol_type = other DNA
tagactgcttaaagcaattgttgtataaaaacttgtttctattttatttagagcttaacttagatagcagtaatttccctggagtaaaactgcggtcaaaaatgtccctccgttcttatg

SEQ ID NO: 22568 - DNA, 120 bp, synthetic construct
  source 1..120: mol_type = other DNA
cagtcctgttcctatgggttcatttccaagaagagggtttgtaaatggaagcagagaaagtactggatatttagaagaacttgagaaagagaggtaacttttcttcatatagtaaacatt

SEQ ID NO: 22569 - DNA, 120 bp, synthetic construct
  source 1..120: mol_type = other DNA
tgattgcacttacattaaatctaaaaatataaacaaggccgtttcctgggattctgaagacctattttgtcacttattttgtttttttgtttgttttttggggtttattttgagacaggg

SEQ ID NO: 22570 - DNA, 120 bp, synthetic construct; identical to SEQ ID NO: 7086
  source 1..120: mol_type = other DNA

SEQ ID NO: 22571 - DNA, 120 bp, synthetic construct
  source 1..120: mol_type = other DNA
cctgggtgacatagtaagactctttctttttttttttttttttgagatgcagtttcacttttgttgcccaggctggattgcaatggcacaatctcggctcactgcaacctctgcctccca

SEQ ID NO: 22572 - DNA, 120 bp, synthetic construct
  source 1..120: mol_type = other DNA
gtctcaaactcatgaccttaggtgattcccccctgcctcggccttctaaagtgctgggattacaggcatgaggcactacacttggccaagactctgtctctttaccaaaaaaaaaaaaag

SEQ ID NO: 22573 - DNA, 120 bp, synthetic construct
  source 1..120: mol_type = other DNA
acaaatgaaatacttctttttttttttttttttactttataaataataattgtacatttcatggggtacatagtgatgtttctacacatataatttattgcaatcaggttagcatatctg

SEQ ID NO: 22574 - DNA, 120 bp, synthetic construct; identical to SEQ ID NO: 7087
  source 1..120: mol_type = other DNA

SEQ ID NO: 22575 - DNA, 120 bp, synthetic construct
  source 1..120: mol_type = other DNA
tctgtgtttcctagcctctagtatttactttttacttctgttagtaaaaagtaaatttttcttttttttcttcttttttttttttttttttttgagataagagtcttcctgtcgcccagg

SEQ ID NO: 22576 - DNA, 120 bp, synthetic construct
  source 1..120: mol_type = other DNA
tttttgtatttttagtagagatgggatttcaccatgttggccaggctggtctcgatctcctgacctcaggtgatctgcctgccttggcctcccaaagttttgggattacaggcatgagcc

SEQ ID NO: 22577 - DNA, 120 bp, synthetic construct
  source 1..120: mol_type = other DNA
aaagttaacattatctcactgcagataccaaaatatagatcattatcaggaacttcgtcaaatgttttatgtcccctaaaagattccttaatgcacatattaaggaatatctttattatc

SEQ ID NO: 22578 - DNA, 120 bp, synthetic construct
  source 1..120: mol_type = other DNA
aaagatatggttctactttgtggcattgttgtgaaaattgaatattagtatataggaaatgcccagcatatctccctgagaggcagaagaccttttataactttctctccagtttcatat

SEQ ID NO: 22579 - DNA, 120 bp, synthetic construct; identical to SEQ ID NO: 7088
  source 1..120: mol_type = other DNA

SEQ ID NO: 22580 - DNA, 120 bp, synthetic construct
  source 1..120: mol_type = other DNA
gtaagtggtaaggaatacttgtaataaaaatgttcttagtttctgtcttgacattatttcttgctagtcttccagagttctttgcatctaaatctaggaaaagcttatttctctgttcaa

SEQ ID NO: 22581 - DNA, 120 bp, synthetic construct
  source 1..120: mol_type = other DNA
aaaggtgctttagccttttctgttgttactgtagaaaagacgtcttgtttttgttttcgtttttctcccaaaatatggcccaacttctaattcaggctttattacactctataaaaagtt

SEQ ID NO: 22582 - DNA, 120 bp, synthetic construct
  source 1..120: mol_type = other DNA
cctttgctatgttcagtctcatttcccatgagatagttacttctataactctaaataatatgtttatattgctagtattggacatgacttactgactcaccactctgaaagatgaagatt

SEQ ID NO: 22583 - DNA, 120 bp, synthetic construct; identical to SEQ ID NO: 7089
  source 1..120: mol_type = other DNA

SEQ ID NO: 22584 - DNA, 120 bp, synthetic construct
  source 1..120: mol_type = other DNA
attgatagaatatcatactctttgtgctgtttaaaggaagatgatgctatttggactgtgtctttcttatatagctctttgtttttgtctcaagtttctaattgcctttcttttatgttt

SEQ ID NO: 22585 - DNA, 120 bp, synthetic construct
  source 1..120: mol_type = other DNA
agcctgctacaagactgtcataccactgttgtcattatgcttcccatttaggtctaatatgtttgggtgttcttgactcttgctgtgttggagagagataaattgatttcttgcttgtgt

SEQ ID NO: 22586 - DNA, 120 bp, synthetic construct
  source 1..120: mol_type = other DNA
cctttgtagatggccatttttcctctttggaagcttttgaatgttttggtatgcatattttcctcattcatcatgctgaatatttactgtacccttttgatctggaaatttatttattca

SEQ ID NO: 22587 - DNA, 120 bp, synthetic construct; identical to SEQ ID NO: 7090
  source 1..120: mol_type = other DNA

SEQ ID NO: 22588 - DNA, 120 bp, synthetic construct
  source 1..120: mol_type = other DNA
attgaatgctaatacaaatgtgccatgctcttctaggtgacccccagtaaggtagaggactaagaagacatgagatttatgtgaaaaagcatttttaaagaagaccattggcaatcacaa

SEQ ID NO: 22589 - DNA, 120 bp, synthetic construct
  source 1..120: mol_type = other DNA
atcacttgctatcattttagctgaagacactataaccttggcttccccagagtattttactacaggttaatcttaaacttgatagtagcaaattgtccctagtgtccctaacctccccct

SEQ ID NO: 22590 - DNA, 120 bp, synthetic construct
  source 1..120: mol_type = other DNA
acgatcttggctcactgcaacctccgcctccctgattcaagagattctcatgcctcagcctcccaagcagctaggactatgagtatctgccacagcgcccagctaatttctgtattttta

SEQ ID NO: 22591 - DNA, 120 bp, synthetic construct; identical to SEQ ID NO: 128
  source 1..120: mol_type = other DNA

SEQ ID NO: 22592 - DNA, 120 bp, synthetic construct
  source 1..120: mol_type = other DNA
cagcttgtctttagtgtgccttttctgagggatgctacatcataagcaggggcttcctttcttcccaatcagtccatcactattaaggttgccacataagaacaaaagcttatttcttat

SEQ ID NO: 22593 - DNA, 120 bp, synthetic construct
  source 1..120: mol_type = other DNA
aagtaatagtatcagagtggggaacgtctctctgtatgaccaaactccagaatctgtaatagaaaatatctacaaatcggactgcatggaaatcaaaattttctacatggcaaaacgtta

SEQ ID NO: 22594 - DNA, 120 bp, synthetic construct; identical to SEQ ID NO: 7092
  source 1..120: mol_type = other DNA

SEQ ID NO: 22595 - DNA, 120 bp, synthetic construct
  source 1..120: mol_type = other DNA
gtcaactgagtaaaaaatgttaaaaagacaagtgtcaagttcagaaaattatatgcagcccaacaactgacaaagcactatcatttttaatatagaaaaggtcctacaaataagaaaaat

SEQ ID NO: 22596 - DNA, 120 bp, synthetic construct
  source 1..120: mol_type = other DNA
accagtgatacaccatttaaaaaaactagacatgaaaaagcaaaaagttgaattaaacacttaaattggtgatgatggtagcatacattggtataacatctcacaagggcagtaagttaa

SEQ ID NO: 22597 - DNA, 120 bp, synthetic construct
  source 1..120: mol_type = other DNA
aagtaccctccaactaagagttggttgtagtgtatccctacatagatttatgaatactagggaattcttggaatattatgtagctaacaaaaaaaatacctagtatagattgagcatccc

SEQ ID NO: 22598 - DNA, 120 bp, synthetic construct
  source 1..120: mol_type = other DNA
tattccaaaatccaaaaacacttctagtcacaatcattttgaataagggatactcaacctgtgcctatttgtgttctgcaagatcgattttttttttttttttttttggaaaggagtcca

SEQ ID NO: 22599 - DNA, 120 bp, synthetic construct; identical to SEQ ID NO: 7093
  source 1..120: mol_type = other DNA

SEQ ID NO: 22600 - DNA, 120 bp, synthetic construct
  source 1..120: mol_type = other DNA
acatataagtatgcacatatgtccttgtatttttatagaatagctctagaagtatacctaagaaaattataacagtggtagctctggcaaagagccacgtgaaaagagataaattatata

SEQ ID NO: 22601 - DNA, 120 bp, synthetic construct
  source 1..120: mol_type = other DNA
agattccaaactaagaagtttttctccgtcataacttcctcttatttcaaaatgacagtatatttcttattattttggctgctgtgaagctgaaagccacatcagtgtccaaagtaatag

SEQ ID NO: 22602 - DNA, 120 bp, synthetic construct
  source 1..120: mol_type = other DNA
aattttgagttttgttatatgtgtatcttttacctatcattatattcttagactataaatatgaagaaagcctttggtgaagtgtaagtattcttttaaggatgattaccagtttattta

SEQ ID NO: 22603 - DNA, 120 bp, synthetic construct; identical to SEQ ID NO: 7094
  source 1..120: mol_type = other DNA

SEQ ID NO: 22604 - DNA, 120 bp, synthetic construct
  source 1..120: mol_type = other DNA
gtaagtaacttggcagtacaacttatttgaaactttaataacttgatattttaaagtacctaggtaatccattaaaattcaggataactgaatttatagttatttgtaaattgcaatatg

SEQ ID NO: 22605 - DNA, 120 bp, synthetic construct
  source 1..120: mol_type = other DNA
ttgaattctagaggacctcagggttcaactaggcaactagttttttaactccgtgtattgaattgccaaacatactctatagaaatatttatcaccatctgcctattttttgtactgtgt

SEQ ID NO: 22606 - DNA, 120 bp, synthetic construct
  source 1..120: mol_type = other DNA
ttgtccaccagtattcacaataaattaacagtatgcagttgaataacattctgatttactacaaagggttatttttcttggcctctgctgaaccagtaaaacatatactgaaaagatcga

SEQ ID NO: 22607 - DNA, 120 bp, synthetic construct; identical to SEQ ID NO: 7095
  source 1..120: mol_type = other DNA

SEQ ID NO: 22608 - DNA, 120 bp, synthetic construct
  source 1..120: mol_type = other DNA
agacatggtggtgcatgcctgtaatctcagctacttgggaggctgaggcaggaaaagcacttgaacctgggaggcagaggttgcaatgatccaagttcatgccactgcactccatccagc

SEQ ID NO: 22609 - DNA, 120 bp, synthetic construct
  source 1..120: mol_type = other DNA
cactaggatttgtctggtttcctcatctggatgttgctagcaatggtaacatttttcattttagaaattttgcaaaccattgcatttatagatatgaattctgatatggctgctttaaaa

SEQ ID NO: 22610 - DNA, 120 bp, synthetic construct
  source 1..120: mol_type = other DNA
gaagtgatttatttttcttagattgttcagaatgatggcatttcagaaacattggattacctgtgatttttgttttggtaaatgtttaaaaacaataaaaaaggaaaacatttacgtgtg

SEQ ID NO: 22611 - DNA, 120 bp, synthetic construct; identical to SEQ ID NO: 7096
  source 1..120: mol_type = other DNA

SEQ ID NO: 22612 - DNA, 120 bp, synthetic construct
  source 1..120: mol_type = other DNA
tgtagttatttcttcacactagtaaatcaaaaaccaagacccatataaaacagggcgaacaattactgtgcttcatcttctggacaagaatgccaagttagtttctcttttataagcaat

SEQ ID NO: 22613 - DNA, 120 bp, synthetic construct
  source 1..120: mol_type = other DNA
ttcaggatcaagacatctggcaaagccttttagtttgtcagcagcatcccttctcttctttgatttactgtcatcagattcactgtcagataaagattttctgtttgtgccatctttttc

SEQ ID NO: 22614 - DNA, 120 bp, synthetic construct
  source 1..120: mol_type = other DNA
caacatctgtaaatcccttccgcttaaggaaatatcccactttcctattcactacacgtcagtctagtacattttccatcacagattcttccggctctgcctcttcatcttttttactct

SEQ ID NO: 22615 - DNA, 120 bp, synthetic construct; identical to SEQ ID NO: 7097
  source 1..120: mol_type = other DNA

SEQ ID NO: 22616 - DNA, 120 bp, synthetic construct
  source 1..120: mol_type = other DNA
ttctatatttaaaaaaaaaaaaaaagaaaattatataatctcaaacaagactacatattttagctattatccataaatatttcacgtaacttattttttttttttttgagatggagtctc

SEQ ID NO: 22617 - DNA, 120 bp, synthetic construct
  source 1..120: mol_type = other DNA
catgtccagctaattttttgtacttttagtagagacaaggttttgatgtgttagccaggatgttcttgatatcctgacctcgtgatccacccaccttggtctcccaaagtgttgggatta

SEQ ID NO: 22618 - DNA, 120 bp, synthetic construct; identical to SEQ ID NO: 7098
  source 1..120: mol_type = other DNA

SEQ ID NO: 22619 - DNA, 120 bp, synthetic construct
  source 1..120: mol_type = other DNA
gtgctcctgggaattaaggagcacagataatgagagaacagttattgttagcctgtgaggattaggaattttgggggatttgttgggactataacttatgaagaaaaataccaaagtgta

SEQ ID NO: 22620 - DNA, 120 bp, synthetic construct
  source 1..120: mol_type = other DNA
ttactatctgaaacaaagatcagttgtcaagttaattattctctactaatttattaagtagatcacatttatttaatatgatatataagacattatcaggcaccattggcaacatcagca

SEQ ID NO: 22621 - DNA, 120 bp, synthetic construct
  source 1..120: mol_type = other DNA
aaaacatcagatctaaaccacattattgcaacatactgtgtcatgttcaattttttttttttgcagagagggtttgggaagtggaggactaataagtggagttacaactggctcagtagg

SEQ ID NO: 22622 - DNA, 120 bp, synthetic construct; identical to SEQ ID NO: 7099
  source 1..120: mol_type = other DNA

SEQ ID NO: 22623 - DNA, 120 bp, synthetic construct
  source 1..120: mol_type = other DNA
atgtttcattaccttgtccttttaaaatcctgttgcatgcttggcagttatcacagtccttggaattttaattaaagggttaataaatttttgaatgagttattacccattctgaagaag

SEQ ID NO: 22624 - DNA, 120 bp, synthetic construct
  source 1..120: mol_type = other DNA
tcatttgattaatgaaaaagttctctcaacttaatctgtatgtatatggtaatccttaccttaagttgaagtatgagcttaagaatgatggacttgtttcttgatatttctatgttgtcc

SEQ ID NO: 22625 - DNA, 120 bp, synthetic construct
  source 1..120: mol_type = other DNA
ccaatctaattaaagccacttgtgactttggcaaataagtgtttgaattccacgtcacatcagggatccagattgagtctgacacctataatcaaatttaaacactccttggagtaaaaa

SEQ ID NO: 22626 - DNA, 120 bp, synthetic construct; identical to SEQ ID NO: 7100
  source 1..120: mol_type = other DNA

SEQ ID NO: 22627 - DNA, 120 bp, synthetic construct
  source 1..120: mol_type = other DNA
tggctctatttcaaaataagatttatcatggctgctgagcaacataatcaatattcacatagttgtgtctttaccatattcatttcccctggtactgttctgttctgccttggaattata

SEQ ID NO: 22628 - DNA, 120 bp, synthetic construct
  source 1..120: mol_type = other DNA
aatcttagactgtataaaggcattcagaacatgtcactgctcttcaaattgtgcacttaaaaaaccctcattcaaggataataggaaggaaacaaagagaattttaggagagatgaagta

SEQ ID NO: 22629 - DNA, 120 bp, synthetic construct
  source 1..120: mol_type = other DNA
tatgactgactaatgttttaaagccctgaagaggccttgccaattgccttatctgtttcaaaactagcgtgggttgttgttttcttttttaacttttgggacaaattgggaggaaaacat

SEQ ID NO: 22630 - DNA, 120 bp, synthetic construct
  source 1..120: mol_type = other DNA
taggatattttacattccttgaagtatagtctttattttttttgtgacacttcctaaacataatgatttttttttttttttcttgagtctcaccctgttgcccaggctgaagtgcaatgg

SEQ ID NO: 22631 - DNA, 120 bp, synthetic construct; identical to SEQ ID NO: 7101
  source 1..120: mol_type = other DNA

SEQ ID NO: 22632 - DNA, 120 bp, synthetic construct
  source 1..120: mol_type = other DNA
tgggtggcagcaggcaaagagagagagactgacagggaaactcccatttttaaaaccatcagatctcgtgagaattatttactatcacaagaacagcacaggagagacccacccccataa

SEQ ID NO: 22633 - DNA, 120 bp, synthetic construct
  source 1..120: mol_type = other DNA
ggagtatggtggaaggctaaggtgctactaaaacaccagtaccatactacatttcatagtccatacatgttagtttcatagtgaaggttaagatcataatgaggttgggggcttaactag

SEQ ID NO: 22634 - DNA, 120 bp, synthetic construct; identical to SEQ ID NO: 7102
  source 1..120: mol_type = other DNA

SEQ ID NO: 22635 - DNA, 120 bp, synthetic construct
  source 1..120: mol_type = other DNA
aaataacttctaaaaatacattgcattttacatttagatttaaattttagattttcatggaattattttaaaatgttaggtttatttgtttcaaaaaaacaagtattactttggtttata

SEQ ID NO: 22636 - DNA, 120 bp, synthetic construct
  source 1..120: mol_type = other DNA
gtagttgtaaaaattcttgtgctatataaatataagtaggtgtattccagacattttatatccctgaggagaggttaacttgagttctttcttggccattttgttcacataagcgctgat

SEQ ID NO: 22637 - DNA, 120 bp, synthetic construct
  source 1..120: mol_type = other DNA
atgaaggttaaggttaaagaaattgtaaacaagataaaaaggcaaataatggaaatgttggtagaatatataagagatttaatatccctactctacaaggatcacctacaaatcaattga

SEQ ID NO: 22638 - DNA, 120 bp, synthetic construct; identical to SEQ ID NO: 7103
  source 1..120: mol_type = other DNA

SEQ ID NO: 22639 - DNA, 120 bp, synthetic construct
  source 1..120: mol_type = other DNA
gtaatataaagtaaggtactattttttttttgcctatcagctgcccgaaactttataatttttgatgacatgcagtattagcaagggtgtgaaagtaaaaacatcatctacctttaaatc

SEQ ID NO: 22640 - DNA, 120 bp, synthetic construct
  source 1..120: mol_type = other DNA
atgcctgagcctcctgagtagctgggactatagttgtgtgccaccacgcccagctaatttttgtatttttagtagaaacagggtttcaccatattggtcaggctggtcttgaactcttgg

SEQ ID NO: 22641 - DNA, 120 bp, synthetic construct
  source 1..120: mol_type = other DNA
acaatttggcattatttgccaaaattaaaatgcctgtgctctatgaccgtgtgtttctataggacttctaggaatatgttgcgtacagaaatacttactttagggcagaatgtagataca

SEQ ID NO: 22642 - DNA, 120 bp, synthetic construct; identical to SEQ ID NO: 7104
  source 1..120: mol_type = other DNA

SEQ ID NO: 22643 - DNA, 120 bp, synthetic construct
  source 1..120: mol_type = other DNA
caagaggatcacaagttagcagtagtgttggcacacaactgtaatcccagctgccttaaggaatgctgaggtggtaggattgcttgagcttaggaattagaggttgcagtgagctatgat

SEQ ID NO: 22644 - DNA, 120 bp, synthetic construct
  source 1..120: mol_type = other DNA
ttgctatcattaatatgtttgagtagcttgccgtcatcactattatttaactttgtttgacaggcttgactaatgcaagtagaaaaaacaaaataagtgttatgaatcctacactatttt

SEQ ID NO: 22645 - DNA, 120 bp, synthetic construct
  source 1..120: mol_type = other DNA
caagttaagatacatacaaaaatcagcaataactaccagttaaaggtggaaatgggggtaggaggacctgttcacagtaacaggaaactttaaagtaactagaaaaagcctgcataaaga

SEQ ID NO: 22646 - DNA, 120 bp, synthetic construct; identical to SEQ ID NO: 7105
  source 1..120: mol_type = other DNA

SEQ ID NO: 22647 - DNA, 120 bp, synthetic construct
  source 1..120: mol_type = other DNA
ttcagaagatgagaaattaaacccttacctcacatcttaagaaaagttataggttgattagctattcaaatgtgaaaaataaatctaaaattaatagaataaaatacaggcaagagatct

SEQ ID NO: 22648 - DNA, 120 bp, synthetic construct
  source 1..120: mol_type = other DNA
aaggggaaaatggtaatatctctaaaatataagaattcctacaaatgaataagaaaaagacaaccctgtgtttttgttttgttcagagagggggttttgctggttgcccaggctgtagtg

SEQ ID NO: 22649 - DNA, 120 bp, synthetic construct
  source 1..120: mol_type = other DNA
tagttgggactttaggcgtgtacatcgcacctgcctaacccatgttttttaatggacagaggatgtaataaggcagttcattaaaaagatggcaaatgaccagtaaaacacagatgacta

SEQ ID NO: 22650 - DNA, 120 bp, synthetic construct; identical to SEQ ID NO: 7106
  source 1..120: mol_type = other DNA

SEQ ID NO: 22651 - DNA, 120 bp, synthetic construct
  source 1..120: mol_type = other DNA
acttaaagtattaaaaaagaaaacagctctgataaacatacttattcatgtcttgtaaacaaacatgcaagagtttctctaggtgaggagtcagcaatctttttcttagaaggccacata

SEQ ID NO: 22652 - DNA, 120 bp, synthetic construct
  source 1..120: mol_type = other DNA
agtacagtcatgcaattttgtctcactgcaacctccgcctctaaggttcaaacgattcttgtgcctcaggctcccaagtagctggaattacaggcatgtgccaccacgcctggctaattt

SEQ ID NO: 22653 - DNA, 120 bp, synthetic construct
  source 1..120: mol_type = other DNA
actctcggcctcaaccgtgccttttaacaagaaagcaaccatagataatttatgaacacaaatgggcatggctgtgtttcagtaaaacttaatttataaaaacagatggcttagtaggcc

SEQ ID NO: 22654 - DNA, 120 bp, synthetic construct
  source 1..120: mol_type = other DNA
ttcctaatagtagtatgtgacaattcttgtttctgtatgtcttctccatcacttgtgagtcagaatttatcattaacaatcagtgggtagtgaaacattttgtcatcttaaactttgtat

SEQ ID NO: 22655 - DNA, 120 bp, synthetic construct; identical to SEQ ID NO: 7107
  source 1..120: mol_type = other DNA

SEQ ID NO: 22656 - DNA, 120 bp, synthetic construct
  source 1..120: mol_type = other DNA
cctgtactgaagtcgtaaaggtaatcttctattagctccttaattcatcttgagtttgctattatgtatgttgtggaggcaggaatctaacttatatgtatattacttatatatgtgtgt

SEQ ID NO: 22657 - DNA, 120 bp, synthetic construct
  source 1..120: mol_type = other DNA
agttcctcatcgatgagtaatgtcatctcttatcacataacaagtttatatatgctggatatttctggactttcttctgttagtccactttagcttctccatgcctgcactgataccaca

SEQ ID NO: 22658 - DNA, 120 bp, synthetic construct; identical to SEQ ID NO: 7108
  source 1..120: mol_type = other DNA

SEQ ID NO: 22659 - DNA, 120 bp, synthetic construct
  source 1..120: mol_type = other DNA
atgagttgatatatgtaaaagcactcagaacctggcacatagtaagcaaattattaggtattcttactaattttatatctctctattcatttaggctttattttatatccttcaataagg

SEQ ID NO: 22660 - DNA, 120 bp, synthetic construct
  source 1..120: mol_type = other DNA
taagtgaaaagtatccagcagtcttcctgaaatattttattatatcatcgccggtttaagattctatacactgtcatattgttcgcaaataatgacagtttgtttatcctttccagtcct

SEQ ID NO: 22661 - DNA, 120 bp, synthetic construct
  source 1..120: mol_type = other DNA
tcttgtcttgactttaaagggaattcttctaaaatttcacagttaagtgtgttgtttacacagttaagtgtaccctttatcaagttaagggatttaccttctattctaatttgtggagag

SEQ ID NO: 22662 - DNA, 120 bp, synthetic construct
  source 1..120: mol_type = other DNA
tagaaaaaggaaagaaatacttagtggttaagcatcctaatccaaaaatccaaattgtgaagtgctgcagtgagcatttcctttgagcaccatgtgggtgctccaaaagtttcctgtttt

SEQ ID NO: 22663 - DNA, 120 bp, synthetic construct; identical to SEQ ID NO: 7109
  source 1..120: mol_type = other DNA

SEQ ID NO: 22664 - DNA, 120 bp, synthetic construct
  source 1..120: mol_type = other DNA
ttggctatttctctaaagctaggaagtacttgccacctggttatggaaatgatcactcatctttgcaatatctttagaaaactagcaaaagtacaggtacttcttcagatggttttcata

SEQ ID NO: 22665 - DNA, 120 bp, synthetic construct
  source 1..120: mol_type = other DNA
caacctccgcctcccaggctcaagccatcctccctcctcagcttcccaagtcactgggactacaggcgtatgccctcatgcctggctaatttttgtattttttgtagagacggggtttca

SEQ ID NO: 22666 - DNA, 120 bp, synthetic construct
  source 1..120: mol_type = other DNA
ttaagtttactactttcagaatcatgatagagactcagcttagttatattgttaaaaagaaagaaaagagggagaaaattaagatagattaatttgggactgtgagcacagcttcttgtt

SEQ ID NO: 22667 - DNA, 120 bp, synthetic construct
  source 1..120: mol_type = other DNA
tgggttcgagcgattctcctgccttagcctcccgagtagctgggattacaggcacgcgtcacccatgcctggctaatttctttttgtatttttagtagagacggggtttcactgtgttgg

SEQ ID NO: 22668 - DNA, 120 bp, synthetic construct; identical to SEQ ID NO: 7110
  source 1..120: mol_type = other DNA

SEQ ID NO: 22669 - DNA, 120 bp, synthetic construct
  source 1..120: mol_type = other DNA
gttgggggtgatatttgttccgaaatattttattgatggagaacataactgaaaaatgtttggaaatactccatctagcttctaacacacacacaccccttattgaaacagtttactttt

SEQ ID NO: 22670 - DNA, 120 bp, synthetic construct
  source 1..120: mol_type = other DNA
agctttatgagacatttgcaaagtctttattcataagtgagttgttttttccacttccactagtattcataaaagttaaaatgaagtctagcttaaaaaacacacacacacacacacaat

SEQ ID NO: 22671 - DNA, 120 bp, synthetic construct; identical to SEQ ID NO: 7111
  source 1..120: mol_type = other DNA

SEQ ID NO: 22672 - DNA, 120 bp, synthetic construct
  source 1..120: mol_type = other DNA
ccttatgagaatcttatctaatgcctgaggacctgaggtggagcagttttatcctgagacttcccctgccccagtcagtagacaaatttcttccacgaaaccagtccctggtgccaaaaa

SEQ ID NO: 22673 - DNA, 120 bp, synthetic construct
  source 1..120: mol_type = other DNA
caggtgtaattttctctttgttgaaatattttttgagaataaattttcacaatgtgtattgtgtcaattttcataattcatgcaacatacaatttgatatatgacttgtatttccagttt

SEQ ID NO: 22674 - DNA, 120 bp, synthetic construct
  source 1..120: mol_type = other DNA
caggcggatcacaaggtcaggacttcgagaccagcctggccagtatggtgaaaccccatcgctactaaaaatacaaaaattagctgggcgtggtggtgcgcgcctgtagtcccagctact

SEQ ID NO: 22675 - DNA, 120 bp, synthetic construct; identical to SEQ ID NO: 7112
  source 1..120: mol_type = other DNA

SEQ ID NO: 22676 - DNA, 120 bp, synthetic construct
  source 1..120: mol_type = other DNA
agaattcagcaaatcgaaaaggacatacttcgtatacgacagcttttacagtcccaagcaacagaagcagaggttagtaaattgcctttcttgtttgtgggtataaaaataggtagttat

SEQ ID NO: 22677 - DNA, 120 bp, synthetic construct
  source 1..120: mol_type = other DNA
tttttttcgtgaaattaaattatcaaagatttggactattttgattttatctaacttttaggcagttaaaatttataaaactgtaaatatagataccttactttagctgtcagtttacat

SEQ ID NO: 22678 - DNA, 120 bp, synthetic construct; identical to SEQ ID NO: 7113
  source 1..120: mol_type = other DNA

SEQ ID NO: 22679 - DNA, 120 bp, synthetic construct
  source 1..120: mol_type = other DNA
ctagatacctctgggtgtgagagtaaaaaagggttaaaagcaggaagatatttgaaaatctgttaagaagcagatggactttccagaacctccctacaaccctgtacagctaggtgactg

SEQ ID NO: 22680 - DNA, 120 bp, synthetic construct
  source 1..120: mol_type = other DNA
acactgaattacatgaaaatttacctactgaatgctgaaacccccactggcatccaggcttataatctccaggcaagtttctggaaggaacttctataaggaatgtgactaaccctgatt

SEQ ID NO: 22681 - DNA, 120 bp, synthetic construct
  source 1..120: mol_type = other DNA
ccctatagggtaatatagttgacaaaatccattcttcaggcatagagcttcatttaactttttcatagatagcccgctcttaaatatgagtggacactaactaccagacagtatagatca

SEQ ID NO: 22682 - DNA, 120 bp, synthetic construct
  source 1..120: mol_type = other DNA
tccaaaaaattggtctctccagtatctaacatcatgtataagaataatcctacactaagacacatcatgaggaaatttcaaatcactggggataaaaagaatattctaacaaccttctgg

SEQ ID NO: 22683 - DNA, 120 bp, synthetic construct; identical to SEQ ID NO: 7114
  source 1..120: mol_type = other DNA

SEQ ID NO: 22684 - DNA, 120 bp, synthetic construct
  source 1..120: mol_type = other DNA
agtagctcatgtgccaccatgcctgactaatttttgtattttttgtagagacgaggttttgccatgttgcccaggctggtctcgaactcctgagctcaagcaatctgcctgtcttggcct

SEQ ID NO: 22685 - DNA, 120 bp, synthetic construct
  source 1..120: mol_type = other DNA
ttttgaccccagttctttgacaccactgtatatcctccagttgggttcaattttgatcctaactacccagagttagagtcagctccacaagtaaaagacaaagtcagtcacaagactgtc

SEQ ID NO: 22686 - DNA, 120 bp, synthetic construct
  source 1..120: mol_type = other DNA
acccagagttagcacagccccaacaggttaagagccgactccttcacaagactgctcccacctcagatgccagccacaaatgttgagtatctccaagccactcacatttctgcccagtgt

SEQ ID NO: 22687 - DNA, 120 bp, synthetic construct; identical to SEQ ID NO: 7115
  source 1..120: mol_type = other DNA

SEQ ID NO: 22688 - DNA, 120 bp, synthetic construct
  source 1..120: mol_type = other DNA
cacactgcaacctccgcctcctgggttcaagcgattctcctgcctcagcctccctagtagctgggattgtaggtgtctgccaccatgcctggctaatattttgtatttttagtagagatg

SEQ ID NO: 22689 - DNA, 120 bp, synthetic construct
  source 1..120: mol_type = other DNA
tcagtgtattcaccaatcagaaagctgcactgagttttggtatccataatttttattgaaattttattctgtaggcatgattaattaaataattggccacatgaggattaaactcgattt

SEQ ID NO: 22690 - DNA, 120 bp, synthetic construct
  source 1..120: mol_type = other DNA
aacacacacccctatcactcgagaaattccaagggtatttgaagctctctcaggtacaaatgaacaaagaccagctatattttttattataccattctagcctttaatcaaagtgttaaa

SEQ ID NO: 22691 - DNA, 120 bp, synthetic construct; identical to SEQ ID NO: 7116
  source 1..120: mol_type = other DNA

SEQ ID NO: 22692 - DNA, 120 bp, synthetic construct
  source 1..120: mol_type = other DNA
tgagcatcagtcatatgtacccagaaacccaaatgaacaaaaaataaagataacctttaactccatggacaacaggaagttgtaaaggaaggtgattatagtataccatctgccagctat

SEQ ID NO: 22693 - DNA, 120 bp, synthetic construct
  source 1..120: mol_type = other DNA
gagatcggagggggtgagtatccccccttccccaaaaactcagctgaaagagattagaaagaaagagttctttcaaaaaacattttcatccatgtctggcttttttaatatctgaggaac

SEQ ID NO: 22694 - DNA, 120 bp, synthetic construct; identical to SEQ ID NO: 7117
  source 1..120: mol_type = other DNA

SEQ ID NO: 22695 - DNA, 120 bp, synthetic construct
  source 1..120: mol_type = other DNA
ataggcagtgttttgtttttaattgaatagctttagttacagttagttctttcccccccatctttcttgtattctgattattactgttttgctgcatctaacaggttttgatatttctaa

SEQ ID NO: 22696 - DNA, 120 bp, synthetic construct
  source 1..120: mol_type = other DNA
aatcctcattttccagtactgttacaagtttcaggttggaaacttgtttgtgtttcttgtatctgttcaaaactttttattcatattattggatttagggcagactgtctgctactatga

SEQ ID NO: 22697 - DNA, 120 bp, synthetic construct
  source 1..120: mol_type = other DNA
ctttttacaattttgccgtttgtggtttgtttattgcattattttattcttctaatgtaagttagagggagaagctagaagatggagaaaattggggattggacacttgcaaattagttc

SEQ ID NO: 22698 - DNA, 120 bp, synthetic construct; identical to SEQ ID NO: 7118
  source 1..120: mol_type = other DNA

SEQ ID NO: 22699 - DNA, 120 bp, synthetic construct
  source 1..120: mol_type = other DNA
gaggacaatgcagtgtgtcttaaaagataatagcaaatgaagaatacttactaaagtcacagtattcttgcaactcattaataaagataaatacaactcaccttttaagtgggcaaaaga

SEQ ID NO: 22700 - DNA, 120 bp, synthetic construct
  source 1..120: mol_type = other DNA
ttatgatggctttaatcataaaggcaataataagcattgacgaagatgtggagaagcaggatccctcattgctggtgggaatttaaatagtacagccaccattttaaaacagttgagtga

SEQ ID NO: 22701 - DNA, 120 bp, synthetic construct
  source 1..120: mol_type = other DNA
tgtgtacacaaagacttagacttgtatgttcattcactagcagcattttttcataatagcctcaaaggagaagcagtgcaaatgtgtatcaactagtgaataaataaacaaaatttgtta

SEQ ID NO: 22702 - DNA, 120 bp, synthetic construct
  source 1..120: mol_type = other DNA
atcaaatgtccagaaaaggcaaaatttctaaagacaaaaagtacattagtggttgtctgactgtaagtggaaatgaggattaactgtaaatggacagcaggaattttattggaatgatga

SEQ ID NO: 22703 - DNA, 120 bp, synthetic construct; identical to SEQ ID NO: 7119
  source 1..120: mol_type = other DNA

SEQ ID NO: 22704 - DNA, 120 bp, synthetic construct
  source 1..120: mol_type = other DNA
gaagatagtaaatgttaaatggtagtttgggttggaattgcctgggttggaattccagctctgactctgccatttactagatatgtgactgaaaacaagttacttatattctctgtgcct

SEQ ID NO: 22705 - DNA, 120 bp, synthetic construct
  source 1..120: mol_type = other DNA
taaccaacatggtgaaaccctgtctctactaaaaatacaaaacataaccagcatggtggtgggcgcctgtaatcccagctacttgggaggctgaggcatgagaatcgtttgagccgagat

SEQ ID NO: 22706 - DNA, 120 bp, synthetic construct; identical to SEQ ID NO: 7120
  source 1..120: mol_type = other DNA

SEQ ID NO: 22707 - DNA, 120 bp, synthetic construct
  source 1..120: mol_type = other DNA
ttcttttatctctgtcactgcttccctagtgcatagtgccactgtctcacacttatattaatacattagcctcctaactggtctttcctatgtttcctccctacttagaccatttaaaat

SEQ ID NO: 22708 - DNA, 120 bp, synthetic construct
  source 1..120: mol_type = other DNA
tctaagaatcgcagaaaaaggcattaaaatttaaatttttttatcatattctttttgttctactttcctccttatttttggtgcttcatccacaccatgattcgttgacacgctaaaaca

SEQ ID NO: 22709 - DNA, 120 bp, synthetic construct
  source 1..120: mol_type = other DNA
cagcacttcccaagagagctcttccaaacctccagagtatatcatatctctctgttatatatatttacagcaccttgtacccttctttcatggcatttgtcaattttacctttattattt

SEQ ID NO: 22710 - DNA, 120 bp, synthetic construct; identical to SEQ ID NO: 7121
  source 1..120: mol_type = other DNA

SEQ ID NO: 22711 - DNA, 120 bp, synthetic construct
  source 1..120: mol_type = other DNA
tgcatataaattaaatttttaagtcacattttttaaatgatctaggaaagcttgatgtttaaagaaattacgttaggaatcattttgtaatttaattatccactgttaggtcagattttt

SEQ ID NO: 22712 - DNA, 120 bp, synthetic construct
  source 1..120: mol_type = other DNA
tgctttgtgctagggataatctatcttgaaatgactgcttttactggatgtaatctgtcattttaatttcctgttaacagatggtggttgcattagaaaaggctttgggttttattcata

SEQ ID NO: 22713 - DNA, 120 bp, synthetic construct
  source 1..120: mol_type = other DNA
agtttaactgttgtatttgcagctccattaaatgtcagaatcatgtgtccttgcagaaaagatagttatttgttctacttgggttatgttcctgatagtaatgtgagcgcagctggtaga

SEQ ID NO: 22714 - DNA, 120 bp, synthetic construct; identical to SEQ ID NO: 7122
  source 1..120: mol_type = other DNA

SEQ ID NO: 22715 - DNA, 120 bp, synthetic construct
  source 1..120: mol_type = other DNA
atgaaaccggctcacatgatgctgagcggcagaatgaaggtcaaggagtgggagaaatcaacatggcaacttctggtaatggtcaggtaaataaattattttatcatattttttaaaatt

SEQ ID NO: 22716 - DNA, 120 bp, synthetic construct
  source 1..120: mol_type = other DNA
ctctttattatatcagcaataatgctgtaaggattttctagatctatttctatagctatagattgtgtgtttatgttttagtctaaaatgattgtgagtagttttttttaataactctaa

SEQ ID NO: 22717 - DNA, 120 bp, synthetic construct
  source 1..120: mol_type = other DNA
aggctttatttcctgttgtacttaaagattatataaatctagaaatccaagtcttactgaaaaagataattgtaatgcacacaaaaaagtaaggcaacatggcctaattatgcttaatat

SEQ ID NO: 22718 - DNA, 120 bp, synthetic construct
  source 1..120: mol_type = other DNA
gacagaatttttctttagggtgttctgtattctccaaattttcttcaatgaatatttttagagtgtaaatgaatgactttttaaaaacagaatttcactaaattgttcttaaaggtaatt

SEQ ID NO: 22719 - DNA, 120 bp, synthetic construct; identical to SEQ ID NO: 7123
  source 1..120: mol_type = other DNA

SEQ ID NO: 22720 - DNA, 120 bp, synthetic construct
  source 1..120: mol_type = other DNA
gatctactcgtagtgctttgggtcatcttccaattattatgtactttggaaaccttacctatccagtaagctggctatgataaattggatccatattacacttactacatcaaaataaat

SEQ ID NO: 22721 - DNA, 120 bp, synthetic construct
  source 1..120: mol_type = other DNA
tataatcatgatgtaggtgggagacccataaagaaaggattgatagatttcacgttacagcatgagacttcagtatgccaggaaatcatagcgagattccaaaacaaacaaccaagatca

SEQ ID NO: 22722 - DNA, 120 bp, synthetic construct
  source 1..120: mol_type = other DNA
aaaataaataataattttaaaaataaaattaaaatgggcaaaggatatgaacaggaaataaaagaagaaattaaaatgacttgtaaacatggaaagatggtcaactttactaatcatgat

SEQ ID NO: 22723 - DNA, 120 bp, synthetic construct; identical to SEQ ID NO: 7124
  source 1..120: mol_type = other DNA

SEQ ID NO: 22724 - DNA, 120 bp, synthetic construct
  source 1..120: mol_type = other DNA
tagttaagtggctctggagtcaacaaacctgggaaatcacactccctcactaactagcttagtaacaaaaagtctctgagctttagtgtttcctctttagtaaaataagatgatgataaa

SEQ ID NO: 22725 - DNA, 120 bp, synthetic construct
  source 1..120: mol_type = other DNA
tatctttaaattaacaaatatgccagatactgtgttggactctagaattgataattgaaaaggacagacagtccttggcctcatggaacctatatggtgcatccatgcaaatattaaaaa

SEQ ID NO: 22726 - DNA, 120 bp, synthetic construct
  source 1..120: mol_type = other DNA
acttatttgtttaaacctttcagtggctactcacctcccatatattagaatccagattcttcatgttgcttactcttccaagagtatctcacaatatttgcccacatttctcaccactcc

SEQ ID NO: 22727 - DNA, 120 bp, synthetic construct
  source 1..120: mol_type = other DNA
tttaaatgtcacttcttcctggacattttccttgtctccacctacctggaataaataaagtactctttgatacgctgtattcctgctctcatagtgcttagcacaatttatcattggttt

SEQ ID NO: 22728 - DNA, 120 bp, synthetic construct; identical to SEQ ID NO: 7125
  source 1..120: mol_type = other DNA

SEQ ID NO: 22729 - DNA, 120 bp, synthetic construct
  source 1..120: mol_type = other DNA
tcctcccgcctcggcctcccaaattgctgggataacaggcgtgagccactgcgcccggccaattacaacttttttaatttaaaaatagcaagtatgctgggcatggtggctcacacctat

SEQ ID NO: 22730 - DNA, 120 bp, synthetic construct
  source 1..120: mol_type = other DNA
ggtagtcccagctacttgggaggccgtgtgggaggatcacttgagcctgggaggtcaaggctgcagtgggctatgatcatgccactgcattccagcctgggtaacaaggcaaaaaatatt

SEQ ID NO: 22731 - DNA, 120 bp, synthetic construct
  source 1..120: mol_type = other DNA
ttctttaaactgttatcaatagttatctctgagtgttgggatttttgtgggttttacttattcttttgtgtgtcgttttattttttgtaatgaacatgtattactataatttataacacc

SEQ ID NO: 22732 - DNA, 120 bp, synthetic construct; identical to SEQ ID NO: 7126
  source 1..120: mol_type = other DNA

SEQ ID NO: 22733 - DNA, 120 bp, synthetic construct
  source 1..120: mol_type = other DNA
agatcctgatgtagatgtgtgacctgtatctgtgggactgtgatttgttattccaaaagtcctttcatctaaataggatctatacacatgatcgcctcttggggtttattagtttgtttt

SEQ ID NO: 22734 - DNA, 120 bp, synthetic construct
  source 1..120: mol_type = other DNA
cttcaccaccacgtgggaatgtattctaccgcttctctcacctggtttcctgcccacaatcattctctttgaaaaatccttcattggcttcccttgattcttagaaaaatgataaccatt

SEQ ID NO: 22735 - DNA, 120 bp, synthetic construct; identical to SEQ ID NO: 7127
  source 1..120: mol_type = other DNA

SEQ ID NO: 22736 - DNA, 120 bp, synthetic construct
  source 1..120: mol_type = other DNA
tgtaagctccagaaaggcagggattctatctagttttgttattttcatacccacacagtccctgataaatagtagataacaataaatatgtggtgtgtgtaatatccctgctaaagaaag

SEQ ID NO: 22737 - DNA, 120 bp, synthetic construct
  source 1..120: mol_type = other DNA
tagttggttctcaactttatttatttatttatttatttatttatttatttatttattgagatagggtctcactctgtcactgtacaccactgcacagtggtgcaatctcggctcattgca

SEQ ID NO: 22738 - DNA, 120 bp, synthetic construct
  source 1..120: mol_type = other DNA
atattgtccaggctggttttgaattcccaagctcaagcaatcctccagcattggcctcccaaagtgctacgattggctgggcatggtgctcacacatgtaatcccagcactttgggaggc

SEQ ID NO: 22739 - DNA, 120 bp, synthetic construct
  source 1..120: mol_type = other DNA
agctacttgggaggctgaggcaggaaaatctcttgaacctaggaggctgaggttgcagtgagttgagattgtaccactgcactctagcctgggtgacagagcaagactctatctcaagga

SEQ ID NO: 22740 - DNA, 120 bp, synthetic construct; identical to SEQ ID NO: 7128
  source 1..120: mol_type = other DNA

SEQ ID NO: 22741 - DNA, 120 bp, synthetic construct
  source 1..120: mol_type = other DNA
agatatggaagtttttaatccatttttctttcactattttttctttttttcaagcaacctaagcttttctatttgaaatttagaaccaggtctctggtaatagccagtatataataataa

SEQ ID NO: 22742 - DNA, 120 bp, synthetic construct
  source 1..120: mol_type = other DNA
tcatatcgacatgtaacctattcaccttaacctcccattttattttttaagaagattccaggcatcatcatcacttcttccctgtttcactgtgtatttacaaaagataaaagtacttat

SEQ ID NO: 22743 - DNA, 120 bp, synthetic construct
  source 1..120: mol_type = other DNA
aaccctgtctctactgaaaatacaaaaattagccagatgtggtggcgcacacgtgtagtcccagctactcgggaagctgaggcaggagaatcacttgaatccaggaggcagaggttgcag

SEQ ID NO: 22744 - DNA, 120 bp, synthetic construct; identical to SEQ ID NO: 7129
  source 1..120: mol_type = other DNA

SEQ ID NO: 22745 - DNA, 120 bp, synthetic construct
  source 1..120: mol_type = other DNA
tttgtttttgtttttttagtcaggatctcactctcgcctggactagagtgcagtggcaaagctcactgcagccttgaactcctgggcttaagcgatcctctcgagtagctggtgctatag

SEQ ID NO: 22746 - DNA, 120 bp, synthetic construct
  source 1..120: mol_type = other DNA
tcatgcctggcttccaaatgttttttttatagagtgtcccatactctagattttgctgatgactccccatgatatacttcaacatgtttctttatcatctgtatgtcctataaattggta

SEQ ID NO: 22747 - DNA, 120 bp, synthetic construct
  source 1..120: mol_type = other DNA
agtcgagaattactcgcaggtttctgttaggcagctagaagggtagtgatgcaatttagtaataatgctagatgagaaggaggtttgtgagagaaaataatgagtctagttttggaaaaa

SEQ ID NO: 22748 - DNA, 120 bp, synthetic construct; identical to SEQ ID NO: 7130
  source 1..120: mol_type = other DNA

SEQ ID NO: 22749 - DNA, 120 bp, synthetic construct
  source 1..120: mol_type = other DNA
aatgtgaggtaggctattagatttggaattgagaggaaaggtaaagaattggtaattaaaggtattaaagatttttacatccccaatgagtatacagtgagaagatgaatacctagccta

SEQ ID NO: 22750 - DNA, 120 bp, synthetic construct
  source 1..120: mol_type = other DNA
tcattgctgatcttgtcaaatgcaattccttgggccttctttcctactatattatattggagtgagttgaagttaaatggaaggttaaaaagtagaagagagcagtcaggcgtgatggct

SEQ ID NO: 22751 - DNA, 120 bp, synthetic construct
  source 1..120: mol_type = other DNA
gtggcagcgcgtgcctgtaatcccagctactcgggaggctgaggcaggagaatcgcttgaacccaggagggagaggttgcagtgagctgagatccttccactgcactccagcctggtgac

SEQ ID NO: 22752 - DNA, 120 bp, synthetic construct; identical to SEQ ID NO: 7131
  source 1..120: mol_type = other DNA

SEQ ID NO: 22753 - DNA, 120 bp, synthetic construct
  source 1..120: mol_type = other DNA
ggaggaggggaactctgatgtcacagcaaaaggtggcgatggatatatacgcaggtaattttaaggttctggttagcaagaagttgaggaaattttgtctgttggctattttttctataa

SEQ ID NO: 22754 - DNA, 120 bp, synthetic construct
  source 1..120: mol_type = other DNA
ccaaagaaaggagagctgacaagggaaacaaaaagatggcagttatagcacggagagtctaggtgtattggtgaccataaatgtatatcgacagcatcctaaagagttacgtaagtttct

SEQ ID NO: 22755 - DNA, 120 bp, synthetic construct; identical to SEQ ID NO: 7132
  source 1..120: mol_type = other DNA

SEQ ID NO: 22756 - DNA, 120 bp, synthetic construct
  source 1..120: mol_type = other DNA
ctactaaaaatacaaaacttagccaggagtggtggcacatgcctgtaatcccagctactctggaggctgaagcaggagaatcacttgaacctgggagccagagttggtagtgagctgaga

SEQ ID NO: 22757 - DNA, 120 bp, synthetic construct
  source 1..120: mol_type = other DNA
taaaatgttgaggatgtatggatatttataaagcattgaatgtggatggtacaggaaagttggataggaaaaaggacagtgggaaatagtgtctcacacatttggacactgagtgtcagg

SEQ ID NO: 22758 - DNA, 120 bp, synthetic construct
  source 1..120: mol_type = other DNA
tcagaatttagttttgagttgggtgggaaacaattcttaggaagttattaatcatttcttgtggatagggagactctagtccctccgaaagaagttggctcaggtctagccttaataaaa

SEQ ID NO: 22759 - DNA, 120 bp, synthetic construct
  source 1..120: mol_type = other DNA
gaagagtgtctcaaaatccaggagctatataggaagataactaagactgaagcttagaaaagatttgttgtctacactgaaatgaatgtcagaaacatgttttattgtggaaacaggttt

SEQ ID NO: 22760 - DNA, 120 bp, synthetic construct; identical to SEQ ID NO: 7133
  source 1..120: mol_type = other DNA

SEQ ID NO: 22761 - DNA, 120 bp, synthetic construct
  source 1..120: mol_type = other DNA
tgcttctaagttcacttacggctattgaaggcctcagatcctcattggatgtcagccagagagacatcagttccttgttacatgggcctcaccaagggcagttcacagcatagtaacgct

SEQ ID NO: 22762 - DNA, 120 bp, synthetic construct
  source 1..120: mol_type = other DNA
agccaagactaaaggggaagggattacaaaaacgcgtgaataccaggaggcaaagatctatcttagaggctacctacaaacagtaaaaatatttagacatcttccaagattgtgtgtttg

SEQ ID NO: 22763 - DNA, 120 bp, synthetic construct; identical to SEQ ID NO: 7134
  source 1..120: mol_type = other DNA

SEQ ID NO: 22764 - DNA, 120 bp, synthetic construct
  source 1..120: mol_type = other DNA
aaattcagatgccactttttcaggaaccaagactgaattgtgtatcttcctgtgtgttcatatagtttctgtcaaagcacttacccacacgtattttcatgttcagctcctcatctagat

SEQ ID NO: 22765 - DNA, 120 bp, synthetic construct
  source 1..120: mol_type = other DNA
tcaggcaatatttgttgcttggttgcatgtggatttaaagaccattccagaagcagtcaatagctggtggcagtggaaagagatgtaagatgagtctttccttgatgcctcttttccctt

SEQ ID NO: 22766 - DNA, 120 bp, synthetic construct
  source 1..120: mol_type = other DNA
ttctcagtccaaccccagacttccctatgcgagtatgaataagtggattatcttgcctttatatggggacacattttttaaaacctctcaagttaggattttttaaagatcacttttatt

SEQ ID NO: 22767 - DNA, 120 bp, synthetic construct
  source 1..120: mol_type = other DNA
atctaaaatagttttgtgcactagtcaggaaaacctcaccttggcttataacatgacttatacagaagttctaagcagccctcataaaaattaactttggagtattacctatttaaggac

SEQ ID NO: 22768 - DNA, 120 bp, synthetic construct; identical to SEQ ID NO: 7135
  source 1..120: mol_type = other DNA

SEQ ID NO: 22769 - DNA, 120 bp, synthetic construct
  source 1..120: mol_type = other DNA
aaaaatcaccaaaagtgaaatttatgcacaaaaggaagttataaggtgtgttggttccagaattctccccttgtaccctctagagtaggaggtgccatctcacagtcctcaaaacctatt

SEQ ID NO: 22770 - DNA, 120 bp, synthetic construct
  source 1..120: mol_type = other DNA
catcttgacattcttacggattttactaatagctcctcatttatttataattcaacaaatattctgtggatacctactaagcttaagaccacccttggtactaagaatgcagcagcgaac

SEQ ID NO: 22771 - DNA, 120 bp, synthetic construct; identical to SEQ ID NO: 7136
  source 1..120: mol_type = other DNA

SEQ ID NO: 22772 - DNA, 120 bp, synthetic construct
  source 1..120: mol_type = other DNA
ttgtcctcgactcccagcccctctttactcacatccagtcaagttactcaagccagttaatttgaccttcagttcaagccaattaatttgaatatccttcaagagcatccccacttctct

SEQ ID NO: 22773 - DNA, 120 bp, synthetic construct
  source 1..120: mol_type = other DNA
ctccgtgctgtttttaagacgtaattctgattgtaccattctcctgcctgaagtccagtgactccacagcttgacagcaacatctttgaaatgacatgagatacttaatgatttaaccca

SEQ ID NO: 22774 - DNA, 120 bp, synthetic construct
  source 1..120: mol_type = other DNA
cacagtctcctccgtcagtctcctgtcacaaaatgcctaccttaaatgttactgattttatacagcctctaatagtccctatgcagtaatttctttcttcctgttttccctcagtgtttt

SEQ ID NO: 22775 - DNA, 120 bp, synthetic construct; identical to SEQ ID NO: 7137
  source 1..120: mol_type = other DNA

SEQ ID NO: 22776 - DNA, 120 bp, synthetic construct
  source 1..120: mol_type = other DNA
gtccattctgcagtttaatgctcatatgcaagaaactctcttttctttagtttttctctaaaacatacttagtaagcgtataggtaaaaaatattttgaacagttataatggtcatactt

SEQ ID NO: 22777 - DNA, 120 bp, synthetic construct
  source 1..120: mol_type = other DNA
tcaactacacgaatggaccatgaaacagccagtgttttgagttctagtagcacacactctgcacctcgaaggctgacaagtcatctgggaaccaaggtaacagaagattacaaaccctgg

SEQ ID NO: 22778 - DNA, 120 bp, synthetic construct
  source 1..120: mol_type = other DNA
ccagcctgggcaacgtggcaaaaccccatctctactaaaaatacaaaaatttagccagtgtggtggcacacacctgtggtcccagctactcaggaggctgaggcatgagaatagttggaa

SEQ ID NO: 22779 - DNA, 120 bp, synthetic construct
  source 1..120: mol_type = other DNA
tcaggtttataaaaagtgccagattagctaatttttaattctttttcagtctttacatccacttttctgcaagaatactgagttccagccaaactggctcacttcctgcttcctgaacat

SEQ ID NO: 22780 - DNA, 120 bp, synthetic construct; identical to SEQ ID NO: 7138
  source 1..120: mol_type = other DNA

SEQ ID NO: 22781 - DNA, 120 bp, synthetic construct
  source 1..120: mol_type = other DNA
tagcaaatattttaggatttgggaataatgtttgaaaagaaaatagttactttaagccggatgtggtggctcacacctgtaatcccagaaatttgggaggctgaggtgggtggatcactt

SEQ ID NO: 22782 - DNA, 120 bp, synthetic construct
  source 1..120: mol_type = other DNA
caggagaattgtttgaacctgggaggcggaggttgcagtgagctgagattgtgccattgcactccagcctgggcaacaagagcaaaactccatttcaaaagaaaaaaaaaagaggaaaat

SEQ ID NO: 22783 - DNA, 120 bp, synthetic construct
  source 1..120: mol_type = other DNA
ggctcactgcaacccccacctccagggtttaagtgattctcctgcctcagcctcccaagtagctgggattacaggtgcgtgccaccatgcccggctaattttttgtatttttagtagaga

SEQ ID NO: 22784 - DNA, 120 bp, synthetic construct; identical to SEQ ID NO: 7139
  source 1..120: mol_type = other DNA

SEQ ID NO: 22785 - DNA, 120 bp, synthetic construct
  source 1..120: mol_type = other DNA
attctcactatgaggcttaatcctgtttatacttcttgggacctcatatgccattcactgtgccaggagttgtatgtaccttatctctggtcctctccaaaattctatgaagtatccata

SEQ ID NO: 22786 - DNA, 120 bp, synthetic construct
  source 1..120: mol_type = other DNA
tattgtgtgaaaactggcaattagaatactgtttctttttgaagtaatttatgcatgataatattaagaccctagtatgtattttgaatgctagctactgtcctatacatgtattatttt

SEQ ID NO: 22787 - DNA, 120 bp, synthetic construct; identical to SEQ ID NO: 173
  source 1..120: mol_type = other DNA

SEQ ID NO: 22788 - DNA, 120 bp, synthetic construct
  source 1..120: mol_type = other DNA
atttctaaacctcagcactattggctggataattctttgttgcattctagaatgtatagtaacgtccctggtctctccccactagattcccctaaaatacccatcctacaattgtgacaa

SEQ ID NO: 22789 - DNA, 120 bp, synthetic construct
  source 1..120: mol_type = other DNA
agaatgatgcattctttatataatagcctctacttttatataataccctctagcgttaaaatgagtggaccatggcccaggataactgggtgccactttccggtttctaatctgcttcta

SEQ ID NO: 22790 - DNA, 120 bp, synthetic construct
  source 1..120: mol_type = other DNA
tctcactctgtatgatcatggcattttcctttttatgacaaaatgtttttaaatttataatcgtataattttaataatattatcatctgacgagaattaatgattgctgagaattagtac

SEQ ID NO: 22791 - DNA, 120 bp, synthetic construct; identical to SEQ ID NO: 7141
  source 1..120: mol_type = other DNA

SEQ ID NO: 22792 - DNA, 120 bp, synthetic construct
  source 1..120: mol_type = other DNA
gttttgtttttttagagttatagtaaatatcccattcatcacttaattggtttttggcttttggatattaaagtcgtaattttgtttctaaactcatttggcccacaggtggaaatggtg

SEQ ID NO: 22793 - DNA, 120 bp, synthetic construct
  source 1..120: mol_type = other DNA
cagctgtatatccatgcgacagtctggatgtcttcctctcctcatccagcttttacatggcaatgacaaagactctgtattgttgggaaattcccggggcagtaaagaggctcgggccag

SEQ ID NO: 22794 - DNA, 120 bp, synthetic construct
  source 1..120: mol_type = other DNA
gtggcaggaagctcatgaaccaggcatggaccaggacaaaaatccaagtatgttctctatagtgtacatcgtagtgcatgtttcaaagcaaatgtgaaatttttaaacagaaaacatgtt

SEQ ID NO: 22795 - DNA, 120 bp, synthetic construct
  source 1..120: mol_type = other DNA
caatcatagcatagtagggccttagtagagctagaaagaacttgagcaattatgttgcccatctttcacttcatagctgaagctcatttcatagatgaaagtgactttacgtaagttcct

SEQ ID NO: 22796 - DNA, 120 bp, synthetic construct; identical to SEQ ID NO: 7142
  source 1..120: mol_type = other DNA

SEQ ID NO: 22797 - DNA, 120 bp, synthetic construct
  source 1..120: mol_type = other DNA
ccactcccgcaggagcagcatgggagttaggacctatggggatataacttatttcattcctgtagccaagaaccaaaagcagtaagtatgtaaggtaagaccttcctttcacctgataag

SEQ ID NO: 22798 - DNA, 120 bp, synthetic construct
  source 1..120: mol_type = other DNA
tgtgaagaggagatgatacaaacatgacttatgaacctatagcagatttttttaagcttaggtatgaaggtgaatttatttgaaatctaaaaatgttcaaggataagaaaggccaggtgt

SEQ ID NO: 22799 - DNA, 120 bp, synthetic construct; identical to SEQ ID NO: 7143
  source 1..120: mol_type = other DNA

SEQ ID NO: 22800 - DNA, 120 bp, synthetic construct
  source 1..120: mol_type = other DNA
tgcatagtattgaatgtggaggtacattttcttagtcacccttttaaaaaatatctgtttactgtctagtatatctgtgtaactttttgtattagagatcacatttgtacatagccacat

SEQ ID NO: 22801 - DNA, 120 bp, synthetic construct
  source 1..120: mol_type = other DNA
cagcctcctgagagtatctgggactacaagcatgtgccaccacaactgactaattttttttttttttttttttgagagacggggttttgccatgtttcccaggctggtcttgaactcctt

SEQ ID NO: 22802 - DNA, 120 bp, synthetic construct
  source 1..120: mol_type = other DNA
tttaacccacactcatgatagtagtttaaatagaaattataaactgggctaagcacggtggctcgtgcctataattctagcactatgggaggcccgggcaggagcggcacttgaggccag

SEQ ID NO: 22803 - DNA, 120 bp, synthetic construct; identical to SEQ ID NO: 7144
  source 1..120: mol_type = other DNA

SEQ ID NO: 22804 - DNA, 120 bp, synthetic construct
  source 1..120: mol_type = other DNA
gagacttagtcaagggcagatgagtggtaaacatttttatggaaacaaatccctttattcctattttttgttccacatttgtagtatttattcatcctttcagcaaatatttgttgatcc

SEQ ID NO: 22805 - DNA, 120 bp, synthetic construct
  source 1..120: mol_type = other DNA
ccagctcctgttgaacatcagatctgtcctgctgtgtgtgttctaatgaaactttcatttgatgaagagcatagacatgcaatgaatgaactaggtaagacaaaaatgttttttaatgac

SEQ ID NO: 22806 - DNA, 120 bp, synthetic construct
  source 1..120: mol_type = other DNA
tgtgtagcaaaaaattgtaccctggtttccagcatagaaaggatcctgaatcacagaaactgctaccctgtcataagctaactttttcaaaatcgaagccggagattgaaaaaaaatgac

SEQ ID NO: 22807 - DNA, 120 bp, synthetic construct; identical to SEQ ID NO: 7145
  source 1..120: mol_type = other DNA

SEQ ID NO: 22808 - DNA, 120 bp, synthetic construct
  source 1..120: mol_type = other DNA
gccttatataaccagcagtgcactccattttttatgtaatggtttttctttgatttctaggttcattttgtacatgtggtatttataaattgcatcatgctgaaccatctcatgtgaact

SEQ ID NO: 22809 - DNA, 120 bp, synthetic construct
  source 1..120: mol_type = other DNA
cgtttatgttacattatgttccagccaccactttatattcctatcccctcatcgtttcattcgtcatttatcttaaaagtgatgaagtcatgagactcttacacagagaacctgaacagc

SEQ ID NO: 22810 - DNA, 120 bp, synthetic construct
  source 1..120: mol_type = other DNA
ttccttcctagtggtgtagcaattggcctacctgattctctttcctccccctggtctcctgtggattctcagttaatcttatgaattctcccctcgttaatacaatctcagcatttgtga

SEQ ID NO: 22811 - DNA, 120 bp, synthetic construct; identical to SEQ ID NO: 7146
  source 1..120: mol_type = other DNA

SEQ ID NO: 22812 - DNA, 120 bp, synthetic construct
  source 1..120: mol_type = other DNA
ggcaaaaggaggattagggtgtgtggattgcggggagataatagtacaagacagcacaaggttttggcagtaagggataaggagaaaagaaatcccaaataggtaaaggggaattcctta

SEQ ID NO: 22813 - DNA, 120 bp, synthetic construct
  source 1..120: mol_type = other DNA
tgattccctaatctaccccagaaactgtgctaggcactagatttttataatgattaagacctggtcctggctttcagggaactcacagtttatttgcattagtgtttcacaaaataccta

SEQ ID NO: 22814 - DNA, 120 bp, synthetic construct
  source 1..120: mol_type = other DNA
taggaatcaatgtgataagtggcctggctgattcttatgttcgggaaattttgtgaaacaccagtagaatattcttgttgagcctgtgatatttattttagaacaaggcatttcatgcta

SEQ ID NO: 22815 - DNA, 120 bp, synthetic construct; identical to SEQ ID NO: 7147
  source 1..120: mol_type = other DNA

SEQ ID NO: 22816 - DNA, 120 bp, synthetic construct
  source 1..120: mol_type = other DNA
atcaatccagtcatgaatttgcatattttagcaaatccatttataggtttaacctatgaattctattctgtgcctcaaaattctctgaaatcttttcatttgcctgaaatcaaaaagcac

SEQ ID NO: 22817 - DNA, 120 bp, synthetic construct
  source 1..120: mol_type = other DNA
ctaagatttttagtttttccatacaagagtactcaactctttgatcatgtagtgccttcttggcatcttctttaggtgcattttatctttcttaagaaagtatcccagttattgtcacac

SEQ ID NO: 22818 - DNA, 120 bp, synthetic construct
  source 1..120: mol_type = other DNA
tggggatctcattagtataccaggccaagtcttaaggtcttccctgtcaatttcatgggtcaaaattctcagttcttttacaggctccttttcttttacccaagtgtaaaatggtggaat

SEQ ID NO: 22819 - DNA, 120 bp, synthetic construct
  source 1..120: mol_type = other DNA
tgaactgactatgtgacatcttcccttaggtggtattttagacacttctaactcaactgtcacaaactgaattcgtaatctttcccatccctgaatctcttatcttttcccagtttcctt

SEQ ID NO: 22820 - DNA, 120 bp, synthetic construct; identical to SEQ ID NO: 7148
  source 1..120: mol_type = other DNA

SEQ ID NO: 22821 - DNA, 120 bp, synthetic construct
  source 1..120: mol_type = other DNA
tctccttgctgttaaatatttcaggcccaggggccctttcacatgctgtttcctttgcttagaacgcatctttcttcttcctgccccacccttgttagatacgcattcatctggccagac

SEQ ID NO: 22822 - DNA, 120 bp, synthetic construct
  source 1..120: mol_type = other DNA
aataaaaagaaagatacacattcatcctttacgtttcaacttaaacattaaaagattatttcctcagcctttttcttatggagcctaatcccaggtctaagttaagtccacctattatat

SEQ ID NO: 22823 - DNA, 120 bp, synthetic construct
  source 1..120: mol_type = other DNA
actgtctctgtattttgccactgttgcaggtgaatggaggaaaattttcctaaatatgatttggattttctttaaccaaattaattttcacttacctacattcaaacatgtctgtcattc

SEQ ID NO: 22824 - DNA, 120 bp, synthetic construct; identical to SEQ ID NO: 7149
  source 1..120: mol_type = other DNA

SEQ ID NO: 22825 - DNA, 120 bp, synthetic construct
  source 1..120: mol_type = other DNA
ctttacctttgttttctccttgacttcctattgttggccattgtgggcattgtttagcattttcagtggaaagaatcaggggaaagaaaatactaaatcttagtatagttaatatttgat

SEQ ID NO: 22826 - DNA, 120 bp, synthetic construct
  source 1..120: mol_type = other DNA
ttcttcatgcacagtttcatttaaaggcatccgtattcctaagggtaattatttgccaaaaaaaaaaaattaaagtagttaggccacagtgtatgacaataaagagtgtttataaagccc

SEQ ID NO: 22827 - DNA, 120 bp, synthetic construct
  source 1..120: mol_type = other DNA
cgctcagcaagataaggggctgggggtggagaaactggcataaaatggaataattgtcagttgtactttataaatatattatacagaagttctttataacagtttttgtagcttataatt

SEQ ID NO: 22828 - DNA, 120 bp, synthetic construct; identical to SEQ ID NO: 7150
  source 1..120: mol_type = other DNA

SEQ ID NO: 22829 - DNA, 120 bp, synthetic construct
  source 1..120: mol_type = other DNA
tcactctcctcattaaacaatgactgataaaaacctgtgcttcacattcgcttatctttactcatttgtttgtcttatgcctaaacaaaggcaaaggtacatctacagatggaacacagt

SEQ ID NO: 22830 - DNA, 120 bp, synthetic construct
  source 1..120: mol_type = other DNA
accaaggcaagtgttacacacacattgattccatccaaataagaggctttactctaaaacctgttgcttatcatttctcaccacttattcactttatttctctagtttgacaaaggaaga

SEQ ID NO: 22831 - DNA, 120 bp, synthetic construct; identical to SEQ ID NO: 183
  source 1..120: mol_type = other DNA

SEQ ID NO: 22832 - DNA, 120 bp, synthetic construct
  source 1..120: mol_type = other DNA
caatctcagctcactgcaacctctgcctccagggttcaagcaatcctcccacttcagcctctcgaggctgggcctacaggtgcacaccaccatgccaaacgaatttttgtattttttata

SEQ ID NO: 22833 - DNA, 120 bp, synthetic construct
  source 1..120: mol_type = other DNA
gtatttagtatctcatgtataaaagatagttccattaacactagaaaaagaaaaataattatattgtggttagactgtaggaaatctttttggcactgtagtagcatttaggaggaattt

SEQ ID NO: 22834 - DNA, 120 bp, synthetic construct
  source 1..120: mol_type = other DNA
agaactactgcaggcgcatgccaccatgcccagctaatttttaaaaagttttcatagagacagggtctcactgtgttacccagaaggtcttgaactcctggtctcaggagatcctcctgc

SEQ ID NO: 22835 - DNA, 120 bp, synthetic construct; identical to SEQ ID NO: 7152
  source 1..120: mol_type = other DNA

SEQ ID NO: 22836 - DNA, 120 bp, synthetic construct
  source 1..120: mol_type = other DNA
gcttttttttgctgccttcttttagccatgagatttcctaatttcttacctgtgtattattcagtactataatatgaatttcatgtttagctttttttgctgccttcttttagccatgag

SEQ ID NO: 22837 - DNA, 120 bp, synthetic construct
  source 1..120: mol_type = other DNA
cctcctgagtagctgggattacagtgcacgccaccactcccggctatttgtatttttagtagagatggggtttcaccatgttggtaaggctggtctcgaactactcctgactttgtgatc

SEQ ID NO: 22838 - DNA, 120 bp, synthetic construct
  source 1..120: mol_type = other DNA
gtttatctcaccagtccatagttttagagtaccgcaaactcctaaagtactaaggtagaaaagattatataaggggatttaatgtatatcagggtttctctgcctcagcactatagacat

SEQ ID NO: 22839 - DNA, 120 bp, synthetic construct; identical to SEQ ID NO: 7153
  source 1..120: mol_type = other DNA

SEQ ID NO: 22840 - DNA, 120 bp, synthetic construct
  source 1..120: mol_type = other DNA
taaaaagaaaaaaaaaagtaaacttgaaatctgagagggaccaagcaagttgtcttagctagtctaggtttcctttcacccagctagtcctcctatacccacagcctacatgttcttctt

SEQ ID NO: 22841 - DNA, 120 bp, synthetic construct
  source 1..120: mol_type = other DNA
cattcagctaaattattagttataaagataatattcaaatatacttagcatctgcataaaaatacctgtatcactgttgaatggagagaagacatttaagaaaagaacatggccgataag

SEQ ID NO: 22842 - DNA, 120 bp, synthetic construct; identical to SEQ ID NO: 7154
  source 1..120: mol_type = other DNA

SEQ ID NO: 22843 - DNA, 120 bp, synthetic construct
  source 1..120: mol_type = other DNA
tgggagtagaagagaaggggaggattatgagagggtaggaaacttttggggatgatataaatgtttgttatcttgattggactggcagttttatgggtgtatacatgtatgaaaaattat

SEQ ID NO: 22844 - DNA, 120 bp, synthetic construct
  source 1..120: mol_type = other DNA
cacttaagtactcctactctaataaccctgtgtagtttcagaaggatttaatgtgtgtgtgtattatgagaatttgcactgctgctaactggttcatgacttaattctctctcaaggacc

SEQ ID NO: 22845 - DNA, 120 bp, synthetic construct
  source 1..120: mol_type = other DNA
ggctaactgcaacctccaactccctggttcaagcgattatcctgcctcagcctcccaagtagctgggattataggcatgcgccaccatgcccagctagtttttgtatttttagtagagac

SEQ ID NO: 22846 - DNA, 120 bp, synthetic construct
  source 1..120: mol_type = other DNA
ctagctgtcagaaatttataatatccagttctgatttgggcctaattctggttagcagtattagaatttatttattttttccctctttttctacatttagtgcagcagtcatgaacattc

SEQ ID NO: 22847 - DNA, 120 bp, synthetic construct; identical to SEQ ID NO: 7155
  source 1..120: mol_type = other DNA

SEQ ID NO: 22848 - DNA, 120 bp, synthetic construct
  source 1..120: mol_type = other DNA
agagtgtttctggggcagttacaatttgacagttgactttgacttgcttcatttctaaactggctgtactatcttgagttcctcctaattttgcttctgacacaacccttctccttgatc

SEQ ID NO: 22849 - DNA, 120 bp, synthetic construct
  source 1..120: mol_type = other DNA
tttgtgtcttctaatttgaactataaaaacatttttgaaacaaaacctctggcccttgacatgtagccccacagagaggaacttttgtatttttctaccttcaactctcaactctgggcc

SEQ ID NO: 22850 - DNA, 120 bp, synthetic construct; identical to SEQ ID NO: 7156
  source 1..120: mol_type = other DNA

SEQ ID NO: 22851 - DNA, 120 bp, synthetic construct
  source 1..120: mol_type = other DNA
ttccctgcctttcctcattctacttcccctgccagcagcaactggattctcttctctgggaatgtacaggtctaatcctcctaaagagctgttctcctccatgaaatatttgattgattt

SEQ ID NO: 22852 - DNA, 120 bp, synthetic construct
  source 1..120: mol_type = other DNA
atgtttgcatcctctagagtgcctctcattgcaataggcacagagttgatttctaattaatgtttgtttcctgatggatatatagtaagaagacagattgacatcaccatcatgccaagt

SEQ ID NO: 22853 - DNA, 120 bp, synthetic construct
  source 1..120: mol_type = other DNA
caagtagctggacctataggtgtgcaccaccatgcctggctaattttttttttttttttttttgagaccgagtctcgctctgtcacctaggctggagtatagtggcgcaatctcggctca

SEQ ID NO: 22854 - DNA, 120 bp, synthetic construct; identical to SEQ ID NO: 7157
  source 1..120: mol_type = other DNA

SEQ ID NO: 22855 - DNA, 120 bp, synthetic construct
  source 1..120: mol_type = other DNA
ccagcacatggcaagttttgaccaaatacctttaattgtgtatcagagtgtttctgtggccattacaatttgacagttgactttgataattgtatgttagggagttccaggttttcataa

SEQ ID NO: 22856 - DNA, 120 bp, synthetic construct
  source 1..120: mol_type = other DNA
aatcaaccacttgtatataatgctttttatataaacagaatattgtatatactacactgcaacttgctcttgtcatttaataatacttccaagatatctttccatatctatgtatggttt

SEQ ID NO: 22857 - DNA, 120 bp, synthetic construct
  source 1..120: mol_type = other DNA
cctcccaagcagctgtgactgcaggcgcgtgccaccatacccagctcattttttttttattttttgtacagacgggatttcaccatgttgtccaggctggtctcaaattcctaaactccc

SEQ ID NO: 22858 - DNA, 120 bp, synthetic construct
  source 1..120: mol_type = other DNA
gtgttgcagtctcggctcactgcgacctctgcctcccaggttcaagcgattctcccacctcagcctcccaagtagctgggattacaggcacctgccatgaagcccggctaattttttttt

SEQ ID NO: 22859 - DNA, 120 bp, synthetic construct; identical to SEQ ID NO: 7158
  source 1..120: mol_type = other DNA

SEQ ID NO: 22860 - DNA, 120 bp, synthetic construct
  source 1..120: mol_type = other DNA
tgtgttctgcttgttttatagagatatcactgatataaatactatttggtattttatgaacatttttctaaatggaaagttcttaatttaccagtgagggacgggcaataggatagatta

SEQ ID NO: 22861 - DNA, 120 bp, synthetic construct
  source 1..120: mol_type = other DNA
tgtttcttactaggaatcaaccctcaaaagcgtattgagtgccttatggaatttgtcagcacattgcactgagaataaagctgatatatgtgctgtagatggtgcacttgcatttttggt

SEQ ID NO: 22862 - DNA, 120 bp, synthetic construct; identical to SEQ ID NO: 7159
  source 1..120: mol_type = other DNA

SEQ ID NO: 22863 - DNA, 120 bp, synthetic construct
  source 1..120: mol_type = other DNA
ttatagttgagaggtgtagcccataggtggaggaaaaaatagtcacaaatattgtaacaaaataatccatttctattagtatagtataaaagagtatgaaaacaaaatttagaacaagac

SEQ ID NO: 22864 - DNA, 120 bp, synthetic construct
  source 1..120: mol_type = other DNA
actggagggcagtgttgtgatcttggctcactgcaacctccacctcctgggttcaagcgattctcccacctcagcttcccaacaagctgggactacagatgcacgccacaacacccggct

SEQ ID NO: 22865 - DNA, 120 bp, synthetic construct
  source 1..120: mol_type = other DNA
ccaccgcgcccggccaataatcataatattatttagctaacagccattcatccaatctgctagagttgtaaaacccaagagagtgcttcagatacagggcacacattttcagaactcgga

SEQ ID NO: 22866 - DNA, 120 bp, synthetic construct
  source 1..120: mol_type = other DNA
gcaacctctgcctttggggttcaagcgattctcctgcctcagcctcccgagtagctgggattacaggtccccccccccccccgccaccgtgcccggctaatttttatatttttagtagag

SEQ ID NO: 22867 - DNA, 120 bp, synthetic construct; identical to SEQ ID NO: 7160
  source 1..120: mol_type = other DNA

SEQ ID NO: 22868 - DNA, 120 bp, synthetic construct
  source 1..120: mol_type = other DNA
atcttcagtttgcctgcgttaaacaagctgttgctctttcatgtccagagttcattatgctgattctcactccttgtttttatatgccttaaatgtttcaaaaactttaatttacttgat

SEQ ID NO: 22869 - DNA, 120 bp, synthetic construct
  source 1..120: mol_type = other DNA
ctcactgcaacctctgcctcccaagtgattctcctggctcagcctcctgagtagctgggactacaggcatgcactaccatgcccggctaatttttgtatttttagtagagacagggtttc

SEQ ID NO: 22870 - DNA, 120 bp, synthetic construct; identical to SEQ ID NO: 7161
  source 1..120: mol_type = other DNA

SEQ ID NO: 22871 - DNA, 120 bp, synthetic construct
  source 1..120: mol_type = other DNA
tatgaatagagtaaatgtatgtgccccaccccctgcaaatgttttaagctattgggtcagaataggaaatgtagaattgacaaaaaataacacctttactttttttagtgtgacagatta

SEQ ID NO: 22872 - DNA, 120 bp, synthetic construct
  source 1..120: mol_type = other DNA
caatcatattatgccttttgtcttctatccttttatttgttgttactgcatacacattgtgaccttaattttgtgatctcttgattttatttcaggcaaatcctaagagagaacaactgt

SEQ ID NO: 22873 - DNA, 120 bp, synthetic construct
  source 1..120: mol_type = other DNA
agcaagaaatcctaaagaccaggaagcattatgggacatgggggcagttagcatgctcaagaacctcattcattcaaagcacaaaatgattgctatgggaagtgctgcagctttaaggaa

SEQ ID NO: 22874 - DNA, 120 bp, synthetic construct
  source 1..120: mol_type = other DNA
ggaaacaaaaagccctagaagcagaattagatgctcagcacttatcagaaacttttgacaatatagacaatttaagtcccaaggcatctcatcgtagtaagcagagacacaagcaaagtc

SEQ ID NO: 22875 - DNA, 120 bp, synthetic construct; identical to SEQ ID NO: 7162
  source 1..120: mol_type = other DNA

SEQ ID NO: 22876 - DNA, 120 bp, synthetic construct
  source 1..120: mol_type = other DNA
gaagacagaagttctgggtctaccactgaattacattgtgtgacagatgagagaaatgcacttagaagaagctctgctgcccatacacattcaaacacttacaatttcactaagtcggaa

SEQ ID NO: 22877 - DNA, 120 bp, synthetic construct
  source 1..120: mol_type = other DNA
tagtagtgatggttatggtaaaagaggtcaaatgaaaccctcgattgaatcctattctgaagatgatgaaagtaagttttgcagttatggtcaatacccagccgacctagcccataaaat

SEQ ID NO: 22878 - DNA, 120 bp, synthetic construct; identical to SEQ ID NO: 7163
  source 1..120: mol_type = other DNA

SEQ ID NO: 22879 - DNA, 120 bp, synthetic construct
  source 1..120: mol_type = other DNA
tgggttctaatcatggaattaatcaaaatgtaagccagtctttgtgtcaagaagatgactatgaagatgataagcctaccaattatagtgaacgttactctgaagaagaacagcatgaag

SEQ ID NO: 22880 - DNA, 120 bp, synthetic construct
  source 1..120: mol_type = other DNA
tttcattctcaaagagttcatctggacaaagcagtaaaaccgaacatatgtcttcaagcagtgagaatacgtccacaccttcatctaatgccaagaggcagaatcagctccatccaagtt

SEQ ID NO: 22881 - DNA, 120 bp, synthetic construct
  source 1..120: mol_type = other DNA
gttcattatcatctttgtcatcagctgaagatgaaataggatgtaatcagacgacacaggaagcagattctgctaataccctgcaaatagcagaaataaaagaaaagattggaactaggt

SEQ ID NO: 22882 - DNA, 120 bp, synthetic construct
  source 1..120: mol_type = other DNA
cttcaggagcgaaatctccctccaaaagtggtgctcagacacccaaaagtccacctgaacactatgttcaggagaccccactcatgtttagcagatgtacttctgtcagttcacttgata

SEQ ID NO: 22883 - DNA, 120 bp, synthetic construct; identical to SEQ ID NO: 7164
  source 1..120: mol_type = other DNA

SEQ ID NO: 22884 - DNA, 120 bp, synthetic construct
  source 1..120: mol_type = other DNA
tgttcatccagcctgagtgctctgagcctcgatgagccatttatacagaaagatgtggaattaagaataatgcctccagttcaggaaaatgacaatgggaatgaaacagaatcagagcag

SEQ ID NO: 22885 - DNA, 120 bp, synthetic construct
  source 1..120: mol_type = other DNA
tgatgatgatattgaaatactagaagaatgtattatttctgccatgccaacaaagtcatcacgtaaagcaaaaaagccagcccagactgcttcaaaattacctccacctgtggcaaggaa

SEQ ID NO: 22886 - DNA, 120 bp, synthetic construct; identical to SEQ ID NO: 7165
  source 1..120: mol_type = other DNA

SEQ ID NO: 22887 - DNA, 120 bp, synthetic construct
  source 1..120: mol_type = other DNA
taattctgctatgcccaaagggaaaagtcacaagcctttccgtgtgaaaaagataatggaccaggtccagcaagcatctgcgtcttcttctgcacccaacaaaaatcagttagatggtaa

SEQ ID NO: 22888 - DNA, 120 bp, synthetic construct
  source 1..120: mol_type = other DNA
caaagattcaaagaaacagaatttgaaaaataattccaaggtcttcaatgataagctcccaaataatgaagatagagtcagaggaagttttgcttttgattcacctcatcattacacgcc

SEQ ID NO: 22889 - DNA, 120 bp, synthetic construct
  source 1..120: mol_type = other DNA
ccagggaaaaggctgaattaagaaaggcaaaagaaaataaggaatcagaggctaaagttaccagccacacagaactaacctccaaccaacaatcagctaataagacacaagctattgcaa

SEQ ID NO: 22890 - DNA, 120 bp, synthetic construct
  source 1..120: mol_type = other DNA
ctattgaaaatactccggtttgcttttctcataattcctctctgagttctctcagtgacattgaccaagaaaacaacaataaagaaaatgaacctatcaaagagactgagccccctgact

SEQ ID NO: 22891 - DNA, 120 bp, synthetic construct; identical to SEQ ID NO: 7166
  source 1..120: mol_type = other DNA

SEQ ID NO: 22892 - DNA, 120 bp, synthetic construct
  source 1..120: mol_type = other DNA
tacatcaagctgctgctgctgcatgtttatctagacaagcttcgtctgattcagattccatcctttccctgaaatcaggaatctctctgggatcaccatttcatcttacacctgatcaag

SEQ ID NO: 22893 - DNA, 120 bp, synthetic construct
  source 1..120: mol_type = other DNA
ataaaagtttgattactggaaaagttcgatctaattcagaaatttcaggccaaatgaaacagccccttcaagcaaacatgccttcaatctctcgaggcaggacaatgattcatattccag

SEQ ID NO: 22894 - DNA, 120 bp, synthetic construct
  source 1..120: mol_type = other DNA
agccatctgtgaaatcagaattaagccctgttgccaggcagacatcccaaataggtgggtcaagtaaagcaccttctagatcaggatctagagattcgaccccttcaagacctgcccagc

SEQ ID NO: 22895 - DNA, 120 bp, synthetic construct; identical to SEQ ID NO: 7167
  source 1..120: mol_type = other DNA

SEQ ID NO: 22896 - DNA, 120 bp, synthetic construct
  source 1..120: mol_type = other DNA
ctgtattagtacgccagtcaactttcatcaaagaagctccaagcccaaccttaagaagaaaattggaggaatctgcttcatttgaatctctttctccatcatctagaccagcttctccca

SEQ ID NO: 22897 - DNA, 120 bp, synthetic construct
  source 1..120: mol_type = other DNA
tagagtataatgatggaagaccagcaaagcgccatgatattgcacggtctcattctgaaagtccttctagacttccaatcaataggtcaggaacctggaaacgtgagcacagcaaacatt

SEQ ID NO: 22898 - DNA, 120 bp, synthetic construct
  source 1..120: mol_type = other DNA
tttcaggaaccaaacaaagtaaagaaaaccaagtatccgcaaaaggaacatggagaaaaataaaagaaaatgaattttctcccacaaatagtacttctcagaccgtttcctcaggtgcta

SEQ ID NO: 22899 - DNA, 120 bp, synthetic construct; identical to SEQ ID NO: 7168
  source 1..120: mol_type = other DNA

SEQ ID NO: 22900 - DNA, 120 bp, synthetic construct
  source 1..120: mol_type = other DNA
caaaataatcctgtccctgtatcagagactaatgaaagttctatagtggaacgtaccccattcagttctagcagctcaagcaaacacagttcacctagtgggactgttgctgccagagtg

SEQ ID NO: 22901 - DNA, 120 bp, synthetic construct
  source 1..120: mol_type = other DNA
agcacagaatccagtggaacccaaagtcctaagcgccattctgggtcttaccttgtgacatctgtttaaaagagaggaagaatgaaactaagaaaattctatgttaattacaactgctat

SEQ ID NO: 22902 - DNA, 120 bp, synthetic construct
  source 1..120: mol_type = other DNA
gtcttattttgggaggcactcttgatggttaggaaaaaaatagtaaagccaagtatgtttgtacagtatgttttacatgtatttaaagtagcatcccatcccaacttcctttaattattg

SEQ ID NO: 22903 - DNA, 120 bp, synthetic construct; identical to SEQ ID NO: 7169
  source 1..120: mol_type = other DNA

SEQ ID NO: 22904 - DNA, 120 bp, synthetic construct
  source 1..120: mol_type = other DNA
tgtgtaactgtaaaacattgaatgaaactattttacctgaactagattttatctgaaagtaggtagaatttttgctatgctgtaatttgttgtatattctggtatttgaggtgagatggc

SEQ ID NO: 22905 - DNA, 120 bp, synthetic construct
  source 1..120: mol_type = other DNA
aactgttactgaaattggtatttgtttgaagggtcttgtttcacatttgtattaataattgtttaaaatgcctcttttaaaagcttatataaatttttttcttcagcttctatgcattaa

SEQ ID NO: 22906 - DNA, 120 bp, synthetic construct
  source 1..120: mol_type = other DNA
ttttaatatttttccacttaaacttttttttcttactccactggagctcagtaaaagtaaattcatgtaatagcaatgcaagcagcctagcacagactaagcattgagcataataggccc

SEQ ID NO: 22907 - DNA, 120 bp, synthetic construct; identical to SEQ ID NO: 7170
  source 1..120: mol_type = other DNA

SEQ ID NO: 22908 - DNA, 120 bp, synthetic construct
  source 1..120: mol_type = other DNA
ccctgcctgttaaggaaactttatttgtggtaggtacagttctggggtacatgttaagtgtccccttatacagtggagggaagtcttccttcctgaaggaaaataaactgacacttatta

SEQ ID NO: 22909 - DNA, 120 bp, synthetic construct
  source 1..120: mol_type = other DNA
atacactctgtatttggggagggaaaacctttttaagcatggtggggcactcagataggagtgaatacacctacctggtgccttgaaaatcacatcaagtagttaattatctacccctta

SEQ ID NO: 22910 - DNA, 120 bp, synthetic construct; identical to SEQ ID NO: 7171
  source 1..120: mol_type = other DNA

SEQ ID NO: 22911 - DNA, 120 bp, synthetic construct
  source 1..120: mol_type = other DNA
tatgatacacaataaagactccatttatttgttcctcctcccccaagtttagcaaaataactcagatcctgattttctttaacttgcaaaaaatgccatccttctgagttcagagacctt

SEQ ID NO: 22912 - DNA, 120 bp, synthetic construct
  source 1..120: mol_type = other DNA
ttctgtgctatgtgaaagttcaattggaaaagaagaataaatgaagatttcttttaaaaaattagaggatgatagtaagttctcctggagcaagcttcatgtaggggttcatgactgtgg

SEQ ID NO: 22913 - DNA, 120 bp, synthetic construct
  source 1..120: mol_type = other DNA
ggtctgaaaaatcttgcagtttatatctaaactgctggtggtaatcagaaattattttcttcgtcgcaatggcctggcttttaattatttcctgagcagtggcagaaagctctgcaatct

SEQ ID NO: 22914 - DNA, 120 bp, synthetic construct; identical to SEQ ID NO: 7172
  source 1..120: mol_type = other DNA

SEQ ID NO: 22915 - DNA, 120 bp, synthetic construct
  source 1..120: mol_type = other DNA
actgtccagccaactatacttggatcaaaatattcttcacgaagggccataatgtattgatggatctgctgtaactcttgagaagcttcctgaagctcgttttgaataaattcattgaac

SEQ ID NO: 22916 - DNA, 120 bp, synthetic construct
  source 1..120: mol_type = other DNA
ttcagctgtttaatgttatcttctattagttggaaaatgaattgtaaaaggtcctgaagattacgtagcacctctgtggtcttgagagactgaatggctttaaatacctcttgggcttct

SEQ ID NO: 22917 - DNA, 120 bp, synthetic construct
  source 1..120: mol_type = other DNA
aatcactaggtcttggaaataggaaaacagtatttctgaaccattatggactttcgaatatacctgggacagtaccgtccctacctcccttatgaacatagtgcaaagttcctccctagt

SEQ ID NO: 22918 - DNA, 120 bp, synthetic construct; identical to SEQ ID NO: 7173
  source 1..120: mol_type = other DNA

SEQ ID NO: 22919 - DNA, 120 bp, synthetic construct
  source 1..120: mol_type = other DNA
ccttgataaacccactcagcattgttctgcagatttcttctcagctttgaagacacttctctcagggtgagccctgtgtgttcccagtggtacttgttgacataatcataaaggacccct

SEQ ID NO: 22920 - DNA, 120 bp, synthetic construct
  source 1..120: mol_type = other DNA
ttcctcatcagattcccggaccctcaactcagttttgaatatggtgagttttttatctggagaggactaaacagagagaaaaaaaaaaataacatgttttcaattactccaattacacaa

SEQ ID NO: 22921 - DNA, 120 bp, synthetic construct
  source 1..120: mol_type = other DNA
actgttgttaatttctctttatcacatgccccagaaaggatttaacaaaaacgcttgctgtttgtcatttacattgtgacacttaaaattaaagccttcctaggactgaaaactggaaga

SEQ ID NO: 22922 - DNA, 120 bp, synthetic construct
  source 1..120: mol_type = other DNA
catcagtacgcattctccaagcccatgacaaacttttagtaacagtcatagaaccatgtttggtcttctcctctggtaatgtcacccttgatttggccctggcagagcttgtaaatgaca

SEQ ID NO: 22923 - DNA, 120 bp, synthetic construct; identical to SEQ ID NO: 7174
  source 1..120: mol_type = other DNA

SEQ ID NO: 22924 - DNA, 120 bp, synthetic construct
  source 1..120: mol_type = other DNA
tatttggtcctgaattaaatgtatctgccccaattctccactcgctcttgggggcgtgtcactcattaggtggtatttacctgagggctgtagtagaagttccatttagaaaagtcgtca

SEQ ID NO: 22925 - DNA, 120 bp, synthetic construct
  source 1..120: mol_type = other DNA
aggtgcgcttttccttcccattccctgaaagcagaaaaacagatgagctatcacgaaaggggtatggagatgaagaaaatcacaatgagttttcaaaaggtataaggtttcaattcaata

SEQ ID NO: 22926 - DNA, 120 bp, synthetic construct; identical to SEQ ID NO: 7175
  source 1..120: mol_type = other DNA

SEQ ID NO: 22927 - DNA, 120 bp, synthetic construct
  source 1..120: mol_type = other DNA
tttctacagtttggtttttacgtgtagggtatacatgtatctcttttcttacttaaaattttgtgacattgagtaattgtacatctactcacaactaaatacataattatttactcataa

SEQ ID NO: 22928 - DNA, 120 bp, synthetic construct
  source 1..120: mol_type = other DNA
ctgctttgtttttcaaactggcactccaagtggcattatacacgggagagtctacctcaaagcgtgcagtcagtgcttgaaaggaaggaatgacaattccagcaggtacagagaacttaa

SEQ ID NO: 22929 - DNA, 120 bp, synthetic construct
  source 1..120: mol_type = other DNA
gcgtgaactgggacacagttaactgagattcaggcacggttatctcaaaaaagggaatcaaggagtcttctggttgagaatattttgttaacacatcaacttcagggaattttacctcgg

SEQ ID NO: 22930 - DNA, 120 bp, synthetic construct
  source 1..120: mol_type = other DNA
gcatgacaagaactgaatttagatcatttagtttcagcccaggaataatgaatttatcagccaaaacttttacagggatggagaatgaatagccattggggtttttggtgtacacaaagg

SEQ ID NO: 22931 - DNA, 120 bp, synthetic construct; identical to SEQ ID NO: 7176
  source 1..120: mol_type = other DNA

SEQ ID NO: 22932 - DNA, 120 bp, synthetic construct
  source 1..120: mol_type = other DNA
ctttgcttgtatgttctccgttggtgaaaaagaggccctctagctgtaagtggtttttcgtactgtgctcccagagggaatatatgcgttggagtgtggcttctccagcaaaattttctt

SEQ ID NO: 22933 - DNA, 120 bp, synthetic construct
  source 1..120: mol_type = other DNA
gagaaagaaccgaacccttgacatctcctttggtagatgactcaatggaaaagtaagaggtgaggctttccaagctaagcttgtggtcaactgctcctttagcggtagagtacagcattg

SEQ ID NO: 22934 - DNA, 120 bp, synthetic construct; identical to SEQ ID NO: 7177
  source 1..120: mol_type = other DNA

SEQ ID NO: 22935 - DNA, 120 bp, synthetic construct
  source 1..120: mol_type = other DNA
cacttgatttaaaggagaaatcataggtaatattgcccatggcaggaataaaaatatggcttatggtacacaattccttgaaatctggaagagaaagcttgagatttctagggacatgaa

SEQ ID NO: 22936 - DNA, 120 bp, synthetic construct
  source 1..120: mol_type = other DNA
tctctatggtgaatggagacacttcaacattgacaactggaacagtgtatccaggaatttgaaaggtcctggggagctcgtcgtgagatttttcagctttgtacttatcaaacttaattt

SEQ ID NO: 22937 - DNA, 120 bp, synthetic construct
  source 1..120: mol_type = other DNA
gtttctgtttttttcaaaatgcctgtcaaaggatttgatgctctgactgataaactcacaaagcacagccaaaggatttgtgatggaatgcctgtgtttgtttttcttatactgagcttt

SEQ ID NO: 22938 - DNA, 120 bp, synthetic construct; identical to SEQ ID NO: 7178
  source 1..120: mol_type = other DNA

SEQ ID NO: 22939 - DNA, 120 bp, synthetic construct
  source 1..120: mol_type = other DNA
tccctgttaaccttaatggaaaacgaactttcaaattcccttcattgtttgtggatgccgtgatctcaaatggctgggctgaaaagaaaagagaatttttcaaagttccaataacctttc

SEQ ID NO: 22940 - DNA, 120 bp, synthetic construct
  source 1..120: mol_type = other DNA
caagtttagaaaagttgagggagccagattcataaaccaagttttggtttactcttaggtgtttgctattgatcttattggacagtccaaaggaagtgaggggtccttctatggtgaaac

SEQ ID NO: 22941 - DNA, 120 bp, synthetic construct
  source 1..120: mol_type = other DNA
gcaggtcagcctgactagagaagtccagtttggggatgttcaatttgtggaagtatttagtgttgctatccagggtaagctgattgtttatcttgacaatcactccattactaagctcca

SEQ ID NO: 22942 - DNA, 120 bp, synthetic construct; identical to SEQ ID NO: 7179
  source 1..120: mol_type = other DNA

SEQ ID NO: 22943 - DNA, 120 bp, synthetic construct
  source 1..120: mol_type = other DNA
ctgtatagcttgccaaaagtaggtacttcaattgtgtgtgagatgtggggaagctggaattctggtatgtgaaggtcaggaacttgaaaatcattaaggttgagagttgggattatgaat

SEQ ID NO: 22944 - DNA, 120 bp, synthetic construct
  source 1..120: mol_type = other DNA
agcatctggtcaatggttctgatgatctttactttcatttctacaaagtcaattgtaaaggaaggaatgtggaaggtgttaaggatggtaaattctggtgtggaaaacctggatgggatt

SEQ ID NO: 22945 - DNA, 120 bp, synthetic construct
  source 1..120: mol_type = other DNA
aaggcaggcatggtcccaaggatggtcttgatttcaggaacagtgaacccttgctctaccaatgctttcatacgtttagcccaatcttggatagaatattgctctgcaaagtcagtaagg

SEQ ID NO: 22946 - DNA, 120 bp, synthetic construct; identical to SEQ ID NO: 7180
  source 1..120: mol_type = other DNA

SEQ ID NO: 22947 - DNA, 120 bp, synthetic construct
  source 1..120: mol_type = other DNA
ttcaccattgagtctctgagtcacctcacggattttgtcattggtttcatctacaaactggtggtaatcaaatgactttaatttctttatcaacatgtcaaggaatttgttaacatcttc

SEQ ID NO: 22948 - DNA, 120 bp, synthetic construct
  source 1..120: mol_type = other DNA
agtctccttcaacttgtattggtgggccaactctactaatttatccattaaaacctggatttgttggtctacttcatacctctcgattaactcatggactttggctctgaaggcattgat

SEQ ID NO: 22949 - DNA, 120 bp, synthetic construct
  source 1..120: mol_type = other DNA
atcaatagcctcaatgtgttgttttaactttccagctaggtgctggatgtctatattctgtatgtgtctcttaagctgctgcagtttttcttgtatctggattctgatttggtacttagt

SEQ ID NO: 22950 - DNA, 120 bp, synthetic construct
  source 1..120: mol_type = other DNA
atcaagactttttaatttttcaatgatttcatcaataatattagcaatagctattttcaaatcatgtaaatcataactatctttaatatactgatcaaattgtatcatatatgtctgcag

SEQ ID NO: 22951 - DNA, 120 bp, synthetic construct; identical to SEQ ID NO: 7181
  source 1..120: mol_type = other DNA

SEQ ID NO: 22952 - DNA, 120 bp, synthetic construct
  source 1..120: mol_type = other DNA
tgtaaattcttggggcttctcaacggcatctctcatctctaaagcatcaatgatattgatgggctcactgagtaaaagtggcactttaattggggagtctagtagagttaggtcagccag

SEQ ID NO: 22953 - DNA, 120 bp, synthetic construct
  source 1..120: mol_type = other DNA
agtaagcagggcactgactttgtgttcaagagctgcactgatgcttttcctagacacgagatgatgacttgtggagcctttgtaatcatgagagaaagtaaatgccagaggttctgcttt

SEQ ID NO: 22954 - DNA, 120 bp, synthetic construct
  source 1..120: mol_type = other DNA
gctgaaatgcagtgagtctgaattatagtttgtgctcatgtcaatggctgaagccagcccagcgatgtctgtgttgagccgatggctaaactccacaccctgaaccttagcaacagtgtc

SEQ ID NO: 22955 - DNA, 120 bp, synthetic construct
  source 1..120: mol_type = other DNA
tttcccattgttggtgagatccagagcattgtatttcaggtcactgtttaaagtagttaccagagaatagggctgtagctgtaaattaacagtttgcttataaaacttgtcagagctgta

SEQ ID NO: 22956 - DNA, 120 bp, synthetic construct; identical to SEQ ID NO: 7182
  source 1..120: mol_type = other DNA

SEQ ID NO: 22957 - DNA, 120 bp, synthetic construct
  source 1..120: mol_type = other DNA
agatattccatcttggccaatccttagtgtcgccttgtgagcaccactattaattttgtcagtgcctaagatgtcagcatttaactcaagaccatgggaatttagtgatccagaaagcag

SEQ ID NO: 22958 - DNA, 120 bp, synthetic construct
  source 1..120: mol_type = other DNA
tcttgttagaagtggcaaagttcttatacttcccattggtgtcagattttaaagtcagctcgtagttctcatactttagggaagcagtatttttaatgatgccactttgcagatcagagg

SEQ ID NO: 22959 - DNA, 120 bp, synthetic construct; identical to SEQ ID NO: 7183
  source 1..120: mol_type = other DNA

SEQ ID NO: 22960 - DNA, 120 bp, synthetic construct
  source 1..120: mol_type = other DNA
gtagagacccatcacatgatagtgtgaacgtattcttgtggtcatatgttgtttctccagatcctaacataaaaatgaaaagacattggttaaattaagcagtacatttccagagcaatc

SEQ ID NO: 22961 - DNA, 120 bp, synthetic construct
  source 1..120: mol_type = other DNA
agataaaatctgatagcaaaaggcattcctccaggaagccttgcctgaccaccacaggctttgtttaggttcccttgttgagtgcttccactctaccttatacttatatactacacttta

SEQ ID NO: 22962 - DNA, 120 bp, synthetic construct
  source 1..120: mol_type = other DNA
acgtgatatgtttaataaatatttctatttgttgaataaaataaaagacttccaagtagcaaggaagattatctgctagaaagccaaagtcctttcctccctggaggaggctctcctctt

SEQ ID NO: 22963 - DNA, 120 bp, synthetic construct
  source 1..120: mol_type = other DNA
aatggtctgtgctggtgttgccaccactgtaggaggcggaccagttgtacaagttgctgtagacattcgtggagaggtctagaacacccaggagaggcacttgcagttgatacaacttgg

SEQ ID NO: 22964 - DNA, 120 bp, synthetic construct; identical to SEQ ID NO: 7184
  source 1..120: mol_type = other DNA

SEQ ID NO: 22965 - DNA, 120 bp, synthetic construct
  source 1..120: mol_type = other DNA
ctcaaatcctgacaaagctcttctaagggccactccttatcattaccatcccacctaagtcatagccaatttgtctcattcttacagttacatagtcccttgcacctttctcaaagagca

SEQ ID NO: 22966 - DNA, 120 bp, synthetic construct
  source 1..120: mol_type = other DNA
ccttacccagtttctatcttctcactgtacctagtctagcattttgcacataggggatacttgatacaaatttgctaaactgaattgagacaacttgatttgtggaaagaacataggtat

SEQ ID NO: 22967 - DNA, 120 bp, synthetic construct
  source 1..120: mol_type = other DNA
attctgaattcttcacagtcagagggagaatttgcttataacaggttgtactgaataaaatatcttagggtgaaagtaccagaatcctctaatgactttcttagattcttcctgacaggg

SEQ ID NO: 22968 - DNA, 120 bp, synthetic construct; identical to SEQ ID NO: 7185
  source 1..120: mol_type = other DNA

SEQ ID NO: 22969 - DNA, 120 bp, synthetic construct
  source 1..120: mol_type = other DNA
attgcctacaaaatgacaggagatttttaaggtaatgggcttggatgagcctcaaagagcaatgaacattaggcaaaaataccgatttgacaagttaattattaagctggacaatgcact

SEQ ID NO: 22970 - DNA, 120 bp, synthetic construct
  source 1..120: mol_type = other DNA
tctaacatagtcagcctcctagctggtgtcctgaagcttcctttgataccactaggcaaagaactgttctacttagtagcatctctttgatatgtatcacattcagctttgtgtaactgg

SEQ ID NO: 22971 - DNA, 120 bp, synthetic construct; identical to SEQ ID NO: 7186
  source 1..120: mol_type = other DNA

SEQ ID NO: 22972 - DNA, 120 bp, synthetic construct
  source 1..120: mol_type = other DNA
tgtgttccattcaaattcaatcttctcttcatctgaaaatacgtaggaaatagttgtgaatggtactagttcagcctgtaaccacaggtctcaacacctgcattactttggaagtgctca

SEQ ID NO: 22973 - DNA, 120 bp, synthetic construct
  source 1..120: mol_type = other DNA
tctcacttctggcttctgcttgcaaacggggtatggaaataacacccttgatttttctttcttcctttgtgtcacaactatggtaaagaaaatcagttggcaccaatgattttgtccttt

SEQ ID NO: 22974 - DNA, 120 bp, synthetic construct
  source 1..120: mol_type = other DNA
gtgatcaaaaccagatacaaggatggttcagagaaacagccacagatcaaactcatcaacttctaaagccaacattcagcacaaattaaggactttgcaaacaggtttaggagaaagaga

SEQ ID NO: 22975 - DNA, 120 bp, synthetic construct; identical to SEQ ID NO: 7187
  source 1..120: mol_type = other DNA

SEQ ID NO: 22976 - DNA, 120 bp, synthetic construct
  source 1..120: mol_type = other DNA
gaaaccctgtctctactaaaaatataaaaattagctgggtgtggtggcatgcacctatagttccagctccttgggaggcttaagcaggagaatcacttgaactcgggaggcggaggttgc

SEQ ID NO: 22977 - DNA, 120 bp, synthetic construct
  source 1..120: mol_type = other DNA
tggcttggtcaggtatgaagtggaagaggaataatgaaaagaaccacccaggcctgcagtgcaggtcagatgaccctcggccttctttaccttaggtggcccatgagggcgacctcagta

SEQ ID NO: 22978 - DNA, 120 bp, synthetic construct
  source 1..120: mol_type = other DNA
gacaaggtcatactctgccgattatatttgaatgtcatggtagcctcagtctgcttcgcacctggacgagtgtataagagaatcaagagatgtgtggtaagaagctatgttttgggccgg

SEQ ID NO: 22979 - DNA, 120 bp, synthetic construct
  source 1..120: mol_type = other DNA
aaaaaattagccgggcgcgttggtgggtgcctgtagtcccagctactcaggaggctgaggcaggagaatggcatgaacccgggaggcggggcttgcagtgagccgagatggcaccactgc

SEQ ID NO: 22980 - DNA, 120 bp, synthetic construct; identical to SEQ ID NO: 7188
  source 1..120: mol_type = other DNA

SEQ ID NO: 22981 - DNA, 120 bp, synthetic construct
  source 1..120: mol_type = other DNA
gtgggggaggtgtacaggcaataaacaagtaacttgctcatgtcagatggtaatgaatgttatgaagaagagtaaaactggatacaaggataaaagaaagggatagaagaagtgttattt

SEQ ID NO: 22982 - DNA, 120 bp, synthetic construct
  source 1..120: mol_type = other DNA
aatgcaaaggccctgaaatggggagcacttagcttgtttgtggaacagcaaaggctcgcagcccttctgggccaggaagacacgacatctctatattactttctacccaagatgcctgtc

SEQ ID NO: 22983 - DNA, 120 bp, synthetic construct; identical to SEQ ID NO: 7189
  source 1..120: mol_type = other DNA

SEQ ID NO: 22984 - DNA, 120 bp, synthetic construct
  source 1..120: mol_type = other DNA
tatccctatataattttttttccaaagtgaacacctaaatttctcccattccctaaaacctgctcctccagtagccctttccatctcaataaatggaagttccatttttcagttgcccgg

SEQ ID NO: 22985 - DNA, 120 bp, synthetic construct
  source 1..120: mol_type = other DNA
ctcttctgccattgccctgatccaaaacaacactgattcctgcctggattattgtgataacctacatattagtttctctgcccttgtctgcccatagtcttttctcaacataaacataaa

SEQ ID NO: 22986 - DNA, 120 bp, synthetic construct
  source 1..120: mol_type = other DNA
ccttccttcacctctccatatctctctgtcctcatcttctacctcttttctccctggtctttctgctccagccatactgtcttccttcctttccttgaaacatggtagtagtgtgtcagc

SEQ ID NO: 22987 - DNA, 120 bp, synthetic construct
  source 1..120: mol_type = other DNA
tccaaatgcactgctttccctgcccttcttcctccctcctactcctagccctccatagaccagtctacgctctgttttcctcctcagtacttatctgatattccaaatattaacttgttt

SEQ ID NO: 22988 - DNA, 120 bp, synthetic construct; identical to SEQ ID NO: 7190
  source 1..120: mol_type = other DNA

SEQ ID NO: 22989 - DNA, 120 bp, synthetic construct
  source 1..120: mol_type = other DNA
gaatactgctcaatctctcctgtaggcctcagttccagctctaatctaaagacattacaatgaagacagtgcataatgttagagctttcaaggatggtgattatgttcccaaaacaattc

SEQ ID NO: 22990 - DNA, 120 bp, synthetic construct
  source 1..120: mol_type = other DNA
cccaagactttggacaagcagagcaggagttggctggttgtttcagcaaagctgagaacaagcactggaacttgggggctgaagacagggagccacctaagtacggtgaaggcttcaagc

SEQ ID NO: 22991 - DNA, 120 bp, synthetic construct; identical to SEQ ID NO: 7191
  source 1..120: mol_type = other DNA

SEQ ID NO: 22992 - DNA, 120 bp, synthetic construct
  source 1..120: mol_type = other DNA
gaggtgcagtaattcaggccaggaaagacttgcttgcaaactgaccaggactgcctgttctcaatgagaggtgggatcacctccgttttggtggtagagaccaaatgtaatgtgttgctg

SEQ ID NO: 22993 - DNA, 120 bp, synthetic construct
  source 1..120: mol_type = other DNA
cttatcctcctgtcttccctcagtccacacctatctctaactatttaatttactgagaaacaaataatattagaaagaacatcaacatgacaagccatgagagtgactctgaagcttctg

SEQ ID NO: 22994 - DNA, 120 bp, synthetic construct
  source 1..120: mol_type = other DNA
agatgttaaatagctgatcactggggctgaacttcagtgtgccccttccttcctacaatgcagggcaagagaaactgtctctttcatatgaaatctcctactctctacctgcttccttcc

SEQ ID NO: 22995 - DNA, 120 bp, synthetic construct
  source 1..120: mol_type = other DNA
tcctcccaatgtgctctgactgctcactccatctcctgaaaatgctttcatcaatgtctctaatgccctccttgctcctacatccaatgggcatatttaggtttcatcttccttgacctc

SEQ ID NO: 22996 - DNA, 120 bp, synthetic construct; identical to SEQ ID NO: 7192
  source 1..120: mol_type = other DNA

SEQ ID NO: 22997 - DNA, 120 bp, synthetic construct
  source 1..120: mol_type = other DNA
cattgctggttattccccttcttcctttatatgtttgtcttctccatatttctgtcctcatctctcatgtctcactctataccagttgctgtttaaccacaacaacctctgtatactaat

SEQ ID NO: 22998 - DNA, 120 bp, synthetic construct
  source 1..120: mol_type = other DNA
aaaactgaatttgtcactttccttgaaaccagaagctctcccactgtagttcttattaaaatgaagggcgcctccttcctcttttcttctttcttttgccttgtccccatacccagttaa

SEQ ID NO: 22999 - DNA, 120 bp, synthetic construct
  source 1..120: mol_type = other DNA
atgtccaatggtctcttcgtgtccagctgtgcctccttctcacccatcttccacactagagtcagagtatttcttctaaaacatcacccctatcttatttctgctccccttttcaactcc

SEQ ID NO: 23000 - DNA, 120 bp, synthetic construct; identical to SEQ ID NO: 7193
  source 1..120: mol_type = other DNA

SEQ ID NO: 23001 - DNA, 120 bp, synthetic construct
  source 1..120: mol_type = other DNA
tagcccttactctatgattactgcttgcttaattgtgtgtctcccttataaaatgtaagcgttcaaaggtcagggaccttgtgtgtctcactcaacatacgtggtatatattaggcaatt

SEQ ID NO: 23002 - DNA, 120 bp, synthetic construct
  source 1..120: mol_type = other DNA
tctcagccttctgagtagctggagctacaggcatgtgccaccacgactggctaattttgttatttatttaattttttttgtagagatggggttttgccatgttgcccaggctggtatcca

SEQ ID NO: 23003 - DNA, 120 bp, synthetic construct; identical to SEQ ID NO: 7194
  source 1..120: mol_type = other DNA

SEQ ID NO: 23004 - DNA, 120 bp, synthetic construct
  source 1..120: mol_type = other DNA
aataaaaactaattaagcagtaggtcttaataagtctcaaagcagaaagataaaggacagtttagtaaaatgtgaaaagtagaagaaaggtaattatgtagttatgtagtaagtctaggc

SEQ ID NO: 23005 - DNA, 120 bp, synthetic construct
  source 1..120: mol_type = other DNA
tctctttcaaactggctaggcagacttggctgaaagaattaccctccactgagcagcttgactggtctctttggggaaggaatgataaacttcagcttcccagcttttagggcaacatga

SEQ ID NO: 23006 - DNA, 120 bp, synthetic construct
  source 1..120: mol_type = other DNA
atttgtcacaaactccacagacacggagggttttgccaccagttcagcctgcatctataagtcagaaaacaacctattcagattcattaaatacttcagtcccctgtcagtcagatcaac

SEQ ID NO: 23007 - DNA, 120 bp, synthetic construct
  source 1..120: mol_type = other DNA
ccagaactagaaagcacctgagttaacgtgaggcaaaaccagattaaaaagatgataggaatactcatttgttgagagaactgagttcttgtcttatggccataccactactggagctag

SEQ ID NO: 23008 - DNA, 120 bp, synthetic construct; identical to SEQ ID NO: 7195
  source 1..120: mol_type = other DNA

SEQ ID NO: 23009 - DNA, 120 bp, synthetic construct
  source 1..120: mol_type = other DNA
gcccttcctgatgacctctccaatctgtagacccaacaagggagagcaaataaaagtaagtctttttaaagtcggttttgttaattacaacctcccatacattggagagtaattcctctt

SEQ ID NO: 23010 - DNA, 120 bp, synthetic construct
  source 1..120: mol_type = other DNA
tcatgtcattttcaagtggactcagaaggctcttaagaatattgctgggcctcagagctttatggactttaagtatcatatatgccatggcttaattctggtgttctggagtctgactgt

SEQ ID NO: 23011 - DNA, 120 bp, synthetic construct
  source 1..120: mol_type = other DNA
aataaaatagcttgagacctgttttcttaaagtcaacatttttttaatcaagccataggagtacatttatatatttccttttatgaattaataataaaaattatagcatatttagatagt

SEQ ID NO: 23012 - DNA, 120 bp, synthetic construct; identical to SEQ ID NO: 7196
  source 1..120: mol_type = other DNA

SEQ ID NO: 23013 - DNA, 120 bp, synthetic construct
  source 1..120: mol_type = other DNA
aaaataaaaataaaaggaccttcagcaaaggtagaggaaggtataccgaacattgttttccagatgaataaattaatgctcttaaaaatacagctaacattatgaatagcttaatttcta

SEQ ID NO: 23014 - DNA, 120 bp, synthetic construct
  source 1..120: mol_type = other DNA
gaaattcaaggcaaacctccatctctgaagaaagtacaagcatcttttcgggcttgtgcagctgggatcgtaagggagtctgggcgatctaaaaaaaaaccaacgtctggtctcatgggc

SEQ ID NO: 23015 - DNA, 120 bp, synthetic construct
  source 1..120: mol_type = other DNA
caagatgcggaggtaggctctggcttccgggacttctttggatttcaaatctttaatcagcttctcaacactgagcattattccatttaccatatcctgagagtttagtaataaaatggc

SEQ ID NO: 23016 - DNA, 120 bp, synthetic construct; identical to SEQ ID NO: 7197
  source 1..120: mol_type = other DNA

SEQ ID NO: 23017 - DNA, 120 bp, synthetic construct
  source 1..120: mol_type = other DNA
gtagctgttatataaattcaccagaagtttgaaaaacacttgatcctagacaagttcttctcagagagaagaagaatctcagagatggatgcccaggcattgggaaaaaaaaaatgtgaa

SEQ ID NO: 23018 - DNA, 120 bp, synthetic construct
  source 1..120: mol_type = other DNA
gttgaatgtgcatacaagtcacatgaggtcttgctaaaatgcgcttctgattcagtagattgtgggtgaagcatgagaagctgtatttctgaccagaccacactttgggtagcaaaaaat

SEQ ID NO: 23019 - DNA, 120 bp, synthetic construct
  source 1..120: mol_type = other DNA
tctcatttgctagtgcactgatgggagtgagagccaaagacagcagttaataataatgaaaatattaatttagaactcgtaatagtgtctgcttattgaacaaccaatgccagcatcagg

SEQ ID NO: 23020 - DNA, 120 bp, synthetic construct; identical to SEQ ID NO: 7198
  source 1..120: mol_type = other DNA

SEQ ID NO: 23021 - DNA, 120 bp, synthetic construct
  source 1..120: mol_type = other DNA
aggcacccactaccatgcccagctagtttttttgtatttttagtagagacggggtttcagtatgttggccaggctggtctcaaattcctgaccttgtgatctgcccaccttggcctccca

SEQ ID NO: 23022 - DNA, 120 bp, synthetic construct
  source 1..120: mol_type = other DNA
gcagaggatactggcccttaccccagcaggtctggttgataaaaaccatagttatcccttcagttagatagtattttgaggacttccatgcttagaaaagaattgtttttgcattgagac

SEQ ID NO: 23023 - DNA, 120 bp, synthetic construct
  source 1..120: mol_type = other DNA
ccagtacaaagctttgttgacactgtctgggaaaaatccttgcttcccaaaaagagcttccaatgttggctcaaagccttttccttccaagccaatctgagaaagaaaatcagacaagaa

SEQ ID NO: 23024 - DNA, 120 bp, synthetic construct
  source 1..120: mol_type = other DNA
tgcttcccaaaaagagcttccaatgttggctcaaagccttttccttccaagccaatctgagaaagaaaatcagacaagaaaatggcatcaggtttctttgttgtatgccagcctagtagt

SEQ ID NO: 23025 - DNA, 120 bp, synthetic construct; identical to SEQ ID NO: 7199
  source 1..120: mol_type = other DNA

SEQ ID NO: 23026 - DNA, 120 bp, synthetic construct
  source 1..120: mol_type = other DNA
ctgcaagctcagcctcctgggttcacgccattctcctgcctcatcctcccaagtagctgggactacaggtgcctgccaccacgcccggctaattttttgtatttttagtagagatgggct

SEQ ID NO: 23027 - DNA, 120 bp, synthetic construct
  source 1..120: mol_type = other DNA
ttaagaagtcatgcttcaggtgacccctagcggggagagaggaaggcggggaaggagggaaagaagaaagcctcagaatcatggtaggaagtgcctggtggttcttagttttcctctggg

SEQ ID NO: 23028 - DNA, 120 bp, synthetic construct
  source 1..120: mol_type = other DNA
tagttttcagcatgctttctttaggaaggtagttatttggatcaaatataagattcccttctattttggctgaggctgggtcaagtgatggaagagaaacagatttgtagagttgatagt

SEQ ID NO: 23029 - DNA, 120 bp, synthetic construct
  source 1..120: mol_type = other DNA
tatcctttgactcttgcaccccaagtaaatatggatttccaatcactaccaaaatgtcttgatttcattgaccctaagtctttgggtctagatctgctacacatttgcacaagtgtttgt

SEQ ID NO: 23030 - DNA, 120 bp, synthetic construct; identical to SEQ ID NO: 7200
  source 1..120: mol_type = other DNA

SEQ ID NO: 23031 - DNA, 120 bp, synthetic construct
  source 1..120: mol_type = other DNA
aacatgcctggcaaacactggcattgtctgctagctctttcttaagcacaggtctaatttctctgtaatcgttcttcaaatgctggtattgaatcttcttgccagtgtttcctagagcac

SEQ ID NO: 23032 - DNA, 120 bp, synthetic construct
  source 1..120: mol_type = other DNA
agttgttttaacgtaagttattttaatgtgaggataaagatgagaaggggtagtaagagtttggggctaataaatagggtagtttccaaagttctggagtctttgcacctaagagggggc

SEQ ID NO: 23033 - DNA, 120 bp, synthetic construct; identical to SEQ ID NO: 7201
  source 1..120: mol_type = other DNA

SEQ ID NO: 23034 - DNA, 120 bp, synthetic construct
  source 1..120: mol_type = other DNA
gcaaaactccatctctactaaaaaatacaaaaattagctgggtgtaatggcacatgcctgtaatcccagttactcaggaggctgaggcagagagaattgcttgaacccaggaggcagaag

SEQ ID NO: 23035 - DNA, 120 bp, synthetic construct
  source 1..120: mol_type = other DNA
gtagatgaaatctagagtctcattcccctagtaccttccaaatccttgttaataaactttcactttcagacctcttcttgtggactttaccttgtctttaggctccattttccgcagagc

SEQ ID NO: 23036 - DNA, 120 bp, synthetic construct
  source 1..120: mol_type = other DNA
cattgaagaaaagaaacaagaacccatcagggtgcaggagagggaagtaaaaggtgtccaggaaaagtgcttctgaaatgatgtatgtcatataaaagactgagattacccgcagaatca

SEQ ID NO: 23037 - DNA, 120 bp, synthetic construct; identical to SEQ ID NO: 7202
  source 1..120: mol_type = other DNA

SEQ ID NO: 23038 - DNA, 120 bp, synthetic construct
  source 1..120: mol_type = other DNA
gcatggtactggcataaaaatagacacatagatcaatggaacagaatactgaacccagaaataaagtcacatacttacagtcaacggatctttgacaaaattgacaaaaacatacactag

SEQ ID NO: 23039 - DNA, 120 bp, synthetic construct
  source 1..120: mol_type = other DNA
ttaaatataagacctgagactataaaaatgcaagaagaaaacctagggaaaacttctctggacattggcctagacaaagaattcgtgaataagacctcaaaggcaaagacaacaaaaaca

SEQ ID NO: 23040 - DNA, 120 bp, synthetic construct
  source 1..120: mol_type = other DNA
tactaatatccggaatgtacaagcaattcaaacaactcaacaaaaaaatcccccaaataatcccattaaaaagtaggcaaaggacatgaatagacatttttttcaaaagaagacatacaa

SEQ ID NO: 23041 - DNA, 120 bp, synthetic construct; identical to SEQ ID NO: 7203
  source 1..120: mol_type = other DNA

SEQ ID NO: 23042 - DNA, 120 bp, synthetic construct
  source 1..120: mol_type = other DNA
catggaatcaacctaagtgtctatcaatggacgattggattaaaaatgtgaaatgtataggcaataaaatactattcggccataaaaagaataaaatcatgtcatttgcagcaacatgga

SEQ ID NO: 23043 - DNA, 120 bp, synthetic construct
  source 1..120: mol_type = other DNA
atagacaattgagactcagaaggtgtggaagtggagggagatggatggtgagaaattacttagtgggtacactatatgttgtctgggtgatggataccctgaaagccctgacttaactac

SEQ ID NO: 23044 - DNA, 120 bp, synthetic construct
  source 1..120: mol_type = other DNA
tgaaaccctgtatctaccaagaatacaaaaattagccagggcatggtagcatgcacctgtggtcccagctactcaggaggctgaggtgggaggatcacttcagcccaggaatttgaggct

SEQ ID NO: 23045 - DNA, 120 bp, synthetic construct; identical to SEQ ID NO: 7204
  source 1..120: mol_type = other DNA

SEQ ID NO: 23046 - DNA, 120 bp, synthetic construct
  source 1..120: mol_type = other DNA
gatttcttatttcaagtcattaccccaaaaatgatcaagaaaaaacacaagagtaaggagcagagtttgaaagtggaaggaggggttcagttttaatacagagatgcacagaggtgcaag

SEQ ID NO: 23047 - DNA, 120 bp, synthetic construct
  source 1..120: mol_type = other DNA
agctgctgtgctgagggctcggggatcagggccaccaggtaggtgaccacatctatcagaagggggttggcatgcacacgtttcagccactggaggatgtgagtggagcactgaggctgt

SEQ ID NO: 23048 - DNA, 120 bp, synthetic construct
  source 1..120: mol_type = other DNA
ccttaatcacctcattcactattcaaatctaacttcaaaacccaacttggagctcagaaccatgatgctttccttaggaatattacccacagaagaagcccaatcgagaaaagttccaag

SEQ ID NO: 23049 - DNA, 120 bp, synthetic construct; identical to SEQ ID NO: 7205
  source 1..120: mol_type = other DNA

SEQ ID NO: 23050 - DNA, 120 bp, synthetic construct
  source 1..120: mol_type = other DNA
ttctctatccagcaatcatgaactgattgactaattgattaactggattgatatccaaatggtccctgagattctccatttggccaaggtttgaaagttcagtcagttaccatcagtttt

SEQ ID NO: 23051 - DNA, 120 bp, synthetic construct
  source 1..120: mol_type = other DNA
gctctctggatattttgctcagagatggttagttttttcagttcctggagagtcttcaaaacagcttcggcctgctttggaggtgatgtggatttggtgctctcaaatgcgaggcccatc

SEQ ID NO: 23052 - DNA, 120 bp, synthetic construct
  source 1..120: mol_type = other DNA
aactatcctgtattcaatgcctgctagatctggctctgccataggtgattgacttgttttcactgactcatcatcctatccctgtggggtggcattattgttcaatttaatgataaattc

SEQ ID NO: 23053 - DNA, 120 bp, synthetic construct
  source 1..120: mol_type = other DNA
cagagatgagcaacttaggtttcccaagagctctcagggtctaagaggtagagctaaagtggaatccagacttgtctgagtctatcatcaggttacccttagcttgaaataattggtgag

SEQ ID NO: 23054 - DNA, 120 bp, synthetic construct; identical to SEQ ID NO: 7206
  source 1..120: mol_type = other DNA

SEQ ID NO: 23055 - DNA, 120 bp, synthetic construct
  source 1..120: mol_type = other DNA
ggtaatgtacaagaaggaatttggacagatataaatacaatacaatactgggtaagggttggacttgagattgttagagttccttctacctctaaagactgactcctgaggttactatct

SEQ ID NO: 23056 - DNA, 120 bp, synthetic construct
  source 1..120: mol_type = other DNA
ttttctatttacaaatgcctaagtagctttgggaacttcttttcctttatgccattgcaacttgacatcatgaaatgagtttgctttctcactagaggtagccagaacaccagtgtctgt

SEQ ID NO: 23057 - DNA, 120 bp, synthetic construct
  source 1..120: mol_type = other DNA
gcggctgttgatctttggtgtgtcttcaagtttcaaagtctgtgtcacttgtgctaccatcccatacttattcctggtaaccaaggaagcacaccatgtcacggatggccagaacatact

SEQ ID NO: 23058 - DNA, 120 bp, synthetic construct; identical to SEQ ID NO: 7207
  source 1..120: mol_type = other DNA

SEQ ID NO: 23059 - DNA, 120 bp, synthetic construct
  source 1..120: mol_type = other DNA
cagtcagtatcccaaatcttccatgaaaccttttctaaccagggtaccctgcagtgatcctcaggttttctggatctacagcccttaaagaatgggtcttagatatcttttgttggtctt

SEQ ID NO: 23060 - DNA, 120 bp, synthetic construct
  source 1..120: mol_type = other DNA
aacagagcacttgagaagtgttcagttcacactgacccattaaatgacaaatcaggggtgcatcacatgacctacttgtaggagaaaggcaggaagaggtgttgctccttgcagatggct

SEQ ID NO: 23061 - DNA, 120 bp, synthetic construct; identical to SEQ ID NO: 7208
  source 1..120: mol_type = other DNA

SEQ ID NO: 23062 - DNA, 120 bp, synthetic construct
  source 1..120: mol_type = other DNA
ctcagtaacttttctttgcccaaaagcccattcttacatgtctctttcatttacatattctttgcattttttgggttcctgctccacatcttccatgaaatgttgcccgctgagctacat

SEQ ID NO: 23063 - DNA, 120 bp, synthetic construct
  source 1..120: mol_type = other DNA
catcctgaggggaaggtccatggttcatctgccactgtcccttccttggtgctgcccagagtggggttgagcaaacagcagatgctcagaaaagacccctaagccagtgcattatcctct

SEQ ID NO: 23064 - DNA, 120 bp, synthetic construct
  source 1..120: mol_type = other DNA
gggctcatatcagggaagatgttgcaggggtcaggcaggctcaggtaatatggtgctccatggccccagttaacagagaggagagggtgctccaggccggtggcagtggggccatgtttg

SEQ ID NO: 23065 - DNA, 120 bp, synthetic construct; identical to SEQ ID NO: 7209
  source 1..120: mol_type = other DNA

SEQ ID NO: 23066 - DNA, 120 bp, synthetic construct
  source 1..120: mol_type = other DNA
cccgtgcctgctcagggtcctatctctagtctgtataaaaaacagccagggcaggctgtcctcaaaggtgcccactagctcaaaagttctggaattgtattaataagaggatgctccttg

SEQ ID NO: 23067 - DNA, 120 bp, synthetic construct
  source 1..120: mol_type = other DNA
ctgttgccacattgcccttcctcgtcttgacggtaaagtgagtggagcagtttccatacacggtatcctatggaggaagaagatgcaaccacatgtattcaacacgggcaacatccttgg

SEQ ID NO: 23068 - DNA, 120 bp, synthetic construct
  source 1..120: mol_type = other DNA
gttgggagagagaaaaccagttaaaggtgggtctgcagaaaggcctccgcaggttgcatcggtgtcttctcccattatggtgtcgtagagaaattagaacacacaaaagtgctcatggga

SEQ ID NO: 23069 - DNA, 120 bp, synthetic construct
  source 1..120: mol_type = other DNA
gtttaaaatacacacaggatttactgtgtacaccataacccagcaaacacaggtgaagcatcaaacaaaagcaggggtggggtggccaggactcctcaatgactgttttaaaattagacc

SEQ ID NO: 23070 - DNA, 120 bp, synthetic construct; identical to SEQ ID NO: 7210
  source 1..120: mol_type = other DNA

SEQ ID NO: 23071 - DNA, 120 bp, synthetic construct
  source 1..120: mol_type = other DNA
tacctgtcccagagagaggatggtcacggaaatgtccttctccattacaacttgctggaagtaagctgggtggcactgaagtttcttttctcatatttttttaaccaattgttcttctga

SEQ ID NO: 23072 - DNA, 120 bp, synthetic construct
  source 1..120: mol_type = other DNA
tgcaatggcgcaacctcagctcactgcaacctccacctcctgggatcaagtgattctcctgcctcagcctccggagtagctaggactactggcatgtgccatcacacccagctaattttt

SEQ ID NO: 23073 - DNA, 120 bp, synthetic construct; identical to SEQ ID NO: 7211
  source 1..120: mol_type = other DNA

SEQ ID NO: 23074 - DNA, 120 bp, synthetic construct
  source 1..120: mol_type = other DNA
tcacttaattatacttcacaaaaatccttctgagtcacttggtacagctctaacagatttttttaaaagctgcatgcagaacattccattccatggctaaatataatttattcacacatt

SEQ ID NO: 23075 - DNA, 120 bp, synthetic construct
  source 1..120: mol_type = other DNA
ctagagtcccaaagactaaaatatctgtgtcaaagggtattaagtattttaaattacagtagatattgcctgatggctctcgtttccaccagcagctcaggacagcacacttttcctcac

SEQ ID NO: 23076 - DNA, 120 bp, synthetic construct
  source 1..120: mol_type = other DNA
tattttcatacacttgttggacagtcattcttttgtatggtgtcaggccatggctgaagcccatgctgactttggtcttagggatttcccactgggtactctctgagtttctgaggacct

SEQ ID NO: 23077 - DNA, 120 bp, synthetic construct
  source 1..120: mol_type = other DNA
ctaattactctgatctgatcaccatacattacatgtatcaaaatatcactatgttctcaataaatatgtataattattgtatgtcaatttttaaaaaagacagttaaagtcatgaagatg

SEQ ID NO: 23078 - DNA, 120 bp, synthetic construct; identical to SEQ ID NO: 7212
  source 1..120: mol_type = other DNA

SEQ ID NO: 23079 - DNA, 120 bp, synthetic construct
  source 1..120: mol_type = other DNA
ttctcgtgattgcagatgggtgtcgggagatctgatggttctaaaaacaggagtttctctgcacaagctctctttgccagccaccatctacataagatgtgacttgctgtccctcacctt

SEQ ID NO: 23080 - DNA, 120 bp, synthetic construct
  source 1..120: mol_type = other DNA
acagagttttctgatgctaccaagttaacaactctatcctgcctgtattcatacacacctaggaccctacaaactgtgattgaggatgaggcaggggtgatgttgaaaatatttacaatg

SEQ ID NO: 23081 - DNA, 120 bp, synthetic construct; identical to SEQ ID NO: 7213
  source 1..120: mol_type = other DNA

SEQ ID NO: 23082 - DNA, 120 bp, synthetic construct
  source 1..120: mol_type = other DNA
gatacggaatacaaatacttacagtcacatccgtgcctggtgcaaacacacaagttcatacctcagcggacacacacacatgcgtgtgctcatgtacaacatgacttacctggacatggc

SEQ ID NO: 23083 - DNA, 120 bp, synthetic construct
  source 1..120: mol_type = other DNA
aacctccagctcaacctgagaattcagggtagcagagcattgaggttgtctatcaagaatgagaggtggcccctgaagcccagggcttaatctctaatcagagcaccaaagggaatggtg

SEQ ID NO: 23084 - DNA, 120 bp, synthetic construct
  source 1..120: mol_type = other DNA
atttcttaagtttgcccctaggcatgggaaggaggatgtccttttattggttctaaagttactcactttaattataaagagctgtggttaaatagaagcgctgcagactaggagtgaaag

SEQ ID NO: 23085 - DNA, 120 bp, synthetic construct; identical to SEQ ID NO: 7214
  source 1..120: mol_type = other DNA

SEQ ID NO: 23086 - DNA, 120 bp, synthetic construct
  source 1..120: mol_type = other DNA
aaaggtgactgctcagcttgacttctcttccccacccaaaccccaatagcagcctgtagatctgctccacatgtatgtaacatgagtacaaccagtctcaataataagcaaagttttatt

SEQ ID NO: 23087 - DNA, 120 bp, synthetic construct
  source 1..120: mol_type = other DNA
ccatagctcacctactgggcctctctcacgctgaaatctacagacccacactgctgctaatctagatcatggattcctattgcatctgggaagttaacgggaaaatacttctgacttgcg

SEQ ID NO: 23088 - DNA, 120 bp, synthetic construct
  source 1..120: mol_type = other DNA
ccctccgggaaggtcgcgtgttgggcgcccgctggaacagggctgggggaaagctgtgggctctaggtccctcctgcctgcatcctccataccttgcagttgatcctggtggcacttctt

SEQ ID NO: 23089 - DNA, 120 bp, synthetic construct
  source 1..120: mol_type = other DNA
cagaaatagctctcccaaggacagccaattctgggcagagaggggcagtggcatagagaattaaaaatggtaattcaactcaaattattttttaattgactttatacttaattttccttt

SEQ ID NO: 23090 - DNA, 120 bp, synthetic construct; identical to SEQ ID NO: 7215
  source 1..120: mol_type = other DNA

SEQ ID NO: 23091 - DNA, 120 bp, synthetic construct
  source 1..120: mol_type = other DNA
cttaacaaactcctagaaaagaatttctggaggtttccactgtagttgagaggaattttctgaacaattgaagaaaaagaacatctgggtcctgagtccagctgcagtgatgacagacgg

SEQ ID NO: 23092 - DNA, 120 bp, synthetic construct
  source 1..120: mol_type = other DNA
ttcgatttcttcacaaaggttaaagtcagtatttcctcaccctcacatgcttcgaatcaatgactagtcactgataaacaggacagtgatgtttcttcaaagtgtgcacaggccagcgga

SEQ ID NO: 23093 - DNA, 120 bp, synthetic construct; identical to SEQ ID NO: 7216
  source 1..120: mol_type = other DNA

SEQ ID NO: 23094 - DNA, 120 bp, synthetic construct
  source 1..120: mol_type = other DNA
ggcacaggtttcacctttcaggagggaggcaggctccggagaccccctcctcagcccctccatcccgcgccccccatcctgagcctgcaggggccgccagctggtccaatccccccactc

SEQ ID NO: 23095 - DNA, 120 bp, synthetic construct
  source 1..120: mol_type = other DNA
ctggcgcccgccagcagcagcagcagcagcgcaggcagcgccagcagcgccagcagcgcgggcctcggcgggtccatcgccagctgcggtggggcggctcctgggctgcggcctggcctc

SEQ ID NO: 23096 - DNA, 120 bp, synthetic construct; identical to SEQ ID NO: 7217
  source 1..120: mol_type = other DNA

SEQ ID NO: 23097 - DNA, 120 bp, synthetic construct
  source 1..120: mol_type = other DNA
aataaaaattgtctaactcaattgtatacacattaggaaatttacctactaaaacactgtcataattttttagagcaaaaaaaaaaaacccctgcaattcaaataatctctttctaatta

SEQ ID NO: 23098 - DNA, 120 bp, synthetic construct
  source 1..120: mol_type = other DNA
aatttgagaatctattttctaacatgtcaatttccagatgtcatttttgaaaaaaaatgagaattactgcatttgtttattaaaaaggtaatcccatcacaattcttcactaaggtctta

SEQ ID NO: 23099 - DNA, 120 bp, synthetic construct
  source 1..120: mol_type = other DNA
tggacactatgtttattgcagcactgttcacaatagtaaaggcttggaaccaacgcaaatgcccatcaatgatagactgaagaaaatgtggcacatgtacaccatggaatgctatgtagc

SEQ ID NO: 23100 - DNA, 120 bp, synthetic construct
  source 1..120: mol_type = other DNA
accaaacaccacatattctcactcgtaagtgggagatgaacaatgagaacacatggacgcagggaggggaacatcacacactggggcctgctgaggggtgggggattaggggagggaaag

SEQ ID NO: 23101 - DNA, 120 bp, synthetic construct; identical to SEQ ID NO: 7218
  source 1..120: mol_type = other DNA

SEQ ID NO: 23102 - DNA, 120 bp, synthetic construct
  source 1..120: mol_type = other DNA
cagagatgtgtaggtaccaagacgtggatatgggggagaaccttgaaatatgataacggactatgccaccagcatgtctctggaacctatgatcaggcaaggttctaaagtacgtagtct

SEQ ID NO: 23103 - DNA, 120 bp, synthetic construct
  source 1..120: mol_type = other DNA
cttccactctttgaagtgtcctggtgtgggtgaagattacactgtcaactcccttcaggtgtggctcacttacaccccccggccaccccaagatgcccacagagctttcccagcagagcc

SEQ ID NO: 23104 - DNA, 120 bp, synthetic construct
  source 1..120: mol_type = other DNA
gaacagaggggtgcaaacgatgcggtaatttaagcctgtgtccgatccagcggggcagggactttgacaggagctgcctttcagcgttctccccacacgccgctgaggcaggcctgcatt

SEQ ID NO: 23105 - DNA, 120 bp, synthetic construct; identical to SEQ ID NO: 7219
  source 1..120: mol_type = other DNA

SEQ ID NO: 23106 - DNA, 120 bp, synthetic construct
  source 1..120: mol_type = other DNA
tcctaaaagttttaaaaatcaacagaattagattctttagataatgatcagcctagtcagaaaacaacattccccaagcaagcataaagagaggacacaattactgacggacagcggaaa

SEQ ID NO: 23107 - DNA, 120 bp, synthetic construct
  source 1..120: mol_type = other DNA
ggtgaaggtcagatgacctcctgaatcaagtgcattctgagttgaaacaatgaatagatcacctggtagatttgttcttccaggaggcaaggaccttttcctcgtttattcttatcagga

SEQ ID NO: 23108 - DNA, 120 bp, synthetic construct
  source 1..120: mol_type = other DNA
gcctgtaaaatgtggacagtaatagctaccctgctggttggttgggaggattagacgtaatctatcaaaagtgctgctaaaactgcccctggcaagtaatggacaatgaaaaaaatcact

SEQ ID NO: 23109 - DNA, 120 bp, synthetic construct; identical to SEQ ID NO: 7220
  source 1..120: mol_type = other DNA

SEQ ID NO: 23110 - DNA, 120 bp, synthetic construct
  source 1..120: mol_type = other DNA
aggcgctagtcacatgaattctctactgaaccccacgaggtgacagtcagaagactgaaaacgaagccccttgggccgtgcagggaggctcctgcacacatacgtttcccatggggcaaa

SEQ ID NO: 23111 - DNA, 120 bp, synthetic construct
  source 1..120: mol_type = other DNA
tggtcagcaacaacactctattgagaagccaacactccatggagaagggggctttaagcaaaaaagaactctcctcaacttgaagaagagtgtggcaagctccctggctggggatgtgtg

SEQ ID NO: 23112 - DNA, 120 bp, synthetic construct
  source 1..120: mol_type = other DNA
aggggtccccactgacaagcacacaggagagaaaaggaacagactatgtacgaagaaaggaacagactatgcaggaagaaagcaacaggcacacctgaggtaaactgtggtctcagaaac

SEQ ID NO: 23113 - DNA, 120 bp, synthetic construct; identical to SEQ ID NO: 7221
  source 1..120: mol_type = other DNA

SEQ ID NO: 23114 - DNA, 120 bp, synthetic construct
  source 1..120: mol_type = other DNA
cccatcctgctgctggctgtcctgctcagcttgtggtgagtggaggcaagtccctgccccggcccgcctgcctgaagtcatcagatgtactgctcctcatccctgccattcaggagcaga

SEQ ID NO: 23115 - DNA, 120 bp, synthetic construct
  source 1..120: mol_type = other DNA
gagtcccgccacctgtcatccatgcctatgtgcacactgacctgggatgccgtcaggggcttcatgtggccatgcgcctgtgcctcatacctctccaggtcaggcttcttatagctggaa

SEQ ID NO: 23116 - DNA, 120 bp, synthetic construct
  source 1..120: mol_type = other DNA
aaggaaaaggacattaaactccctatggttccaggaaagctcacctgatttagaaacttcctaagcaaatgccttgcacattgtaggctgccactaacttttgttaaatgaatgcactca

SEQ ID NO: 23117 - DNA, 120 bp, synthetic construct; identical to SEQ ID NO: 7222
  source 1..120: mol_type = other DNA

SEQ ID NO: 23118 - DNA, 120 bp, synthetic construct
  source 1..120: mol_type = other DNA
ctgccatggccgctgagcccatccagggctgcagcacaatgccgatgggcatgaagacacctggggaagaaagaactcgcactcacacctaggtctggggagaggagccaggagagggct

SEQ ID NO: 23119 - DNA, 120 bp, synthetic construct
  source 1..120: mol_type = other DNA
gctgggtgtgggatgctgttgagtgggcctggctctcttccactcgccctgatgttcccagaaccacccacaggtggcatcccatttcagggcgagctccagggcagcgacaaaccacaa

SEQ ID NO: 23120 - DNA, 120 bp, synthetic construct
  source 1..120: mol_type = other DNA
gatctcgcctccagggcttcatgacatctttagaagaggaatgagagccaggtcccaggacagggtcaggagacaggtatggtcaactttgtgtggcagaggcacatacactgggggaat

SEQ ID NO: 23121 - DNA, 120 bp, synthetic construct
  source 1..120: mol_type = other DNA
aggaatgctgtgattacaaacttgatctctcctcagcccatggaggagcactctggaacttttcattgccatgttcctgggggcagggggcagggagcagggggcgggggagagatggtt

SEQ ID NO: 23122 - DNA, 120 bp, synthetic construct; identical to SEQ ID NO: 7223
  source 1..120: mol_type = other DNA

SEQ ID NO: 23123 - DNA, 120 bp, synthetic construct
  source 1..120: mol_type = other DNA
tttctttccatgatcatttgtgtaactcagagtgaaacttgggcaggattaatgttcaggataaggttctgaaacaccaataattgtgcctagcatgtagcagatgccccataattctta

SEQ ID NO: 23124 - DNA, 120 bp, synthetic construct
  source 1..120: mol_type = other DNA
tgaatgaaggtttcaggtcctctccacagtttctcatttaaagacatataaagcaggggacatgaaaaaaaaaaaaaaacagcctttctaaaacgcctctagccagccagtgagtgagcc

SEQ ID NO: 23125 - DNA, 120 bp, synthetic construct; identical to SEQ ID NO: 7224
  source 1..120: mol_type = other DNA

SEQ ID NO: 23126 - DNA, 120 bp, synthetic construct
  source 1..120: mol_type = other DNA
gtgccggtgccaatggccacacccatgtctgcctgggccaaggccggggagtcattgaccccatcccccaccatggcgactttcttccctttattctggagctcctggaccttggccacc

SEQ ID NO: 23127 - DNA, 120 bp, synthetic construct
  source 1..120: mol_type = other DNA
cccctctgccctcggcctctgggtccagtcagtgatgttggtcaaccacaccctgcaggtttgctgtcacagggccagtttatccctggctcctgccccaacaccctgcactggtttagg

SEQ ID NO: 23128 - DNA, 120 bp, synthetic construct
  source 1..120: mol_type = other DNA
atgtccctccctactctcctgcttcacatccagtagaccccatgcatctcccagaggagggcagctcaactcttgggtctgcttccgagggtcccagagtcccagggtcccagggtctgg

SEQ ID NO: 23129 - DNA, 120 bp, synthetic construct
  source 1..120: mol_type = other DNA
tcctttcctagtccctttcccgcttctcagatctacacagtcactggtccaccttcctgcaagaccatgagcccgtcaagggcagaccccccttcactcctcacagagcctggccccaca

SEQ ID NO: 23130 - DNA, 120 bp, synthetic construct; identical to SEQ ID NO: 7225
  source 1..120: mol_type = other DNA

SEQ ID NO: 23131 - DNA, 120 bp, synthetic construct
  source 1..120: mol_type = other DNA
tcttcccttaacataaaggttagaaaatgtctatctcagcccttaggtcacatacttttttttccattgcaaagactgggaaacggttagagaaccctggaactcctttttttccaggat

SEQ ID NO: 23132 - DNA, 120 bp, synthetic construct
  source 1..120: mol_type = other DNA
aggagtacagctcagtgctgggccaactggtgcttacttttgtctctaactgcttttatgagctttacacagtttgcaacattaaagggctgtacctgggtggcaatagctctggctgtc

SEQ ID NO: 23133 - DNA, 120 bp, synthetic construct; identical to SEQ ID NO: 7226
  source 1..120: mol_type = other DNA

SEQ ID NO: 23134 - DNA, 120 bp, synthetic construct
  source 1..120: mol_type = other DNA
atcttcgcagtggctccccaaggaataggattacgagtgatttcattttctcctttatagctgaattttccaaactttctgcaaggagcacgtatgacactttgcgaagtgcctggcttg

SEQ ID NO: 23135 - DNA, 120 bp, synthetic construct
  source 1..120: mol_type = other DNA
agaaaatcaatccttcgtcttttcctgcagaaaacatttcggcagaatttctctttgagtgaatcttagctatagaagcaggagggcttttagggctgaggtgtgaatgagaacagagta

SEQ ID NO: 23136 - DNA, 120 bp, synthetic construct
  source 1..120: mol_type = other DNA
caattctggtttgatagccgaggggcgggtggatttacaaagacttagaaaaagggaaaaaagagagagaatgtgagagaaagacatatttggctggagcattcaaaaggtgtcatgtat

SEQ ID NO: 23137 - DNA, 120 bp, synthetic construct; identical to SEQ ID NO: 7227
  source 1..120: mol_type = other DNA

SEQ ID NO: 23138 - DNA, 120 bp, synthetic construct
  source 1..120: mol_type = other DNA
ctcccgacctcaggtgatccacccacctcagcctcccaaagtgctgggattacaggcgtgagccaccgcacctggccaacacacagtcttgagacctgtactctgtgcgacaccagtctg

SEQ ID NO: 23139 - DNA, 120 bp, synthetic construct
  source 1..120: mol_type = other DNA
ctctactaaaaatacaaaatgtagctgggcgtggtggcgggggcctgtaatcccagctactcaggagtctgaggcaggagaattgcttgaacccggaaggtggagcttgtagtgagacaa

SEQ ID NO: 23140 - DNA, 120 bp, synthetic construct
  source 1..120: mol_type = other DNA
tttaaatgcatcctgtagttaaacctgctgggaagtgaattcctgctctgtctgcagggatgaaggagaaggatgactctgaactgcccacctggacaagagcaatgatgatgacacaga

SEQ ID NO: 23141 - DNA, 120 bp, synthetic construct
  source 1..120: mol_type = other DNA
ctgaaattaagagaggaaggcttttgtttgtcttcttttcttttataaaggaggactcttttgcctgatatctgcagaaaactgtatttctgagagagcggaaggaaggcagaagcagaa

SEQ ID NO: 23142 - DNA, 120 bp, synthetic construct; identical to SEQ ID NO: 7228
  source 1..120: mol_type = other DNA

SEQ ID NO: 23143 - DNA, 120 bp, synthetic construct
  source 1..120: mol_type = other DNA
aatgtgtaggacatgtgggtatgaattaagatggggcattaatagtacatgctacatgggtggaaatggtataaacgtattaaacataaggcaatgtccgtctttgtcttagaagtatcc

SEQ ID NO: 23144 - DNA, 120 bp, synthetic construct
  source 1..120: mol_type = other DNA
tgcttggtatcaacaaccccaggtgaatcaacaaataatcagacacgtctacatgaaatgtttaaaactgtaactcccgaggctaatgcacctctcacctatcactttctaacagcgtgt

SEQ ID NO: 23145 - DNA, 120 bp, synthetic construct
  source 1..120: mol_type = other DNA
tttcactaccaacacttaggaaaaacactagtcacagattttgagtgttttccaccctttattctggtggctggcaagctaccttgagaataaaaaaggccattcttcaaaagcagctgt

SEQ ID NO: 23146 - DNA, 120 bp, synthetic construct; identical to SEQ ID NO: 7229
  source 1..120: mol_type = other DNA

SEQ ID NO: 23147 - DNA, 120 bp, synthetic construct
  source 1..120: mol_type = other DNA
ccatgaaccgtctgccgcacagcagaggcaatcactgctgggcgtggtgctctctgtggtttgacccacctctacttttaaccagctgcagagacaaaagccagcaatacctttttctgc

SEQ ID NO: 23148 - DNA, 120 bp, synthetic construct
  source 1..120: mol_type = other DNA
tgctgactttgcacccaattccacagcctggcactgcctggaagtccgtgcagtatcccaaggtctctgttccaagttcctgggaaggtggaaagagaggaagaggaaactgtaagccaa

SEQ ID NO: 23149 - DNA, 120 bp, synthetic construct
  source 1..120: mol_type = other DNA
gttaagatagtgactagtaacttgtaattatttctccctcctttggtaaagatattatagctgtaagttgaatgagactattttaaacagcctaaaatccttccctgggtgggtgcctca

SEQ ID NO: 23150 - DNA, 120 bp, synthetic construct; identical to SEQ ID NO: 7230
  source 1..120: mol_type = other DNA

SEQ ID NO: 23151 - DNA, 120 bp, synthetic construct
  source 1..120: mol_type = other DNA
ccgacctcactttatgacaacctagaactgtggcaagggctgactgtgagcccctcatctccacttgctgcagaggacccttctaagcggttttccagaccacacaacaaataaaggatg

SEQ ID NO: 23152 - DNA, 120 bp, synthetic construct
  source 1..120: mol_type = other DNA
ggaagagttgtcaattgtttttcaaggcaatgatgtcacctttctacatttactgctaacagtattgctcaggctgtttaaaagttgtcagggcaatattctgtgtgacgcgttctgctg

SEQ ID NO: 23153 - DNA, 120 bp, synthetic construct; identical to SEQ ID NO: 7231
  source 1..120: mol_type = other DNA

SEQ ID NO: 23154 - DNA, 120 bp, synthetic construct
  source 1..120: mol_type = other DNA
tgtccccttgcactaagcactgtcaaagcactgagtttccagactgcccgtactccccaagaccgtgagctcccaaagggtagagttcatatcccactcctgttgttctcctgagcctgg

SEQ ID NO: 23155 - DNA, 120 bp, synthetic construct
  source 1..120: mol_type = other DNA
ggttttccagaccacacagagaaggctcctcgagggcagctaggagagaaggacatggtgaggaataaaagagcattggcggggagggcagggccacgcccaagtccacgtacctcttta

SEQ ID NO: 23156 - DNA, 120 bp, synthetic construct
  source 1..120: mol_type = other DNA
accctggggacgccatgggtaatggtgccagtcttgtcaaacatcacagtctttatctgccaaaaacaaccacaactcactgaccacaatacagatggaggggcttccatagtcacactc

SEQ ID NO: 23157 - DNA, 120 bp, synthetic construct
  source 1..120: mol_type = other DNA
ttccctatgtgtccagtcaaaccagccacactgaggcttgaccttgaccaggcaaagccagaaaccctcagtcggctgtacaggagatggcacagcactgtcccccagacagtgacacca

SEQ ID NO: 23158 - DNA, 120 bp, synthetic construct; identical to SEQ ID NO: 7232
  source 1..120: mol_type = other DNA

SEQ ID NO: 23159 - DNA, 120 bp, synthetic construct
  source 1..120: mol_type = other DNA
agtgtataattttacccatttaaggccagcaggttgctcttctcagaccatgtcccacaagcagggttctcccttacaagcaaacaataattcagctttttgtttctgatgctgagcggt

SEQ ID NO: 23160 - DNA, 120 bp, synthetic construct
  source 1..120: mol_type = other DNA
agaacactttactaaatcttcagcctttggattctggcccctccctcaacggcctcatctctggttcctctctctcaatgattttcttccagttcctcatttgctcattcaacagataac

SEQ ID NO: 23161 - DNA, 120 bp, synthetic construct; identical to SEQ ID NO: 7233
  source 1..120: mol_type = other DNA

SEQ ID NO: 23162 - DNA, 120 bp, synthetic construct
  source 1..120: mol_type = other DNA
aaaccatgaccatcgccagaacccagtgcagggctcacacgcagtgagtgcccagcaaatactgattaaataggtgaaagtgtggaaggccagaggttagtaagttgggcaaaaggaaga

SEQ ID NO: 23163 - DNA, 120 bp, synthetic construct
  source 1..120: mol_type = other DNA
gctctgcctctggttagctgcaggcgtttggtcaagttacctaatctcctcctgctgcagtttcctcatctgtaaaatgggaatgataagcacctaccacacagagttgttaatgcaatt

SEQ ID NO: 23164 - DNA, 120 bp, synthetic construct
  source 1..120: mol_type = other DNA
ttgacttcctattctatgtaattaacactgctgtcttgagtggctctcaggcttttctctcaatgtgaaatagtaaacagatactactttcatctctcaggatggggaaagccgtgctac

SEQ ID NO: 23165 - DNA, 120 bp, synthetic construct
  source 1..120: mol_type = other DNA
caggcaatgcacagcaccgtgatggacgtctggaaagcaaaccggatgatcacctctgtctgggagatgtgcttgttggggttctgaaaacaggacagagtcagaggcaggttgagagtt

SEQ ID NO: 23166 - DNA, 120 bp, synthetic construct; identical to SEQ ID NO: 7234
  source 1..120: mol_type = other DNA

SEQ ID NO: 23167 - DNA, 120 bp, synthetic construct
  source 1..120: mol_type = other DNA
cacagtacataacacctggcataggagcggcatttaagaaacagtaactattatcgttatttttctcatcattaggaaagcttaaaaatgctattctaaggtgataatcatataaataag

SEQ ID NO: 23168 - DNA, 120 bp, synthetic construct
  source 1..120: mol_type = other DNA
aggcaactattggaatgatgatggaacatactgatatggaaaggtaccagcagcactgcaaaattaaaaagcaagtacaaaatcgcatgtgctgggatttattcgtgcaaaaatctccgc

SEQ ID NO: 23169 - DNA, 120 bp, synthetic construct
  source 1..120: mol_type = other DNA
ttttctttgtacccaaaacaaacaaaatatgacctactttccagacacttggtattatttgcattctgagagcttgaattatcttggtttatttttaaaaatggctggtggctatggagt

SEQ ID NO: 23170 - DNA, 120 bp, synthetic construct; identical to SEQ ID NO: 7235
  source 1..120: mol_type = other DNA

SEQ ID NO: 23171 - DNA, 120 bp, synthetic construct
  source 1..120: mol_type = other DNA
gactgggtggacttctggaagttaccatgagcccttctctacaatgacttttgtacagcagagagatgacagtatcttaaaggaacatgcagtacctcatttgccagcatcctccctgat

SEQ ID NO: 23172 - DNA, 120 bp, synthetic construct
  source 1..120: mol_type = other DNA
tcccgaaaaagccgaaattataggcagtcaggtgccatggatagccacaggcacattctaccaatatatctgtaagttacttttaagagcactgaggttccttagatgtcagaaagtgtt

SEQ ID NO: 23173 - DNA, 120 bp, synthetic construct; identical to SEQ ID NO: 7236
  source 1..120: mol_type = other DNA

SEQ ID NO: 23174 - DNA, 120 bp, synthetic construct
  source 1..120: mol_type = other DNA
tggtataacaagcactagactgggctaggaataagataaggtaaaaacattgttccgctcattgtgccattaccaaatactgttctaagtgtgccattagctttttaagtacattatcaa

SEQ ID NO: 23175 - DNA, 120 bp, synthetic construct
  source 1..120: mol_type = other DNA
gctgccaactgagaatcacagatgtaatatagcttttattcctcaagcagatatgtttttttgaggggtggcctgtattttcctttctttttctgaggtttaataaaaccatatttccta

SEQ ID NO: 23176 - DNA, 120 bp, synthetic construct
  source 1..120: mol_type = other DNA
acacctgaaatcccagcactttaggaggccgagacaggcagatcacctgaggtcaggagttcgaagccagcctgactaatacggtgaaaccccatctctgctaaaaatacaaaaattagc

SEQ ID NO: 23177 - DNA, 120 bp, synthetic construct
  source 1..120: mol_type = other DNA
ggaaacagagggagactccatctcaaataaataaataaataaacaaacaaacataaaaagctatttacattacttgggaagctgggaggtcaaagatggtactggtaaatatatacatca

SEQ ID NO: 23178 - DNA, 120 bp, synthetic construct; identical to SEQ ID NO: 7237
  source 1..120: mol_type = other DNA

SEQ ID NO: 23179 - DNA, 120 bp, synthetic construct
  source 1..120: mol_type = other DNA
catatagcccaaggcattcaacttacaggaaagtatctctgaacaacaccaaaatcgataaaaccgattacaatccataccaccaacgtcaaagttgacatgatgatgataaatgggaca

SEQ ID NO: 23180 - DNA, 120 bp, synthetic construct
  source 1..120: mol_type = other DNA
caccaacgtcaaagttgacatgatgatgataaatgggacaaaatatccactaaaccggtcagccagctgctgaatgggtgcctatgaaaataaaacaccaagaccatgggaaattacaac

SEQ ID NO: 23181 - DNA, 120 bp, synthetic construct; identical to SEQ ID NO: 7238
  source 1..120: mol_type = other DNA

SEQ ID NO: 23182 - DNA, 120 bp, synthetic construct
  source 1..120: mol_type = other DNA
agccccatccagcactcatgtgacctgacagctgctatgatatcctcctgagggaacatgaaacaagccatctcacctgtgatgagggactcatcagccatggtattgccttccaggact

SEQ ID NO: 23183 - DNA, 120 bp, synthetic construct
  source 1..120: mol_type = other DNA
cattcggtcaccgggtcaggttctaggccagctgttacaatagttacactgtatttgcttatactgagcaacagtattcatttgatctgttcatttacagatatttatcgtgcagctgct

SEQ ID NO: 23184 - DNA, 120 bp, synthetic construct
  source 1..120: mol_type = other DNA
tattaaatattaataagtgctgtgatgaaaaaaacaaggataatgtgactggagggcttcttagagtggcagagggaggaggagacatggaagggcttctctgggaaggtaacatttaag

SEQ ID NO: 23185 - DNA, 120 bp, synthetic construct
  source 1..120: mol_type = other DNA
aagcaaggctggcaggaagtaagtgacgtgcaagttgaggtcagagaagcaggcagagtccagatcatgccgagtctcctggagcagagcatgggttttggatgtaaggcttttagcagg

SEQ ID NO: 23186 - DNA, 120 bp, synthetic construct; identical to SEQ ID NO: 7239
  source 1..120: mol_type = other DNA

SEQ ID NO: 23187 - DNA, 120 bp, synthetic construct
  source 1..120: mol_type = other DNA
aatggttcattttgacatgtcgggtttgagatgcctatttgacttccacgtagaaatgccaactagggagctgaaaatatgagtctgaagtggaaagaagaggtcagaggtagagaacaa

SEQ ID NO: 23188 - DNA, 120 bp, synthetic construct
  source 1..120: mol_type = other DNA
agatcatataagcgcccctaggagtgacggagaaaacacagaaggggtcctagaactcatccctgagacactccactatctgaaagctgagcagaagctgaaggaccagccagtgacaca

SEQ ID NO: 23189 - DNA, 120 bp, synthetic construct
  source 1..120: mol_type = other DNA
tagggtttgtgtgttgcagtgactgtgagttacacattgaaaaaagaaaaaaaatcaaagaaacagacaagggggaaatactggtgagagactgaaatgaggacttaacacaagcaatgt

SEQ ID NO: 23190 - DNA, 120 bp, synthetic construct; identical to SEQ ID NO: 7240
  source 1..120: mol_type = other DNA

SEQ ID NO: 23191 - DNA, 120 bp, synthetic construct
  source 1..120: mol_type = other DNA
aagcatggcatgggcccaacagaattaattgtataggtaatactggctcatgagctaatggtcaacaagccagaagagcatgcatggaaagcaagcagggctctgaggttattttacacc

SEQ ID NO: 23192 - DNA, 120 bp, synthetic construct
  source 1..120: mol_type = other DNA
ttttacctcactgaatcttcccagacacatacaaggtgagtcttattacccccatttcagcaaaacctgaagatgtcttagaaaggcacaaaattgaacatacatgcccacttatttaaa

SEQ ID NO: 23193 - DNA, 120 bp, synthetic construct; identical to SEQ ID NO: 7241
  source 1..120: mol_type = other DNA

SEQ ID NO: 23194 - DNA, 120 bp, synthetic construct
  source 1..120: mol_type = other DNA
gttaagacacacacagaaagttcaatcatggcaaccaaaataaatggagtactgaaaaggagactttcaaagactgaagtctttagtgctgggagtatacctgtgtaaatctgtttggtg

SEQ ID NO: 23195 - DNA, 120 bp, synthetic construct
  source 1..120: mol_type = other DNA
acaacctggaggatttatcatcccacagaggtctccacatggcctgagaagcccaagtcgggaggaggagctccctgcattcaatttagaaatgaaagaccccaagaactaaaggtcaga

SEQ ID NO: 23196 - DNA, 120 bp, synthetic construct
  source 1..120: mol_type = other DNA
ctgttaaatctaactttgaatttctcctttgatctaaattaaccacatctttctaactctaagcagcttacaaggaatagtcctttatgagggttaatgtggctcctactggtgaatctc

SEQ ID NO: 23197 - DNA, 120 bp, synthetic construct
  source 1..120: mol_type = other DNA
ttgtttcatagcacttcatctttaagagtttctgccaggaatctgtttacttcacttgtctcctctcttctactccccttcctcattaaacacaagttaagaaaacaaagaaaaaactta

SEQ ID NO: 23198 - DNA, 120 bp, synthetic construct; identical to SEQ ID NO: 7242
  source 1..120: mol_type = other DNA

SEQ ID NO: 23199 - DNA, 120 bp, synthetic construct
  source 1..120: mol_type = other DNA
aaggaagaagggagttcagagggaaggaaggatgtgtgcagaggtctgcagagagaggcagtcccttcctgggacctgccagtggtgcagggcagctggagcacaacgcaggggatggca

SEQ ID NO: 23200 - DNA, 120 bp, synthetic construct
  source 1..120: mol_type = other DNA
tgtgctttcagaaagcactgtaatatgatcaatttgtgctttcaggaagatcactggtttgaatgtggaaaaatactggattgataaatggctgcaagcagtatgaagagacagctgcgg

SEQ ID NO: 23201 - DNA, 120 bp, synthetic construct; identical to SEQ ID NO: 7243
  source 1..120: mol_type = other DNA

SEQ ID NO: 23202 - DNA, 120 bp, synthetic construct
  source 1..120: mol_type = other DNA
aaaaaggagagaagaaagcccatggagactaagcagcagcagcagcaaggaaactacagtgtgccagacggatcgcacctagaaacgctgccagcacccaagacttggagtaaagagaaa

SEQ ID NO: 23203 - DNA, 120 bp, synthetic construct
  source 1..120: mol_type = other DNA
agaggcccagacgcgggagggccctgtgggaggcagagtcactgggaaaccagtgtccagtgcacctcaaagcacagaatggttgagctcaggggaggcctagactgcggcaatccaggc

SEQ ID NO: 23204 - DNA, 120 bp, synthetic construct
  source 1..120: mol_type = other DNA
ggcccctagcttaataatgtcctgtcatgttgcatggtagtagtcaggccgtgcgtccccagccaaaaaatgaatcggcattcttggaaaagaactgagttatgacaggtgctgcacgca

SEQ ID NO: 23205 - DNA, 120 bp, synthetic construct; identical to SEQ ID NO: 7244
  source 1..120: mol_type = other DNA

SEQ ID NO: 23206 - DNA, 120 bp, synthetic construct
  source 1..120: mol_type = other DNA
gcctccagggttccaatcccagctctgctgcctgcctgccatggactctggggatattactccacctcactgcacttggcttttcctgaggaaagctgggatgatgacagtgctgcctca

SEQ ID NO: 23207 - DNA, 120 bp, synthetic construct
  source 1..120: mol_type = other DNA
caggatccagaacaaaaccagtgccaccgcgcagcagccagcctgcacctcatgaacactcatgcatctgtgtggccccggtcagttcctctactcacctggggcgtgcccagggccagc

SEQ ID NO: 23208 - DNA, 120 bp, synthetic construct
  source 1..120: mol_type = other DNA
cacacaagggaggggcaaggcacaacgcctctgaaaatgggagtggttagagtctgcatgacatcggaggataagaatcagagacaccaaaaaccactgagaaaaccaacagagaaaggt

SEQ ID NO: 23209 - DNA, 120 bp, synthetic construct; identical to SEQ ID NO: 7245
  source 1..120: mol_type = other DNA

SEQ ID NO: 23210 - DNA, 120 bp, synthetic construct
  source 1..120: mol_type = other DNA
ggttacatcccaattccattactgaatacctgtgtgaccttgggccagttgcttagcctctctgaacctcagcttcctcatctgtaaattaagagtaataatagtccctgcctcagaaag

SEQ ID NO: 23211 - DNA, 120 bp, synthetic construct
  source 1..120: mol_type = other DNA
aagaagataaatttctccttcaatttttattctttagcaagttgaagtccttatctctctgcctgtctgaatgtgtatcttactaggaaggcctaattcatactctatgttctctgtgaa

SEQ ID NO: 23212 - DNA, 120 bp, synthetic construct
  source 1..120: mol_type = other DNA
acacacacaccacctacaaatcttgctagttttatagttcaatgccttgctttcgtagctggattgagagtggtgatcttactgtgtctctgcccacactcacaaggtctattgcaatgt

SEQ ID NO: 23213 - DNA, 120 bp, synthetic construct
  source 1..120: mol_type = other DNA
cttctgtggcttggagagacatgagtttagccagggcttctgaggttttgctctaggaaataaccagaatgtgaaatgagagctatcgaaagcagacctgtccaaacccagcctgagagt

SEQ ID NO: 23214 - DNA, 120 bp, synthetic construct; identical to SEQ ID NO: 7246
  source 1..120: mol_type = other DNA

SEQ ID NO: 23215 - DNA, 120 bp, synthetic construct
  source 1..120: mol_type = other DNA
gatgtctagaccaactacatattcagttttgcaccaagagacaatgtaggctctgccctgaaggccaggtttctttagtttacacaatacacctgaatgatggttttaataattaaccag

SEQ ID NO: 23216 - DNA, 120 bp, synthetic construct
  source 1..120: mol_type = other DNA
ctttaagtctgtctctatgctgtgtataattagtaattctaaacatggtgttcagaggaagtgagatttgtttactgaaggagcagctcttttctgaacctgaagctgctgttacctttg

SEQ ID NO: 23217 - DNA, 120 bp, synthetic construct
  source 1..120: mol_type = other DNA
aataaacataagcaatgcttgtggccaggacgatgagcacgtccatgttggctgacctgtgtctcagagatttgtaggcctgaacgtagaagtaccacccaccgaggagctgaaagacaa

SEQ ID NO: 23218 - DNA, 120 bp, synthetic construct; identical to SEQ ID NO: 7247
  source 1..120: mol_type = other DNA

SEQ ID NO: 23219 - DNA, 120 bp, synthetic construct
  source 1..120: mol_type = other DNA
tgtactgtagacagcacaaggcattccattccctaaagagaatgggctctatctataacccactggcataaaagatgtctaatacatagttaagtgaaaaagccagctgcacatcagtct

SEQ ID NO: 23220 - DNA, 120 bp, synthetic construct
  source 1..120: mol_type = other DNA
ctattaatatcaccatagcaacactggggaatgagattgggcgggaggcagaatgtgatcagtgaaagggcatcttcctcttttcttcttatacttcagtacggtttgaattgttaataa

SEQ ID NO: 23221 - DNA, 120 bp, synthetic construct
  source 1..120: mol_type = other DNA
ggccaggagtttgagaccaacctgggcacatagcaagaccctatctagccaggcatggtggcaggcgcttgtggtcctagctactcaggaggctgaggtgggaggatcgcttgagcccag

SEQ ID NO: 23222 - DNA, 120 bp, synthetic construct; identical to SEQ ID NO: 7248
  source 1..120: mol_type = other DNA

SEQ ID NO: 23223 - DNA, 120 bp, synthetic construct
  source 1..120: mol_type = other DNA
ccagcaacaaacgtaaattaacctaaacaatatgcacattggagacacagagttcaccacaccttgcagcaaggaggttgctattccagggccagttctgatcacttgcaatcaactgaa

SEQ ID NO: 23224 - DNA, 120 bp, synthetic construct
  source 1..120: mol_type = other DNA
taaagtgccatttaaaccaagctaaagcactatgtttgcgcttagcgggcagaatatctgagggccacacacagcatggaagggagaggtctgcccactttctcatatatacctggacaa

SEQ ID NO: 23225 - DNA, 120 bp, synthetic construct
  source 1..120: mol_type = other DNA
ggctcgttgctgggtatcagcatatagatcattaaggccatgacagggatgccaaacaccaggctgcacaggaaagacttcttccacctggaaagcaaatgcagcaacacagatatatca

SEQ ID NO: 23226 - DNA, 120 bp, synthetic construct; identical to SEQ ID NO: 7249
  source 1..120: mol_type = other DNA

SEQ ID NO: 23227 - DNA, 120 bp, synthetic construct
  source 1..120: mol_type = other DNA
aggtgcctaccatcctcggcctatggttgcctatagctttcttttcaaaatgcaatcttatacagacccccaaagaaaaaaatagataaaagcagtattttattagtataaacttataca

SEQ ID NO: 23228 - DNA, 120 bp, synthetic construct
  source 1..120: mol_type = other DNA
tgcagcatccatgaaattccaaccgagtggttgtggaacctcaaatgcacctaaaacatgacatgaaaaccactggcctttgaggctgaagtcttaggctgttggactgctacccaagaa

SEQ ID NO: 23229 - DNA, 120 bp, synthetic construct
  source 1..120: mol_type = other DNA
agcaaacttccactcattctttgaggctcagatcttatgtcccctgcttggagttttcctagaccttccagaatctgccagagccattgatttcattgctcactcactctttctcagcca

SEQ ID NO: 23230 - DNA, 120 bp, synthetic construct; identical to SEQ ID NO: 7250
  source 1..120: mol_type = other DNA

SEQ ID NO: 23231 - DNA, 120 bp, synthetic construct
  source 1..120: mol_type = other DNA
gtgctcactagctacatgtgactagcggctatcacactgggcagtgcagatacagaacactgccatcattccagaacttcttttggacagcactgtttcagagggttcacattacaaggg

SEQ ID NO: 23232 - DNA, 120 bp, synthetic construct
  source 1..120: mol_type = other DNA
cttagatgagagctggagtttatcttttgtgttctacctactgctttatttccatcttgtggtccaagtgatgagcgttggggtttctctgggccagggaagcatgaaagccaatttcct

SEQ ID NO: 23233 - DNA, 120 bp, synthetic construct
  source 1..120: mol_type = other DNA
tttggaaattagaaagtgaatctaaaagtgcctcagtagactttgtgggttttctgcttacaacttctttacccaatagccctacaaaccctgtgcagaagttcagcacttctgggaaga

SEQ ID NO: 23234 - DNA, 120 bp, synthetic construct; identical to SEQ ID NO: 7251
  source 1..120: mol_type = other DNA

SEQ ID NO: 23235 - DNA, 120 bp, synthetic construct
  source 1..120: mol_type = other DNA
gagcctacaccgcaatcttgtgctttgctcacagtttaactcaagcgctttgttaccacgttcatctgaccactatatctctgatactctttatgaatacacacaggaaaaactgccacg

SEQ ID NO: 23236 - DNA, 120 bp, synthetic construct
  source 1..120: mol_type = other DNA
tccttttacaagtaataccagcctaattatattagcaaaaaatggcccagagatgcaagaatggaggacagacattagcaatagtccccaaataaggtcagcatggatgccacaccacac

SEQ ID NO: 23237 - DNA, 120 bp, synthetic construct
  source 1..120: mol_type = other DNA
gaggtcaggagttcgagaccagcctgacaaacatggcgaaaccccatctctactaaaaatacaaaaattagccaggcgtggtggtgcatacctgtaatcccagctactcgggaggctgag

SEQ ID NO: 23238 - DNA, 120 bp, synthetic construct; identical to SEQ ID NO: 7252
  source 1..120: mol_type = other DNA

SEQ ID NO: 23239 - DNA, 120 bp, synthetic construct
  source 1..120: mol_type = other DNA
tttcctcagctgataaaaaagctatgctgtctgcctccaagggtggggccctggaccatcagcagcatgatcatttccatgtcaaaaagctttcccggggctaggcacggtggctcatgc

SEQ ID NO: 23240 - DNA, 120 bp, synthetic construct
  source 1..120: mol_type = other DNA
catggtggcaggtgcctgtaatcccaactactcggggaaccgaggcaggagaatcgcttgatcccaggaggcggaggttgcagtgagccgagatcatgccatcacactccagcctggggg

SEQ ID NO: 23241 - DNA, 120 bp, synthetic construct
  source 1..120: mol_type = other DNA
ggtgtcaggagtttgagaccggcctggccaacatggcgaaacaccatctcaagtaaaaatacaaaaattagccaggcatggcggtgcacgcctgtagtcccagctactggggagactaag

SEQ ID NO: 23242 - DNA, 120 bp, synthetic construct; identical to SEQ ID NO: 7253
  source 1..120: mol_type = other DNA

SEQ ID NO: 23243 - DNA, 120 bp, synthetic construct
  source 1..120: mol_type = other DNA
cttatagcctagtattgtataaaatgtaaaaaggaaatagcatgtctgtggacaaactgggaagggagtaagaggcagggcacgcatgaaaattctcacggattttccaaagcagaagcg

SEQ ID NO: 23244 - DNA, 120 bp, synthetic construct
  source 1..120: mol_type = other DNA
tacaattaggcactttaaccctatgtacagggtatcttgacaatattgatgtttcttagggaatatctaaaattaaaacaataataatgtcttttcctcatctttctcttacccattcac

SEQ ID NO: 23245 - DNA, 120 bp, synthetic construct; identical to SEQ ID NO: 7254
  source 1..120: mol_type = other DNA

SEQ ID NO: 23246 - DNA, 120 bp, synthetic construct
  source 1..120: mol_type = other DNA
ggaaagcctgtgaaagccagtccagggagtctaggtaacaggcagccaagagcctttccctcctcagcactgctctcaagaccctggactccacctccaaaccccgcatgtgagattctc

SEQ ID NO: 23247 - DNA, 120 bp, synthetic construct
  source 1..120: mol_type = other DNA
atgggcttttataagcccctctccactgtctgttacctcactggcaaagccgggatactaatgcctgtacggggttgtgcacttctgtgaaactcgctgcactcctgaaatactctccgt

SEQ ID NO: 23248 - DNA, 120 bp, synthetic construct
  source 1..120: mol_type = other DNA
gatgcaggagatgtaatcaaaggtggtcccaaggtacaaataggctattgacaagtgaagggaaggacactaccagaaggagaagctcgaaaaagacgacaggcaggatagcatgatgta

SEQ ID NO: 23249 - DNA, 120 bp, synthetic construct
  source 1..120: mol_type = other DNA
tgctaagctagcacctgatgcgaagtcactgaggggtaatgagcagtggaatgatgtgactggagctgcatgctgaaattcgcatcagtgatcccagaataaatacaaaaagagccaagg

SEQ ID NO: 23250 - DNA, 120 bp, synthetic construct; identical to SEQ ID NO: 7255
  source 1..120: mol_type = other DNA

SEQ ID NO: 23251 - DNA, 120 bp, synthetic construct
  source 1..120: mol_type = other DNA
gctactcacaccaaacctaagaggtaagtctcaaaaccgcagtactgagaggtttaggaacttgtccaaagtcgcgcaactagtgacgggtagagctgaagcacgtccccagatgggctg

SEQ ID NO: 23252 - DNA, 120 bp, synthetic construct
  source 1..120: mol_type = other DNA
accgcttgtgccgtaccatgttgtgtatcctgacatgggaaagggaagtcttaagtgtgacgtgctattcctgggatatgtattaggcaaatatgaagcaaacagacaattcactcttct

SEQ ID NO: 23253 - DNA, 120 bp, synthetic construct; identical to SEQ ID NO: 7256
  source 1..120: mol_type = other DNA

SEQ ID NO: 23254 - DNA, 120 bp, synthetic construct
  source 1..120: mol_type = other DNA
actttgaaaacaacacagttttcttgtaccctgggagatgagtttgaagaaaccacagctgatggcagaaaaacacagactgtctgcaactttacagatggtgcattggttcagcatcag

SEQ ID NO: 23255 - DNA, 120 bp, synthetic construct
  source 1..120: mol_type = other DNA
catcatcactttggacaggagttaactaagagaatgaccaagctcagttcaatgagcaaatctccatactgtttctttcttttttttttcattactgtgttcaattatctttatcacaaa

SEQ ID NO: 23256 - DNA, 120 bp, synthetic construct
  source 1..120: mol_type = other DNA
aaagaacactacaataaaaaaattgtttaaaagaaatgtacaccttttccaataatcctcttgctttagattttccacatagaagtctgagcaggcagagatgtccacatgtagatccag

SEQ ID NO: 23257 - DNA, 120 bp, synthetic construct
  source 1..120: mol_type = other DNA
ggtttgctccacaaagaacacggcttatcaggagctcatgggcctctgtgtcctcagtgctttcccctcaaacatccagttaccactaatggcactgacaaaacacacaaaggaagtaga

SEQ ID NO: 23258 - DNA, 120 bp, synthetic construct; identical to SEQ ID NO: 7257
  source 1..120: mol_type = other DNA

SEQ ID NO: 23259 - DNA, 120 bp, synthetic construct
  source 1..120: mol_type = other DNA
acctatcacaagcccttttctcttagaatggcactttctaccacatggacttccctcttctgccttgagatagttgcaggcatgctagcttctttttaggcttgaaggactgtgttcatg

SEQ ID NO: 23260 - DNA, 120 bp, synthetic construct
  source 1..120: mol_type = other DNA
tccccatgactgtttaacgtaactgacctttcttaaaatgaacaagtcattgttgtcggcttcaaaggaaagtgaaacaaacaaaatacccaacaacaacaaaccagacacgtccaagat

SEQ ID NO: 23261 - DNA, 120 bp, synthetic construct
  source 1..120: mol_type = other DNA
agtcctccatgactgctgcctcaaaacccaggtcctggatgaactgagctatctcgaggggctggatgacctctgggtcatacttgatctctgcctttcctgccatcaaggcaaccaaca

SEQ ID NO: 23262 - DNA, 120 bp, synthetic construct; identical to SEQ ID NO: 7258
  source 1..120: mol_type = other DNA

SEQ ID NO: 23263 - DNA, 120 bp, synthetic construct
  source 1..120: mol_type = other DNA
agtagcatgatctcggctcactgcaacctctgcctccagggttcaagtgattctcctgcctcagcctcctgagtagctggggttacaggtgcgtgccaccatgcccagctaatttttgta

SEQ ID NO: 23264 - DNA, 120 bp, synthetic construct
  source 1..120: mol_type = other DNA
ggtgatcctaatgtacagggaagtctgacaaccactattctagaagaacaatgcttctcaaactttaatggacatatgaatcacccgaggaccttgttaaaatagagcttctgactagtc

SEQ ID NO: 23265 - DNA, 120 bp, synthetic construct; identical to SEQ ID NO: 7259
  source 1..120: mol_type = other DNA

SEQ ID NO: 23266 - DNA, 120 bp, synthetic construct
  source 1..120: mol_type = other DNA
aaaaaaagcctcgttcaaataaatgaaaggaaggaagtgcttcagaaaggatgccacataggataaaaatgaggattcaagtcaggaacagaaacataggctataggagattataggcta

SEQ ID NO: 23267 - DNA, 120 bp, synthetic construct
  source 1..120: mol_type = other DNA
atgtcatctgaattcagggctgattctaagggccagggagttcaagtaaaaagacacatcactggggtaagaaaagagaaagtgattctggtggcaaggtagagtcatggttaagagatt

SEQ ID NO: 23268 - DNA, 120 bp, synthetic construct
  source 1..120: mol_type = other DNA
acactctctggtttacaggaacaacaagaaagaatatttgaaattggaacttctatacaaaatgcaggttatttattcattttatagtaaggggttgatgggatgggagggaacaaaata

SEQ ID NO: 23269 - DNA, 120 bp, synthetic construct
  source 1..120: mol_type = other DNA
cttaaagaacacaatgccagttatacaaggacattagacaaacatttatgctatataatgaacttgctacctggttatcagggctactgataaacacagttgctgggtattctgaaggga

SEQ ID NO: 23270 - DNA, 120 bp, synthetic construct; identical to SEQ ID NO: 7260
  source 1..120: mol_type = other DNA

SEQ ID NO: 23271 - DNA, 120 bp, synthetic construct
  source 1..120: mol_type = other DNA
aggtgtaccatctgtagtttgcaccatggaattcccagcactgtggtttccaagagggttagtagaacagctttctaggataaaatgtcagaaaatattcaaattagaagagcaaataat

SEQ ID NO: 23272 - DNA, 120 bp, synthetic construct
  source 1..120: mol_type = other DNA
cagagctccctgctgttgttaatctctggggttcttcccattgcctatttggatttccagctctctaatacctttgtaaatagttctctatattaaatccttccactgagctaccccgta

SEQ ID NO: 23273 - DNA, 120 bp, synthetic construct; identical to SEQ ID NO: 7261
  source 1..120: mol_type = other DNA

SEQ ID NO: 23274 - DNA, 120 bp, synthetic construct
  source 1..120: mol_type = other DNA
aatacctcttcggctaaataaaattctcataatcctgcccaattaaaaaaatcactattcttttctttctaggtttatttaatcaaatccaattattctgtaatatgtaagttcagtgct

SEQ ID NO: 23275 - DNA, 120 bp, synthetic construct
  source 1..120: mol_type = other DNA
tctattgtgttttccttattgatttttgttttaaagaaactccttcctgaaacttgatacaaaagacaaagcacaaaatggggccaggccactccacatgaatgcccactcccttcagca

SEQ ID NO: 23276 - DNA, 120 bp, synthetic construct
  source 1..120: mol_type = other DNA
ccatccctgagcactgagctgccagtgggcttgcccacgccactgaaagcagctcttcttagtgttgggcccgctgctccctacagtaccgagctccagccaaaaggctgaggaagccag

SEQ ID NO: 23277 - DNA, 120 bp, synthetic construct; identical to SEQ ID NO: 7262
  source 1..120: mol_type = other DNA

SEQ ID NO: 23278 - DNA, 120 bp, synthetic construct
  source 1..120: mol_type = other DNA
ctaattctttcccatctcacaatcactctttctaggtctctgtcatcttcccacactctgcatttccggccccacactctccctcaaaattcaaggcccttctatcccactgtcctccag

SEQ ID NO: 23279 - DNA, 120 bp, synthetic construct
  source 1..120: mol_type = other DNA
tctttctcacccggcctcctacgtggtctcattgcctccatggacactgtactgtgacaccacaccagtcttctaaaatataatctgacttcgtgcttcctctgattaaaacccatgatg

SEQ ID NO: 23280 - DNA, 120 bp, synthetic construct
  source 1..120: mol_type = other DNA
tcaagaccagcctgggaaacacagcaacactccgtctctacaaaaaaataaaaataaaaaatgagcccggtgtggtggtgcacacctgtagtcccagctactcaggaggctgaggtgcga

SEQ ID NO: 23281 - DNA, 120 bp, synthetic construct
  source 1..120: mol_type = other DNA
aatataaaagcctggtggctccctcacctttacctcttctcttatattcatcaaacagggagaaaaaaatcatttataaatcctttccttaactctcatttttaccagcatggtctctag

SEQ ID NO: 23282 - DNA, 120 bp, synthetic construct; identical to SEQ ID NO: 7263
  source 1..120: mol_type = other DNA

SEQ ID NO: 23283 - DNA, 120 bp, synthetic construct
  source 1..120: mol_type = other DNA
tcacaggtgtggcatcgaggctttctaaaaagaggaagagccacctaagcaaccacgtgagcatgctcagcacccctgccatgtgatgccctgtggcaccggagtccccactggcagaag

SEQ ID NO: 23284 - DNA, 120 bp, synthetic construct
  source 1..120: mol_type = other DNA
tacaaaatcccaactacatgaaaagcaaaatctagacacttggagattatatttcctctatcttaacaaatttaacatgcaaggaaagtttgcaggattttgttccactgttgacatggg

SEQ ID NO: 23285 - DNA, 120 bp, synthetic construct; identical to SEQ ID NO: 7264
  source 1..120: mol_type = other DNA

SEQ ID NO: 23286 - DNA, 120 bp, synthetic construct
  source 1..120: mol_type = other DNA
tggacctggtttctcggtggggagccaggggaatgagaactggaagacctgtgatctgtcccactcccttcggctccatcaggaagagaaactttaaaattcccaggtggaagtgcctcg

SEQ ID NO: 23287 - DNA, 120 bp, synthetic construct
  source 1..120: mol_type = other DNA
atattcaagacgcaagacttacaatgcattccatctattctcagttggagggtgaccacatggcttccttggtgccccaaggtctcagaattattaaaattctggttagcagaagataaa

SEQ ID NO: 23288 - DNA, 120 bp, synthetic construct
  source 1..120: mol_type = other DNA
tcgggctgaatgagataaggctgataagtgatgacggcctcttggttgctgagtgagactttgactctcactactccttgcagtttccggaccttgccttcaatggagctgacacaggac

SEQ ID NO: 23289 - DNA, 120 bp, synthetic construct; identical to SEQ ID NO: 7265
  source 1..120: mol_type = other DNA

SEQ ID NO: 23290 - DNA, 120 bp, synthetic construct
  source 1..120: mol_type = other DNA
ttcttcattgctggttcccaggcacgggtaggcaaagaaagcttagataagatctaaaaagaaaagaaataacattttttaaccttgaaaccaaatattttctacaacatcccagcttct

SEQ ID NO: 23291 - DNA, 120 bp, synthetic construct
  source 1..120: mol_type = other DNA
ttcttctctgacagaagctaactgtctgtcctccttagtgaaatgtcgttctcacacaacagacgtggaggattctgagggaaagaaggaaagcacgacacagctttacatatggaatgc

SEQ ID NO: 23292 - DNA, 120 bp, synthetic construct
  source 1..120: mol_type = other DNA
ctcaaactttgggggtcctgctgaaatacaaaccccagaatagtcaacaccttacttctatatctctttctaggggtgtctgtctgattatcttagcagaggttaaatgtgcttaacacc

SEQ ID NO: 23293 - DNA, 120 bp, synthetic construct; identical to SEQ ID NO: 7266
  source 1..120: mol_type = other DNA

SEQ ID NO: 23294 - DNA, 120 bp, synthetic construct
  source 1..120: mol_type = other DNA
ttccatgtgcttcagaaatttgggaacaggcctttatacatgatacatcataaaaaagcacatttctctctacttgtacacaatcctgcttgtcttcagatgaatctcctttacatggaa

SEQ ID NO: 23295 - DNA, 120 bp, synthetic construct
  source 1..120: mol_type = other DNA
tatccacaaaggtttgggattaataattacatagaattttaaatattcactgtagcatttcctaagagaaaaaagggaataattaagtaatttgggggacagcagttcaaaagatattgc

SEQ ID NO: 23296 - DNA, 120 bp, synthetic construct
  source 1..120: mol_type = other DNA
gctgatgtagcctaccaaacacctgagctgtatggtgtagcctgttgctcctaggccacacacctgtacagcatgttactgtactgaatactgtaggcaattgtaacacaatggtaagta

SEQ ID NO: 23297 - DNA, 120 bp, synthetic construct; identical to SEQ ID NO: 7267
  source 1..120: mol_type = other DNA

SEQ ID NO: 23298 - DNA, 120 bp, synthetic construct
  source 1..120: mol_type = other DNA
ttgcaccactgtactctagcctgggagacaaaacaagaccctgtctctgaaacaataataataatttattaattaacctcagcttgctgtaacttttttacttcataaacgtttaatttt

SEQ ID NO: 23299 - DNA, 120 bp, synthetic construct
  source 1..120: mol_type = other DNA
ttttaaactgtttaagcatttttgttaaaaactaagacacaaacacatacattagcctcggcctacacatggtcaggatcatcagtataactgtcttccatctctacatcttctcccact

SEQ ID NO: 23300 - DNA, 120 bp, synthetic construct
  source 1..120: mol_type = other DNA
taagtagaaggagtacactctaaaataacaatagagtatagtaaatacataaaccagtaacatagtcatttattatcgagtattatgtactgtacagaattgtatgtgctctatttttat

SEQ ID NO: 23301 - DNA, 120 bp, synthetic construct; identical to SEQ ID NO: 7268
  source 1..120: mol_type = other DNA

SEQ ID NO: 23302 - DNA, 120 bp, synthetic construct
  source 1..120: mol_type = other DNA
gagaaaagcctaaatatgaccaacaaaccagaacaaaaccaagaaaatccaaaagctataaaagatttgacataactaaacacaataaggacaaaaaattattcaaatgaagtcaaaaga

SEQ ID NO: 23303 - DNA, 120 bp, synthetic construct
  source 1..120: mol_type = other DNA
gttcatcaaaaaagaaatgcatatggtttttaaaatacatgggaaaatattaaaaagaaatgtaacattccaaccacactggcacagtcttcctacattgctagtgggagtgtaacctct

SEQ ID NO: 23304 - DNA, 120 bp, synthetic construct
  source 1..120: mol_type = other DNA
cccaataaatatatttgttcatgtgcaaaacaaagcatgccatggagatattaaatgctgagaaagattagaaacatcaatgtccatcaataagaggctagttaattactgtacagccat

SEQ ID NO: 23305 - DNA, 120 bp, synthetic construct; identical to SEQ ID NO: 7269
  source 1..120: mol_type = other DNA

SEQ ID NO: 23306 - DNA, 120 bp, synthetic construct
  source 1..120: mol_type = other DNA
gggacccggttctcttccatgtggcttctctttatgactaggtggggacctcacagctgggggcttctgggtactgagagggagtgtcacaatagcaagcactcctctagaacacatttc

SEQ ID NO: 23307 - DNA, 120 bp, synthetic construct
  source 1..120: mol_type = other DNA
acagtcaatatgggcaggaattacacggagcttgaatacaagggtgtgtagttcactgagagggctacaattctgtcatggtgctaggactacctgtgtgaaacaagagaatatcataca

SEQ ID NO: 23308 - DNA, 120 bp, synthetic construct
  source 1..120: mol_type = other DNA
gcaaaagctagtacagaatttgaggaagattaggcagctgaaggggaccaggtggctgggatacagagaattactttcactatataatttaactgtacaatacacacattaccaaaatct

SEQ ID NO: 23309 - DNA, 120 bp, synthetic construct
  source 1..120: mol_type = other DNA
actaagaagatattcaaagacattcattttcatatagtaccttattaggcaaaaacctcttcctcataataagaaagacataaccctcaaccatctagtttgttggaaaaacaaatccct

SEQ ID NO: 23310 - DNA, 120 bp, synthetic construct; identical to SEQ ID NO: 7270
  source 1..120: mol_type = other DNA

SEQ ID NO: 23311 - DNA, 120 bp, synthetic construct
  source 1..120: mol_type = other DNA
aagatgatccttgggggaaaaaactctcctgatgagttttaaaaaacaaacacaggtttagatttaagggcccatcaaagagtcacagaaatggagagcaggccaaggttccacatggat

SEQ ID NO: 23312 - DNA, 120 bp, synthetic construct
  source 1..120: mol_type = other DNA
tctagcttttgaatttttgataaatgatggtagacgtcaggatgagaaaggactggaagcagaggaggccacagaagggagtccaaaagtgaatttcaattctctgctacctctctaggt

SEQ ID NO: 23313 - DNA, 120 bp, synthetic construct
  source 1..120: mol_type = other DNA
caagatgaagccagaaaggaaaacaaaatctctggataagccattctgatatgaagaaatcagaaactgggtggcatgttttcatgaaggctttcaaagccaatctgatagtgaaaaagc

SEQ ID NO: 23314 - DNA, 120 bp, synthetic construct; identical to SEQ ID NO: 7271
  source 1..120: mol_type = other DNA

SEQ ID NO: 23315 - DNA, 120 bp, synthetic construct
  source 1..120: mol_type = other DNA
tgattctgagtgttattttatgaggatggcattttatatccctcatgcttagggcaattctagaaggagatattatcaccatttcactgttgaaactgactcagaagcttatccaagagc

SEQ ID NO: 23316 - DNA, 120 bp, synthetic construct
  source 1..120: mol_type = other DNA
ttttagagtaaccttttcttttcagccatgttaattataggaagagactacaatgcagaaaagtgaaatgaaaataaacagccatacctgcaagcagcaagccaggctaacacacaagag

SEQ ID NO: 23317 - DNA, 120 bp, synthetic construct
  source 1..120: mol_type = other DNA
ccactttcctcaatatccctaatcaaggcaaccacacttacaggagaaggcacacaagacacaagtcagagaagacaacagctctggaccacgtacatcctgaatatctggaatgagtac

SEQ ID NO: 23318 - DNA, 120 bp, synthetic construct; identical to SEQ ID NO: 7272
  source 1..120: mol_type = other DNA

SEQ ID NO: 23319 - DNA, 120 bp, synthetic construct
  source 1..120: mol_type = other DNA
ccgtttgtctaaggcaagcctgtccaacccatggcctgcaagccacatgcagcccaggatggctttgaatacggcccaacacaaatttgtaaactttcttaaaacataatgagatttttt

SEQ ID NO: 23320 - DNA, 120 bp, synthetic construct
  source 1..120: mol_type = other DNA
acacccctgctctaaggcaaggaagaaaatgttttgttaaaccattctaatttgggcaacaatattattgactgtgataaagataacaacaatgatgaattgatgacacttttgtaaatt

SEQ ID NO: 23321 - DNA, 120 bp, synthetic construct
  source 1..120: mol_type = other DNA
aatccaggcctcagtttcctttaggtataaaggtttgtgttttggatagttttaagtgtagacacagggcacatgtatgcttttaattcagttcttcaattaagatgatctttggaggaa

SEQ ID NO: 23322 - DNA, 120 bp, synthetic construct; identical to SEQ ID NO: 7273
  source 1..120: mol_type = other DNA

SEQ ID NO: 23323 - DNA, 120 bp, synthetic construct
  source 1..120: mol_type = other DNA
gggaagccgcgagggactgtgccatgaggaatggtgcactctggtccaggcactacacttttcccacggtcttcacaacccacagaccaggagattccctcgggtgcctacaccaccagg

SEQ ID NO: 23324 - DNA, 120 bp, synthetic construct
  source 1..120: mol_type = other DNA
gcctggaaaggtggctgaagccagggagccaagtggtctagctcagcggatcccacccctacagagcccagcaagttaagatccactggtttgaaattctcactgccagcacaacagtct

SEQ ID NO: 23325 - DNA, 120 bp, synthetic construct
  source 1..120: mol_type = other DNA
gagccctccgcagctcagcaaagctactgtagctagactgcctctctagattcctcttctctgggcagggcatctctgaaaaaaaggcagcagccccagtcaggggcttatagatgaagc

SEQ ID NO: 23326 - DNA, 120 bp, synthetic construct; identical to SEQ ID NO: 7274
  source 1..120: mol_type = other DNA

SEQ ID NO: 23327 - DNA, 120 bp, synthetic construct
  source 1..120: mol_type = other DNA
ctagcagacctgcagcagagggacctgactgttagaaggaaaactaacaaacagaaaggtatagcatcaatatcaacaaaaaggacgtccactcagaaacgccatccgaaggtcaccaac

SEQ ID NO: 23328 - DNA, 120 bp, synthetic construct; identical to SEQ ID NO: 7275
  source 1..120: mol_type = other DNA

SEQ ID NO: 23329 - DNA, 120 bp, synthetic construct
  source 1..120: mol_type = other DNA
tatcaatagccaaatcgatcaagcagaagaaagaatatcagcgactgaagatcaacttaatgaaataaagcgtgaagacaagatagagaaaaaagaatgaaaaggaacaaacaaagcctc

SEQ ID NO: 23330 - DNA, 120 bp, synthetic construct
  source 1..120: mol_type = other DNA
cccaacctagcaagacaggccaacattcaaattcaggaaatacagagaacacaacaaagatactcctcaagaagagcaaccccaagacacataatcgtcagattcaccaagcttgaaatg

SEQ ID NO: 23331 - DNA, 120 bp, synthetic construct
  source 1..120: mol_type = other DNA
aatattcgacattcttaaagaaaataattttcaacccagaatttcatatccagccaaactaagcttcataagtgaaggagaaataaaattctttacagacaagcaaatgctgagagattt

SEQ ID NO: 23332 - DNA, 120 bp, synthetic construct
  source 1..120: mol_type = other DNA
gaaactgcatcaactaatagccaaaataaccagctagcatcataatgacaggatcaaattcacacataacaatactaaccttaaacgtaaacaggctaaatgccccaattaaaagacaca

SEQ ID NO: 23333 - DNA, 120 bp, synthetic construct; identical to SEQ ID NO: 7276
  source 1..120: mol_type = other DNA

SEQ ID NO: 23334 - DNA, 120 bp, synthetic construct
  source 1..120: mol_type = other DNA
taacaccccactgtcaatattagacagatcaatgaggcagaaaattaacaacgatattcagggcttgaaatcagctctggaccaaacagacttaatagacatctacagaactctccaccc

SEQ ID NO: 23335 - DNA, 120 bp, synthetic construct
  source 1..120: mol_type = other DNA
tctctcagatcacagtgcaatcaaattagaactcaggattaagaaactcactcaaaactgtaaaactacatggaaactgaacaacctgctcctgaatgactactgggtaaataatgaaat

SEQ ID NO: 23336 - DNA, 120 bp, synthetic construct; identical to SEQ ID NO: 7277
  source 1..120: mol_type = other DNA

SEQ ID NO: 23337 - DNA, 120 bp, synthetic construct
  source 1..120: mol_type = other DNA
gaatcaaatcgatgcaataaaaaatgataaaggagatatcaccaccgatcccacagaaatacaaactaccatcagagaatactacaaacacctctaagcaaatgaactagaaaatctaga

SEQ ID NO: 23338 - DNA, 120 bp, synthetic construct
  source 1..120: mol_type = other DNA
caaaaaaagtctaggatcaggtggatacacagtcaaattctaccagaggtataaagaggagctggtaccattccttctgaaactattccaaacaatagaaaaagagggactcctccctaa

SEQ ID NO: 23339 - DNA, 120 bp, synthetic construct; identical to SEQ ID NO: 7278
  source 1..120: mol_type = other DNA

SEQ ID NO: 23340 - DNA, 120 bp, synthetic construct
  source 1..120: mol_type = other DNA
tctcaaaataataacagctatttatgacaaacccagagccaatatcacagtgaatgggcaaaaactggaagcactccttttgaaaactggcacaagacaaggatgccctctctcaccact

SEQ ID NO: 23341 - DNA, 120 bp, synthetic construct
  source 1..120: mol_type = other DNA
atatttagaaaaccccatcatctcagcccaaaatctccttaagctgataagcaatttcagcaaagtctcaggatacaaaatcaatgtgcaaaaatcacaagcatttctatacaccaataa

SEQ ID NO: 23342 - DNA, 120 bp, synthetic construct
  source 1..120: mol_type = other DNA
ctcaaggaaataagagaggacacaaacaaatggaaaaacattccatgctcatgcataggaacaatcaatatcgtgaaaatggccatactgcccaaagtaatttatagattcaatgctatc

SEQ ID NO: 23343 - DNA, 120 bp, synthetic construct
  source 1..120: mol_type = other DNA
ggcatcacactacctaacttcaaactatactacaaggctatagtaaccaaaacagcatggtactggtaccaaaacagagatatagaccaatggaacagaacatgggcctcagaaataaca

SEQ ID NO: 23344 - DNA, 120 bp, synthetic construct; identical to SEQ ID NO: 7279
  source 1..120: mol_type = other DNA

SEQ ID NO: 23345 - DNA, 120 bp, synthetic construct
  source 1..120: mol_type = other DNA
caggcaacctacagaatgggagaaaatttttgcaatctatccatctgacaaagggctaatatccaggatctacaaggaacttaaacaaatttacaagaaaaaaaaaacaaccccatcaaa

SEQ ID NO: 23346 - DNA, 120 bp, synthetic construct
  source 1..120: mol_type = other DNA
ataccatctcatgccagttaggatggcaatcattaaaaagtcaggaaacaatagatgctggagaggatgtagagaaataggaacacttttacactattggtgggagtgtaaattagttca

SEQ ID NO: 23347 - DNA, 120 bp, synthetic construct
  source 1..120: mol_type = other DNA
cacacgcacacatatgtttattgtggcactactcacaatagcaaagacttggaaccaacccaaatgcccattaatgatagactggataaagaaaatgtggcacatatacaccatggaata

SEQ ID NO: 23348 - DNA, 120 bp, synthetic construct
  source 1..120: mol_type = other DNA
cataagtgggagctaaacaatgagaacacatggacacagggaggggaacatcacacactggggcctgtcgggggtgggggggctaggggagggataccattaggagaaatacctaatgta

SEQ ID NO: 23349 - DNA, 120 bp, synthetic construct; identical to SEQ ID NO: 7280
  source 1..120: mol_type = other DNA

SEQ ID NO: 23350 - DNA, 120 bp, synthetic construct
  source 1..120: mol_type = other DNA
gtactctacatagttttctccattttactgataaggcaaactaattattaaaagtagtgtacatattcccccaagcccttcactctggccttgaatcctgtttcacaatggtccaaaaag

SEQ ID NO: 23351 - DNA, 120 bp, synthetic construct
  source 1..120: mol_type = other DNA
ctgaggacagactgtaaactttctgggtaattctgtgcaaatgactattcattgcctatttgcttctctcaaccacagcaagggaaaatattaacccttactgagaaacaaaatgtagca

SEQ ID NO: 23352 - DNA, 120 bp, synthetic construct
  source 1..120: mol_type = other DNA
attcacaaactataagacagggtatcgtctccaaggagcacttcacaatattatcttagaaaacccattcacaatctcgtgctacacagctttataatcaaccgtttcagagaatgtgct

SEQ ID NO: 23353 - DNA, 120 bp, synthetic construct
  source 1..120: mol_type = other DNA
gtattggtttctgcctagaattataggtatgacacataaaacaaatgtattcctttaagacatgtacaaacctaatgtttataaattagcactactctataaatgcatgatgggaaatgc

SEQ ID NO: 23354 - DNA, 120 bp, synthetic construct; identical to SEQ ID NO: 7281
  source 1..120: mol_type = other DNA

SEQ ID NO: 23355 - DNA, 120 bp, synthetic construct
  source 1..120: mol_type = other DNA
gtccatcgaacagaaatctatgtcatggttttttaaaaataggtgaatttacatgtattgacgtggaaagacttccatgatgttaaaaagaaaaaaaagttgcagaactgtattaagaca

SEQ ID NO: 23356 - DNA, 120 bp, synthetic construct
  source 1..120: mol_type = other DNA
acaaaagcaaataaaataatagcgaatgctgatgattccataatgacagataacttctttaaatgactagatcacaccacttcatttattgtttttcctttattttagaagggatatatc

SEQ ID NO: 23357 - DNA, 120 bp, synthetic construct
  source 1..120: mol_type = other DNA
tcaagagattgagacgatcctggacaacacggtgaaacctcatctctactaaaaatacaaatattagttgggcgtggtggcatgcacctgtagtcccagatattcaggagcctgaggcag

SEQ ID NO: 23358 - DNA, 120 bp, synthetic construct; identical to SEQ ID NO: 7282
  source 1..120: mol_type = other DNA

SEQ ID NO: 23359 - DNA, 120 bp, synthetic construct
  source 1..120: mol_type = other DNA
agtataaatctacttctagttcattcatttgttcactcagtcaatagcttgataccatggactgaactctgtcagatacaggatacgatgacaaattaaaacagcagccagtgtgcacct

SEQ ID NO: 23360 - DNA, 120 bp, synthetic construct
  source 1..120: mol_type = other DNA
aacagcagccaagcttggccaaagaagtcaacagagtcatgagtaaggaggcttaagcagttgtttctggaaacaaagggtaattctgtatacagctggaacaactttctagtaacctcc

SEQ ID NO: 23361 - DNA, 120 bp, synthetic construct
  source 1..120: mol_type = other DNA
ccattcctctccagctcaccattctgggcctgaaaggttgtctgtggaacctttgataggaacacctgggccaaagcacggagcccctgacttctactctggttagcgtgctcttatgga

SEQ ID NO: 23362 - DNA, 120 bp, synthetic construct; identical to SEQ ID NO: 7283
  source 1..120: mol_type = other DNA

SEQ ID NO: 23363 - DNA, 120 bp, synthetic construct
  source 1..120: mol_type = other DNA
aatataagcaaacaaatctgctaggcataaacagcaatttttaaatgttttattcatagcagcggcctttctgaacaacgtgccacctaaaagctaactttccattcactatgaattagc

SEQ ID NO: 23364 - DNA, 120 bp, synthetic construct
  source 1..120: mol_type = other DNA
tgtcatcagacggacctgggattaaatttttcaggaaacctaagctctcactcagctttctcgtctgttaaaggtggactgatgatacctactaaagttgttaaaatgattaagtgacaa

SEQ ID NO: 23365 - DNA, 120 bp, synthetic construct; identical to SEQ ID NO: 7284
  source 1..120: mol_type = other DNA

SEQ ID NO: 23366 - DNA, 120 bp, synthetic construct
  source 1..120: mol_type = other DNA
ggtatggtgtcaggtgcctgtagtcccagctactctggaggctgaggcaggagaatcacttgaacccaggagatggaggttgcagtgagccaagattacgccactgcactctatagcctg

SEQ ID NO: 23367 - DNA, 120 bp, synthetic construct
  source 1..120: mol_type = other DNA
agatagtatgtataatttgatcccatatttattttaaaaatatacattatgtaaacataaacatacatacacgtatacacattcatatttgttgggaaaacgactgctttttctttatac

SEQ ID NO: 23368 - DNA, 120 bp, synthetic construct
  source 1..120: mol_type = other DNA
ccagcactttgggagggggaggcaggaggatcatttgagcccaggagtttgagaccagcctgggcaacatagggagaccacatctctacaaataaagagaaactggaaatggtggcatgc

SEQ ID NO: 23369 - DNA, 120 bp, synthetic construct
  source 1..120: mol_type = other DNA
atgtcccaaaataaaaaacttagaaaaaaacaaacaaaggaaaaatagagttgcaactgtgctcagatagattactgggttatcacagtcctgtccagaccttcagacaacacatcaaac

SEQ ID NO: 23370 - DNA, 120 bp, synthetic construct; identical to SEQ ID NO: 7285
  source 1..120: mol_type = other DNA

SEQ ID NO: 23371 - DNA, 120 bp, synthetic construct
  source 1..120: mol_type = other DNA
tcacagattggtgctggccttaaaaatcaccagcacacgtcatatctcaaaacttcagatataggctggaaattgtaaagtaacagtttggacattttttaaaaatgcctcaagcatttt

SEQ ID NO: 23372 - DNA, 120 bp, synthetic construct
  source 1..120: mol_type = other DNA
caacatatgaaaaggctgattaaaagattaaacgctctgtcactctttaaaattctaagtgatttaacacattagtttagctactggcttaatacagtttaaagagacataaaatgaaat

SEQ ID NO: 23373 - DNA, 120 bp, synthetic construct; identical to SEQ ID NO: 7286
  source 1..120: mol_type = other DNA

SEQ ID NO: 23374 - DNA, 120 bp, synthetic construct
  source 1..120: mol_type = other DNA
caagtaccctgtgatttcaacgtatgtaaatctcttgcatagcacatttgaaagttcttttcacaaaatttcctttagtctttgggactttaaccaatgaacagcacaaaaataagtctt

SEQ ID NO: 23375 - DNA, 120 bp, synthetic construct
  source 1..120: mol_type = other DNA
tgctcagaaatgctgctaaaaggcaccatttttacaaaacgttatactgtcttacttttggacatgacctaacctttggagtaacaaaacttcaacttgcttaagaaaaggaacttcatt

SEQ ID NO: 23376 - DNA, 120 bp, synthetic construct
  source 1..120: mol_type = other DNA
acttttgcttcatagagtcttacaaaatattctgaaaataaaaagcaacaaaacccaaacttccaagccatggtgtaattaatcagcttgactcctgccaggtgctacattcacactctc

SEQ ID NO: 23377 - DNA, 120 bp, synthetic construct
  source 1..120: mol_type = other DNA
gactggaactcatttcccaggttccattcaaaactctctgtggaaattctccttcctctgacggtggagtgccttcctccacagtagacactggcctggctgaatgcctaaccccagggc

SEQ ID NO: 23378 - DNA, 120 bp, synthetic construct; identical to SEQ ID NO: 7287
  source 1..120: mol_type = other DNA

SEQ ID NO: 23379 - DNA, 120 bp, synthetic construct
  source 1..120: mol_type = other DNA
gtactgcacctatttgcttttgtttatctacaaccgtcccagcacttggcaccctctcactcaacacactgtgtgcagcactgcagatctttgcacacagcccatgcacaccctcaccca

SEQ ID NO: 23380 - DNA, 120 bp, synthetic construct
  source 1..120: mol_type = other DNA
tatgccacttccttttattaccaaactgctagcactttcttggaattgcttcagctgcctcttccacagctccaatgttggcagcgtgcagaatacttggtgagagaagtatttcctagg

SEQ ID NO: 23381 - DNA, 120 bp, synthetic construct
  source 1..120: mol_type = other DNA
ctcatctgtttaagcagcaccacggccaggaactaaggcacaattcaggcttctcaggctacctgctgttccacatggggattaataggaggagacacacgacactgtggtaattccagc

SEQ ID NO: 23382 - DNA, 120 bp, synthetic construct; identical to SEQ ID NO: 7288
  source 1..120: mol_type = other DNA

SEQ ID NO: 23383 - DNA, 120 bp, synthetic construct
  source 1..120: mol_type = other DNA
ctgttctctttgaggaaaggcaacaccaaggctggtccatgcaccaaagccccttcgtgcctgctttatcctgctgcttcttaccacacttgtggcggttgctatcacttctaaagcaca

SEQ ID NO: 23384 - DNA, 120 bp, synthetic construct
  source 1..120: mol_type = other DNA
caaaggaaaggtatatttgatgctaaaggccttgagccccaaccctagcctccctgccagaggccagcactgtggggctgtgcagctgcctctatgggagcccatgtaaatacatcaggt

SEQ ID NO: 23385 - DNA, 120 bp, synthetic construct
  source 1..120: mol_type = other DNA
gcatcagaagtagattttccaggtaactgaagctcatcgctttgagcattagattttttaaaaattttgtcattctgggtgaaaatattccccataagtgacatctatttttccgctgcc

SEQ ID NO: 23386 - DNA, 120 bp, synthetic construct; identical to SEQ ID NO: 7289
  source 1..120: mol_type = other DNA

SEQ ID NO: 23387 - DNA, 120 bp, synthetic construct
  source 1..120: mol_type = other DNA
ctcacagaatcatatttgtgatctggaaacagtttgggcagaaacaagaatgaagacccaggagaggagggattacaaggggcagaaaatttaatagtagaatacgattaaacaaacgag

SEQ ID NO: 23388 - DNA, 120 bp, synthetic construct
  source 1..120: mol_type = other DNA
tttcgcagattgagcacatggtgatgagtacaccaagatgagcggggagggtgggaagaaggcaagtctggggtaaacacagtggcttctcctttgctcccatagaatctaagagacgtg

SEQ ID NO: 23389 - DNA, 120 bp, synthetic construct
  source 1..120: mol_type = other DNA
caccatctaatccttcttatcctttaagtcctgcctctctgtggaatcctgctagcagctctctcccttatctgaattccagcatcactaatgtcaacatcagggtgccagcaggtggtc

SEQ ID NO: 23390 - DNA, 120 bp, synthetic construct; identical to SEQ ID NO: 7290
  source 1..120: mol_type = other DNA

SEQ ID NO: 23391 - DNA, 120 bp, synthetic construct
  source 1..120: mol_type = other DNA
tgctcagaatgtgctttctacctagaatttcatggtactttttgtcccccttaccacaacacaagggcaaactctatcagtccctcacatatttcttctaggtcttcaaggatttccttg

SEQ ID NO: 23392 - DNA, 120 bp, synthetic construct
  source 1..120: mol_type = other DNA
tcgccttcccagtctgtggatttttcctgtataaaaataaatatctctttggtgtcctaaacaatcttgttgcaacctgagaagcctgggcccaaaggcagatgggcagctcatgtttcc

SEQ ID NO: 23393 - DNA, 120 bp, synthetic construct
  source 1..120: mol_type = other DNA
gaaatccccaggccatccctcccaagatggggagaggagtcccggatcctgtgacaggacaggagggcagagcctgacattaaagctgcatatgttgggttcccaagaagagaacatgag

SEQ ID NO: 23394 - DNA, 120 bp, synthetic construct; identical to SEQ ID NO: 7291
  source 1..120: mol_type = other DNA

SEQ ID NO: 23395 - DNA, 120 bp, synthetic construct
  source 1..120: mol_type = other DNA
agactgaaacaactagctcagcaggactttcatatcagcttattaacaggagacaggcacaaacacacacatacctaagtaagctcactgaaggagtgctcttaaataaactgcacttgg

SEQ ID NO: 23396 - DNA, 120 bp, synthetic construct
  source 1..120: mol_type = other DNA
attacgaagagatgggatggccaaaaagagaaacaatgggattatcgaaaagtaaaagccaatgtttccatttcacagttcattccatgcaccttcgacttcgctggctgccctcatcat

SEQ ID NO: 23397 - DNA, 120 bp, synthetic construct
  source 1..120: mol_type = other DNA
ctctgattcagcaccacgaactgcgggaggacccgtgctgccacctggcagtccaactaccccctagtccgctcacccttcgctctccgagacagtggtcctatcccctctctggctcct

SEQ ID NO: 23398 - DNA, 120 bp, synthetic construct; identical to SEQ ID NO: 7292
  source 1..120: mol_type = other DNA

SEQ ID NO: 23399 - DNA, 120 bp, synthetic construct
  source 1..120: mol_type = other DNA
ctgggaagtcccagatcaaggagccagcagattcagtatccggtgaaggctgttctttgcttcacagatggtgccttgctgctgcatcctcaaatggcagaagagcaaagtggctccctc

SEQ ID NO: 23400 - DNA, 120 bp, synthetic construct
  source 1..120: mol_type = other DNA
atttggcagggacattaacattcagactatatcaccacctatagcctacaattcccaactctatacttacagacccaaatgcctcatcaccatctcctcggtgtttcatatgcatcgcaa

SEQ ID NO: 23401 - DNA, 120 bp, synthetic construct
  source 1..120: mol_type = other DNA
ccctctttgataagaataatctcatccaggtgcaggggctcatgcctgtaatcccagcactttggaaggccaaggcaggaggaccacttgagcccagatgtttcagaacagcttgggcaa

SEQ ID NO: 23402 - DNA, 120 bp, synthetic construct; identical to SEQ ID NO: 7293
  source 1..120: mol_type = other DNA

SEQ ID NO: 23403 - DNA, 120 bp, synthetic construct
  source 1..120: mol_type = other DNA
tgcactattgcttagaatctcctaagcgacctcctggcttctgctcttagcccctaaagtctattctcaacacaaaagtcagaatacctataagaggaagtcacaagatgtcattcctct

SEQ ID NO: 23404 - DNA, 120 bp, synthetic construct
  source 1..120: mol_type = other DNA
aaaatccttacaatgatgacctgtaagactatacagttgcagccctcccattaccttccaacttatcctcacactcctggccccttactcattctgaaacagtcattctgatcttgctgt

SEQ ID NO: 23405 - DNA, 120 bp, synthetic construct; identical to SEQ ID NO: 7294
  source 1..120: mol_type = other DNA

SEQ ID NO: 23406 - DNA, 120 bp, synthetic construct
  source 1..120: mol_type = other DNA
gctggagtgcagtggcatgatcttggctcactgcagcctccgcctccctggctcaagtgatcctcccatctcagcctcccaagtacctggggctacaggtgcgtgccacgatgcccagct

SEQ ID NO: 23407 - DNA, 120 bp, synthetic construct
  source 1..120: mol_type = other DNA
gtctgaaccaccacacacagcctcttcacatctattttgttcagtcactgctttattccaaggtctaaaacagtgcttgacacttaaagaatttctcaataagcatttgttaaatgaatg

SEQ ID NO: 23408 - DNA, 120 bp, synthetic construct
  source 1..120: mol_type = other DNA
ctttgagaggctgaaatgggaggatcacttgagcccaggagtttaaaaccagcttgggcaacatggtgaaaccgtgtctctaaaaaaaaaaatgtttttaattatctgggcatggtggca

SEQ ID NO: 23409 - DNA, 120 bp, synthetic construct; identical to SEQ ID NO: 7295
  source 1..120: mol_type = other DNA

SEQ ID NO: 23410 - DNA, 120 bp, synthetic construct
  source 1..120: mol_type = other DNA
atagcattatgcctaaaaaaatacatatactttaattttaaaatatgttatggcaaaaaaatgctaacaatcatctgagctgtcagtaagtcatggtctttctgctagtggaaggccttg

SEQ ID NO: 23411 - DNA, 120 bp, synthetic construct
  source 1..120: mol_type = other DNA
ttcttatcatttatctgttcactagagtagtacttactttccttcaaggactttacctttgcattaaaaactttgctaactgtttggcaccagaggcctaggtttcagcctatctcagct

SEQ ID NO: 23412 - DNA, 120 bp, synthetic construct
  source 1..120: mol_type = other DNA
tgttgtgtcttaggaaatagggagacctgagagggagggagagacagagacatgaactgctggagtcagtggagcagtcagaatgtacacatttatagattaactttgccatcttacacg

SEQ ID NO: 23413 - DNA, 120 bp, synthetic construct
  source 1..120: mol_type = other DNA
agtatatgctgttacacaaatggcgtcagtagacttgctcagtgcagggttgccacaaaccttcaactggtaaaaaaaaaaaatacagcatctgcaaaagggcaataaagcaaaggtttg

SEQ ID NO: 23414 - DNA, 120 bp, synthetic construct; identical to SEQ ID NO: 7296
  source 1..120: mol_type = other DNA

SEQ ID NO: 23415 - DNA, 120 bp, synthetic construct
  source 1..120: mol_type = other DNA
ttacctgaggtcaggagttcaagaccagcctggccaacatggtgaaaccccgtctctactaaaaaaaattacaaaaattagccgggcatggtggcacatgcctgtaaacccagctactcg

SEQ ID NO: 23416 - DNA, 120 bp, synthetic construct
  source 1..120: mol_type = other DNA
agcaggattatccttgcctttcccttatttcagctatgtgcaacttgaaatacacggctgcagcaccaacaactgttttaggccatgaggtatcaggaagatggagttgcatcctaactt

SEQ ID NO: 23417 - DNA, 120 bp, synthetic construct
  source 1..120: mol_type = other DNA
gtgttaacaaatcattaatcaggaagcaattaggctgagatgactccaacatttcaggttcctatgtaagcaaaccaaacccaactcaatataaacagtaaaacaaagcttagcttaacc

SEQ ID NO: 23418 - DNA, 120 bp, synthetic construct; identical to SEQ ID NO: 7297
  source 1..120: mol_type = other DNA

SEQ ID NO: 23419 - DNA, 120 bp, synthetic construct
  source 1..120: mol_type = other DNA
agtagccacactccacagctcttgaactctgctcagctgcagttagcaccacatggacaccaaggtttatagcctgcaccttccagagcagcagcccaagccacacctgagccgcacctg

SEQ ID NO: 23420 - DNA, 120 bp, synthetic construct
  source 1..120: mol_type = other DNA
actctgggcctgtgacaggaggagcagtcccaaagacctcccaaatccctttaaggtcattcttcccagcagcctttttattctttatgatctagccaggctgaaaattttccaaatctt

SEQ ID NO: 23421 - DNA, 120 bp, synthetic construct
  source 1..120: mol_type = other DNA
ttccaccaaatatcctagttcatcactcttcatctagttcatcatctatcctccacaaagcattagggcacagacacaactgacccacgttctctgccattttataaataaaaacagaat

SEQ ID NO: 23422 - DNA, 120 bp, synthetic construct; identical to SEQ ID NO: 7298
  source 1..120: mol_type = other DNA

SEQ ID NO: 23423 - DNA, 120 bp, synthetic construct
  source 1..120: mol_type = other DNA
ccaaaatctagccataaactggccccaaaactgaccataaacaaaatctctgcagcactgtgaaatgttcatgatggccgtaacgcccacgctggaaggttgtgggtttactggaatgaa

SEQ ID NO: 23424 - DNA, 120 bp, synthetic construct
  source 1..120: mol_type = other DNA
ccttaagggcatgttcctgctgcagataactagccagacccacccctttatttcggcccatcccttcctttcccataagggatacttttagttaatgaatatctatagaaacaatgctaa

SEQ ID NO: 23425 - DNA, 120 bp, synthetic construct
  source 1..120: mol_type = other DNA
tctatgctatggcatcagtgagcagtgttcatgttactgggccatctccatccctcccattgagaagaaaatgtgtgtcacgtaaagaagcacttaaatccatctctgtcacttgcttag

SEQ ID NO: 23426 - DNA, 120 bp, synthetic construct; identical to SEQ ID NO: 7299
  source 1..120: mol_type = other DNA

SEQ ID NO: 23427 - DNA, 120 bp, synthetic construct
  source 1..120: mol_type = other DNA
agggtcttccacagaccttccagccttccactcttccagccttgccacgcccctcacagtcccctaaatgcctctttccatttccagtcctctggacctttatacatgctggtctctgcc

SEQ ID NO: 23428 - DNA, 120 bp, synthetic construct
  source 1..120: mol_type = other DNA
catgtagacagctctgtcccagcatgcatccagcacaggggctgacctctcttcatctatgcatccccctgcttggcccagtaccaggcaaacagaaagtgctccataatgtttgtggac

SEQ ID NO: 23429 - DNA, 120 bp, synthetic construct
  source 1..120: mol_type = other DNA
ggaaatagttttttaaacggtaaaaacccggttcccatttcaagaagcacagagttgcaaataaaagctatattcattaaataatcataccaggtggtatgaccaagtgtcaagtaagtt

SEQ ID NO: 23430 - DNA, 120 bp, synthetic construct; identical to SEQ ID NO: 7300
  source 1..120: mol_type = other DNA

SEQ ID NO: 23431 - DNA, 120 bp, synthetic construct
  source 1..120: mol_type = other DNA
atctggagttagcacggaccccacaggtaagggctcaggcccacaagaccacaagaatgcccacacttcacatgccagtcgctgggtctgggccatctgtactcctgaccaactgtaaag

SEQ ID NO: 23432 - DNA, 120 bp, synthetic construct
  source 1..120: mol_type = other DNA
accacatggaaaagatagggcaaaatatgggaatggaggtttccaggagcttccatatcctttccaggaaccaccttcccagcaccttgatgtgttcactaacaggaagctctccaaaac

SEQ ID NO: 23433 - DNA, 120 bp, synthetic construct
  source 1..120: mol_type = other DNA
cggatcacgagatcaagagatagagatgaccctgaccaacatggtgaaaccccgtctccactaaaaatacaaaaattagctgggtgtggtggcgtgcgcctgtaatcccagctactcagg

SEQ ID NO: 23434 - DNA, 120 bp, synthetic construct; identical to SEQ ID NO: 7301
  source 1..120: mol_type = other DNA

SEQ ID NO: 23435 - DNA, 120 bp, synthetic construct
  source 1..120: mol_type = other DNA
tcttatcaccatctctcaggaaattacaacggtttaagaagctctatgtcaggaacttgggacaagaccaagtatatatttcttcttatcacatgactgccgtaggactctcacacttta

SEQ ID NO: 23436 - DNA, 120 bp, synthetic construct
  source 1..120: mol_type = other DNA
ttcaggtctctactcaaatcctaccttccaagagaaatcattccctgaccacctacttaaaacagcatcttcctctccacccatgtcaatccctatcttattcccttattctgctttctt

SEQ ID NO: 23437 - DNA, 120 bp, synthetic construct; identical to SEQ ID NO: 7302
  source 1..120: mol_type = other DNA

SEQ ID NO: 23438 - DNA, 120 bp, synthetic construct
  source 1..120: mol_type = other DNA
agacaaaagtagtcctactgtgagggagatgagcatctgttgagaacctccattgacgcagccagtttttctcagagggcccttccttgtctggatctgggtgagattagctgaatttgg

SEQ ID NO: 23439 - DNA, 120 bp, synthetic construct
  source 1..120: mol_type = other DNA
aaccataacctgtttttggccaagcttagagcccccacactttctgtaacctcaggatagtataattgtggcaaccaccttgccttcctttgagatcttatgttgtaagactctcacggc

SEQ ID NO: 23440 - DNA, 120 bp, synthetic construct
  source 1..120: mol_type = other DNA
ccctttttttttcctatctccaactaggatgtaaattcatgagggcaaggtctcggtcctacctaaatccccagtgtctaaaactttgagtactatgtgtttgagcacatagtacacaca

SEQ ID NO: 23441 - DNA, 120 bp, synthetic construct
  source 1..120: mol_type = other DNA
cacagtaagctcaataacgctggtcaacgctattatcagaggattccagaagacaggtcaacatgggcaggagcagttacagaacgtttcaaggaggtggcaggtcttgagcttgatttg

SEQ ID NO: 23442 - DNA, 120 bp, synthetic construct; identical to SEQ ID NO: 7303
  source 1..120: mol_type = other DNA

SEQ ID NO: 23443 - DNA, 120 bp, synthetic construct
  source 1..120: mol_type = other DNA
gtgtcagcattaaaaatcatgtacaaagatgttcacttgcaagagagagagaaaaaaagtagcaaacagaacgtccaccactaggaaaccatgaataaactatgatgcgtccaaactgtg

SEQ ID NO: 23444 - DNA, 120 bp, synthetic construct
  source 1..120: mol_type = other DNA
tacaaatgaaacctaaagatttctctgaatgtgtgcatattacatatagatacatgtcttgttaaccactgtatcaactcaacactgtgtgcctgaaacatagaaagttctcaataaata

SEQ ID NO: 23445 - DNA, 120 bp, synthetic construct; identical to SEQ ID NO: 7304
  source 1..120: mol_type = other DNA

SEQ ID NO: 23446 - DNA, 120 bp, synthetic construct
  source 1..120: mol_type = other DNA
ccagcatcagaccccttaaaagcataaagatgaattttgaggtgcggggttttccattgctcccaaacatcagttgacggcacactttttctaaagggtccttttctcccacgccaagac

SEQ ID NO: 23447 - DNA, 120 bp, synthetic construct
  source 1..120: mol_type = other DNA
acaaaactcactttccgactggccccttctctggctgtgatctgtctctcctgctcaggcatcgtcccgcacggacaccgaattcttctctgatctggctcagagcaaaaggtcacctgg

SEQ ID NO: 23448 - DNA, 120 bp, synthetic construct
  source 1..120: mol_type = other DNA
gggaagccgcagccctcttcacacggatgattcaaagttgcgcgccgccgtcctcccgacctgggggcacggggatgagagcgtgaggggagagtgggcctcggaccctcgcccactccc

SEQ ID NO: 23449 - DNA, 120 bp, synthetic construct
  source 1..120: mol_type = other DNA
cctccgcggtctcggccacctcgcgctggtgcgctccgacactgtactgggatctcacgcgtgtgcgggagcgggagggcaggtgagctgcgcagagccgggccgcagactcagctccca

SEQ ID NO: 23450 - DNA, 120 bp, synthetic construct; identical to SEQ ID NO: 7305
  source 1..120: mol_type = other DNA

SEQ ID NO: 23451 - DNA, 120 bp, synthetic construct; identical to SEQ ID NO: 7306
  source 1..120: mol_type = other DNA

SEQ ID NO: 23452 - DNA, 120 bp, synthetic construct
  source 1..120: mol_type = other DNA
ggcgcccggagccagcgccccgcacccgcgccccagcgggcagaccccaacccagcatgagcgccgccacccactcgcccatgatgcaggtggcgtccggcaacggtgaccgcgaccctt

SEQ ID NO: 23453 - DNA, 120 bp, synthetic construct
  source 1..120: mol_type = other DNA
tggaacgacccgcgcgtgccctctgagggccccaaggtgagccgggcccgcggcccgccctggtcggtggcgccacctcgacggcaggcggcggggagtgggctgggccggggggacgcg

SEQ ID NO: 23454 - DNA, 120 bp, synthetic construct
  source 1..120: mol_type = other DNA
tcggggcgaaaggaggccccgggattcggtggcccgggaagcgaccccgcagtggctccggtgccgtccacggctcgactccagggcggaaggccgggtgtccagcgctggcctcgcgct

SEQ ID NO: 23455 - DNA, 120 bp, synthetic construct; identical to SEQ ID NO: 7307
  source 1..120: mol_type = other DNA

SEQ ID NO: 23456 - DNA, 120 bp, synthetic construct; identical to SEQ ID NO: 7308
  source 1..120: mol_type = other DNA

SEQ ID NO: 23457 - DNA, 120 bp, synthetic construct
  source 1..120: mol_type = other DNA
gactaatgatactcttgtgaatacagcagaagtatgtctcatttacatacatgcaaggatatatacttcttaatccccaagagcatgaaatttgaaaatgtaaatttggaatgagtgtgt

SEQ ID NO: 23458 - DNA, 120 bp, synthetic construct
  source 1..120: mol_type = other DNA
ctgggcaagataaaagcagcaaagagctggtaaattattttgaagatttaaaaactcaccaaattaaaactgctgtgtaacccattgttttagaagaaagacctgtattatttcccttca

SEQ ID NO: 23459 - DNA, 120 bp, synthetic construct
  source 1..120: mol_type = other DNA
gtacaagaggctgtaattagctgggatgggcacagttacatatacctttttgtgtgtctgttccacccatttttgggtgaaactgacactcatttcaaaccacctttcttaggagtctgc

SEQ ID NO: 23460 - DNA, 120 bp, synthetic construct
  source 1..120: mol_type = other DNA
ataaacattcccagcactttgttctcagcatgaaacttacccagcaagttgagatcttcctgtacccacctggtgcatgggttaggctgtgatttcataaaccttattaaaagaaaaaaa

SEQ ID NO: 23461 - DNA, 120 bp, synthetic construct; identical to SEQ ID NO: 7309
  source 1..120: mol_type = other DNA

SEQ ID NO: 23462 - DNA, 120 bp, synthetic construct
  source 1..120: mol_type = other DNA
tctgtgctgaggttgcttggattttgatgatgggactgatgaactcaagaaaagagttccctttaccaagtgaatgacttgagacttgtcagcatggcaccaaaacttaaggagaaaact

SEQ ID NO: 23463 - DNA, 120 bp, synthetic construct
  source 1..120: mol_type = other DNA
ccttgaatatcattttgtatttgaaattggcttctcaatgcataatgagaaaaaggcccttgcagaaaacaaagggcgattttggaggagctgagctgaggcccgtctgagcatcatcat

SEQ ID NO: 23464 - DNA, 120 bp, synthetic construct; identical to SEQ ID NO: 7310
  source 1..120: mol_type = other DNA

SEQ ID NO: 23465 - DNA, 120 bp, synthetic construct
  source 1..120: mol_type = other DNA
gattttgattttctgcacacttgggcttcccactaatttggcaagttcataccagtccaggccctttcctggcagaggatggcattcagtgctggtgcagccactcctccaggctcctcc

SEQ ID NO: 23466 - DNA, 120 bp, synthetic construct
  source 1..120: mol_type = other DNA
accagtctggcactctccagggagtcctgttaagaacacagattgtggctgtgtctcatcgcctccctgccccaaccccatgttcaaatctgaattgctcagtgtagggcccagaaaact

SEQ ID NO: 23467 - DNA, 120 bp, synthetic construct
  source 1..120: mol_type = other DNA
tatcctgcagagcattttcccaagcctccattttccttcttggggaaactccccaggtacgcgggcttctggaggtgtgaatatggggatgacatgggaagcgagccgagacagcacctt

SEQ ID NO: 23468 - DNA, 120 bp, synthetic construct; identical to SEQ ID NO: 7311
  source 1..120: mol_type = other DNA

SEQ ID NO: 23469 - DNA, 120 bp, synthetic construct
  source 1..120: mol_type = other DNA
cttaaggttcagcagagcctcctgaattttcttaaagatgagatcgttttgctctttccagatctattgcaagctgttatgcctcttagcagaggcggagcacaatcaggaaatgagtgg

SEQ ID NO: 23470 - DNA, 120 bp, synthetic construct
  source 1..120: mol_type = other DNA
agctcatccaggactttcattttcccctctgaagaacagcctgtgttgttcacatgagaaccgactgcacctccgagaacatcatttgtcccgttttgtagggtagatttgccctttatg

SEQ ID NO: 23471 - DNA, 120 bp, synthetic construct
  source 1..120: mol_type = other DNA
agggctgcttgtgagtcagaaagcttcataccacccatgaggcttgcttagtgctgtcctcgtttctggaatgacacacagtcaccttatataaaccactctacatgtttattactttct

SEQ ID NO: 23472 - DNA, 120 bp, synthetic construct; identical to SEQ ID NO: 7312
  source 1..120: mol_type = other DNA

SEQ ID NO: 23473 - DNA, 120 bp, synthetic construct
  source 1..120: mol_type = other DNA
tttttttttttttttttttgagacggagtcgcactttgtctcccaggctggggtgccgtagtgcgatcttggctcactgcaacctccgtctcctgggttcaagcgattctcctgcctcag

SEQ ID NO: 23474 - DNA, 120 bp, synthetic construct
  source 1..120: mol_type = other DNA
catgtgataccatgtgaggtatctggtgttactaagtcgtcacgtatttcgatgaaggtatctttgggaccttggcagccttttaggaagccaggcagcttgcaaaagcttaggaagaat

SEQ ID NO: 23475 - DNA, 120 bp, synthetic construct
  source 1..120: mol_type = other DNA
ctttgaactagaaactatgaagtgtcttacacatgggacagcagatttggagaggcagtgtgcctggcctgtgataaacagaaagacttctgtggctttacccccatctgagttcctgaa

SEQ ID NO: 23476 - DNA, 120 bp, synthetic construct; identical to SEQ ID NO: 7313
  source 1..120: mol_type = other DNA

SEQ ID NO: 23477 - DNA, 120 bp, synthetic construct
  source 1..120: mol_type = other DNA
ttaatttgaatctttttgcttaagctctgcacttttctgctttgtcttggggtcacacccctgttaggagttctggggcagagtctgtgtgcttcatcgctgcctcttgatgcctggcag

SEQ ID NO: 23478 - DNA, 120 bp, synthetic construct
  source 1..120: mol_type = other DNA
gaagccttccattggttcctaagaactgcagagttgtcctgggctcctaaaggtccccagaggcctgctcctttttgtcactttgtgaatggccttctctgcacaaaggacttcagtatt

SEQ ID NO: 23479 - DNA, 120 bp, synthetic construct
  source 1..120: mol_type = other DNA
tagctgtgcagagagcagcccctggcactgtgaaaagagtctcttaaaaattttttttcgtgtggctggcagcaagatcagacaccgtatacgtgaaggttcttattcactgtcaattca

SEQ ID NO: 23480 - DNA, 120 bp, synthetic construct
  source 1..120: mol_type = other DNA
agagctgtgccccagtgaactggggagactttttacggaaaattccttagcattcaattggagaacaaacgtttgctgttttaaagtatcttcctcagtgtttattaaagtagaattata

SEQ ID NO: 23481 - DNA, 120 bp, synthetic construct; identical to SEQ ID NO: 7314
  source 1..120: mol_type = other DNA

SEQ ID NO: 23482 - DNA, 120 bp, synthetic construct
  source 1..120: mol_type = other DNA
aagctgagtgctctcactctcgtgtaccctgcctggctggcctgatgactcagcatggagcgctggctccctgacccagagcacacttgaactgaatgttccaggtctgagcctcagccg

SEQ ID NO: 23483 - DNA, 120 bp, synthetic construct
  source 1..120: mol_type = other DNA
gtgacaggagtagcagaaaggttagcatctacctggccttaccatcagacaaacctgggttctagagatcttaggcaaagcacttacccttcttgagcctcagtctcccgttgtgtgaag

SEQ ID NO: 23484 - DNA, 120 bp, synthetic construct; identical to SEQ ID NO: 7315
  source 1..120: mol_type = other DNA

SEQ ID NO: 23485 - DNA, 120 bp, synthetic construct
  source 1..120: mol_type = other DNA
gaacagtaacagatgaagctgcggggccttcgggagccttgacccagctgccagaccctgcgccatgcgtccatagatgcatctccccatcctctgcccaagataggctgggtccttgtg

SEQ ID NO: 23486 - DNA, 120 bp, synthetic construct
  source 1..120: mol_type = other DNA
gtgaggggggacatcagcccaccttactgaggggccgattacctgcacagctcttctggacccagctctcaggggtgtaaatgtcaccgcagatggaaggaaggaggggttttccaagtg

SEQ ID NO: 23487 - DNA, 120 bp, synthetic construct
  source 1..120: mol_type = other DNA
tgcctgcatggcagctgatgaactgaggatgtttttcttttggaaattgtattttgtacagaatacacgtccgctgatgtcctgtacactgagacctaacaggcacttgtagggtcgtgt

SEQ ID NO: 23488 - DNA, 120 bp, synthetic construct; identical to SEQ ID NO: 7316
  source 1..120: mol_type = other DNA

SEQ ID NO: 23489 - DNA, 120 bp, synthetic construct
  source 1..120: mol_type = other DNA
ccagcagctgcggatggtgcctggcctggagacggctgacgtgtgccctggtgaggggccatcgaggatgttgaggagacgccagcagatgttctgctcccaggcggacccttctgtgcc

SEQ ID NO: 23490 - DNA, 120 bp, synthetic construct
  source 1..120: mol_type = other DNA
gcagcggcccagcctgttggagaggtgggtcgtttagggctcaggtccctagagttgtctttggctctttgcttccaggctgtgaaactttagataaagtcttaagcagagaaagtgaca

SEQ ID NO: 23491 - DNA, 120 bp, synthetic construct
  source 1..120: mol_type = other DNA
tcacacctgtaatcccagcactttgggaggccgaggcagatggatcacttgagcccgggagttcgagagcagcctgggccccatagtgagaccttgtctctaaaataaataaataaataa

SEQ ID NO: 23492 - DNA, 120 bp, synthetic construct
  source 1..120: mol_type = other DNA
gtggtggctcacggctgtcatcccagcactttgggaggctgaggcaggaagatcacttgagatcagaagttcgagaccatcctggccaacatggtgaaaccccatctttactaaaaatac

SEQ ID NO: 23493 - DNA, 120 bp, synthetic construct; identical to SEQ ID NO: 7317
  source 1..120: mol_type = other DNA

SEQ ID NO: 23494 - DNA, 120 bp, synthetic construct
  source 1..120: mol_type = other DNA
ttagggcacagagcagctcagagtttacaaagacttgtaccttatttcgtaccttatttcacttaactcttgcaaaaacccctgggaaatatggggatctttacagctgcggaaacagta

SEQ ID NO: 23495 - DNA, 120 bp, synthetic construct
  source 1..120: mol_type = other DNA
ggctcatgctggttcattcctgtttatttggacacagctgcaaagagaagcaatgttggtttcatcttctaaaaaaattttttttcccattgaaaacacatagggacagtcatctgttta

SEQ ID NO: 23496 - DNA, 120 bp, synthetic construct; identical to SEQ ID NO: 7318
  source 1..120: mol_type = other DNA

SEQ ID NO: 23497 - DNA, 120 bp, synthetic construct
  source 1..120: mol_type = other DNA
ttcagtatcaaatgggcagtaatacttaattcattcatgcaccccatcatagcaagcagagagcttcggtagggtgctgaagctcgactccagttgcactttgttttttgttttggttgt

SEQ ID NO: 23498 - DNA, 120 bp, synthetic construct
  source 1..120: mol_type = other DNA
tgggattgcaggcccccgccaccatgcctggctatgttttttttttgttttttttttttttgtatttttagtagagacagggtttcaccatgttggccaagctggtcttgaactcctgac

SEQ ID NO: 23499 - DNA, 120 bp, synthetic construct
  source 1..120: mol_type = other DNA
tatggggagttccaggatttctgtgttcttgcatcttttttctttgttttagaagttttgaagtgttcacttgacccatgtgaaggctcttctggcctaaaaacccagttaatacagtct

SEQ ID NO: 23500 - DNA, 120 bp, synthetic construct; identical to SEQ ID NO: 7319
  source 1..120: mol_type = other DNA

SEQ ID NO: 23501 - DNA, 120 bp, synthetic construct
  source 1..120: mol_type = other DNA
gggaggcggaggttgcaatgagccgagatcgcgccactgcactccagcctaggcgacagagcgagactctgtctcaaaaataaaaataaaataaagagcactgtaccatggagccaagat

SEQ ID NO: 23502 - DNA, 120 bp, synthetic construct
  source 1..120: mol_type = other DNA
gtacgcctctctaggcagacaccttgcaggtgcccaagggttgtggttcccaccctgcttttagggcacagggttgggggttagaggcttccttctcttcatttgtttttggttttgttt

SEQ ID NO: 23503 - DNA, 120 bp, synthetic construct
  source 1..120: mol_type = other DNA
aacttcctaagcagctgggattatgatgcccaccgccacggccagctaatttttgtatttttagaagagacagggttttgtcattttggacaggctggtctcaaactcctgggaatggat

SEQ ID NO: 23504 - DNA, 120 bp, synthetic construct; identical to SEQ ID NO: 7320
  source 1..120: mol_type = other DNA

SEQ ID NO: 23505 - DNA, 120 bp, synthetic construct
  source 1..120: mol_type = other DNA
tgcaatgtttgcatttcctgggtgcttcgataccccaagtgctggagaaccactgctttctagaacatttttgggcctccccttcattttgcagctgagaaaacgaaagttcacagaggg

SEQ ID NO: 23506 - DNA, 120 bp, synthetic construct
  source 1..120: mol_type = other DNA
agtgcagtttagacctgctcttaagcaaacgagcccaacagctcaccaaagctcagaacctgacctcaggctttctctaatcataatatcttgtacataatagggcaaattttgactcat

SEQ ID NO: 23507 - DNA, 120 bp, synthetic construct
  source 1..120: mol_type = other DNA
gccaattcattttataaattaatatagtgagataagcagtgagagtcaggactgagcccctgggctcttctttcctaattggattttgtataatatgtgttcctgatgtctttagccgag

SEQ ID NO: 23508 - DNA, 120 bp, synthetic construct; identical to SEQ ID NO: 7321
  source 1..120: mol_type = other DNA

SEQ ID NO: 23509 - DNA, 120 bp, synthetic construct
  source 1..120: mol_type = other DNA
ccaggtggtgttttttgtgtgtgtgtgagagtttttttggcagagtttcactcttgtagcccaggctagagtgcaatggtgtgatcttagctcactgcaacctccgcctccagcttcaag

SEQ ID NO: 23510 - DNA, 120 bp, synthetic construct
  source 1..120: mol_type = other DNA
atatatttttttttttagttggagtcttgctctgtcgcccaggctggagtgcagtggtgcgatctcggctcactgcaagctccacctcccgggttcacgccattctcctgcctcagcctc

SEQ ID NO: 23511 - DNA, 120 bp, synthetic construct
  source 1..120: mol_type = other DNA
tccacccacctcagcctgccaaagtgctgggattacaggcgtgagccaccgcgcccagcctaatttttgtattttttttagtgaagatggggtttcatcacgttggccaggctggtcttg

SEQ ID NO: 23512 - DNA, 120 bp, synthetic construct; identical to SEQ ID NO: 7322
  source 1..120: mol_type = other DNA

SEQ ID NO: 23513 - DNA, 120 bp, synthetic construct
  source 1..120: mol_type = other DNA
tgcagtgctcacaaggagacacttggttttttattaaatggcaaaaatgggtcattaattcacccaagcccaggaatacagacctcgggactgttggagaagcagccaggccgcccttgc

SEQ ID NO: 23514 - DNA, 120 bp, synthetic construct
  source 1..120: mol_type = other DNA
ttaccctccaggccctctgccctgctttgtgctcatctcctcctccctgacgtccttcttcacttcccagcatgtcctggcttctcctttccagtccctctgtcttgctgaggcatctcc

SEQ ID NO: 23515 - DNA, 120 bp, synthetic construct
  source 1..120: mol_type = other DNA
ttcccaccactcttctgacaccactgcccctgcctgcagtgaccacattccttccccgtggaccaagccatgtctctggaaaggttgaatattggctccagcaagcagtctctgctgtca

SEQ ID NO: 23516 - DNA, 120 bp, synthetic construct
  source 1..120: mol_type = other DNA
gatgcacgaggtgctcagcgagatgcatgaggtgctcagctcgtggctggctcaagggctttctggatccaggggcttcccccaggaggagctgcatctcctcaaggcctgtctgaggac

SEQ ID NO: 23517 - DNA, 120 bp, synthetic construct; identical to SEQ ID NO: 7323
  source 1..120: mol_type = other DNA

SEQ ID NO: 23518 - DNA, 120 bp, synthetic construct
  source 1..120: mol_type = other DNA
tctgcctccggggttcaggtgattctcctgcctcagcctcctgaatagcagggactacaggtgccccccaccatgcccagctaatctttgtatttttagtagagatggggtttcaccatg

SEQ ID NO: 23519 - DNA, 120 bp, synthetic construct
  source 1..120: mol_type = other DNA
tgacactttggagtctgaaaagcataattttgtgcgtatttagggagaaactcacatttattgccagtcttccgggcatccctcttgatatgcccttataaaacctcacaacatttctcc

SEQ ID NO: 23520 - DNA, 120 bp, synthetic construct
  source 1..120: mol_type = other DNA
cctagggcagcgtctaccctggaagagcctgtgcctttccccatccctcagggcctccgtgctttccaagtaattctgcttcttgtttgtttcctgcccccttagcccatcttctaagcc

SEQ ID NO: 23521 - DNA, 120 bp, synthetic construct; identical to SEQ ID NO: 7324
  source 1..120: mol_type = other DNA

SEQ ID NO: 23522 - DNA, 120 bp, synthetic construct
  source 1..120: mol_type = other DNA
tctgaatgtgaggcctggacctgctcctgctcttgggtgacctgagagttaagcaggctaatgtaatgccgccgccctgagcacgtggctgttctaatctgagaatgcctgtctgcccat

SEQ ID NO: 23523 - DNA, 120 bp, synthetic construct
  source 1..120: mol_type = other DNA
ctggtgcccacgcctgcacacaaatagaaacatcacagaattaatggtctgttctctcaaagtgcagagcagccctcagtatctgtccttacttttgattgattccgcagcagtagagat

SEQ ID NO: 23524 - DNA, 120 bp, synthetic construct; identical to SEQ ID NO: 7325
  source 1..120: mol_type = other DNA

SEQ ID NO: 23525 - DNA, 120 bp, synthetic construct
  source 1..120: mol_type = other DNA
cttgttgtctgaaataagatctttcctgtggtacatctggaacttggccttctcaagggtcccaaaatagccaggccactgaagggagaacttcaagagaggacataagagaaggacccc

SEQ ID NO: 23526 - DNA, 120 bp, synthetic construct
  source 1..120: mol_type = other DNA
agtggggtcgtgcagtcatgggtagagactgggcacaacttcaaatacaacacgggcgattgggaatttatagtcaaggagcagtgtggatggaaaattagaagaggaaacatcagggct

SEQ ID NO: 23527 - DNA, 120 bp, synthetic construct
  source 1..120: mol_type = other DNA
ggctaaactgacttagcagtgtcttttgctaaaacttgactttacaaggaagtgcacagatgggcctaggagatgcttcggaagcctaagatttggtcaagcagagaatctttgtcagtt

SEQ ID NO: 23528 - DNA, 120 bp, synthetic construct
  source 1..120: mol_type = other DNA
ctccccagcccacttctctgtaaagattcccaaactgtgtcctgtgtttgggcccagtacaagctctatattgctgggaaatgtgagggcctttttggaaacagagacgcttgctgtaat

SEQ ID NO: 23529 - DNA, 120 bp, synthetic construct; identical to SEQ ID NO: 7326
  source 1..120: mol_type = other DNA

SEQ ID NO: 23530 - DNA, 120 bp, synthetic construct
  source 1..120: mol_type = other DNA
ccagcctgtgtttctccactttttatttcaggagactccatcctctgccaatggcccttcccgggagggctctaggctgccgcctgctagggaaggccaccctgtgtacccccagctccg

SEQ ID NO: 23531 - DNA, 120 bp, synthetic construct
  source 1..120: mol_type = other DNA
tcctcagaggtcccagtcacctctgcggggcatgccagaaaccactcagccagataaacagtgtggacaggtggcagcggcggcggcagcccagcccccagcctcccacggacctgaggt

SEQ ID NO: 23532 - DNA, 120 bp, synthetic construct
  source 1..120: mol_type = other DNA
ctagcctgcagcatcagaggtcacccagcaaagacagggtgatggccccacatcatcccccagcatctcatagggctgttcttcagtggggcagggcaggaatcatgtggcttctttttg

SEQ ID NO: 23533 - DNA, 120 bp, synthetic construct; identical to SEQ ID NO: 7327
  source 1..120: mol_type = other DNA

SEQ ID NO: 23534 - DNA, 120 bp, synthetic construct
  source 1..120: mol_type = other DNA
ttctgtgcattaatagctaaaaaatagttcttaatctggttcttagctgagatttgaggcattcctagtaggattcctaagcagtaagtcctctcattttcctgtctgcacatcatcctg

SEQ ID NO: 23535 - DNA, 120 bp, synthetic construct
  source 1..120: mol_type = other DNA
tcctatctgcaccctgagtcatgcttgcctctcagctccgtctgaatctgttcagcttcacacctgcttgagagtgaaagttacagttaatgtgggataccttttttcttttcttagaga

SEQ ID NO: 23536 - DNA, 120 bp, synthetic construct
  source 1..120: mol_type = other DNA
tctacaaaaaatacaaaaattagccgggcatggtggcacattcctgtaatcccagctactcaggaggctgaggcaggagaattgcttaaacccaggaggcagaggttgcagtgagccgag

SEQ ID NO: 23537 - DNA, 120 bp, synthetic construct; identical to SEQ ID NO: 7328
  source 1..120: mol_type = other DNA

SEQ ID NO: 23538 - DNA, 120 bp, synthetic construct
  source 1..120: mol_type = other DNA
cccaggtgactgacctcatcttcagagcagcccagtgagggaggggcactcttcctatatttcaaatgaagcttagaaaatgattgaattactaggaatttgaacataggccccttgatt

SEQ ID NO: 23539 - DNA, 120 bp, synthetic construct
  source 1..120: mol_type = other DNA
atcactgcaacctctgcctcctaggttcaagcaattcccctgcctcagcctcctgagtagctggcactacaggcatgcgccgccacacccagctaatttttgtatttttggtagagatgg

SEQ ID NO: 23540 - DNA, 120 bp, synthetic construct; identical to SEQ ID NO: 7329
  source 1..120: mol_type = other DNA

SEQ ID NO: 23541 - DNA, 120 bp, synthetic construct
  source 1..120: mol_type = other DNA
gtcaccagctcccgcgggggtacatctccattccggtgatacacgagcagaacgttacccggccagcagcccagccctccttccaccaagcccagaagacgcactacccagcgcagcagg

SEQ ID NO: 23542 - DNA, 120 bp, synthetic construct
  source 1..120: mol_type = other DNA
gctcaccagccaggagcagcacgccactccactccccctcgcccatccgtgtgcacaccgtggtcgacaggcctcaggtacgggaagttagtcgtcagcagactggttatggtggtatgt

SEQ ID NO: 23543 - DNA, 120 bp, synthetic construct
  source 1..120: mol_type = other DNA
aagtgagattcgagaaattgctaggtattaacagaaatgcaggacagttgctcaggctgtgaaccctccgcactctgcagcttttgctgggctgatcattgtgcattgcggctgacttag

SEQ ID NO: 23544 - DNA, 120 bp, synthetic construct
  source 1..120: mol_type = other DNA
gtaggcagtgtgtcaccttccactcagttacccactccactctgcaggcccattctgctcattcccacccctgtgcctttgcccatgctgaacccgctccctgaaatgcccgcacagtat

SEQ ID NO: 23545 - DNA, 120 bp, synthetic construct; identical to SEQ ID NO: 7330
  source 1..120: mol_type = other DNA

SEQ ID NO: 23546 - DNA, 120 bp, synthetic construct
  source 1..120: mol_type = other DNA
gaggatgtcatttagtttaagcagctcacagcttagcagcaggacagtcagcagccctgggccccctgtggctgcaacttgagcagctgaatgctacagtttttaaaaaggaaagccccc

SEQ ID NO: 23547 - DNA, 120 bp, synthetic construct
  source 1..120: mol_type = other DNA
gttgtgtgaatcatacagagccccacatatacttcatccagttcactgtttgtcaatatgtctgcattcgccttgtcatttcttctctcgtatattattgatgtgttttaactgtttgaa

SEQ ID NO: 23548 - DNA, 120 bp, synthetic construct; identical to SEQ ID NO: 7331
  source 1..120: mol_type = other DNA

SEQ ID NO: 23549 - DNA, 120 bp, synthetic construct
  source 1..120: mol_type = other DNA
taggaggggtgcgtggttgggttgtgagtggtaagggccaaagttgcgaatgtctgcattggcgaaagagatttgatggaaaaggaggttgctggagtgtagacagctacatcgatccat

SEQ ID NO: 23550 - DNA, 120 bp, synthetic construct
  source 1..120: mol_type = other DNA
ccgtgtttgtggtgacctcccttttagagctgattcaaagttcccttttgggaggctttccaggatttcaccaaactgaacgttatagtggaattgagtgttttaagctgggaatagttt

SEQ ID NO: 23551 - DNA, 120 bp, synthetic construct
  source 1..120: mol_type = other DNA
cctgtaatcctgtaatcctagcactttgggaggccgaggcgggggtatcacttaaggtcaggagttcaagactagcctggccaacatggtgaaaccccatctctactaaaaatacaaaaa

SEQ ID NO: 23552 - DNA, 120 bp, synthetic construct; identical to SEQ ID NO: 7332
  source 1..120: mol_type = other DNA

SEQ ID NO: 23553 - DNA, 120 bp, synthetic construct
  source 1..120: mol_type = other DNA
aaaattagccaggcatgatggtatgtgcctgtagttgcaactaatcatgaagctaaggtgagaggatcacttgaggccagaaggttgaggctgcattgagctgtgatagccccgctgcac

SEQ ID NO: 23554 - DNA, 120 bp, synthetic construct
  source 1..120: mol_type = other DNA
attgctgaatgttaggctacagcacagctatcctgaagcaaaattgttctggagttaaccatttagagcatcttggctaatcctaaaaaaatacattggtctgggcagaaactactaggc

SEQ ID NO: 23555 - DNA, 120 bp, synthetic construct
  source 1..120: mol_type = other DNA
ctgcaacacctgagagctggagtcactcaggactctgctctgagtcagcctagttcagcagtcagcatgagtttttgctatttttttccttctttccttccttccttccctccttccctc

SEQ ID NO: 23556 - DNA, 120 bp, synthetic construct
  source 1..120: mol_type = other DNA
ccccccttccttccttccttcctccctccctcccttccttctttgagacaggatctcgctctgtcactcaggctggagtgcaatgacataatcgtggctcactacagccttgaattcctg

SEQ ID NO: 23557 - DNA, 120 bp, synthetic construct; identical to SEQ ID NO: 7333
  source 1..120: mol_type = other DNA

SEQ ID NO: 23558 - DNA, 120 bp, synthetic construct
  source 1..120: mol_type = other DNA
ttctttctaatctgtactagctacaaacaatttctgtgactttcagtcagttattaaaaatatatttttgtgtccttttttcagcagcccatgacccatcgagaaactgcacctgtttcc

SEQ ID NO: 23559 - DNA, 120 bp, synthetic construct
  source 1..120: mol_type = other DNA
ccgcaaagaggtggattctaaacctgtttcccagaagcccccacctccctctgagaaggtagaggtgaaagttccccctgctccagttccttgtcctcctcccagccctggcccttctgc

SEQ ID NO: 23560 - DNA, 120 bp, synthetic construct; identical to SEQ ID NO: 7334
  source 1..120: mol_type = other DNA

SEQ ID NO: 23561 - DNA, 120 bp, synthetic construct
  source 1..120: mol_type = other DNA
ccatcttggaaaaacttgaacagaaagccattgatgtcccaggtcaagtccaggtctatgaactccagcccagcaaccttgaagcagatcagccactgcaggcaatcatggagatgggtg

SEQ ID NO: 23562 - DNA, 120 bp, synthetic construct
  source 1..120: mol_type = other DNA
ctggtaacccagcagcaccgtagcctctgccctgtaaaaatcagactcggaaccgatgtgtgctttagggaattttaagttgcatgcatttcagagactttaagtcagttggtttttatt

SEQ ID NO: 23563 - DNA, 120 bp, synthetic construct
  source 1..120: mol_type = other DNA
taataaaagggctaaaaaggaaaatgatgcttttcttctatattcttactctgtacaaataaagaagttgcttgttgtttgagaagtttaaccccgttgcttgttgttctgcagccctgt

SEQ ID NO: 23564 - DNA, 120 bp, synthetic construct; identical to SEQ ID NO: 7335
  source 1..120: mol_type = other DNA

SEQ ID NO: 23565 - DNA, 120 bp, synthetic construct; identical to SEQ ID NO: 7336
  source 1..120: mol_type = other DNA

SEQ ID NO: 23566 - DNA, 120 bp, synthetic construct
  source 1..120: mol_type = other DNA
gggtcggggccgctgcacgccaagggcgaaggccgattcgggccccacttcgccccggcggctcgccgcgcccacccgctccgcgccgagggctggaggatgcgttccctggggtccggg

SEQ ID NO: 23567 - DNA, 120 bp, synthetic construct
  source 1..120: mol_type = other DNA
cggccccggcagctccgcaggcctcggcgcgcgctgggccgggaccgcccagccagagacccacggcaccccgcgccgcgtcccccgccggcccctcttttgtctcccactcgcgggttg

SEQ ID NO: 23568 - DNA, 120 bp, synthetic construct
  source 1..120: mol_type = other DNA
cctccccgccccggagcggcgaggctgatatttgtgatttggctccggacgctgtggggaggaacaggggagaacaaaatgagtttcgggcgggggtcgagtgagaggagcagccggccc

SEQ ID NO: 23569 - DNA, 120 bp, synthetic construct; identical to SEQ ID NO: 7337
  source 1..120: mol_type = other DNA

SEQ ID NO: 23570 - DNA, 120 bp, synthetic construct
  source 1..120: mol_type = other DNA
tgtgttacgtcatttaatccttacaacgattctggtttattgtattcctcattgttttaggggaagaaaccgagtcgcaaagaggttaactaacttgtctaagggagctgggatttgaac

SEQ ID NO: 23571 - DNA, 120 bp, synthetic construct
  source 1..120: mol_type = other DNA
tgctggagttgaaaacaactactttattgtatttacttgtgagaggagttaaactttgaattagagtgtaacttaatgcgtctcattgttttcagttgttgaaataaagaatgtgaacca

SEQ ID NO: 23572 - DNA, 120 bp, synthetic construct; identical to SEQ ID NO: 7338
  source 1..120: mol_type = other DNA

SEQ ID NO: 23573 - DNA, 120 bp, synthetic construct
  source 1..120: mol_type = other DNA
aacaccttggggtttttttcctttccttctaattttcctgcttagtggagcgtgagttattttctctgtcgtatttgggttctttaaagtacaaatgttcttaagattttttcagtttac

SEQ ID NO: 23574 - DNA, 120 bp, synthetic construct
  source 1..120: mol_type = other DNA
gcgaactagcgcaacattgaaattaaaatttagtcattcacaatccatctctagagattgccaagtgtagtctgcttttcctgcctttgcctggttggtggctagccactcatttcttaa

SEQ ID NO: 23575 - DNA, 120 bp, synthetic construct
  source 1..120: mol_type = other DNA
cttgagttttctgtaagatttaacatcgacttcacattttcagatgcctctccttgggtttcattcatctatactcgctgtattctaacacagggtccaaggcagtaagatacaacagat

SEQ ID NO: 23576 - DNA, 120 bp, synthetic construct; identical to SEQ ID NO: 375
  source 1..120: mol_type = other DNA

SEQ ID NO: 23577 - DNA, 120 bp, synthetic construct
  source 1..120: mol_type = other DNA
cttttctgccttctgtttcttctttcctctttaatatgcgttctccaagtttcacttttcagatcacttttctctatgtctctagtcccttagaatgattgttcagacctttctgttgga

SEQ ID NO: 23578 - DNA, 120 bp, synthetic construct
  source 1..120: mol_type = other DNA
ttgctttctacatatctgtacctgattgttctgagctgcttttccttagcaaacttgcctctttggtgttctttatttttgttgatgtcataccaaacccaaaccttttcccatttcatc

SEQ ID NO: 23579 - DNA, 120 bp, synthetic construct
  source 1..120: mol_type = other DNA
aatcataaaacgagttgggcagctttccttctttttctctttttcaggatcattttagactgggattatctgttccttgaaagtttggaagacctcccctatgtgaccatttaggcctag

SEQ ID NO: 23580 - DNA, 120 bp, synthetic construct; identical to SEQ ID NO: 7340
  source 1..120: mol_type = other DNA

SEQ ID NO: 23581 - DNA, 120 bp, synthetic construct
  source 1..120: mol_type = other DNA
gcctaaattaatctgtaagcccagttcttaccacttcgccactcagaagtttcctaggtcttccattaaatgaaatattttctgtggtatttgcctcagatttacctgtttttttttttt

SEQ ID NO: 23582 - DNA, 120 bp, synthetic construct
  source 1..120: mol_type = other DNA
tcagctcattgcaacctctgcctcctgggttcaagggattctcctgcctcagcctcccaggtagctgggaccacgcctggctaatttttgtatttttagtagaggtggggttttgccatg

SEQ ID NO: 23583 - DNA, 120 bp, synthetic construct
  source 1..120: mol_type = other DNA
gcactgtggctggcctttatagcagtttttatacaaatattagtttcactactagtttgcagggtgggtctgtaacggacttttcttgcatattaaaaggaataaatggggaaaggctcc

SEQ ID NO: 23584 - DNA, 120 bp, synthetic construct
  source 1..120: mol_type = other DNA
ctattggatcttaggagcagcgaaccatggagagaaaggaaaatgggtttcctatcacactaaattttgaagtaggaaccatttcttttccttttctactttcccaccttttactagttt

SEQ ID NO: 23585 - DNA, 120 bp, synthetic construct; identical to SEQ ID NO: 7341
  source 1..120: mol_type = other DNA

SEQ ID NO: 23586 - DNA, 120 bp, synthetic construct
  source 1..120: mol_type = other DNA
catagggagatcagatgatcagtagactccatctcagggtggcccctgtggtccctaagccagttcgtatgggcagtttaatatataactaatgagtagacattgaatagatgagtaaat

SEQ ID NO: 23587 - DNA, 120 bp, synthetic construct
  source 1..120: mol_type = other DNA
aacagtggagcttggctcttgatccagctgtatataattggctgttgacttatgaaggaggacaggagtatgctagagatagggataaaatattataatcacatttgcagttagggagat

SEQ ID NO: 23588 - DNA, 120 bp, synthetic construct
  source 1..120: mol_type = other DNA
ccggattaaacccatttatgcctagtgttccactattggaacgctaagcacgtgggagttatttatatcctgctcaaggtcatcaccaaggtctgattgcaaaaattcaaaaaattgcag

SEQ ID NO: 23589 - DNA, 120 bp, synthetic construct; identical to SEQ ID NO: 7342
  source 1..120: mol_type = other DNA

SEQ ID NO: 23590 - DNA, 120 bp, synthetic construct
  source 1..120: mol_type = other DNA
ctgtatagattttatattccaacagtgggaattgggtggctctctcaagtgactcttgcttacaagtgacagccctaactcaagttagcttaaaggagggaaaagcttctccccactaac

SEQ ID NO: 23591 - DNA, 120 bp, synthetic construct
  source 1..120: mol_type = other DNA
tatatctggcagaggaagacataggttataggttatagaattacaggttataggttatagacctcgtatcgagaactccttgtatggtctagcaaagagcctaaaacagcattgagaatt

SEQ ID NO: 23592 - DNA, 120 bp, synthetic construct
  source 1..120: mol_type = other DNA
cccgagtagctgggtttaacaggcgcccgccaatacgcctggctcctttttgtatttttagtagagacagggttttgcctcgtgggccaggctggtctcaactcctgacctcaggtgatc

SEQ ID NO: 23593 - DNA, 120 bp, synthetic construct; identical to SEQ ID NO: 7343
  source 1..120: mol_type = other DNA

SEQ ID NO: 23594 - DNA, 120 bp, synthetic construct
  source 1..120: mol_type = other DNA
atcttggctcactgcaacctctacctcccgggttaagcgattctcatgcctcagcctcccaagtagttggggtcacaagcgtgagccaccacgcctggctaatttttgtatttttagtag

SEQ ID NO: 23595 - DNA, 120 bp, synthetic construct
  source 1..120: mol_type = other DNA
ttcggtaaagtgagcagtttttgcagctttttaaaaattttaaaggcaatacatctattgtgggtaatttgggaagtataaaaagccataaagaagcagcggaatgattaagtttcagct

SEQ ID NO: 23596 - DNA, 120 bp, synthetic construct
  source 1..120: mol_type = other DNA
ctgagtacctattcaatcacggatgccacactaacccaatccgaatcttcgtttctttatcttaaaaaatagaaggaacatggtgaactttaagataatttttctgcttaaaaaaagaaa

SEQ ID NO: 23597 - DNA, 120 bp, synthetic construct; identical to SEQ ID NO: 7344
  source 1..120: mol_type = other DNA

SEQ ID NO: 23598 - DNA, 120 bp, synthetic construct
  source 1..120: mol_type = other DNA
gagtgcagtggcgcatgttggctcactgcaagctctgcctcccgggttcacgccattctcctgcctcagcctcctgagtagctgggaccacaggagcccgccaccacgcctagctaattt

SEQ ID NO: 23599 - DNA, 120 bp, synthetic construct
  source 1..120: mol_type = other DNA
acatctggctgacttggatagttttgatactgttttatgtatattaagatttgtaggtagttttcttactagtaattaaaatgctttgtaatgtatttcaagagtatagggtcttgagtg

SEQ ID NO: 23600 - DNA, 120 bp, synthetic construct
  source 1..120: mol_type = other DNA
tcatttaaaaatgtcatgaaataaaaatatttcagtggtaactgttcagaagtatcttaaatgtataccaaatcaatgaaatataatcgctgggtgacagattattcttccttcatttta

SEQ ID NO: 23601 - DNA, 120 bp, synthetic construct; identical to SEQ ID NO: 7345
  source 1..120: mol_type = other DNA

SEQ ID NO: 23602 - DNA, 120 bp, synthetic construct
  source 1..120: mol_type = other DNA
aagtgtgaattacgtaccagattttgaagatagtaccaaaagatgtaaaatatctcattatgcttttaaaatattggttatatagtgagatgatactgttagggatacattggattaaag

SEQ ID NO: 23603 - DNA, 120 bp, synthetic construct
  source 1..120: mol_type = other DNA
tctcagttaaaaaaacaaaactgatttcacaggattctttttactttttaaatgtggcaactagaaagtttaaaattacacgtcatattggacagtactgcctttgactttcctttccct

SEQ ID NO: 23604 - DNA, 120 bp, synthetic construct
  source 1..120: mol_type = other DNA
ctcgagaccagcctgaccaacatggtgaaaccccatctccactaaaaatacaaaaattagccgggtgtggtggcacgcctgtaatcccaggtactcaggaggctaagacaggagaatcac

SEQ ID NO: 23605 - DNA, 120 bp, synthetic construct; identical to SEQ ID NO: 7346
  source 1..120: mol_type = other DNA

SEQ ID NO: 23606 - DNA, 120 bp, synthetic construct
  source 1..120: mol_type = other DNA
gaaatgaagtaatgaaagtcttctgtaatcatgcttcacctgtgccccaagattgccactgttgaaagtatagagctagaaaaaattttcttttctgttgccttctttctttttttctgt

SEQ ID NO: 23607 - DNA, 120 bp, synthetic construct
  source 1..120: mol_type = other DNA
tttgagggaaggtcttgttctgttgcccaggctgcagtggtgctgtggtgcaaacagctcactgcagcatccaactcctgggctcaagcaatcctcccatctcagcctcctgaatagctg

SEQ ID NO: 23608 - DNA, 120 bp, synthetic construct
  source 1..120: mol_type = other DNA
ctaggcctcccaaagtgctgagattacaggtgtgaggtgttgtgcgcagccttaatcatctcattctttatagtagttaagcagttattccattttctgattataccttaattttactta

SEQ ID NO: 23609 - DNA, 120 bp, synthetic construct; identical to SEQ ID NO: 7347
  source 1..120: mol_type = other DNA

SEQ ID NO: 23610 - DNA, 120 bp, synthetic construct
  source 1..120: mol_type = other DNA
ttctcctgcctcagcctcccgagtacaggcgcccgccatcacacctggctaatttttttttgtatttttagtggagacggggtttcaccgtgttagccaggatggttttttttttttttt

SEQ ID NO: 23611 - DNA, 120 bp, synthetic construct
  source 1..120: mol_type = other DNA
caacaggtgcacgtcaccatgtccagctaatttttgtatttttagtagagacagggtttcaccatgttggtcaggatggtcttgatctcgtgacctcgtgatccgcccgccttggcctcc

SEQ ID NO: 23612 - DNA, 120 bp, synthetic construct
  source 1..120: mol_type = other DNA
atattaaaaaacaaaaaattttaagtttcatttgtcttatactctcaacttgttatacgctcctttgatttttgtgctaaaatatttcgtattgctaacagtacacatgcatgctttgta

SEQ ID NO: 23613 - DNA, 120 bp, synthetic construct; identical to SEQ ID NO: 7348
  source 1..120: mol_type = other DNA

SEQ ID NO: 23614 - DNA, 120 bp, synthetic construct
  source 1..120: mol_type = other DNA
aaacaaaacatatattttaatctggaaacatttgagaatagcttttttttcctcctgaactcccttgtctgcctaaaactagatcctcccccaaagaactcaattgtcataacttccagt

SEQ ID NO: 23615 - DNA, 120 bp, synthetic construct
  source 1..120: mol_type = other DNA
aaacagacattgttataaactatcctatgtccaactgttgtcctaagggtccatttgtctttcctacatgttacttgttttcctgcaacagcccattgttcttttctagttccagttccc

SEQ ID NO: 23616 - DNA, 120 bp, synthetic construct
  source 1..120: mol_type = other DNA
gtttaatttatcagacctcaattactgaacctaagagggtgtaggaagtttttcttctctgacaatggccaaattgatatttttctggctgtaagggcaagggataataataaagtaacg

SEQ ID NO: 23617 - DNA, 120 bp, synthetic construct; identical to SEQ ID NO: 7349
  source 1..120: mol_type = other DNA

SEQ ID NO: 23618 - DNA, 120 bp, synthetic construct
  source 1..120: mol_type = other DNA
ttccctgttttttcttagcattttatcaatttgcatagaagagaaaatgatttgtaacaggtttctctggtcacatcactgaggagagtcaacaaaagaagtcattcaattgaggttaaa

SEQ ID NO: 23619 - DNA, 120 bp, synthetic construct
  source 1..120: mol_type = other DNA
tttctaggtttagttatgcatcggtgtgtttattgctttctgtgccttattacactctgcttactaggtttgtgaccttgagccaaagttgttaattactctaagccttcttttctcata

SEQ ID NO: 23620 - DNA, 120 bp, synthetic construct; identical to SEQ ID NO: 7350
  source 1..120: mol_type = other DNA

SEQ ID NO: 23621 - DNA, 120 bp, synthetic construct
  source 1..120: mol_type = other DNA
atataggaaattttgttgcttttcctgctttgtacatcaagaattggaggctaatgaaggttaattttcccaccaatgtcaaacaagttggtgtaaaagagtaaatagatctagagctga

SEQ ID NO: 23622 - DNA, 120 bp, synthetic construct
  source 1..120: mol_type = other DNA
aaatagaatcagacttttcctcattcactcagagtggatgattaggacctcaaagttacatataaagtaaagtcaaagactccacatgctaaagaaagccctaggcattagtggccagaa

SEQ ID NO: 23623 - DNA, 120 bp, synthetic construct
  source 1..120: mol_type = other DNA
ttcccttctccttcccttggagtgtccttcccttagaaacttagtgtggagaggtctaagagaaccattcctggaggttaagaatactagcagaagatggaatggagtatctgattacct

SEQ ID NO: 23624 - DNA, 120 bp, synthetic construct; identical to SEQ ID NO: 7351
  source 1..120: mol_type = other DNA

SEQ ID NO: 23625 - DNA, 120 bp, synthetic construct
  source 1..120: mol_type = other DNA
ggcgcctgtggtcccagctgctcaggaggctgaggtggcagattggcttgagcccaggaggttgaggctacagtgagctgagatcgtgctactgcacatcagcctaagtgacagtgaggc

SEQ ID NO: 23626 - DNA, 120 bp, synthetic construct
  source 1..120: mol_type = other DNA
ctgtctcaaaaccaaacaaaacaatacaacaaatggagggtgagctgaagcagatcttcaggtgggctgagagcctctagtctcctttgtcatgaaagaaccccacttgtccccagaaga

SEQ ID NO: 23627 - DNA, 120 bp, synthetic construct
  source 1..120: mol_type = other DNA
ttcctccaggctagctctcttggactgggtgcacccaatctgaatttgaagagaaaggaggtgattgtaagactgaagattaacgttttaaactgtactttttaataaccaaaagctata

SEQ ID NO: 23628 - DNA, 120 bp, synthetic construct; identical to SEQ ID NO: 7352
  source 1..120: mol_type = other DNA

SEQ ID NO: 23629 - DNA, 120 bp, synthetic construct
  source 1..120: mol_type = other DNA
cattaagtgtatcatttaattttatctcagatttataagctgtatattatatgataacccttttaattggaatattaattcaaatatcttaattcctttttatggaattgttggagttta

SEQ ID NO: 23630 - DNA, 120 bp, synthetic construct
  source 1..120: mol_type = other DNA
ctgttattcacatataaaaggtaagtaggttttagtttaaagaatgttgagcaataaaatataagattgagatggattaaatggtatctgacatatttccttactctgaatcgatttaac

SEQ ID NO: 23631 - DNA, 120 bp, synthetic construct
  source 1..120: mol_type = other DNA
attcaaacccaggcagtctggattttagagtccatgctcttaaccacataattatattgtcaaatggaggaggagaattttaagatgaggatgtgtactaggcacagagttgacttttaa

SEQ ID NO: 23632 - DNA, 120 bp, synthetic construct
  source 1..120: mol_type = other DNA
ccccaggcaggagtgcagtggtgtgaacatggctcactgtagcctcggctgcctgggctcaagcttagatcctcccgccttgacctcccaaagtgctgggattacagctgtgagccactg

SEQ ID NO: 23633 - DNA, 120 bp, synthetic construct; identical to SEQ ID NO: 7353
  source 1..120: mol_type = other DNA

SEQ ID NO: 23634 - DNA, 120 bp, synthetic construct
  source 1..120: mol_type = other DNA
ccaccatgcccggctaatgttttgtatttttagtagagacggggtttcaccgtgttagccaggatggtctcgatctcctgacctcatgatctccccaccttggtctcccaaagtgctggg

SEQ ID NO: 23635 - DNA, 120 bp, synthetic construct
  source 1..120: mol_type = other DNA
ttgtatcgtttcatagaataaattaaaacctaccctgtgagagaacaagaagaaaaagagagtcagttgaaaatgaaagtgattaagtccatctgtggggcagtttttggagtcagattg

SEQ ID NO: 23636 - DNA, 120 bp, synthetic construct
  source 1..120: mol_type = other DNA
tctaaaaatcatcccattcctttaaagtttcttttcaaaacaagtcttttttccctcctgattgcaaaaataatgcttacagaacaaattgaaacacatagaaaagccctgagaagaaag

SEQ ID NO: 23637 - DNA, 120 bp, synthetic construct; identical to SEQ ID NO: 7354
  source 1..120: mol_type = other DNA

SEQ ID NO: 23638 - DNA, 120 bp, synthetic construct
  source 1..120: mol_type = other DNA
atcaagatgtttcacatttgatatgttcttcagtaataatagactaaaatataataagatgtagggaagcagaacctaaactgtaggaggttaaaaaccagatgaaggccaggtgtggtg

SEQ ID NO: 23639 - DNA, 120 bp, synthetic construct
  source 1..120: mol_type = other DNA
taacatatagtggaaccctgtctctactaaaaaagtacaaaaattagctgggcatggtggcgggcacctgtaatcccagctacttgggaagctgaggcaagagaatcacttgaacccggg

SEQ ID NO: 23640 - DNA, 120 bp, synthetic construct; identical to SEQ ID NO: 7355
  source 1..120: mol_type = other DNA

SEQ ID NO: 23641 - DNA, 120 bp, synthetic construct
  source 1..120: mol_type = other DNA
catgtatttcattctttttttttttttttgagacagagtcttactctgtcgccaggctggagtgaagtggtgcgatctcggctcactgcaacctgtgcctcctgggttcaagcgattctc

SEQ ID NO: 23642 - DNA, 120 bp, synthetic construct
  source 1..120: mol_type = other DNA
cctcagatgatcgcccgcctcggcctccgaaagtgctgggattacaagcgtgagccaccgcgcccagcctttaattcatctttaaatgaattgtccccattttctaggagttattatctt

SEQ ID NO: 23643 - DNA, 120 bp, synthetic construct
  source 1..120: mol_type = other DNA
atgctgttgtaaatttgccattgctttcctttttgtcaatattcaaggattgtcttggaccatgggccaagcctgaattgtaagaaggaatggtaaagcatggtaacccattaaagggta

SEQ ID NO: 23644 - DNA, 120 bp, synthetic construct; identical to SEQ ID NO: 7356
  source 1..120: mol_type = other DNA

SEQ ID NO: 23645 - DNA, 120 bp, synthetic construct
  source 1..120: mol_type = other DNA
ataaatctaaggaggaaaacaatacaaccatctcagttaatggtaaaaaatatattaaatgaaattaagtaactctttgtgatagactagttttaagaaaagaaagaaccttcctcaacc

SEQ ID NO: 23646 - DNA, 120 bp, synthetic construct
  source 1..120: mol_type = other DNA
gccaatggactaagagaagctgaagcgaaaaagttgtaaatatttgaagggaaggtcagaatgtgtactgtttgtttatgctctttgctaagcatgtaatctacctagaaaagccaagaa

SEQ ID NO: 23647 - DNA, 120 bp, synthetic construct
  source 1..120: mol_type = other DNA
taggttcctgtacaccagcaatagccgtgtgagaagtactgtcactgtctgttacatctgataaaacctgcctattaatctttggcctgcttgtcagtttcttgtcccagacatgctttg

SEQ ID NO: 23648 - DNA, 120 bp, synthetic construct; identical to SEQ ID NO: 7357
  source 1..120: mol_type = other DNA

SEQ ID NO: 23649 - DNA, 120 bp, synthetic construct
  source 1..120: mol_type = other DNA
ctttcctccctactctctttgctctcccctctgtgctgtttccttttccttggtaaccagtgttgttactgtatgtatcttcctaagattttctttccatttacaaaaatgcatatccat

SEQ ID NO: 23650 - DNA, 120 bp, synthetic construct
  source 1..120: mol_type = other DNA
ctctgtctgttcccttggcagtcctctcccactgctctccaactcctgacaccttccattgtctctctttttctatttgccttcttgttcttaaggattcttaaatgttttaagcagcct

SEQ ID NO: 23651 - DNA, 120 bp, synthetic construct
  source 1..120: mol_type = other DNA
ttattaacttattaaataatccaggggtgagtataacaactgccctaatttttagatgctgatgagcataaataatgctttgagttgcctgcagcaagtagtttgatgagaatatctgat

SEQ ID NO: 23652 - DNA, 120 bp, synthetic construct; identical to SEQ ID NO: 7358
  source 1..120: mol_type = other DNA

SEQ ID NO: 23653 - DNA, 120 bp, synthetic construct
  source 1..120: mol_type = other DNA
caatctcatgatacatcttgtagttttccatggaaccttgactgacttccttctcatttaatgaagattttgtcttatatggctcattttctctagtacttctttattctagttcttgat

SEQ ID NO: 23654 - DNA, 120 bp, synthetic construct
  source 1..120: mol_type = other DNA
ataacaaaaaattataaccccttccataatttcagttctaccctgatcatcacttcccactttactggctcatgccttctagtgccaacaattcttttatctcactgagacttagaaccc

SEQ ID NO: 23655 - DNA, 120 bp, synthetic construct
  source 1..120: mol_type = other DNA
tacacttgccctcacttgcttcattgcttaatagagaaaccccagtttctctattaagaaccgcagttggttaaatccaactgtgcctactctacacttgtactttttaaaaatgtggtt

SEQ ID NO: 23656 - DNA, 120 bp, synthetic construct; identical to SEQ ID NO: 7359
  source 1..120: mol_type = other DNA

SEQ ID NO: 23657 - DNA, 120 bp, synthetic construct
  source 1..120: mol_type = other DNA
aactttttttttgttctctgcagttacaagcttttaaaaattttatttttaggccaggcgcagtggctcatgcctgtaatcccagcactttggaaggctgaggcaggtggatcacctgag

SEQ ID NO: 23658 - DNA, 120 bp, synthetic construct
  source 1..120: mol_type = other DNA
gagaattgcttgaacccaggaggcagaggttgcagtgagtcaagatggtgccattgcactccagcctgggtaacaagagcgaaactcaaaaaaaaaaaaaaaattaaattgacaaatgta

SEQ ID NO: 23659 - DNA, 120 bp, synthetic construct
  source 1..120: mol_type = other DNA
gcccaggatagcttcgaatacagaccaacacaaattcctaaactttcttaaaacatgagattttttttgcaatttttttttttggtagctcatcagctatcattagtggattttcttgtt

SEQ ID NO: 23660 - DNA, 120 bp, synthetic construct; identical to SEQ ID NO: 7360
  source 1..120: mol_type = other DNA

SEQ ID NO: 23661 - DNA, 120 bp, synthetic construct
  source 1..120: mol_type = other DNA
tattgttcactatagccttcctaccgtaggataaaggataaagtactagaatttattcctcctgtcttgctgtaattttgtatcctttaacaaatttctccctgtccctccctttcctct

SEQ ID NO: 23662 - DNA, 120 bp, synthetic construct
  source 1..120: mol_type = other DNA
ttccatccatattgctgtgaatgagtggattttatttatgtattttctttttttttttttttttttaagtagagatggggtttcaccatgttggccagtctgatcttgaactcctgactt

SEQ ID NO: 23663 - DNA, 120 bp, synthetic construct; identical to SEQ ID NO: 395
  source 1..120: mol_type = other DNA

SEQ ID NO: 23664 - DNA, 120 bp, synthetic construct
  source 1..120: mol_type = other DNA
gtcttgtggctgtactagtttgtattcccaccaataaagtgtaagtgttcccttttctcctgtccttgtcagcacttgttactttttaaattgaattgtttatctttttccccgtttgcc

SEQ ID NO: 23665 - DNA, 120 bp, synthetic construct; identical to SEQ ID NO: 7361
  source 1..120: mol_type = other DNA

SEQ ID NO: 23666 - DNA, 120 bp, synthetic construct
  source 1..120: mol_type = other DNA
tatgttgcccaggcttgtctcaaattcctggccttcagcgatctttcagcatcagcctcccaaagtgctgggactacaggtgtgagccaccatgctctgcccttctttgtttttgttttg

SEQ ID NO: 23667 - DNA, 120 bp, synthetic construct
  source 1..120: mol_type = other DNA
attacaggcatgagcccctggtaatagcacctggcctatttcatttgttttttggccatttttcttcttttgagaaatgtgtctgttcagatcatttgcccattttttaattggatttgt

SEQ ID NO: 23668 - DNA, 120 bp, synthetic construct; identical to SEQ ID NO: 7362
  source 1..120: mol_type = other DNA

SEQ ID NO: 23669 - DNA, 120 bp, synthetic construct
  source 1..120: mol_type = other DNA
ctggagtgcagtggcacgatctcggctcactgcaacctccgcctcccaggttcaagcaattctcctgcctcagcctcccgagtagctgggattacaggcgtgcaccaccacgcccggcta

SEQ ID NO: 23670 - DNA, 120 bp, synthetic construct; identical to SEQ ID NO: 397
  source 1..120: mol_type = other DNA

SEQ ID NO: 23671 - DNA, 120 bp, synthetic construct
  source 1..120: mol_type = other DNA
ccacagtgctgggattacaggtgtgagccaccgtgcctggccaaaatcagttttaatatatttctttaatctaatatatccctaacagtatcaccatgttggtcaagctggtctcgaact

SEQ ID NO: 23672 - DNA, 120 bp, synthetic construct
  source 1..120: mol_type = other DNA
ttttgtatagggtgagtgttgggcgtctgcttttattcttctgcatatggatatccatttttcccagcaccatttattgaagagactgtctttttcccaatgagtgtttttggcactttt

SEQ ID NO: 23673 - DNA, 120 bp, synthetic construct; identical to SEQ ID NO: 7363
  source 1..120: mol_type = other DNA

SEQ ID NO: 23674 - DNA, 120 bp, synthetic construct
  source 1..120: mol_type = other DNA
ccttcagctcctggcaaccaccagtctaccattttactttctgtctctatgagtttgattatttaagatacctcatgtaagtggaattatgcagtacttgttgttttatgattggcgtat

SEQ ID NO: 23675 - DNA, 120 bp, synthetic construct
  source 1..120: mol_type = other DNA
cagtggcgcgatctgggctcactgcaacccccgcctcccaggttcaagtgattcttctgcctcagcctcctaagtagctgggattacaggcatgagccaccacgcctaatttttgtattt

SEQ ID NO: 23676 - DNA, 120 bp, synthetic construct; identical to SEQ ID NO: 7364
  source 1..120: mol_type = other DNA

SEQ ID NO: 23677 - DNA, 120 bp, synthetic construct
  source 1..120: mol_type = other DNA
tctggatcatctggtattccattttaaattttttgaggaacgtccatactgtttttcatagtgattgtactgttttatagtcccaccaacaatgcacaggagttctaattcctccacatc

SEQ ID NO: 23678 - DNA, 120 bp, synthetic construct
  source 1..120: mol_type = other DNA
ctcagtgtgatttgatgtgagttttgccgatgattagtgatgttgagtagcttttcatattttttttggccatttatgtatcttctttgtaaaaatgtctattcaagtccttagctcatt

SEQ ID NO: 23679 - DNA, 120 bp, synthetic construct
  source 1..120: mol_type = other DNA
gttgccttttcactcttccttggtttcattctggttttggttgattgcttgccttgctgcacagaagtttgtaagtttgatgtaattctgtgtctatttttgcctttgttgcctgtgctt

SEQ ID NO: 23680 - DNA, 120 bp, synthetic construct; identical to SEQ ID NO: 7365
  source 1..120: mol_type = other DNA

SEQ ID NO: 23681 - DNA, 120 bp, synthetic construct
  source 1..120: mol_type = other DNA
gtgaagcctacagttttgttcttaatcaaggttgttttggctatttggggtcctttgagattacttactgatttcaggatggctttttctcattttgcaaaaaatgacactgaaatttga

SEQ ID NO: 23682 - DNA, 120 bp, synthetic construct
  source 1..120: mol_type = other DNA
ttttttgtcatttttagtgtacaagtcttttgcctccttgacgtttatttttaagtattttattttagttttactttatttttttagaaacgggatctcgttctgtcacccaggttggag

SEQ ID NO: 23683 - DNA, 120 bp, synthetic construct
  source 1..120: mol_type = other DNA
aaattttttgtacagatggggtcttgccatcttgcccaagctggtctcgaagtgctggaattacaggtgtgagccactgtgctggccttattcttaagtattattcattttgatgttatt

SEQ ID NO: 23684 - DNA, 120 bp, synthetic construct
  source 1..120: mol_type = other DNA
ttctaacagtttttttgtgaaacccttagggtttttcatgtataaaatcatgtcttctgtgaatggagataattttacttcttcctttccaatttggatgcctttttttcttgcctcctt

SEQ ID NO: 23685 - DNA, 120 bp, synthetic construct; identical to SEQ ID NO: 7366
  source 1..120: mol_type = other DNA

SEQ ID NO: 23686 - DNA, 120 bp, synthetic construct
  source 1..120: mol_type = other DNA
gaataaggctccctcagtcatcgtgtatgattttaatatgcctttgaatttggtttggtaacattttttgagaatatgtgcatcaaagtttagaagtgtttcttcagtttttttggtgag

SEQ ID NO: 23687 - DNA, 120 bp, synthetic construct
  source 1..120: mol_type = other DNA
cttactagttataggtttgttaagattttctgtttcttcgtgattcagtcctggcaggttgtgtgtttctaataattcatccatttcttctaggttgtctaaattgttggcatgtgatcg

SEQ ID NO: 23688 - DNA, 120 bp, synthetic construct
  source 1..120: mol_type = other DNA
caattttattgatcttatttaagatctttttaaatgtaggcatttactgctataaacttccctcttagcacggcttttctgtatcccttaagttttggaatgttctgttttcttcttcat

SEQ ID NO: 23689 - DNA, 120 bp, synthetic construct; identical to SEQ ID NO: 7367
  source 1..120: mol_type = other DNA

SEQ ID NO: 23690 - DNA, 120 bp, synthetic construct
  source 1..120: mol_type = other DNA
gttcaagtgattctcctgcctcaccttcccgagtagctgggattataggcatgtgccaccacatctagctaattttgtatttttagtagagacagggtttctccaatttggtcaggctgg

SEQ ID NO: 23691 - DNA, 120 bp, synthetic construct
  source 1..120: mol_type = other DNA
tctccagtgttcaaattctgtgtctcctcattgatccgctctccggtggttctgtccattattgaaagtggggatactgaaatctcctgctgttactgggttactgtctgttttttcttt

SEQ ID NO: 23692 - DNA, 120 bp, synthetic construct
  source 1..120: mol_type = other DNA
aattaacttggctgattggccttaccactaattaccactaagttcaggagagtccttaaaactgcacagcagtagttcctagttcatttattctcccagtgtgacctaaatgatcattta

SEQ ID NO: 23693 - DNA, 120 bp, synthetic construct; identical to SEQ ID NO: 7368
  source 1..120: mol_type = other DNA

SEQ ID NO: 23694 - DNA, 120 bp, synthetic construct
  source 1..120: mol_type = other DNA
tctcatcttaaaacacaacaaaacttctctgaactccatttttccttctaaccgttgttcatttcccaccccgaccccttttttccctaaaagaagtatctgcactttgtttccaatttt

SEQ ID NO: 23695 - DNA, 120 bp, synthetic construct
  source 1..120: mol_type = other DNA
ttgacactggtgattacttatttcctgctcgttgaaacactttgttcacttggcttccaggatagcatacaaagaaattccccatctcagtcttttgtcacagagtccctccagggctca

SEQ ID NO: 23696 - DNA, 120 bp, synthetic construct; identical to SEQ ID NO: 7369
  source 1..120: mol_type = other DNA

SEQ ID NO: 23697 - DNA, 120 bp, synthetic construct
  source 1..120: mol_type = other DNA
atcaggcggctagctagtttcttaacagtattgaataatatatttttaattgtttgaattgtcatctttattgttctgagaataatatcaaggatttaagtgaaattgccatctaatgtt

SEQ ID NO: 23698 - DNA, 120 bp, synthetic construct
  source 1..120: mol_type = other DNA
agagcacagaaacaaactttaaatttagcatttaatagaccaggaacaacacaccagtaaagaaaggggtcactaattactgtttggatacttggattttagtttgaaaaataagtaaaa

SEQ ID NO: 23699 - DNA, 120 bp, synthetic construct
  source 1..120: mol_type = other DNA
aattagattgggagtaaaaggcagaaatagtaaaatcatcacatgcacaaatgctgtctgtatttaatcccagttaaagacatgggaaataagataaccctaaggctataatgctcacct

SEQ ID NO: 23700 - DNA, 120 bp, synthetic construct; identical to SEQ ID NO: 7370
  source 1..120: mol_type = other DNA

SEQ ID NO: 23701 - DNA, 120 bp, synthetic construct
  source 1..120: mol_type = other DNA
aggggaagaggaagcaggcctatcttcacatgacagcaggagagacagcaaagaggggaatgccacatgcttccagatctcttgagaactcactatcatgagtacagcaagggggaaatc

SEQ ID NO: 23702 - DNA, 120 bp, synthetic construct
  source 1..120: mol_type = other DNA
ttggttcaaccatagaggaagagaatttgactaaatacatattttagggaaaagggaagtactgtgggctcagcggtttgatcttaaaatttctatgcagtgatggcatactatattcct

SEQ ID NO: 23703 - DNA, 120 bp, synthetic construct
  source 1..120: mol_type = other DNA
cattgaatcaaatgtttcatgtaaaacaggatggaaatgaacttttctatttggctaagtggtgtaggcagaaaaacctataggctttctcttttcatcaacttcatgctgagtcctgtc

SEQ ID NO: 23704 - DNA, 120 bp, synthetic construct; identical to SEQ ID NO: 7371
  source 1..120: mol_type = other DNA

SEQ ID NO: 23705 - DNA, 120 bp, synthetic construct
  source 1..120: mol_type = other DNA
cttcagcctcctgagtagctgggattacaggtgcctgcaccatgcccggcttatttttgtatttttagtagagatagggtttcatcatattggccaggctggtctcgaactcctgacctt

SEQ ID NO: 23706 - DNA, 120 bp, synthetic construct
  source 1..120: mol_type = other DNA
taactcttcctctgacccttctcttaccatgatgcacttgccttgtagtgggaaaacctcagggatgaaaagggtgtcaggacaattctaagacaccaatggaatagtgctggaagaatt

SEQ ID NO: 23707 - DNA, 120 bp, synthetic construct
  source 1..120: mol_type = other DNA
acataggtataaatcttggtgaccttggattaggcagtgatttcttcaatatgacaacaaagcacaagcaatcagaaaaaagtagataaattaaactttatcaaaattaaaaacctgtgt

SEQ ID NO: 23708 - DNA, 120 bp, synthetic construct
  source 1..120: mol_type = other DNA
cgtggctcacacctgtaattccagcactttgggagactgaggtgggcggatcacttgaggtcaggagttcgagaccagcctggccaacatggtgaaacgccatctctgctagaaatacaa

SEQ ID NO: 23709 - DNA, 120 bp, synthetic construct; identical to SEQ ID NO: 7372
  source 1..120: mol_type = other DNA

SEQ ID NO: 23710 - DNA, 120 bp, synthetic construct
  source 1..120: mol_type = other DNA
ccgaggagggcagatcatgaggtcaggagatcgagaccatcctggctaacacagcgaaaccccgtctccactaaaaatacaaaaaattagccgggcgtggtggcaggttcctgtagtccc

SEQ ID NO: 23711 - DNA, 120 bp, synthetic construct
  source 1..120: mol_type = other DNA
ccaaaaaaaaaaaaaaaaaaaaaaaaaaatatatatatatatatatatatatatatatatatatatatatatatatcaaaaccacaatgagattctgcttcttacccactaggatgtcta

SEQ ID NO: 23712 - DNA, 120 bp, synthetic construct; identical to SEQ ID NO: 7373
  source 1..120: mol_type = other DNA

SEQ ID NO: 23713 - DNA, 120 bp, synthetic construct
  source 1..120: mol_type = other DNA
aacatagatgaattttgaaaacattaatgcaggttgaaagaagtcagtcacaaaatatcgtatgttgtattattcttatttttatgaaaggtccggaaaaggtaagtccacagagaaagt

SEQ ID NO: 23714 - DNA, 120 bp, synthetic construct; identical to SEQ ID NO: 407
  source 1..120: mol_type = other DNA

SEQ ID NO: 23715 - DNA, 120 bp, synthetic construct
  source 1..120: mol_type = other DNA
tatttctggtggaaaacaactatgtaattttcaacagataactcagaagaaattttaaaagtcatgtgacccaactgacagaattccttttatttccatcacctgtttatatgagcaagc

SEQ ID NO: 23716 - DNA, 120 bp, synthetic construct
  source 1..120: mol_type = other DNA
ttctgcctcagcctcttgagtagctgggactacaggcacgtgccaccatgcctggctaattttttgtatttttagtagagacggggtttcaccatgttggccaggctggtctcaatctcc

SEQ ID NO: 23717 - DNA, 120 bp, synthetic construct; identical to SEQ ID NO: 7374
  source 1..120: mol_type = other DNA

SEQ ID NO: 23718 - DNA, 120 bp, synthetic construct
  source 1..120: mol_type = other DNA
ccaggctggagtgcagtggtgcactattttggctcactgcaacctctgcccctgggttcaagcatttctcccatgtcagccttcccgagtagctgggactacagatgtgtgccaccatgc

SEQ ID NO: 23719 - DNA, 120 bp, synthetic construct
  source 1..120: mol_type = other DNA
gagccactgttcccagcctccagtagaatttttacctttaatgttgttaattactgtcagatcttttttttttttttttttttttttagatggactcttactctgttgctaggctggagt

SEQ ID NO: 23720 - DNA, 120 bp, synthetic construct
  source 1..120: mol_type = other DNA
tatttttagtagagatgggtttcaccatgttagccaggatggtcttgatctcctgacattgtggtccgcttgcctcagcttcccagagtgctgggattacaggcatgagccagcatgcct

SEQ ID NO: 23721 - DNA, 120 bp, synthetic construct; identical to SEQ ID NO: 7375
  source 1..120: mol_type = other DNA

SEQ ID NO: 23722 - DNA, 120 bp, synthetic construct
  source 1..120: mol_type = other DNA
aatgtactggaaatatgaattcaaggaggaaaatatgctgtgaaaatttcactttaaaatggatcatgatgggtatcagatcacaattgtatttggattctgttgaagagatttaaggtt

SEQ ID NO: 23723 - DNA, 120 bp, synthetic construct
  source 1..120: mol_type = other DNA
cttggcaaatactctgttcagtgattcacattctgtttaatagcccactgctttgtttctttctggtaagtcttctgccttaatgcagtcttctctagctactatgtgtccttttttcat

SEQ ID NO: 23724 - DNA, 120 bp, synthetic construct; identical to SEQ ID NO: 7376
  source 1..120: mol_type = other DNA

SEQ ID NO: 23725 - DNA, 120 bp, synthetic construct
  source 1..120: mol_type = other DNA
gcaacctctgcctcccggattcaagcgattctcctgtctcagcctcccgagtagctgggattacaggtgcatgccaccacgcctagctaatttttgtatttttagtagagacagggtttc

SEQ ID NO: 23726 - DNA, 120 bp, synthetic construct
  source 1..120: mol_type = other DNA
tgtcaattatgtagtgtagttggtatattttctgttgttactgtaacaaattaccatacttttagtggtttatagagcacaaatttattatcttatggttctgcaggtcagaagtccaac

SEQ ID NO: 23727 - DNA, 120 bp, synthetic construct
  source 1..120: mol_type = other DNA
aggctccccttcctgttcaccttcacagtcagcaaggtgacatggctctgacctcctgtcatctctttcccaccgtacttgggagaagttctctgcttttaaggaccatgtgagtagatt

SEQ ID NO: 23728 - DNA, 120 bp, synthetic construct; identical to SEQ ID NO: 7377
  source 1..120: mol_type = other DNA

SEQ ID NO: 23729 - DNA, 120 bp, synthetic construct
  source 1..120: mol_type = other DNA
tactgaaataaagtaatagtttagggttctagatgggaggcaagagatttctaccaatctttttgtgtctgtctcaaataagcaaatatgtgatcacctaactcacaaggttgttgtgaa

SEQ ID NO: 23730 - DNA, 120 bp, synthetic construct; identical to SEQ ID NO: 411
  source 1..120: mol_type = other DNA

SEQ ID NO: 23731 - DNA, 120 bp, synthetic construct
  source 1..120: mol_type = other DNA
tagatatagatatagttttttttttttagatagagagtttcgctcttgtttcccaggatggagtgcaatggtgccatcttgactcaccgcacactccacctccttggttcaagcagttct

SEQ ID NO: 23732 - DNA, 120 bp, synthetic construct
  source 1..120: mol_type = other DNA
gggtttctccatgttggtcaggctggtcttgaactcccgacctcaggtgatctgcctgcttctgcctcccaaagtgctgggattataggggtgagccaccactcctggcctatctagata

SEQ ID NO: 23733 - DNA, 120 bp, synthetic construct; identical to SEQ ID NO: 7378
  source 1..120: mol_type = other DNA

SEQ ID NO: 23734 - DNA, 120 bp, synthetic construct
  source 1..120: mol_type = other DNA
acagtgaatagatctttttcccctaagcagcacaaagatgccattttgggaggttaaattactttctaaaagttgctgtgaaggagagaaggaaaagagatcaggttacacattctttgt

SEQ ID NO: 23735 - DNA, 120 bp, synthetic construct
  source 1..120: mol_type = other DNA
ccccatagtagggagggagggaattaggcagttttcctaacagggccccgaagagtaccattttaacttaaatactcttaaaagttgctacttattttttttaaggctttctttactttt

SEQ ID NO: 23736 - DNA, 120 bp, synthetic construct; identical to SEQ ID NO: 7379
  source 1..120: mol_type = other DNA

SEQ ID NO: 23737 - DNA, 120 bp, synthetic construct
  source 1..120: mol_type = other DNA
aagaattttcacataaaaacgtcataaaatcccagtgccatattctgaatattaatttgactgttttatgtcgtatttttttcccagttggttttagttagaatatatgcttttttttaa

SEQ ID NO: 23738 - DNA, 120 bp, synthetic construct
  source 1..120: mol_type = other DNA
cccttttctgaggggttaggaagtttaagcattatttgtaagctatttgtaaatccctgtcaaacattatttgtccattaagaaatactatttttttcttcacttttaggtcattttaag

SEQ ID NO: 23739 - DNA, 120 bp, synthetic construct
  source 1..120: mol_type = other DNA
ttatttatttttagtattttgagagtaggtgctgtattttcttttctttccttgtttcttcttttttgttttttgagacagaatctctctctgttgcccaggctggagtacagtggcatg

SEQ ID NO: 23740 - DNA, 120 bp, synthetic construct; identical to SEQ ID NO: 7380
  source 1..120: mol_type = other DNA

SEQ ID NO: 23741 - DNA, 120 bp, synthetic construct
  source 1..120: mol_type = other DNA
tatattgtggctccaatttttcttcccagtttatactcttatttttcctttctttttcttttcttttcttttttttttttttttgagacagtcttgctctgtcgcccaggctggagtgca

SEQ ID NO: 23742 - DNA, 120 bp, synthetic construct
  source 1..120: mol_type = other DNA
ttttttttgagacggagtcttgctctgttgtctgggctggagtgtagtggcccaatctcggttcactgcaacctccacctcctgggttcaagtgattctcctgcctcagcctcctgagta

SEQ ID NO: 23743 - DNA, 120 bp, synthetic construct
  source 1..120: mol_type = other DNA
tcggcctccctgagtgttgggattacaggcatgaactactgcgcccagccaatttttgtatttttagtagagacgaggtttcaccacgttggccagcctggtcttgaactcctgacctca

SEQ ID NO: 23744 - DNA, 120 bp, synthetic construct; identical to SEQ ID NO: 7381
  source 1..120: mol_type = other DNA

SEQ ID NO: 23745 - DNA, 120 bp, synthetic construct
  source 1..120: mol_type = other DNA
tttaaaaattagatgtaggtaagcctcagaaatgggaaaatggagataaatcttaggagagatttttgaatcttttacttaagactgtgttcaaaactttgtctatttgctatttattat

SEQ ID NO: 23746 - DNA, 120 bp, synthetic construct
  source 1..120: mol_type = other DNA
ttttttagtcctatttttttttactagggaattatgactcattttggcacttagcttttgtagcttactaccgtatgacattttatatctttgcaaaaaccaagtaattagaccattcat

SEQ ID NO: 23747 - DNA, 120 bp, synthetic construct
  source 1..120: mol_type = other DNA
ttataaatatataatttgctttaattacttaaatgttccttgagccttagaacttaaatcctgatgagggttttactttttaaaatactgaagtttattatttatgcatgttttacagaa

SEQ ID NO: 23748 - DNA, 120 bp, synthetic construct; identical to SEQ ID NO: 7382
  source 1..120: mol_type = other DNA

SEQ ID NO: 23749 - DNA, 120 bp, synthetic construct
  source 1..120: mol_type = other DNA
gctgagcactgtgccttgtgtcagtagtcagtggtgttcctttagtccttgttatgttaataaaaaagctttggtttttgcaagactttgtttttagagattctggaaaggaacatatta

SEQ ID NO: 23750 - DNA, 120 bp, synthetic construct
  source 1..120: mol_type = other DNA
tcaaaggatattgtccttcaaaatctttaccttgcatttttgttactgtgatttaagatggttgtaattatcattgattgatgatacctatcaaaaggcaaccctaaccaaccatttctg

SEQ ID NO: 23751 - DNA, 120 bp, synthetic construct
  source 1..120: mol_type = other DNA
caacttcacaaggtaatttaggctttcgtgaaaactagagtgtgaaaatgcttagtaatgtgctgggcacactgcaggtgctctacaaataactactgataactactttttttcatgagt

SEQ ID NO: 23752 - DNA, 120 bp, synthetic construct; identical to SEQ ID NO: 7383
  source 1..120: mol_type = other DNA

SEQ ID NO: 23753 - DNA, 120 bp, synthetic construct
  source 1..120: mol_type = other DNA
gtgctgtgattacaagagtaattgtaaatttaaaatgaatttctttcccatcccaaaccagtatcaaaatgcaaatatagtaaattactttttaaaagagagatgtttaatggcagttgt

SEQ ID NO: 23754 - DNA, 120 bp, synthetic construct
  source 1..120: mol_type = other DNA
acaggttgcaaactagtgacctgtcagttggatttggcctgtaggcatgtttttggcttataatgtaattttttaaaaattagtggccaacaattaaaaattgggagagttttcaaaaga

SEQ ID NO: 23755 - DNA, 120 bp, synthetic construct
  source 1..120: mol_type = other DNA
cagttgccatcactcactgcatttggactctttcttcatatagtgagccgaggggggagtgatagtctcatgttcctatcaaaagagggaaacctaaaataaggccatttttgtttttgt

SEQ ID NO: 23756 - DNA, 120 bp, synthetic construct
  source 1..120: mol_type = other DNA
agctgggattacaggcttccgccaccatgcccagctaatttttgtattttttagtagagacgggatttcaccatgttggccaggttggtcttgaactcctgagctcaagtgatccacccg

SEQ ID NO: 23757 - DNA, 120 bp, synthetic construct; identical to SEQ ID NO: 7384
  source 1..120: mol_type = other DNA

SEQ ID NO: 23758 - DNA, 120 bp, synthetic construct
  source 1..120: mol_type = other DNA
cctaagtgtctagagatggcaagaaactttgtatgttttgcatgacagtaattgtaaatatgagcttatctggaaatattgtttgcatagatgttaaaaatatgggcaggacaatgtgta

SEQ ID NO: 23759 - DNA, 120 bp, synthetic construct
  source 1..120: mol_type = other DNA
gctatcacgggctcactggagccttgacctccccacgctcaggtgatcctcccacctcagcctcctgagtagttggtggcgtgcgccaccatgcccaactgatagtttgtattttttgta

SEQ ID NO: 23760 - DNA, 120 bp, synthetic construct
  source 1..120: mol_type = other DNA
tgatagaagcttagagattaatatcacctagttagctctgtttgtgtatggtatctgtgtgaattttgactgtttctcccctctcttctttagtcattacccctgtttttggttcattcc

SEQ ID NO: 23761 - DNA, 120 bp, synthetic construct; identical to SEQ ID NO: 7385
  source 1..120: mol_type = other DNA

SEQ ID NO: 23762 - DNA, 120 bp, synthetic construct
  source 1..120: mol_type = other DNA
tggagtgcagtggcgcatgttggctcactgcaagctctgcctcccgggttcacgccattctcctgcctcagactcccgagtagcttggactacaggcacccgccaccatgcccggctaat

SEQ ID NO: 23763 - DNA, 120 bp, synthetic construct
  source 1..120: mol_type = other DNA
accgccccccacccttgcctgattcttattctcttgtccaccacagtttgcattcctcaggccatttttgtctgcgtcgttgagggcctccattgtccagccccatctcctttactctct

SEQ ID NO: 23764 - DNA, 120 bp, synthetic construct; identical to SEQ ID NO: 7386
  source 1..120: mol_type = other DNA

SEQ ID NO: 23765 - DNA, 120 bp, synthetic construct
  source 1..120: mol_type = other DNA
aggaaagggagaagaaactaaaaatttgacgtgggatgtcacattcaaataagcagttttttcccctttagaacatttgcttataacctaggtcatttaaccagttgaggttcaagtagc

SEQ ID NO: 23766 - DNA, 120 bp, synthetic construct
  source 1..120: mol_type = other DNA
taactcaacaccaacttgtcagaagttagctgaattttagataatttctttcattccagccaaaaataataatcacagacatgtttaaaaaaaaaaaaggagttaattgggaggctgagg

SEQ ID NO: 23767 - DNA, 120 bp, synthetic construct
  source 1..120: mol_type = other DNA
attagccaggcattgtgatacatggctgtggccctatctagggatctgcactctagcctgggcgacagagcaagacccggtctcaaaaaaaaaaaaaaaaaaaagaccctaagccttttt

SEQ ID NO: 23768 - DNA, 120 bp, synthetic construct
  source 1..120: mol_type = other DNA
cagatgggtagaataaaatatactgatgttactgccatagtcacaattctaaagcacaacataattgtaataatgtcacaagcttaccaaggttgctacatgaaacagaagaaaattaaa

SEQ ID NO: 23769 - DNA, 120 bp, synthetic construct; identical to SEQ ID NO: 7387
  source 1..120: mol_type = other DNA

SEQ ID NO: 23770 - DNA, 120 bp, synthetic construct
  source 1..120: mol_type = other DNA
tttattgatttgagatgttacttttattatattctcatatatatttggatctacttttggtcttttgtgacctatctcttgacagtggaatcacactgtttatatcagtatagctttggg

SEQ ID NO: 23771 - DNA, 120 bp, synthetic construct
  source 1..120: mol_type = other DNA
attcattgactgattgatttgatttggagaggactaccatctttacagtatatagtttactaattaataaattcgcgtttcatctttcacaagtcttcttttttgactttcagtaaagtt

SEQ ID NO: 23772 - DNA, 120 bp, synthetic construct
  source 1..120: mol_type = other DNA
tcaacatatttaacttctttttctaataattttcagtttattctcataggggatttaaaatatatcatctttaaataataataactttgctaaatcagttttaatatattcacaattggg

SEQ ID NO: 23773 - DNA, 120 bp, synthetic construct
  source 1..120: mol_type = other DNA
actccacctcgtgggttcaagtgattctcctgcctcagtctccctggtagctgggactacaggcacccaccaccacacccggctaatttttatatttttagcagagatggggtttcgcca

SEQ ID NO: 23774 - DNA, 120 bp, synthetic construct; identical to SEQ ID NO: 7388
  source 1..120: mol_type = other DNA

SEQ ID NO: 23775 - DNA, 120 bp, synthetic construct
  source 1..120: mol_type = other DNA
ttttttttttttttgctattctaattattttatttgtttgtgtgggtttagaatagcagaaatttattgtctcccaattctagaggctgtacttccaaaatcaagggatccaaaatagga

SEQ ID NO: 23776 - DNA, 120 bp, synthetic construct
  source 1..120: mol_type = other DNA
aggcgttccttgggtttcagatggcagttttatccctgtctctccccacatgtctgtggtttcatatctagatgtctccctttttataaggatggtatagtcatataggattaggcccta

SEQ ID NO: 23777 - DNA, 120 bp, synthetic construct; identical to SEQ ID NO: 7389
  source 1..120: mol_type = other DNA

SEQ ID NO: 23778 - DNA, 120 bp, synthetic construct
  source 1..120: mol_type = other DNA
gcaggatcttggctcactgcaacctccacctccccagttcaagcaattctcctgcctcagcctcccgagtagctaggactacaggcgcgtgccaccacgctgggctaattttttgtattt

SEQ ID NO: 23779 - DNA, 120 bp, synthetic construct
  source 1..120: mol_type = other DNA
ttcagctttcattttctaaggacatggatattctgtgtaatcattcttcagttatcaaattcagggagtttaacattgaggcggcactttgatctgcagtctgtattccagttttgtcag

SEQ ID NO: 23780 - DNA, 120 bp, synthetic construct
  source 1..120: mol_type = other DNA
tgcatttggttgtcctgcctctttaatctccttctctctgaagcagttccttagccacctgttgtgtttcatgacatcaacatttttgaagaacaccaggccagttattttctagaatat

SEQ ID NO: 23781 - DNA, 120 bp, synthetic construct; identical to SEQ ID NO: 7390
  source 1..120: mol_type = other DNA

SEQ ID NO: 23782 - DNA, 120 bp, synthetic construct
  source 1..120: mol_type = other DNA
cattctgaattctgtaagaacccttcttactcccttatgtatgtatttgatttatctatttagttgtcatcactatggagtgatagactccatttcgttcaatgagttatagtccttatg

SEQ ID NO: 23783 - DNA, 120 bp, synthetic construct
  source 1..120: mol_type = other DNA
agctggaactacaggtgcacaccaccaaacctgacgaaatttttttttttaaagtataaatgggggtttcaccatgttggccaggcttgatactcctgggctcaagggatctgcctgtgt

SEQ ID NO: 23784 - DNA, 120 bp, synthetic construct
  source 1..120: mol_type = other DNA
tgtcctttggatatggccttgtcattttttcttccctttaaaaaaaaataaagagcacttctttatgccatagtgatgttccaggcttctataggaccttctttgccccatccccagaat

SEQ ID NO: 23785 - DNA, 120 bp, synthetic construct
  source 1..120: mol_type = other DNA
aaatgtatctaggaaatagactattattttttaacatactatctttaaaatcatttttagtttatactaatacttctaattctaaaccaacccctcaggatttttttggcctttccccag

SEQ ID NO: 23786 - DNA, 120 bp, synthetic construct; identical to SEQ ID NO: 7391
  source 1..120: mol_type = other DNA

SEQ ID NO: 23787 - DNA, 120 bp, synthetic construct
  source 1..120: mol_type = other DNA
ttgaattcctggcctcaagcaattctcctacctcagtctcccaaagagctgggattacaggcatatgccaccatgcccagtccccatctttcttatgtattccgtttaatctgttttgac

SEQ ID NO: 23788 - DNA, 120 bp, synthetic construct
  source 1..120: mol_type = other DNA
actgcaacctctgcctcctgaattcaagcagttttcctgctttagcctccctacaagctgggattacaggcgcacacctccatgcccggctaatttttgtatttttagtagagacggggt

SEQ ID NO: 23789 - DNA, 120 bp, synthetic construct; identical to SEQ ID NO: 7392
  source 1..120: mol_type = other DNA

SEQ ID NO: 23790 - DNA, 120 bp, synthetic construct
  source 1..120: mol_type = other DNA
gctatttgtgtcatctttttaattaattggcttagctaaaggcttatcaattttatgatcttttcaaagaaccagcttttagtttttcttactgatttcctattttcagtatcattgata

SEQ ID NO: 23791 - DNA, 120 bp, synthetic construct
  source 1..120: mol_type = other DNA
ttcaccgaaagagttaagagatttgaagcaatggcctgagtttgaatcctagttctccactcattgacaaaccacttgtcctgtctgaaccctatctcccataaaatggaagaaggatat

SEQ ID NO: 23792 - DNA, 120 bp, synthetic construct
  source 1..120: mol_type = other DNA
acaatcaccattggaattttgcctcaatttatggtcaaactttgtctggttttcagtttccagaatttccatctctcacctgctacccaaatcaggatggctaccaaacctgcccatctt

SEQ ID NO: 23793 - DNA, 120 bp, synthetic construct; identical to SEQ ID NO: 7393
  source 1..120: mol_type = other DNA

SEQ ID NO: 23794 - DNA, 120 bp, synthetic construct
  source 1..120: mol_type = other DNA
ttatcactactatgtattttcagaactttttcatcatcccaaacaggcccccctcccttttttttttgagacagggtctcactctgtcacccaggctggagtgcagtggcacaatcatag

SEQ ID NO: 23795 - DNA, 120 bp, synthetic construct
  source 1..120: mol_type = other DNA
atgcggttttgccatgttgcccagtctggtcttgaattcctgggctcaagtgatcctcctgcctcagtcttccaaagtccggggattacaggagtaaggcaccacacccgacctcttttt

SEQ ID NO: 23796 - DNA, 120 bp, synthetic construct
  source 1..120: mol_type = other DNA
gtgtgagccaggacgcctacccgcaaacagaaactctttacccattaaacaataactctgtagtattccttccttcctgcccctggtaaccactatagtactttctgtctaatatgaatt

SEQ ID NO: 23797 - DNA, 120 bp, synthetic construct; identical to SEQ ID NO: 7394
  source 1..120: mol_type = other DNA

SEQ ID NO: 23798 - DNA, 120 bp, synthetic construct
  source 1..120: mol_type = other DNA
gaactactgacctcaggtgatccacccgcctcagtctcccaaagtgctgggattacaggcgtgagccaacacgcctggctgctgaatattattttattgtgtagagtaatgtattcattc

SEQ ID NO: 23799 - DNA, 120 bp, synthetic construct
  source 1..120: mol_type = other DNA
taggaaaagaattacagaatcaactctgtgcttaaccatttgaagaactggttttcttttccaaaatggctgcaccatttacagccctgccagcaggttataaaagttccagcttctctg

SEQ ID NO: 23800 - DNA, 120 bp, synthetic construct
  source 1..120: mol_type = other DNA
tgcttattgctcatatgcatatgttctttggagaactgtctgagattctttgctcatttttaactgggttatttctctttttattgttgaatttcaatggttctttatatattccagata

SEQ ID NO: 23801 - DNA, 120 bp, synthetic construct
  source 1..120: mol_type = other DNA
atttttagtagagatggggttttgccatgttggtcgggcgggtcttaaactcctgatctcaggtgatccacccaccttgccggtgaaccaccacagcacccggcccgtttttggtttttt

SEQ ID NO: 23802 - DNA, 120 bp, synthetic construct; identical to SEQ ID NO: 7395
  source 1..120: mol_type = other DNA

SEQ ID NO: 23803 - DNA, 120 bp, synthetic construct
  source 1..120: mol_type = other DNA
tatttttgtgtgtcttaatatgtcttctaagtctgttttaatggatggattctccccttcctgcctctcatttatctgttgaagaattttgcctatttgacctgtagagtttcctatggt

SEQ ID NO: 23804 - DNA, 120 bp, synthetic construct
  source 1..120: mol_type = other DNA
ctatcttacaggcagtcagtatgctattatattaggagacacacaatgtgtggttgtgtctctgtgatattattttagtagctttgatgctgaatgctgattaggtcttcattggggttt

SEQ ID NO: 23805 - DNA, 120 bp, synthetic construct
  source 1..120: mol_type = other DNA
accaccctggtcaacatagtgagacatcatttgtacaaaaaattagaaaaattagccaggcgtggtggtgtcaacctgtagtcctggctgttcgggaggctgagatgagaggattgtttg

SEQ ID NO: 23806 - DNA, 120 bp, synthetic construct; identical to SEQ ID NO: 7396
  source 1..120: mol_type = other DNA

SEQ ID NO: 23807 - DNA, 120 bp, synthetic construct
  source 1..120: mol_type = other DNA
catccaggttgttgcatgtgtgaagagtgttgtccctttctgtggttgattatcattccattggatggatgtgccagttttttattcgttcacttttagaaggacttacgtgttgtgtcc

SEQ ID NO: 23808 - DNA, 120 bp, synthetic construct
  source 1..120: mol_type = other DNA
gtgctgtatgccttttagttctccagggaataggaaagacaagatacatgcttgttctctccttttactggcagtttttaaaaacagactgtttcttagagcattttcaggttcacagca

SEQ ID NO: 23809 - DNA, 120 bp, synthetic construct
  source 1..120: mol_type = other DNA
cactcttggtgttgtacattatatgggttatattatatattaaatgcagagtgatgtctattcaccattatggtatcatagagaatagtttcactgccctataaatcctctgtgctttct

SEQ ID NO: 23810 - DNA, 120 bp, synthetic construct; identical to SEQ ID NO: 7397
  source 1..120: mol_type = other DNA

SEQ ID NO: 23811 - DNA, 120 bp, synthetic construct
  source 1..120: mol_type = other DNA
atttctgcctcacacctggaatatctccaagaagccttgggtttttttcagtgggaaatggtatttcaaaaccactgccaggactgttggggtgttctaatgcttattgctactgagtta

SEQ ID NO: 23812 - DNA, 120 bp, synthetic construct
  source 1..120: mol_type = other DNA
tgtctctgacagttacaaaacaacaatactaatatatccaccatgggttgaaaccagttaaaaccattctttgcatgcgctctccatttccccccattccctgtgcagttgtcttccata

SEQ ID NO: 23813 - DNA, 120 bp, synthetic construct; identical to SEQ ID NO: 7398
  source 1..120: mol_type = other DNA

SEQ ID NO: 23814 - DNA, 120 bp, synthetic construct
  source 1..120: mol_type = other DNA
tttggaaagtttgttgttaatgtagtttttttcccttataaattacttgatgtttttgcctagatgctcaagtttattttttccttaaaaatcctgcaattttactatatcttggtattg

SEQ ID NO: 23815 - DNA, 120 bp, synthetic construct
  source 1..120: mol_type = other DNA
cctctcgcctcagcttccccaatgctgagagtatgggctgcattagctcttttttcttaattttggcaaaaatttcttggattacagtttttagtgttgcttgttctcctgcttttgctt

SEQ ID NO: 23816 - DNA, 120 bp, synthetic construct
  source 1..120: mol_type = other DNA
ctcgaaggcattatctgtaatattcattcttgtgttccttgggttttattcttcatttctcaaataaatttttaaatttctaattacttactgagtcatgttctcacatttctgagtttc

SEQ ID NO: 23817 - DNA, 120 bp, synthetic construct; identical to SEQ ID NO: 7399
  source 1..120: mol_type = other DNA

SEQ ID NO: 23818 - DNA, 120 bp, synthetic construct
  source 1..120: mol_type = other DNA
gttcaggcaattcttctgcctcagcctcccgagtagctgggactataggtgcgcgccaccatgctcggctaatttttgtatttttagtagagacagggtttcaccatattggccaggctt

SEQ ID NO: 23819 - DNA, 120 bp, synthetic construct
  source 1..120: mol_type = other DNA
ccccttccccattttcttataataacttctatgagatttggatctgaaaactttgccatgggtcagttttattggaagttcattttcctgaatgtttggaagaaagcctagtgactcagg

SEQ ID NO: 23820 - DNA, 120 bp, synthetic construct
  source 1..120: mol_type = other DNA
gagaaccttttcctgttcaattctgttttaattttcagcagttttttttctgtgtgagtgaggctgtttcctagcagggaggtctggttggtcattttcaagttcatcagggcttcatca

SEQ ID NO: 23821 - DNA, 120 bp, synthetic construct; identical to SEQ ID NO: 7400
  source 1..120: mol_type = other DNA

SEQ ID NO: 23822 - DNA, 120 bp, synthetic construct
  source 1..120: mol_type = other DNA
atgggaacatttaattcctttgctccttgatgttagatgggatcaggtgactgatgctggccagtggactttgagggaggttgtgttacttctgagttggcatagtgaaaagcccatgaa

SEQ ID NO: 23823 - DNA, 120 bp, synthetic construct
  source 1..120: mol_type = other DNA
tctttgaataactggaaatggcccctgcatacccgtgttggacatattacatgaggcagaaataaatttctgttgtgctaagccattgaaatgttggggttgttaccacagcatcactta

SEQ ID NO: 23824 - DNA, 120 bp, synthetic construct
  source 1..120: mol_type = other DNA
tttcagctttctctttagtttttttcatgaagctgcttagaaaatttaaaattatacacgtggtcacatttgtggcattatccgcagcactgacccctaccttagtaattcagtacccct

SEQ ID NO: 23825 - DNA, 120 bp, synthetic construct; identical to SEQ ID NO: 7401
  source 1..120: mol_type = other DNA

SEQ ID NO: 23826 - DNA, 120 bp, synthetic construct
  source 1..120: mol_type = other DNA
acatgcagagagggtccagttggggttgacgaaccactctttatgggaacagcacccaagatacaccagacactggtggaaaattctaacaggaattaacttgttaagggaaagataata

SEQ ID NO: 23827 - DNA, 120 bp, synthetic construct
  source 1..120: mol_type = other DNA
atgagtctttgcgataaagctcttctccagccatccccatttctacaatatttttttccaatttttaaaatcaaggtaaaatatacataccccaaatttatcattttaaccatttttaag

SEQ ID NO: 23828 - DNA, 120 bp, synthetic construct
  source 1..120: mol_type = other DNA
acaactctcccttcttccctttccccatccttggcaaccatgattctactgatgtctctatgatcttgactactaagtacgtcatataagtggcatcatttagtatttttctttttggtg

SEQ ID NO: 23829 - DNA, 120 bp, synthetic construct; identical to SEQ ID NO: 7402
  source 1..120: mol_type = other DNA

SEQ ID NO: 23830 - DNA, 120 bp, synthetic construct
  source 1..120: mol_type = other DNA
ctcctgacagaaaagaaaaaccctggacctgatggcttcactggtgaattctaccaaacatttaaggaaaaactaataccattcttcaagttttcaaaaacaaaaaaaactggagaaaga

SEQ ID NO: 23831 - DNA, 120 bp, synthetic construct
  source 1..120: mol_type = other DNA
aagtactagcagagtttcctctaatattttaagaagtttgctgaagtgtgaatagttctttgattaatattttttcgagacggagtctcaccgtgttgcccaggctggagtgtaatggca

SEQ ID NO: 23832 - DNA, 120 bp, synthetic construct
  source 1..120: mol_type = other DNA
tagagacagggtttccccatgttggccaagctggtctcgaactcctgacctcgtgatctgccctcctcggcctccaaaagtgctgggattacaggtgtgagccaccgtgtcccgccagct

SEQ ID NO: 23833 - DNA, 120 bp, synthetic construct
  source 1..120: mol_type = other DNA
gaatagttcttcggttaataattttagggcgcagatgaagaggctttcagattgcttttgtctcaggattttttgctttaaaatttataaagtgaatggaaagaaacgttaactgaggat

SEQ ID NO: 23834 - DNA, 120 bp, synthetic construct; identical to SEQ ID NO: 7403
  source 1..120: mol_type = other DNA

SEQ ID NO: 23835 - DNA, 120 bp, synthetic construct
  source 1..120: mol_type = other DNA
agattttttggatttttttgttgttgttcattgctgtatgctgaggtttagattagttcctgggacacagaactagcagtcagtaaatacgttgaatgaacccgaagaattcctgcctcc

SEQ ID NO: 23836 - DNA, 120 bp, synthetic construct
  source 1..120: mol_type = other DNA
gaattgttttggggatgaaatgcggtaatgcatgtaaagcattgggcatgcaagtgaagccagccacgtattaaacagtactcagctcttacctctgtatcttatattcttatttccgtg

SEQ ID NO: 23837 - DNA, 120 bp, synthetic construct
  source 1..120: mol_type = other DNA
cacttacatctctggagatctctgtatgtgtgttaaaaataccatgttttgtaacaattggcttgtcttagaaaacttttcaattatacagaatttgagatctttacaacttgaattttc

SEQ ID NO: 23838 - DNA, 120 bp, synthetic construct
  source 1..120: mol_type = other DNA
caggcacgcgccaccatgcccaactaatttttgtatttttagtagagatggggtttcatcattttggccaggatggtctcgatctcctgacctcgtgatccgcccacttcggcctcccca

SEQ ID NO: 23839 - DNA, 120 bp, synthetic construct; identical to SEQ ID NO: 7404
  source 1..120: mol_type = other DNA

SEQ ID NO: 23840 - DNA, 120 bp, synthetic construct
  source 1..120: mol_type = other DNA
gatgattaggctgatggtttctgctagctctggcaaaaggtgaatccagttgctttctagcacttttcctactaaccctgcttctcaccctgtacctaataccacatttttagtttagtt

SEQ ID NO: 23841 - DNA, 120 bp, synthetic construct
  source 1..120: mol_type = other DNA
gcctcctgaatagctgggactacaggattatgcccccatgcctggctgtttaaaaatttttgggtagagatggggttttgccacgttgccatggctggtctcaaactactgggtttaagc

SEQ ID NO: 23842 - DNA, 120 bp, synthetic construct
  source 1..120: mol_type = other DNA
gagggtaccaaattaaagtctgtcagttttttctgtctccacctcaaagatcactgtatgacttcttttcttccttctcggctgtttcacacgaagttttccctttttctaaggctcagt

SEQ ID NO: 23843 - DNA, 120 bp, synthetic construct; identical to SEQ ID NO: 7405
  source 1..120: mol_type = other DNA

SEQ ID NO: 23844 - DNA, 120 bp, synthetic construct
  source 1..120: mol_type = other DNA
tgcctggttggcatctaccacttctctggaatcagcaaccccaatagcagatttaactgctggttccatggtttttgttacttgtccttttttgcagtgttttaaataataatcatcttt

SEQ ID NO: 23845 - DNA, 120 bp, synthetic construct
  source 1..120: mol_type = other DNA
agacaattatcaactgtaataccagcagtacctattgttaagctctagggcatgtcatttccatcgctctctttttaaatgcattaaacagaaaaggatcacatggttattttgtgatct

SEQ ID NO: 23846 - DNA, 120 bp, synthetic construct; identical to SEQ ID NO: 7406
  source 1..120: mol_type = other DNA

SEQ ID NO: 23847 - DNA, 120 bp, synthetic construct
  source 1..120: mol_type = other DNA
taagaccatacgtgtcactaaatctgggtgcacaacatgattttttttaaatgtggatttttattagtaggattgctcagctagtgggtacatcatgctcattgctaagttgctctctag

SEQ ID NO: 23848 - DNA, 120 bp, synthetic construct
  source 1..120: mol_type = other DNA
aatatgatcatgttgttacctctctcttgccaaaacgttgacttgatgataaggggatcactgtgacatcatcattacccacagatgtttcttttttctcccccctccccctctcttctc

SEQ ID NO: 23849 - DNA, 120 bp, synthetic construct
  source 1..120: mol_type = other DNA
acccagctaatttttgtattttttgtagagaggggttttaccacgttcctaggctggtctcgaactgcatgttcccaggctggtctcgaactcgtgggctcaagcgatccacccacctcg

SEQ ID NO: 23850 - DNA, 120 bp, synthetic construct; identical to SEQ ID NO: 7407
  source 1..120: mol_type = other DNA

SEQ ID NO: 23851 - DNA, 120 bp, synthetic construct
  source 1..120: mol_type = other DNA
ccattatcacagtcatgggcaattggttcaggatttgggaagaaaacgtatggcattaggattaaaagtacaatgtttagagtctggctgatctgggtttaaatcccaaatctaccatgt

SEQ ID NO: 23852 - DNA, 120 bp, synthetic construct
  source 1..120: mol_type = other DNA
ggctggagtgcagtggcgcgatctcggctcactgcaacctctgcctcctgggttcaagtgattctttgcctcagcctcccaagtagctgggattacaggccaccatgcttggctaatttt

SEQ ID NO: 23853 - DNA, 120 bp, synthetic construct
  source 1..120: mol_type = other DNA
tgccggcctgagcttcagttttcttatctgtaatatgggattactagtggtatctggctcataggcttattttaaggattaagcaagataataaatgtatagaatttagcacagtaaccg

SEQ ID NO: 23854 - DNA, 120 bp, synthetic construct
  source 1..120: mol_type = other DNA
gtttctaccagtgattcacagtgttttctgtatccagcaagcttttaatacagctgcttgtattattctcccgtataaacttctaattactctctgaaaatacagttggtttcctgttga

SEQ ID NO: 23855 - DNA, 120 bp, synthetic construct; identical to SEQ ID NO: 7408
  source 1..120: mol_type = other DNA

SEQ ID NO: 23856 - DNA, 120 bp, synthetic construct
  source 1..120: mol_type = other DNA
aatgcttggttggaaggagaactaaaatgagcagttgtgtgtgctgtgggcatgggccttagggcagctgtatatttgtcatctggatcagaccatacattggtgatcctgcttcacaac

SEQ ID NO: 23857 - DNA, 120 bp, synthetic construct
  source 1..120: mol_type = other DNA
gatccttggaaggccaccttaaattacttcccacctgtgaagcagtaaacgttagtgctcttcggttaatcatcatgtgtggtggtatgacatttgcagtatcatctgttaccattattt

SEQ ID NO: 23858 - DNA, 120 bp, synthetic construct; identical to SEQ ID NO: 7409
  source 1..120: mol_type = other DNA

SEQ ID NO: 23859 - DNA, 120 bp, synthetic construct
  source 1..120: mol_type = other DNA
ctgcatccaggcccctcccttaggcatgtgactcacggatttaaaagacagtgctgtacggtaattaactacctgcctctcatcacacagagatgagaacttaaatgtaggcttcccatc

SEQ ID NO: 23860 - DNA, 120 bp, synthetic construct
  source 1..120: mol_type = other DNA
atattcgtgtacaagggatggattttacatgggtgctcttaattgaaaataattttattttctgtaacttctagaattttgttagtttattgatgcacacatattgggtgggtgacagtt

SEQ ID NO: 23861 - DNA, 120 bp, synthetic construct
  source 1..120: mol_type = other DNA
ctgacataacctatacatccttaaggtgaccggtggttatcattttctatgaaatgtaattagtttttcaggaaactttgtccacataaaggaattgattccacccttactacctgctta

SEQ ID NO: 23862 - DNA, 120 bp, synthetic construct; identical to SEQ ID NO: 7410
  source 1..120: mol_type = other DNA

SEQ ID NO: 23863 - DNA, 120 bp, synthetic construct
  source 1..120: mol_type = other DNA
tctaatgtattagtatggttttatctattttagcagtgtaaaataaagtctttgtgaattatatatagtataattgaattgccaaaataaacatccttgccctcaaattgcttatgatat

SEQ ID NO: 23864 - DNA, 120 bp, synthetic construct
  source 1..120: mol_type = other DNA
ggctagagtatagtgatgcaatgatggtttactgcagcctcaacttcccaggctcaagtgatcctcccacctcagcctcctgagtaattgggactgcaggcacgtgccaccatacttggc

SEQ ID NO: 23865 - DNA, 120 bp, synthetic construct
  source 1..120: mol_type = other DNA
gccatcgtgcctggcctttcattcaacttgtaattcacaatttccagaaaaaaagttttaaaattactgatggaggaaagatctttgggacttgcttgtaaatatgttaatatttgatct

SEQ ID NO: 23866 - DNA, 120 bp, synthetic construct; identical to SEQ ID NO: 7411
  source 1..120: mol_type = other DNA

SEQ ID NO: 23867 - DNA, 120 bp, synthetic construct
  source 1..120: mol_type = other DNA
aatacaatattatctaacatgtgatccctatttaaatttcatttattttcttccccagaacagttctttatagatgttttaatttttgatccagaaaccaagggaaaaaatatatctata

SEQ ID NO: 23868 - DNA, 120 bp, synthetic construct
  source 1..120: mol_type = other DNA
taggataagccactaccccacctccatctaccacccggcagtggtcttttatgaaatctcatcatatttttccttttcttatataagcagtcccacaatttgctggttatatttcatgcc

SEQ ID NO: 23869 - DNA, 120 bp, synthetic construct
  source 1..120: mol_type = other DNA
cttaattttcttagtatgttgtattccaaaattatagaaagtgctataatagacatttatgtacattacataaagtaatagacatttatgtaatgtgggcatagatttaaatttttttta

SEQ ID NO: 23870 - DNA, 120 bp, synthetic construct; identical to SEQ ID NO: 7412
  source 1..120: mol_type = other DNA

SEQ ID NO: 23871 - DNA, 120 bp, synthetic construct
  source 1..120: mol_type = other DNA
attcttcttgggcttgatttttttatttatattacaattttgagatgtcatttatgttgacattgttagccgaagttcattaatttttcactatttgatataatattccaaattactgga

SEQ ID NO: 23872 - DNA, 120 bp, synthetic construct
  source 1..120: mol_type = other DNA
agctaagtacaaaaggttctctaggttatatgcatagacctggattgttgagtcttgggtgtatacaccatcagctttactaggtatggcagaatgtcttcttttacacagttgtggaat

SEQ ID NO: 23873 - DNA, 120 bp, synthetic construct
  source 1..120: mol_type = other DNA
gatgtgtttacttttttagctccacccatctttgttttttcctaggttgactcattcaggtatgtcatctctcccttctccttaaagtggcctttaaagaaaaaagttgcaggccgggca

SEQ ID NO: 23874 - DNA, 120 bp, synthetic construct
  source 1..120: mol_type = other DNA
ggccaatatggtgaaaccgcatttctactaaaaataaaaaaattagccgagcgtggtgacacgtgcctgtaatcccagccacttgggaggctgaggcaggagaatcactggacctaggga

SEQ ID NO: 23875 - DNA, 120 bp, synthetic construct; identical to SEQ ID NO: 7413
  source 1..120: mol_type = other DNA

SEQ ID NO: 23876 - DNA, 120 bp, synthetic construct
  source 1..120: mol_type = other DNA
cgtaaaggaaagacgggtgcaagctaaaacaaataagccagtaagtaaaaaaccacaacactcttttgtgattatttagatctgaaacaaatagcagcatgtattaatagtccctgatga

SEQ ID NO: 23877 - DNA, 120 bp, synthetic construct
  source 1..120: mol_type = other DNA
tcactctctgataattcctgaattaacagtagaaatttaactgttttatgtggtgaaattattctaggaagcttgttccatgggacatttacctattagctaataaaacaaatggtctat

SEQ ID NO: 23878 - DNA, 120 bp, synthetic construct
  source 1..120: mol_type = other DNA
ttaggttcgtaagttgtagaacaagaatgagaatgtgcaagtgtttttatgcttcattgttgggaaggataaattgcaaaagaacatagagctgggtgattttctggggttcagtctgtt

SEQ ID NO: 23879 - DNA, 120 bp, synthetic construct; identical to SEQ ID NO: 7414
  source 1..120: mol_type = other DNA

SEQ ID NO: 23880 - DNA, 120 bp, synthetic construct
  source 1..120: mol_type = other DNA
aagtaggttcttcaaaatttttaatttgaaataactaggtttacaggaaattgcaaaaaatagtaaggagaggtcccttgtgcctttcacctttcccttaatggtaacttcttactaccc

SEQ ID NO: 23881 - DNA, 120 bp, synthetic construct
  source 1..120: mol_type = other DNA
accaccaagctctcccttgtgctgcacacacctgccccatggcagccagtaatctgcttttcatctctatgatgttgacatttcgaggatattaataaatggaatcacatagtatgtgac

SEQ ID NO: 23882 - DNA, 120 bp, synthetic construct; identical to SEQ ID NO: 7415
  source 1..120: mol_type = other DNA

SEQ ID NO: 23883 - DNA, 120 bp, synthetic construct
  source 1..120: mol_type = other DNA
cgtggcctcagtgctggatgtagcatggggaagtgggaatttgtagccaaggagctggttgagggccagtggatggaaaattctcaagaggaaatgtcaggtgtaaggggtttctgccta

SEQ ID NO: 23884 - DNA, 120 bp, synthetic construct
  source 1..120: mol_type = other DNA
gcttagcagggttctttgctaaaacaggaatttacaaggaagtacacagataggcctgggagaaaagttcaggagcctggctcatttggtcaagcaaagaatctttgccagagcccaggg

SEQ ID NO: 23885 - DNA, 120 bp, synthetic construct; identical to SEQ ID NO: 447
  source 1..120: mol_type = other DNA

SEQ ID NO: 23886 - DNA, 120 bp, synthetic construct
  source 1..120: mol_type = other DNA
caattgttgagctttgagatttctttatatatcctagatgaggcttttatcacatatattgttagcaaatatattttcctagcctgtacctcatttttttgccttcttaaacaggtcttt

SEQ ID NO: 23887 - DNA, 120 bp, synthetic construct; identical to SEQ ID NO: 7416
  source 1..120: mol_type = other DNA

SEQ ID NO: 23888 - DNA, 120 bp, synthetic construct
  source 1..120: mol_type = other DNA
cttcgtctgcatcagtacagctgcatgtgtacccttcagccctgcaccttccttatacacgatgcacagatgtacgcatgcgagtacttgtgtgtacggttttgttttcttttttaaata

SEQ ID NO: 23889 - DNA, 120 bp, synthetic construct
  source 1..120: mol_type = other DNA
attattttaaatgactatgtagtgtttaatgtgactgcttaattgatcctattctaataaacatttagatgacattgggtaacttcttgtttttcttttttatataacagtggcaccagg

SEQ ID NO: 23890 - DNA, 120 bp, synthetic construct
  source 1..120: mol_type = other DNA
aaacaaacaaaaaattatccaggcttgttggcacttgcctgtagtcccagctactttggaggctgaggtgggaggatcacttgagcccagtaggtggaggctacagggaattaggattac

SEQ ID NO: 23891 - DNA, 120 bp, synthetic construct; identical to SEQ ID NO: 7417
  source 1..120: mol_type = other DNA

SEQ ID NO: 23892 - DNA, 120 bp, synthetic construct
  source 1..120: mol_type = other DNA
aggcaggttacgttaaatagattgaaaacagattatagcagtctgtgaatgcccttctaatgaatttggacttcattttgtacataattagaaatcattgaaaaaggccgggcgcggtgg

SEQ ID NO: 23893 - DNA, 120 bp, synthetic construct
  source 1..120: mol_type = other DNA
ctgagtgtgatggcacatgcctgtagtcccagctacttgggaggctgaggcaggagaattgcttgaacccgggaggcagaggttgtggtgagctgagttcgtgccattgcactccagcct

SEQ ID NO: 23894 - DNA, 120 bp, synthetic construct; identical to SEQ ID NO: 7418
  source 1..120: mol_type = other DNA

SEQ ID NO: 23895 - DNA, 120 bp, synthetic construct
  source 1..120: mol_type = other DNA
tttttacattggcttctttcatctagcgtgtctttgaggctcatgtatgctgtaatgtgtatcagtattttgtgcctttttactgcctaatgatattccattctgtggtgatgacaattt

SEQ ID NO: 23896 - DNA, 120 bp, synthetic construct
  source 1..120: mol_type = other DNA
aaattttggatcctgtgataagtttatatataactttaagaaattagggcatggtggctcacgcttataatcccagtgactcgggagactgaggcgggaggattgcttgagctcaagagg

SEQ ID NO: 23897 - DNA, 120 bp, synthetic construct
  source 1..120: mol_type = other DNA
cattttacagtcctgtcagcaatgtatgcgggttccagcttctccagatgctcgacacttggtattgtcttttgattatggccattttaatggctgtatagtgtatctcattgtagtttt

SEQ ID NO: 23898 - DNA, 120 bp, synthetic construct; identical to SEQ ID NO: 7419
  source 1..120: mol_type = other DNA

SEQ ID NO: 23899 - DNA, 120 bp, synthetic construct
  source 1..120: mol_type = other DNA
tatattgatcttattctcttgatgtgccactggaataaacatttaatagagtgtttggaaacatgtatctagttcaaaagaaggatctgggctgaggtataaatttagggcagtttacat

SEQ ID NO: 23900 - DNA, 120 bp, synthetic construct
  source 1..120: mol_type = other DNA
cacgttaagatgattctaggattaattcattcaggcatgacagcatcaccaaggacccaggttctttctatcttttaatgctgctgctgttcttgatctgttgggttgtcctcatggtcc

SEQ ID NO: 23901 - DNA, 120 bp, synthetic construct
  source 1..120: mol_type = other DNA
actttcttgtcttcttggccagaattgcattaggaatgtgttaccagactacccactggcaaggggaatggaaattgtcacagttggttcagaccagagctttctagcccaagtattttt

SEQ ID NO: 23902 - DNA, 120 bp, synthetic construct
  source 1..120: mol_type = other DNA
acttcacaacagcaaatacttgccaaaatcctacactgtgtcatgctggattctaggatacagaaatgaataagaaacttgtagtttgacatagatacaagcttaaacagaagagtgcta

SEQ ID NO: 23903 - DNA, 120 bp, synthetic construct; identical to SEQ ID NO: 7420
  source 1..120: mol_type = other DNA

SEQ ID NO: 23904 - DNA, 120 bp, synthetic construct
  source 1..120: mol_type = other DNA
aaatatagattgttttgtaatttggctctttttttttaatggtcctatgaatgcaactatagtgtttgcagtatttgtacagtgcatggggtgctttttctgggtgctgagaagggagga

SEQ ID NO: 23905 - DNA, 120 bp, synthetic construct
  source 1..120: mol_type = other DNA
gaaatgatagggaagaggggatttggagtagccgaaggaaaaaatgtgcaatcagtgttgttgattccaccgaattctaagaattccattacatcttgatatctggtacaagctcaaagt

SEQ ID NO: 23906 - DNA, 120 bp, synthetic construct; identical to SEQ ID NO: 7421
  source 1..120: mol_type = other DNA

SEQ ID NO: 23907 - DNA, 120 bp, synthetic construct
  source 1..120: mol_type = other DNA
taaaatacaaaaattagctgggcatggttaatcccagctactggggaggctgaggcaggagaatggcttgaacccaggaggcagaggttgcagtgagctgagatcgtgccactgtactcc

SEQ ID NO: 23908 - DNA, 120 bp, synthetic construct
  source 1..120: mol_type = other DNA
aagcaaatcttactaataatagaaatcagtgggtgacattctgaaaccttatagataactgttatgatatccataatcagtgcttgtccttggattctgcatgggtagtgagctttaaag

SEQ ID NO: 23909 - DNA, 120 bp, synthetic construct
  source 1..120: mol_type = other DNA
gtgtttgtttgcaaataattattaatgttgaagaaattttgatgttagctctgagttatgaatgttagaatatatttagaaatgtttgattttcatttttccatgtcattaagaagcttg

SEQ ID NO: 23910 - DNA, 120 bp, synthetic construct
  source 1..120: mol_type = other DNA
ttgaaaaaatgacttgtacttacttagcgttttgttttgactaacacccctggtggttgttgaaccacaagttcatagtgttaaaagcctgtggtaaattacccagtaagctaagtgatt

SEQ ID NO: 23911 - DNA, 120 bp, synthetic construct; identical to SEQ ID NO: 7422
  source 1..120: mol_type = other DNA

SEQ ID NO: 23912 - DNA, 120 bp, synthetic construct
  source 1..120: mol_type = other DNA
tagtcttaaattcagtctttaggaaacgttttctgggctgggcacagtggctcatgcctgtaatctaagcactttgggaggccgaggcaggcggatcacttgaggtcaggagttcgaaat

SEQ ID NO: 23913 - DNA, 120 bp, synthetic construct
  source 1..120: mol_type = other DNA
ccaggaattcgagaccagcctgggcaacacggcaaaaccccatgtctacaaaaaatataaaaattagctgggcatggttgtatgtacctgtagtcccagctactcgggaggctgaggccg

SEQ ID NO: 23914 - DNA, 120 bp, synthetic construct; identical to SEQ ID NO: 7423
  source 1..120: mol_type = other DNA

SEQ ID NO: 23915 - DNA, 120 bp, synthetic construct
  source 1..120: mol_type = other DNA
aggaaacaatgttttagtaaatggtgctgtaataaacaatagttggtaagtagtttacatgttaattttataatgatacattggaaatatctggcagaattagaatcaggctgtgtgtgt

SEQ ID NO: 23916 - DNA, 120 bp, synthetic construct
  source 1..120: mol_type = other DNA
cacctggccaggccatatatttttgaaacagacactttgatggactgtttttacttttatggggataaattcatttgaactttgtttaatacagtgattgcctgctctctctcccacacc

SEQ ID NO: 23917 - DNA, 120 bp, synthetic construct
  source 1..120: mol_type = other DNA
tgagcatctcagaagaacactgaacaccaactctttatttttgccttccctcatttctctgagcgacagcctgagagttttatagtcatatgaggactctgaaaaatgttagagacctgg

SEQ ID NO: 23918 - DNA, 120 bp, synthetic construct; identical to SEQ ID NO: 7424
  source 1..120: mol_type = other DNA

SEQ ID NO: 23919 - DNA, 120 bp, synthetic construct
  source 1..120: mol_type = other DNA
cacgaaacagaatactttgctatttgaagtttccgttaaaagattgaatgatttttaagatcgcaaagtaaacagcagacatacctttagaaatttttttatgacttgaacccaggaggc

SEQ ID NO: 23920 - DNA, 120 bp, synthetic construct
  source 1..120: mol_type = other DNA
atgaatgcttgccccttaaagggtaaggtgttaatagcagtactaatatacggtagtttagacctattccacaggcatagaccaaccagtgcaattaattcttcaacctcacaagtccta

SEQ ID NO: 23921 - DNA, 120 bp, synthetic construct
  source 1..120: mol_type = other DNA
ctaggtggtccaatatatttttgtctaagtaggaatctgaatattgtagaattgtacatttcggtgctgcttctagctattcctgttcttttttttttttcaaattgagatgagtttttt

SEQ ID NO: 23922 - DNA, 120 bp, synthetic construct; identical to SEQ ID NO: 7425
  source 1..120: mol_type = other DNA

SEQ ID NO: 23923 - DNA, 120 bp, synthetic construct
  source 1..120: mol_type = other DNA
atcagtttaatactgtcttggaattcatgagatggaagcataggtcaaagctgtttggagaaaatcagaagtacagttttatctagccacatcttggaggtaaggaaaagaacataattt

SEQ ID NO: 23924 - DNA, 120 bp, synthetic construct
  source 1..120: mol_type = other DNA
ttctttgtaacaccacaactttatagtagcttctttagtttccttaatcatcttcctgacgagttcataagtaattctaatatatattcctcataaatgttgaacctcttcaggagtgaa

SEQ ID NO: 23925 - DNA, 120 bp, synthetic construct
  source 1..120: mol_type = other DNA
ggccaggtgtgcctgtaatcccagcactttgggaggctgaggcaggtgggtcacatgaggccaggagttcgagaccagcctggccaacatggcgaaatctcgtctctactaaaaatgcag

SEQ ID NO: 23926 - DNA, 120 bp, synthetic construct
  source 1..120: mol_type = other DNA
ccattctgggcaacagagtgagactctgtctcaaaaaaaaaaaaaaaaaaaaagattatattgaaaaatgaatgtttatgttattctgaaatttttacgctttttagaattcagaatttt

SEQ ID NO: 23927 - DNA, 120 bp, synthetic construct; identical to SEQ ID NO: 7426
  source 1..120: mol_type = other DNA

SEQ ID NO: 23928 - DNA, 120 bp, synthetic construct
  source 1..120: mol_type = other DNA
agaaataggaggaaagaagccatcctaagacagtatgtacaggaaaatcaggcttactgttttaaaatccatttagagactaatgatcaggtaaaaggtttgaattatgtggggaatcta

SEQ ID NO: 23929 - DNA, 120 bp, synthetic construct
  source 1..120: mol_type = other DNA
tgcccctgccaaaccgctggattagatcttctaaaaaataacgtaactctcgaattcttttgttaggtttcatattgtttgattggtagagttgtgatcgtttttttctttctcagttct

SEQ ID NO: 23930 - DNA, 120 bp, synthetic construct
  source 1..120: mol_type = other DNA
tatcctgtttttttcttatgtctttcctagtctcatgatttccgcaattatctctaaaatgatctctctcaacttcctatctcagttgtggcattttctctaagcttcaggcccatattt

SEQ ID NO: 23931 - DNA, 120 bp, synthetic construct; identical to SEQ ID NO: 7427
  source 1..120: mol_type = other DNA

SEQ ID NO: 23932 - DNA, 120 bp, synthetic construct
  source 1..120: mol_type = other DNA
gcttctcgctcctacttcattttacatgttgctgccagcttaaattatcttaagagataattttgcttgtattgtcggtgacactttgcctgtctgccagagtaaggacagattcctcta

SEQ ID NO: 23933 - DNA, 120 bp, synthetic construct
  source 1..120: mol_type = other DNA
aacaggttcctagctatactcaaaaaatagtctttctagggttggatgagcatgaaaacaattattgaagtgcaatctgagaagtgctatattataattgaaaagatatatttgattatt

SEQ ID NO: 23934 - DNA, 120 bp, synthetic construct; identical to SEQ ID NO: 7428
  source 1..120: mol_type = other DNA

SEQ ID NO: 23935 - DNA, 120 bp, synthetic construct
  source 1..120: mol_type = other DNA
gtagatgacagccccctaggtagctttaggatgggggctggtcagcagaaagactaaggcaggattagagtcagaactttcagttcccgcccccaccaacccccaacatttagggagggg

SEQ ID NO: 23936 - DNA, 120 bp, synthetic construct
  source 1..120: mol_type = other DNA
atgtgcaggctctggtgccctgtacatctctttatctgtcctttgtaacatcccctataataaacctgtaaacataaatgtttccttgaattctgtcagccgctctaagcaaactaatag

SEQ ID NO: 23937 - DNA, 120 bp, synthetic construct
  source 1..120: mol_type = other DNA
aacctgtgggatctgatgctgtctccaggtgggtagtgtcggaatttaattggaggttccagctggtgtctgatgcagaattgtctgcttgcttgttgatggggagaaaccctcacacat

SEQ ID NO: 23938 - DNA, 120 bp, synthetic construct
  source 1..120: mol_type = other DNA
gtggaggcagagcttgaaagtgtatagaatgtacagaagatagaataatttttgtatggcttgaatttagaataggagagagagtttgagggacaaggctggaaaggaccttatgaagaa

SEQ ID NO: 23939 - DNA, 120 bp, synthetic construct; identical to SEQ ID NO: 7429
  source 1..120: mol_type = other DNA

SEQ ID NO: 23940 - DNA, 120 bp, synthetic construct
  source 1..120: mol_type = other DNA
taggggaaactgcccccatgattcaattatttcccactgggtccctcccacaacatgggggaattatgggagctacaattcaagaggagatttgggtggggacacagccaaaccatatcg

SEQ ID NO: 23941 - DNA, 120 bp, synthetic construct
  source 1..120: mol_type = other DNA
ttacccgtttaagcattggttgtttagaaaatgtttaattttcttctattcccctatgtactatactcttcagctggtgatttgaaatcgtccttccttttctctactctcttctcttgg

SEQ ID NO: 23942 - DNA, 120 bp, synthetic construct
  source 1..120: mol_type = other DNA
ttttcctagtctaaagcccccaaagcacttatttttattctacaggatattacttttttggtccctattaaactatgtggcagcaagtcacaaaggaggaatcagaaagtaacctgctcc

SEQ ID NO: 23943 - DNA, 120 bp, synthetic construct; identical to SEQ ID NO: 7430
  source 1..120: mol_type = other DNA

SEQ ID NO: 23944 - DNA, 120 bp, synthetic construct
  source 1..120: mol_type = other DNA
ggaagtatgatgtgaagaaagctcttttagtgaaattactctagcagtgacatataaactatacatcattagagaaatgaagtgaggaggtagggagccgagtgaggagattgtggcact

SEQ ID NO: 23945 - DNA, 120 bp, synthetic construct
  source 1..120: mol_type = other DNA
aaagagatgatgccgcctgaattttgagcctggatggtggggataatgttggcctcattagtagccaaggtaagttggatcctacttttctaaatgtagagaaacattaaaatttatgtt

SEQ ID NO: 23946 - DNA, 120 bp, synthetic construct
  source 1..120: mol_type = other DNA
agggagattttatgaaaaaagcaaagtatgacctcttttacaaaagcagtttttaaggaaataaactgtattctgttcatagttacctcttttgctatcatgttaaatgctatgtaagat

SEQ ID NO: 23947 - DNA, 120 bp, synthetic construct; identical to SEQ ID NO: 7431
  source 1..120: mol_type = other DNA

SEQ ID NO: 23948 - DNA, 120 bp, synthetic construct
  source 1..120: mol_type = other DNA
gttgaaaataatcactaattgttttataattataattatacatgtgtaaaactggaagacattacattattgaggaaggaaggcatttgtgttttgtttgttttttaagtcaggctttgt

SEQ ID NO: 23949 - DNA, 120 bp, synthetic construct
  source 1..120: mol_type = other DNA
gttctcctgcctcagcctcccgagaggctgggattacaggcacccgccaccacgctcagctaattttgtatttttagtagagatgaggtttcgccatgttggccaggctggtcttgaaca

SEQ ID NO: 23950 - DNA, 120 bp, synthetic construct; identical to SEQ ID NO: 7432
  source 1..120: mol_type = other DNA

SEQ ID NO: 23951 - DNA, 120 bp, synthetic construct
  source 1..120: mol_type = other DNA
agacatgcatgcaccaactttcacctgttgttaattgaaggttgctccgtgagctttaactccggcaggtctgtgcttgtgcctccatgctgttgagcagtctcccttaggtttgcaaag

SEQ ID NO: 23952 - DNA, 120 bp, synthetic construct
  source 1..120: mol_type = other DNA
aaggtctgctgtggtctgccccttttaccagtgagactccctcatgccccattagatctactctgtcactgaccctgcagattggtggctgattatgatcactaaaagaaatatctaaca

SEQ ID NO: 23953 - DNA, 120 bp, synthetic construct
  source 1..120: mol_type = other DNA
tcctggctaacatggtgaaaccccgtctctactaaaaatacaaaaaattagccgggtgtgatggcgggcgcctgtagtcccagctactcgggaggctgaggcaggagaatggcgtggact

SEQ ID NO: 23954 - DNA, 120 bp, synthetic construct; identical to SEQ ID NO: 7433
  source 1..120: mol_type = other DNA

SEQ ID NO: 23955 - DNA, 120 bp, synthetic construct
  source 1..120: mol_type = other DNA
taggtcacccttcataagaaggagcccatgctgttgggcctatgtagagccttcctctctgtcactccacaggctccattgacgggcctggtactccagccttgggaagaagctggctga

SEQ ID NO: 23956 - DNA, 120 bp, synthetic construct
  source 1..120: mol_type = other DNA
cacataagataaagattggcactttgtgttccctgccttagggccgtcagcgtgcctcttctccaggcttctggtctcttatttcctttttggacccttttaatacaaaaattagccggg

SEQ ID NO: 23957 - DNA, 120 bp, synthetic construct; identical to SEQ ID NO: 463
  source 1..120: mol_type = other DNA

SEQ ID NO: 23958 - DNA, 120 bp, synthetic construct
  source 1..120: mol_type = other DNA
ggtgctttaattttatttatttatttatttagaggtggagtctcgctctgctctctgctaatttttgtatttttagtagagatggggtttcacaatgttggccaggctggtcttgaattc

SEQ ID NO: 23959 - DNA, 120 bp, synthetic construct; identical to SEQ ID NO: 7434
  source 1..120: mol_type = other DNA

SEQ ID NO: 23960 - DNA, 120 bp, synthetic construct
  source 1..120: mol_type = other DNA
tcccttccctgctctgtcttttatagggcaggggttagggaacgtctcattgccccttttgtttttctttttcctcattgcctctttttaaaatgatcttttttttatttttaaaagatt

SEQ ID NO: 23961 - DNA, 120 bp, synthetic construct
  source 1..120: mol_type = other DNA
cgtgtgtatgtgtgtgtataaagattatgtaagcagcctattaataagttcctatataaaattttaaacactatgcaccaaagccttttagtccctcttccccacccttcaccccattgc

SEQ ID NO: 23962 - DNA, 120 bp, synthetic construct; identical to SEQ ID NO: 7435
  source 1..120: mol_type = other DNA

SEQ ID NO: 23963 - DNA, 120 bp, synthetic construct
  source 1..120: mol_type = other DNA
cctgcctcagcctcccaagtagctgggactacaggcgcctgccaccacacctggctaaagttttgtagttttagtagagatggggcttcatcatgttggtcaggctggtcttgaactccc

SEQ ID NO: 23964 - DNA, 120 bp, synthetic construct
  source 1..120: mol_type = other DNA
tgagaatatccctctcataaagttagtgtgaagattaaggaatttaacatatgaagtatgtagaacagtgcctggcctatagagctctaagtgttaactattatttaatattattatgct

SEQ ID NO: 23965 - DNA, 120 bp, synthetic construct
  source 1..120: mol_type = other DNA
tcaaagagccagcattttggttttataaattaactccacttttttgttatatatttaataatttttgcttttaacatactaccttttcttcctgcctttggtacccattcttccatctcg

SEQ ID NO: 23966 - DNA, 120 bp, synthetic construct; identical to SEQ ID NO: 7436
  source 1..120: mol_type = other DNA

SEQ ID NO: 23967 - DNA, 120 bp, synthetic construct
  source 1..120: mol_type = other DNA
ccctgtccctttcatcccatgtaatgcttcaagagtgatttttctaaaccatggtgcactcacttctttgctctgaaacctccagtgatttctccttgtctgctgagtaaagttcaggct

SEQ ID NO: 23968 - DNA, 120 bp, synthetic construct
  source 1..120: mol_type = other DNA
tagtaatgctgtttttcagtcttactgatctcactctattccttatctttaccatgcttttctgactttgtgcttttgcctctggatttcccagtctggaatgcctctctcacatcctag

SEQ ID NO: 23969 - DNA, 120 bp, synthetic construct
  source 1..120: mol_type = other DNA
agcttctgtgctctgttactagtcattccattttcgatagtctaccagtaacttctgtgccttagatccacatttacactggcttgtcaggattggtcagtgaatcaaataggtagtaag

SEQ ID NO: 23970 - DNA, 120 bp, synthetic construct
  source 1..120: mol_type = other DNA
tagtggctactttattgagtaacatagagactttcatgattgcagaaagttattttgagcagtatctagaacaatgcctggcaaataatagacaccagggaatgttgttcctaggtatca

SEQ ID NO: 23971 - DNA, 120 bp, synthetic construct; identical to SEQ ID NO: 7437
  source 1..120: mol_type = other DNA

SEQ ID NO: 23972 - DNA, 120 bp, synthetic construct
  source 1..120: mol_type = other DNA
aaatacaaaaattagccaggcatggtggtgcatgccagtaattccagctccttgggaggctgaggcaggagaatggcttgaacctgggaagcggaggttgcagtgagctgagatagcgcc

SEQ ID NO: 23973 - DNA, 120 bp, synthetic construct
  source 1..120: mol_type = other DNA
ataaaggtggtcttatctactgcttttcaaatttagtgtacgcgcatgtcacctgggggtcttgttagaagattctaattcagcacggtctgggattctgcatttctagccagcttgcaa

SEQ ID NO: 23974 - DNA, 120 bp, synthetic construct; identical to SEQ ID NO: 7438
  source 1..120: mol_type = other DNA

SEQ ID NO: 23975 - DNA, 120 bp, synthetic construct
  source 1..120: mol_type = other DNA
gtaggtgcattgttcagtaccaatatgagaaagaattatgaatacagctttatattattagatttcttatgtcataatataaaaaaccggtaaacttagcgctgaactattcatgatagt

SEQ ID NO: 23976 - DNA, 120 bp, synthetic construct
  source 1..120: mol_type = other DNA
tctagaaatcacaaaaggatggtgattttgggaacgaagttcttgagctagcactgtcagtagtaactggccgttactgtaagatctagagatatatttttagatgccattatacttaca

SEQ ID NO: 23977 - DNA, 120 bp, synthetic construct
  source 1..120: mol_type = other DNA
tttgtttagaaatgtgctagacagtggcaattacattgctgcaagataagtaaaaaaatcagctgactaagctttataagaggaggaatcatgtctcttttatttaccgttggatagtca

SEQ ID NO: 23978 - DNA, 120 bp, synthetic construct; identical to SEQ ID NO: 7439
  source 1..120: mol_type = other DNA

SEQ ID NO: 23979 - DNA, 120 bp, synthetic construct
  source 1..120: mol_type = other DNA
tgacaaaaagtcttgcgttactaattttatcgtatgaaatgaggatattttttaggtttttaagcagagagaatggcaaggtcatttggttttagaagttagtccgagctaggcatggtg

SEQ ID NO: 23980 - DNA, 120 bp, synthetic construct
  source 1..120: mol_type = other DNA
ctttaaaaaagaaaagtctgaaatacccctcacaactgttaaaaaaaaaaaaaagttctttcaagcacacgtggagtgttttatgaaagtgaccatttactaggctatacagcaagttct

SEQ ID NO: 23981 - DNA, 120 bp, synthetic construct
  source 1..120: mol_type = other DNA
taaaataatcaatttagtgaacacctagaacaaaacaatagagaaaataacagcctgagcaaaatagtgagaccctgcgtctacaaaaaaaaataaaaattagcccggcacagtggtgtc

SEQ ID NO: 23982 - DNA, 120 bp, synthetic construct
  source 1..120: mol_type = other DNA
ttatttcaaagaaaaagaaacttaggacatattaaaacgtgtgtgaaaccctgaagccttaaatattcatatttgaaaagaagattttaatactaataagctaatctaagttagggaaag

SEQ ID NO: 23983 - DNA, 120 bp, synthetic construct; identical to SEQ ID NO: 469
  source 1..120: mol_type = other DNA

SEQ ID NO: 23984 - DNA, 120 bp, synthetic construct
  source 1..120: mol_type = other DNA
aactatttgaaagattgatcaagaaaaaatataaagtacaaataatactgaggatataaaaggaagatacagaagaaagtcttaaaaataaaatatcttgaatcactttataccaataaa

SEQ ID NO: 23985 - DNA, 120 bp, synthetic construct
  source 1..120: mol_type = other DNA
ctgtaactgttagagaaattggatttgtaattaaaagaaccacccactttcatatattcagagataagcctttggcccagatgatctttttttctaagaaaaaaaaaaacaggcctcttc

SEQ ID NO: 23986 - DNA, 120 bp, synthetic construct; identical to SEQ ID NO: 7441
  source 1..120: mol_type = other DNA

SEQ ID NO: 23987 - DNA, 120 bp, synthetic construct
  source 1..120: mol_type = other DNA
atgtcggtagattccgtgatgccccacaagccgtgaaaccagcaattttttattagtgattttcaaaaggggagggagtgtgcaaataggtgtgggtcacagagatcacgtgcttcacaa

SEQ ID NO: 23988 - DNA, 120 bp, synthetic construct
  source 1..120: mol_type = other DNA
gaagtttcgggcaccattgtcattgataacatcttatcaggagacagggtttgagagcaaccagtctgaccaaaatttattaggcgggaatttccttgtcctaataagcctgggagcgct

SEQ ID NO: 23989 - DNA, 120 bp, synthetic construct
  source 1..120: mol_type = other DNA
gctgagaaaaagaattcagcaatatttctcctatttgcttttgaaagaagagcaatatggctctgttccgcccggctcaccggcggtcagagtttaaggttctctctcttattccctgaa

SEQ ID NO: 23990 - DNA, 120 bp, synthetic construct
  source 1..120: mol_type = other DNA
cctcagctgacaggattaagagattaaagtaaagacaagcataggaaatcacaagggtattgattgaggaagtgataagtgtccatgaaatcttcacaatttgtgtttagagactgcagt

SEQ ID NO: 23991 - DNA, 120 bp, synthetic construct; identical to SEQ ID NO: 7442
  source 1..120: mol_type = other DNA

SEQ ID NO: 23992 - DNA, 120 bp, synthetic construct
  source 1..120: mol_type = other DNA
atcagtggtttaatggctgtatctgagcacctaaaaggtaaagactcttccaagctgttgagactccctccaggcaggggaatgactatctgggtctgagattatgtcattaagttcttt

SEQ ID NO: 23993 - DNA, 120 bp, synthetic construct
  source 1..120: mol_type = other DNA
gttctcctcagcctcccaagtagctgggattacaggcacctgcctccacgcccagctaattattgtatttttagtagagacagggtttcacatcaggtctcgaactcctgacatcaggtg

SEQ ID NO: 23994 - DNA, 120 bp, synthetic construct; identical to SEQ ID NO: 7443
  source 1..120: mol_type = other DNA

SEQ ID NO: 23995 - DNA, 120 bp, synthetic construct
  source 1..120: mol_type = other DNA
attagagttatttctgacctactgtatttactttcagaattttctgaagctataatctttcaggaaatagtactattttttgaaatagtatttctattttttgaaaatagtatttctatt

SEQ ID NO: 23996 - DNA, 120 bp, synthetic construct
  source 1..120: mol_type = other DNA
gctcagtgacatccactactgtctgttctttgtgtttggcattagctttgagaccagctttctttttcattatgcttttttggtgcagctgtcgtctaatacttgttgaatttggtctgt

SEQ ID NO: 23997 - DNA, 120 bp, synthetic construct
  source 1..120: mol_type = other DNA
tatctgatgttttaatggctttactgcataactatttcttttccagaatggccactttgcccttcctttagcagttgaaaatctggatgcctctcaccgtactggagttttgggaatttg

SEQ ID NO: 23998 - DNA, 120 bp, synthetic construct
  source 1..120: mol_type = other DNA
aaaggataaccacagagtttgacaatagaatgttcattcactacatcgttgtagtgagcaggtgtaatgaacttccccttttagaagcatcttcttgtttcaaagtacttgtctgtttag

SEQ ID NO: 23999 - DNA, 120 bp, synthetic construct; identical to SEQ ID NO: 7444
  source 1..120: mol_type = other DNA

SEQ ID NO: 24000 - DNA, 120 bp, synthetic construct
  source 1..120: mol_type = other DNA
tttaaatattttatatgtatatatctcatgtctacaatgctgactgtaatacagttctgacagagttagcatgaaactccacaggtttaagggtgcagttcccaacgagactgcccttgc

SEQ ID NO: 24001 - DNA, 120 bp, synthetic construct
  source 1..120: mol_type = other DNA
gaacttgggaaagtggtatacttaagttacactttaattatgaagaatacagatcaggaccagccaaatgagatacagggtactgggagggttcctaacatggagcttctgtgctctctt

SEQ ID NO: 24002 - DNA, 120 bp, synthetic construct; identical to SEQ ID NO: 7445
  source 1..120: mol_type = other DNA

SEQ ID NO: 24003 - DNA, 120 bp, synthetic construct
  source 1..120: mol_type = other DNA
aatctcaggaatgatccatgaggctcgtgagtaacaaaggcattcctactaccaaggaaattccatgaattagaggttctctcccaagaactagggtcaaagactgaatacattatttat

SEQ ID NO: 24004 - DNA, 120 bp, synthetic construct
  source 1..120: mol_type = other DNA
ccaaaacttaatgacatgaaaccctaatttacaagaattcaggagtagcctagctggatgtggttctaatctttatgtttcacaaggttgcagtcaggaagtcagcaggggctacagtca

SEQ ID NO: 24005 - DNA, 120 bp, synthetic construct
  source 1..120: mol_type = other DNA
gacagctggctttctccagatctagtgatccaaaaaaaaaaaaaaaacaaggagaaagctgcagtgccttttaagacctagtcattactttattcgtttctttttttttttaaattaaat

SEQ ID NO: 24006 - DNA, 120 bp, synthetic construct; identical to SEQ ID NO: 7446
  source 1..120: mol_type = other DNA

SEQ ID NO: 24007 - DNA, 120 bp, synthetic construct
  source 1..120: mol_type = other DNA
ccttaatgtgataaagactttcattaaatttataattaatttaggaacagttgacataccttatattgaagctttctgtacgtaatatgattcatctatttgttaaacttattattttgt

SEQ ID NO: 24008 - DNA, 120 bp, synthetic construct
  source 1..120: mol_type = other DNA
agggcatctaaattggaaaggaggaagtcgaattgccacgatcatatatatatgtggaaaaccctaaaaacttcaccataaaacttttagaactgataaatgaatttagtaaggttgcag

SEQ ID NO: 24009 - DNA, 120 bp, synthetic construct
  source 1..120: mol_type = other DNA
gaggtgaaagatctctacaaggaaaactataaaacactgatgaaggaaattgaagcgggcacaaaatatggaaagacatccatattcaaggatttgaagaattaatactgtgaaaatgac

SEQ ID NO: 24010 - DNA, 120 bp, synthetic construct; identical to SEQ ID NO: 7447
  source 1..120: mol_type = other DNA

SEQ ID NO: 24011 - DNA, 120 bp, synthetic construct
  source 1..120: mol_type = other DNA
gatatacatatgcagagtgaaactgtacccctgtctttcaccatatacaaaaataaactcaaaatggattaaagacttaaatgtaagacaaaggcaccaaagacaaagtgaatcatctat

SEQ ID NO: 24012 - DNA, 120 bp, synthetic construct
  source 1..120: mol_type = other DNA
ttataggtgtgagccattagcgcccagctaaatactgtattttcagcccatgtttgcctgcaatatgaagagattgctatacttattgaaaagaagagaccggaagtggtggttcatgcc

SEQ ID NO: 24013 - DNA, 120 bp, synthetic construct
  source 1..120: mol_type = other DNA
ctctactaaaaatataaaaattaaccaggcttgctggcatgcgcctgtagtcccagctactcgggaggctgaggcaggagaatctcttgaacctgggaggcggaggttgcagtgagccaa

SEQ ID NO: 24014 - DNA, 120 bp, synthetic construct; identical to SEQ ID NO: 7448
  source 1..120: mol_type = other DNA

SEQ ID NO: 24015 - DNA, 120 bp, synthetic construct
  source 1..120: mol_type = other DNA
gcctggaccagcatggcaagaccctatctctaagaagaaaatgttcatcaacgagaatgagcaaatatgaccataagatatttataggataaaacactagataacaatgaaaatgaatta

SEQ ID NO: 24016 - DNA, 120 bp, synthetic construct
  source 1..120: mol_type = other DNA
aaggcaatgctatatgttacttaacaatcctttctttgaaataaaaggcaagttgatgtgtgtttaaactagaaatcccaggaaaaaatcagaaaggtacctgggcttaaagaaaaatgc

SEQ ID NO: 24017 - DNA, 120 bp, synthetic construct
  source 1..120: mol_type = other DNA
agagttcgagaccatcctagccaacatggcaaaaccctgtctctactaaaaatacaaaaattggccaagtgtggtggcatgtgcctgtagtcccagctactcgggaggctgaggcaggag

SEQ ID NO: 24018 - DNA, 120 bp, synthetic construct; identical to SEQ ID NO: 7449
  source 1..120: mol_type = other DNA

SEQ ID NO: 24019 - DNA, 120 bp, synthetic construct
  source 1..120: mol_type = other DNA
ccggctaatgttttgtatttttagtagagacagggtttcaccatgttagccaggatggtctcaatctcctgaccttgtgatccgccatccttggcctcccaaagtgctgggattacaggc

SEQ ID NO: 24020 - DNA, 120 bp, synthetic construct
  source 1..120: mol_type = other DNA
ggggaactcttctaggttcccaagttcttgagcttcacgtgcatacagcaggaatctgtcatcttgagggagttctttcttaaacctatgggtttgtaagattttagttttctatgctgt

SEQ ID NO: 24021 - DNA, 120 bp, synthetic construct
  source 1..120: mol_type = other DNA
gtgtgttgtttatgtactgaaagattgcagttgaatttagatcatgctttgaagttccctttgtcagaccacattgtttgtacccaaagaaagacttcattttctttttgtctgtaatta

SEQ ID NO: 24022 - DNA, 120 bp, synthetic construct; identical to SEQ ID NO: 7450
  source 1..120: mol_type = other DNA

SEQ ID NO: 24023 - DNA, 120 bp, synthetic construct
  source 1..120: mol_type = other DNA
agtctggtttgtatataaaagtgaaaggaattggcataatgttttaatttcttctgctccattcagtcattccctcaataaatatttatttagtatcgactctgtgccaggcactgttcc

SEQ ID NO: 24024 - DNA, 120 bp, synthetic construct
  source 1..120: mol_type = other DNA
acaaatgctaaagagaaagaaacagccagaaaggagaggagtgctaggcatggggatgggattacagttttaaatagggtgggcaggaagcctgtaaataagaaagggattttgagtaag

SEQ ID NO: 24025 - DNA, 120 bp, synthetic construct
  source 1..120: mol_type = other DNA
gaacggagggagggtggaccactggagactttagctttttgtctgagtgagttggagcaccgttggagggatctgaatggggtgtgatgtggtttaacatgctttctcttaggatcactc

SEQ ID NO: 24026 - DNA, 120 bp, synthetic construct; identical to SEQ ID NO: 7451
  source 1..120: mol_type = other DNA

SEQ ID NO: 24027 - DNA, 120 bp, synthetic construct
  source 1..120: mol_type = other DNA
aagaggctgtcaacggaggtgggaaagacttaggatctagcaaatttgggagggaagaggcaaggaaagataaatagtgacaaattgtatagttgctgataacattgttaagtcaatatt

SEQ ID NO: 24028 - DNA, 120 bp, synthetic construct
  source 1..120: mol_type = other DNA
gcagttctcctacctcggcctcaagtagctgggattacaggcacccaccaccaggcctggctaatttctgtatttttagtagagatggggtttcactatgttagccaggctggtcttgaa

SEQ ID NO: 24029 - DNA, 120 bp, synthetic construct
  source 1..120: mol_type = other DNA
ttcagatgttatcaagtatcttttctggtaagacatttatttgcctttattcagaattgctaattttatgctaatctaacccagaatactcaagtgtgcctttccctttaatcctcatat

SEQ ID NO: 24030 - DNA, 120 bp, synthetic construct; identical to SEQ ID NO: 7452
  source 1..120: mol_type = other DNA

SEQ ID NO: 24031 - DNA, 120 bp, synthetic construct
  source 1..120: mol_type = other DNA
aaagtcctgagactattagaccagctcgcccctgaactttttgtggcagggaagatagaatatgcttagtgtaagagcctctactcctgagatcttaggggaaatctttgtaccctgaat

SEQ ID NO: 24032 - DNA, 120 bp, synthetic construct
  source 1..120: mol_type = other DNA
ggaaaaaaagtaaaattgtattcatacattagtttgatcaagataatttttcttcttagagatttaatagtgttgccacttgaccagctggaactacaaaggaaccattagatagtaatg

SEQ ID NO: 24033 - DNA, 120 bp, synthetic construct
  source 1..120: mol_type = other DNA
tagacaggcacatgcacactagttttctttatccccaaaattcagtttgcaaatgggaccgaagagctccctgttcccctcatgacaccgacacgacaaaaaaaagttattccactaatt

SEQ ID NO: 24034 - DNA, 120 bp, synthetic construct
  source 1..120: mol_type = other DNA
acagacatatcacaaactttatcagtcctccaggccctagttgactcttcagctgcagttgtcctccaaggacaactccgaggccttgacttactcactgctgaaaaaggaggactctgt

SEQ ID NO: 24035 - DNA, 120 bp, synthetic construct; identical to SEQ ID NO: 7453
  source 1..120: mol_type = other DNA

SEQ ID NO: 24036 - DNA, 120 bp, synthetic construct
  source 1..120: mol_type = other DNA
aatcccgcttgaagcagccctgagaaacaccgcccattctctctccataccaccccccaaaaattttcgccgccccaacacttcaacactattttgttttatttttcctattaatataag

SEQ ID NO: 24037 - DNA, 120 bp, synthetic construct
  source 1..120: mol_type = other DNA
cccaccttaactgatgacattccaccacaaaagaagtgtaaatggccggtccatgccttaactgatgacattccaccacaaaagaagtgaaaatggccagtccttgccttaactgatgat

SEQ ID NO: 24038 - DNA, 120 bp, synthetic construct
  source 1..120: mol_type = other DNA
cccccactctgcccgccagagaacaactcctctttgactgtaattttcctttatctacccaaatcctataaaacggccccaccctcatctcccttcgctgactctcttttaggactcagc

SEQ ID NO: 24039 - DNA, 120 bp, synthetic construct; identical to SEQ ID NO: 7454
  source 1..120: mol_type = other DNA

SEQ ID NO: 24040 - DNA, 120 bp, synthetic construct
  source 1..120: mol_type = other DNA
cctgaggggagtgcaaagctgggtttttgaggagctgggactgagatcctgagtagtaggcaccactgggcctaaaaggattccatggggttggttctgggagtgtggaaggaagcagag

SEQ ID NO: 24041 - DNA, 120 bp, synthetic construct
  source 1..120: mol_type = other DNA
gttggcagagcctctccaggaaccagctggtgaaggacatattgtcagcagcatcccagctccagcatcagaaagcagaatctatagatagaagagggagctttttttttttttttttgg

SEQ ID NO: 24042 - DNA, 120 bp, synthetic construct; identical to SEQ ID NO: 7455
  source 1..120: mol_type = other DNA

SEQ ID NO: 24043 - DNA, 120 bp, synthetic construct
  source 1..120: mol_type = other DNA
gcctcagcctcctgagtagctgggtttgcaggtgcctgccaccacgcctggctaattttttgtatttttagtagagacagggttttactatgttggccaggctggtctcgaacgcctgac

SEQ ID NO: 24044 - DNA, 120 bp, synthetic construct
  source 1..120: mol_type = other DNA
ttcctgtttaacatatgtgctcatggtatacccgacaaaacactgcactttggattagaaaacctgggtgttagtttgtcatatatactagctacatggaattcagcaagttatttatct

SEQ ID NO: 24045 - DNA, 120 bp, synthetic construct
  source 1..120: mol_type = other DNA
gctaagcaggtaccattaaataccaccacatatctgagtttctctgatttaatctgcacaaaatacctagatcatctgttttaggctagactctgaactctttaccaccacattaaactg

SEQ ID NO: 24046 - DNA, 120 bp, synthetic construct
  source 1..120: mol_type = other DNA
cattaggtgttttggatttgagttgctgaaccagtaagtatagatagtgcaaatattacaaatttaaaaatccaaaatccaaaacacttctggtcccaagcatttctaataaggagtagt

SEQ ID NO: 24047 - DNA, 120 bp, synthetic construct; identical to SEQ ID NO: 7456
  source 1..120: mol_type = other DNA

SEQ ID NO: 24048 - DNA, 120 bp, synthetic construct
  source 1..120: mol_type = other DNA
cctggaagcatttcttctgcatctaatgttgaggtcctggtgaagggtataaaacacacagcatcaactatatataatgctatactagattgtcttgattctgtggtcctggaagagttt

SEQ ID NO: 24049 - DNA, 120 bp, synthetic construct
  source 1..120: mol_type = other DNA
caaaggttaaatgtgggcttgttttgattgttaattaataattgagcatgggggaaaggtagagttggaaagtaatttcaggggtggcgatgaaattggtaacttcaaagtggtggagac

SEQ ID NO: 24050 - DNA, 120 bp, synthetic construct; identical to SEQ ID NO: 7457
  source 1..120: mol_type = other DNA

SEQ ID NO: 24051 - DNA, 120 bp, synthetic construct
  source 1..120: mol_type = other DNA
agtgtagagaacgggaaggaatggatgagttgcttgttaagggaaaagatgatattcttatgctaatccaggccctggataaggagcagagcagccatgcgaacaatggccttggagcca

SEQ ID NO: 24052 - DNA, 120 bp, synthetic construct
  source 1..120: mol_type = other DNA
ctgctggccagcttgttggaaattcccaaacttctctactagaaagtgaaaatcaacggtggggggcttaacaggaagaggaaggaatgactttactctgtagtctgttttttcaactga

SEQ ID NO: 24053 - DNA, 120 bp, synthetic construct
  source 1..120: mol_type = other DNA
taattctgccttaatgttattttcctgaaaagaaacagtaccagtctgtgtatatagcaaggggaagtaaatttatttagatgcccatttcgtctaactattcaatagcttttaaatggc

SEQ ID NO: 24054 - DNA, 120 bp, synthetic construct; identical to SEQ ID NO: 7458
  source 1..120: mol_type = other DNA

SEQ ID NO: 24055 - DNA, 120 bp, synthetic construct
  source 1..120: mol_type = other DNA
gcaggagaattgcttgaacccaggaggtgaaggttgcagtgagcagaggttgcaccactgcagtccagcctgggctacagagcaagactctgtctcaaaaaaaaaaaaaaaaaaggctgg

SEQ ID NO: 24056 - DNA, 120 bp, synthetic construct
  source 1..120: mol_type = other DNA
acaaaaattagctgggcgtgatggcgcatgcctgtaatctcagctactcgggatgctgaggcgggagaatcgcttgaaccctggaggcagaggttgcggtgagctgagatggcgccattg

SEQ ID NO: 24057 - DNA, 120 bp, synthetic construct
  source 1..120: mol_type = other DNA
agtgctcagttattaataattacatctgtttgttgaaatgtttactgagatgtaatattactaactcttttgagttagtaatatccccattttgtggtgaaggaaaccgagacctggata

SEQ ID NO: 24058 - DNA, 120 bp, synthetic construct; identical to SEQ ID NO: 7459
  source 1..120: mol_type = other DNA

SEQ ID NO: 24059 - DNA, 120 bp, synthetic construct
  source 1..120: mol_type = other DNA
atttgaacctttgatctcttcactcctgtcaaaatcactcattcccatttcaataactgttcatgccacagatgtgggaatcttctttgacgcctcactttcccttaccctacatttaat

SEQ ID NO: 24060 - DNA, 120 bp, synthetic construct
  source 1..120: mol_type = other DNA
gaagagatcctcccacctcagcctccctagtgtctgggactacaggtatgcaccaccatgcccagctaatttttttaagttttttgtacagatgaggtcttgcagtgtttcccaggctgg

SEQ ID NO: 24061 - DNA, 120 bp, synthetic construct
  source 1..120: mol_type = other DNA
ataccactgccaccctattctttttttttttaattcatccatctgcacacggattctgccctaatcttaaccaccattgtcattctcctaaatttccacaatattctgcttactcatctg

SEQ ID NO: 24062 - DNA, 120 bp, synthetic construct
  source 1..120: mol_type = other DNA
atatgcccttgcctgatctggtctttgtcttctctgcctcttcaccctcatctcccactacactatctcttattctcaacatttcagacattgttctctctttgcttttctctccctcaa

SEQ ID NO: 24063 - DNA, 120 bp, synthetic construct; identical to SEQ ID NO: 7460
  source 1..120: mol_type = other DNA

SEQ ID NO: 24064 - DNA, 120 bp, synthetic construct
  source 1..120: mol_type = other DNA
aatacagaatcatgcatagcacagacacttaataaacatttagggaataaattaataattcaacggcaagaacactgtttccataggactccagcattggaagggataacgtagattatt

SEQ ID NO: 24065 - DNA, 120 bp, synthetic construct
  source 1..120: mol_type = other DNA
tctcaacagaaaatacaaaattagccaggcttggtgacacgtgcttgtggtcccagctactcaggaggctgaggtgggaggattgcctggagcccaggaggcagtgagctgaggttgtac

SEQ ID NO: 24066 - DNA, 120 bp, synthetic construct; identical to SEQ ID NO: 7461
  source 1..120: mol_type = other DNA

SEQ ID NO: 24067 - DNA, 120 bp, synthetic construct
  source 1..120: mol_type = other DNA
agggaagatttgatggctgttctccatacaagttatcacagctttttttgtctataaaaatttcttgcagattgaattgttatggatagcacctgttagtgacttcctttgccaggttgg

SEQ ID NO: 24068 - DNA, 120 bp, synthetic construct
  source 1..120: mol_type = other DNA
agggaagtataggatagttgttaacatgtagaatctggaatcagacctccttgattttaattatgactctgccacttaacctgttgtgtgatctttgataagttccttaaagtctacttg

SEQ ID NO: 24069 - DNA, 120 bp, synthetic construct
  source 1..120: mol_type = other DNA
aatatgtgtttgctgttatctcatttggttctcaaaataactgtcagttaataaatatcattccagatttgtttgtttgttaagatggggtcttgctgtgttgccaaggctggagtgcag

SEQ ID NO: 24070 - DNA, 120 bp, synthetic construct; identical to SEQ ID NO: 7462
  source 1..120: mol_type = other DNA

SEQ ID NO: 24071 - DNA, 120 bp, synthetic construct
  source 1..120: mol_type = other DNA
aacagtgacaatgaaagatgtaacaaggcatagcggtcagtctcctgcccaagactgtgagttccttgcagcaggaacaaccatactcatatttgtatttctggtacctaacactgggtc

SEQ ID NO: 24072 - DNA, 120 bp, synthetic construct
  source 1..120: mol_type = other DNA
aaaaaaaaaaaaagatgttgttggtgaataagtgagtaaattaataagtgaaaatttggggaggggtggagacctagcaagggaggcaggaccaaagccagggtttctggcatggtatcc

SEQ ID NO: 24073 - DNA, 120 bp, synthetic construct
  source 1..120: mol_type = other DNA
ggattggaaatacactggaaacttctcttgaattggaaacctggaacatatatccttagaatgacagttgaattatttcaagaagttttcaaagaaatgctgttaaatcatgtggcagac

SEQ ID NO: 24074 - DNA, 120 bp, synthetic construct; identical to SEQ ID NO: 7463
  source 1..120: mol_type = other DNA

SEQ ID NO: 24075 - DNA, 120 bp, synthetic construct
  source 1..120: mol_type = other DNA
attaatgtagaaatcacaccagggtcattgtgtcataaataagcaagatctttgtcattcaggaatagttcaagctgaaagtcaataaaatcaaaccacatgaaacaatgggatgggggt

SEQ ID NO: 24076 - DNA, 120 bp, synthetic construct; identical to SEQ ID NO: 491
  source 1..120: mol_type = other DNA

SEQ ID NO: 24077 - DNA, 120 bp, synthetic construct
  source 1..120: mol_type = other DNA
tcagcctcctgagtagttgggactacaggcgcctgccaccacacctggctaattttttttgtatttttagtagagacggggtttcactatgttagcctggatggtctcgatctcctgacc

SEQ ID NO: 24078 - DNA, 120 bp, synthetic construct; identical to SEQ ID NO: 7464
  source 1..120: mol_type = other DNA

SEQ ID NO: 24079 - DNA, 120 bp, synthetic construct
  source 1..120: mol_type = other DNA
ttcaggtgatctgcccaccttggcctcccaaagtgctgggattacaggtgtgagccactgcacctggctcctttttcttttttttcctttaatgatgaagcaccctctttaattaaatat

SEQ ID NO: 24080 - DNA, 120 bp, synthetic construct
  source 1..120: mol_type = other DNA
catctctactaaaaatacaaaaattagccgagtgtggtggtgcacacctgtaatcccagctactcagaaggctgaggcaggagaatcacttgaacccaggaggtggaggttgcagtgagt

SEQ ID NO: 24081 - DNA, 120 bp, synthetic construct; identical to SEQ ID NO: 7465
  source 1..120: mol_type = other DNA

SEQ ID NO: 24082 - DNA, 120 bp, synthetic construct
  source 1..120: mol_type = other DNA
gtacatatggctaatctgaggtcaggagaggttgcagcctattaactaaattatttgaagtttgaaattatagtgcctaaaaaaaaaaaagcaaggatacctttaatcttttaaaatgta

SEQ ID NO: 24083 - DNA, 120 bp, synthetic construct
  source 1..120: mol_type = other DNA
cagtgggagttgaagtcattgtcaagtgcttgcgatcttttacaagaaaatctcactgaatgatagtcatttaaattggtgaagtagcaagaccaattattaaaggtgacagtacacagg

SEQ ID NO: 24084 - DNA, 120 bp, synthetic construct
  source 1..120: mol_type = other DNA
atataaaaagcactatttcttgcttctgttctttcaactcatccctgtttgaatagttaggcccagcctactagggcagcttttaggaaagaagcaaagatgaaacacgtgccaaataat

SEQ ID NO: 24085 - DNA, 120 bp, synthetic construct; identical to SEQ ID NO: 7466
  source 1..120: mol_type = other DNA

SEQ ID NO: 24086 - DNA, 120 bp, synthetic construct
  source 1..120: mol_type = other DNA
gcaaaacctcatctttaccaaaaaatacaaaaattagccgggggcctgtaatcccagctactcgggaggctgaggcaggagaatcacttgaaccccgggaggtggaagctgcagtgagct

SEQ ID NO: 24087 - DNA, 120 bp, synthetic construct; identical to SEQ ID NO: 7467
  source 1..120: mol_type = other DNA

SEQ ID NO: 24088 - DNA, 120 bp, synthetic construct
  source 1..120: mol_type = other DNA
tgtcttcgttctcaagttttttacttcacaggttgctttttcctaatgttttgatcacagtgatctggattaatatctgctgttaagaagaaacatgattaacaccataaagcttttgat

SEQ ID NO: 24089 - DNA, 120 bp, synthetic construct
  source 1..120: mol_type = other DNA
tcacgcccagctaattttttgtatttttagtagagacggggtttcaccgtgttagccaggatggtctcgatctcctgacctcgtgatccacccacttcggcctcccaaagtgctggcatt

SEQ ID NO: 24090 - DNA, 120 bp, synthetic construct; identical to SEQ ID NO: 7468
  source 1..120: mol_type = other DNA

SEQ ID NO: 24091 - DNA, 120 bp, synthetic construct
  source 1..120: mol_type = other DNA
agatcacacgtaggcaatatgatacaaaattctcagtcttcgccccagttcacattgttctataataaacttttattaggtggaataagttggtaattagttactacgtaaaagcaaaag

SEQ ID NO: 24092 - DNA, 120 bp, synthetic construct
  source 1..120: mol_type = other DNA
atgtagaaaagttatttctgagagatcattaggaaggattgtagaatggtattaatggaaataacttctgactttagctctagctttatcttgttttgaattatgtctcaggaaaataaa

SEQ ID NO: 24093 - DNA, 120 bp, synthetic construct
  source 1..120: mol_type = other DNA
taaagttacttaggtttgaacagaaaaatgagtcatctgatattaacagctgatagatacttagttcttattttttaagacttggtcacaaattttacaacaggatatattaatgttgga

SEQ ID NO: 24094 - DNA, 120 bp, synthetic construct; identical to SEQ ID NO: 7469
  source 1..120: mol_type = other DNA

SEQ ID NO: 24095 - DNA, 120 bp, synthetic construct
  source 1..120: mol_type = other DNA
attgtcttaatctatatccattgcctagggctgggtgtgttgttcccccaaacaaaatcagagtttggttagctgggaaaagggggaaaataggtatcaattggacaattaaaaggatct

SEQ ID NO: 24096 - DNA, 120 bp, synthetic construct
  source 1..120: mol_type = other DNA
gtttgaacaataaagagcatgtagtaacacacaggaagtctgtatataaggggactgtagttggttatgtggctcatcaagacccaagttctttgtcttttcaactgtgacatctctaaa

SEQ ID NO: 24097 - DNA, 120 bp, synthetic construct
  source 1..120: mol_type = other DNA
tttaattgataaatctttccccattcactcacttcctctccccaacagacttccttctaatcttagtggccaaaattcattatatgctcttgtgttaaatcactggcaaggggaatggaa

SEQ ID NO: 24098 - DNA, 120 bp, synthetic construct; identical to SEQ ID NO: 7470
  source 1..120: mol_type = other DNA

SEQ ID NO: 24099 - DNA, 120 bp, synthetic construct
  source 1..120: mol_type = other DNA
ggctaaaagcaattatcagtgcacagtatatccagtatccagtgataaagatgaagtgggataagtactatataaaacttccattcagaggaagaaaaattggaaacaacctcagtattc

SEQ ID NO: 24100 - DNA, 120 bp, synthetic construct
  source 1..120: mol_type = other DNA
acatctgagctggaattagtggaggatgatctttgtggagactgaacagctttagcggcctgctttctgttagtatggaggtctgattactggaaattgtcctatggattgaaaactcac

SEQ ID NO: 24101 - DNA, 120 bp, synthetic construct
  source 1..120: mol_type = other DNA
gatctctttggtttcactccattaaacacagttaaatatcttgtcttgatgtgtgttctgagaatttctgacctagccactggcctctgctttgcctgttctcctggcctttggtttagt

SEQ ID NO: 24102 - DNA, 120 bp, synthetic construct; identical to SEQ ID NO: 7471
  source 1..120: mol_type = other DNA

SEQ ID NO: 24103 - DNA, 120 bp, synthetic construct
  source 1..120: mol_type = other DNA
actgaccaacccagtaacaacaagcacctgtaacaacccagttgtagtatctgattgtcttttttcactaaggatctagaactccttggagaaatcactgagttcaagttcggcagggaa

SEQ ID NO: 24104 - DNA, 120 bp, synthetic construct
  source 1..120: mol_type = other DNA
aattgtagtggattcaaacaaatcaaatatgtttaaatccacgtgtttgtaataacacttaagaaaaaaactagttagggctgagggctgtgacttacacctgtacatgccaacacttgg

SEQ ID NO: 24105 - DNA, 120 bp, synthetic construct
  source 1..120: mol_type = other DNA
tacaaaaaaaaaattttaattagctgagtgtggtgatgtgtgcctgtattcctggctgaggtgggcgggagaatcacttgagcccgggagcttgaggctgcagtgaaccaatgatgacgc

SEQ ID NO: 24106 - DNA, 120 bp, synthetic construct; identical to SEQ ID NO: 7472
  source 1..120: mol_type = other DNA

SEQ ID NO: 24107 - DNA, 120 bp, synthetic construct
  source 1..120: mol_type = other DNA
attagatacattattttatactatgccgattgaattagtgaatctagaccttaaaaacagagataagcaggcatttggttccctcctgcccacaacatacagagcagctgcatttcagcg

SEQ ID NO: 24108 - DNA, 120 bp, synthetic construct
  source 1..120: mol_type = other DNA
agaacaagaggacatgttaaatgatgccaggaggatgtgatcagaaattccagactgtggtaaatactatactagtaaataccggacaagttacccaatgtctacaagtaaatctcaagg

SEQ ID NO: 24109 - DNA, 120 bp, synthetic construct
  source 1..120: mol_type = other DNA
ctaaagtaatttgtaatatttatgatacaattggaaattagaaagcaatttataacatttataatataattggaaatttgaacattgccttgatgtttgatgatattggtaaggataagg

SEQ ID NO: 24110 - DNA, 120 bp, synthetic construct; identical to SEQ ID NO: 7473
  source 1..120: mol_type = other DNA

SEQ ID NO: 24111 - DNA, 120 bp, synthetic construct
  source 1..120: mol_type = other DNA
ggcatggtggcatgtgcctgtagtcacagctactcgggaggctgaggtgggaggatcgcttgaaccagggaggtggaggttgcagtgagccgagattgggccactgaactccagcctggg

SEQ ID NO: 24112 - DNA, 120 bp, synthetic construct
  source 1..120: mol_type = other DNA
ggtggttatgtttaaggagtgggaaggggattagatgggcccaaagaggactttttggtttacttgtggggctcaatttttttttggatgctatgagaatatattgttgttttatttgag

SEQ ID NO: 24113 - DNA, 120 bp, synthetic construct
  source 1..120: mol_type = other DNA
tcgagaccagcctggccaacatggagaaaccccgtctctactaaaaatacaaaaaattagccaggtgtggtggcacatgcctgtaatcccagctactcgggaggctgaggcaggagaatc

SEQ ID NO: 24114 - DNA, 120 bp, synthetic construct; identical to SEQ ID NO: 7474
  source 1..120: mol_type = other DNA

SEQ ID NO: 24115 - DNA, 120 bp, synthetic construct
  source 1..120: mol_type = other DNA
gagttcaagaccagcctgccagcactttgggaggccgaggtgggcggatcatgaggtcaggagatagagaccatcctggctaacacggtgaaaccccgtctctactacaaatacaaaaaa

SEQ ID NO: 24116 - DNA, 120 bp, synthetic construct
  source 1..120: mol_type = other DNA
gcctgggcgacagagcgagactccgtctcaaaaaaaaaaaaaaaaaaaaagaccagcctggccaacatggtgaaacaccgtctctactaaaaatacaaaaattagccgggcgtggtggca

SEQ ID NO: 24117 - DNA, 120 bp, synthetic construct
  source 1..120: mol_type = other DNA
ctccatttcaaaacaaaaaaaacaaaaagcaaaattcctcaaaggccacatactgtgatcataatgcaataaaaggagttcaacagtgtaaactttgtttgagcgtatgacttttttttt

SEQ ID NO: 24118 - DNA, 120 bp, synthetic construct
  source 1..120: mol_type = other DNA
agtagctgggataacaggtagacaccaccacactcggctaatttttgtatttttagtagggtttcgccatgttggccaggctggtttgaactcctgagctcaggtgatccacccacctcg

SEQ ID NO: 24119 - DNA, 120 bp, synthetic construct; identical to SEQ ID NO: 7475
  source 1..120: mol_type = other DNA

SEQ ID NO: 24120 - DNA, 120 bp, synthetic construct
  source 1..120: mol_type = other DNA
ttgtctcactacatcctccacctccctggttcaagtgattcctttgtctcagcctcctgagtagctggattacaggctcacagcaccatgcccagctaatttgttgtatttttagtagag

SEQ ID NO: 24121 - DNA, 120 bp, synthetic construct
  source 1..120: mol_type = other DNA
atgatttttaatgcaataactatattcatgtttctagaagcttttttttgccattcagtgacattatggatgacactgcatgtcagtatgtgtcggacatgtgtcagcatgtgtcggaat

SEQ ID NO: 24122 - DNA, 120 bp, synthetic construct; identical to SEQ ID NO: 7476
  source 1..120: mol_type = other DNA

SEQ ID NO: 24123 - DNA, 120 bp, synthetic construct
  source 1..120: mol_type = other DNA
tctatatcagtaatttgcaaactatagcccacaaactaaatccagcgcattgctgcattttgtgctgctcatgagtgaagaatggtgtttttgcatttttaagtgattgaagaaaaatca

SEQ ID NO: 24124 - DNA, 120 bp, synthetic construct
  source 1..120: mol_type = other DNA
tgtcggcagaattgaatagttgtgacagagaccttggggcccacaaaaccaatacctgttttctatatctctgctgtcttgtgtgatagctactagccaaatgtggcttttgagcacttg

SEQ ID NO: 24125 - DNA, 120 bp, synthetic construct
  source 1..120: mol_type = other DNA
accttttccctagttcttgcttccttgtacttgactttccttctgctgatgtcttcctggtttctatttaattaatgatgcagactgttgttgcagaattcattaggctaccattgctga

SEQ ID NO: 24126 - DNA, 120 bp, synthetic construct
  source 1..120: mol_type = other DNA
aaggaagccaataaattattgggaaaatatgaaaaattacttagccaggaataaaaatctagtaaaatcattgatgccaaaaattgctgttgatgacaaggacctgtaaatgtgcctgtg

SEQ ID NO: 24127 - DNA, 120 bp, synthetic construct; identical to SEQ ID NO: 7477
  source 1..120: mol_type = other DNA

SEQ ID NO: 24128 - DNA, 120 bp, synthetic construct
  source 1..120: mol_type = other DNA
gccctgggagcacacagtggaggttggattttattctgagtgcattgtggagccattgattggttttatataggagtgacagatttgtgtttataaaatgtctctggctgctctgtggaa

SEQ ID NO: 24129 - DNA, 120 bp, synthetic construct; identical to SEQ ID NO: 503
  source 1..120: mol_type = other DNA

SEQ ID NO: 24130 - DNA, 120 bp, synthetic construct; identical to SEQ ID NO: 7478
  source 1..120: mol_type = other DNA

SEQ ID NO: 24131 - DNA, 120 bp, synthetic construct
  source 1..120: mol_type = other DNA
aagtgcaatggcttgatctctgttcactgcaacctccacctcccaggtcaagtgattgtcctgcctcagccacctgaatactgggattacaggcgccttgccaccacgcccagctaattt

SEQ ID NO: 24132 - DNA, 120 bp, synthetic construct
  source 1..120: mol_type = other DNA
ccgcgcctggcctttgtattttgtcacttttcacattgtatttatttgcttttgtgcttattccccctctgctttccaccaagtttctcaaggccacatatgtggttttgatgccacatc

SEQ ID NO: 24133 - DNA, 120 bp, synthetic construct
  source 1..120: mol_type = other DNA
taagctccagatacaactactgtaattgagttttttgtctcatgaattcaaatagtattctaggaagtttcatataactttgagttttttcatgtatcagtgatcttttagtgttctgat

SEQ ID NO: 24134 - DNA, 120 bp, synthetic construct; identical to SEQ ID NO: 7479
  source 1..120: mol_type = other DNA

SEQ ID NO: 24135 - DNA, 120 bp, synthetic construct
  source 1..120: mol_type = other DNA
attatatactgtttgttttccagagctgaattgatacgtgtcttctgttaatgtaataggattttaaagctggtcaggttccctcacctgtcctctagtcctgtagccttatagagtaaa

SEQ ID NO: 24136 - DNA, 120 bp, synthetic construct
  source 1..120: mol_type = other DNA
ctgtacctcctgcttcccccaccccatcttttacagttgatgtttctaacataaaggaggtctttccgctttgtagcaatcagatccaacggaagccttgacattatattacggaattta

SEQ ID NO: 24137 - DNA, 120 bp, synthetic construct; identical to SEQ ID NO: 505
  source 1..120: mol_type = other DNA

SEQ ID NO: 24138 - DNA, 120 bp, synthetic construct
  source 1..120: mol_type = other DNA
tggtgaaaccctgtctctaccaacaaaatacaaaaaaattagctaggcgttgtgtggggtgcctgtaatcccagctactcgggagtctgaggcaggagaattgcttgaacctgggaggcg

SEQ ID NO: 24139 - DNA, 120 bp, synthetic construct; identical to SEQ ID NO: 7480
  source 1..120: mol_type = other DNA

SEQ ID NO: 24140 - DNA, 120 bp, synthetic construct
  source 1..120: mol_type = other DNA
aggctgcagtgagctctgatcacatcactgtactccagcctgggcaatagcgtgagaccatgtctcaaaaaaaaaaaaaaaaaaagtgaaaattattgaaactgaaggcatgtaatcatc

SEQ ID NO: 24141 - DNA, 120 bp, synthetic construct
  source 1..120: mol_type = other DNA
gaaccacttatttaacattcataatgaaatacatatacacttgtctgtttggttccacctttcattcccttgagagtaacccacaaagaatggcctagctgagtcagagagaggaagtaa

SEQ ID NO: 24142 - DNA, 120 bp, synthetic construct
  source 1..120: mol_type = other DNA
gtgagctaactgctgcccttctataaccttcagtttctgccagcatcgtctgcattcaaaccaatgacctcgaggtgaaaatctccagataacatgattggtccccatgctctcatgatt

SEQ ID NO: 24143 - DNA, 120 bp, synthetic construct; identical to SEQ ID NO: 7481
  source 1..120: mol_type = other DNA

SEQ ID NO: 24144 - DNA, 120 bp, synthetic construct
  source 1..120: mol_type = other DNA
ttaaaaatataaaaaacaagatttgactgtattctgccttgcgccactcttgtttgtctttcactagtgcaaaaattgtgatatagctgtcttcatgtaccccgcaatacctggtgcagt

SEQ ID NO: 24145 - DNA, 120 bp, synthetic construct
  source 1..120: mol_type = other DNA
tgtcacgaaacaatgagcttttcagaaatgatttacttacaaattccatatttgaatgcaggacagaatctggatagtatgcttcatggcactgggatgaaatcagactccgaccagaaa

SEQ ID NO: 24146 - DNA, 120 bp, synthetic construct
  source 1..120: mol_type = other DNA
gcccttcttaagagttaggagaatagagttgcatttagtgctattttaagaattattaaacttgtctgcggtttttttttcattcatatatagtatctttccagaaagccaaaaagcctt

SEQ ID NO: 24147 - DNA, 120 bp, synthetic construct; identical to SEQ ID NO: 7482
  source 1..120: mol_type = other DNA

SEQ ID NO: 24148 - DNA, 120 bp, synthetic construct
  source 1..120: mol_type = other DNA
gccacacctggcctcctacttcttaattagttgaaatattttgcagatatatataaatcatattgtgttaattaattttatgcttttttcttacctgtgaatttaccaatccaaatctga

SEQ ID NO: 24149 - DNA, 120 bp, synthetic construct
  source 1..120: mol_type = other DNA
ccaaaaaaaattgcctgaacaactcaacctcatcagtcaattaattgtctccttgttatagaggcaataatgaatgtcatgttttatacttttaataattgtatgttccctgaatggacc

SEQ ID NO: 24150 - DNA, 120 bp, synthetic construct
  source 1..120: mol_type = other DNA
gttcatttttaccttggtgagagtttgccagcagggaactgctctctgctatgtcaccaaataatgttttgctaaacttcttgtctgtagtacctgcctgatgtaatgggctgtctgtta

SEQ ID NO: 24151 - DNA, 120 bp, synthetic construct; identical to SEQ ID NO: 7483
  source 1..120: mol_type = other DNA

SEQ ID NO: 24152 - DNA, 120 bp, synthetic construct
  source 1..120: mol_type = other DNA
taaaaggtgccttttagtccccttttttttggtcattaagcctatttgtatgtttcagagaaaagtttgtttttatctattatcatatacaatatggaagtactgaaaaaatgggtaaaa

SEQ ID NO: 24153 - DNA, 120 bp, synthetic construct
  source 1..120: mol_type = other DNA
tgtttaattgaaatccttttcttcttgacaaagggttgtcactggccttttagatcttggctcagacataactttcatttgtcttaaaacctctggcgttgccaataaatcacgtgtgaa

SEQ ID NO: 24154 - DNA, 120 bp, synthetic construct
  source 1..120: mol_type = other DNA
ttttagaactaatggacattgctttgccatcatagaagaagatgaccagggagaaaccacattagcttcagggtgtatgaaatatgaaggatctgattttcagtgcaaagtaagatataa

SEQ ID NO: 24155 - DNA, 120 bp, synthetic construct; identical to SEQ ID NO: 7484
  source 1..120: mol_type = other DNA

SEQ ID NO: 24156 - DNA, 120 bp, synthetic construct
  source 1..120: mol_type = other DNA
gtattttttgtagagacaaggttttaccatgttgcccaggctggtctcaaactcctgggctcaagcagtctgcccgcatcggcccgcaaagtgctgggattacaggtgtgagccactgtg

SEQ ID NO: 24157 - DNA, 120 bp, synthetic construct
  source 1..120: mol_type = other DNA
ccacagagcaagaccctgtctcaaaaaaaaaaaaaaaaaaattcttttttctttttttaaattttaaccgtctttggctactgattacaattttcaatgagaaaaagtttctaaactttc

SEQ ID NO: 24158 - DNA, 120 bp, synthetic construct
  source 1..120: mol_type = other DNA
ttgtcatgactgcaaaaaaattatattgtcacacttatttgtagattataaaatttactgagaagacttttaagatagtggcagtaacctttgtatcactctgagacaacttagaaatgt

SEQ ID NO: 24159 - DNA, 120 bp, synthetic construct; identical to SEQ ID NO: 7485
  source 1..120: mol_type = other DNA

SEQ ID NO: 24160 - DNA, 120 bp, synthetic construct
  source 1..120: mol_type = other DNA
gggtggatcacgaggtctggagatcaagaccatccggctaacatggtgaaactccgtctctactaaaaatacaaaaaattagctggacgtggtggcgggtgcctgtcgtcccagctactc

SEQ ID NO: 24161 - DNA, 120 bp, synthetic construct
  source 1..120: mol_type = other DNA
aaaagaaattctcaggatggatagaaaccttaaaggttatgtttcaacctctcagctaatgtttggaatcacccttgttgcaaatgactgcaaatctatcttcctttctgactctttgga

SEQ ID NO: 24162 - DNA, 120 bp, synthetic construct
  source 1..120: mol_type = other DNA
gcccagtgaaaataattgtccataatgacctcaactgctccttatatgatcagctttagagttattcagtctccacttcctcagtgtaatatgcagaattgagtgtgatatgaccaagga

SEQ ID NO: 24163 - DNA, 120 bp, synthetic construct; identical to SEQ ID NO: 7486
  source 1..120: mol_type = other DNA

SEQ ID NO: 24164 - DNA, 120 bp, synthetic construct
  source 1..120: mol_type = other DNA
atacattttttaatcacttaaaaaattgaagaaagagctatggttagggtactgagcccagcagtaataaccagtgttcaacaggcccctagtgtaggcctgtcctaagctgaattcacc

SEQ ID NO: 24165 - DNA, 120 bp, synthetic construct
  source 1..120: mol_type = other DNA
aatgagatacatgtaaatagtttagcacaattagcacatagtaagggcttaatagatgttagctttgaccatattgattctttaatagagcagtcttcatgctgttacccatatccctgg

SEQ ID NO: 24166 - DNA, 120 bp, synthetic construct
  source 1..120: mol_type = other DNA
acttctcaagcagttctctttcccttagtcacttttcatagtcaacccctcctagtttacaaatagaaggcctgaggtgtaaaacttcaaggttccaaacggtgttgtaattcgaagtaa

SEQ ID NO: 24167 - DNA, 120 bp, synthetic construct; identical to SEQ ID NO: 7487
  source 1..120: mol_type = other DNA

SEQ ID NO: 24168 - DNA, 120 bp, synthetic construct
  source 1..120: mol_type = other DNA
ggtggtgcgtgcctttaatcccagctacttgggaggctgagacaggagaattgcttgaacacaggaggtggaggttgcagtgagccaaaatcatgccattgcactccagcctaggcagca

SEQ ID NO: 24169 - DNA, 120 bp, synthetic construct
  source 1..120: mol_type = other DNA
gaataagattaatgatgaatcttctcactctagcagtaatttttattcatgaattcgtgaactgatttgtttcaaaagtcccatccatatcattaagaaatgcctggccaggtgcagtgg

SEQ ID NO: 24170 - DNA, 120 bp, synthetic construct
  source 1..120: mol_type = other DNA
tggtggctcacgcctgtaattctagcactttgggaggccaaggcaggtggatcacctgaggtcaggagtttcagactagcctggccaacatggtgaaaccccgtctctactagaaataca

SEQ ID NO: 24171 - DNA, 120 bp, synthetic construct; identical to SEQ ID NO: 7488
  source 1..120: mol_type = other DNA

SEQ ID NO: 24172 - DNA, 120 bp, synthetic construct
  source 1..120: mol_type = other DNA
taacattttcttaagtttgtatttaatgaagattgtaacatatatattgttttgatcaattttatgctaataatgattatgataaactagaataattttctaagacttaaagacatacag

SEQ ID NO: 24173 - DNA, 120 bp, synthetic construct
  source 1..120: mol_type = other DNA
gttctagtgtaaaatttctcattgctaaaagaagcatttgttcatttattctttaaaatgatgataatgggtatcaaattgcaatgctatttagattctactgaatgcattaaaaaatga

SEQ ID NO: 24174 - DNA, 120 bp, synthetic construct
  source 1..120: mol_type = other DNA
tcacctgaaaaatacgtgaaggatacgttgcttttaagaattgggttacgccagcaagcattttgaccagcacttatctaactttctgtatttcttggtaaacgtcacccaagcacagca

SEQ ID NO: 24175 - DNA, 120 bp, synthetic construct; identical to SEQ ID NO: 7489
  source 1..120: mol_type = other DNA

SEQ ID NO: 24176 - DNA, 120 bp, synthetic construct
  source 1..120: mol_type = other DNA
aaattcatattccccacataagtctagaaatacaaaattgacttgggcagagggtacgggtggagagtgcaggaaaaggaaaggctgtgtcacccaaattcataatctcgacaaacccaa

SEQ ID NO: 24177 - DNA, 120 bp, synthetic construct
  source 1..120: mol_type = other DNA
tctagaatctcatctgggattcatgtcaagcaagaggaagggaagttaatttattgaatatttgttatatgtgtatagtatcctggggattcagtatattctaccttgtttccccccaac

SEQ ID NO: 24178 - DNA, 120 bp, synthetic construct
  source 1..120: mol_type = other DNA
ctcagcctcctgagtagctgggaccacaggcgtgtaccaccacacctggctgatttaaaaatttttttagagatggggtctcactattttgcccagcctgatctcagactcctccgctca

SEQ ID NO: 24179 - DNA, 120 bp, synthetic construct; identical to SEQ ID NO: 7490
  source 1..120: mol_type = other DNA

SEQ ID NO: 24180 - DNA, 120 bp, synthetic construct
  source 1..120: mol_type = other DNA
taaagtctactttctttcccttttaaagaaaagggacgtatataacacatatatatataacatatatataaacatatatacatgtttatatgaaatgtttatataaaaatataacattcc

SEQ ID NO: 24181 - DNA, 120 bp, synthetic construct
  source 1..120: mol_type = other DNA
tataggaactcataaggaatacaaacgcatcgtaagatctcttcgtacatttgggatgtcgtttcccacttagtagtgtttgagctaccttcgtcatccctgtcagcatccttcatagag

SEQ ID NO: 24182 - DNA, 120 bp, synthetic construct
  source 1..120: mol_type = other DNA
tttttctttgcacttttctcttctgcaaggccaagctcattttagctttcctggaaccgtttttggatgcttgacacttctttcattcatcgttagttatatgattttcatttcctcctc

SEQ ID NO: 24183 - DNA, 120 bp, synthetic construct
  source 1..120: mol_type = other DNA
atttaaaatataaaatatgtatttggacatttccaaatgctcttgaccatcttcccaacagaatctgaagtcacaggctcatgtttacctttttaaagtcatagctgattatactgaggc

SEQ ID NO: 24184 - DNA, 120 bp, synthetic construct; identical to SEQ ID NO: 7491
  source 1..120: mol_type = other DNA

SEQ ID NO: 24185 - DNA, 120 bp, synthetic construct
  source 1..120: mol_type = other DNA
tctgcacgctcagctgccttgctaaccagccttttctttggactacgacaccctccactttttagtctgatcttaaatctcatccacatctcagtaccacagtgagattatatgtaccag

SEQ ID NO: 24186 - DNA, 120 bp, synthetic construct
  source 1..120: mol_type = other DNA
accagtttatgattgtaattacctaagttcgggtttggtgttctaatctagtgtctaacacaccatccacatagatatgttcttaagaaaagccattttgcagtcttcactatttcagca

SEQ ID NO: 24187 - DNA, 120 bp, synthetic construct
  source 1..120: mol_type = other DNA
ccatttctaattttatcattactcttcttttaggattctccaaaagcccagctacgccggacaatagaatgttgtcggaccaatttatgtaaccagtatttgcaacccacactgccccct

SEQ ID NO: 24188 - DNA, 120 bp, synthetic construct; identical to SEQ ID NO: 7492
  source 1..120: mol_type = other DNA

SEQ ID NO: 24189 - DNA, 120 bp, synthetic construct
  source 1..120: mol_type = other DNA
tttatgtaactagactatagttctcttaagggaaaaggaccttactaccaattaattaattgggcacaatttcatacttcttgtatgttcatgattacttatgattttcttattaatgga

SEQ ID NO: 24190 - DNA, 120 bp, synthetic construct
  source 1..120: mol_type = other DNA
gcatgtagccatgatttcagaagacagttgccaaaaaagaagagtaataagagacagtccctaatggatataaactttaataataaaacatcataccaacctagatacattaatgaaaca

SEQ ID NO: 24191 - DNA, 120 bp, synthetic construct; identical to SEQ ID NO: 7493
  source 1..120: mol_type = other DNA

SEQ ID NO: 24192 - DNA, 120 bp, synthetic construct
  source 1..120: mol_type = other DNA
gggctgatctgtgtgacaaataggatatggcaaaagtgacttccaagtctacgttataaacagctttgcagctttcaccatggtctctgggatcactcactctgggggaagccaggcatc

SEQ ID NO: 24193 - DNA, 120 bp, synthetic construct
  source 1..120: mol_type = other DNA
gctcctgtcaagctttcacatgagtgcagtctcagctgacatctgaccctgagctacccaatcaagtcactcctgaatgcatgatccacagaaacagtgagataacaattgctgttttaa

SEQ ID NO: 24194 - DNA, 120 bp, synthetic construct
  source 1..120: mol_type = other DNA
acataaccacaatggccagttccgaagttcttgggggaactccatagtataaactggttgcttcttggttttctcaatttctaacctaagaatcagactttttgggtgtgcaaagtcact

SEQ ID NO: 24195 - DNA, 120 bp, synthetic construct; identical to SEQ ID NO: 7494
  source 1..120: mol_type = other DNA

SEQ ID NO: 24196 - DNA, 120 bp, synthetic construct
  source 1..120: mol_type = other DNA
tagaaatagagtctcactctgtctcccaggtggagtgcagtgatctcggctcactgcaatctctgcctcccaggttcaagcgatactcatgcctcagccttgcaagtaactgggattaca

SEQ ID NO: 24197 - DNA, 120 bp, synthetic construct
  source 1..120: mol_type = other DNA
aattgctggaattacaggcgtgagccaccgcacctggcctctaatgtgtatagtaaaatattgttgagtatgcttttatttttcttttaagaaaagaaccatctatatttttatttaaat

SEQ ID NO: 24198 - DNA, 120 bp, synthetic construct
  source 1..120: mol_type = other DNA
tttctttttttgtttttttttcatgctgcgttacctcagagctacctacacttttcactgtggtgtgtcttgagactgcctgcagtgccttcagccacatagtaaagaaccctatcagcc

SEQ ID NO: 24199 - DNA, 120 bp, synthetic construct; identical to SEQ ID NO: 7495
  source 1..120: mol_type = other DNA

SEQ ID NO: 24200 - DNA, 120 bp, synthetic construct
  source 1..120: mol_type = other DNA
gagcacctgaaatgattgagaaaacagtgtttggtgctcacacaaggctgggagtaggatctgttcacaccagctgtgagagttgaaaaccccataattcataggttttggttgaaggac

SEQ ID NO: 24201 - DNA, 120 bp, synthetic construct
  source 1..120: mol_type = other DNA
tagactaaacatggctctggtctcaccctaaaagcaagccccaaacagatcacaccatttctaagtcactgtatcctagaacaaactcaacagtatttataggaatataaaaatatctgg

SEQ ID NO: 24202 - DNA, 120 bp, synthetic construct
  source 1..120: mol_type = other DNA
tccataatgagggaagaaatgaagcaatcaaaaccactgacccagaactgatatagaccttagaattagcaattacattaaaatagttattataactgtattttttatgtacaaaagtta

SEQ ID NO: 24203 - DNA, 120 bp, synthetic construct; identical to SEQ ID NO: 7496
  source 1..120: mol_type = other DNA

SEQ ID NO: 24204 - DNA, 120 bp, synthetic construct
  source 1..120: mol_type = other DNA
cgctcaatgcaagctccacctcccgggtttacgccattctcttgcttcagccttccgagtagctgggactacaggcacctgccaccatgcctaagtttttgtatttttagtagagacggg

SEQ ID NO: 24205 - DNA, 120 bp, synthetic construct
  source 1..120: mol_type = other DNA
tgagacaaggtcttgctctgtcacccaggctggagtgcagtggtgcaatctcagctctctgcatactccacctgctgggttcaagcgattctcgtgcttcagcttcccaagtagctggga

SEQ ID NO: 24206 - DNA, 120 bp, synthetic construct
  source 1..120: mol_type = other DNA
cccaaagtgttgggactataggcgtgagccactgcactcagctttttcaaatttaatgaaaaccatgaatccagatatctgaaagctcagcaaaccctgagtataagaaacatgaagaaa

SEQ ID NO: 24207 - DNA, 120 bp, synthetic construct; identical to SEQ ID NO: 7497
  source 1..120: mol_type = other DNA

SEQ ID NO: 24208 - DNA, 120 bp, synthetic construct
  source 1..120: mol_type = other DNA
gaagttcttcgggtggaaagacaggccaggtgaagataagaatccacataaaagaatgaagatccggaaatggggatctaagtgaccctggcacaaactaacaatatcttttaagatgaa

SEQ ID NO: 24209 - DNA, 120 bp, synthetic construct
  source 1..120: mol_type = other DNA
gacatcaggaactggtcatgtaggcttttttatagttctaaactaaatactacatagaactttgtgactgccctgtttatttagctttagaacttcatgtgctagttcagtctgtgaaga

SEQ ID NO: 24210 - DNA, 120 bp, synthetic construct
  source 1..120: mol_type = other DNA
aagagaggtctgtccgtcagcatattaaggtttgtctgttttgtttgcctcattaatattttgtttcccttttttctgatgtgatcgttttcctccaatttagatacgtctgcaatttat

SEQ ID NO: 24211 - DNA, 120 bp, synthetic construct
  source 1..120: mol_type = other DNA
agttcctggttgtttcctctggcatcttcttttgtagctcctttaatccttcagactgcttagatcctatgatctgcccccataacacttactaattttatcttgcatttttttacattg

SEQ ID NO: 24212 - DNA, 120 bp, synthetic construct; identical to SEQ ID NO: 7498
  source 1..120: mol_type = other DNA

SEQ ID NO: 24213 - DNA, 120 bp, synthetic construct
  source 1..120: mol_type = other DNA
ttgtcagatgaaaagcctgcttctggctttataatggaccctttatcctcattgtctttaggggactcctggtcctagagtagttaaatagtaagaattgaatgatttttttaagttgca

SEQ ID NO: 24214 - DNA, 120 bp, synthetic construct
  source 1..120: mol_type = other DNA
aaaatgccctatatgtacacatatttttatcactttcagcactctccatgtatttaattccaagttttaggtccaagttttcatttgataccatattccttctgcctgaagaatttcttt

SEQ ID NO: 24215 - DNA, 120 bp, synthetic construct; identical to SEQ ID NO: 7499
  source 1..120: mol_type = other DNA

SEQ ID NO: 24216 - DNA, 120 bp, synthetic construct
  source 1..120: mol_type = other DNA
taaacagctacaatacatttagaagcgtgtgtgtgtgtttcttttttggtatttactctgctttgggtttcactgagcttagtgaatctatggtttgctatctttcattattattgcaaa

SEQ ID NO: 24217 - DNA, 120 bp, synthetic construct
  source 1..120: mol_type = other DNA
catactggctaacatggtgaaactccgtctctaccaaaaatacaaaaaaagaaattagccaggcgtggtggcgggcgcctgtagtcccagctactcgggaggctgaggcaggaggatggc

SEQ ID NO: 24218 - DNA, 120 bp, synthetic construct
  source 1..120: mol_type = other DNA
aacactttgtccttttatctgtctcttctgtttttgagactccaattatacatattttagattatttggtgttgtgccacagctctttaattcttcagtttttctcacttgttttttctc

SEQ ID NO: 24219 - DNA, 120 bp, synthetic construct
  source 1..120: mol_type = other DNA
gagctgtgtattgttgagctcatcaaacattcttcatctttaatagcatgttttccctttctcacattcctgtctgacttcatttttctgctgagactctccatctgtgtattctgttac

SEQ ID NO: 24220 - DNA, 120 bp, synthetic construct; identical to SEQ ID NO: 7500
  source 1..120: mol_type = other DNA

SEQ ID NO: 24221 - DNA, 120 bp, synthetic construct
  source 1..120: mol_type = other DNA
gctactatggagaacagtgtggaggtccctcaaaaaactaaaatcagaactaccatatgatcttgcaatcccactatttggtatatatccaaaaggaaatcagtatattgaaggcctgtt

SEQ ID NO: 24222 - DNA, 120 bp, synthetic construct
  source 1..120: mol_type = other DNA
attaatgaaatcctgttattttcagcaacgtgaatggaactggagttcattaatgttaagtgaaataagccagtcatagacaaatattacatgttctcaatcatacgtgggagctaaaaa

SEQ ID NO: 24223 - DNA, 120 bp, synthetic construct
  source 1..120: mol_type = other DNA
ctaatagaaggaataagttctagtatttgatagtacagtagggaaattatagttagtaatttattgtgtatttcaaagtagctagtctttaagagaagaattgtaatattcccaacacaa

SEQ ID NO: 24224 - DNA, 120 bp, synthetic construct; identical to SEQ ID NO: 7501
  source 1..120: mol_type = other DNA

SEQ ID NO: 24225 - DNA, 120 bp, synthetic construct
  source 1..120: mol_type = other DNA
acagacattgaaataaagacatactcctgaaaatgggcatacctcctcttaggctgttgataggcaggaggtgttcagtctagtacgagtcgatttgggttagggttttgttcagtgttt

SEQ ID NO: 24226 - DNA, 120 bp, synthetic construct
  source 1..120: mol_type = other DNA
cctgtagctttcagctcttaccacgtcattgcacctctgtgggagtcactgtctatgttcttgttcctcccacagaggtcatctgctgttgcgtgttattcacattagaggacagttgga

SEQ ID NO: 24227 - DNA, 120 bp, synthetic construct
  source 1..120: mol_type = other DNA
tcctgtaggatcctatgcccacaaggagagaggaaggtgtcatcttctcctcttcctcagcatcagaggatcttagcctggtcagagcacagggagcatttcctctacatccccaagagg

SEQ ID NO: 24228 - DNA, 120 bp, synthetic construct; identical to SEQ ID NO: 7502
  source 1..120: mol_type = other DNA

SEQ ID NO: 24229 - DNA, 120 bp, synthetic construct
  source 1..120: mol_type = other DNA
gtgaggatggaagtatttctgttttgggaagccgcagggtgttaaatgatcagttaaattgtcatattccccagtgtaaggtcaatagttaaagcctaagactgaaaaacttaaaatgtc

SEQ ID NO: 24230 - DNA, 120 bp, synthetic construct
  source 1..120: mol_type = other DNA
tggccaactagcggaaccttaactctactaaaaatacaaaaattagcctggtatggtggtgtgtgcctgcagtcccagctacttggggttcccaagaattgatcaaaccaggaaggcggg

SEQ ID NO: 24231 - DNA, 120 bp, synthetic construct; identical to SEQ ID NO: 7503
  source 1..120: mol_type = other DNA

SEQ ID NO: 24232 - DNA, 120 bp, synthetic construct
  source 1..120: mol_type = other DNA
attctcatatgttggtggagggattccaactggttcaccctttaaggaggtcagtagggcactccatcaaagttccaaattcagtaattcctactacagatatggtagaaaattgtattt

SEQ ID NO: 24233 - DNA, 120 bp, synthetic construct
  source 1..120: mol_type = other DNA
ttaggagttcaagaccagcctggccaacatggtgaaaccccatctctactaaaaaaaaatacaaaaattagccaggtgtggtggtgggtgcctgtaatcccagctactcgggaggctgag

SEQ ID NO: 24234 - DNA, 120 bp, synthetic construct
  source 1..120: mol_type = other DNA
ataaagattaccaataggtgaatggttagcagctatacagtggaatactatctagccattaaagaaaaaggtgacactttgtgtacttacgtggaatgataccccaggtaagaagcaaga

SEQ ID NO: 24235 - DNA, 120 bp, synthetic construct; identical to SEQ ID NO: 7504
  source 1..120: mol_type = other DNA

SEQ ID NO: 24236 - DNA, 120 bp, synthetic construct
  source 1..120: mol_type = other DNA
atttatatggaaaatactttaatttgtttcttagtttccattatatattatacattctgaatggaccatatgactaaatgagagaatcaatatgttaaaaccaggccaggcacagtgggt

SEQ ID NO: 24237 - DNA, 120 bp, synthetic construct
  source 1..120: mol_type = other DNA
cctaggcaacatggtgaaacctcatctctatgaaaaatacaaaaattagccaggcgtagtggaacataccagtagtcccagccacttgggaggctgaggtgggaggatcacttaagccca

SEQ ID NO: 24238 - DNA, 120 bp, synthetic construct
  source 1..120: mol_type = other DNA
gacattaggattggaaggttgtcttaagagacaaaagcatgtcaaaaagagtaaagatgaagtaatttgtctacactaaaatttaaaaactgacataaaaatgccataaagagaatgctg

SEQ ID NO: 24239 - DNA, 120 bp, synthetic construct; identical to SEQ ID NO: 7505
  source 1..120: mol_type = other DNA

SEQ ID NO: 24240 - DNA, 120 bp, synthetic construct
  source 1..120: mol_type = other DNA
ttagctgggcatggtggcacgtacctgtagtcccagctactcaggaggctgaggtgggaggatcgcttgagcctgggtggcagaggttgcagtgaactgagatcgtaccactgcattcca

SEQ ID NO: 24241 - DNA, 120 bp, synthetic construct
  source 1..120: mol_type = other DNA
agaggaaagcatattaaaagaaggcattgtttcatatctatcaagttggcaaaagtctgaaaatatgacttcgaggtttgggttggaatgtaaggaaatgtatattgtgattatttgaag

SEQ ID NO: 24242 - DNA, 120 bp, synthetic construct
  source 1..120: mol_type = other DNA
ttctagatgtatttaacaggatatattatccaatgataagactaatttggataggattctttctgagggaaggataatggtatagagaacctcaaggtttttcttagggttttatagttt

SEQ ID NO: 24243 - DNA, 120 bp, synthetic construct
  source 1..120: mol_type = other DNA
atcactaaaagaccttattgaccagtcacaaagttctggtagtgggtctggactacctttattggtaagttaaacgttcctatagacatgaatggtgtgttgatttagaatgtgtcctca

SEQ ID NO: 24244 - DNA, 120 bp, synthetic construct; identical to SEQ ID NO: 7506
  source 1..120: mol_type = other DNA

SEQ ID NO: 24245 - DNA, 120 bp, synthetic construct
  source 1..120: mol_type = other DNA
tgaaataaaaaagaagtttcaacagatattcttagagaggatgcttctctcaatatactactaccaaaacacatagttcaataaaaaataattttaaagggaattacaaataaattccaa

SEQ ID NO: 24246 - DNA, 120 bp, synthetic construct
  source 1..120: mol_type = other DNA
acactagatatccagataggtttaagtttttaattgtattagttgaaagaaactgatctcttcttattttattttattttactttattttattttaatcgtatcgagatagtcttgctct

SEQ ID NO: 24247 - DNA, 120 bp, synthetic construct; identical to SEQ ID NO: 7507
  source 1..120: mol_type = other DNA

SEQ ID NO: 24248 - DNA, 120 bp, synthetic construct
  source 1..120: mol_type = other DNA
gtttacgtagaaaatcccaagaatggtacaataaaactactgcagccagtaaatgactttatcaggttgcagaatacagagtcattgtacaaataccattgaatttataggctctagcaa

SEQ ID NO: 24249 - DNA, 120 bp, synthetic construct
  source 1..120: mol_type = other DNA
aagaaattaataaagccctaaataagtggagatgtttataaatctgaggactcagtattaagatttcagttttcctcaaattggtgtgtaatttcattcgaatccaaatgaaaatcagag

SEQ ID NO: 24250 - DNA, 120 bp, synthetic construct
  source 1..120: mol_type = other DNA
gtagaagaacaaagaggaatcactacctgatttctggacttaccgtaaaactcaataatgatctcaatttggtactggcataaggatagatgtattgatgaatggaacagattatggagt

SEQ ID NO: 24251 - DNA, 120 bp, synthetic construct; identical to SEQ ID NO: 7508
  source 1..120: mol_type = other DNA

SEQ ID NO: 24252 - DNA, 120 bp, synthetic construct
  source 1..120: mol_type = other DNA
tttatcaaaatttaaaacttctgctatttagaagacaagaaaatgagaagacaagtcacagattggcaaaacagatctgatacagggtttttgtgcaaaatatataaagaccttttgcaa

SEQ ID NO: 24253 - DNA, 120 bp, synthetic construct
  source 1..120: mol_type = other DNA
tggcaaacaagcacatgaaaagatgctcagcatcagcagggatatacaaattaaacacagtaagatactactgcacatccactagtatagctaagactgataatattaagtggtgccaaa

SEQ ID NO: 24254 - DNA, 120 bp, synthetic construct
  source 1..120: mol_type = other DNA
caatccttctgctaattatttacccaagagatatgaaaacttgtccacaccagaggcctgaatgtgaatgtttatagcagttttatttataatagacataaactggaaacaaccccaaag

SEQ ID NO: 24255 - DNA, 120 bp, synthetic construct; identical to SEQ ID NO: 7509
  source 1..120: mol_type = other DNA

SEQ ID NO: 24256 - DNA, 120 bp, synthetic construct
  source 1..120: mol_type = other DNA
acgcctggccaaaaagtgagaatttttttacgttattaaaatattctgtatcttaattgtggtattggtgattacatgatatagatttgtccaaggcttgttgaacttttctcaaaaagg

SEQ ID NO: 24257 - DNA, 120 bp, synthetic construct
  source 1..120: mol_type = other DNA
tctactaaaaatacaaaaattagctggacgtggtggcagatgcctgtaatcccagctgctcgggaggctgaggcaggaaattgttttaactggggaggcagaagttgcagtgagctgaga

SEQ ID NO: 24258 - DNA, 120 bp, synthetic construct
  source 1..120: mol_type = other DNA
tctagtccattttagaagcatttccaacttggagcataatgttctttttaatttagaatgatcactaatgcttctgaaaatgaaagataacaatccatgtacatcttttatttaacaaat

SEQ ID NO: 24259 - DNA, 120 bp, synthetic construct
  source 1..120: mol_type = other DNA
gagaggttttgtgtgctatgaaggtgtttaagtgagaaaatagcactctaagtaaagggaactggatattcaaaaaaacccagcgacaggaataagcttgagtgaattctaaaagttgag

SEQ ID NO: 24260 - DNA, 120 bp, synthetic construct; identical to SEQ ID NO: 7510
  source 1..120: mol_type = other DNA

SEQ ID NO: 24261 - DNA, 120 bp, synthetic construct
  source 1..120: mol_type = other DNA
tgagtctgtggaccaagactacccacgactgtgtgcactgggagggtaattattatgaccatttttgcaaacagccagccacttgaataacctgtttatgatttcagaatacattgtaca

SEQ ID NO: 24262 - DNA, 120 bp, synthetic construct
  source 1..120: mol_type = other DNA
gtcaacgtggctaaaccccatctctactaaaaatacaaaaaaattagctgggcatggtggcgggtgtctgtaatcccagctacttgggaggctgaggcaggagaatcacttgaatctaaa

SEQ ID NO: 24263 - DNA, 120 bp, synthetic construct; identical to SEQ ID NO: 7511
  source 1..120: mol_type = other DNA

SEQ ID NO: 24264 - DNA, 120 bp, synthetic construct
  source 1..120: mol_type = other DNA
acagaaatctaccaaactgtgctaatgcgccatgaaaacatacttggtgggtacacactgattcagtcaatttcatttttgacaaggctagtgaggtacaggtggaagcctccatatgtg

SEQ ID NO: 24265 - DNA, 120 bp, synthetic construct
  source 1..120: mol_type = other DNA
ccggaatgccaaccaagatctttctttactaaccagctgaagaaacagcagtgagtttcaaatggaaaataatactagtttattggacttactcccatagtaatgaaaacccagtctttt

SEQ ID NO: 24266 - DNA, 120 bp, synthetic construct
  source 1..120: mol_type = other DNA
catctccacatttacacaatagcaaagtaatttaggtgtgagctggtcagtcaggtacataagccgatctggctatcctgagttttcttttcccttcacctcttgttttcctccctttaa

SEQ ID NO: 24267 - DNA, 120 bp, synthetic construct
  source 1..120: mol_type = other DNA
tctctgaatactctagaggaggagccttccttgcctcctctggctactggttggtggccaggaatttttggtgttccttggcttagtatagacaacactctagtctccatttctgtcatc

SEQ ID NO: 24268 - DNA, 120 bp, synthetic construct; identical to SEQ ID NO: 7512
  source 1..120: mol_type = other DNA

SEQ ID NO: 24269 - DNA, 120 bp, synthetic construct; identical to SEQ ID NO: 535
  source 1..120: mol_type = other DNA

SEQ ID NO: 24270 - DNA, 120 bp, synthetic construct
  source 1..120: mol_type = other DNA
ctttttcttttctttccttttcttttcttttttttttttttgagacggagtctcattctgtcgctcaggctggagtgcagtggcgccatcttggctcactgcaacctctgccgccaggtt

SEQ ID NO: 24271 - DNA, 120 bp, synthetic construct; identical to SEQ ID NO: 7513
  source 1..120: mol_type = other DNA

SEQ ID NO: 24272 - DNA, 120 bp, synthetic construct
  source 1..120: mol_type = other DNA
cctaagtttttctcagtatccagaatgagcattacttctccctagcctatctctgatgataactaaccttttaaactcatcaactggacaggtttcatagcggcagacattaaaggtaca

SEQ ID NO: 24273 - DNA, 120 bp, synthetic construct
  source 1..120: mol_type = other DNA
tgtggtctgtgccacctgcacacagaaatttatggcacccaaggaaagcccgcaattgctcatcgagacctaaagagcaaaaacatcctcatcaagaaaaatgggagttgctgcattgct

SEQ ID NO: 24274 - DNA, 120 bp, synthetic construct
  source 1..120: mol_type = other DNA
tatttccctatttgtattcaagataatggaattctaaaaatgtgcatatgcttgtttttagttacataaatgtatagttgggggggattttgttctttttacaaaaattgtgtcctactt

SEQ ID NO: 24275 - DNA, 120 bp, synthetic construct
  source 1..120: mol_type = other DNA
ttttaaagacagtgtctcactcagttgcccaggctggaatatagtagtgtgatcttagctcactgcaacctcgacctcatgggctcaagcaatcctcccacctcagcctcctgagtagct

SEQ ID NO: 24276 - DNA, 120 bp, synthetic construct; identical to SEQ ID NO: 7514
  source 1..120: mol_type = other DNA

SEQ ID NO: 24277 - DNA, 120 bp, synthetic construct
  source 1..120: mol_type = other DNA
gcatttcttcatgatggattcctagagaagggcctgctgaggcagtgagtttatacatattaaactatggtatgttgcatattatttctttcagcagtgtgcctcagtttacacacccgt

SEQ ID NO: 24278 - DNA, 120 bp, synthetic construct
  source 1..120: mol_type = other DNA
gtaattctagaatggagtggctgctttacatttcagaattcattttaggctgtaatataaaagtaccagtctttaaaacaactgtaagagacatttaaatctgttacagtgttctgagtc

SEQ ID NO: 24279 - DNA, 120 bp, synthetic construct
  source 1..120: mol_type = other DNA
aacaacagaactctgttgatgggacccataaagaagaaaatgtaatcctatgtcacaaagccttagtgtatcatatgagagtggtaaaagcaagcgattcctcttgtattttcatattca

SEQ ID NO: 24280 - DNA, 120 bp, synthetic construct; identical to SEQ ID NO: 7515
  source 1..120: mol_type = other DNA

SEQ ID NO: 24281 - DNA, 120 bp, synthetic construct
  source 1..120: mol_type = other DNA
atcttatattcagtgttgtcctctttcttagacaccagacttatttagtgacaaaacctgacctgaacggatgtgaggtgtgtattgcccttatccagttgaggaggactatcggactta

SEQ ID NO: 24282 - DNA, 120 bp, synthetic construct
  source 1..120: mol_type = other DNA
ttccacaatgcatctggccccaaggagaaaaagaagcttttataaaataggacaaaaatacaagataaactattttatttttggccctcaacttggaccttggctttcttttgtttcagt

SEQ ID NO: 24283 - DNA, 120 bp, synthetic construct; identical to SEQ ID NO: 7516
  source 1..120: mol_type = other DNA

SEQ ID NO: 24284 - DNA, 120 bp, synthetic construct; identical to SEQ ID NO: 539
  source 1..120: mol_type = other DNA

SEQ ID NO: 24285 - DNA, 120 bp, synthetic construct
  source 1..120: mol_type = other DNA
agttcctccatgttatttcagaaggcagaatctcattcttttttctggctgaatgatactccattgtgtgtaggtgccacattttcttgatgtgttcatctgttgatggtcacttaggtt

SEQ ID NO: 24286 - DNA, 120 bp, synthetic construct
  source 1..120: mol_type = other DNA
acgtaatttagatgtcacatacgtcagagtccccaagaccacccccaggttgtgcgatttcacttgaaggaccacaggactcggcatgtggttgtcccaatggctaacatttatcccagt

SEQ ID NO: 24287 - DNA, 120 bp, synthetic construct; identical to SEQ ID NO: 7517
  source 1..120: mol_type = other DNA

SEQ ID NO: 24288 - DNA, 120 bp, synthetic construct
  source 1..120: mol_type = other DNA
gtgagttaccctcaccgtttccggtaagttttatatccatgtagggaactgtttaccatttgtgtacccgggcactggccaaggccaaaccttgcaagccgcctttcctaagggaaggtc

SEQ ID NO: 24289 - DNA, 120 bp, synthetic construct
  source 1..120: mol_type = other DNA
ctttagggtaaatggctgatttcgccttgcttattttttttaaggaagattgatatgccctttgtcgatggactctatcacagttgtgatgacatccctggtggaggtagaggaaatagt

SEQ ID NO: 24290 - DNA, 120 bp, synthetic construct
  source 1..120: mol_type = other DNA
gttttagttccatagtttagcaaaagatgcttactagattggtatatcttgtccagcaaccatttttgtgcccatgttttctcattcccttatagggatcgtggaagaataccaattgcc

SEQ ID NO: 24291 - DNA, 120 bp, synthetic construct; identical to SEQ ID NO: 7518
  source 1..120: mol_type = other DNA

SEQ ID NO: 24292 - DNA, 120 bp, synthetic construct
  source 1..120: mol_type = other DNA
gtttttacccatggcatgggtggaattagagtggaataaggatgttaacttggttctcagactctttcttcactacgtgttcacaggctgctaatattaaacctttcagtactcttatta

SEQ ID NO: 24293 - DNA, 120 bp, synthetic construct
  source 1..120: mol_type = other DNA
ctgattagtgtctccagtcaagctctgggtactgaattgcctgttcataaaacggtgctttctgtgaaagccttaagaagataaatgagcgcagcagagatggagaaatagactttgcct

SEQ ID NO: 24294 - DNA, 120 bp, synthetic construct; identical to SEQ ID NO: 7519
  source 1..120: mol_type = other DNA

SEQ ID NO: 24295 - DNA, 120 bp, synthetic construct
  source 1..120: mol_type = other DNA
tctgtaaatttggactgttttccttcaaccaccattttttttgtggttattatttttgtcacggaaagcatcctctccaaagttggagcttctattgccatgaaccatgcttacaaagaa

SEQ ID NO: 24296 - DNA, 120 bp, synthetic construct
  source 1..120: mol_type = other DNA
tgtgctttatttgcaaatcacccactcctttacaaccatactttatatatgtacatacattcatactgtagaaaccagctcatgtgtacctcatatcccatccttaagagaagaaatgtt

SEQ ID NO: 24297 - DNA, 120 bp, synthetic construct
  source 1..120: mol_type = other DNA
gtaaaaacttcattagggtaatatcatctcaattttttcaaatgaaaggattctctaattagaaatttatatgtcagagctgttataaatttatcaactgtcaaatatgttctggacagc

SEQ ID NO: 24298 - DNA, 120 bp, synthetic construct
  source 1..120: mol_type = other DNA
gtatctagtcagtatctgtagctacactgtataactgttcttcaataaaatggttcatattttatagatgccttgttatctcaagaaatctgatttacataaacttatacttctttaatg

SEQ ID NO: 24299 - DNA, 120 bp, synthetic construct; identical to SEQ ID NO: 7520
  source 1..120: mol_type = other DNA

SEQ ID NO: 24300 - DNA, 120 bp, synthetic construct
  source 1..120: mol_type = other DNA
agaaatacaaatattttaatctgcgttgccgtatgatatgattgcacttagaacacccaatttacttaaatcttggtttacttttgacttgataccataatctttaaaatcatttgtcat

SEQ ID NO: 24301 - DNA, 120 bp, synthetic construct
  source 1..120: mol_type = other DNA
cctcagcctcccgagtagctgggactacaggcgcccgccaccgcgcccggctaattttttgtatttttagtagagacggggtttcaccttgttagccaggatggtctcaatctcctgacc

SEQ ID NO: 24302 - DNA, 120 bp, synthetic construct; identical to SEQ ID NO: 7521
  source 1..120: mol_type = other DNA

SEQ ID NO: 24303 - DNA, 120 bp, synthetic construct
  source 1..120: mol_type = other DNA
accagcctggccaacatggtgaaaccccatctctactaaaaataaaaaactcagccaggcgtggtggcgggtgcctgtaatcccagctactcgggaggctgaagcaggagaattgcttaa

SEQ ID NO: 24304 - DNA, 120 bp, synthetic construct
  source 1..120: mol_type = other DNA
attaaacttagttcttgtctctcctttccactcttattcttaaatctgaagctcatcgactaagtgaaatatttaaagaatatgataggccagcaagaagaagtattatgtagtaccata

SEQ ID NO: 24305 - DNA, 120 bp, synthetic construct
  source 1..120: mol_type = other DNA
cccaaactacctgactataaacaggaaaagttaaccctcaaagagagttcttgtgaattctctttatgctggcaaatagctctaggattaaaggcacattagggtttccttcagtttgtt

SEQ ID NO: 24306 - DNA, 120 bp, synthetic construct; identical to SEQ ID NO: 7522
  source 1..120: mol_type = other DNA

SEQ ID NO: 24307 - DNA, 120 bp, synthetic construct
  source 1..120: mol_type = other DNA
tttcaacagcagaaatgatttttattttaacaaaagattatgatagcccttgtagtgtttaaaagtggtcatatttattactgactttgagtcaggtgttaaaatagcagtgccacagct

SEQ ID NO: 24308 - DNA, 120 bp, synthetic construct
  source 1..120: mol_type = other DNA
taaggaaagtatgtgaatatggctcttgtaaaggattaactattgtaattttagcttatgctctgtattctgttttctatggaattatttaagcccttttagtgacctttgtcctggccc

SEQ ID NO: 24309 - DNA, 120 bp, synthetic construct
  source 1..120: mol_type = other DNA
tgtaaaacaccaaaaatatagattcgtctttgacgtgtaacacactaaatgtattttgtacagcatctggtttaaaaggtgccttaagagtttaccattacttgctttgttctatataca

SEQ ID NO: 24310 - DNA, 120 bp, synthetic construct; identical to SEQ ID NO: 7523
  source 1..120: mol_type = other DNA

SEQ ID NO: 24311 - DNA, 120 bp, synthetic construct
  source 1..120: mol_type = other DNA
ggcacgatctcagctcactgcaacctttgcctcctgggttcaagcaattctcctgcctcagcctcccgaatagctggaactacaggtgtttgccaccatgcctggctaattttttgtatt

SEQ ID NO: 24312 - DNA, 120 bp, synthetic construct
  source 1..120: mol_type = other DNA
gccaaaacattgttttctgattatggaaatgtactcatggcagaaaatttgggaaacaacagcaaataataaagcaaataaaaatcactcaaaattctattgccagacattatcactata

SEQ ID NO: 24313 - DNA, 120 bp, synthetic construct
  source 1..120: mol_type = other DNA
tctcctgcctcagcctcccaagtagccgggattacaggtgtgcaccaccacgcccggctaatttttgtattttagtagagatgcggtttcaccatgttggcccaggctggtctcgaactc

SEQ ID NO: 24314 - DNA, 120 bp, synthetic construct
  source 1..120: mol_type = other DNA
tgccattaaatagccattgagaactttttttttaatgactgcacaatatttgactaagaagatggagtaatttctgtgctcaatcccctattgaatatttggattattttcattgttttg

SEQ ID NO: 24315 - DNA, 120 bp, synthetic construct; identical to SEQ ID NO: 7524
  source 1..120: mol_type = other DNA

SEQ ID NO: 24316 - DNA, 120 bp, synthetic construct
  source 1..120: mol_type = other DNA
agtgtgccttctgctgccttttcctagggaactgaacatgttaaatcacagacgcgatgtggcactgattattgttcctcaaaagaaatgcgtgtctgaagatagcctcttacagattcc

SEQ ID NO: 24317 - DNA, 120 bp, synthetic construct
  source 1..120: mol_type = other DNA
tcagtgatttctgggaactgcaaatgcttgccagctttccttctgtctgtggaaacactgaataaatgtattcatttctcctttccagcaatctgttagtctcactgctccattccaagg

SEQ ID NO: 24318 - DNA, 120 bp, synthetic construct; identical to SEQ ID NO: 7525
  source 1..120: mol_type = other DNA

SEQ ID NO: 24319 - DNA, 120 bp, synthetic construct
  source 1..120: mol_type = other DNA
gcatggagacttaaatgtgtgagtgctggtataagcagaagtgggagagtcacctcgatgctgggatccagatggcggcttatttcaagtgcagtggcacatacaaaaaatatttttgga

SEQ ID NO: 24320 - DNA, 120 bp, synthetic construct
  source 1..120: mol_type = other DNA
cctccacctcccgggttaaagcaattctcctgcctcagccacctgagaagttgggattacaggcgtgcaccaccacactcagctaattttgtatttttagtagagacggggtttaccatg

SEQ ID NO: 24321 - DNA, 120 bp, synthetic construct
  source 1..120: mol_type = other DNA
attgttaattcacatattccatcaacctattgctcctctgaatcttagcagcttcttggtctttgttcaaatgaaatctaagtcaattccatatctctcaatgtcgctacatccacctca

SEQ ID NO: 24322 - DNA, 120 bp, synthetic construct; identical to SEQ ID NO: 7526
  source 1..120: mol_type = other DNA

SEQ ID NO: 24323 - DNA, 120 bp, synthetic construct
  source 1..120: mol_type = other DNA
aggtacaaaaattagctgggtgtggtggtactcgcctgtagtcccagctccttgggaagctgaggcaggagaatcacttgaacccaggaggcggaggttgcagtgagctgagatcgcacc

SEQ ID NO: 24324 - DNA, 120 bp, synthetic construct
  source 1..120: mol_type = other DNA
aatgtgaagaaaatattgggcccccttgtttttctttaatggaagagccatttttaaaagccagtttagaatccagatgatgacatctgttgctctactgtatgactgaaatgcaggtca

SEQ ID NO: 24325 - DNA, 120 bp, synthetic construct
  source 1..120: mol_type = other DNA
aaaagcaatttttattacttgatcctgtcctcatacttggctaggagttcagctggagatagaatctaactctgaagatgatactccatgatcttctagcatcccttgtcaccagtgaga

SEQ ID NO: 24326 - DNA, 120 bp, synthetic construct
  source 1..120: mol_type = other DNA
tgttggaagttgaaactggccatatctaaatatattcattctgtttcttagtactaatgggatcttttcttagacctgggaaattttctcccattatttcttttgtttcttccctttttt

SEQ ID NO: 24327 - DNA, 120 bp, synthetic construct; identical to SEQ ID NO: 7527
  source 1..120: mol_type = other DNA

SEQ ID NO: 24328 - DNA, 120 bp, synthetic construct
  source 1..120: mol_type = other DNA
gaagcaaattacagagctaatacccctttatccctaaatacttcagggatgttctattacttaaccaattatgtacaattatcagaaccaggaaagttcacattgatacaatagcaatga

SEQ ID NO: 24329 - DNA, 120 bp, synthetic construct
  source 1..120: mol_type = other DNA
gcacagtcatagctcacttcaacctcaaactttgggcctcaagcgatcctcccgcctcagcctcccaaagggctatgattacaggcatgagccaccatgctggcctcatttcccctttcc

SEQ ID NO: 24330 - DNA, 120 bp, synthetic construct; identical to SEQ ID NO: 7528
  source 1..120: mol_type = other DNA

SEQ ID NO: 24331 - DNA, 120 bp, synthetic construct; identical to SEQ ID NO: 7529
  source 1..120: mol_type = other DNA

SEQ ID NO: 24332 - DNA, 120 bp, synthetic construct; identical to SEQ ID NO: 550
  source 1..120: mol_type = other DNA

SEQ ID NO: 24333 - DNA, 120 bp, synthetic construct
  source 1..120: mol_type = other DNA
tgtctttggaaaccggttcttgaaaatcttctgctgttttagaacacattctttagaaatctagcaaatatatctcagacttttagaaatctcttctagtttcattttcctttttttttt

SEQ ID NO: 24334 - DNA, 120 bp, synthetic construct
  source 1..120: mol_type = other DNA
ccgggctgaagtgattctcctgccttagccacctgagtagctgggattacaggtgtccaccaccatgaccggctaatttctgtatttttagtagagatggggtttcaccatgttggccag

SEQ ID NO: 24335 - DNA, 120 bp, synthetic construct; identical to SEQ ID NO: 7530
  source 1..120: mol_type = other DNA

SEQ ID NO: 24336 - DNA, 120 bp, synthetic construct; identical to SEQ ID NO: 7531
  source 1..120: mol_type = other DNA

SEQ ID NO: 24337 - DNA, 120 bp, synthetic construct
  source 1..120: mol_type = other DNA
agtagaaggactgaagagtgagaggagctcccagggcctggaaaggccactttgtaagctcattcttggggtcctgtggctctgtacctgtggctggctgcagtcagtagtggctgtggg

SEQ ID NO: 24338 - DNA, 120 bp, synthetic construct
  source 1..120: mol_type = other DNA
aacacaagcagagattagtgtcaattcattctcctggactaggctctaatcaatcgactccagggtcctggttgtatgagttcttaggattaatgaggtagaagctaatttttttttttt

SEQ ID NO: 24339 - DNA, 120 bp, synthetic construct
  source 1..120: mol_type = other DNA
ggaattacaggcacatgccatcacacccagctaatttttgtatttttagtagagacgggggtttcacaatgttggccaggctgctctggaactcctgacctcaggtgatccacccacctt

SEQ ID NO: 24340 - DNA, 120 bp, synthetic construct
  source 1..120: mol_type = other DNA
atctcagctcactgcaacctccacctcccgggttcaagcaattctcctgcctcagcctcccaagtagcagggattacaggtgcctgccaccatgccaggctaattgttttttcttttttt

SEQ ID NO: 24341 - DNA, 120 bp, synthetic construct; identical to SEQ ID NO: 7532
  source 1..120: mol_type = other DNA

SEQ ID NO: 24342 - DNA, 120 bp, synthetic construct
  source 1..120: mol_type = other DNA
gcaatgcttcaggacataaggccttgctctgaagaggccctaggagtgactcctggtgacagtgaaagcccacagcctctggcaactgtattaacatgaacttcaatctgttaaaggaaa

SEQ ID NO: 24343 - DNA, 120 bp, synthetic construct
  source 1..120: mol_type = other DNA
attatgatcacattttataaaatacacgtgtatatatacgcacatatgcctggtggagttttatggtgatcatctccaagtggtggaattactgggattattttattgtttttgtgtaaa

SEQ ID NO: 24344 - DNA, 120 bp, synthetic construct; identical to SEQ ID NO: 7533
  source 1..120: mol_type = other DNA

SEQ ID NO: 24345 - DNA, 120 bp, synthetic construct
  source 1..120: mol_type = other DNA
tgtgatgaacattcatatcttactcccaccccatggaaacagttcatgtattacttttacaatataaaacaaataacaataaaaacatcaaaaagacattttagccattcattcaacaaa

SEQ ID NO: 24346 - DNA, 120 bp, synthetic construct
  source 1..120: mol_type = other DNA
tgtcctctgtccaggcatctggctgcacaaccacaattgggtggacaccctggatccccaggaaggaaagagcattcaaagtgtcaaagtaggactactggaactgtcacttcatcattt

SEQ ID NO: 24347 - DNA, 120 bp, synthetic construct
  source 1..120: mol_type = other DNA
ctaagtagctggaactacagacacgtaccaccacccctggctaatttttttgtatttttggtagagacagggttttgccatgttgcccaggctggtctcaaactcctgggctcaacttca

SEQ ID NO: 24348 - DNA, 120 bp, synthetic construct; identical to SEQ ID NO: 7534
  source 1..120: mol_type = other DNA

SEQ ID NO: 24349 - DNA, 120 bp, synthetic construct
  source 1..120: mol_type = other DNA
gtatttttagtagagacggggtttcgccatgttggttggccaggatggtctcgatctcttgacctcgtgatctgcccacctcagcctcccaaagtgctgggattacaggcgtgagccacc

SEQ ID NO: 24350 - DNA, 120 bp, synthetic construct
  source 1..120: mol_type = other DNA
agcgatgctcacacctcaacttcccaaatagctggcattacaggcatgctccaccaggcctggctactttttgtttttttttttttagtacagatggggtttcaccatgttggccaggct

SEQ ID NO: 24351 - DNA, 120 bp, synthetic construct
  source 1..120: mol_type = other DNA
gtatgctggggcagtcacagagaggagggggagggacatatgggaaaaagagttagagggaaaaagtcttccctcagtatatttaatatgtgcagttctcaaatccttacccatccctta

SEQ ID NO: 24352 - DNA, 120 bp, synthetic construct; identical to SEQ ID NO: 7535
  source 1..120: mol_type = other DNA

SEQ ID NO: 24353 - DNA, 120 bp, synthetic construct
  source 1..120: mol_type = other DNA
gtcttaaaatagtaggggtatggattttaagtcaatttgccactgatatgccatgtactctggttatcagtctccataaggccacttggtataaggtttgatagtctctcaaataaaatg

SEQ ID NO: 24354 - DNA, 120 bp, synthetic construct
  source 1..120: mol_type = other DNA
tgttggtaactgataatcacggccactgaaaataccatacttggtggtaattactgtaaatgtcaagagatgggaagataattcatccagtcaaaaaaatacatgttatcctggttagag

SEQ ID NO: 24355 - DNA, 120 bp, synthetic construct
  source 1..120: mol_type = other DNA
ggctgtgttcttcaagacattcatgtatgttgctctttcccatcagcccgtttctgggaattgctgaggtgctcctgtctgtctgactgaacgaaggttgactaactcacccccaaaata

SEQ ID NO: 24356 - DNA, 120 bp, synthetic construct
  source 1..120: mol_type = other DNA
ataaaaatccaattgataactaataaagaggatggaaacaaaattacattgcagccaggttttcttgctgtcactcatctgcctgtgaccagatgctaaggcctttctctaaggtgtaag

SEQ ID NO: 24357 - DNA, 120 bp, synthetic construct; identical to SEQ ID NO: 7536
  source 1..120: mol_type = other DNA

SEQ ID NO: 24358 - DNA, 120 bp, synthetic construct
  source 1..120: mol_type = other DNA
tacaaaaaattagtcgggcgtggtggcacacgcctgtagtctcagctatttgggaggctgaggcaggagaatcacttgaacccgggaggtggaggttgcagtgagccgagatcgcgccat

SEQ ID NO: 24359 - DNA, 120 bp, synthetic construct
  source 1..120: mol_type = other DNA
cttctatgtaagtaaattaagatggtttaggaagaggagaactcctccttgatttttacctatccaaagatattttctcactaacatgttggcactaacagcagctcaacgccatctgaa

SEQ ID NO: 24360 - DNA, 120 bp, synthetic construct; identical to SEQ ID NO: 7537
  source 1..120: mol_type = other DNA

SEQ ID NO: 24361 - DNA, 120 bp, synthetic construct
  source 1..120: mol_type = other DNA
cagatttctagccccctgaagatctggaagaagagaggaagagagagggacaggggaatggagagaaggaaaatctagttataaaagaatattggcttttattcaaaaaacagactttca

SEQ ID NO: 24362 - DNA, 120 bp, synthetic construct
  source 1..120: mol_type = other DNA
tccagaacactactggatttcagaagatcttcttgaagtgcatatgtagttgacctgcactctacaggcattctttgtcattcaaggactgagcatctcacttttgtcaccaatcaggcc

SEQ ID NO: 24363 - DNA, 120 bp, synthetic construct
  source 1..120: mol_type = other DNA
gtttgatgtttatccagacttggtacctcaagtactcactatgaccccatcaacagaggggtctatgttgattttaggtgtacatgctccttgtctcctctgactttttttttttttttt

SEQ ID NO: 24364 - DNA, 120 bp, synthetic construct
  source 1..120: mol_type = other DNA
caagcgattctcctgccttagcctcctgagtagctgggattacaggcgcgcaccaccacgcccggctaatttttgtatttttagtagagacagggtttcaccatgttggtcaggctggtc

SEQ ID NO: 24365 - DNA, 120 bp, synthetic construct; identical to SEQ ID NO: 7538
  source 1..120: mol_type = other DNA

SEQ ID NO: 24366 - DNA, 120 bp, synthetic construct
  source 1..120: mol_type = other DNA
catatagttattgagcactggagatgtggttagggtgaatgaagaactaaacttcatattttaatttttttctttttttttgaagagatgaggtctcattctgtcactcaggctggagta

SEQ ID NO: 24367 - DNA, 120 bp, synthetic construct
  source 1..120: mol_type = other DNA
aatttaaatttaaacagtcccatgtggctggtggcaacagtgtgggacagtgcaaattctcataaacacactggcataggttcttagcaaataacttgggtatcacttaaaaataaaccc

SEQ ID NO: 24368 - DNA, 120 bp, synthetic construct; identical to SEQ ID NO: 7539
  source 1..120: mol_type = other DNA

SEQ ID NO: 24369 - DNA, 120 bp, synthetic construct
  source 1..120: mol_type = other DNA
gagacgcagtcttgcactgtcgcctgggctggagtgcaatggtgccatctcggctcactgcaacctccacctcctgggttcaagtgattctcctgcctcagcctccctagtagctgggat

SEQ ID NO: 24370 - DNA, 120 bp, synthetic construct
  source 1..120: mol_type = other DNA
caaagacaagtctgtttgttttaagggacagcatccatctgtgccactctcactacctgtatgaataaaccgcacccccaacctgttgataggacctgcatgctcataatgctagaagtt

SEQ ID NO: 24371 - DNA, 120 bp, synthetic construct
  source 1..120: mol_type = other DNA
gtttcgggcttggcgtagtggctcacgcctgtaatcccagcactttgggaggctgaggcaggcggatcacgaggtcaagagatggagaccatcccgtctaacacagtgaaaacccgtctc

SEQ ID NO: 24372 - DNA, 120 bp, synthetic construct; identical to SEQ ID NO: 7540
  source 1..120: mol_type = other DNA

SEQ ID NO: 24373 - DNA, 120 bp, synthetic construct
  source 1..120: mol_type = other DNA
gctacttaggaggctgaggcaggagaatcacttgaaccctggaggcagagattgcggtgagccaagatcacgccattgtacttcagcctgggcaagaagagcaaagcttcgtcttaaaaa

SEQ ID NO: 24374 - DNA, 120 bp, synthetic construct
  source 1..120: mol_type = other DNA
tgctattctgcatggaggaaaaaatccaaagcactagaatttctttttaaagaggggaagaatctggtgctaatactgcctagcatacagtggaggaaaaacagaggactggctcacatg

SEQ ID NO: 24375 - DNA, 120 bp, synthetic construct
  source 1..120: mol_type = other DNA
caggcttcatttgtgatcatgtcccaaagcagttttccttaggaaattacctctactggttccctcttaagtttctataaagggacagaaagtgctcagtagaaggatgttttgttttgt

SEQ ID NO: 24376 - DNA, 120 bp, synthetic construct
  source 1..120: mol_type = other DNA
gaatacaagagtgtgctacgacacccaattaatttttaaatttttttgtagagacagggtcttactatgttgcccaggctagtcttgaactcctgggctcaagtgatcctcctgccttgg

SEQ ID NO: 24377 - DNA, 120 bp, synthetic construct; identical to SEQ ID NO: 7541
  source 1..120: mol_type = other DNA

SEQ ID NO: 24378 - DNA, 120 bp, synthetic construct
  source 1..120: mol_type = other DNA
tgttctgaaatgcctggtagtgcacacttgaaaaaggaagaaaagcagactgggaacatagcacttagggagctgagaaagcagccagctcaggcctgacaggtaagtgtgaaatcttgc

SEQ ID NO: 24379 - DNA, 120 bp, synthetic construct
  source 1..120: mol_type = other DNA
cttgggtctcatctgcaaagttgttagaatgctccattttttttccctccgtgaagccttcaacaacttttcaagaaactatagtattgttgttaagagtttagaattggaggccgggtg

SEQ ID NO: 24380 - DNA, 120 bp, synthetic construct; identical to SEQ ID NO: 7542
  source 1..120: mol_type = other DNA

SEQ ID NO: 24381 - DNA, 120 bp, synthetic construct
  source 1..120: mol_type = other DNA
cctagccacttgggaggccaaggcacaagaattgaacaaggtttgaacttgggaggtgaaggttgcagtgagcagagatagtggcactgcactccagcctgggtgacagagtaagactct

SEQ ID NO: 24382 - DNA, 120 bp, synthetic construct
  source 1..120: mol_type = other DNA
tcaattttcacatctgtaatataggcataattacagtacatagctcatagagttgtcataaaattgttaattagttaaaacatggttgggcctttagagcagtcccagcataaagtgatc

SEQ ID NO: 24383 - DNA, 120 bp, synthetic construct
  source 1..120: mol_type = other DNA
ttccgagtagctggaactacaagtacatgccaccacgcctggctaatttttgtatattttttttggtagagatggggttttgccatgttgcccaggctggtatcgaactccttggctcaa

SEQ ID NO: 24384 - DNA, 120 bp, synthetic construct
  source 1..120: mol_type = other DNA
atcccagcacttggggaggccaaggcgggaggatcacaaggtcaggggttcaagaccagcctgggcaagatgagttttcagtgagctgagatcgcaccactgcactctggcctgggcaat

SEQ ID NO: 24385 - DNA, 120 bp, synthetic construct; identical to SEQ ID NO: 7543
  source 1..120: mol_type = other DNA

SEQ ID NO: 24386 - DNA, 120 bp, synthetic construct
  source 1..120: mol_type = other DNA
ggtgagatttttgtcaacttgagggagggagctttacctttctgtcctgggattctcttgctcgctttggaccttggtggtttcttccattgaccacatctcctctgacttcaaaatcat

SEQ ID NO: 24387 - DNA, 120 bp, synthetic construct
  source 1..120: mol_type = other DNA
atcctagcactttgggagactgaggcaggcagatcacttgaggtcaggagttcgacaccagtctgaccaacatggtgaaacctcatctctactaaaaatacaaaaaattagttgggcgtg

SEQ ID NO: 24388 - DNA, 120 bp, synthetic construct; identical to SEQ ID NO: 7544
  source 1..120: mol_type = other DNA

SEQ ID NO: 24389 - DNA, 120 bp, synthetic construct
  source 1..120: mol_type = other DNA
ctgaggcaggagaatggcgtgaacccgggaggcggagcttgcagtgagcggagatcacgccactgcactccagcctgggcaactgagcgagactccgtctcaaaacaaacaaacaaacaa

SEQ ID NO: 24390 - DNA, 120 bp, synthetic construct
  source 1..120: mol_type = other DNA
atgccactgcactccagcctgggtgacagagtgaaactctgtctcaaaaaaaaaaaaaaaaaaaaaaaaaatttaaggcattcagaattgccaggcaggcagtagctgggcaccaatggc

SEQ ID NO: 24391 - DNA, 120 bp, synthetic construct
  source 1..120: mol_type = other DNA
acataaaacctcagccaggcatagttgcatgtgcctgcagtcccaatttcttgaaaagctgaagctggaggatcacttgagcccaggagttggaggctgcagtgaactgtgatcatacca

SEQ ID NO: 24392 - DNA, 120 bp, synthetic construct; identical to SEQ ID NO: 7545
  source 1..120: mol_type = other DNA

SEQ ID NO: 24393 - DNA, 120 bp, synthetic construct
  source 1..120: mol_type = other DNA
tgtgctgttataaaggtaactgaaaaattccctatctcctaaatcaattgtatattatcatctaaggaaataaaggcttttcagatttccactgagagatttacagttaacacaaccaaa

SEQ ID NO: 24394 - DNA, 120 bp, synthetic construct
  source 1..120: mol_type = other DNA
aataaagaataatgagactggggagaaatttgaggaagaacgctcagaaacaattctgactgaaactcagattgtagggaaggccttatgtgttgccaagagtattgtgaagaaaactaa

SEQ ID NO: 24395 - DNA, 120 bp, synthetic construct
  source 1..120: mol_type = other DNA
taaatttgtcagaagactcccatgttcatagtcctccttgtacccctgagcttcatacaatgtgtccaactgcctacttaacttctctatccagaagtctagtatacatctcaaaattca

SEQ ID NO: 24396 - DNA, 120 bp, synthetic construct
  source 1..120: mol_type = other DNA
ctctactaaaaatacaagtattagccaggcattgtggcaggtgcctgtaatcccagctactcgggaggctgaggcaggaaaatcacttgaaccgggaggcggaggttggagtgagctgag

SEQ ID NO: 24397 - DNA, 120 bp, synthetic construct; identical to SEQ ID NO: 7546
  source 1..120: mol_type = other DNA

SEQ ID NO: 24398 - DNA, 120 bp, synthetic construct
  source 1..120: mol_type = other DNA
ataaaatctgaattccttaccaccaaatactatgtgatctggccctcatctatgaccttctcccattccttgtgtaatctctgcctccacacataatttgcaaattactccagctacact

SEQ ID NO: 24399 - DNA, 120 bp, synthetic construct
  source 1..120: mol_type = other DNA
cctgccccagcctcccaagtagctgtgattacaggcacatgccaccattcccagctaatttttttttgtttttgagatggagtttcactcttgttgcccaggctggagtgcaatggtgcg

SEQ ID NO: 24400 - DNA, 120 bp, synthetic construct
  source 1..120: mol_type = other DNA
gtagagacagggtttctacctcagtgatctgtccgccttgacctcccaaagtgctgggattacaggaatgagccaccacacccagccgtgcccagctaatttttgcattttttagtagag

SEQ ID NO: 24401 - DNA, 120 bp, synthetic construct; identical to SEQ ID NO: 7547
  source 1..120: mol_type = other DNA

SEQ ID NO: 24402 - DNA, 120 bp, synthetic construct
  source 1..120: mol_type = other DNA
gacctcaagtgatttgcctgccttggcttcccaaagtgctgggattataggcacgagccaccacacacgaccaacattggcctatcttttaaaaaataaaccaagctctggccgggcaca

SEQ ID NO: 24403 - DNA, 120 bp, synthetic construct
  source 1..120: mol_type = other DNA
gaccaacgtggtaaaaccccatctctactaaaaataaaaactagtcgggtgtggtagcacgcgtgcctgtaataccagctactcaggaggccaaggcaggagaattgcttgaacccagga

SEQ ID NO: 24404 - DNA, 120 bp, synthetic construct
  source 1..120: mol_type = other DNA
agacctttatgtttgctattcctctgcctataagatgcattcccttcatttttcaaggacaattatttcttgttatttaggtctcagctcaattttttcagaaaggctttccctggcctc

SEQ ID NO: 24405 - DNA, 120 bp, synthetic construct; identical to SEQ ID NO: 7548
  source 1..120: mol_type = other DNA

SEQ ID NO: 24406 - DNA, 120 bp, synthetic construct
  source 1..120: mol_type = other DNA
tcactgcaacctccgcctcccgggttcaagtgattctcctgcctcagcctccccagcagctaggattacaggcacatgccaccacgctcgactaatttttttgtgtttttagtagagaca

SEQ ID NO: 24407 - DNA, 120 bp, synthetic construct
  source 1..120: mol_type = other DNA
ctttcacatttcattttgcctgatctgttgtcacagaagttctcagatggctgttctgaaattattcctcctcctacactctatcttatttacttctcactgttctcagtatcataaagt

SEQ ID NO: 24408 - DNA, 120 bp, synthetic construct
  source 1..120: mol_type = other DNA
aagtgcaagagtgcaatggtatgatcatagctcactgcagccttgaactcctgggctcaagtgattcttctggcttagcttcctcagtagctaagactacagaagcacactgccatgccc

SEQ ID NO: 24409 - DNA, 120 bp, synthetic construct; identical to SEQ ID NO: 7549
  source 1..120: mol_type = other DNA

SEQ ID NO: 24410 - DNA, 120 bp, synthetic construct
  source 1..120: mol_type = other DNA
tgcaagtgggcccacttcttgttcttatgaatcttttctttccttttataaaactccttttcctttctcttttccccaaagaaaggactgtttcttttgaaatctagaacaaatgagaac

SEQ ID NO: 24411 - DNA, 120 bp, synthetic construct
  source 1..120: mol_type = other DNA
tcaagagattctcctgcctcagcctcctgagtagctggaactaaaggcgcatgccaccacgctgagtaattttttgtattttagtagagacagggtttcaccatgttgcccaggctgatc

SEQ ID NO: 24412 - DNA, 120 bp, synthetic construct
  source 1..120: mol_type = other DNA
ggttagagtgcaatgatgcgatctcagctcactgcaacccccgcctcccaggttcaagtgattctcctgcctcagcctcccgagtagctggaattacaggcaagtgccaccaagcccggc

SEQ ID NO: 24413 - DNA, 120 bp, synthetic construct
  source 1..120: mol_type = other DNA
ccacagtgcaggcctgcataattcttgatgatcctcattatcatggaaaatttgtgcattgttaaggaaagtggtgcattgatggaaggaagcaaatacatttttaactatatgactgaa

SEQ ID NO: 24414 - DNA, 120 bp, synthetic construct; identical to SEQ ID NO: 7550
  source 1..120: mol_type = other DNA

SEQ ID NO: 24415 - DNA, 120 bp, synthetic construct
  source 1..120: mol_type = other DNA
ataagtttgcctgctgcacatggattcctgccgactattaaataaatccctagctcatatgctaacattgctaggagcagattaggtcctattagttataaaagagacccattttcccag

SEQ ID NO: 24416 - DNA, 120 bp, synthetic construct
  source 1..120: mol_type = other DNA
gactcagcatcagcaaaaaccttaggtgttaaacgttaggtgtaaaaatgcaattctgaggtgttaaagggaggaggggagaaatagtattatacttacagaaatagctaactacccatt

SEQ ID NO: 24417 - DNA, 120 bp, synthetic construct
  source 1..120: mol_type = other DNA
ggattagaagttgaaaacaaaatcaggaagtgctgtcctaagaagctaaagagcctcagttttttacactcccaagatcaatctggatttatgattctaaaacccctggtgacagaatca

SEQ ID NO: 24418 - DNA, 120 bp, synthetic construct; identical to SEQ ID NO: 7551
  source 1..120: mol_type = other DNA

SEQ ID NO: 24419 - DNA, 120 bp, synthetic construct
  source 1..120: mol_type = other DNA
acctggggagtcctaaccctctaatattcccctgagagggatgggagaatacagtgcagagcttttatataagtatttcagaaagcagtagctaaagaatcacttgtttatttcccagtg

SEQ ID NO: 24420 - DNA, 120 bp, synthetic construct
  source 1..120: mol_type = other DNA
agcagccatgctccctcacagaatccttacaatttttgaagttttttgtttaactgctacaaaagccgatttagtaacatttattacacttaaaaacttcagttcatttgtagttcaaag

SEQ ID NO: 24421 - DNA, 120 bp, synthetic construct
  source 1..120: mol_type = other DNA
atctcagctcacggcaagctctgcctcctgggttcatgccattctcctgcctcagcctcctgagtagctgggactacagatgcccgccaccatgcccggctaattttttgtatttttact

SEQ ID NO: 24422 - DNA, 120 bp, synthetic construct; identical to SEQ ID NO: 7552
  source 1..120: mol_type = other DNA

SEQ ID NO: 24423 - DNA, 120 bp, synthetic construct
  source 1..120: mol_type = other DNA
ttgtaataacttgttctggcacctggctccaatgaacactaccctctgaccctgtggtataattttcatgagtaagtggaaacctaagatcttagaagttcaacggcaatgtgtccaagg

SEQ ID NO: 24424 - DNA, 120 bp, synthetic construct
  source 1..120: mol_type = other DNA
ggtcgggagtccaagaccagcctgactgacatggaaaaaccctgtctctactaaaaatacaaaattaggtatggtggtgcattcctgtaatcccagctactcgggaggctgaggcaggag

SEQ ID NO: 24425 - DNA, 120 bp, synthetic construct
  source 1..120: mol_type = other DNA
tcatcatcaagtgaactggaacacatccagagaactaattttgttagaaagattttagagttgagccacacaatctgcatcttctgcgtcctccatgcactcgtctgctttctggagccc

SEQ ID NO: 24426 - DNA, 120 bp, synthetic construct
  source 1..120: mol_type = other DNA
tttcaagttacttttatgtatctttaccatctacctctggataaacactctccaatttgtcagtgaccatgttaaaaaccaagcacggtgcttaaaactgacatcatctttcaggcaatc

SEQ ID NO: 24427 - DNA, 120 bp, synthetic construct; identical to SEQ ID NO: 7553
  source 1..120: mol_type = other DNA

SEQ ID NO: 24428 - DNA, 120 bp, synthetic construct
  source 1..120: mol_type = other DNA
ttcatatgttaagactatctcggagctgttatcagacttttttcctgaaaaactctcaacaatactcaaactaggtgttacatgaagctggggtctccaggttttgcctcacttgttctt

SEQ ID NO: 24429 - DNA, 120 bp, synthetic construct; identical to SEQ ID NO: 7554
  source 1..120: mol_type = other DNA

SEQ ID NO: 24430 - DNA, 120 bp, synthetic construct
  source 1..120: mol_type = other DNA
caccgcgtccagctgcctcacttgttgttttaggacttaggctccacctcaccagtgtagtcccagcaggtagataggagttaatagttgactatctcagctcaccaccctccaaacctt

SEQ ID NO: 24431 - DNA, 120 bp, synthetic construct
  source 1..120: mol_type = other DNA
gcaacctccacctcctgggttcaagcgattctgctgcctcagcctcctgagtagctgggattacaggtgcctgccaccacgcccacctaatttttatatttttagtagagacggggtttc

SEQ ID NO: 24432 - DNA, 120 bp, synthetic construct; identical to SEQ ID NO: 7555
  source 1..120: mol_type = other DNA

SEQ ID NO: 24433 - DNA, 120 bp, synthetic construct
  source 1..120: mol_type = other DNA
ctcacgagtagctgggactacaggcgcacgcgaccacacccagctaatttttttattttttagtagagacggggtttcaccatgctggccaggatggtctcgatctcctaatctcgtgat

SEQ ID NO: 24434 - DNA, 120 bp, synthetic construct
  source 1..120: mol_type = other DNA
cataacaacatgagtagtctcttcagtaattagattagttaaagtgatgtggtgttttctggcaaacttgtacacgagcatctgaaattaaatcaaatattccattatcatgagttacct

SEQ ID NO: 24435 - DNA, 120 bp, synthetic construct
  source 1..120: mol_type = other DNA
tagacagagtcttgctctgtcacccaggctggaggtaaaaaaaaaaaaaaaaaaaaaatagaataccagttatcctagctttaagtctctgtttttctcagaaagggtacatttaaaaaa

SEQ ID NO: 24436 - DNA, 120 bp, synthetic construct
  source 1..120: mol_type = other DNA
gtgaaaccctgtctctactaaaaatacaaaaaattagccaggcgtggtggcgggcacctgtagtctcagctactcaggaggctgaggcaggagaatggcgtgaacccaggaagcagagct

SEQ ID NO: 24437 - DNA, 120 bp, synthetic construct; identical to SEQ ID NO: 7556
  source 1..120: mol_type = other DNA

SEQ ID NO: 24438 - DNA, 120 bp, synthetic construct
  source 1..120: mol_type = other DNA
gaaaaaatatatattaattttgctttaatagcagatatcattcgattccctaagatcgtttctttgcatagtgacactctactgtactataaatttatcagcctacactttataagctga

SEQ ID NO: 24439 - DNA, 120 bp, synthetic construct
  source 1..120: mol_type = other DNA
aacactgaaatcaggatgttactaaaggtcagtgcaaaagcgatcaattctctcgtaagaaggcttagaaggggttcatgttcttccccaaagaaatttagagtcctctagctattatct

SEQ ID NO: 24440 - DNA, 120 bp, synthetic construct
  source 1..120: mol_type = other DNA
ttgtctgataaataactttgtttaccaagggccatcatttactagccatagccacagccactcacaccagtatttacgtgttgcacaatactgccatgaaggtcaggccatctttctttc

SEQ ID NO: 24441 - DNA, 120 bp, synthetic construct; identical to SEQ ID NO: 7557
  source 1..120: mol_type = other DNA

SEQ ID NO: 24442 - DNA, 120 bp, synthetic construct
  source 1..120: mol_type = other DNA
aagttttcctcttcgcttgtttaaagacaacatgtacccaagccacttgtagtctaatctgcagctcagaattgcctttgccaagaaagattagaccattttagccatctctaaaaagct

SEQ ID NO: 24443 - DNA, 120 bp, synthetic construct
  source 1..120: mol_type = other DNA
agagccattgaaacagacacaggtaagagctttcagagcaaattgctggtctggacatgggattatgagatgaaaacatttatagccatcactgtgcacttactcattgtatctaccagg

SEQ ID NO: 24444 - DNA, 120 bp, synthetic construct
  source 1..120: mol_type = other DNA
agatatttcagaatgacttggtcatctctcagtgtgcaataaatggcacacccactactgaatccatttgataatctggtatgttatctcatcatagttttaaagaaatattcacgcaat

SEQ ID NO: 24445 - DNA, 120 bp, synthetic construct
  source 1..120: mol_type = other DNA
tcctgagtagctgggattataggcatgcgccaccacgcccggctaattgtgtatttttagtaaagatggggtttcttcatgttggtcaggctggtcttgatctcctgaccttaggtgatc

SEQ ID NO: 24446 - DNA, 120 bp, synthetic construct; identical to SEQ ID NO: 7558
  source 1..120: mol_type = other DNA

SEQ ID NO: 24447 - DNA, 120 bp, synthetic construct
  source 1..120: mol_type = other DNA
cagtctgaatttagttaaatatgctggtaaattcacccatgtgagacaagggggagaaaaagatgccttctggggaataaaactatacctacttgcttttacagatagaaaggaaaattc

SEQ ID NO: 24448 - DNA, 120 bp, synthetic construct
  source 1..120: mol_type = other DNA
tcagaaattagtaatcgaaattaaattacacagaactgtgattgttttctagatttcttcctctaggttattaattgacaatacctacataaaactctttccagaatgttgttaagtctt

SEQ ID NO: 24449 - DNA, 120 bp, synthetic construct; identical to SEQ ID NO: 7559
  source 1..120: mol_type = other DNA

SEQ ID NO: 24450 - DNA, 120 bp, synthetic construct
  source 1..120: mol_type = other DNA
cagattccaggtaaggggttccctctgaaaggaatgggagaagtttaatttacacaacgatgaatgttgaattacaaagttctggtctctgttaagaattaaaaagaccaataaagttag

SEQ ID NO: 24451 - DNA, 120 bp, synthetic construct
  source 1..120: mol_type = other DNA
caacaatgctagttttagaaatatatcctagggagataaaagatatatgcaaaggtttagtcataggaatagtataattttagaaacaatgtagttgtccaataataggagattaaatta

SEQ ID NO: 24452 - DNA, 120 bp, synthetic construct
  source 1..120: mol_type = other DNA
acattattttaaaaataaaagtttatgggccgagcacggtggctcacacctgtaatcccagcactttgggaggccgagacgggtggatcacgaggtcaggagatcaagaccatcctggct

SEQ ID NO: 24453 - DNA, 120 bp, synthetic construct; identical to SEQ ID NO: 7560
  source 1..120: mol_type = other DNA

SEQ ID NO: 24454 - DNA, 120 bp, synthetic construct
  source 1..120: mol_type = other DNA
gtcaagaggtcgagaccagtctgaccaacatggagaaaccctgtctctactaaaaatacaaaaaattagccgggcgtggtggtgcatgcctgtaatcccagctactggggaggctgaagc

SEQ ID NO: 24455 - DNA, 120 bp, synthetic construct
  source 1..120: mol_type = other DNA
ttttttgagaagggtctcggtctgtcatccaggctgcagtgcagtggcacaaacatggctcacctgcagccttgacctcctggactcaagtgatcttcctgtctcagcctcctgagtagc

SEQ ID NO: 24456 - DNA, 120 bp, synthetic construct
  source 1..120: mol_type = other DNA
cccaggttcaagcgattctcctgcctcagcctcccgagtagctgggactacaggcataagccaccaagcctggctaattttgtatttttagtagagacagggtttctccatattggtcag

SEQ ID NO: 24457 - DNA, 120 bp, synthetic construct
  source 1..120: mol_type = other DNA
tttatagagatcaggtctcgctacattgcccaggctggtcttgaactcttggcctcgagcaattctcccaccttggcctcccaaagtactgagattacaggcatgagcagtggctgtaat

SEQ ID NO: 24458 - DNA, 120 bp, synthetic construct; identical to SEQ ID NO: 7561
  source 1..120: mol_type = other DNA

SEQ ID NO: 24459 - DNA, 120 bp, synthetic construct
  source 1..120: mol_type = other DNA
atccttgaaacatttcagaaaatgccatggtatcaggaattaagcatagctaagtagaatgtatgagattcctaaaatgaccctaatgaacatggccaaataccacatttgatgccaaac

SEQ ID NO: 24460 - DNA, 120 bp, synthetic construct
  source 1..120: mol_type = other DNA
gtcatttatattcattaactcataaaaaaaacttgctttgggatttgactcattttctaataaaggactggcctaaaactttattctttggcctttggactcttgtctaacagttgaaat

SEQ ID NO: 24461 - DNA, 120 bp, synthetic construct
  source 1..120: mol_type = other DNA
agtgattctgctgcctcagcctccagagtagctaggattacgggcatgcactagcacacccagttaatttttttgtatttttagtagagacagggtttcaccatgttggccagacaggtc

SEQ ID NO: 24462 - DNA, 120 bp, synthetic construct; identical to SEQ ID NO: 7562
  source 1..120: mol_type = other DNA

SEQ ID NO: 24463 - DNA, 120 bp, synthetic construct
  source 1..120: mol_type = other DNA
aaagtgtttgttccaatacagcagatgaaatattacctagatcttgccttggcaagtaagatgtttccgtcaaatcgtgtggcccagactcttccagctgttgctcctccacatcaacaa

SEQ ID NO: 24464 - DNA, 120 bp, synthetic construct
  source 1..120: mol_type = other DNA
aatgatgggcatttagaaggggatgacctagaaagataaatggaaggagaaaaccatcgccaccaattgtgaaaggacaaatcatacttgctgggcagccaaagcataaatgaaacagct

SEQ ID NO: 24465 - DNA, 120 bp, synthetic construct
  source 1..120: mol_type = other DNA
gcaagacagcctagaagtctggattcatgttgcctgccaatatgtcagggttgacatataacatggggttgggttggtctgaggcaccatatctcccagctgtttaaaagcaggtcagta

SEQ ID NO: 24466 - DNA, 120 bp, synthetic construct; identical to SEQ ID NO: 7563
  source 1..120: mol_type = other DNA

SEQ ID NO: 24467 - DNA, 120 bp, synthetic construct
  source 1..120: mol_type = other DNA
ccaaattactcactgccactcactctatacacaatattctacttgagtctaaatggatatgttagaatcagatctcttatgaagatagaaagttgatcaatgtcgacatctctacactca

SEQ ID NO: 24468 - DNA, 120 bp, synthetic construct
  source 1..120: mol_type = other DNA
caaaagccagctataaaatattgttagaaaagcatacacacccagtaaatagttcctctgctcttccaagtgcttaggactttgcaaaataagatacttatcaacagatttaaagggcct

SEQ ID NO: 24469 - DNA, 120 bp, synthetic construct
  source 1..120: mol_type = other DNA
ggtgagacctgaattactgctctctctctctttttttttttgttttgagacggagtcttgctctgtcgcccaggctggagtgcaatggcacggtcccagctcactgcaacctctgcctcc

SEQ ID NO: 24470 - DNA, 120 bp, synthetic construct; identical to SEQ ID NO: 7564
  source 1..120: mol_type = other DNA

SEQ ID NO: 24471 - DNA, 120 bp, synthetic construct
  source 1..120: mol_type = other DNA
cccagctactcaggaggctaaggtgggaggattgcttgagcctgaaaaacggaggatgcagtgagccatgactgcaccactgcaatctaggtgacacagggcgaccctgtctcaaaaaat

SEQ ID NO: 24472 - DNA, 120 bp, synthetic construct
  source 1..120: mol_type = other DNA
caagcttgttcaggttttacctccattatatttttttctgaccttcagaagggacatatctatctaaccgcacatttctcatgttgtagcttatgttataggttcaaaaaacctatatag

SEQ ID NO: 24473 - DNA, 120 bp, synthetic construct; identical to SEQ ID NO: 7565
  source 1..120: mol_type = other DNA

SEQ ID NO: 24474 - DNA, 120 bp, synthetic construct
  source 1..120: mol_type = other DNA
tcaaaagcatcaatctatgatacacaaattggtttttaaacaagtatatcaggcagaattttataaacacaagcaatgcaacagacagatgctagcaccaaatggaattcaatgattaaa

SEQ ID NO: 24475 - DNA, 120 bp, synthetic construct
  source 1..120: mol_type = other DNA
caaatttttatctctgcagcaaaataaattatgcccaaatcccctcagacaataggaaagaaagagtaccggagagcacaaagtacattattttctccatccctactgcctccacattga

SEQ ID NO: 24476 - DNA, 120 bp, synthetic construct
  source 1..120: mol_type = other DNA
aagtacattattttctccatccctactgcctccacattgaagactgtatgaaatggggatttcagcttctgcatgtcgggggtaaacaagacatgagtgtcagacatgaaagaaaaaaca

SEQ ID NO: 24477 - DNA, 120 bp, synthetic construct
  source 1..120: mol_type = other DNA
aaaaatcccaaggtgctggttgataagaaatcttaaataatacatggaactaatgatgaaatggcacaagaagggaaaaatcacaaaacatactgaaggcaaagttctggcatgttagtt

SEQ ID NO: 24478 - DNA, 120 bp, synthetic construct; identical to SEQ ID NO: 7566
  source 1..120: mol_type = other DNA

SEQ ID NO: 24479 - DNA, 120 bp, synthetic construct
  source 1..120: mol_type = other DNA
gaagtggcttaaaggcagaagtacttatttatttatttttatttatttattttttttgagatggagtttgctcttgttgcccaggctgcagtgcaatggcatgatcttggctcaccacaa

SEQ ID NO: 24480 - DNA, 120 bp, synthetic construct
  source 1..120: mol_type = other DNA
atgttggtcacgctggtctcgaactcccgacctcaggtgatctgcctgcctcggcctcccaaagtgatgggattacaggcgtgagccactgcgcccgaccgttatttttcaacgagatgg

SEQ ID NO: 24481 - DNA, 120 bp, synthetic construct
  source 1..120: mol_type = other DNA
ccaggttcaagcgattctcctgccttagcctcccaagaagatgggattataggtgcccaccaccaccccttggctaatttttgtattttttgtagagatggggttttaccatgttggcca

SEQ ID NO: 24482 - DNA, 120 bp, synthetic construct; identical to SEQ ID NO: 7567
  source 1..120: mol_type = other DNA

SEQ ID NO: 24483 - DNA, 120 bp, synthetic construct
  source 1..120: mol_type = other DNA
gggtagcctggggggaaataatcattgatttcctgagttagtcttcaaatgcattatttatagtttcctttatgcttgtcttttctggacctgtgagtttctaggattgttaagaactct

SEQ ID NO: 24484 - DNA, 120 bp, synthetic construct
  source 1..120: mol_type = other DNA
gttgaaagtaagtaggatctaactatgaagagaggtatcatcctccccacccccaatacagggtgataattgataaagggtaatgtgcaagttccaaggaaccatatcaaacggaattaa

SEQ ID NO: 24485 - DNA, 120 bp, synthetic construct
  source 1..120: mol_type = other DNA
catggtgaaaccctgtctctactaaaaatacaaaaattagctgggcgtggtggcgggtgcctgtaatcccagctacccaggaggctgaggcggacattgtaatgagccgaaatcacacca

SEQ ID NO: 24486 - DNA, 120 bp, synthetic construct
  source 1..120: mol_type = other DNA
cattcctccttttggccagaaccaccatctttcagtaatttgccaaaatgacgaacacaaagggaaagaggagaggcacctgatatatgttctctaggccttttagaaaacatggagttg

SEQ ID NO: 24487 - DNA, 120 bp, synthetic construct; identical to SEQ ID NO: 7568
  source 1..120: mol_type = other DNA

SEQ ID NO: 24488 - DNA, 120 bp, synthetic construct
  source 1..120: mol_type = other DNA
ggagcctgagcagctggaacctattccctatgaattcatggcataataggtgttaaaaaaaaaaaaaaaagacctttggactgtaaaaaaaaagaaaagtcattctatcaccagaacatt

SEQ ID NO: 24489 - DNA, 120 bp, synthetic construct
  source 1..120: mol_type = other DNA
ttttctccttaatccttaattcattctctgaacagcaagcccaacctaagccttgtgacatgatgatctacttgctggctggtttaggaaagtctaaatgcagagatccagagtccaagt

SEQ ID NO: 24490 - DNA, 120 bp, synthetic construct; identical to SEQ ID NO: 7569
  source 1..120: mol_type = other DNA

SEQ ID NO: 24491 - DNA, 120 bp, synthetic construct
  source 1..120: mol_type = other DNA
ccaaagtgctggggttacaggcgtgagccaccgtacccggcaacaatattctttttactagaagttctggccaggtgccatggctcacacctgtaaccccagcactttgggaggctgagg

SEQ ID NO: 24492 - DNA, 120 bp, synthetic construct
  source 1..120: mol_type = other DNA
gctacttgggaggctaaggcaggaggatcgcttgaggaggtcgagaggctgcagtgagctgtgattatgccactgccctccagcttgggcaacagagcaagaccctctctataaggtgag

SEQ ID NO: 24493 - DNA, 120 bp, synthetic construct
  source 1..120: mol_type = other DNA
atttgagtttcagttagactcacaccagatttagggagaaaaaggctcaaaacttatgttggtattaagttgtgatatccaaaacaattcagaaattaagcatttcagttacagatctcc

SEQ ID NO: 24494 - DNA, 120 bp, synthetic construct
  source 1..120: mol_type = other DNA
ttagactgaagatggtgaaagtaccctaaagaagagtattatactggggatgggactctgatctctcattatctgagagatgaactaaatgaagatagttacaaagaaagcatttaagga

SEQ ID NO: 24495 - DNA, 120 bp, synthetic construct; identical to SEQ ID NO: 7570
  source 1..120: mol_type = other DNA

SEQ ID NO: 24496 - DNA, 120 bp, synthetic construct
  source 1..120: mol_type = other DNA
aaatctgcctgatgtattgtctttccaattaaaaactcaaatttccatctcactttccttcatttatgccattattcctcagctcagtgctcacttcttataggaagtcagctctgatca

SEQ ID NO: 24497 - DNA, 120 bp, synthetic construct
  source 1..120: mol_type = other DNA
ttcttttcttttccttttgaactaacaggagctctacatcactaggctttctgtggatcaaagtgcagttcctgaagtataggatgtctctccctataaatcagaagcacattaaatagg

SEQ ID NO: 24498 - DNA, 120 bp, synthetic construct; identical to SEQ ID NO: 7571
  source 1..120: mol_type = other DNA

SEQ ID NO: 24499 - DNA, 120 bp, synthetic construct
  source 1..120: mol_type = other DNA
tgagcaaggatcataaaatgttggagctaggtccttactcttcagaaggagataaaggggaaggaaagaattttgcttaagatatcagtgtttggccaacaatacacacctttttctgat

SEQ ID NO: 24500 - DNA, 120 bp, synthetic construct
  source 1..120: mol_type = other DNA
tgctggagctttatcaggttatgttgcatggtatccctctgcttcaaaaacgataaatggcaccaagaaaatgaaatactttgagaagctttccattaaatgaaaatatatcatacaaat

SEQ ID NO: 24501 - DNA, 120 bp, synthetic construct
  source 1..120: mol_type = other DNA
tgagggaaaaaatcctcaaattcccccaaatagacttgatgttattgtgatgtccttttgaagttggttattttcttttaaagctagggagtgaaaaaataattaaggcatttaaacact

SEQ ID NO: 24502 - DNA, 120 bp, synthetic construct
  source 1..120: mol_type = other DNA
ttagactgatgtaatgttgaaaaaagccctctatctatggcattttataaaaatacaacaaatataaaaatactatcagtaatcctgcctagattactggcttgtgaggactcttccttt

SEQ ID NO: 24503 - DNA, 120 bp, synthetic construct; identical to SEQ ID NO: 7572
  source 1..120: mol_type = other DNA

SEQ ID NO: 24504 - DNA, 120 bp, synthetic construct
  source 1..120: mol_type = other DNA
tcatgaatctatctgtttgctcagttaattagacaactatttactatctattaagcaccaggcgctgtcctagtactgaggatatagccctcatggtgctgccattctagacagggacat

SEQ ID NO: 24505 - DNA, 120 bp, synthetic construct
  source 1..120: mol_type = other DNA
tttttgcttatgggctcctgttgtttattggtccatttcaaagaagagtgtgctaagtccaagtatttgataaacaaagaatttaggtatgtaaggagttttccaaaatatccttcttaa

SEQ ID NO: 24506 - DNA, 120 bp, synthetic construct
  source 1..120: mol_type = other DNA
ctgcctcagcctctcaagtagctgggattacaggcacctgttaccatgcccgactaatttttttttttttttttgagacggagtctcactttgttgcccaggctggagtgcagtggcgca

SEQ ID NO: 24507 - DNA, 120 bp, synthetic construct
  source 1..120: mol_type = other DNA
agaaatggtgtttcaccgtgttagccaggatggtctggatctcctgaccacatgatcctcccgcctcggcctcccaaagtgctgggattacaggcgtgagccaccacacctggcctaatt

SEQ ID NO: 24508 - DNA, 120 bp, synthetic construct; identical to SEQ ID NO: 7573
  source 1..120: mol_type = other DNA

SEQ ID NO: 24509 - DNA, 120 bp, synthetic construct
  source 1..120: mol_type = other DNA
gccatcttctttctcctgctacactgagttcacaattttcaggaggtttttatgaccagaaaatgtattcctagcttcacaaaggtttctactgctactctaacactgctttgctgccaa

SEQ ID NO: 24510 - DNA, 120 bp, synthetic construct; identical to SEQ ID NO: 590
  source 1..120: mol_type = other DNA

SEQ ID NO: 24511 - DNA, 120 bp, synthetic construct
  source 1..120: mol_type = other DNA
ccagcaggtaagtggccaaatacattagggagaataaaaccaataggtttctaagacttcttgattctaattctgaagtgctccttcaattagctctagccttctacttctactatgctg

SEQ ID NO: 24512 - DNA, 120 bp, synthetic construct
  source 1..120: mol_type = other DNA
ctctgatctctacttttaatacagctacattactgtagaagttccctaaaagccttgtttatcatgtctttttcttccataaagacccttagtgctccatcctggccatcacagtgaaac

SEQ ID NO: 24513 - DNA, 120 bp, synthetic construct
  source 1..120: mol_type = other DNA
agaaaaaaacccttagtggtataccactgctgatttatactttttgaacactatataattgttagtcattactgccattaggataaaattcctcaacatagcattcaaaaggccctttat

SEQ ID NO: 24514 - DNA, 120 bp, synthetic construct
  source 1..120: mol_type = other DNA
caagttgttttcctataacacatgacaactttacgtttcctgggaattccatgactctgtacctttaccttacttgctgccactcctctttttccacttggaaaaattctcatctttcaa

SEQ ID NO: 24515 - DNA, 120 bp, synthetic construct; identical to SEQ ID NO: 7575
  source 1..120: mol_type = other DNA

SEQ ID NO: 24516 - DNA, 120 bp, synthetic construct
  source 1..120: mol_type = other DNA
agatacaagctgaagtcttagcacaaatagtggctttatcatgctagttttgtcgacatgttgtgaatattttcaaatatacagaaaacttgaagcaactttgcaatgagtgtttatata

SEQ ID NO: 24517 - DNA, 120 bp, synthetic construct
  source 1..120: mol_type = other DNA
tatcgggaacagatgatctctcactacttgatttacattgctaatgcattagtatacccaaatggaacacatgaccttgataggaggaagcttcccttaatcatatttgtctccctaatg

SEQ ID NO: 24518 - DNA, 120 bp, synthetic construct
  source 1..120: mol_type = other DNA
ctaatgcattagtatacccaaatggaacacatgaccttgataggaggaagcttcccttaatcatatttgtctccctaatgcctagcagacagtaagcactcagcaagtgtttattaatga

SEQ ID NO: 24519 - DNA, 120 bp, synthetic construct
  source 1..120: mol_type = other DNA
tacaaaaagggaaaaaaaaatcccacttcaatagtttttcctgcctgtgctactttagacgtaagacagcctgaaatctgacttcaacggttttgggtagatgcttagtaaaaacacgtt

SEQ ID NO: 24520 - DNA, 120 bp, synthetic construct
  source 1..120: mol_type = other DNA
agaaattgcaaccttaaactttaaaacacaatggacagaattagatgatgggtatattgacagagtcccaaacccacattcaaaaaggatcataggaattgcaaagagagaaaaggcctc

SEQ ID NO: 24521 - DNA, 120 bp, synthetic construct; identical to SEQ ID NO: 7576
  source 1..120: mol_type = other DNA

SEQ ID NO: 24522 - DNA, 120 bp, synthetic construct
  source 1..120: mol_type = other DNA
aatttagactaaggaaataatcagggatgtaggcaaatatttagctatcaggatgccactatagtgatgtacataatagcaaactgtgcctcttaccctgaaacctccaacattcagcaa

SEQ ID NO: 24523 - DNA, 120 bp, synthetic construct
  source 1..120: mol_type = other DNA
cactttgggaggccgaggtgggtggatcacttgaggccaggagtttgagaccagcctggtcaacatggagaaaccctgtctctactaaaaatacaaagttagctgggcatggtggcacat

SEQ ID NO: 24524 - DNA, 120 bp, synthetic construct
  source 1..120: mol_type = other DNA
tcacaccactgcactccagcctgggcaacaagagtgaaactccatctcagaaaaaaaaaaaaaaaaagaaaaaagaattttaatgatccagtaaaagctagattataatgcacagaatta

SEQ ID NO: 24525 - DNA, 120 bp, synthetic construct; identical to SEQ ID NO: 7577
  source 1..120: mol_type = other DNA

SEQ ID NO: 24526 - DNA, 120 bp, synthetic construct
  source 1..120: mol_type = other DNA
tgcacacacaggaatactaaaagaatatacaccaataaattgctaaccatttctggataacacaaattacaattaacttatcattttaatcattttaagtgtacagttcagtggcattat

SEQ ID NO: 24527 - DNA, 120 bp, synthetic construct
  source 1..120: mol_type = other DNA
accactattctaccttccatcctatgaatttatcttttttttttttttaactgctccttgtggagcaaggcttatctataggcaatgtacccagagtaaccaaatgtaactattctaggt

SEQ ID NO: 24528 - DNA, 120 bp, synthetic construct; identical to SEQ ID NO: 7578
  source 1..120: mol_type = other DNA

SEQ ID NO: 24529 - DNA, 120 bp, synthetic construct
  source 1..120: mol_type = other DNA
tgtgtgtgtattctgcatagaaccctgtgctgggaatacaaagaaccaacctaattattagaagttgtcaatttagtgggagataaataaatgaaaaaaataaactgagatgagcctgaa

SEQ ID NO: 24530 - DNA, 120 bp, synthetic construct
  source 1..120: mol_type = other DNA
ttgaggtcaggagttcgagacgagcctggccaacatggtgaaaccctctctctactaaaaaaatacaaaaaaatgagctgggtgtggtggcagtcacctgtaatcccagctacttagaag

SEQ ID NO: 24531 - DNA, 120 bp, synthetic construct
  source 1..120: mol_type = other DNA
taggagaaagagcctggttctatgatgaagatgatattcatttttagacgttgtgatacagaatgttttttctagactattctgcctttagtacataaacatttcatattacattatcaa

SEQ ID NO: 24532 - DNA, 120 bp, synthetic construct
  source 1..120: mol_type = other DNA
ttcactcttgttgcccaggctggagagcagcagcatgatctcagctcactgcaacctccgcctcctgggttcaagtgattctcctgctttagcctcccatctttcttttttttaaagaaa

SEQ ID NO: 24533 - DNA, 120 bp, synthetic construct; identical to SEQ ID NO: 7579
  source 1..120: mol_type = other DNA

SEQ ID NO: 24534 - DNA, 120 bp, synthetic construct
  source 1..120: mol_type = other DNA
aaaaaagaagaagagaaagaagtatccacaaaacagtgaaaggctagatggtctctattaggaagagaaccctatagtctccaacttggtaccaagaataaacaccaaaattgcgattgc

SEQ ID NO: 24535 - DNA, 120 bp, synthetic construct
  source 1..120: mol_type = other DNA
catattcttaaaatggagctatgcagagtcccttgaatcatcctgctgtggctcctttttctcacctctcttgatacagtaagtgccgtcatgtttttgctataggggaaatgatgtgtt

SEQ ID NO: 24536 - DNA, 120 bp, synthetic construct
  source 1..120: mol_type = other DNA
tccagaatagctgggattacaaggcattggccaccacgcccagctaatttttgtatttttagtagatgtggggtttcaccatgttggccaggctggtctcaaacttctgacctgaggtga

SEQ ID NO: 24537 - DNA, 120 bp, synthetic construct; identical to SEQ ID NO: 7580
  source 1..120: mol_type = other DNA

SEQ ID NO: 24538 - DNA, 120 bp, synthetic construct
  source 1..120: mol_type = other DNA
agccctgagcagtcttcagagacgcttgtttcactctcacacccagatgctgcttcaccttaaataacaaaaacagaggttcagatgtaaaagcagactataaacgctgcaacttgctgt

SEQ ID NO: 24539 - DNA, 120 bp, synthetic construct
  source 1..120: mol_type = other DNA
gtaattaggatgttaaagctcattcagtcaaagatgacgtcctagctgtgtgaaggacttttttctatgaaaagcaccttaggaggaacatgtttcaagtttaagaagcagttcctttaa

SEQ ID NO: 24540 - DNA, 120 bp, synthetic construct; identical to SEQ ID NO: 7581
  source 1..120: mol_type = other DNA

SEQ ID NO: 24541 - DNA, 120 bp, synthetic construct
  source 1..120: mol_type = other DNA
gcctttgccaatattacctggttactgcagtcatttaagctattcttcaatgataataaattctcctctgtgttcttagacagacactcggtagcaacggtgctatgcctagtagactga

SEQ ID NO: 24542 - DNA, 120 bp, synthetic construct
  source 1..120: mol_type = other DNA
gccaaatgtgtatgggtgaaagggctaggactcctgctaagctctcctttctggacgcttttgctaaaaacagcagaactttccttaatgtcattttcagcaaaactagtatcttccttt

SEQ ID NO: 24543 - DNA, 120 bp, synthetic construct
  source 1..120: mol_type = other DNA
gtctgaactacttcttcatattcttgcttttttatttcaggatgcttacaattacttccaggaagactttgtttatagacctcaggttgcaaaacccctaatctaagcatagcattcaat

SEQ ID NO: 24544 - DNA, 120 bp, synthetic construct
  source 1..120: mol_type = other DNA
gcttctttaaaaacattttctctaatgttattacggctaattgtgctcactgtacttggaatgttctcatttcccatttctctttcaggtgacattgaatgttcctcaaagttttcctct

SEQ ID NO: 24545 - DNA, 120 bp, synthetic construct; identical to SEQ ID NO: 7582
  source 1..120: mol_type = other DNA

SEQ ID NO: 24546 - DNA, 120 bp, synthetic construct
  source 1..120: mol_type = other DNA
tctgcatttcctggatttgaaaacggagcaaatgactggcgctttgaaaccttgaatgtattctgcaaatactgagcatcaagttcactttcttccatttctatgcttgtttcccgactg

SEQ ID NO: 24547 - DNA, 120 bp, synthetic construct
  source 1..120: mol_type = other DNA
tttggttctgtttttgccttccctagagtgctaacttccagtaacgagatactttcctgagtgccataatcagtaccaggtaccaatgaaatactgctactctctacagatctttcagtt

SEQ ID NO: 24548 - DNA, 120 bp, synthetic construct
  source 1..120: mol_type = other DNA
ttaagttcactggtatttgaacacttagtaaaagaaccaggtgcatttgttaacttcagctctgggaaagtatcgctgtcatgtcttttacttgtctgttcatttggcttgttactcttc

SEQ ID NO: 24549 - DNA, 120 bp, synthetic construct; identical to SEQ ID NO: 7583
  source 1..120: mol_type = other DNA

SEQ ID NO: 24550 - DNA, 120 bp, synthetic construct
  source 1..120: mol_type = other DNA
ccttttgttttattctcatgaccactattagtaatattcatcacttgaccattctgctccgtttggttagttccctgatttatcatttcaggagtcttttgaactgccaaatctgctttc

SEQ ID NO: 24551 - DNA, 120 bp, synthetic construct
  source 1..120: mol_type = other DNA
tatctgtggctcagtaacaaatgctcctataattagattttcagttacatggcttaagttggggaggcttgccttcttccgataggttttcccaaatattttgtcttcaatattactctc

SEQ ID NO: 24552 - DNA, 120 bp, synthetic construct
  source 1..120: mol_type = other DNA
tacatcagctactttggcatttgattcagactccccatcatgtgagtcatcagaacctaacagttcatcacttctggaaaaccactcattaactttctgaatgctgctatttagtgttat

SEQ ID NO: 24553 - DNA, 120 bp, synthetic construct; identical to SEQ ID NO: 7584
  source 1..120: mol_type = other DNA

SEQ ID NO: 24554 - DNA, 120 bp, synthetic construct
  source 1..120: mol_type = other DNA
cagaactaccctgatacttttctggatgcctctcagctgcacgcttctcagtggtgttcaaatcattattactgggttgatgatgttcagtatttgttacatccgtctcagaaaattcac

SEQ ID NO: 24555 - DNA, 120 bp, synthetic construct
  source 1..120: mol_type = other DNA
ggaggtggaaatcaaccaactggctatattagagaaactaacctcataaactaccaagtatactgaagatgtagctcatactctttcatttaattcctatttacctagattatttccact

SEQ ID NO: 24556 - DNA, 120 bp, synthetic construct; identical to SEQ ID NO: 7585
  source 1..120: mol_type = other DNA

SEQ ID NO: 24557 - DNA, 120 bp, synthetic construct
  source 1..120: mol_type = other DNA
agtttgagaccagcctcggtaacatggtgaaaccccatctctataaaaccacaaaaaattaaccgggtgtggtggcatgcgcctgtagtcccagctactcaggaggctgaagtgggagga

SEQ ID NO: 24558 - DNA, 120 bp, synthetic construct
  source 1..120: mol_type = other DNA
cgaaagggcaacaatcagttacagaaggtcttattataggtacattagtctagtaccatttaaatctatcagaccataccacgacatttgacagagaatgatactctaactctgccaaga

SEQ ID NO: 24559 - DNA, 120 bp, synthetic construct
  source 1..120: mol_type = other DNA
cagaatccaaactgatttcatccctggttccttgaggggtgatttgtaacaattcttgatctcccacactatagggaaaagacagagtcctaataagaaacactagttacatgtatgcag

SEQ ID NO: 24560 - DNA, 120 bp, synthetic construct
  source 1..120: mol_type = other DNA
tgctgggcacggtggctcaagcctgtaattccagcactttgggaggctgaggcgggtggaccacttgaggtcatgagttcaagaccagcctggccaacatggtgaaaccccatctctact

SEQ ID NO: 24561 - DNA, 120 bp, synthetic construct; identical to SEQ ID NO: 7586
  source 1..120: mol_type = other DNA

SEQ ID NO: 24562 - DNA, 120 bp, synthetic construct
  source 1..120: mol_type = other DNA
aaaaaaaaaaaaaaaacctgggtcaagcaataattcctaaggaaggtaggtaacatagttggggttgcttgtagtttattatataacatacagacaaagcttgagagatatgtggaaata

SEQ ID NO: 24563 - DNA, 120 bp, synthetic construct
  source 1..120: mol_type = other DNA
tgtatatgaggaacttagagaacaatctgctagaagcaagcatgtgcagagttctactgttatcctaaattcctttggacagtgctaataactaaatccaacaaacaaaaagggtatttc

SEQ ID NO: 24564 - DNA, 120 bp, synthetic construct; identical to SEQ ID NO: 7587
  source 1..120: mol_type = other DNA

SEQ ID NO: 24565 - DNA, 120 bp, synthetic construct
  source 1..120: mol_type = other DNA
tgccttattaacggtatcttcagaagaatcagatcctaaaaaatttccccccaaaaaataaatcaataaaagttttcttaattaaaagggttaaaaaaatgtacttgttgaaaaacagat

SEQ ID NO: 24566 - DNA, 120 bp, synthetic construct
  source 1..120: mol_type = other DNA
gtaatcccagcacttgaggaggccgagatgggtggattatttgaggttaggagttcaagaccagcctggccaacaaagtgagacccccgtttctactgaaaacaaaaacaaaaacaaaaa

SEQ ID NO: 24567 - DNA, 120 bp, synthetic construct
  source 1..120: mol_type = other DNA
ataagtataataggaacaatctcagaggtctgacaagcatctaatgagttatacaagaaaagcacaatagtgcctggaatatagttaagtgctcctaaatatcaactactataactattt

SEQ ID NO: 24568 - DNA, 120 bp, synthetic construct; identical to SEQ ID NO: 7588
  source 1..120: mol_type = other DNA

SEQ ID NO: 24569 - DNA, 120 bp, synthetic construct
  source 1..120: mol_type = other DNA
ccaccacacccagctaatttaaaaaagaaatttttttgtagagatgaggtcttgctatgttgcccaggctggtctcaaactcctggcttcaagcaatcctctgccactgctgagattaca

SEQ ID NO: 24570 - DNA, 120 bp, synthetic construct
  source 1..120: mol_type = other DNA
gtggtgtagtgttggctcattgtaacctccgcctccctggttcaagcgattctcctgcctcagcctcccaagtagctgggattacaagcatgtgctaccacacccagctaattttttttt

SEQ ID NO: 24571 - DNA, 120 bp, synthetic construct
  source 1..120: mol_type = other DNA
ccgcaccggccaaaaatgtattattattttaaaaatagagacagggttcccctatgttggccaggctggtcttaaactcgtggactcaaccaatccttctgcctcggtcttccaaagcgt

SEQ ID NO: 24572 - DNA, 120 bp, synthetic construct
  source 1..120: mol_type = other DNA
gcaacctctgcttcctgggttcaagcgattctcctgcctcagcctcctgagtagctgggattacaggcataagccaccaccccggctaatttttttttttttttttttagtagagatggg

SEQ ID NO: 24573 - DNA, 120 bp, synthetic construct; identical to SEQ ID NO: 7589
  source 1..120: mol_type = other DNA

SEQ ID NO: 24574 - DNA, 120 bp, synthetic construct
  source 1..120: mol_type = other DNA
attctcctgcctcagcctcccgagtagctgggattacagttatgtgccaccacacctggctaattttttattttttggtacagacagagtttctccatgttggctaggctggtctcgaac

SEQ ID NO: 24575 - DNA, 120 bp, synthetic construct
  source 1..120: mol_type = other DNA
gcgtcttttacattttttataactcaccatagggctcataaaattcacttcccaaagctgcctaccacaaatacaaattatgaccaagatttttggcaaaactataagataaggaatcca

SEQ ID NO: 24576 - DNA, 120 bp, synthetic construct; identical to SEQ ID NO: 7590
  source 1..120: mol_type = other DNA

SEQ ID NO: 24577 - DNA, 120 bp, synthetic construct
  source 1..120: mol_type = other DNA
tggagcaggactgcttgaggccaggagttcaagaccagcataagcaacagagtgagacccagtctctacaaaataatagtagtagtaataataaaatgtgtgggatatgtgtgatttgaa

SEQ ID NO: 24578 - DNA, 120 bp, synthetic construct
  source 1..120: mol_type = other DNA
taacttttttttttgttttggggggtgtacagagtcctgctctgtcacccaggctggagtgcagtggcgcaatctcagctcactgcaacctccgcctcctaagttcaagagattctcctg

SEQ ID NO: 24579 - DNA, 120 bp, synthetic construct
  source 1..120: mol_type = other DNA
atatatataacatatatatattatatatatataacatatatataacatatatatatgttatatatatataacatatatataacatatatatatatatatatataatatatatatatatat

SEQ ID NO: 24580 - DNA, 120 bp, synthetic construct
  source 1..120: mol_type = other DNA
tccacctccctggttcagttgattctcctgcctcagcctcccgagtagctgggactacaggcgtacaccaccacgcctagttaatttttgtatttttagtagagacaggtttcgccatgt

SEQ ID NO: 24581 - DNA, 120 bp, synthetic construct; identical to SEQ ID NO: 7591
  source 1..120: mol_type = other DNA

SEQ ID NO: 24582 - DNA, 120 bp, synthetic construct
  source 1..120: mol_type = other DNA
caagtgatcctcccacctcagcctcccaaggagctgggactacatgcgcacgccaccatgcctggctaatttttgtattttttgtagcgatggggtttcaccacattgcctaggctggtc

SEQ ID NO: 24583 - DNA, 120 bp, synthetic construct
  source 1..120: mol_type = other DNA
ctctacggcccaggctggagtgcagtggcgcgatcttggctcgctgcaacctccgcgtcctaggttcaagcaattcttgtgcctccgcctcccgagtagctgggattacaggtacgtgcc

SEQ ID NO: 24584 - DNA, 120 bp, synthetic construct; identical to SEQ ID NO: 7592
  source 1..120: mol_type = other DNA

SEQ ID NO: 24585 - DNA, 120 bp, synthetic construct
  source 1..120: mol_type = other DNA
gcctcagcctcccaagtagctaggaccacaggtgcataccaccacgcccagctaagtttttttgttttttttttgagacagagtctcactctgtcgcccaggctggatcgcagtggcggg

SEQ ID NO: 24586 - DNA, 120 bp, synthetic construct
  source 1..120: mol_type = other DNA
tagagacgggctttcaccatgtgagccaggatagtcttgatctccacacctcgtgatccacttgactcggcctcccaaagtgctgggattacaggcgtgaagcttttttttttttttttt

SEQ ID NO: 24587 - DNA, 120 bp, synthetic construct
  source 1..120: mol_type = other DNA
tacaggcacgtgccaccacacccagctaatttttgtatttttagtagagaccgggtttcaccatgttggccagggtggtctcaatctcctgacctcatgatccactggcctcagcctccc

SEQ ID NO: 24588 - DNA, 120 bp, synthetic construct; identical to SEQ ID NO: 7593
  source 1..120: mol_type = other DNA

SEQ ID NO: 24589 - DNA, 120 bp, synthetic construct
  source 1..120: mol_type = other DNA
agtgtctcactgtgttgcccaagctgggctcaaaggacctcctacctcagcctcccaaagggttgggattataggcatgagccatggcacccagctgaagtaatttccaaatgcttaaaa

SEQ ID NO: 24590 - DNA, 120 bp, synthetic construct
  source 1..120: mol_type = other DNA
ccagcactctgggaggccaaggagggtggatcacctgaggtcaggagttcgagaccagcctgaccaatatggtgaaaccccgactctactaaaattacaaaaattagccaggtctggtgt

SEQ ID NO: 24591 - DNA, 120 bp, synthetic construct
  source 1..120: mol_type = other DNA
tgacatcgtgtcactgcgctccagcctgggcgacagagcgagactctgtctcaaaaaaaaaaaaaaaaaagaaatctgtctttttggtgtatctgatggggatcttgctatgttgcctgg

SEQ ID NO: 24592 - DNA, 120 bp, synthetic construct; identical to SEQ ID NO: 7594
  source 1..120: mol_type = other DNA

SEQ ID NO: 24593 - DNA, 120 bp, synthetic construct
  source 1..120: mol_type = other DNA
ccagcaatttggggagccgaggtgggtggatcacctgaggttaggagttcgagaccagcctggccaacatgatgaaaccccgtctctactaaaaatacaaaaattagcctggcatggtgg

SEQ ID NO: 24594 - DNA, 120 bp, synthetic construct
  source 1..120: mol_type = other DNA
gaagaagaagaaaacaaatggttttaccaaggaaggattttcgggttcactctgtagaagtcttttggcacggtttctgtagcccatactttggatgatagaaacttcatcttttagatg

SEQ ID NO: 24595 - DNA, 120 bp, synthetic construct
  source 1..120: mol_type = other DNA
agaaaccctatgtatgctctttgttgtgttaagacaatgcattaaggttacctgtgattttttttaaaaatcaaattttaaaaaatcaactggaaattttactcctaggaaacaaaaaca

SEQ ID NO: 24596 - DNA, 120 bp, synthetic construct
  source 1..120: mol_type = other DNA
cactaaagctaagacaccaacaatgtaagttgcactattattttctgtatcactaagaaagaaagcacacaaattaaacaaatgacacaccctcaatagtaaaatgttcccaatttcaga

SEQ ID NO: 24597 - DNA, 120 bp, synthetic construct; identical to SEQ ID NO: 7595
  source 1..120: mol_type = other DNA

SEQ ID NO: 24598 - DNA, 120 bp, synthetic construct
  source 1..120: mol_type = other DNA
tgagttttcatggacagcacttgagtgtcattcttgggatattcaacacttacactccaaacctgtgtcaagctgaaaagcacaaatgattttcaatagctcttcaacaagttgactaaa

SEQ ID NO: 24599 - DNA, 120 bp, synthetic construct
  source 1..120: mol_type = other DNA
tgcagcaacagtagaaaacctctataatcaatacatcattgacatctgtataaaccgtgtgatggcagtgatttagtaactttttgtcattcatttaagcctaccaaatgcctaaaatta

SEQ ID NO: 24600 - DNA, 120 bp, synthetic construct
  source 1..120: mol_type = other DNA
agtgccacaatcatagctcactgcagcctcagacttctgtactcaagctatcctcccactatagcctcccaagtagctaggactatgggcatatgccaccatgtacatttatttatttat

SEQ ID NO: 24601 - DNA, 120 bp, synthetic construct
  source 1..120: mol_type = other DNA
cctgctgagcttactgttcttaacatctgaaccctgcccaatccctcacttagttctgcctctcaaggatttctgtcaaattatgattatacttctttgaaaacacatagataacaatgt

SEQ ID NO: 24602 - DNA, 120 bp, synthetic construct; identical to SEQ ID NO: 7596
  source 1..120: mol_type = other DNA

SEQ ID NO: 24603 - DNA, 120 bp, synthetic construct
  source 1..120: mol_type = other DNA
tgggcaacatggtaaaacctcatctctacaaaaaatacaaaaattggccgggcatggtagcgtgtgcctgtagtcccagctatttgggaggctaaggcaggaagaggctgggagacagag

SEQ ID NO: 24604 - DNA, 120 bp, synthetic construct
  source 1..120: mol_type = other DNA
cagacaatgggggcacggcgatacagccctactttacataagtctgcaagtttttacactagaagcattagagaaaggcagtaagtttctaatacctgtataaggcagatgtcccataaa

SEQ ID NO: 24605 - DNA, 120 bp, synthetic construct
  source 1..120: mol_type = other DNA
tgtggttgcttccaacctagcatcattaccaaattatataccttttggttatatcattcttacataaaggacactgtgaaggccctttcttctggttgagaagtttcagcatgcaaaatc

SEQ ID NO: 24606 - DNA, 120 bp, synthetic construct; identical to SEQ ID NO: 7597
  source 1..120: mol_type = other DNA

SEQ ID NO: 24607 - DNA, 120 bp, synthetic construct
  source 1..120: mol_type = other DNA
tagtttaaaatctcaacacctcaccacaaagctatagtaatcaagaaagtgtggtaatagcataagaatagacacatacatcaataaaatggaattgacagtacagaaataaactcatac

SEQ ID NO: 24608 - DNA, 120 bp, synthetic construct
  source 1..120: mol_type = other DNA
gctcactgcaagctccacctcctgggttcacgccattctcctgcctcagcctcccgagcagctgggactacaggcgcccagcaccatgcccggctaatttttttatttttagtagagacg

SEQ ID NO: 24609 - DNA, 120 bp, synthetic construct
  source 1..120: mol_type = other DNA
tttcttaattttttttttttttttttgagacagactcactctatcacccaggctggagggtagtgacacaatctcagctcactacaacctccacctcctaggctcaagcaattctcgtgc

SEQ ID NO: 24610 - DNA, 120 bp, synthetic construct; identical to SEQ ID NO: 7598
  source 1..120: mol_type = other DNA

SEQ ID NO: 24611 - DNA, 120 bp, synthetic construct
  source 1..120: mol_type = other DNA
tcactcatacaaccaatatttactatgtctagtactattctagatggaggggattcaatagaaaagcaaaataagatcctgcaaaataaaacataaaggacataatatactggtgaaggg

SEQ ID NO: 24612 - DNA, 120 bp, synthetic construct
  source 1..120: mol_type = other DNA
agcacttgcggggtgggtgaatcacttgaggccaggagttcaagaccagcctggccaacatggtgaaaccctgtctctactaaatattcaaaaattagctgggtgtggtggtggtgcact

SEQ ID NO: 24613 - DNA, 120 bp, synthetic construct
  source 1..120: mol_type = other DNA
caaaaaaaaaaaaaaggcattgggaattgtgagaaaagacacttagagaatattttttactagccaggtaatttaacatttattaccctctcttggccgggtgcagtggctcatgtctgc

SEQ ID NO: 24614 - DNA, 120 bp, synthetic construct; identical to SEQ ID NO: 7599
  source 1..120: mol_type = other DNA

SEQ ID NO: 24615 - DNA, 120 bp, synthetic construct
  source 1..120: mol_type = other DNA
aaaccctgtctctactaaaaatacaaaaattagccgggcatggtggcatatgcctgtaatcctggctactcaggaggctgaggcaggagaatctcttgaacccgggaggcggaggttgca

SEQ ID NO: 24616 - DNA, 120 bp, synthetic construct
  source 1..120: mol_type = other DNA
tacctatctatctgtctacagtcttgaactcccgacctcaagtgatcgcctgcttcagcctcccaaagtgctgggattacaggtgtgagccattgcgctgggctactttctatctttatt

SEQ ID NO: 24617 - DNA, 120 bp, synthetic construct
  source 1..120: mol_type = other DNA
ccttatcttcatttttatagagtagaggcttgtcccagatcacacagtaattaagcaatgaaggttatattggatccagaattggattgtagcaaagcccacaatcttccttttttcttt

SEQ ID NO: 24618 - DNA, 120 bp, synthetic construct; identical to SEQ ID NO: 7600
  source 1..120: mol_type = other DNA

SEQ ID NO: 24619 - DNA, 120 bp, synthetic construct
  source 1..120: mol_type = other DNA
caattcagagcaggggtagggaggaaattcccttatgatagtactgcagaatatagtacagtagagtgacaagctaagctgtctcgtgctgtagtctatacaattatataaataattcag

SEQ ID NO: 24620 - DNA, 120 bp, synthetic construct
  source 1..120: mol_type = other DNA
agctctgcctcctgggttcacgccattctcctgcctcagcctcctgagtagctgggactacaggtgcccgctaccacgcctggctaactttttgtaattttagtagaggcggggtttcac

SEQ ID NO: 24621 - DNA, 120 bp, synthetic construct
  source 1..120: mol_type = other DNA
aaaaagaatacatgtataaaggttgttaactaaacttaaaagaaaatgaacttgtatatgacttgaaaagacagagctaactaaaatactggccaggcatgatgactcacacctgtaatc

SEQ ID NO: 24622 - DNA, 120 bp, synthetic construct
  source 1..120: mol_type = other DNA
gtgcacttacagtcccagctacttgggagactgaggtgataggatcgcttgagcctaggaggtcaaggcaacagtaagcctcatgatcgcaccactgtactccagctgggacaacagagt

SEQ ID NO: 24623 - DNA, 120 bp, synthetic construct; identical to SEQ ID NO: 7601
  source 1..120: mol_type = other DNA

SEQ ID NO: 24624 - DNA, 120 bp, synthetic construct
  source 1..120: mol_type = other DNA
tactaaaaatacaaaaattagccatgcatggtggtgcacgcctgtaatcccagctacttgggaggctgaggcaggagaatcacttgaaccagagaggcagaggctgcagtgagccgagat

SEQ ID NO: 24625 - DNA, 120 bp, synthetic construct; identical to SEQ ID NO: 7602
  source 1..120: mol_type = other DNA

SEQ ID NO: 24626 - DNA, 120 bp, synthetic construct
  source 1..120: mol_type = other DNA
gaggctgaggcaggagatttgcttgaacccaggagatggaggtggcagtgagctgagatcatgccactgcactccagtctgggcaacacagtgagactccgtctcaaaacaaaacaaaaa

SEQ ID NO: 24627 - DNA, 120 bp, synthetic construct
  source 1..120: mol_type = other DNA
actaaaaatacaaaaaaattagctgggcgtggtggcaggcgtctgtagtcccagctacttgggaggctgaggcaggagaatggtgtgaacccgggaggtggagcttgcagtgagccgaga

SEQ ID NO: 24628 - DNA, 120 bp, synthetic construct; identical to SEQ ID NO: 7603
  source 1..120: mol_type = other DNA

SEQ ID NO: 24629 - DNA, 120 bp, synthetic construct
  source 1..120: mol_type = other DNA
tatcgctcccaggctcccagctttctcatcatatagatcaaagtgttattcagattatattgatattacagaagagatttcatgaaaaagtcgatctatcacatgggcattatactggac

SEQ ID NO: 24630 - DNA, 120 bp, synthetic construct
  source 1..120: mol_type = other DNA
gagtagctgggactacaggcatgtgcccccatacccagctaatttttgtatttttagtagagatggtgttaccatattggccaggctggtctcgaactcctgacctcgtgatccgcccac

SEQ ID NO: 24631 - DNA, 120 bp, synthetic construct; identical to SEQ ID NO: 7604
  source 1..120: mol_type = other DNA

SEQ ID NO: 24632 - DNA, 120 bp, synthetic construct
  source 1..120: mol_type = other DNA
actggttctttcctgactatcacaatcctgactatcacaagcttgaaaccaagcttctcactcttctccagttgccaactctaatcctctcaatctcaacagctgttttttgttgttttt

SEQ ID NO: 24633 - DNA, 120 bp, synthetic construct
  source 1..120: mol_type = other DNA
ctgggattacaggcatgcgcctccacgcccgtctaattttgtatttttagtagagatggggtttctctatgttggtcaggctggtcttgagctcctgacctcaggtgatccacctgcctt

SEQ ID NO: 24634 - DNA, 120 bp, synthetic construct; identical to SEQ ID NO: 7605
  source 1..120: mol_type = other DNA

SEQ ID NO: 24635 - DNA, 120 bp, synthetic construct
  source 1..120: mol_type = other DNA
ggagtgcattggcatgatctcggctcagggcaacctctgcctcccaggttcaagtgatacccctgccgcagcctaccaagtagctgggactacaggtacgtgccaccatgccaggctagt

SEQ ID NO: 24636 - DNA, 120 bp, synthetic construct
  source 1..120: mol_type = other DNA
ccgcgcccgtcctctattttcttttatttgtacatttgctcgtattattatctctgcctataagcctataatttccttcttccacaagttctcaaagcaactatattcataacttaatct

SEQ ID NO: 24637 - DNA, 120 bp, synthetic construct
  source 1..120: mol_type = other DNA
gctgaagtcaggagtttgagagcagcctggccaacatggtgaaaaccctgtctcgactaaaaatacaaaaattagctgggtgtggtggcagatgcctgtaatcccagctactcaagaggc

SEQ ID NO: 24638 - DNA, 120 bp, synthetic construct; identical to SEQ ID NO: 7606
  source 1..120: mol_type = other DNA

SEQ ID NO: 24639 - DNA, 120 bp, synthetic construct
  source 1..120: mol_type = other DNA
catacagttcattccagaaagattctcatccagataaattgaaagccccagggctttaaaggttaatctttagctctctgtagtaaatactgggacttttttttttttttttgagtctcc

SEQ ID NO: 24640 - DNA, 120 bp, synthetic construct
  source 1..120: mol_type = other DNA
ctaggaaattcataaagactattcataaaccccaagttaagaactctggaatttaaaaattcctcaaaggatacataagaaattgatcattgtggttgtctggggagggaacagggaggc

SEQ ID NO: 24641 - DNA, 120 bp, synthetic construct
  source 1..120: mol_type = other DNA
ttgtacctggtaccaggttatgtaccaggtacataaatacttaaaaacaaattagttgacatttaaggtaagatgtgagccatagcttaacataaagaaaaggagaaagcccacttgttc

SEQ ID NO: 24642 - DNA, 120 bp, synthetic construct; identical to SEQ ID NO: 7607
  source 1..120: mol_type = other DNA

SEQ ID NO: 24643 - DNA, 120 bp, synthetic construct
  source 1..120: mol_type = other DNA
aaaacactgttcaaaatgatgttacatcctaatagataatatatgtcagtcgggtgtggtggctcacgcctgtaatcccagaactttgggaggccgaggcaggtggatcacaaggtcagg

SEQ ID NO: 24644 - DNA, 120 bp, synthetic construct
  source 1..120: mol_type = other DNA
tcgcttgaactcggggggcggaggttgcagtgagccaagatcatgccactgcactccagcctgggcgacagagcgagactttgtctcaaaaaaaaaaaaaaagataatatatgtcaaaac

SEQ ID NO: 24645 - DNA, 120 bp, synthetic construct
  source 1..120: mol_type = other DNA
aggtgtttcctgggttatgaaggacaaaaacaaaagctaataatggagccacataacacattcaaacttacttgcaaaatatgtggtcacactttgtggagacaggttccttgatcaact

SEQ ID NO: 24646 - DNA, 120 bp, synthetic construct; identical to SEQ ID NO: 7608
  source 1..120: mol_type = other DNA

SEQ ID NO: 24647 - DNA, 120 bp, synthetic construct
  source 1..120: mol_type = other DNA
atttttctgcactatcactgtgggtgcacatctcatctttaagctccataaagacaaaattttctgcttatatttcttttgaattccttcctagaacttttttttgtttactgtaaatgc

SEQ ID NO: 24648 - DNA, 120 bp, synthetic construct
  source 1..120: mol_type = other DNA
tcacccatatccacccctaccccagattattttaattattattacttttaagataaggtcacactctgtcacctaggctggagtgcagtggtgcaaacatacctcactgcagccttgaac

SEQ ID NO: 24649 - DNA, 120 bp, synthetic construct
  source 1..120: mol_type = other DNA
atggtgcgatctcggctcactgcaacctctgcctcccaagttcaagtgattctcctgcctcagcctcccaggtagttggaactacaggcgtgcgccaccacgcccggctgatttttcgta

SEQ ID NO: 24650 - DNA, 120 bp, synthetic construct; identical to SEQ ID NO: 7609
  source 1..120: mol_type = other DNA

SEQ ID NO: 24651 - DNA, 120 bp, synthetic construct
  source 1..120: mol_type = other DNA
ttattagatcacttcagaagaggcatgatgtttggtttgtgattactttgtaaaaacagtgtaataagtactcactaaaggaaatttagaaaatgataagcttaaggccgggcatggtgc

SEQ ID NO: 24652 - DNA, 120 bp, synthetic construct
  source 1..120: mol_type = other DNA
agccgggcgtggtggcgcatgcctgtggtctcagctactttggagactaaggtagaaggatcacttgaatcctggaggtggaggttgcagagtgagccaatatcgtgccactgcactcca

SEQ ID NO: 24653 - DNA, 120 bp, synthetic construct
  source 1..120: mol_type = other DNA
tcgagaccagcctggccaacacagtgaaacgctgtctctactaaaaataccaaaactaactgggcatggtggcatgcgcctgtaatcccagctacttgggaggctaaggcaggagaatcg

SEQ ID NO: 24654 - DNA, 120 bp, synthetic construct; identical to SEQ ID NO: 7610
  source 1..120: mol_type = other DNA

SEQ ID NO: 24655 - DNA, 120 bp, synthetic construct
  source 1..120: mol_type = other DNA
attaaagagaaaaattaagcagggtaaggggaaacaggtagttcaatatctatgtgggggtgagatgtacatggggggagtcaggaaaggtttcactgaggtgagactagaggatagctt

SEQ ID NO: 24656 - DNA, 120 bp, synthetic construct
  source 1..120: mol_type = other DNA
aggtgctaaaatgtaataatccaggaggatattgtagggaaagactatcagagaggtagctggtaacttctggtaggaacctataggctattttaaatctttagctttattctggtcttt

SEQ ID NO: 24657 - DNA, 120 bp, synthetic construct
  source 1..120: mol_type = other DNA
gcctcccgagtagctgggactaaaggcatgcaccaccatgccttggcctcccaaagtactgggattacaggagtgagccaccatgccagccatctttttaatttttaatgttaattaatt

SEQ ID NO: 24658 - DNA, 120 bp, synthetic construct; identical to SEQ ID NO: 7611
  source 1..120: mol_type = other DNA

SEQ ID NO: 24659 - DNA, 120 bp, synthetic construct
  source 1..120: mol_type = other DNA
taaatgtgaatttttgaaacggattttttggataaagtccaggcaagatatcaaagaacgactaacctggcagtgtgacaagaatgtggttttttccttaaatatttaactttttagaaa

SEQ ID NO: 24660 - DNA, 120 bp, synthetic construct
  source 1..120: mol_type = other DNA
gatcacaagaaaagcttgtggacagtaaccttattgtgaagggttgtaatacaactcttgtaatcatggggtttttgacatagcacagggcagtgaaaagaaaaacaatgaactaagtca

SEQ ID NO: 24661 - DNA, 120 bp, synthetic construct
  source 1..120: mol_type = other DNA
ctcttgccattcaccctgccagactccttgggctattgcaagaataaaattaaatgctacttgggaaaatgcttcacaacctgagatgacttgggaaaaatgcttcacaacctgagataa

SEQ ID NO: 24662 - DNA, 120 bp, synthetic construct; identical to SEQ ID NO: 7612
  source 1..120: mol_type = other DNA

SEQ ID NO: 24663 - DNA, 120 bp, synthetic construct
  source 1..120: mol_type = other DNA
tccgatatgtaaaaaggtaatgaatgttgaaggaagactgtgaaaagggaaaagaaaaaaaattaaaatgttccccttctaggtcctgatgagagtaaatgtttactataaaaatgattc

SEQ ID NO: 24664 - DNA, 120 bp, synthetic construct
  source 1..120: mol_type = other DNA
aacccaccggggaacacattttagcaaattcttctgaaagtcaaaaatgttatagtcataggtaaaaagttacaaagaactaccaattgtcagaaatagctgccaatattgacttagaag

SEQ ID NO: 24665 - DNA, 120 bp, synthetic construct; identical to SEQ ID NO: 7613
  source 1..120: mol_type = other DNA

SEQ ID NO: 24666 - DNA, 120 bp, synthetic construct
  source 1..120: mol_type = other DNA
attagccgggcgtggtggtggacgcctgtagtcccagctacttggggggccgaggcaggagaatggcgtgaacccgggaggcggagcttgcagtgagccgagatggcgccactgcactcc

SEQ ID NO: 24667 - DNA, 120 bp, synthetic construct
  source 1..120: mol_type = other DNA
aggacttcaagaccagcctgaccaacgtgatgaaaccctatctctactaaaaatacaaaattagccggccacggtggcgtgcgcctataatcccagctactcaggaggctgaggcaggag

SEQ ID NO: 24668 - DNA, 120 bp, synthetic construct
  source 1..120: mol_type = other DNA
gccgggcgcagtggctcaggactgtaatcccagcactttggaaggctgaggcgggtggatcacaaggtcaggagatcgagaccatcttggctaacatggtgaaaccccgtctctactaaa

SEQ ID NO: 24669 - DNA, 120 bp, synthetic construct; identical to SEQ ID NO: 7614
  source 1..120: mol_type = other DNA

SEQ ID NO: 24670 - DNA, 120 bp, synthetic construct
  source 1..120: mol_type = other DNA
ccggaggctgaggcagcagaattgcttgaacccgggaggtggaggttgtagtgagccgagattgtgccactgcactccagcctgggcaacaagagccaaagtctgtctcaaaaaaaaaaa

SEQ ID NO: 24671 - DNA, 120 bp, synthetic construct
  source 1..120: mol_type = other DNA
tatgtatctgagtttttaattgatggtttaatttgccagaatgagaaagaacatcctatttttatgactctctcccatggaaatgaaacataaatgtatccaaatgccacactattgagg

SEQ ID NO: 24672 - DNA, 120 bp, synthetic construct
  source 1..120: mol_type = other DNA
cctgttttcctcttatttttgtttagctataatgttgaagggcaagggagaggatggttatttataaatcttgtatcgctctgaaaacacaacatacattttccttaatctgattaactt

SEQ ID NO: 24673 - DNA, 120 bp, synthetic construct
  source 1..120: mol_type = other DNA
atcaccatatttaaaaaaattaaagaactaatttagtttagtttattatttatttgacaaatgtttattgagtggcaactaggtcccaagtaccgttctaactactgaacatacagatgt

SEQ ID NO: 24674 - DNA, 120 bp, synthetic construct; identical to SEQ ID NO: 7615
  source 1..120: mol_type = other DNA

SEQ ID NO: 24675 - DNA, 120 bp, synthetic construct
  source 1..120: mol_type = other DNA
cctatctctacaacagaaaaatacaagaatggctggacgcagtggcttatgcctgtaatcctagcactttgggaggcccaggcgggtggatcacaaggtcaggagatcaagactatcctg

SEQ ID NO: 24676 - DNA, 120 bp, synthetic construct
  source 1..120: mol_type = other DNA
tgaacccgggaggcagagtttgcagtgagctgagatcgcgccactgcactccagcctgggcaacagagcaagactccatctcaaaaaaagaaaaaaaaatacaaaaattagctgggcatg

SEQ ID NO: 24677 - DNA, 120 bp, synthetic construct
  source 1..120: mol_type = other DNA
agatcctatataaaaaaaaaacctctgcatttcattgtatgtaaataagtatgtaatttcattgtatgtacagagccagtttcaaacaaaggttcttccaaatacctatcctctcaacga

SEQ ID NO: 24678 - DNA, 120 bp, synthetic construct
  source 1..120: mol_type = other DNA
atattggctcacagcaacatctgcctcctggttcaagtgattctcctgcctcagcctcctgagtagctgggattacaggcacatgccactacgcccagctaatttttgtatttttagtgg

SEQ ID NO: 24679 - DNA, 120 bp, synthetic construct; identical to SEQ ID NO: 7616
  source 1..120: mol_type = other DNA

SEQ ID NO: 24680 - DNA, 120 bp, synthetic construct
  source 1..120: mol_type = other DNA
ttacaatagcctaatcttactagacatgtcttttcttccctagtatgtaaggtcaattctgttcatttgcataggagataatcataggaatcccaaattaatacactcttgtgctgactt

SEQ ID NO: 24681 - DNA, 120 bp, synthetic construct
  source 1..120: mol_type = other DNA
catatatatatatctttttaaaaggtttataaaatgacaacttcattttatcattttaaaataaagtaaatttaagatttggaaggttttagaataatacaaaccaaagaactaatgaca

SEQ ID NO: 24682 - DNA, 120 bp, synthetic construct
  source 1..120: mol_type = other DNA
agctacagaggagtgactgaccgggtaggtggtggtagccttagctttctccaatgtttctggttgttttctttttcttgcataaaaccaaaatcaacaacgaccaaaccaacaccaatc

SEQ ID NO: 24683 - DNA, 120 bp, synthetic construct; identical to SEQ ID NO: 7617
  source 1..120: mol_type = other DNA

SEQ ID NO: 24684 - DNA, 120 bp, synthetic construct
  source 1..120: mol_type = other DNA
ctagcgattctcctgcctcagcctcctgagtagctggagcggcaccacgcccggctaatttttgtatttttagtagagacggagtttcaccacgttggtcaggctggtctggaactcctg

SEQ ID NO: 24685 - DNA, 120 bp, synthetic construct
  source 1..120: mol_type = other DNA
ctcgcgacctacaaactgcccccctccccagggttcacaacgccttacgcctctcaggttccgcccctaccccccgtcaaagaatacccatctgtcagcttcggaaatccactctcccac

SEQ ID NO: 24686 - DNA, 120 bp, synthetic construct
  source 1..120: mol_type = other DNA
cagcctgtcccccgtccaggaagtctcagcgagctcacgccgcgcagtcgcagttttaatttatctgtaattcccgcgcttttccgttgccacggaaaccaaggggctaccgctaagcag

SEQ ID NO: 24687 - DNA, 120 bp, synthetic construct; identical to SEQ ID NO: 7618
  source 1..120: mol_type = other DNA

SEQ ID NO: 24688 - DNA, 120 bp, synthetic construct
  source 1..120: mol_type = other DNA
atataagtaataaggattgttgggggggtggagggaaataattatttccagcatgcgttgcggaatgaaaggtcttcgccacagtgttccttagaaactgtagtcttatggagaggaaca

SEQ ID NO: 24689 - DNA, 120 bp, synthetic construct
  source 1..120: mol_type = other DNA
gttatggactggagtgttatgttttcgtattttgaaagcagaaactaggccttaaaaagatacgtacaactctttagggagactacaattcccatccagccccaggagtctggggcaagt

SEQ ID NO: 24690 - DNA, 120 bp, synthetic construct
  source 1..120: mol_type = other DNA
gttatttttcgggttcagcttgcttttgccccgtctccgtcgacgcaatcgccaccagtcaatggggtggtcgttttgagggacaagtggtaagagccaatcttcttggcgaaaacgcgg

SEQ ID NO: 24691 - DNA, 120 bp, synthetic construct
  source 1..120: mol_type = other DNA
aggaagcagcctgggttagctaggggtggggtcacgtcacactaagagggtttggagaagttcaagggaggaatcctgcaaagaagaggggcgactttttccgtgtctccggacagctaa

SEQ ID NO: 24692 - DNA, 120 bp, synthetic construct; identical to SEQ ID NO: 7619
  source 1..120: mol_type = other DNA

SEQ ID NO: 24693 - DNA, 120 bp, synthetic construct
  source 1..120: mol_type = other DNA
ccccgggcagtcaggggcctagcacccgggccagcagctgcagagggtgcgccgggtcccccagcactgccggcccgcctgcaccccgcttgaattctcaccgggccccagccgccctgc

SEQ ID NO: 24694 - DNA, 120 bp, synthetic construct
  source 1..120: mol_type = other DNA
ccatcgactgcccaagggctgagaggagtgcaggcgcccggcacagccctgcgcaggatccactaggtgaagccagctgggctcctgagtcagatggggacttggaaaacttttatgtct

SEQ ID NO: 24695 - DNA, 120 bp, synthetic construct
  source 1..120: mol_type = other DNA
gctaaaggattgtaaatgcaccaatcagtgctctgtgtctagctcaaggtttgcaaatgcaccaatcagcactctgtgtctagctaaaggtttgtaaacgcaccaatcagtgctctgtgt

SEQ ID NO: 24696 - DNA, 120 bp, synthetic construct; identical to SEQ ID NO: 7620
  source 1..120: mol_type = other DNA

SEQ ID NO: 24697 - DNA, 120 bp, synthetic construct
  source 1..120: mol_type = other DNA
gtgcctgtaatcccctctactggggaggttgaggcaggagaatggcgtgaacccgggaggcggagcttgcagtgagcccagattgcaccactgcattccagcctgggtgacagagggaga

SEQ ID NO: 24698 - DNA, 120 bp, synthetic construct
  source 1..120: mol_type = other DNA
aatcttgctgctgctcactctttgggtccgcatagcatttatctgctggtaacaccgaccgcagaggtctgcagcttcactcctgaagccagcgagaccacgaacccaccaggaggaatg

SEQ ID NO: 24699 - DNA, 120 bp, synthetic construct
  source 1..120: mol_type = other DNA
ggaggtaactctgaacacgtccgaacatcagaaggaacaaactctggacacatcatctttaagaactgtaccactcaccgtgagggtccgcaacttcattcttgaagtcagtgagaccaa

SEQ ID NO: 24700 - DNA, 120 bp, synthetic construct; identical to SEQ ID NO: 7621
  source 1..120: mol_type = other DNA

SEQ ID NO: 24701 - DNA, 120 bp, synthetic construct
  source 1..120: mol_type = other DNA
cactttttttttttttttcgagacaaagtctcgctttctcaaagaccagcccaggctggtcttgaactcctgagctcaagcgatcctcctgccttggcctcccaaagtgctgggattaca

SEQ ID NO: 24702 - DNA, 120 bp, synthetic construct
  source 1..120: mol_type = other DNA
tgaaagaaaaaaaaatcgatgtggaggaaaagctaacttgtgccaagacaaggtgagtcagtcacatggacttaacaataatgtcaattatgaaagctgaaggcctaggacccagctatc

SEQ ID NO: 24703 - DNA, 120 bp, synthetic construct; identical to SEQ ID NO: 7622
  source 1..120: mol_type = other DNA

SEQ ID NO: 24704 - DNA, 120 bp, synthetic construct
  source 1..120: mol_type = other DNA
tcgcggctagtgcactgcgaactctgtctcccgggttcacgccattctcctgcctcagcctcccgagtagctgggactacaggcacccgccatcacgcccagctaattttttgtgttttt

SEQ ID NO: 24705 - DNA, 120 bp, synthetic construct
  source 1..120: mol_type = other DNA
gaagtgtttcttaaagttggaaagtggtatttcagaatatccgcttttggcagactgagtcagtcacttcattttcctgattttttgcctaaggtcctggtgaattgacaaagattctgc

SEQ ID NO: 24706 - DNA, 120 bp, synthetic construct
  source 1..120: mol_type = other DNA
ataattatcttagggtttcaaaaaagtgcctgatcttcacagacttcagggtccttaaaataacagtcttaattgtagtgttttacagggcagtgcattacattgtcaaaaacagtacag

SEQ ID NO: 24707 - DNA, 120 bp, synthetic construct; identical to SEQ ID NO: 7623
  source 1..120: mol_type = other DNA

SEQ ID NO: 24708 - DNA, 120 bp, synthetic construct
  source 1..120: mol_type = other DNA
ttagagacgaagtttcaccatgttggctaggctggtctcgaactcctggactcaagcgatctgcctgcctctgcttcccaaaatcctgggattacagacatgagccactgtgcctggcct

SEQ ID NO: 24709 - DNA, 120 bp, synthetic construct
  source 1..120: mol_type = other DNA
gattaaagaactgaagctcaaaggtgaactgacctgctcacagttttatgtctagtaatgggccagagctgtgtctagaacccaagtcttcccattttttgtgctcacacacatacacac

SEQ ID NO: 24710 - DNA, 120 bp, synthetic construct
  source 1..120: mol_type = other DNA
atgtatactttttcctgggttgttaattgtatcattagcagttttgctgatactctgggtgtgttgcagatattaaccctttgctgtgggttgtgatggttgtttgttgtcttctgattt

SEQ ID NO: 24711 - DNA, 120 bp, synthetic construct
  source 1..120: mol_type = other DNA
tttcatttgatctgaatagtattaaaataaaatacctggatgaggaagatgaagaggtaaagtatattatggtacttattgctaggtgttcagaatagggatcttatttctccagtgata

SEQ ID NO: 24712 - DNA, 120 bp, synthetic construct; identical to SEQ ID NO: 7624
  source 1..120: mol_type = other DNA

SEQ ID NO: 24713 - DNA, 120 bp, synthetic construct
  source 1..120: mol_type = other DNA
agcttgcagtgagccgagatcgtgccactgcacttcagcctcggtgacagagcgagactccgtctcaaaaaaaaaaaaaggatatcagctttttattttcttttcttttctccttttctt

SEQ ID NO: 24714 - DNA, 120 bp, synthetic construct
  source 1..120: mol_type = other DNA
tgcctcagcctcccaagtagctgggactacaggcatgcaccaccatgcctggctaatttttgtatatttggtagaaatggggtttcaccatgttggccaggctggttttgaactcctggc

SEQ ID NO: 24715 - DNA, 120 bp, synthetic construct
  source 1..120: mol_type = other DNA
cagatgaggaactgaggcacagagaggttttggtacttgcctgaggtcacacactctgggctctctgcttggggctgagggccaaggggggttgtgactgacttctctttcctgaacatc

SEQ ID NO: 24716 - DNA, 120 bp, synthetic construct; identical to SEQ ID NO: 7625
  source 1..120: mol_type = other DNA

SEQ ID NO: 24717 - DNA, 120 bp, synthetic construct
  source 1..120: mol_type = other DNA
tgtcaccaggctggagtgcagtggcgtgatcttggctcactgcaacctctgcctccgggttcaagcaattctcctgcttcagcctcccgagtagcttgggactacagacgtgcgcaacca

SEQ ID NO: 24718 - DNA, 120 bp, synthetic construct
  source 1..120: mol_type = other DNA
ccgggttcacgccattctcctgcctcagcttcctgagtagcttggactacaggcgcccaccagcacgcccagctaatttttttttttctttgtatttttagtagagacggggtttcactg

SEQ ID NO: 24719 - DNA, 120 bp, synthetic construct
  source 1..120: mol_type = other DNA
ttctcatccatacaatggagataatggcagcacccactgcttggtaaggaatattaggtgaacacaggtgcctatgtgggttcctccattttccataaatgttaattcccttatccctca

SEQ ID NO: 24720 - DNA, 120 bp, synthetic construct; identical to SEQ ID NO: 7626
  source 1..120: mol_type = other DNA

SEQ ID NO: 24721 - DNA, 120 bp, synthetic construct
  source 1..120: mol_type = other DNA
ttctcctgtctggctttgaataactctgggtagtgctttaaatctaagctgacataccagtgggatgtgaactgtccttgcaaatgttttgagcccttcctgcgctggcctccaactctg

SEQ ID NO: 24722 - DNA, 120 bp, synthetic construct
  source 1..120: mol_type = other DNA
catgatcttcgctcactgcaagctccgcctcccgggttcaagcaattatcataccttagcctcctgagtagctgggactacaggcgcacaccaccacacccagctaatttttgtagtttt

SEQ ID NO: 24723 - DNA, 120 bp, synthetic construct; identical to SEQ ID NO: 7627
  source 1..120: mol_type = other DNA

SEQ ID NO: 24724 - DNA, 120 bp, synthetic construct
  source 1..120: mol_type = other DNA
gtaccttttttcttgtacaagtcacatgataatgtaaggggtttttttccccatctagagcctgcctggtgggctcatggtccatttgtggaaacatgcatttccctctcctccgccccc

SEQ ID NO: 24725 - DNA, 120 bp, synthetic construct
  source 1..120: mol_type = other DNA
ggagataggagttcctaaaaagcagacaagagattaccgaggggttccccacagctccagcacacagcagctgcaaaaaaaatgcagtggaattactgagggacattatgggcttgatgg

SEQ ID NO: 24726 - DNA, 120 bp, synthetic construct
  source 1..120: mol_type = other DNA
tttaaaatgagtttaacaccaagaaaatagttgtctctatgtccttatttctaatcttcctgctcaaccatgaactgcactaaacacactcagacccatctaacctaaaattgagaaagg

SEQ ID NO: 24727 - DNA, 120 bp, synthetic construct
  source 1..120: mol_type = other DNA
gataaaagggatactttcctaacccagagaggccaaaggagcacaggacgcccaggccgagggcagtgaagcttgcagacccaggctgtgcaacccccacagcaggtctcctcacgggat

SEQ ID NO: 24728 - DNA, 120 bp, synthetic construct; identical to SEQ ID NO: 7628
  source 1..120: mol_type = other DNA

SEQ ID NO: 24729 - DNA, 120 bp, synthetic construct
  source 1..120: mol_type = other DNA
gaactttcttccaactgccgtttgggatggttgattaggacgcgttgctgtggcggtagctcaccaatccaatgcatgcacccgctcctttattaggctatagggccagtggctgcgaca

SEQ ID NO: 24730 - DNA, 120 bp, synthetic construct
  source 1..120: mol_type = other DNA
gaaccttcccatggttcgcaggtcgcggtcttcggagccttcagcctcgtgagcccgaacagtccatagggcggcgccagaccctcttcccaacgccaccctctaaagcctcggctccaa

SEQ ID NO: 24731 - DNA, 120 bp, synthetic construct
  source 1..120: mol_type = other DNA
ggcgagaggccctgacctctggggtagggtggcagcgtccccttgaagatgcggtcccgcctcccatccccaggcgcccggcctctcacaccctcagcaccctgctcacctccagctgaa

SEQ ID NO: 24732 - DNA, 120 bp, synthetic construct; identical to SEQ ID NO: 7629
  source 1..120: mol_type = other DNA

SEQ ID NO: 24733 - DNA, 120 bp, synthetic construct
  source 1..120: mol_type = other DNA
taaaaacttaaacataagatctaaaaccataaaaaccctaaaagaaaacctaggcaataccattcaggacataggcaggggcaaagacttcatgactaaaacaccaaaagcagtggcaac

SEQ ID NO: 24734 - DNA, 120 bp, synthetic construct; identical to SEQ ID NO: 7630
  source 1..120: mol_type = other DNA

SEQ ID NO: 24735 - DNA, 120 bp, synthetic construct
  source 1..120: mol_type = other DNA
gaaacaacaggtgctggagaggatgtggagaaataggaacgcttttacgccattggtgggactgtaaactagttcaaccattgtggaaaacagtgtggtgattcctcaaggatctagaac

SEQ ID NO: 24736 - DNA, 120 bp, synthetic construct
  source 1..120: mol_type = other DNA
agacttggaaccaacccaaatgtccatcaatgatagactggattaagaaaatgtggcacatatacaccataatatactatgcagtcctaaaaaatgatgagttcatgtcctttgtaggga

SEQ ID NO: 24737 - DNA, 120 bp, synthetic construct
  source 1..120: mol_type = other DNA
catcacacaccagagcctattgtggggtggggggaggggggagggatagcattaggagatatccttaatgtaaatgacgagttaacaggtgcagcacaccaacatgacacgtgtatacct

SEQ ID NO: 24738 - DNA, 120 bp, synthetic construct; identical to SEQ ID NO: 7631
  source 1..120: mol_type = other DNA

SEQ ID NO: 24739 - DNA, 120 bp, synthetic construct
  source 1..120: mol_type = other DNA
ggcatggtggtgagcacctgtattcccagctattcaggaggctgaggcaggagaatcatttgaacctggaaggcagaggttgcagtgaaccaagatcatgctactgcactccagcctggg

SEQ ID NO: 24740 - DNA, 120 bp, synthetic construct
  source 1..120: mol_type = other DNA
tcaggagtttgagaccagtctgaccagcatggtgaaaccctgtctctactaaaaatacaaaaattagccgggcatggtggtgcatgcctgtaattccagctactagggaggctgaggcag

SEQ ID NO: 24741 - DNA, 120 bp, synthetic construct; identical to SEQ ID NO: 7632
  source 1..120: mol_type = other DNA

SEQ ID NO: 24742 - DNA, 120 bp, synthetic construct
  source 1..120: mol_type = other DNA
ctaggtctccaccatgtgactccaccgtagactccatgccttcttcttttgcaaagcctcggacacccaaacacctaccaaaagtgggtagggtgccaggacacctccaagtataagtag

SEQ ID NO: 24743 - DNA, 120 bp, synthetic construct
  source 1..120: mol_type = other DNA
gccagcagggtgctgccaataaaaggtagtcacgtggaatttggaatgtggaaaggaggtagaagtcatcctttcctcccctgtagcagcaggcgtgcaggctctggtggtcagctggac

SEQ ID NO: 24744 - DNA, 120 bp, synthetic construct; identical to SEQ ID NO: 7633
  source 1..120: mol_type = other DNA

SEQ ID NO: 24745 - DNA, 120 bp, synthetic construct
  source 1..120: mol_type = other DNA
gtctttttttttttttaaatttatcatttttcttttctcccaggtgttttttccttttttttttttttaacttttattttagattaggggatacatgtgaacgtttgttatatagctaaa

SEQ ID NO: 24746 - DNA, 120 bp, synthetic construct
  source 1..120: mol_type = other DNA
ggcacgatctcggctcactgcaacttccgcctcccaggtttacgccattcttctgcctcagcctcctgagtagctgggactgcaggtgcctgccaccacgtccagctaattttttatgtt

SEQ ID NO: 24747 - DNA, 120 bp, synthetic construct; identical to SEQ ID NO: 7634
  source 1..120: mol_type = other DNA

SEQ ID NO: 24748 - DNA, 120 bp, synthetic construct
  source 1..120: mol_type = other DNA
cttttgttctaacgtttggtccttcaccttggttcctgacacaaggattcctaaatcccttggaattttctgcatgataggagcgtcctttgttctcatgaggtgactcttggtgggctc

SEQ ID NO: 24749 - DNA, 120 bp, synthetic construct
  source 1..120: mol_type = other DNA
aaagcctccagaaaaatccttgaaagacaggacatggagagctgctgggttggcgaacacatccatgtgccgggaggatggtgcaccccaactccacaaggacccttccagacctcaccc

SEQ ID NO: 24750 - DNA, 120 bp, synthetic construct
  source 1..120: mol_type = other DNA
ctgaggagggagttgtggggacctccaatttatagccagttggtcagatgcataggtgatgcttggccttgcacctggggtctgacgtgagggcggtcctgtgtgactgagcccttaacc

SEQ ID NO: 24751 - DNA, 120 bp, synthetic construct
  source 1..120: mol_type = other DNA
catcccttatatctactcctttccagccgaccaagagcagaaccacggctggctccactgccagcatgctgtcccacactgtctcctcaggatgtattcagatgtccggccctctcccta

SEQ ID NO: 24752 - DNA, 120 bp, synthetic construct; identical to SEQ ID NO: 7635
  source 1..120: mol_type = other DNA

SEQ ID NO: 24753 - DNA, 120 bp, synthetic construct
  source 1..120: mol_type = other DNA
gcagtcatgttttgttccacctgaccctgggcacccctccccctcccaggctactggcagggatgggcaccggcctgggagagacagctcatccacaggctggcccagcagaaactctgg

SEQ ID NO: 24754 - DNA, 120 bp, synthetic construct
  source 1..120: mol_type = other DNA
ggtgcatgcctgtagacccccagctactctggaggctgaggcaggaggatcttttgagccctagagcttgaggctgcagtgagctatgaatgcaccactgcactccaggctgggtgacac

SEQ ID NO: 24755 - DNA, 120 bp, synthetic construct
  source 1..120: mol_type = other DNA
gaggctgaggcgggcggatcacgaggtcaggagatcgagaccatcttggttaacatggtgaaaccccatctctactaaaaacaaaaaattagccaggtgtggtgacgggcacctgtagtc

SEQ ID NO: 24756 - DNA, 120 bp, synthetic construct; identical to SEQ ID NO: 7636
  source 1..120: mol_type = other DNA

SEQ ID NO: 24757 - DNA, 120 bp, synthetic construct
  source 1..120: mol_type = other DNA
ggagcacatgaccatccccagctaatttttgtattttttagtagagacggggttttgccatgttggccaggctggtcttgaactcctgacctcaggtggtccacccacctcagcctccca

SEQ ID NO: 24758 - DNA, 120 bp, synthetic construct
  source 1..120: mol_type = other DNA
tggtgacttaacagtgtaattaaagtgcttagcactgtacctgaccacagctggtgcccaacaaacagcagctgccatcattctcaccatccgtatgttattgttattgactcttcaatg

SEQ ID NO: 24759 - DNA, 120 bp, synthetic construct; identical to SEQ ID NO: 7637
  source 1..120: mol_type = other DNA

SEQ ID NO: 24760 - DNA, 120 bp, synthetic construct
  source 1..120: mol_type = other DNA
gtcttattgcccaggcaggagtgcaatggcgtgatcttggctcaccacaacctccacttcccaggttcaagtgattctcctacctcagcctcctgagtagctgggattacaggcatgtgc

SEQ ID NO: 24761 - DNA, 120 bp, synthetic construct
  source 1..120: mol_type = other DNA
tatatatgtatatatgtgtgtatatatatgtatatatgtgtatatatatatgtatatatatgtgtgtgtgtatatttatttatttatttatttattttattttttttggtagacacgggt

SEQ ID NO: 24762 - DNA, 120 bp, synthetic construct
  source 1..120: mol_type = other DNA
agactcaaatatttgttggcccactgaagtcaccacacagataaagacacttttcattctcagtaaggaactttgggagataattggggcaggcagctaaagaacaggtgtcttttgtct

SEQ ID NO: 24763 - DNA, 120 bp, synthetic construct
  source 1..120: mol_type = other DNA
gttagcactgttctttacttcctattactgaactgccagcgttcatttgtgttcagttaggtagattaccaattcttgttcattcagattttcttttgctcactaatgtgtttcatgttc

SEQ ID NO: 24764 - DNA, 120 bp, synthetic construct; identical to SEQ ID NO: 7638
  source 1..120: mol_type = other DNA

SEQ ID NO: 24765 - DNA, 120 bp, synthetic construct
  source 1..120: mol_type = other DNA
ctttgggaggctgaggcgggcagatcacaaggtcaggagatcgagaccatcctggctaagatggtgaaaccctgtctctactaagaatacaaaaagaaattagctgggcatgctggcggg

SEQ ID NO: 24766 - DNA, 120 bp, synthetic construct
  source 1..120: mol_type = other DNA
tccatctcaataaaaaaaataaagtgaattttcctccatcttgtaagggcgaaaagccccctaccatgtctgaatgaacattcatgcatgggcttgagggcttgggaaaaagacagggct

SEQ ID NO: 24767 - DNA, 120 bp, synthetic construct
  source 1..120: mol_type = other DNA
gtatgtggtattatacttgatgaaccaggggagagggcaccaagaacaacgatatttaattgtaaaatctccaccctctgaggatatgtttttaggtctggatgactaattagactggga

SEQ ID NO: 24768 - DNA, 120 bp, synthetic construct; identical to SEQ ID NO: 650
  source 1..120: mol_type = other DNA

SEQ ID NO: 24769 - DNA, 120 bp, synthetic construct
  source 1..120: mol_type = other DNA
ctttgggaggccgaggcaggtggttcatctaaggtctggagttcgagaccagcctggccaacatagcgagagcagctccggtggcgggaggagtggcagcggccaggcagcccagcttcg

SEQ ID NO: 24770 - DNA, 120 bp, synthetic construct
  source 1..120: mol_type = other DNA
atcagcgcaattgtcagctaaacctcctgcaaaagtggaagcgaagccgaaaaaggcagcagcgaaggataaattttcagacacaaaagtgcaaaaaaagggaaaaggggagcaaaggga

SEQ ID NO: 24771 - DNA, 120 bp, synthetic construct; identical to SEQ ID NO: 7640
  source 1..120: mol_type = other DNA

SEQ ID NO: 24772 - DNA, 120 bp, synthetic construct
  source 1..120: mol_type = other DNA
tagctgggactacaggcgcccaccatcacgcccggctaattttttgtatttttagtagagatggggtttcaccgcattagccaggatggtctcgatctcctgacctcgtgatccgcccgc

SEQ ID NO: 24773 - DNA, 120 bp, synthetic construct
  source 1..120: mol_type = other DNA
gaaggagggaatcccacctcattccattttttaagtgtaaatgcttttttttaagaggtgaaatcatttgctggttgtttattttttggtacaaccagaaaattgtgtaggatattgaat

SEQ ID NO: 24774 - DNA, 120 bp, synthetic construct
  source 1..120: mol_type = other DNA
tcttgaacattttaaattacttccatccccatgttgttttgtagtagaattgtttcctaaagaaaacaactccttgattatggctcaccctgttggagttgtgggcactctgtaacatct

SEQ ID NO: 24775 - DNA, 120 bp, synthetic construct; identical to SEQ ID NO: 7641
  source 1..120: mol_type = other DNA

SEQ ID NO: 24776 - DNA, 120 bp, synthetic construct
  source 1..120: mol_type = other DNA
tctcctgccttagcctcccaagtagctgggactacaggcaccctccaccatgcctggctaatttttcgtatttttagtagagacggggtttcactgtattagccaggatggtctcgatct

SEQ ID NO: 24777 - DNA, 120 bp, synthetic construct
  source 1..120: mol_type = other DNA
tactgaccctcaaccaataaaatctcaattatgaaagaaaaaaaaagaaaaataagtaattttacaggaggcctgaggtgggctagggtcactctgtgttctcctcctagggcagggcct

SEQ ID NO: 24778 - DNA, 120 bp, synthetic construct
  source 1..120: mol_type = other DNA
ttctcaccccctcctcattttagatgggaaccatgagggccccgtcgtttaccccgcatcactgttgaagatctcatcctcactggaagactccttgtcctgcagcctcatggctttttt

SEQ ID NO: 24779 - DNA, 120 bp, synthetic construct; identical to SEQ ID NO: 7642
  source 1..120: mol_type = other DNA

SEQ ID NO: 24780 - DNA, 120 bp, synthetic construct
  source 1..120: mol_type = other DNA
gcccgccaccacgcccggctaattttttgtatttttagtagagacggggtttcactgtgttagccaggatggtctcgatctcctgacctcgtgatctgcccgcctcggcctcccaaagtg

SEQ ID NO: 24781 - DNA, 120 bp, synthetic construct
  source 1..120: mol_type = other DNA
tgggattacacgtgtaagccatcccgcctggcctttctagttagaattctgtgaggtttgtataaaaggaatagagtgggggcccaaaaaccagtaagatgagaaagtactgtttgctca

SEQ ID NO: 24782 - DNA, 120 bp, synthetic construct
  source 1..120: mol_type = other DNA
catatcctaccttccatcagccttgaaggagatgagtgccctctccaacacctggtggccttccctaccccttccccaaagcctccaagaaggcccctggcctagcctgatgcccactat

SEQ ID NO: 24783 - DNA, 120 bp, synthetic construct
  source 1..120: mol_type = other DNA
tttcactggagccaggataagcattagggtaagtaactatttttcctgtcttgggcagtttcctcactgacaaatgagggcagagttctaagctctcttctaattctaaaattctaatgt

SEQ ID NO: 24784 - DNA, 120 bp, synthetic construct; identical to SEQ ID NO: 7643
  source 1..120: mol_type = other DNA

SEQ ID NO: 24785 - DNA, 120 bp, synthetic construct
  source 1..120: mol_type = other DNA
gggggtaacaaggtgcttggtgaggagctcctgagactcattgtccaggagaaggaatgtcacaagatcaattgatcagttagggtggagcaggaacaaatcacaatggtggaatgtcat

SEQ ID NO: 24786 - DNA, 120 bp, synthetic construct
  source 1..120: mol_type = other DNA
ttgaggattcttttttatcttcctctgatgctcttctataagaatgactctgttttggaagaaaacgcaattaagattttccatcacaacaaccactatctccaaatctgtattcattcc

SEQ ID NO: 24787 - DNA, 120 bp, synthetic construct; identical to SEQ ID NO: 7644
  source 1..120: mol_type = other DNA

SEQ ID NO: 24788 - DNA, 120 bp, synthetic construct
  source 1..120: mol_type = other DNA
tgcaagctctgcctcctaggttcatgccattctcctgcctcagcctcccgagtagctgggattacaggtgcccgccaccacaccgggctagtttttttttttttttttttctttgtattt

SEQ ID NO: 24789 - DNA, 120 bp, synthetic construct
  source 1..120: mol_type = other DNA
agtagagacggggtttcaccatgttggccaggctggtctcgaacacctgacatcaagtgatccgcccaccttggcctcccaaagtgctaggattacaggcatgagccaccgcacccagcc

SEQ ID NO: 24790 - DNA, 120 bp, synthetic construct; identical to SEQ ID NO: 7645
  source 1..120: mol_type = other DNA

SEQ ID NO: 24791 - DNA, 120 bp, synthetic construct
  source 1..120: mol_type = other DNA
tctcctgcctcaaccacccgagtagctgggattacaggaacccaccaccgtgcctagctaatttttgtgtttttaatagagacggggtttcaccatcttggccaggcaggtctcaaactc

SEQ ID NO: 24792 - DNA, 120 bp, synthetic construct
  source 1..120: mol_type = other DNA
tcatgggtcactgcagcctgaacctcctgggctcaagcaatcctcccaccttagcttcctgagtagctgggactacgggctgtcactactacacctggctaaatgttgtatttttagtag

SEQ ID NO: 24793 - DNA, 120 bp, synthetic construct
  source 1..120: mol_type = other DNA
gactcacttacctctgcagattggctcaaatgtcattattctcaggcttctctcctgtttacaggtgtcctgggccatccagtccagtctcatgatatttgccacccaatgtgctcatgt

SEQ ID NO: 24794 - DNA, 120 bp, synthetic construct
  source 1..120: mol_type = other DNA
acatgaatattcacctcacccagtcctctgggaggtccataagtccctgttttgggaagaatgaagctgagctctagctaaaaaaaaacaactccatttggggatctaaaaattttgcag

SEQ ID NO: 24795 - DNA, 120 bp, synthetic construct; identical to SEQ ID NO: 7646
  source 1..120: mol_type = other DNA

SEQ ID NO: 24796 - DNA, 120 bp, synthetic construct
  source 1..120: mol_type = other DNA
caatgggacagtgaaattcgggtataaggctaatgtgacctcatttaaaatcacaggctggagaggcccagggactttgggtatctatttacatagccaagataacatcagattcaaatt

SEQ ID NO: 24797 - DNA, 120 bp, synthetic construct
  source 1..120: mol_type = other DNA
tatatgaagtgtggtggctcacacctgtaatccccacatttttgggaggccaaggcagatgaatcacttgaggttaggtgtttgagaccagcctggccaacataacaagaccacatctct

SEQ ID NO: 24798 - DNA, 120 bp, synthetic construct
  source 1..120: mol_type = other DNA
aaacaaaaacaaaaaaaccaaaagaggattttcagtgtgttccagaaatgttcctattataaatacatctttgtgctaaaagttttttttccctatatgtaagatttgtttcaggctaga

SEQ ID NO: 24799 - DNA, 120 bp, synthetic construct
  source 1..120: mol_type = other DNA
gtttaaaaaaacttagccgcacatggtggcacgcccctgtccttccagctacttgggaggctgaggagggaagatcacttcagcacaactgttcaaggttgcaatgagctatggttgcac

SEQ ID NO: 24800 - DNA, 120 bp, synthetic construct; identical to SEQ ID NO: 7647
  source 1..120: mol_type = other DNA

SEQ ID NO: 24801 - DNA, 120 bp, synthetic construct
  source 1..120: mol_type = other DNA
aaatatgttgatggtgaattttggtttgtttacagctgtgtcatctgttgcctggctttgctctactgagccaccactgagccttgtatatgtctctctttatttttggttatgtgcact

SEQ ID NO: 24802 - DNA, 120 bp, synthetic construct
  source 1..120: mol_type = other DNA
caagtggagggtagaactgcatttattcatccttttccaacacatctagcaagacgtagtagagacgcaagagaaatttgttaatgtataaaaggagaactccaggccgggtgcagtggc

SEQ ID NO: 24803 - DNA, 120 bp, synthetic construct
  source 1..120: mol_type = other DNA
ctgggcgtggtggctcacacctgtaatcccagcactctgggaggctgaggtgggcggatcacaaggttaggagatcgagaccatcctggctaacacagtgaaaccccatctctactaaaa

SEQ ID NO: 24804 - DNA, 120 bp, synthetic construct; identical to SEQ ID NO: 7648
  source 1..120: mol_type = other DNA

SEQ ID NO: 24805 - DNA, 120 bp, synthetic construct
  source 1..120: mol_type = other DNA
taaataaataaatggagaactccactggttaagagcgaagggaaggattacttctggatttaggagacgaactgctggacaggtcactcgacctgtagagttttgtgcattttggatttt

SEQ ID NO: 24806 - DNA, 120 bp, synthetic construct
  source 1..120: mol_type = other DNA
gaaactcagttgtatgtaagaaaacccaatttcccctgagaaaaagaaggagctgaagtcctttaaaaattaactgcctgtttttctgtggctagtgagccttatctctcctcctttccc

SEQ ID NO: 24807 - DNA, 120 bp, synthetic construct
  source 1..120: mol_type = other DNA
ttaattgaataaccgtctttgtttctcacttctgtaatatgcttccccctgcacagatctcccccaccccaccaaatgcttaaaaggtaacttaactctttgttcagggctcagtccttt

SEQ ID NO: 24808 - DNA, 120 bp, synthetic construct; identical to SEQ ID NO: 7649
  source 1..120: mol_type = other DNA

SEQ ID NO: 24809 - DNA, 120 bp, synthetic construct
  source 1..120: mol_type = other DNA
ctagcactttgggaggctgaggtgggtggatcacctgagctcaggagttctagatcatcctggacaacatggtgaaaccccgtctctactaaaaatacaaaaattagccaggcgtggtgt

SEQ ID NO: 24810 - DNA, 120 bp, synthetic construct; identical to SEQ ID NO: 7650
  source 1..120: mol_type = other DNA

SEQ ID NO: 24811 - DNA, 120 bp, synthetic construct
  source 1..120: mol_type = other DNA
tcaggaggctgaggcaggagaatcgcttgaacctgggaggcgcaggttgcagtgagccaagattgccccactgcactccagcttgggtgacagagctagactccatctcaaaataataat

SEQ ID NO: 24812 - DNA, 120 bp, synthetic construct
  source 1..120: mol_type = other DNA
ctttagaaaatacatcaccccagttcccatccctacctgtctatccacaaaaccaaggcattcctgagagtaattcatttattatactaatataacaagtgtttattaagtatctactac

SEQ ID NO: 24813 - DNA, 120 bp, synthetic construct; identical to SEQ ID NO: 7651
  source 1..120: mol_type = other DNA

SEQ ID NO: 24814 - DNA, 120 bp, synthetic construct
  source 1..120: mol_type = other DNA
tgctaaaatgtaataatccaggaggatattgtagggaaagagcatcagagaggtagctggtaacttttggtaggaacctgccagctattttaaatctttagctttattctggtcttttta

SEQ ID NO: 24815 - DNA, 120 bp, synthetic construct
  source 1..120: mol_type = other DNA
ctcccaaagtactgggattacaggagtgagccaccatgcccggccatctttttaatttttaatgttaattaatttttatagagacaggatctcactatgttgcccatgctggtcttgaat

SEQ ID NO: 24816 - DNA, 120 bp, synthetic construct
  source 1..120: mol_type = other DNA
caggctggagtgcagtggtgtggtcttggctcactgcaacctctgcctctcggattgaagtgattcttgtgcctcagccttccaagtagctgggactacaggcgcatgctgccatgcctg

SEQ ID NO: 24817 - DNA, 120 bp, synthetic construct; identical to SEQ ID NO: 7652
  source 1..120: mol_type = other DNA

SEQ ID NO: 24818 - DNA, 120 bp, synthetic construct
  source 1..120: mol_type = other DNA
ggggaaaccccgcctctgctaaaactacaaaaattaaccaggcatggtggcacgcacctgtagtcctggctactcgggaggctgaggcaggagaattgcttgaacccgggaggcggaagt

SEQ ID NO: 24819 - DNA, 120 bp, synthetic construct
  source 1..120: mol_type = other DNA
aaggatttagtaatactactcttgtaatcatggtgtttctgacgtagcacagggcagtgaaaagagaaacactgaactaagtcagaaggctgggtttctactaccagttgtgtatataag

SEQ ID NO: 24820 - DNA, 120 bp, synthetic construct
  source 1..120: mol_type = other DNA
acaacctgagatgacttgtaccaatgtgggtattattactgggaccaaatgtgactttaaaaagaaaaacaaccttgacaaagaaaactctgattggttactaaatccctatttctgaga

SEQ ID NO: 24821 - DNA, 120 bp, synthetic construct; identical to SEQ ID NO: 7653
  source 1..120: mol_type = other DNA

SEQ ID NO: 24822 - DNA, 120 bp, synthetic construct
  source 1..120: mol_type = other DNA
tccaatacggataagtgactggaaaaagcagctaggtttaggttgaaaaacaacaacccaccggggaacacattttagcaaattcttctgaaagtcaaaaatgttacagtcataggtaaa

SEQ ID NO: 24823 - DNA, 120 bp, synthetic construct
  source 1..120: mol_type = other DNA
ccacaaataacactgtttccagtcatgatcaggaatcacatattaagacataactgcaaattgtgctatactgggtactgtattaaaaggaagtgaaatatggtccccatcctagaagtt

SEQ ID NO: 24824 - DNA, 120 bp, synthetic construct
  source 1..120: mol_type = other DNA
caagaacatcctgacaacatggtgaaaccccgtctctactaagaatacaaaattagctgggcatggtggcacacgcctgtaatcctagctactcaggaggctcaggcaggagaagcactt

SEQ ID NO: 24825 - DNA, 120 bp, synthetic construct
  source 1..120: mol_type = other DNA
gcctgtaatcccagcactttgggaggccgaggcaggcagatcacctgaggctgggagtttgagaccagcctgatcaacatggagacaccccgtctctactaagaaatacaaaattagctg

SEQ ID NO: 24826 - DNA, 120 bp, synthetic construct; identical to SEQ ID NO: 7654
  source 1..120: mol_type = other DNA

SEQ ID NO: 24827 - DNA, 120 bp, synthetic construct
  source 1..120: mol_type = other DNA
taaatggatccaaatgccacactattgaggatttttttgatcactctgattgtcatgagtaagttgtgctttttcaaaagcagttttttcctacaatgtcatttcctgcttctctggctc

SEQ ID NO: 24828 - DNA, 120 bp, synthetic construct
  source 1..120: mol_type = other DNA
aacttgcattttccttaatctgattgacatgactccaaatatgaaaaacaactttcataaagcacaaaagaaaatttccttgaatttacccttttttattgtgggtaagaggcaataggt

SEQ ID NO: 24829 - DNA, 120 bp, synthetic construct; identical to SEQ ID NO: 7655
  source 1..120: mol_type = other DNA

SEQ ID NO: 24830 - DNA, 120 bp, synthetic construct
  source 1..120: mol_type = other DNA
atcaagattttcagaccatggctgggtgcagaggctcatacctgtaatcccagcactttgagaggccaaggtgggtagatcacttgaggtcaggagtttgagaccagcgtggccaacatg

SEQ ID NO: 24831 - DNA, 120 bp, synthetic construct
  source 1..120: mol_type = other DNA
tggcgaggttgaggctgcagtgagctgtgatagcaccactgcactccagcctctcgacagagatcctgtataaaaaaacctctgcatttcactgtatgtaaattatacctcgattcaaaa

SEQ ID NO: 24832 - DNA, 120 bp, synthetic construct
  source 1..120: mol_type = other DNA
acccccacctccctcccggacggggtggctgccgggctgagacgctcctcacttcccagacggggtggctgccaggcggaggggctcctcacttctcagacggggcggttgccaggtaga

SEQ ID NO: 24833 - DNA, 120 bp, synthetic construct
  source 1..120: mol_type = other DNA
aagagtcatcaccactccctaatctcaagtacccagggacacaaacactgcggaaggccgcagggtcctctgcctaggaaaaccagagacctttgttcacttgtttatctgctgaccttc

SEQ ID NO: 24834 - DNA, 120 bp, synthetic construct; identical to SEQ ID NO: 7656
  source 1..120: mol_type = other DNA

SEQ ID NO: 24835 - DNA, 120 bp, synthetic construct
  source 1..120: mol_type = other DNA
aggctcacaccattctcctgcctcagcctcccaagcagctgggactacaggcacccgccaccacacctggctaatttttttgtatttttttagtagagatggggtttcacctgtagcagg

SEQ ID NO: 24836 - DNA, 120 bp, synthetic construct
  source 1..120: mol_type = other DNA
tgtcccttttaaggactcacaagtctaagggggtgtgcgtgagagggtcgtgatcgattgagcaagcaggaggtacgtgggtacgtgactgggggctgcacgcaccagtaattagattgg

SEQ ID NO: 24837 - DNA, 120 bp, synthetic construct; identical to SEQ ID NO: 7657
  source 1..120: mol_type = other DNA

SEQ ID NO: 24838 - DNA, 120 bp, synthetic construct
  source 1..120: mol_type = other DNA
atgaagctttttatcatttgaagaagtacaggtagcaaacgagggagcagtaagtaggttcctattactattataactcttattataagagttttaaatcctcctagcgctgggaaccat

SEQ ID NO: 24839 - DNA, 120 bp, synthetic construct
  source 1..120: mol_type = other DNA
caattagtaaggttaaatttcctacagacctctccttcagctgctagcaagtagtcgagagctaatctattttgatagatagcatttctcatctgagtttcttgctgggccagaatagtc

SEQ ID NO: 24840 - DNA, 120 bp, synthetic construct
  source 1..120: mol_type = other DNA
taatactgtatgattctctcagggggccatttatcattgtttcaatttcttatagctatgcttttcacgggaagcatagacagggaagcccaggagttctcctgtttttatggacagtag

SEQ ID NO: 24841 - DNA, 120 bp, synthetic construct; identical to SEQ ID NO: 7658
  source 1..120: mol_type = other DNA

SEQ ID NO: 24842 - DNA, 120 bp, synthetic construct
  source 1..120: mol_type = other DNA
ttgatctgctattacagttcctccacatacataacatgaagtgacagtgagagactgggctacatgctcggctaattgcaaaaacaaatttcttgtttttcctggaaattctgttattgg

SEQ ID NO: 24843 - DNA, 120 bp, synthetic construct
  source 1..120: mol_type = other DNA
acgctactcttttttccagcgaggatcaaggggattggttattactagctctaaggggttacattgtcccttagcacaggaagggccatttttttcctttctgaaggtggactggatcct

SEQ ID NO: 24844 - DNA, 120 bp, synthetic construct
  source 1..120: mol_type = other DNA
ttaagagaaccacactttattcctaacttattactattaatgacagcacaggcatcaaattttaaggtgacttgtttgggcacccctttttcttctgttttggctaacactttactcata

SEQ ID NO: 24845 - DNA, 120 bp, synthetic construct
  source 1..120: mol_type = other DNA
tacagaataacattatacaaacaagttatttttagagttccagtacacttataataaccataaaataataggactgtagcaaccttttgtcctacctcagtgacttgatgtatacactgg

SEQ ID NO: 24846 - DNA, 120 bp, synthetic construct; identical to SEQ ID NO: 7659
  source 1..120: mol_type = other DNA

SEQ ID NO: 24847 - DNA, 120 bp, synthetic construct
  source 1..120: mol_type = other DNA
gattttcacatagcaagctttggtacttggttaatctagcatttgtaaccaatgaggtcctttggtagtcattaaagttaccacagcatggggggcctttatattcaggttttcctaagg

SEQ ID NO: 24848 - DNA, 120 bp, synthetic construct
  source 1..120: mol_type = other DNA
ggcctcacagtatgggttaaaactccaactgccattttttctctttctgacacatagagtgtaaagagttttgtcaggtcaggtagcctcagggctgggaccaacatgaggttttctttt

SEQ ID NO: 24849 - DNA, 120 bp, synthetic construct
  source 1..120: mol_type = other DNA
ttaaattgatctggtattcttcgtgggactccaattgcatctaaatagacatgagagtcgaaagacccataaggggcttctctcgctttacaatgtctttctttttttccttctggttga

SEQ ID NO: 24850 - DNA, 120 bp, synthetic construct
  source 1..120: mol_type = other DNA
acaagggctgactgattgataagctcttgaaaattcttaagctaactgcatcctttcaggtctccaaggaacgctaagtttcctccctgttgtgagagacatgaagtgaacttagtgttg

SEQ ID NO: 24851 - DNA, 120 bp, synthetic construct; identical to SEQ ID NO: 7660
  source 1..120: mol_type = other DNA

SEQ ID NO: 24852 - DNA, 120 bp, synthetic construct
  source 1..120: mol_type = other DNA
caaaaactggttggggcagtccattcttgctctttagtggtccacagaacgttggaccaactacggcataaaaactctacatcaggggacaagactcctggttggcactggggtctttat

SEQ ID NO: 24853 - DNA, 120 bp, synthetic construct
  source 1..120: mol_type = other DNA
gtataacaaggcaagcattaaatgcaatagtttgaggtgaaattgacttggttatgttaataactagatggtcagcaatagcacgaggaaagaaagaagagtaatagaatagatgaaaag

SEQ ID NO: 24854 - DNA, 120 bp, synthetic construct; identical to SEQ ID NO: 7661
  source 1..120: mol_type = other DNA

SEQ ID NO: 24855 - DNA, 120 bp, synthetic construct
  source 1..120: mol_type = other DNA
gactttatagtccttagtgcctttttcctgagaaatttcctttagcacctatttttattagtttttaaaccaaagaaagccaaataccattttacatttaacagtgcttctcgtatgatt

SEQ ID NO: 24856 - DNA, 120 bp, synthetic construct
  source 1..120: mol_type = other DNA
ttttatagattctttttaaccctttataatttttgcaaaagagcaggttggtgctttaagaaaaaacctgttatgcttttactttaatgtccagttcacagaaaaactggatgatacttc

SEQ ID NO: 24857 - DNA, 120 bp, synthetic construct
  source 1..120: mol_type = other DNA
ccttatgcctccttacaattcttttaccaaagatatattttacttttcttatacaccttgcatataaactgttttttttttcaacagttttacattcaggaggcctagttacttttaaat

SEQ ID NO: 24858 - DNA, 120 bp, synthetic construct; identical to SEQ ID NO: 7662
  source 1..120: mol_type = other DNA

SEQ ID NO: 24859 - DNA, 120 bp, synthetic construct
  source 1..120: mol_type = other DNA
gtgcacatgtaccctaaaacttaaagtataataataataataataaaaagaaaaccttctaagtttgggattttaattatcctttgctattaataagaccttgttttgtctaaattagaa

SEQ ID NO: 24860 - DNA, 120 bp, synthetic construct
  source 1..120: mol_type = other DNA
tgtgtgtgtgtgtgtgtgtgtctctctctctctctctctctctatccttgactctctgtctgtctcttcctgtctcttcctctctctcttttcctcttttcctctctgtctctttccttt

SEQ ID NO: 24861 - DNA, 120 bp, synthetic construct
  source 1..120: mol_type = other DNA
actggtctgggttccttggcttataggttaccttgtgccatacctttgaaacaagggacctgtccaggcttccttctaatggccaacctacctctaatgctggccagtctatcttacaca

SEQ ID NO: 24862 - DNA, 120 bp, synthetic construct; identical to SEQ ID NO: 7663
  source 1..120: mol_type = other DNA

SEQ ID NO: 24863 - DNA, 120 bp, synthetic construct
  source 1..120: mol_type = other DNA
gttcccaagaccaatcctgtcaagcaattcaaaccaaaaccaaagtgccaataaaggcacgccatgggtgatcaggccatgcttccactcaaatggagtgggcaagtttcaaagactact

SEQ ID NO: 24864 - DNA, 120 bp, synthetic construct
  source 1..120: mol_type = other DNA
aatgcctaaccaggagcgccctcaggatccgtgttgctcgggctggttggagtcccctgcagggatgttccacagggcaggtttaagccgcctaaggagctgccttgaccatccgccatt

SEQ ID NO: 24865 - DNA, 120 bp, synthetic construct
  source 1..120: mol_type = other DNA
agccaagctccccgagtgagcaattcctgtcccttttaagggctcacaactctaagggggtgcacgtgagagggtcgtgatcaattgagcaagcagggggtacgtgactgggggctgcat

SEQ ID NO: 24866 - DNA, 120 bp, synthetic construct
  source 1..120: mol_type = other DNA
cccagggtgtggcacctggggtgtctgcttgtggatgtcatttctgccctttagtttttactttttctttctttggaggcagaaattgggcataagacaatatgaggggtggtctcctcc

SEQ ID NO: 24867 - DNA, 120 bp, synthetic construct; identical to SEQ ID NO: 7664
  source 1..120: mol_type = other DNA

SEQ ID NO: 24868 - DNA, 120 bp, synthetic construct
  source 1..120: mol_type = other DNA
cctaatcttattagacatgtcttttcctcccttctatgtaaggtcaattctgttcatttgcataggagataatcatataggaatcccaaattaataccctcttctggtgacttaccagat

SEQ ID NO: 24869 - DNA, 120 bp, synthetic construct; identical to SEQ ID NO: 7665
  source 1..120: mol_type = other DNA

SEQ ID NO: 24870 - DNA, 120 bp, synthetic construct
  source 1..120: mol_type = other DNA
gagctgaggcaggagaatcgcttgaacccacgagtcagaggttgcggtgagcccaaatcacgccattacactccagcctgggcaacaagagcgaagctccgtctcaaaaataaataaaat

SEQ ID NO: 24871 - DNA, 120 bp, synthetic construct
  source 1..120: mol_type = other DNA
ttagacaatataaattctgtattttttcacatattgcttccaaccctttgggtcttttcctttctccaagaaagagaaagctacaggggagtgactgaccgggtaagtggtgagctttct

SEQ ID NO: 24872 - DNA, 120 bp, synthetic construct
  source 1..120: mol_type = other DNA
tccccctcaagcacatccctgccggcagcatctgttactactgacgctcctctacttccctcttgcgctttctcaatagcacaaatggatccagttcttaagttctccctcccacaaaat

SEQ ID NO: 24873 - DNA, 120 bp, synthetic construct
  source 1..120: mol_type = other DNA
gccacccaggctggagtgcaatggcgcgatctcggctcactgcaacctccgcctcctgggttcaagcgattctcctgcctcagctcctgagtagctggcgcgcgccaccacgcccggcta

SEQ ID NO: 24874 - DNA, 120 bp, synthetic construct; identical to SEQ ID NO: 7666
  source 1..120: mol_type = other DNA

SEQ ID NO: 24875 - DNA, 120 bp, synthetic construct
  source 1..120: mol_type = other DNA
cgcataagaatacccatctgcctagcttcggaaattcactttcccccgcccgtcccccggagcatcccttgggcccctgtccctttcccggggctcttctaccttaacccagagcagagg

SEQ ID NO: 24876 - DNA, 120 bp, synthetic construct
  source 1..120: mol_type = other DNA
gcagatgtggctcccaatgttgacgttggccaggacctttgcaaacaagccaggccaaaaagtttcaatatttacactggctgctttaataagggcattgatcttatcctccgtaaaggt

SEQ ID NO: 24877 - DNA, 120 bp, synthetic construct; identical to SEQ ID NO: 7667
  source 1..120: mol_type = other DNA

SEQ ID NO: 24878 - DNA, 120 bp, synthetic construct; identical to SEQ ID NO: 7668
  source 1..120: mol_type = other DNA

SEQ ID NO: 24879 - DNA, 120 bp, synthetic construct
  source 1..120: mol_type = other DNA
ttaagggtcagcgagaagagaacacacactccagctcccgctttattcggtcagatactgacggttgggatgcctgacaaggaatttcctttcgccacactgagaaatacccgcagcggc

SEQ ID NO: 24880 - DNA, 120 bp, synthetic construct
  source 1..120: mol_type = other DNA
gcactgctgcgcctctgctgcgcctcgggtgtcttttgcggcggtgggtcgccgccgggagaagcgtgaggggacagatttgtgaccggcgcggtttttgtcagcttactccggccaaaa

SEQ ID NO: 24881 - DNA, 120 bp, synthetic construct
  source 1..120: mol_type = other DNA
ttcttgcccttttgtctctgccaacccccacccatgcctgagagaaaggtccttgcccgaaggcagattttcgccaagcaaattcgagccccgccccttccctgggtctccatttcccgc

SEQ ID NO: 24882 - DNA, 120 bp, synthetic construct; identical to SEQ ID NO: 7669
  source 1..120: mol_type = other DNA

SEQ ID NO: 24883 - DNA, 120 bp, synthetic construct
  source 1..120: mol_type = other DNA
gattgaaactaaatcgtatgaaaatcctcttctctagtcgcactagccacgtttcgagtgcttaatgtggctagtggcaccggtttggacagcacagctgtaaaatgttcccatcctcac

SEQ ID NO: 24884 - DNA, 120 bp, synthetic construct
  source 1..120: mol_type = other DNA
tcacataataaggaatgcatccctgtgtaagtgcattttggtcttctgttttgcagacttatttaccaagcattggaggaatatcgtaggtaaaaatgcctattggatccaaagagaggc

SEQ ID NO: 24885 - DNA, 120 bp, synthetic construct
  source 1..120: mol_type = other DNA
agaaagtgttttctaaaaaatgcttgctaaaaacccagtacgtcacagtgttgcttagaaccataaactgttccttatgtgtgtataaatccagttaacaacataatcatcgtttgcagg

SEQ ID NO: 24886 - DNA, 120 bp, synthetic construct
  source 1..120: mol_type = other DNA
caaatcagaagcattaatgttactttatggcagaagttgtccaactttttggtttcagtactccttatactcttaaaaatgatctaggacccccggagtgcttttgtttatgtagcttac

SEQ ID NO: 24887 - DNA, 120 bp, synthetic construct; identical to SEQ ID NO: 7670
  source 1..120: mol_type = other DNA

SEQ ID NO: 24888 - DNA, 120 bp, synthetic construct
  source 1..120: mol_type = other DNA
taaaaataatgaaagctaacccattgcatattatcacaacattcttaggaaaaataactttttgaaaacaagtgagtggaatagtttttacatttttgcagttctctttaatgtctggct

SEQ ID NO: 24889 - DNA, 120 bp, synthetic construct
  source 1..120: mol_type = other DNA
ggtatttttccttgtactttgcatagatttttcaaagatctaatagatataccataggtctttcccatgtcgcaacatcatgcagtgattatttggaagatagtggtgttctgaattata

SEQ ID NO: 24890 - DNA, 120 bp, synthetic construct
  source 1..120: mol_type = other DNA
gtcttttaagattgggtagaaatgagccactggaaattctaattttcatttgaaagttcacattttgtcattgacaacaaactgttttccttgcagcaacaagatcacttcattgatttg

SEQ ID NO: 24891 - DNA, 120 bp, synthetic construct
  source 1..120: mol_type = other DNA
aaaattgcttgttcagatcacagctcaacatgagtgcttttctaggcagtattgtacttcagtatgcagaagtgctttatgtatgcttcctattttgtcagagattattaaaagaagtgc

SEQ ID NO: 24892 - DNA, 120 bp, synthetic construct; identical to SEQ ID NO: 7671
  source 1..120: mol_type = other DNA

SEQ ID NO: 24893 - DNA, 120 bp, synthetic construct
  source 1..120: mol_type = other DNA
gatgaatagctcacaatacaaatttgtcatttccctttaagagagaattcccattttatgtgagagtccacatgttcctcatacccatagtttgccacatcttgagtactcttcagaatt

SEQ ID NO: 24894 - DNA, 120 bp, synthetic construct
  source 1..120: mol_type = other DNA
ccgcctcctgggttcaagtgattctcctgtggcagcctccggagtagctgggactacaggcgtgtgccaccatgcttggctaattttttgtgtttttagtaaagatggggtttcaacgtg

SEQ ID NO: 24895 - DNA, 120 bp, synthetic construct
  source 1..120: mol_type = other DNA
gtgaatagtttttgattccgaaccatgaataataagaaaataaataaaatttaaatgaaaataaaagctaatatatacagcttttaataatatagttaaatgccatcttgtaacttttgt

SEQ ID NO: 24896 - DNA, 120 bp, synthetic construct; identical to SEQ ID NO: 7672
  source 1..120: mol_type = other DNA

SEQ ID NO: 24897 - DNA, 120 bp, synthetic construct
  source 1..120: mol_type = other DNA
aaaggaaaccatcttataatcagctggcttcaactccaataatattcaaagagcaagggctgactctgccgctgtaccaatctcctgtaaaagaattagataaattcaaattagacttag

SEQ ID NO: 24898 - DNA, 120 bp, synthetic construct
  source 1..120: mol_type = other DNA
cattaattgtgtcatgctgggcaaatcagtctctctggcctctttttcctcactcgaaaaatggagacgatgaaaataatgtctcataggtttggattaaattaaataatgtaggtactt

SEQ ID NO: 24899 - DNA, 120 bp, synthetic construct
  source 1..120: mol_type = other DNA
tttctgcaagctatcacagaggacagagattattttaccgatatactataagtatcatgatttggaaggagtttccctggcgtaggtgccgcatgtttctaagcaattatgtaataagat

SEQ ID NO: 24900 - DNA, 120 bp, synthetic construct
  source 1..120: mol_type = other DNA
aaggttgaatgtagtatgtgctaagagaaaaatataaaaaagtataatgagagttgagaagaaagagcaaatagtattgggcaaagttaggcaattattcctttgagctaaaccttgaag

SEQ ID NO: 24901 - DNA, 120 bp, synthetic construct; identical to SEQ ID NO: 7673
  source 1..120: mol_type = other DNA

SEQ ID NO: 24902 - DNA, 120 bp, synthetic construct
  source 1..120: mol_type = other DNA
atatggctttcaagttcctttgtgatcaggcccctgatttacactcttggctcagcttgccatattcatcctctcacctatcttcatttgccattcattcctactgaatttcttttcgtt

SEQ ID NO: 24903 - DNA, 120 bp, synthetic construct
  source 1..120: mol_type = other DNA
tttctgcttctgagaaatacttcctgtctgccctcgttgagcttctagtgaaggagacatacataagcaattatagtgtgatacatgctttgaaagaaattcatggctatagggagtgca

SEQ ID NO: 24904 - DNA, 120 bp, synthetic construct; identical to SEQ ID NO: 7674
  source 1..120: mol_type = other DNA

SEQ ID NO: 24905 - DNA, 120 bp, synthetic construct
  source 1..120: mol_type = other DNA
gtgatagagacaagtgcctgaattacagtaataacagtgaaagtaaatatggaacataaaactataggaccttgcagtagtctagatatggaggattcaaaaaaaggaacaaatgacagg

SEQ ID NO: 24906 - DNA, 120 bp, synthetic construct
  source 1..120: mol_type = other DNA
atgaataagatgtcctttgacctctaagtactcagtctcgtaagcacgtcttgtaagcacatcttggttgcttccataaaaataaatacactagtgtgatatgttataagagcatgtacc

SEQ ID NO: 24907 - DNA, 120 bp, synthetic construct
  source 1..120: mol_type = other DNA
ctagaattgatctataaccaaggaaggatagtaaggaattaataaggccactctcaactcactgcaaaggagttaactttttgaaggctgtaatacataaatctgctgactagtctcttg

SEQ ID NO: 24908 - DNA, 120 bp, synthetic construct; identical to SEQ ID NO: 7675
  source 1..120: mol_type = other DNA

SEQ ID NO: 24909 - DNA, 120 bp, synthetic construct
  source 1..120: mol_type = other DNA
tttcattgctgaactaaaatggatgtgttattattagctgaactccttagtttactttagagttcaccctttgtatggttctatggattttgacaaattgtataatgtcgtatatctgcc

SEQ ID NO: 24910 - DNA, 120 bp, synthetic construct
  source 1..120: mol_type = other DNA
ccctggcagccactgatctttttactgtctgtatagttttgccttttccagaatgtcatgtagttggaatcatacagaatatagcattttcagactggcttctttcacttagcaatatgc

SEQ ID NO: 24911 - DNA, 120 bp, synthetic construct
  source 1..120: mol_type = other DNA
gtgataagcattgtttctatagattatagattaactgaaagtattccttaggggaaataaagggctgggccgaagtaaagggatgggtctggctagttatctgcagcaggagaatgtcct

SEQ ID NO: 24912 - DNA, 120 bp, synthetic construct
  source 1..120: mol_type = other DNA
gtgtcatggccatcacgaacatgtcacagtgctgcagagattttgtttatggccagttttggggccagttcccaacagcaatatgtgtttaaggttcttccatgtcttttaatgatttca

SEQ ID NO: 24913 - DNA, 120 bp, synthetic construct; identical to SEQ ID NO: 7676
  source 1..120: mol_type = other DNA

SEQ ID NO: 24914 - DNA, 120 bp, synthetic construct
  source 1..120: mol_type = other DNA
ggtacctcattgtttgttttatttaattttttttttttttttttggagatgaaatctcgctttgtcgcccaggctggagtgcagtggcgtgatcttggctcactgcaagctccgcctccc

SEQ ID NO: 24915 - DNA, 120 bp, synthetic construct
  source 1..120: mol_type = other DNA
tgtatttttagtagagacggggtttcactgtgttagccaggatggtcttgatctcctgacctcgtgatccgctcgcctcggcctcccaaagtgctgggattacaggcgtgagccatcatg

SEQ ID NO: 24916 - DNA, 120 bp, synthetic construct
  source 1..120: mol_type = other DNA
agagaaggaggttggatattttgttgaagtggggtttttaagttacacatccatttgctttattagtgattatgtctagtccatgttaacttgaaaaatgagactataatgagacatttt

SEQ ID NO: 24917 - DNA, 120 bp, synthetic construct; identical to SEQ ID NO: 7677
  source 1..120: mol_type = other DNA

SEQ ID NO: 24918 - DNA, 120 bp, synthetic construct
  source 1..120: mol_type = other DNA
tgtctgcaactcactttgtctaattatatccaatttattcatccagtcaatatttcaggagtgactaatataccagacatttttgtagttgctagggatacagtgacaaataagacaaaa

SEQ ID NO: 24919 - DNA, 120 bp, synthetic construct; identical to SEQ ID NO: 685
  source 1..120: mol_type = other DNA

SEQ ID NO: 24920 - DNA, 120 bp, synthetic construct; identical to SEQ ID NO: 7678
  source 1..120: mol_type = other DNA

SEQ ID NO: 24921 - DNA, 120 bp, synthetic construct
  source 1..120: mol_type = other DNA
ggaatacagtggcatgatcatagctcaagctcctgggctcaagtgatcctcccgcctcagcctctcaagtagctaggactacaggcatatcaccacaccagcgttttctttgtagaggca

SEQ ID NO: 24922 - DNA, 120 bp, synthetic construct
  source 1..120: mol_type = other DNA
attataagccactgtgctcggggcatcctttttggggggtaatcagcaaactgaaaaacctcttcttacaactccctatacattctcattcccagtatagaggagactttttgtttttaa

SEQ ID NO: 24923 - DNA, 120 bp, synthetic construct
  source 1..120: mol_type = other DNA
aaaatggatcaagcagatgatgtttcctgtccacttctaaattcttgtcttagtgaaaggtatgatgaagctattatattaaaatatttaaatgaaacattttcctacatatatttgttc

SEQ ID NO: 24924 - DNA, 120 bp, synthetic construct; identical to SEQ ID NO: 7679
  source 1..120: mol_type = other DNA

SEQ ID NO: 24925 - DNA, 120 bp, synthetic construct
  source 1..120: mol_type = other DNA
tctcagctcactgcaagctccgcctcccgggttcacgccattctcctgcctcagcctcccaagtagctgggactacaggcgcccgccaccatgcccggctaattttttgtatttttagta

SEQ ID NO: 24926 - DNA, 120 bp, synthetic construct
  source 1..120: mol_type = other DNA
acaaaatttttgagtttaaaatacacggtttccagcagctgaaatttgtgagtacatatgtgttggcattttaaacatcacttgatgattatttaatgcttcatgagagatttacttttt

SEQ ID NO: 24927 - DNA, 120 bp, synthetic construct
  source 1..120: mol_type = other DNA
tttgttttattttagtcctgttgttctacaatgtacacatgtaacaccacaaagagataagtcaggtatgattaaaaacaatgctttttattcttagaatactagaaatgttaataaaaa

SEQ ID NO: 24928 - DNA, 120 bp, synthetic construct
  source 1..120: mol_type = other DNA
aatttgacaatagcgttatacctttgccctgagatttacaaatctgtacctagcattctgcctcatacaggcaattcagtaaacgttaagtgaaataaagagtgaatgaaaaaataatat

SEQ ID NO: 24929 - DNA, 120 bp, synthetic construct; identical to SEQ ID NO: 7680
  source 1..120: mol_type = other DNA

SEQ ID NO: 24930 - DNA, 120 bp, synthetic construct
  source 1..120: mol_type = other DNA
ccagtggtgtcaagcattatgttttagtacgatgtgattaacgtagaatagcttacaaatattcctttactggcctatataagcgtttaagaggcagtatttggtgtgactgaattcttt

SEQ ID NO: 24931 - DNA, 120 bp, synthetic construct
  source 1..120: mol_type = other DNA
acaagtgtaattacacaactatgtgataaactgcaatatttatccattcattaaactgtaaactctttgcagtctcaccacagtttctcttactaggatctagaaatatttcctattgta

SEQ ID NO: 24932 - DNA, 120 bp, synthetic construct; identical to SEQ ID NO: 7681
  source 1..120: mol_type = other DNA

SEQ ID NO: 24933 - DNA, 120 bp, synthetic construct
  source 1..120: mol_type = other DNA
tgggcgtggtggcagacacctgtagtcccagctactcaggaggctgaggcaggagaatggcatgaacccgggaggcggatcttgtagtgatctgagatcatcacgccactgcactccagc

SEQ ID NO: 24934 - DNA, 120 bp, synthetic construct
  source 1..120: mol_type = other DNA
ctattttttttttttttaattgagacaaggttcttctctgttgcccaggctggagtgcagtggcaccgtcgcagttcactgcagcctcaacctcccaggctcaattaatctttcttcctc

SEQ ID NO: 24935 - DNA, 120 bp, synthetic construct
  source 1..120: mol_type = other DNA
aattcctgagctcaagcagccaccacacccacctgtgaccattcttttttatttttatgagataataaacatacaagtttaaagaaatgtctgtacataaatgtgattatagtacaaaca

SEQ ID NO: 24936 - DNA, 120 bp, synthetic construct
  source 1..120: mol_type = other DNA
ttttttttttttttgaggcggagtcttgcccttttgcccaggctggagtacagtggcaccatctcggctcacagcaacctctgccttctgggttcaggcgattctcctgccttagactcc

SEQ ID NO: 24937 - DNA, 120 bp, synthetic construct; identical to SEQ ID NO: 7682
  source 1..120: mol_type = other DNA

SEQ ID NO: 24938 - DNA, 120 bp, synthetic construct
  source 1..120: mol_type = other DNA
tttaatgaggtgtcctgtattttatccagaagtcctacacacagtaaagtttgttttgtaaaacttttttacttaacctttgtgtgcccatgtgtgtgtgcagtcataaagtgtgtgtgt

SEQ ID NO: 24939 - DNA, 120 bp, synthetic construct
  source 1..120: mol_type = other DNA
gcttaatttattcccaaaccagtattacattttgtttattctagcaaaatagcattctgttttgattcctctttagctgggagtaagttaaccctattctgttgcttagatgaaataata

SEQ ID NO: 24940 - DNA, 120 bp, synthetic construct; identical to SEQ ID NO: 7683
  source 1..120: mol_type = other DNA

SEQ ID NO: 24941 - DNA, 120 bp, synthetic construct
  source 1..120: mol_type = other DNA
tgataatatacaatacacataaatttttatcttacagtcagaaatgaagaagcatctgaaactgtatttcctcatgatactactgctgtaagtaaatatgacattgattagactgttgaa

SEQ ID NO: 24942 - DNA, 120 bp, synthetic construct
  source 1..120: mol_type = other DNA
cttcctgtgaaactctgctgtctctctgttaaagttgcatatatacaatatataccgtagtcccctattcatggggtatacattccaatatcccccagtgaatgcttgaaaccttagata

SEQ ID NO: 24943 - DNA, 120 bp, synthetic construct
  source 1..120: mol_type = other DNA
agagattaacaagaactaataataaaataggacaattataacaaaataccgtaataaaagttatgtgaatgttgtctctctgtctcaaaatatcttattgttctgtactcatgtggcagc

SEQ ID NO: 24944 - DNA, 120 bp, synthetic construct; identical to SEQ ID NO: 7684
  source 1..120: mol_type = other DNA

SEQ ID NO: 24945 - DNA, 120 bp, synthetic construct
  source 1..120: mol_type = other DNA
caatttttttcctttccttaagtcgagaactttcactgtttcaattaaaggaagcactttatggcttctttttggcatatttgaattgccagcatcattatacttgtgctttggggccat

SEQ ID NO: 24946 - DNA, 120 bp, synthetic construct
  source 1..120: mol_type = other DNA
ggacaaagggatgattcatgtcccaagtgggatggagcaagatggtgcaagtttttttttctccatttccattttcctttcctaagatttccacatcctagtggtgcaagatttcatcac

SEQ ID NO: 24947 - DNA, 120 bp, synthetic construct
  source 1..120: mol_type = other DNA
gataaggggggactactactatatgtgcattgagagtttttatactagtgattttaaactataatttttgcagaatgtgaaaagctatttttccaatcatgatgaaagtctgaagaaaaa

SEQ ID NO: 24948 - DNA, 120 bp, synthetic construct
  source 1..120: mol_type = other DNA
tttttttttgaggtggagtcttgctctgtcacccgtgatctcggtttaccgcaacctctgcctcccgtgctcaagcgatcctgcctcagcttgccaagtagctgagattacaagcatgca

SEQ ID NO: 24949 - DNA, 120 bp, synthetic construct; identical to SEQ ID NO: 7685
  source 1..120: mol_type = other DNA

SEQ ID NO: 24950 - DNA, 120 bp, synthetic construct
  source 1..120: mol_type = other DNA
ggaaaaaaagagaaactaatttgatttcgatgacagtatttaaatactgtgtaagacagtactatttaatatgtggttgtgacacaaaaacaaagcctattgaaaattttcagagacaat

SEQ ID NO: 24951 - DNA, 120 bp, synthetic construct
  source 1..120: mol_type = other DNA
tgtatgtctgtataactgtgtaggatttgatatctgtttttgtctgtgtggtatcatgtacgtatgtatatgcatatgtaaaatcagatttacccttgttatagggccacagaattgatt

SEQ ID NO: 24952 - DNA, 120 bp, synthetic construct; identical to SEQ ID NO: 7686
  source 1..120: mol_type = other DNA

SEQ ID NO: 24953 - DNA, 120 bp, synthetic construct
  source 1..120: mol_type = other DNA
tcagggaattcatttaaagtaaatagctgcaaagaccacattggaaagtcaatgccaaatgtcctagaagatgaagtatatgaaacagttgtagatacctctgaagaagatagtttttca

SEQ ID NO: 24954 - DNA, 120 bp, synthetic construct
  source 1..120: mol_type = other DNA
gaaaaatactcatttgtatctgaagtggaaccaaatgatactgatccattagattcaaatgtagcaaatcagaagccctttgagagtggaagtgacaaaatctccaaggaagttgtaccg

SEQ ID NO: 24955 - DNA, 120 bp, synthetic construct
  source 1..120: mol_type = other DNA
gacacagagaacaaaagaaagaaagattttcttacttcagagaattctttgccacgtatttctagcctaccaaaatcagagaagccattaaatgaggaaacagtggtaaataagagagat

SEQ ID NO: 24956 - DNA, 120 bp, synthetic construct
  source 1..120: mol_type = other DNA
gaatcacctaaagagactttcaatgcaagtttttcaggtcatatgactgatccaaactttaaaaaagaaactgaagcctctgaaagtggactggaaatacatactgtttgctcacagaag

SEQ ID NO: 24957 - DNA, 120 bp, synthetic construct; identical to SEQ ID NO: 7687
  source 1..120: mol_type = other DNA

SEQ ID NO: 24958 - DNA, 120 bp, synthetic construct
  source 1..120: mol_type = other DNA
tatttaatcttaggcatcatctgtatacatgattgtttaggtctttaattaccagtgtttagaatcaggtcactcaaacatggtagataagtttgcatagtttgtgtatatccatcactc

SEQ ID NO: 24959 - DNA, 120 bp, synthetic construct
  source 1..120: mol_type = other DNA
cccacacacccccacctcctgacagaccctagtgtgtgttgttcccctccctgtgtccgtgtgttctcattgttcagctcccacttatgagtgagaacatgtgatgtttagttttctgtt

SEQ ID NO: 24960 - DNA, 120 bp, synthetic construct
  source 1..120: mol_type = other DNA
tatccagtctatcattgatgggcatttgggttgattccatgtctgtgctattgtgaatagtgctgcagtgaatgtacaggtggatgtatctttataatacaatgatttatcttcctttgg

SEQ ID NO: 24961 - DNA, 120 bp, synthetic construct; identical to SEQ ID NO: 7688
  source 1..120: mol_type = other DNA

SEQ ID NO: 24962 - DNA, 120 bp, synthetic construct
  source 1..120: mol_type = other DNA
ggcaacatagcgagaccccatctctacaaaaaatttaaaatacccaggcatggtggcatgcttctgatgttgtagctactcaggatgctcagacaggaggatcacttgagcccaagtgac

SEQ ID NO: 24963 - DNA, 120 bp, synthetic construct
  source 1..120: mol_type = other DNA
ttaatgtaggccagttctaaaataatgatttattgctgctgttgttacataattttcttaaatattttaaagattgcatactgttactgctctatttctgcatctccgtggtgtaactct

SEQ ID NO: 24964 - DNA, 120 bp, synthetic construct
  source 1..120: mol_type = other DNA
tttagtgaatagctcagtgaatagtagagttggtgagaccacagtacagaactgtttgaagtttgggttaaatttttagaggaaaatgtttgatactatgcatatcatagttaaagccaa

SEQ ID NO: 24965 - DNA, 120 bp, synthetic construct; identical to SEQ ID NO: 7689
  source 1..120: mol_type = other DNA

SEQ ID NO: 24966 - DNA, 120 bp, synthetic construct
  source 1..120: mol_type = other DNA
ttagtagaaaattcagagggtcaagaaatttaacagagcagttgaactcatttgcctttatcgttgagattagatcatctttcaggctgttagtatatggaccctgtttttaaaaattgt

SEQ ID NO: 24967 - DNA, 120 bp, synthetic construct
  source 1..120: mol_type = other DNA
ttccaataaaaattactttgagttttttttatggtagctagctacttccttgacctagatactaattttgattgagttggtaactattattaaaaaaacaacttaggtctaatttatctt

SEQ ID NO: 24968 - DNA, 120 bp, synthetic construct; identical to SEQ ID NO: 7690
  source 1..120: mol_type = other DNA

SEQ ID NO: 24969 - DNA, 120 bp, synthetic construct
  source 1..120: mol_type = other DNA
ccactgtgcccaaacactacctttttaacttagtgaaaaatatttagtgaatgtgattgatggtactttaattttgtcactttgtgtttttatgtttaggtttattgcattcttctgtga

SEQ ID NO: 24970 - DNA, 120 bp, synthetic construct
  source 1..120: mol_type = other DNA
aggatcttgattataaagaagcaaaatgtaataaggaaaaactacagttatttattaccccagaagctgattctctgtcatgcctgcaggaaggacagtgtgaaaatgatccaaaaagca

SEQ ID NO: 24971 - DNA, 120 bp, synthetic construct
  source 1..120: mol_type = other DNA
actgactttcaatcccagaaaagtcttttatatgatcatgaaaatgccagcactcttattttaactcctacttccaaggatgttctgtcaaacctagtcatgatttctagaggcaaagaa

SEQ ID NO: 24972 - DNA, 120 bp, synthetic construct
  source 1..120: mol_type = other DNA
gttgagctgttgccacctgaaaaatacatgagagtagcatcaccttcaagaaaggtacaattcaaccaaaacacaaatctaagagtaatccaaaaaaatcaagaagaaactacttcaatt

SEQ ID NO: 24973 - DNA, 120 bp, synthetic construct; identical to SEQ ID NO: 7691
  source 1..120: mol_type = other DNA

SEQ ID NO: 24974 - DNA, 120 bp, synthetic construct
  source 1..120: mol_type = other DNA
aacaaatgggcaggactcttaggtccaatttcaaatcacagttttggaggtagcttcagaacagcttcaaataaggaaatcaagctctctgaacataacattaagaagagcaaaatgttc

SEQ ID NO: 24975 - DNA, 120 bp, synthetic construct
  source 1..120: mol_type = other DNA
catttacagagtagtgtagttgtttctgattgtaaaaatagtcatataacccctcagatgttattttccaagcaggattttaattcaaaccataatttaacacctagccaaaaggcagaa

SEQ ID NO: 24976 - DNA, 120 bp, synthetic construct; identical to SEQ ID NO: 7692
  source 1..120: mol_type = other DNA

SEQ ID NO: 24977 - DNA, 120 bp, synthetic construct
  source 1..120: mol_type = other DNA
actgaagctctgcaaaaagctgtgaaactgtttagtgatattgagaatattagtgaggaaacttctgcagaggtacatccaataagtttatcttcaagtaaatgtcatgattctgttgtt

SEQ ID NO: 24978 - DNA, 120 bp, synthetic construct
  source 1..120: mol_type = other DNA
atactgctgccagtagaaattctcataacttagaatttgatggcagtgattcaagtaaaaatgatactgtttgtattcataaagatgaaacggacttgctatttactgatcagcacaaca

SEQ ID NO: 24979 - DNA, 120 bp, synthetic construct
  source 1..120: mol_type = other DNA
caaataaagaacagttaactgctactaaaacggagcaaaatataaaagattttgagacttctgatacattttttcagactgcaagtgggaaaaatattagtgtcgccaaagagtcattta

SEQ ID NO: 24980 - DNA, 120 bp, synthetic construct; identical to SEQ ID NO: 7693
  source 1..120: mol_type = other DNA

SEQ ID NO: 24981 - DNA, 120 bp, synthetic construct; identical to SEQ ID NO: 700
  source 1..120: mol_type = other DNA

SEQ ID NO: 24982 - DNA, 120 bp, synthetic construct
  source 1..120: mol_type = other DNA
aaaaagaaacagcaaaaagtcctgcaacttgttacacaaatcagtccccttattcagtcattgaaaattcagccttagctttttacacaagttgtagtagaaaaacttctgtgagtcaga

SEQ ID NO: 24983 - DNA, 120 bp, synthetic construct
  source 1..120: mol_type = other DNA
tagctgaaaatgacaaaaatcatctctccgaaaaacaagatacttatttaagtaacagtagcatgtctaacagctattcctaccattctgatgaggtatataatgattcaggatatctct

SEQ ID NO: 24984 - DNA, 120 bp, synthetic construct
  source 1..120: mol_type = other DNA
taaatgaagatatttgcgttgaggaacttgtgactagctcttcaccctgcaaaaataaaaatgcagccattaaattgtccatatctaatagtaataattttgaggtagggccacctgcat

SEQ ID NO: 24985 - DNA, 120 bp, synthetic construct; identical to SEQ ID NO: 7694
  source 1..120: mol_type = other DNA

SEQ ID NO: 24986 - DNA, 120 bp, synthetic construct
  source 1..120: mol_type = other DNA
agtttggaaacttcagatatatgtaaatgtagtatagggaagcttcataagtcagtctcatctgcaaatacttgtgggatttttagcacagcaagtggaaaatctgtccaggtatcagat

SEQ ID NO: 24987 - DNA, 120 bp, synthetic construct
  source 1..120: mol_type = other DNA
aagtaacgaacattcagaccagctcacaagagaagaaaatactgctatacgtactccagaacatttaatatcccaaaaaggcttttcatataatgtggtaaattcatctgctttctctgg

SEQ ID NO: 24988 - DNA, 120 bp, synthetic construct
  source 1..120: mol_type = other DNA
atttaatcagaactgagcatagtcttcactattcacctacgtctagacaaaatgtatcaaaaatacttcctcgtgttgataagagaaacccagagcactgtgtaaactcagaaatggaaa

SEQ ID NO: 24989 - DNA, 120 bp, synthetic construct; identical to SEQ ID NO: 7695
  source 1..120: mol_type = other DNA

SEQ ID NO: 24990 - DNA, 120 bp, synthetic construct
  source 1..120: mol_type = other DNA
gctaaagcttttatggaagatgatgaactgacagattctaaactgccaagtcatgccacacattctctttttacatgtcccgaaaatgaggaaatggttttgtcaaattcaagaattgga

SEQ ID NO: 24991 - DNA, 120 bp, synthetic construct
  source 1..120: mol_type = other DNA
tataaactatgtcttttcagccatttttgtgtagtcagtttgggggagtatggtttgatatacagatacacagattcagtattcgtatacagatttgatatcttggtatacagattcgat

SEQ ID NO: 24992 - DNA, 120 bp, synthetic construct; identical to SEQ ID NO: 7696
  source 1..120: mol_type = other DNA

SEQ ID NO: 24993 - DNA, 120 bp, synthetic construct
  source 1..120: mol_type = other DNA
tgcagtgagccgagatcccgccactgcactccagcctgggcgacagagcgagactccgtctcaaaaaaaaaaaaaaagttggtttccgattataccatttactgggtaatatatactact

SEQ ID NO: 24994 - DNA, 120 bp, synthetic construct
  source 1..120: mol_type = other DNA
tggatcacctgaggtcaggagtttgagaccagcctgaccaacatggtgaaaccccatctttactaaaaatacaaaaaattagccaagcgtggtggcgcgcacctataatcccaactactc

SEQ ID NO: 24995 - DNA, 120 bp, synthetic construct
  source 1..120: mol_type = other DNA
aaagtgtatttaaagcacttagcagtgaacttgacatatagtaggcagagagcattcagtaagtgttggcttgctccctttttttcatttaggaagtgatctaaaaacagtattgttagt

SEQ ID NO: 24996 - DNA, 120 bp, synthetic construct; identical to SEQ ID NO: 7697
  source 1..120: mol_type = other DNA

SEQ ID NO: 24997 - DNA, 120 bp, synthetic construct
  source 1..120: mol_type = other DNA
aaaaggtacagtaaaaatacggtattaaaatcttatggggctgggctcagtggctcatgcctgtaatcccagcactttgggaggctgaggcaggcggatcacctgaggtcaggagtttga

SEQ ID NO: 24998 - DNA, 120 bp, synthetic construct
  source 1..120: mol_type = other DNA
ttgaaccctggaggcagagatttcagtgagccaagatcgcaccactgcactcctgcctgggcgacagagcaagactccatctgaaaaaaaaaaaaaatcttatgggaccactattaaagt

SEQ ID NO: 24999 - DNA, 120 bp, synthetic construct
  source 1..120: mol_type = other DNA
tttgtgtgtgtttttttctattagtgtatctgactggtaataatcttaaataattgaatctgtttgttagttgcaattaaagcaaatgccaaaactccaacatttcagtggataatctta

SEQ ID NO: 25000 - DNA, 120 bp, synthetic construct; identical to SEQ ID NO: 7698
  source 1..120: mol_type = other DNA

SEQ ID NO: 25001 - DNA, 120 bp, synthetic construct
  source 1..120: mol_type = other DNA
ctttatttatagcaacccattctgttcttgtgcatactgaagtatattgactttccacctagggaaaaaaaaaacaataactcagacttgtaaatgctttcaacggtgttactacttaat

SEQ ID NO: 25002 - DNA, 120 bp, synthetic construct
  source 1..120: mol_type = other DNA
gcttctggttactggaacagtacaggtcactgttaaacaattaaaccacttttataataatctaacacctcctaaagccttgcatggacatttttacttattaaattatacaaatttatt

SEQ ID NO: 25003 - DNA, 120 bp, synthetic construct
  source 1..120: mol_type = other DNA
taagaattgtttctattactagtactttaatgtaatttgataattgtaaaaagcctcttaactctaattcaaggacctacataataaattactccttcagttaatggctgcccccgtgct

SEQ ID NO: 25004 - DNA, 120 bp, synthetic construct; identical to SEQ ID NO: 7699
  source 1..120: mol_type = other DNA

SEQ ID NO: 25005 - DNA, 120 bp, synthetic construct
  source 1..120: mol_type = other DNA
cttaaaaacatatatgaaatatttctttttaggagaaccctcaatcaaaagaaacttattaaatgaatttgacaggataatagaaaatcaagaaaaatccttaaaggcttcaaaaagcac

SEQ ID NO: 25006 - DNA, 120 bp, synthetic construct
  source 1..120: mol_type = other DNA
cactgtgcctaatcaaggacctctttatactcttaaaaattactgaggacctaaaagagcatttgtttatgtggaatatatctattgatatttaccatattagaaatgtaaattgattaa

SEQ ID NO: 25007 - DNA, 120 bp, synthetic construct
  source 1..120: mol_type = other DNA
ccattaccgatcagaaaagtttaagtagtagaaagctgtcaagcttacagagccagatacaagcttcccaaaaattctgattttcatctaaaagcttgaatttttccccggcaataagta

SEQ ID NO: 25008 - DNA, 120 bp, synthetic construct; identical to SEQ ID NO: 7700
  source 1..120: mol_type = other DNA

SEQ ID NO: 25009 - DNA, 120 bp, synthetic construct
  source 1..120: mol_type = other DNA
ataataatctaaatttacaatatcagtattaactactgacaataaaactactaaggaaaatgtaagaattgtttgcagtttttgtccttagagtatataggttgagtatccctatctgaa

SEQ ID NO: 25010 - DNA, 120 bp, synthetic construct
  source 1..120: mol_type = other DNA
agtttcataaacaccttatacatataacttaaatgtaattttatacaatattttaaataatttttgcataagacaatttaaattgtgatccatcacatgaggtcagatgtggaattttct

SEQ ID NO: 25011 - DNA, 120 bp, synthetic construct
  source 1..120: mol_type = other DNA
attattaagaatgtttagtcaaaatactgtgttcaaatgtcactcaaaataattcttccggatgtggttaccaatttgataattaggttacattcctttttttccatttgttttcaattt

SEQ ID NO: 25012 - DNA, 120 bp, synthetic construct
  source 1..120: mol_type = other DNA
gtatacttagagtttttattcacccacctcttgcttactataggtaatcttttttagtgtttttttttcaggattctgtttaataaaaataagcaaatacatgtatatactcattaccct

SEQ ID NO: 25013 - DNA, 120 bp, synthetic construct; identical to SEQ ID NO: 707
  source 1..120: mol_type = other DNA

SEQ ID NO: 25014 - DNA, 120 bp, synthetic construct
  source 1..120: mol_type = other DNA
tgctgatttctgttgtatgcttgtactgtgagttatttggtgcatagtcattatcaatttgtgaatcaatttattttcatagttaacatttattgagcatctgttacattcactgaaaat

SEQ ID NO: 25015 - DNA, 120 bp, synthetic construct
  source 1..120: mol_type = other DNA
attgtttatgcatcatgtttctttagagccgattacctgtgtaccctttcggtaagacatgtttaaatttttctaaattctaatacagtatgagaaaagtctcgtttttataaatgaaca

SEQ ID NO: 25016 - DNA, 120 bp, synthetic construct
  source 1..120: mol_type = other DNA
tgacagctttgtaaagtagacagattttattctaattttatggatgaagtactaaggttgagaggaattaaggaaattgctccgaatcagttaacaaaaagattgcagatattaaaaata

SEQ ID NO: 25017 - DNA, 120 bp, synthetic construct; identical to SEQ ID NO: 7702
  source 1..120: mol_type = other DNA

SEQ ID NO: 25018 - DNA, 120 bp, synthetic construct
  source 1..120: mol_type = other DNA
gccaggaaatcagaaggttgttcttgaaaaagatgaattgagaggattctgaattgaaggtgggctggagggaggggacaccaggcacaattgagggaaagatactaaaatgaaagatca

SEQ ID NO: 25019 - DNA, 120 bp, synthetic construct
  source 1..120: mol_type = other DNA
actggaagatttttttttcctagggaatatgcctgacccaatagaaaagaccaaaaaatactgacagttgaggatactcagatgaaacagtatagccagtcaccagaccaggaagttaac

SEQ ID NO: 25020 - DNA, 120 bp, synthetic construct; identical to SEQ ID NO: 7703
  source 1..120: mol_type = other DNA

SEQ ID NO: 25021 - DNA, 120 bp, synthetic construct
  source 1..120: mol_type = other DNA
aactcagtagaaataatggaagaatcatgaaagttcccagaatacagaataaaatgaaaaaaggtatgaaaagtcaattctgtggatctatcatctgaaaatacagagtttgagaaggaa

SEQ ID NO: 25022 - DNA, 120 bp, synthetic construct
  source 1..120: mol_type = other DNA
tttccttaattaaaagggcccactgagtgagcacacaagtaaaaatgacccacagtaaggcacatccttgtgaatttttagaataatagaggcagacaggaaccttaaattcattagagg

SEQ ID NO: 25023 - DNA, 120 bp, synthetic construct
  source 1..120: mol_type = other DNA
gagagaaaatgatttccaacctagaatctgaattaagtgtgagggtagacatttttcagatgtgaagtactaaaagatctcttgtgcgcttttctcaggaaactaaccaaaacaaatgca

SEQ ID NO: 25024 - DNA, 120 bp, synthetic construct; identical to SEQ ID NO: 7704
  source 1..120: mol_type = other DNA

SEQ ID NO: 25025 - DNA, 120 bp, synthetic construct
  source 1..120: mol_type = other DNA
taatccagcacattgggaggctgaggtgggtagatcacttgaggccaggagttcgagactagcctggccaacatggtaaaatcccatctctactgaaaatacaaaaattagccaggcgtg

SEQ ID NO: 25026 - DNA, 120 bp, synthetic construct
  source 1..120: mol_type = other DNA
gactctgtctcaaaaaaaaaaaaaaaaaaaaaaagatggtgaattgaacatactcatatcctttctttgccttccaaacttttaccaaaacatcattgaagaaacttacacacacacaaa

SEQ ID NO: 25027 - DNA, 120 bp, synthetic construct
  source 1..120: mol_type = other DNA
caaaagactaggaattggtggcttcatttcttatctttagaattgggtggtgcagaaggagggagccaaaatggaataagttgaaattatgtttaagaagcaatactcgccgggtacggt

SEQ ID NO: 25028 - DNA, 120 bp, synthetic construct
  source 1..120: mol_type = other DNA
tctctgttaaaaatgcaaaaattagctcggcatggtagcatgcccctgtaatccagctactcaggaggctgaggtgggagaactgcttgaacccaggaggtggaggctgcagtgagccaa

SEQ ID NO: 25029 - DNA, 120 bp, synthetic construct; identical to SEQ ID NO: 7705
  source 1..120: mol_type = other DNA

SEQ ID NO: 25030 - DNA, 120 bp, synthetic construct
  source 1..120: mol_type = other DNA
ttctatctttgtaccaagtgcttcaaaacagccttttggtccctcactcttaactataaacagacatccaaagattatgagacatcagaaaaagcaaaaataaaataaccaaaaaacaca

SEQ ID NO: 25031 - DNA, 120 bp, synthetic construct
  source 1..120: mol_type = other DNA
aataaacagtaagtacatagaaaataagcagattttaaaaattaactcaagagaaagcaaaagttgtaaaggaagtacactatttatatactacccattaatggccgggtgtggtggttc

SEQ ID NO: 25032 - DNA, 120 bp, synthetic construct
  source 1..120: mol_type = other DNA
agccagacgtagtggtgggcgcctgtagtcccagctacttgggaggctgaggcaggagaatggcatcaacccaggaggcggagctttcagtgagccgagattgcaccactgcactccagc

SEQ ID NO: 25033 - DNA, 120 bp, synthetic construct; identical to SEQ ID NO: 7706
  source 1..120: mol_type = other DNA

SEQ ID NO: 25034 - DNA, 120 bp, synthetic construct
  source 1..120: mol_type = other DNA
aagctggccacctgagccagccccagcagccgctcggctccacttccatgccatggaatctttgttttttcactctttgcaatgaatcttgctgctgctcactctttagtgagcactacc

SEQ ID NO: 25035 - DNA, 120 bp, synthetic construct
  source 1..120: mol_type = other DNA
tcactgggaaggtctgcggcttcactcctgaagtcagcaagaccacaaacccaccagaaagaagaaactctggacacatctgaacatcaggaagaacaaactcgggacacactatcttta

SEQ ID NO: 25036 - DNA, 120 bp, synthetic construct; identical to SEQ ID NO: 7707
  source 1..120: mol_type = other DNA

SEQ ID NO: 25037 - DNA, 120 bp, synthetic construct
  source 1..120: mol_type = other DNA
tatttatttattttgatacagagtctcactctgtcgcccaggctggagtacagtggcacgatcttggctcactgcaacctctgcctcctaggttcaagcgactctcctgcttcagcctcc

SEQ ID NO: 25038 - DNA, 120 bp, synthetic construct
  source 1..120: mol_type = other DNA
ccactgtaccaggcctaatgttaccttttcaaaaacacctgattgtggaattgttgaagtcactgagttgtatttctggaatgtgttttttagcaggctgcacatacacatatgtagaaa

SEQ ID NO: 25039 - DNA, 120 bp, synthetic construct
  source 1..120: mol_type = other DNA
taatgtatttaacaaacaaacatttgttaaagtacctgctcaaactacctaatatatactatagtgaaagatataaggataaataagtctaactcagattgctagcctgggaaccagaca

SEQ ID NO: 25040 - DNA, 120 bp, synthetic construct; identical to SEQ ID NO: 7708
  source 1..120: mol_type = other DNA

SEQ ID NO: 25041 - DNA, 120 bp, synthetic construct
  source 1..120: mol_type = other DNA
agaagtataccaaagcaaaactgttgcaaggagattagtaaatacaggtcttaacctagcagaggaggtagagggtagagaatgattgagatagaaattcagtagatttggccagatagt

SEQ ID NO: 25042 - DNA, 120 bp, synthetic construct
  source 1..120: mol_type = other DNA
gatcaatcaatagaagtttggggacagaaggtttattcattcttgtgcattagatctcatctagatcacctgtttgaagaaatcattccagcaattatcttgtctctctcctgcatggat

SEQ ID NO: 25043 - DNA, 120 bp, synthetic construct; identical to SEQ ID NO: 714
  source 1..120: mol_type = other DNA

SEQ ID NO: 25044 - DNA, 120 bp, synthetic construct
  source 1..120: mol_type = other DNA
tgtgccatctcagagtagagactaaaagcccttgtcatggtgtacagattcttcatgatctggctgctttgctatttttccagtctgaccttctaatgttccccttgctctccttgctcc

SEQ ID NO: 25045 - DNA, 120 bp, synthetic construct; identical to SEQ ID NO: 7709
  source 1..120: mol_type = other DNA

SEQ ID NO: 25046 - DNA, 120 bp, synthetic construct
  source 1..120: mol_type = other DNA
ccctaggagaaaaatcgggcatgaggataaaggatattttcattgttaggtgataatttaagcaatggaaatgactcacattagcaagggaaagtgtctaaggaagacatccagttttgg

SEQ ID NO: 25047 - DNA, 120 bp, synthetic construct
  source 1..120: mol_type = other DNA
agaatgagtttgcgtgcatcccacatgcatctgggaggtcattaacaactttattgagaacagtttctgtagagtagtgggagaaatgagagtttattgagtagagattgaggaagtgaa

SEQ ID NO: 25048 - DNA, 120 bp, synthetic construct; identical to SEQ ID NO: 7710
  source 1..120: mol_type = other DNA

SEQ ID NO: 25049 - DNA, 120 bp, synthetic construct
  source 1..120: mol_type = other DNA
aattagaggggacacactgagagggtccacacttgacagactctcttctattatgtgttatgtgaggtagattgtaaagtcaaaggctagccttgaaaaatgtgatattgttttggaatg

SEQ ID NO: 25050 - DNA, 120 bp, synthetic construct; identical to SEQ ID NO: 716
  source 1..120: mol_type = other DNA

SEQ ID NO: 25051 - DNA, 120 bp, synthetic construct
  source 1..120: mol_type = other DNA
ctacaggcagaccaaccaaagtctttgttccaccttttaaaactaaatcacattttcacagagttgaacagtgtgttaggaatattaacttggaggaaaacagacaaaagcaaaacattg

SEQ ID NO: 25052 - DNA, 120 bp, synthetic construct; identical to SEQ ID NO: 7711
  source 1..120: mol_type = other DNA

SEQ ID NO: 25053 - DNA, 120 bp, synthetic construct
  source 1..120: mol_type = other DNA
ttctaatgtttctttcaaagataacttcttgtggacttgttaaaaaaaattagacacacaatctaggactgctgttactggaatatattttctatcatgctactaattttctttttaaaa

SEQ ID NO: 25054 - DNA, 120 bp, synthetic construct
  source 1..120: mol_type = other DNA
accctgtctctactaaaaatacaaaataaataaataaataaataaatagctgagcgtggtggcaggcacctgtaatcccagctgcttgggaggctgaggcaggagaatcgtttgaacccg

SEQ ID NO: 25055 - DNA, 120 bp, synthetic construct
  source 1..120: mol_type = other DNA
ttacaagttgaaacatcctttcatttatgaagaattaaaaggggtaccctttttagagaaaaggagagcatgtaaacttcgaggaaattgatatgtataattttataaaacagggcttgc

SEQ ID NO: 25056 - DNA, 120 bp, synthetic construct; identical to SEQ ID NO: 7712
  source 1..120: mol_type = other DNA

SEQ ID NO: 25057 - DNA, 120 bp, synthetic construct
  source 1..120: mol_type = other DNA
ctaagtatttattctttgatagatttaattacaagtcttcagaatgccagagatatacaggatatgcgaattaagaagaaacaaaggcaacgcgtctttccacagccaggcagtctgtat

SEQ ID NO: 25058 - DNA, 120 bp, synthetic construct
  source 1..120: mol_type = other DNA
cagcagtaggaggccaagttccctctgcgtgttctcataaacaggtatgtgtttgtctacaatactgatggcttttatgacagagtgtaattttatttcattaactagtatctacaaatg

SEQ ID NO: 25059 - DNA, 120 bp, synthetic construct
  source 1..120: mol_type = other DNA
tgatctgtgcttccaaattactacttcttttcccccttcaaatctttcttattttgtcattgtaaatgctctcagctaggtgttaaagtagtcttactgatattcaaatgtgaataactg

SEQ ID NO: 25060 - DNA, 120 bp, synthetic construct
  source 1..120: mol_type = other DNA
gctaactttgagcattttctaggtgtaagatgctcttctaagcacttcacatgcattaggtatatcttgcttaatcctcacagtcaccttgaaagaaaggcactgttactttgtttccat

SEQ ID NO: 25061 - DNA, 120 bp, synthetic construct; identical to SEQ ID NO: 7713
  source 1..120: mol_type = other DNA

SEQ ID NO: 25062 - DNA, 120 bp, synthetic construct
  source 1..120: mol_type = other DNA
attttgtaaaacatcacatttttttatcctcacagtaccttcctatggcagatttagcaggaggcgtataaacggggtggaaaaggtacagcagactgtggaatgtatggatcatttata

SEQ ID NO: 25063 - DNA, 120 bp, synthetic construct
  source 1..120: mol_type = other DNA
tgatacatgtttactttaaattgtttttcttttttgtgtgtgtttattttgtgtagctgtatacgtatggcgtttctaaacattgcataaaaattaacagcaaaaatgcagagtcttttc

SEQ ID NO: 25064 - DNA, 120 bp, synthetic construct; identical to SEQ ID NO: 7714
  source 1..120: mol_type = other DNA

SEQ ID NO: 25065 - DNA, 120 bp, synthetic construct
  source 1..120: mol_type = other DNA
cttttgaaaagtgctgtttgtcctggggtttaatgaactggattttcttgatttgggacatttttcttaggcatttataaatatagcccaatttataaagttaaatttggccgggtacag

SEQ ID NO: 25066 - DNA, 120 bp, synthetic construct
  source 1..120: mol_type = other DNA
gccaacgtggcgaaaccccatctctactaaaagtacaagaactatctgggcgtggtggcaggcacctgtaatcccggctactctggaggctgaggcaggagaatcgcttgaacctgggag

SEQ ID NO: 25067 - DNA, 120 bp, synthetic construct
  source 1..120: mol_type = other DNA
tcatgcctgtaatcccagcactttgggaggctgaggtgggcagatctcttgagcacaggagtttgagaccagcctgggcaacatggtgaaaacccatctctacaaacaaattaaaaaatt

SEQ ID NO: 25068 - DNA, 120 bp, synthetic construct
  source 1..120: mol_type = other DNA
tctactaaaaatacaaaaattagccaggtatggtgatgcatgcccgtaatcccagctactcgggaggctgaggcaggagaatcatttgagcccagtaggtggaggttgcagtgagccaag

SEQ ID NO: 25069 - DNA, 120 bp, synthetic construct
  source 1..120: mol_type = other DNA
gaggtcaggaatttgaaaccagcctggccaacatggcaaaaccccatctctactaaaaatacaaaaattagctggacgtggtggcacgcgcctgcaatcccacttacttgggaggccgag

SEQ ID NO: 25070 - DNA, 120 bp, synthetic construct; identical to SEQ ID NO: 720
  source 1..120: mol_type = other DNA

SEQ ID NO: 25071 - DNA, 120 bp, synthetic construct
  source 1..120: mol_type = other DNA
tttttgttatcagagatatattacattatgccagtggcaaaagatgggatttatttcctcagcatccttatctttaaatttctgtacatctttccaaaatttatagctttggaaaagtga

SEQ ID NO: 25072 - DNA, 120 bp, synthetic construct; identical to SEQ ID NO: 7716
  source 1..120: mol_type = other DNA

SEQ ID NO: 25073 - DNA, 120 bp, synthetic construct
  source 1..120: mol_type = other DNA
aatataagtgaattgtgtagtatgttagaagaagatacatactataaagatagataaagttggaaaggtggcagagaaagttgggcaaggagatgcgatttttaatctaataagtagtta

SEQ ID NO: 25074 - DNA, 120 bp, synthetic construct
  source 1..120: mol_type = other DNA
ggaacaggaagttagtgcaactggagtagagtgggcaggagaagagtagtagtagatgagatacaaaaggaagacctcatagaccttcgtaagacccttaccttttactctgcacgattt

SEQ ID NO: 25075 - DNA, 120 bp, synthetic construct
  source 1..120: mol_type = other DNA
acctcccaggttcaagcgattctcctgcctcagcctcccgtgtagctgggactacaggcgcgcaccaccgtgcccggctgatttttgtgtttttagtagagacagggtttcaccatgttg

SEQ ID NO: 25076 - DNA, 120 bp, synthetic construct; identical to SEQ ID NO: 7717
  source 1..120: mol_type = other DNA

SEQ ID NO: 25077 - DNA, 120 bp, synthetic construct
  source 1..120: mol_type = other DNA
ggagttgctcaaggattagatataaaacgtgagagaggaggagaataagaatggctgtgaagattttggccttagcagctggaaggatagagttgtatgtaactactagaattgagaaga

SEQ ID NO: 25078 - DNA, 120 bp, synthetic construct
  source 1..120: mol_type = other DNA
ttaggtaggcagttggatatggaagtctatacacaggtaaagtataggccaaataaatcaattcacaagtcatcggcatatagatggacttgaaggccatgaaaaagagactgagaaaga

SEQ ID NO: 25079 - DNA, 120 bp, synthetic construct
  source 1..120: mol_type = other DNA
ccagctgtggaagctgcttctaataggtaaagtaagatgaggactgagattggccgctggatttagcactgcagaagacattactaatgttattaaaaatagctcaatagattggtggag

SEQ ID NO: 25080 - DNA, 120 bp, synthetic construct
  source 1..120: mol_type = other DNA
aggaagtaggatcaaagagtcttagttttggcttgttttaaggtagaaaaaaaccgtttcttatgctgattcacattgttcagtagagagggaaaaaattgatgatgcaggagagagagg

SEQ ID NO: 25081 - DNA, 120 bp, synthetic construct; identical to SEQ ID NO: 7718
  source 1..120: mol_type = other DNA

SEQ ID NO: 25082 - DNA, 120 bp, synthetic construct
  source 1..120: mol_type = other DNA
atttttcaggaacaaatatgagttgaaatcattctgttgactgttaagtggaattttttgttttgtttttatattttgagatagggtctcactcttgtccaggctggagtgcagtggcac

SEQ ID NO: 25083 - DNA, 120 bp, synthetic construct
  source 1..120: mol_type = other DNA
ttgtagagatgtgggggtctcactatgttgcctaggctggtctcaaacttctggcctcaagcaatcctcctgcctcagcttcccaaaatgctgggagtataggcatgagccaccatgctc

SEQ ID NO: 25084 - DNA, 120 bp, synthetic construct
  source 1..120: mol_type = other DNA
agagaatagttgtagttgttgaattcagtatcatcctatgtggtttttatgataatattctacttttatttgttcagggctctgtgtgacactccaggtgtggatccaaagcttatttct

SEQ ID NO: 25085 - DNA, 120 bp, synthetic construct; identical to SEQ ID NO: 7719
  source 1..120: mol_type = other DNA

SEQ ID NO: 25086 - DNA, 120 bp, synthetic construct
  source 1..120: mol_type = other DNA
catttaagagagatcacacattcatgcattgcttgcttccctctttccccaccccctccttaacctcttgatgtatgagaagaatatgagttactaatttgatccactatttggggattg

SEQ ID NO: 25087 - DNA, 120 bp, synthetic construct
  source 1..120: mol_type = other DNA
cagtttttattctcagttattcagtgacttgtttaaacagtggaattctagagtcacacttcctaaaatatgcatttttgttttcacttttagatatgatacggaaattgatagaagcag

SEQ ID NO: 25088 - DNA, 120 bp, synthetic construct; identical to SEQ ID NO: 724
  source 1..120: mol_type = other DNA

SEQ ID NO: 25089 - DNA, 120 bp, synthetic construct
  source 1..120: mol_type = other DNA
tgttaaaggtaaattaatttgcactcttggtaaaaatcagtcattgattcagttaaattctagaagttttacatttaaattttaaatgcttactaaggatgctcaatttcttagatgtac

SEQ ID NO: 25090 - DNA, 120 bp, synthetic construct
  source 1..120: mol_type = other DNA
atttgcaccatttgattttggtatctgtagcttgctgccctcttgttctcatagctttgctttgatcagatccctattccactctggattagagaattacattttagtacttttcaaata

SEQ ID NO: 25091 - DNA, 120 bp, synthetic construct
  source 1..120: mol_type = other DNA
tcacttaagaggtaaccttgcagagaatttacttctgtggtattctggatcactctaaagagaatgttttataaattaaacatttttaaggtaaagatatattttgtttggcattagttc

SEQ ID NO: 25092 - DNA, 120 bp, synthetic construct
  source 1..120: mol_type = other DNA
taaatcaaatcaatgcatgtgcataatttggaaactcaagtaatataagacatataaccaaaaaaaagcagttgctagcacaaccctccccatcctcattcatggtcccaagaggcaatc

SEQ ID NO: 25093 - DNA, 120 bp, synthetic construct; identical to SEQ ID NO: 7721
  source 1..120: mol_type = other DNA

SEQ ID NO: 25094 - DNA, 120 bp, synthetic construct
  source 1..120: mol_type = other DNA
ctcttaattttctgtgtccttacacaggagctataaaaatcctgcccaatatgttaaaatttctccattggttccatttctgtttcttggagaacccctggacctcttcatatgcttact

SEQ ID NO: 25095 - DNA, 120 bp, synthetic construct
  source 1..120: mol_type = other DNA
aaccccatttcctggtttccatgtcatctttctagagtttttcccccaattttaagggcccacaactctcagaggcttgttgggaaaaggagcatgcaagctttttgatatcttagggta

SEQ ID NO: 25096 - DNA, 120 bp, synthetic construct; identical to SEQ ID NO: 7722
  source 1..120: mol_type = other DNA

SEQ ID NO: 25097 - DNA, 120 bp, synthetic construct
  source 1..120: mol_type = other DNA
cattcattatgtgctctggttttaagaagttaagattgttttgtctttatttttatttatttatttatttttgagacaaagtctcgctcttgttgcccaggctggagtgcaatggcgtga

SEQ ID NO: 25098 - DNA, 120 bp, synthetic construct
  source 1..120: mol_type = other DNA
acctgccaccacacccagccaaattttgtatttttagtagagacagggtttcaccatattggccaggctggtctcatcctgacctcaggtgatccacctgcctcagcctcccaaagtgtt

SEQ ID NO: 25099 - DNA, 120 bp, synthetic construct
  source 1..120: mol_type = other DNA
ttggcccagatgcttactggcacttactctagaaacacatagtccttcattgagttctggaaaattttctttaagtggttcttttataatttccctccatttttttctctagttttttct

SEQ ID NO: 25100 - DNA, 120 bp, synthetic construct
  source 1..120: mol_type = other DNA
tgtctttttttattctaacttctgggatggtttttaatttttttcttctaattctttattaatatgccatgttttatagatttgtctttaaatatttttacataattttgtaacaaaata

SEQ ID NO: 25101 - DNA, 120 bp, synthetic construct; identical to SEQ ID NO: 7723
  source 1..120: mol_type = other DNA

SEQ ID NO: 25102 - DNA, 120 bp, synthetic construct
  source 1..120: mol_type = other DNA
agagaacagggatctttttatcagagaaaggtgcagatgtgagattgaagtaaaagaaaacttgtggttctgcatttgtattggaaatatcattatgaactcgagatctatattatcttt

SEQ ID NO: 25103 - DNA, 120 bp, synthetic construct
  source 1..120: mol_type = other DNA
accccgtctctactaaaaatataaaacttagccaggcatgatggcatgctcctgtagtcccagctactgtggaggctgaggtgggagaatcacttgaacctgggacgtagaggttgcagt

SEQ ID NO: 25104 - DNA, 120 bp, synthetic construct; identical to SEQ ID NO: 728
  source 1..120: mol_type = other DNA

SEQ ID NO: 25105 - DNA, 120 bp, synthetic construct; identical to SEQ ID NO: 7724
  source 1..120: mol_type = other DNA

SEQ ID NO: 25106 - DNA, 120 bp, synthetic construct
  source 1..120: mol_type = other DNA
agcggaggttgcagtgagccgagattgtgccactgcattctagcctgggtgacagagcgagactccatctcaaagaaaaaaaaaaggataataacagcaaaaaattgaaattcataacaa

SEQ ID NO: 25107 - DNA, 120 bp, synthetic construct
  source 1..120: mol_type = other DNA
gcaacatgacaaaaccccatctctacaaaaaatacaaaaattaaccaggtgtggtggcatgtgcctatagtcccagctacttgagaggccgtggtgggaggatgacctgagcccaggagg

SEQ ID NO: 25108 - DNA, 120 bp, synthetic construct
  source 1..120: mol_type = other DNA
ttatctttcttctcttatatgatctatattttgggaccctcaagtagatgaggggaagtttctgtttataaaaatgtttcaacaaataaggaataatagaattaaaatataaccatttcg

SEQ ID NO: 25109 - DNA, 120 bp, synthetic construct
  source 1..120: mol_type = other DNA
cttggctcactgcaacctctgcctcctggattcaagcgattctcctgcctcagcctcctaagtagctgggattataggcacccaccaccacacctggctaatttttttgtatttttagta

SEQ ID NO: 25110 - DNA, 120 bp, synthetic construct; identical to SEQ ID NO: 7725
  source 1..120: mol_type = other DNA

SEQ ID NO: 25111 - DNA, 120 bp, synthetic construct
  source 1..120: mol_type = other DNA
gttagagactttcctcaatggtgatcattcactgatccagaagttgtatgtgaggtgaggcttgtcagctcatagggtagtaatgtagtgatttagtttttaactaggagaccctcaaat

SEQ ID NO: 25112 - DNA, 120 bp, synthetic construct
  source 1..120: mol_type = other DNA
tttgttgtttgttgtttgttttttgtttttttgttttttttttggttttttttgttttttttttagatggagtcttgctctgttgcccaggctagagtgcagtggtgcgatctcggctca

SEQ ID NO: 25113 - DNA, 120 bp, synthetic construct
  source 1..120: mol_type = other DNA
caccatcttggccaggctggtctccaactcctgaccttgtgatccacccgcctcggcctcccaaagtgttgggattacaggcgtgagccacagcgcccggcccagttttgttttcaataa

SEQ ID NO: 25114 - DNA, 120 bp, synthetic construct; identical to SEQ ID NO: 7726
  source 1..120: mol_type = other DNA

SEQ ID NO: 25115 - DNA, 120 bp, synthetic construct
  source 1..120: mol_type = other DNA
catgttaactccttacaacaagtttggtggctgaataaccttgggcaagttgtgtagtttctcatatactttagttttatcgttgtctgtaaaatggagatgagtcttcagattattgtg

SEQ ID NO: 25116 - DNA, 120 bp, synthetic construct
  source 1..120: mol_type = other DNA
acctcacctggctacttttttggtttttagtagagacggggtttcaccatgttggcccgggtggtctcgaactcctgacctcaggtgatacgcctgcctcggcctcccaaagtgttggga

SEQ ID NO: 25117 - DNA, 120 bp, synthetic construct; identical to SEQ ID NO: 7727
  source 1..120: mol_type = other DNA

SEQ ID NO: 25118 - DNA, 120 bp, synthetic construct
  source 1..120: mol_type = other DNA
gagaagtactatattgtgaaaatattttcacttttatacagttttttacttatttactgtcttactaatcttcctaagactttttaaagtgaatatttttaaggcagttctagaagaatg

SEQ ID NO: 25119 - DNA, 120 bp, synthetic construct
  source 1..120: mol_type = other DNA
tggattctttcctgaccctagaccttttcctctgcccttatcatcgcttttcagtgatggaggaaatgttggttgtgttgatgtaattattcaaagagcataccctatacaggtatgatg

SEQ ID NO: 25120 - DNA, 120 bp, synthetic construct
  source 1..120: mol_type = other DNA
cagcctccacctcccgggttcaagtgattctcctgcctcagcctctcaagtagctgagccaccacacctggctaattttgtatttttggtagagaaggggtttcatcatgttggtcaggc

SEQ ID NO: 25121 - DNA, 120 bp, synthetic construct; identical to SEQ ID NO: 7728
  source 1..120: mol_type = other DNA

SEQ ID NO: 25122 - DNA, 120 bp, synthetic construct
  source 1..120: mol_type = other DNA
ggaagaaaaggaagcagcaaaatatgtggaggcccaacaaaagagactagaagccttattcactaaaattcaggaggaatttgaagaacatgaaggtaaaattagttatatggtacacat

SEQ ID NO: 25123 - DNA, 120 bp, synthetic construct
  source 1..120: mol_type = other DNA
tttggtgttagacaaagaatagcaacaagggacagaaatatcaggtctaagccatttgtaatatttttcctgaattcttacctatatgatgtggcttttgcatttttgtcatggtagtta

SEQ ID NO: 25124 - DNA, 120 bp, synthetic construct
  source 1..120: mol_type = other DNA
ttgttgttgctgaagattttatgtttttctgcatttcctcatgatttatatagatgtaacatgttctataggacatgtaatttacatgtcctatagaactataagttacatgtcctatag

SEQ ID NO: 25125 - DNA, 120 bp, synthetic construct
  source 1..120: mol_type = other DNA
ctcagagatactgtggatttgattctagaccaccgcaataaagcaaatattacagtagagcaaatcacacgaatattttggtttcccagagcatacaaaagtaatgtttacactatagca

SEQ ID NO: 25126 - DNA, 120 bp, synthetic construct; identical to SEQ ID NO: 7729
  source 1..120: mol_type = other DNA

SEQ ID NO: 25127 - DNA, 120 bp, synthetic construct
  source 1..120: mol_type = other DNA
attatgtaatattctaaatcctttgttgtcatttcaacaatattcacagcaccttcgccaggactagattccctctcaagaaactactttctttgcttatccataagaagcagctctgta

SEQ ID NO: 25128 - DNA, 120 bp, synthetic construct
  source 1..120: mol_type = other DNA
gcggaaggcaaaggcaaagcaagtacccttttcataaggtggcagaagagagagtgcaggggaaactgccacttgtaagccatcagatctcataagaactccctcactagcacaagaata

SEQ ID NO: 25129 - DNA, 120 bp, synthetic construct
  source 1..120: mol_type = other DNA
gccctggaccctcccaaatctcgtgtccttttcacatttcaaaaccaatcatgccttcctaacagtctccgaaagtcttaactaattccagcattaactcaaaagttcaagtccaaagtc

SEQ ID NO: 25130 - DNA, 120 bp, synthetic construct; identical to SEQ ID NO: 7730
  source 1..120: mol_type = other DNA

SEQ ID NO: 25131 - DNA, 120 bp, synthetic construct
  source 1..120: mol_type = other DNA
atttttagtagagatggggtttcaccatgttggccaggctagtcttaaaactcctagcctcgctgggtggggtgtctcattcctgtaatcccagcactttgggaggctgaagtgggcaga

SEQ ID NO: 25132 - DNA, 120 bp, synthetic construct
  source 1..120: mol_type = other DNA
tgaggcaggagaattgcttgaatccaggaggcagagattgcagtaagccaaaatcacaccactgcactctagcctgggcaacaaagcaagactctgtctcaaaaaaataaataaaaaaaa

SEQ ID NO: 25133 - DNA, 120 bp, synthetic construct
  source 1..120: mol_type = other DNA
cccacggccttgggcagctctgccctttggctcttcagtctacagcccctgcagctgctttcatgggctgccattgagtgacagctgcacagtgcaggctgtcagtgggggatgatggcc

SEQ ID NO: 25134 - DNA, 120 bp, synthetic construct; identical to SEQ ID NO: 7731
  source 1..120: mol_type = other DNA

SEQ ID NO: 25135 - DNA, 120 bp, synthetic construct
  source 1..120: mol_type = other DNA
ccatgtcccatggctgcacagagcagtggggccttgggcccagcccacaaaaccatttttccctcctaggcctcaaggcctgtgatagaagggtctactgtggagatctctgacatgcct

SEQ ID NO: 25136 - DNA, 120 bp, synthetic construct
  source 1..120: mol_type = other DNA
taggctgcagattttccaaacttgcatgctctgcttcccttttaaatataggttccaatttcaaaccatctctttgtgaacatgtatgactgtgtttctagaaaaagccacatcacacct

SEQ ID NO: 25137 - DNA, 120 bp, synthetic construct
  source 1..120: mol_type = other DNA
catagcaagagtgacctttgctccagttcccaataagatcctcatctccatctgagaccacctcaggctggacttcactggccacatcactgtcagaattttggtcaaaaccattcaaca

SEQ ID NO: 25138 - DNA, 120 bp, synthetic construct; identical to SEQ ID NO: 7732
  source 1..120: mol_type = other DNA

SEQ ID NO: 25139 - DNA, 120 bp, synthetic construct
  source 1..120: mol_type = other DNA
cagatcttgtgagaactccctcactatcatggaacagcatgggagaaactgcccccgtgatccagttacctcccaccaggtccgtccctcgacacgtgaggattaccgttcaagatgaga

SEQ ID NO: 25140 - DNA, 120 bp, synthetic construct
  source 1..120: mol_type = other DNA
tttcaccatatatgcagttacttcctccactgaagtcttgaaccccccaaagtcatccatgagggttggaatcaacttctggtaaacttgttaatgttgatattttgacttcccatgaaa

SEQ ID NO: 25141 - DNA, 120 bp, synthetic construct
  source 1..120: mol_type = other DNA
ttttttttttttgagatggagtttcgcacttgttgcccaggctggagtgcaatggcgtgatcttggctcacagcaacctctgcctcccaggttcaagcaattctcctgcctcagcctccg

SEQ ID NO: 25142 - DNA, 120 bp, synthetic construct; identical to SEQ ID NO: 7733
  source 1..120: mol_type = other DNA

SEQ ID NO: 25143 - DNA, 120 bp, synthetic construct
  source 1..120: mol_type = other DNA
tcaacatagtttccacaaaccttcaatttgtgtttttaaaaaaatgcagtatctatgaaactcagtgaagtgaaatacattaaaacaaatatacctatgttaactcacatattactgtaa

SEQ ID NO: 25144 - DNA, 120 bp, synthetic construct
  source 1..120: mol_type = other DNA
tccaaggtggtggatcacttgaggtcaggagtttgagaccagcctggccaatatggtgaaactccgtctctaccaaaaatgcaaaaattaaccgggcatgttggatgtgcctctaatccc

SEQ ID NO: 25145 - DNA, 120 bp, synthetic construct
  source 1..120: mol_type = other DNA
aaaaaaaaaagaaaaaacttttagcagttatatagtttcttatctttaaatctcccttctttgggtgttttatgcttggttctttagttttagttgcttttgaatttacagtttagtgaa

SEQ ID NO: 25146 - DNA, 120 bp, synthetic construct; identical to SEQ ID NO: 7734
  source 1..120: mol_type = other DNA

SEQ ID NO: 25147 - DNA, 120 bp, synthetic construct
  source 1..120: mol_type = other DNA
gattttcagtgatgtgccagacgagtgtggtggtatgttttcaactatataccgagtagaggatgggagggttctagaattttatatattaattaaatttggtttaaaatgcaggcaaaa

SEQ ID NO: 25148 - DNA, 120 bp, synthetic construct
  source 1..120: mol_type = other DNA
ttcctggagtgtacttgataatcctctaccctaagggtacttgggtagaaatgtttccgaagcactaaactgttagaagtagcataggctttagaatcgtggcactctcattttattagc

SEQ ID NO: 25149 - DNA, 120 bp, synthetic construct; identical to SEQ ID NO: 7735
  source 1..120: mol_type = other DNA

SEQ ID NO: 25150 - DNA, 120 bp, synthetic construct
  source 1..120: mol_type = other DNA
taaataatctatataaaagttccatataaatgttagttactattattagaacataattttatatattaaactacctcctaaatttttagacaggtagatagctaaaaaaaaattcaaatt

SEQ ID NO: 25151 - DNA, 120 bp, synthetic construct
  source 1..120: mol_type = other DNA
taaatagtgggactacaaaataaacaatatttcatcagtaatgtaagcagtgctatactgagtagaattccctcctgttccgaaatgttacaatttgggttctccctgtgagaagtgagt

SEQ ID NO: 25152 - DNA, 120 bp, synthetic construct
  source 1..120: mol_type = other DNA
ctatgaatcatcatgaagatagctttaatttcatccacaaaatttaacaatatttttttgtctggacataagggggcagaataagagttggagtagggccttgcccagccactctgtaac

SEQ ID NO: 25153 - DNA, 120 bp, synthetic construct; identical to SEQ ID NO: 7736
  source 1..120: mol_type = other DNA

SEQ ID NO: 25154 - DNA, 120 bp, synthetic construct
  source 1..120: mol_type = other DNA
gtatagataatctcccttcccggtagagattaggatattaagatgtataatatcctaaagtgtagcagcagtctggtatgttacatgtctaaattccatttcctattttatttgtttatt

SEQ ID NO: 25155 - DNA, 120 bp, synthetic construct; identical to SEQ ID NO: 740
  source 1..120: mol_type = other DNA

SEQ ID NO: 25156 - DNA, 120 bp, synthetic construct
  source 1..120: mol_type = other DNA
ttcagatattagccatctgtaatgtagttggtgatgattatgattattagagtacatttataattggaggatcatttttgccgtagggaaatagaattattaatagtttgaggcacctga

SEQ ID NO: 25157 - DNA, 120 bp, synthetic construct; identical to SEQ ID NO: 7737
  source 1..120: mol_type = other DNA

SEQ ID NO: 25158 - DNA, 120 bp, synthetic construct
  source 1..120: mol_type = other DNA
aaatgctttgtttttatcagttttattaacttaaaaaatgaccttactaacaaaatgattataaatccagataaagtataaagttagtttatatcagagaagcaaaatccactactaatg

SEQ ID NO: 25159 - DNA, 120 bp, synthetic construct
  source 1..120: mol_type = other DNA
gcgtccatcatcagatttatattctctgttaacagaaggaaagagatacagaatttatcatcttgcaacttcaaaatctaaaagtaaatctgaaagagctaacatacagttagcagcgac

SEQ ID NO: 25160 - DNA, 120 bp, synthetic construct
  source 1..120: mol_type = other DNA
ggtttcagatgaaattttatttcagatttaccagccacgggagccccttcacttcagcaaatttttagatccagactttcagccatcttgttctgaggtggacctaataggatttgtcgt

SEQ ID NO: 25161 - DNA, 120 bp, synthetic construct
  source 1..120: mol_type = other DNA
ctagctaactagtgatctgaaagtaagcctctttgaacctctgatttttcatgaaaagcaattctctcaattctatattatttcaagggtaacaagttacatcctagtctgtgtacttaa

SEQ ID NO: 25162 - DNA, 120 bp, synthetic construct; identical to SEQ ID NO: 7738
  source 1..120: mol_type = other DNA

SEQ ID NO: 25163 - DNA, 120 bp, synthetic construct
  source 1..120: mol_type = other DNA
gagtcggggtttcaccgtgttaaccaggatagtctaaatctcctgacctcgtgatctaccagcctcggcctcccaaagtgctgggattacaggcgtgagccaccgtgcctggccagagtc

SEQ ID NO: 25164 - DNA, 120 bp, synthetic construct
  source 1..120: mol_type = other DNA
tcttttgctgtgttttctccttattttttaaatgtgtttgtgtttggtgagttatgttttagtgcttcgtaggtttttctttgactatattatattagtaagccacattgttcccatgcc

SEQ ID NO: 25165 - DNA, 120 bp, synthetic construct; identical to SEQ ID NO: 7739
  source 1..120: mol_type = other DNA

SEQ ID NO: 25166 - DNA, 120 bp, synthetic construct
  source 1..120: mol_type = other DNA
aagctgacatttgagtgaagcttgaaggaattgagggagtgaggtgaggcatgtggccatctggggaaagctttccaggcaattacaaaggccgcagtacagcaggatcatgcctagtgt

SEQ ID NO: 25167 - DNA, 120 bp, synthetic construct
  source 1..120: mol_type = other DNA
cacaggaaaattccaggtagagggacactgtctgacaggttttcacagaatcattcaggccactgtgttgagaataggctgtagggggcacaagagtacaaacaagccatttggaggctc

SEQ ID NO: 25168 - DNA, 120 bp, synthetic construct
  source 1..120: mol_type = other DNA
gaaaaatggaattgccacttagaaggaaagactgcaagaaaagcaagtatgtggggaagttcaggagctcagttttagacagttaagttttagatgcttattaggcatctaagtagaaat

SEQ ID NO: 25169 - DNA, 120 bp, synthetic construct
  source 1..120: mol_type = other DNA
atggtctcgatctcctgacctcgtgatccacccaccttggcctcccaaagtgctgggattacaggcatgagccactgcacccggccagtcatacaggggacatttaaagccgtgagactg

SEQ ID NO: 25170 - DNA, 120 bp, synthetic construct; identical to SEQ ID NO: 7740
  source 1..120: mol_type = other DNA

SEQ ID NO: 25171 - DNA, 120 bp, synthetic construct
  source 1..120: mol_type = other DNA
gcatttcaaggatttttgctttaagagaagaagagaaatgaatcagtagccagaaggggaatcaggatcaagagaacatttgctttttcagttgaaagtgctaatagcatactgatgaga

SEQ ID NO: 25172 - DNA, 120 bp, synthetic construct
  source 1..120: mol_type = other DNA
tgaaattggccttagctagcaggagagactgttcatctgtaatcacaggaaaaaagtaaagtacgtaggtatagataccaatggaagagttgatatacaagaggaaacttgtggcagacc

SEQ ID NO: 25173 - DNA, 120 bp, synthetic construct
  source 1..120: mol_type = other DNA
caaggtgggtggatcacgaggtcaggagatggagacaatcctggataacacggtgaaaccccgtctctactaaaaatacaaaaaattagccgggtgtggtggcgggcgcctgcagtctca

SEQ ID NO: 25174 - DNA, 120 bp, synthetic construct; identical to SEQ ID NO: 7741
  source 1..120: mol_type = other DNA

SEQ ID NO: 25175 - DNA, 120 bp, synthetic construct
  source 1..120: mol_type = other DNA
aatgcaaagcaagaagggcaaagaatttgggggtatatgcaaaaggaggatttaaataattgaccttggacacaatgcagagcaaagaagagacattagaagacgtggatcaatgaacag

SEQ ID NO: 25176 - DNA, 120 bp, synthetic construct
  source 1..120: mol_type = other DNA
ggaaatggagttattggaaataaaagtcttgggtatgtccattgcagtgagttaccagtggaaaatagaggacatgatcatttaggaagaaaacaaggaacttgggagcaacagagtatt

SEQ ID NO: 25177 - DNA, 120 bp, synthetic construct; identical to SEQ ID NO: 7742
  source 1..120: mol_type = other DNA

SEQ ID NO: 25178 - DNA, 120 bp, synthetic construct
  source 1..120: mol_type = other DNA
tgaagaggtaggaggagatggtgcccagaaaggccacatccaaagcctggaagcggaatccagggaatttggcatgactgagagcctgtgctgccttttttaaatgttttaatttttgtg

SEQ ID NO: 25179 - DNA, 120 bp, synthetic construct
  source 1..120: mol_type = other DNA
gtcagaggagtccggctaaaccactgcagaactgctgcctaattcacagcaaccatgagtaaaaatgctgatgatcatcaggtcaaggatagtctggagcagttaagatgttactttaca

SEQ ID NO: 25180 - DNA, 120 bp, synthetic construct; identical to SEQ ID NO: 746
  source 1..120: mol_type = other DNA

SEQ ID NO: 25181 - DNA, 120 bp, synthetic construct
  source 1..120: mol_type = other DNA
ctgggtgtattaccacatgggcagactggcagaaacccagacttacctggacaaggtagagaacatttgcaagaagttttcaagtcctttctgtcacagaatggaatgtccagagatgga

SEQ ID NO: 25182 - DNA, 120 bp, synthetic construct; identical to SEQ ID NO: 7743
  source 1..120: mol_type = other DNA

SEQ ID NO: 25183 - DNA, 120 bp, synthetic construct
  source 1..120: mol_type = other DNA
tgcagacctttgtctttggatatgtctttggatatgtcttctcttcttactgaagagaagactttgtggatgaagctcttgagctcttaaaaacctccttgcaggcaactcccacttctg

SEQ ID NO: 25184 - DNA, 120 bp, synthetic construct
  source 1..120: mol_type = other DNA
ctgtatttcatcttcaatctgctgtggaacaaaagcccacatttgaggttgcctatatagaactggcaggaaagtatatagaagcaggcaatcacagaaaagctgaagacacttttcaaa

SEQ ID NO: 25185 - DNA, 120 bp, synthetic construct
  source 1..120: mol_type = other DNA
caataaaaatagaaaaaggcataattttcaagggataaaagtgtcaattctttggagaaactggttttaaggaaacttcagagaaatgcgttagacctggaaagcttaagcctccttagg

SEQ ID NO: 25186 - DNA, 120 bp, synthetic construct; identical to SEQ ID NO: 7744
  source 1..120: mol_type = other DNA

SEQ ID NO: 25187 - DNA, 120 bp, synthetic construct
  source 1..120: mol_type = other DNA
ccactgcactccagcctgggccacagaacgagactgcatctcaaaataaagaaaaaatgataatcatcttttctgcttgctgttttcagaaacatattatgtaattcactgtaatgatgt

SEQ ID NO: 25188 - DNA, 120 bp, synthetic construct
  source 1..120: mol_type = other DNA
gatttgtaggaaacaaaatactggacttacactaaaataaagtgagaaggtcggtgccatgacccagtgtaattcttgactctctatttatccaagattaatttctcccccccttagtta

SEQ ID NO: 25189 - DNA, 120 bp, synthetic construct
  source 1..120: mol_type = other DNA
tttcccagttcagtgagtaacgccgtgtatttatttgctataacaaagaaccatagactgggggcttaaacaacagaaatttgttttctcacagttctggaggctggaaatccaagatca

SEQ ID NO: 25190 - DNA, 120 bp, synthetic construct; identical to SEQ ID NO: 7745
  source 1..120: mol_type = other DNA

SEQ ID NO: 25191 - DNA, 120 bp, synthetic construct
  source 1..120: mol_type = other DNA
tcattataaaccttaatcattagcttttagtattattctttgctgcattactaatataacctaggaataactggcgggtatagggtgaggtgctgaagggacattgtgagaagtgaccta

SEQ ID NO: 25192 - DNA, 120 bp, synthetic construct
  source 1..120: mol_type = other DNA
ctcatttccttggaggagtcagggaacactctgctccaccagcttcttgtggaagcctggatattacgcaggcctgcccgcagtcatccggaggcctaaatcccctccctgtggtgctgt

SEQ ID NO: 25193 - DNA, 120 bp, synthetic construct
  source 1..120: mol_type = other DNA
cttataagtgcagagaagaaaacgctgacgtatgctgccttccctctctgtttcggctacctaaaaggaaagggccccctatcctgtaatcacgtgaattgcttcaccttttcaatcact

SEQ ID NO: 25194 - DNA, 120 bp, synthetic construct; identical to SEQ ID NO: 7746
  source 1..120: mol_type = other DNA

SEQ ID NO: 25195 - DNA, 120 bp, synthetic construct
  source 1..120: mol_type = other DNA
gtagctgggacgacaggcacgtgccaccacacacggctaattttttgtattttaatagagctggggtttcaccatgttgcccagggtggtcttgaactcctgagctcaggcattctgctt

SEQ ID NO: 25196 - DNA, 120 bp, synthetic construct
  source 1..120: mol_type = other DNA
ttcacttccagtacagtatgcaataaattacatgagatattcaacacttttttttttaaaaacaggccttgcgttagatgattttgctcaactgtaggctaatataagtgttctgaacac

SEQ ID NO: 25197 - DNA, 120 bp, synthetic construct
  source 1..120: mol_type = other DNA
gaaagtcacatttattgccacgtgaaggaaagccaattaagtcaaattgattaatgtttgcagagtatatctgtttcgatccttttgtttttaatctacctttgtcgaatttaaagtgag

SEQ ID NO: 25198 - DNA, 120 bp, synthetic construct; identical to SEQ ID NO: 7747
  source 1..120: mol_type = other DNA

SEQ ID NO: 25199 - DNA, 120 bp, synthetic construct
  source 1..120: mol_type = other DNA
tctactagtatcaatattctaccactctaagtgaagtgtgagaattttgctttcattttgattttggagggaaagggattggatagtgaccatatacagacctttttcttccctactttt

SEQ ID NO: 25200 - DNA, 120 bp, synthetic construct
  source 1..120: mol_type = other DNA
tgatagcttatcgtatatgtccatttctcaaactctttccattgtttcttcctccatcctattgtcctcagtcctgatgctctgagagtcttcctttaatcttctcttttctgtttaaac

SEQ ID NO: 25201 - DNA, 120 bp, synthetic construct
  source 1..120: mol_type = other DNA
aattctttctttcagtacttgaaaaatattgtgccacttccctctggcctctggttttagatgagaaatctgtcatcattccaattgatgtgtccctatttaaatgcattttcaactaac

SEQ ID NO: 25202 - DNA, 120 bp, synthetic construct; identical to SEQ ID NO: 7748
  source 1..120: mol_type = other DNA

SEQ ID NO: 25203 - DNA, 120 bp, synthetic construct
  source 1..120: mol_type = other DNA
gtttgtagattttgggtgaatgtttcctttttaaaatttaatttgtttttaagtgttaaagttctattagaaagtttcaaggagccaccttaaaccagaagtctttaacacccagatcta

SEQ ID NO: 25204 - DNA, 120 bp, synthetic construct
  source 1..120: mol_type = other DNA
cacgtcagctaaactctaattttaggctgggcgcagtagctaatgcttgtaatcccaggactttgggaggctgaggcggctcgcaaggctaggagtttgggacaagtctgggcaacagtg

SEQ ID NO: 25205 - DNA, 120 bp, synthetic construct
  source 1..120: mol_type = other DNA
cctttaaaaatcttctttgttttgcatagatgctcttttgttctccccctcttgatgaatttgtcctattcattattcagctcaagtattacctccctagtcagatgcttacagtctggg

SEQ ID NO: 25206 - DNA, 120 bp, synthetic construct; identical to SEQ ID NO: 7749
  source 1..120: mol_type = other DNA

SEQ ID NO: 25207 - DNA, 120 bp, synthetic construct
  source 1..120: mol_type = other DNA
gctcagggtcacaatgctataaattgatttgaacttatactttcaggccctaaagctcttaggttctttcttatacttcatgctgacaaaacaaaagcaaactcaacatttgagagttgg

SEQ ID NO: 25208 - DNA, 120 bp, synthetic construct
  source 1..120: mol_type = other DNA
attaaacgagaacctttcttaggttgggaaagatttgttttggggaaagcctgtttccctgggaaacagacttacagatttcatgtaggagattagaaaatgcccttaggaacagcactt

SEQ ID NO: 25209 - DNA, 120 bp, synthetic construct
  source 1..120: mol_type = other DNA
ggcccttcagagtcttgctagcctgaggcaagagccagtccttgcatactggctcctccagggaggggcatagccttaagcaagacaatgcctttcgacagagggcaagtccaggaggga

SEQ ID NO: 25210 - DNA, 120 bp, synthetic construct; identical to SEQ ID NO: 7750
  source 1..120: mol_type = other DNA

SEQ ID NO: 25211 - DNA, 120 bp, synthetic construct
  source 1..120: mol_type = other DNA
atcagttgtatgataattaaagaaataaggcttccatttcttttgatggaatttgatccagacatggaaacctccacttacgtaaaagtgcaatgaggaaactacactgtttacttttta

SEQ ID NO: 25212 - DNA, 120 bp, synthetic construct
  source 1..120: mol_type = other DNA
agaggcaagttccaaaattagaaaatggaacatgcttgagaaacttataatttctttaaaagcagtgtttaaaattaagatccattaaataaatttgaaatgaaaagaaagaaaagatga

SEQ ID NO: 25213 - DNA, 120 bp, synthetic construct; identical to SEQ ID NO: 7751
  source 1..120: mol_type = other DNA

SEQ ID NO: 25214 - DNA, 120 bp, synthetic construct
  source 1..120: mol_type = other DNA
gctgcggtgacccaagattgcaccactgcaccctagcctaggccacagagtgagactgcgtctcaaaaaaaaaaaaaaaaaattataactctttattttgaactaatttcagacctttaa

SEQ ID NO: 25215 - DNA, 120 bp, synthetic construct
  source 1..120: mol_type = other DNA
catactgtagatgtatttgaaaaattgtttgagtttaaggtattttaccctgtttccccttttttgttctgggatcccaaattgcatttagtcatttttcccctgtattttctaccagtc

SEQ ID NO: 25216 - DNA, 120 bp, synthetic construct
  source 1..120: mol_type = other DNA
tctgatgttttctcatgactaggatgaagttatgcatttctggcaagactaccactgaagtgatgatgtgtctttctcagtacatcatatcaaggggttaatgatactgatcttaatcac

SEQ ID NO: 25217 - DNA, 120 bp, synthetic construct
  source 1..120: mol_type = other DNA
cattcatcagttgattttgtttgcaacaatgattactgtggtatttgcctaattatgatttttctccctttctttccttctacattaattggaattctataaggaaaagctgtgcccttt

SEQ ID NO: 25218 - DNA, 120 bp, synthetic construct; identical to SEQ ID NO: 7752
  source 1..120: mol_type = other DNA

SEQ ID NO: 25219 - DNA, 120 bp, synthetic construct
  source 1..120: mol_type = other DNA
tgccctagtcttggaatcagccatttctcttggcttcttttttttagtagaaaatggtgtttagatccaagatctggttgctagataggctcattactttactgtggaggcatcagtact

SEQ ID NO: 25220 - DNA, 120 bp, synthetic construct
  source 1..120: mol_type = other DNA
ttggttggtttattgggtatgtgaagtatcactgtggttctagggagtcagacctgtacaaaaagatatacttcatgtcacttcctccttatccttgcagtcccaatcctaatcctcctt

SEQ ID NO: 25221 - DNA, 120 bp, synthetic construct
  source 1..120: mol_type = other DNA
acatactctagcctttcttttatgcttttcttttttaactcaacactgtcctggagatcagttcatagaaatcgtcctcactctttttttacagctacgtggtacaccattgtttggatg

SEQ ID NO: 25222 - DNA, 120 bp, synthetic construct
  source 1..120: mol_type = other DNA
catgtgtattttactattattagaggtctatcttcagagaggagtacaagaaatgggattactgggtgcaaaggtaaatggatatgtgtctttgctaggtattgccaaatttatctccag

SEQ ID NO: 25223 - DNA, 120 bp, synthetic construct; identical to SEQ ID NO: 7753
  source 1..120: mol_type = other DNA

SEQ ID NO: 25224 - DNA, 120 bp, synthetic construct
  source 1..120: mol_type = other DNA
taggacttgcccctttcgtctatttgtcagacgaatgttacaatttactggcaataaagttttggatagaccttaatgaggacattattaagcctcatatgttaattgctgcaagcaacc

SEQ ID NO: 25225 - DNA, 120 bp, synthetic construct
  source 1..120: mol_type = other DNA
atttgctggagatttttctgtgttttctgctagtccaaaagagggccactttcaagagacattcaacaaaatgaaaaatactgttgaggtaaggttacttttcagcatcaccacacattt

SEQ ID NO: 25226 - DNA, 120 bp, synthetic construct; identical to SEQ ID NO: 7754
  source 1..120: mol_type = other DNA

SEQ ID NO: 25227 - DNA, 120 bp, synthetic construct
  source 1..120: mol_type = other DNA
tttctttgacttgatttaatcccagataagagacactgatattattttccctagatcatgtatgcattttctgcttaaatctatatatacattatataatattagctggtgtttattgag

SEQ ID NO: 25228 - DNA, 120 bp, synthetic construct; identical to SEQ ID NO: 757
  source 1..120: mol_type = other DNA

SEQ ID NO: 25229 - DNA, 120 bp, synthetic construct; identical to SEQ ID NO: 7755
  source 1..120: mol_type = other DNA

SEQ ID NO: 25230 - DNA, 120 bp, synthetic construct
  source 1..120: mol_type = other DNA
tcactgcagtgtctgcctcctgggctcaagcgattctcgtgccttagcctcccaagtagctgggactacaggtgcgtgccaccacgcccagctaatttttgtatttttagtagagacatg

SEQ ID NO: 25231 - DNA, 120 bp, synthetic construct
  source 1..120: mol_type = other DNA
ttacaggcatgagccaccgagcccgcattttctctgagacgtcttcaaaggcagtttactaatcctgctgaagagacaactgtcatttacacagcattttaaagttttacaaaatactgt

SEQ ID NO: 25232 - DNA, 120 bp, synthetic construct
  source 1..120: mol_type = other DNA
gtaggtgaggcaattctttcttttctctaaccaaagaagtacctttatagatgtgagatgattcccagctattaagtagtaaatagagctaggacttgagccccaatcttccagcttcaa

SEQ ID NO: 25233 - DNA, 120 bp, synthetic construct
  source 1..120: mol_type = other DNA
atactggttttgtaattttgcatcggcatgtttgacaattggtatcacatttagggtttttcattcttttttggtccaaacttttcatttctgcttttaaaggaaatacttttggaaaca

SEQ ID NO: 25234 - DNA, 120 bp, synthetic construct; identical to SEQ ID NO: 7756
  source 1..120: mol_type = other DNA

SEQ ID NO: 25235 - DNA, 120 bp, synthetic construct
  source 1..120: mol_type = other DNA
tattgaagcaagatatgaaactctgggtgcacactttccaaacaggtgctttcatttacatgtgattgaaaagtgttttttgtcatttatttcactgttccatacaattagggttgtttc

SEQ ID NO: 25236 - DNA, 120 bp, synthetic construct
  source 1..120: mol_type = other DNA
ggtatctatattaactcatttaatcctcataacaaccctatgagataaaacctaagtcctcacttaacattgtcaataggtttttggaaactgattttaagggaagtgatgtataacaaa

SEQ ID NO: 25237 - DNA, 120 bp, synthetic construct; identical to SEQ ID NO: 7757
  source 1..120: mol_type = other DNA

SEQ ID NO: 25238 - DNA, 120 bp, synthetic construct
  source 1..120: mol_type = other DNA
gtgattattcttcatcttccttccttttcatgtcattttatatgttcttatgtaaaattactttcatctagaataggaataatgtgaactgaaatcacctaacctattaggagttagggg

SEQ ID NO: 25239 - DNA, 120 bp, synthetic construct
  source 1..120: mol_type = other DNA
cttctcctaattgtgagatatattatcaaagtcctttatcactttgtatggccaaaaggaagtctgtttccacacctgtctcagcccagatgacttcaaagtcttgtaaaggggagaaag

SEQ ID NO: 25240 - DNA, 120 bp, synthetic construct
  source 1..120: mol_type = other DNA
ttcagccaccaaggagttgtggcaccaaatacgaaacacccataaagaaaaaagaactgaattctcctcagatgactccatttaaaaaattcaatgaaatttctcttttggaaagtaatt

SEQ ID NO: 25241 - DNA, 120 bp, synthetic construct; identical to SEQ ID NO: 7758
  source 1..120: mol_type = other DNA

SEQ ID NO: 25242 - DNA, 120 bp, synthetic construct
  source 1..120: mol_type = other DNA
gtttcaaatttacctcagcgtttgtgtatcgggcaaaaatcgttttgcccgattccgtattggtatacttttgcttcagttgcatatcttaaaactaaatgtaatttattaactaatcaa

SEQ ID NO: 25243 - DNA, 120 bp, synthetic construct
  source 1..120: mol_type = other DNA
cccccatctttacaaagaaaaaaaaaaggggaaaagaaaatcttttaaatctttggatttgatcactacaagtattattttacaagtgaaataaacataccattttcttttagattgtgt

SEQ ID NO: 25244 - DNA, 120 bp, synthetic construct
  source 1..120: mol_type = other DNA
tgcaaatatgttggttctgctatagttccatcctgttcaaaagtcaggatgaatatgaagagtggtgtttccttttgagcaattcttcatccttaagtcagcatgattataagaaaaata

SEQ ID NO: 25245 - DNA, 120 bp, synthetic construct; identical to SEQ ID NO: 7759
  source 1..120: mol_type = other DNA

SEQ ID NO: 25246 - DNA, 120 bp, synthetic construct
  source 1..120: mol_type = other DNA
atgatcctggctcactgcagcctccacttcccgggttcacgtaattctcccacctcaagcctccctagtagctgggattacagggacgcaccaccatgcccagctaatttttgcattttt

SEQ ID NO: 25247 - DNA, 120 bp, synthetic construct
  source 1..120: mol_type = other DNA
aatatttgttactttcttaggtttaatagagaaaagggataaaacatttctaactgggagttaattgcatggagaaggtcttaaatcagatgttttaatgccttaaatgtctgtataata

SEQ ID NO: 25248 - DNA, 120 bp, synthetic construct; identical to SEQ ID NO: 7760
  source 1..120: mol_type = other DNA

SEQ ID NO: 25249 - DNA, 120 bp, synthetic construct
  source 1..120: mol_type = other DNA
gggcaaccaactgccttaaacaacgggaaggaagaggcggtctaaattcgtccacttcccgggagaggtgagaatgtaaacacgcgcgttctccaatcagaactgcgctctcttctcggc

SEQ ID NO: 25250 - DNA, 120 bp, synthetic construct
  source 1..120: mol_type = other DNA
ctggagcgttttcggggctgtaaagggagaatggcgcatgcgcatattcagggcggaaggcgcgctaagagcaggtacggagggggcgtggtgcggcgcggagggggtgtggtaagggcg

SEQ ID NO: 25251 - DNA, 120 bp, synthetic construct
  source 1..120: mol_type = other DNA
gctaccgcgttgcgttttctaggcatttacttacacgctttgtggtttacgctctcataaccttgtggttttatagtccttaaattattgtagcgcacgttacttaaatccagaagcaga

SEQ ID NO: 25252 - DNA, 120 bp, synthetic construct
  source 1..120: mol_type = other DNA
caccttgaaggtagtatagagcactgttttctccagcccttgctactaatccatattactctccgctaatatctttccaaaattaggaactatggcgtttcataattcttaggttgggtc

SEQ ID NO: 25253 - DNA, 120 bp, synthetic construct; identical to SEQ ID NO: 7761
  source 1..120: mol_type = other DNA

SEQ ID NO: 25254 - DNA, 120 bp, synthetic construct
  source 1..120: mol_type = other DNA
tttaattttttgaggatttggagtcattttaagcaaaaagaacagtgataagtggacagtaaagagatgagaggggagtgggtcatgggtagtgaaatgagtgagaagcactggaagtga

SEQ ID NO: 25255 - DNA, 120 bp, synthetic construct
  source 1..120: mol_type = other DNA
cctgcatatgtggacggtgttagtccattttcatactgctataaagaaatacccaaaactgggtaatttataaagaaaaagaggtttaatggtctcacagttccaaatggctacggaggc

SEQ ID NO: 25256 - DNA, 120 bp, synthetic construct
  source 1..120: mol_type = other DNA
tcattagaacagcatgggaaaaatcccctccccatgattcagttacttcccactgggtccctctcaccacatgtggggattatgggagctataattcaagatgagatttggatgaggaca

SEQ ID NO: 25257 - DNA, 120 bp, synthetic construct; identical to SEQ ID NO: 7762
  source 1..120: mol_type = other DNA

SEQ ID NO: 25258 - DNA, 120 bp, synthetic construct
  source 1..120: mol_type = other DNA
cagctactcaggaggctgaggcaggagaatggtgtgaacccgggaggcagagcttgcagtgagctgagattgggccactgcactccagcctgggggacagatcgagactccgtctcaaaa

SEQ ID NO: 25259 - DNA, 120 bp, synthetic construct
  source 1..120: mol_type = other DNA
acaaaggggctaaagcccccatgcaagttcaaaatctggcagggcagtcaaatattaaagctccaaaatgatctttggatcattttgacttcgtatctcacagccagatcatgctgatgc

SEQ ID NO: 25260 - DNA, 120 bp, synthetic construct
  source 1..120: mol_type = other DNA
gtgcaagtggtcagtagatctaccattctggggtctggaggacggtggccctcttctcacagttccaccagcagtgccccaggagggactctgtatgggggctcccaccccacatttccc

SEQ ID NO: 25261 - DNA, 120 bp, synthetic construct
  source 1..120: mol_type = other DNA
atttttgacttctgtgcacctgcaggctcaacaccatgtggaagctgccaaggcttcaggcttgcactgtctgaagccaggcctgagctgtacattggccctttttagccatggctggca

SEQ ID NO: 25262 - DNA, 120 bp, synthetic construct; identical to SEQ ID NO: 7763
  source 1..120: mol_type = other DNA

SEQ ID NO: 25263 - DNA, 120 bp, synthetic construct
  source 1..120: mol_type = other DNA
aaagttccacagatctctaggacaggggcaaaatgccactagtctctttgcatagcaagagtgacctttactccaactctgaataagttcctcatctccatcagaaaccacttcagcctg

SEQ ID NO: 25264 - DNA, 120 bp, synthetic construct
  source 1..120: mol_type = other DNA
cagactttcccacattttcctatcttcttctgagccctccaaactgttccaacttctgccagttacccagttccaaagttatttccacagtttcggctgtctttacagtagtgccccact

SEQ ID NO: 25265 - DNA, 120 bp, synthetic construct; identical to SEQ ID NO: 7764
  source 1..120: mol_type = other DNA

SEQ ID NO: 25266 - DNA, 120 bp, synthetic construct
  source 1..120: mol_type = other DNA
ggacataaccaaaccatatcagggacccatctcagagggtgacttctttcaagtctcagagtgtatctaaaaagaaaatgcagattttgtattatactctagaatgtatccatattttaa

SEQ ID NO: 25267 - DNA, 120 bp, synthetic construct
  source 1..120: mol_type = other DNA
aatgacattttaaactgcttacctgtcaagtaaaattgacattccagaaagatgtgaaacgggctgggcacaatggctcatgcctgtaatcccagcactttgggaggccgaggtgggcag

SEQ ID NO: 25268 - DNA, 120 bp, synthetic construct
  source 1..120: mol_type = other DNA
actgaggtgggagaatcgtgtgagccagggaggtagatgttgcagtaaaccaagattgcaccactgtactctagcctgggtgacagagcgagaccctgtctcaaaaaaaaaaaaaaaaaa

SEQ ID NO: 25269 - DNA, 120 bp, synthetic construct; identical to SEQ ID NO: 7765
  source 1..120: mol_type = other DNA

SEQ ID NO: 25270 - DNA, 120 bp, synthetic construct
  source 1..120: mol_type = other DNA
taattaaacatatgattgcctgtcaccaaagtaatactgttgattaatttggattgacaggttcaagactgatttgacattgacagaacaagctgtatcgatggtagtcagttcactggg

SEQ ID NO: 25271 - DNA, 120 bp, synthetic construct
  source 1..120: mol_type = other DNA
tactcaactggttgttttctgccatttaacaaagagaaaaatcattgggattgtttaaacttgctttcacctttgcacctttcagttcaggatgcagtgttcaattgttaacttgggctt

SEQ ID NO: 25272 - DNA, 120 bp, synthetic construct
  source 1..120: mol_type = other DNA
ttgtaattacagccagcttgtccaacccttggcccaggatggctttgaatgcggcccaacacaaattcataaactttcttaaaacattatgagatttatgcaccgacccttttttttgtt

SEQ ID NO: 25273 - DNA, 120 bp, synthetic construct
  source 1..120: mol_type = other DNA
ggatacccctgacaggattccaggattcttttgtaatttctcagaggccctctgtgcatactccgtaaggactatccacattctttattactttcattggcaataggtataaaattttat

SEQ ID NO: 25274 - DNA, 120 bp, synthetic construct; identical to SEQ ID NO: 7766
  source 1..120: mol_type = other DNA

SEQ ID NO: 25275 - DNA, 120 bp, synthetic construct
  source 1..120: mol_type = other DNA
ttctacaggcagtaactcttaaagcccccaaattgggatagtgcattttaatttccgtatactaacaaggacactaaaaatccttgtgattattttaaagcataacactagctgaacttg

SEQ ID NO: 25276 - DNA, 120 bp, synthetic construct
  source 1..120: mol_type = other DNA
agataaaactgatactgaatatcttaaaaataaaaaggcggaaacaacaaaaaaaggagtctatgtagaacactattttttatagcaatgcaaaaactgtacagccggaaatgtgttgta

SEQ ID NO: 25277 - DNA, 120 bp, synthetic construct
  source 1..120: mol_type = other DNA
caacaggcttgaaacaaacccagtgaaaagcaactttattattgagctgaggattgatatcagtaataactcattaataaaaaagcttgataataaaaactcccagtgcctgatgccagc

SEQ ID NO: 25278 - DNA, 120 bp, synthetic construct; identical to SEQ ID NO: 7767
  source 1..120: mol_type = other DNA

SEQ ID NO: 25279 - DNA, 120 bp, synthetic construct
  source 1..120: mol_type = other DNA
cgaggacgtttacttgtgtaaaatgcaccaggaaatagtgacaactgtatgttgtgctatgaggatgtaagagatttatctcaaatggcttagaaatcaaaatataggtcagtgcggtgg

SEQ ID NO: 25280 - DNA, 120 bp, synthetic construct
  source 1..120: mol_type = other DNA
catggtgaaaccccgtctctactaaaaatacaaaaattagctgggcatggtgatgtgcgcctgtaatcccagctaccggggaggctgaggcaggagaaccacttgaacccaggagttgga

SEQ ID NO: 25281 - DNA, 120 bp, synthetic construct; identical to SEQ ID NO: 7768
  source 1..120: mol_type = other DNA

SEQ ID NO: 25282 - DNA, 120 bp, synthetic construct
  source 1..120: mol_type = other DNA
ataatctattctccatgtcagcaaaacaaagatttatctctagggaagaatctctgagtgattcccagggtttgggggttgaactggggacatcttcatgatgaacttaagcccttaaac

SEQ ID NO: 25283 - DNA, 120 bp, synthetic construct
  source 1..120: mol_type = other DNA
taacatttatgacatctttcagacacatgaataggatcagagattaatatacacccatgtacccagcccctggcttaagaaatacatcacaaatataatgaaacccccgtgtgtcctttc

SEQ ID NO: 25284 - DNA, 120 bp, synthetic construct
  source 1..120: mol_type = other DNA
aacagtgtgctctgaaattcttgcatgtttccttcttgtgcacatgtgtgagagtttctacatatatatcaaggtggaggtcatcatcatttgatctccaaagtattgtaccaatttata

SEQ ID NO: 25285 - DNA, 120 bp, synthetic construct; identical to SEQ ID NO: 7769
  source 1..120: mol_type = other DNA

SEQ ID NO: 25286 - DNA, 120 bp, synthetic construct
  source 1..120: mol_type = other DNA
atttgacaactggtcttccttattttttttttaatttttttatttttttggtaacttgctaaagaaaactttttgtaacctgaggttatgaagatttttttctatatcaaaaagtgtaaa

SEQ ID NO: 25287 - DNA, 120 bp, synthetic construct
  source 1..120: mol_type = other DNA
ttaaaagaaccaccatttatttaacatatattcctatgaggctggtctcaactgggctcacccatgtatctgttagtcagttgccagtgaactgagtcactcagcccctggaggttagct

SEQ ID NO: 25288 - DNA, 120 bp, synthetic construct
  source 1..120: mol_type = other DNA
gcaagcctctatgtgcggtgtttgctaacatctcattagccaaagcaagttatgtggctgggctcagactctaagttaaaggcattcgagttacatgataatggaacatggatacagaga

SEQ ID NO: 25289 - DNA, 120 bp, synthetic construct
  source 1..120: mol_type = other DNA
caagctcgcatatttatgggagtatttctgtactctctgttcttttcctatcctaacaccaatcccacactatcttaatttctgtgtttttaaaataagtcttgatgttggtaggacaag

SEQ ID NO: 25290 - DNA, 120 bp, synthetic construct; identical to SEQ ID NO: 7770
  source 1..120: mol_type = other DNA

SEQ ID NO: 25291 - DNA, 120 bp, synthetic construct
  source 1..120: mol_type = other DNA
aaagttaaatttaactgggccacctgtattttacctggaaaaatcctgattttattcaaggtgataatgcagtttacattgcccagccttccttgtagctaggagtggtcacgcgtccac

SEQ ID NO: 25292 - DNA, 120 bp, synthetic construct
  source 1..120: mol_type = other DNA
actcttcctctgtacaacatgataattggagttgtagaagtcattttggaaccacaagatgactctgaaaatggaagctacatgccaagaagttaggcccagaaagagagggatcctggg

SEQ ID NO: 25293 - DNA, 120 bp, synthetic construct
  source 1..120: mol_type = other DNA
tattctcacacacattgagtagcattaggattattttttcctttatagttagaaagaattcttctagaaactatttgggcctgttttgagggtggagaatgggagggaatgattgtttga

SEQ ID NO: 25294 - DNA, 120 bp, synthetic construct; identical to SEQ ID NO: 7771
  source 1..120: mol_type = other DNA

SEQ ID NO: 25295 - DNA, 120 bp, synthetic construct
  source 1..120: mol_type = other DNA
tttttcttaattaggctagccgatcatttgtctttacctttttttttctctaaacaacaactccttggacatacttattcattctgtcatttttctgttttctaatttaatttccactct

SEQ ID NO: 25296 - DNA, 120 bp, synthetic construct
  source 1..120: mol_type = other DNA
tctataaatataatcctcatgtttattttacattcaaggctcttgccagtttttccattcacctcttaattggccgaagattaccctctatgcattttttcaaagaaggctgatgagact

SEQ ID NO: 25297 - DNA, 120 bp, synthetic construct; identical to SEQ ID NO: 7772
  source 1..120: mol_type = other DNA

SEQ ID NO: 25298 - DNA, 120 bp, synthetic construct
  source 1..120: mol_type = other DNA
gtgagttttcttcaattacatctttaattttttttttttttgcttcattatatgttgtctattgttgtataaaaatttaccctacgacctattcagcagcttaaaacaagacccatttat

SEQ ID NO: 25299 - DNA, 120 bp, synthetic construct
  source 1..120: mol_type = other DNA
aagttgtcagctgacctcatggtctcatctgaggctgagttttcttccaaattcaactgatcgttgaaagaatgaatttccttgcagttgtagtattcatggtggcttgcttcttcaagg

SEQ ID NO: 25300 - DNA, 120 bp, synthetic construct
  source 1..120: mol_type = other DNA
gggtaatctcttttgattaactagattaactggcttgggattttaactacatatgtgaaagcccttcacctttgtcatattctattggctagtaacagagtacaatttccacctgcactc

SEQ ID NO: 25301 - DNA, 120 bp, synthetic construct
  source 1..120: mol_type = other DNA
atgcatatgatggatctcgttcactgttctccctgtctatcattttctgtggactccttttcaattctgtatttccattcatgttgcttatttatttacagcatcatctgatttcttttg

SEQ ID NO: 25302 - DNA, 120 bp, synthetic construct; identical to SEQ ID NO: 7773
  source 1..120: mol_type = other DNA

SEQ ID NO: 25303 - DNA, 120 bp, synthetic construct
  source 1..120: mol_type = other DNA
tttatttactcatttttgagtgagtttttcctctactgtaggaggtttatgtgtgaacaaggccattctggttcacagttattttttcttagcacatttaagattttgttttcttacttc

SEQ ID NO: 25304 - DNA, 120 bp, synthetic construct
  source 1..120: mol_type = other DNA
ttatgttgtgtatagatttctttttggttgtcttgaatctatggatttctgtattttattattaaaattctcacctattataccttcaaacatgtgtaatgtgtcatgtgtcattttatg

SEQ ID NO: 25305 - DNA, 120 bp, synthetic construct; identical to SEQ ID NO: 7774
  source 1..120: mol_type = other DNA

SEQ ID NO: 25306 - DNA, 120 bp, synthetic construct
  source 1..120: mol_type = other DNA
catatatgtcttccatgtctcatcttctttttttcccttttgtcatctctgtggtacattctaaacaaattttttaatgattctaacggccatgccacaaaatgtctccatttggtttta

SEQ ID NO: 25307 - DNA, 120 bp, synthetic construct
  source 1..120: mol_type = other DNA
gatcttagctcactgccacctccgcctctgagctcaagcaatcgccctaccttagccacccaagtagctgggactacaggcatgcaccaccacacacagctaatttttgtattttttgta

SEQ ID NO: 25308 - DNA, 120 bp, synthetic construct
  source 1..120: mol_type = other DNA
atatcttattcttttacctgttttagagtcctctgagtacttctttaatcaacttcagtgtacttatttgaaaattttcactagtaatccttccatctgaagttgttgggggcctgattt

SEQ ID NO: 25309 - DNA, 120 bp, synthetic construct; identical to SEQ ID NO: 7775
  source 1..120: mol_type = other DNA

SEQ ID NO: 25310 - DNA, 120 bp, synthetic construct
  source 1..120: mol_type = other DNA
gcagatatttgtttttgtccatcctttcaataaaggaatcattccttaaggttcctagctatatgcacagatctcactccaacctccacatcttgtctttctgtccttcatggtctttaa

SEQ ID NO: 25311 - DNA, 120 bp, synthetic construct
  source 1..120: mol_type = other DNA
atgctcacaataaaattgagcagaaagtacagaaagtttacatatactccctgtcctgatacatgcatagccttccctgttatcaatatcccagactagaatggtatgtttgttataatc

SEQ ID NO: 25312 - DNA, 120 bp, synthetic construct
  source 1..120: mol_type = other DNA
tttccaccactggaaatgttacatattggaatcatacagtatgtagcctttacagattggtttctttcctttagtaatatacatctaaggttcctccatatcttttcatggcttgatagc

SEQ ID NO: 25313 - DNA, 120 bp, synthetic construct; identical to SEQ ID NO: 7776
  source 1..120: mol_type = other DNA

SEQ ID NO: 25314 - DNA, 120 bp, synthetic construct
  source 1..120: mol_type = other DNA
gcggtggctcacacctgtaatcccggcaattttgggaggccgaggtgggtggatcacctgaggtcaggagtttgagacaagcctgaccaaaatagagaaaccctgtctctactaaaaata

SEQ ID NO: 25315 - DNA, 120 bp, synthetic construct
  source 1..120: mol_type = other DNA
actccagcataggggacaagagcgagacttcatcttcaaaaaaaaaaagttttgtttttttcctttcaccaaactaagcatttagtcttgtcagtgttttggattttgactattctaata

SEQ ID NO: 25316 - DNA, 120 bp, synthetic construct
  source 1..120: mol_type = other DNA
tttgcttattttattttatttatgtatttttttttcgagtctcactctgtcacccaggctggagtgcagtggtgcaatctcggctcactgcaacctccgcctcctgggttaaagcaattc

SEQ ID NO: 25317 - DNA, 120 bp, synthetic construct
  source 1..120: mol_type = other DNA
ttgacctcgtgatctgcctgccttggcctcccaaagtgctgggattataggcatgagccaccatgcccggccttttgcctattttttaatcaagttgtttactttcttattgttgagttt

SEQ ID NO: 25318 - DNA, 120 bp, synthetic construct; identical to SEQ ID NO: 7777
  source 1..120: mol_type = other DNA

SEQ ID NO: 25319 - DNA, 120 bp, synthetic construct
  source 1..120: mol_type = other DNA
tcacattgcctttgctcctttgtcaaagatgagttaactatagcctggtgtgcagtggtacacacttgtagtcccagctgctcagtagagttcaatagttttctttaggaggctgaggta

SEQ ID NO: 25320 - DNA, 120 bp, synthetic construct
  source 1..120: mol_type = other DNA
tctctattctgttccatctatttgtctgttctttggccaattgataaaatatcatgttgtcttgattactacagttttataatgtcttgaagttggtagtgtgagttttctgacttcatt

SEQ ID NO: 25321 - DNA, 120 bp, synthetic construct; identical to SEQ ID NO: 7778
  source 1..120: mol_type = other DNA

SEQ ID NO: 25322 - DNA, 120 bp, synthetic construct
  source 1..120: mol_type = other DNA
catatgcagtttagaatcagtttgttgatacctacaaaataacttgttgggatttcagttgggattgtgttgaatctatagatcaagttgttcgcaagaactgacatcttaacgatattg

SEQ ID NO: 25323 - DNA, 120 bp, synthetic construct
  source 1..120: mol_type = other DNA
atataaatagtattatggtttttaaaatttttttcttttttatttttttgagtctcactctgtcacccaggctagagtgcagtggtgcgatctcggctcactgcaagctccacctcccgg

SEQ ID NO: 25324 - DNA, 120 bp, synthetic construct
  source 1..120: mol_type = other DNA
ggtctcaatctcctgacctcgtgatccacctgcctcagcctcccaaagtgctgggattacaggcgtgagccactgtgcccagccaatagtattatgttttaaatttaaaagtccactgtt

SEQ ID NO: 25325 - DNA, 120 bp, synthetic construct; identical to SEQ ID NO: 7779
  source 1..120: mol_type = other DNA

SEQ ID NO: 25326 - DNA, 120 bp, synthetic construct
  source 1..120: mol_type = other DNA
agtttactgagagttattatcattccaaatgggtattgtacttcgtcaaatacatctatttgacatctatttttctgtgtctattgatataatcatgtgatttttcttttctttttttga

SEQ ID NO: 25327 - DNA, 120 bp, synthetic construct
  source 1..120: mol_type = other DNA
taaattgattttcaaatattgaaccaacctttcatacctgagataaatctcacttagtcatggtgtataatttcttctatggattgttagattcaatttgctaatatttgttggtgtaaa

SEQ ID NO: 25328 - DNA, 120 bp, synthetic construct
  source 1..120: mol_type = other DNA
ctgaattctctagggagatactgggagaacccacccccaatatttcaacgtaagttctattttccataagtgtcagctggctgagaaataaagagagacagtacaaagagaggaatttta

SEQ ID NO: 25329 - DNA, 120 bp, synthetic construct
  source 1..120: mol_type = other DNA
gatacaaagatcacatgcttcaaagggcaaaaagcagaaccactgataagggtctaacaaagatcacatgcttctgagggaacagggcaaagggcaaaagcagaaccactgataagggtc

SEQ ID NO: 25330 - DNA, 120 bp, synthetic construct; identical to SEQ ID NO: 7780
  source 1..120: mol_type = other DNA

SEQ ID NO: 25331 - DNA, 120 bp, synthetic construct
  source 1..120: mol_type = other DNA
aggctctctgcaagaagaaaaatgtggctcttttagcccaaccccacaggcagtcagaccttatggttgtcttcccttgttccataaaaatcgctattattctgttctttttcaaggtgc

SEQ ID NO: 25332 - DNA, 120 bp, synthetic construct
  source 1..120: mol_type = other DNA
attaaagacaggcataagaaattataaaagtgttatttgagaactgataaatgtccatattaagatgaaatcttcacaatttatgttcctctgccgcagctccagctggtccctccattc

SEQ ID NO: 25333 - DNA, 120 bp, synthetic construct
  source 1..120: mol_type = other DNA
acaggccatctgcaagctggagaccctggaatgtcaatggcataactcagtccaaggccgaaggcctgagaacccagggggctgctggtgcaagtcctggagtccacaggccagggagtt

SEQ ID NO: 25334 - DNA, 120 bp, synthetic construct; identical to SEQ ID NO: 7781
  source 1..120: mol_type = other DNA

SEQ ID NO: 25335 - DNA, 120 bp, synthetic construct
  source 1..120: mol_type = other DNA
tttctgtcttctggaagacatagtagagaattggtataatttatttctgaatgtttggtagaattcaccaatgaacccacctggactgggtgatctctgttttaaaatattttgaattat

SEQ ID NO: 25336 - DNA, 120 bp, synthetic construct
  source 1..120: mol_type = other DNA
tggagtttcgctcttgttgcccaggctggagtgcaatggtgcgatcttggctcactgcaacctctgcctccctggttcaagcaattctcctgcctcagcctcctgagtagctggaattac

SEQ ID NO: 25337 - DNA, 120 bp, synthetic construct; identical to SEQ ID NO: 7782
  source 1..120: mol_type = other DNA

SEQ ID NO: 25338 - DNA, 120 bp, synthetic construct
  source 1..120: mol_type = other DNA
gaaccagaatttagtttcatttttctctattgatctcctgctttacatttcattgatttctattctagtgtttattatttctgtcattcttcttactttggaattaagttgctcttcttt

SEQ ID NO: 25339 - DNA, 120 bp, synthetic construct
  source 1..120: mol_type = other DNA
ctgacccatttgttatttaaaactgtgcagttttatttccaagtattttgggtatttcttgctaaatttatgttattgatttttagtttaattctactgtggtctgagagcagatattgt

SEQ ID NO: 25340 - DNA, 120 bp, synthetic construct
  source 1..120: mol_type = other DNA
agtctatagatgtcccttgtatacagttgattgatggtgctactgaattcaactatgtccttactgattttctgcattctggattttatccattactgatagaggggtgttgaagtttac

SEQ ID NO: 25341 - DNA, 120 bp, synthetic construct; identical to SEQ ID NO: 7783
  source 1..120: mol_type = other DNA

SEQ ID NO: 25342 - DNA, 120 bp, synthetic construct
  source 1..120: mol_type = other DNA
agcaaaggcatgtcttacatggtagcagacaagagtttgtgcagaggagcttccatttataaaaccatcagatttcatgagacttattcactaccatgagaacagtatgtgggaaaccac

SEQ ID NO: 25343 - DNA, 120 bp, synthetic construct
  source 1..120: mol_type = other DNA
tccatccatttactacacaatctacatgtgtctttataaagtgggtttcttgtagacaacatatagttgagtcatgttttttatctactgtaatgatctcttgtttcgaattgatatatt

SEQ ID NO: 25344 - DNA, 120 bp, synthetic construct
  source 1..120: mol_type = other DNA
tgagttttggtgttttaattgaacattttatgtgattttgtcacatgattttgtctgaaagtatcttatttctctgcttttgaaggttaattttgtaggatgtttatatggtttggctct

SEQ ID NO: 25345 - DNA, 120 bp, synthetic construct; identical to SEQ ID NO: 7784
  source 1..120: mol_type = other DNA

SEQ ID NO: 25346 - DNA, 120 bp, synthetic construct
  source 1..120: mol_type = other DNA
caggtagttctttatagcagtgtgagaatggactaatacagacgcacaatgctaggctggtacttttttcctctcaacactttaaatatttcacatcactgtcttattgtttacatgatt

SEQ ID NO: 25347 - DNA, 120 bp, synthetic construct
  source 1..120: mol_type = other DNA
ctacatgtagatttttttattttttattttcgtttttggcagttaacctgattggtgttctctgagcttcctgggtctgtggtttagtgtctgatattaatctggggaaattctcagtca

SEQ ID NO: 25348 - DNA, 120 bp, synthetic construct
  source 1..120: mol_type = other DNA
gcttttcagttttgggcatttctattgtcatattctcaagctcagggattccttcctcagccatgtccaatctactaatgaatccattaaagtgattcttcatttctgttagtgtttttt

SEQ ID NO: 25349 - DNA, 120 bp, synthetic construct; identical to SEQ ID NO: 7785
  source 1..120: mol_type = other DNA

SEQ ID NO: 25350 - DNA, 120 bp, synthetic construct
  source 1..120: mol_type = other DNA
tagctgggactataggcgtgtgccaccaagcctggccaatttttgtatttttagtaaagacagggttttgccatgttggccaggctggtcttgaactcctggccttaagctccttagcct

SEQ ID NO: 25351 - DNA, 120 bp, synthetic construct
  source 1..120: mol_type = other DNA
aagttggactcgatgtactaagtaaaggaacagcagtaaaaaggcatttaattgaaatgtggtgggagggaatgtgttctattgtctttagggatctttagggagcctgtgtttatggac

SEQ ID NO: 25352 - DNA, 120 bp, synthetic construct
  source 1..120: mol_type = other DNA
aaatagtttctctggaggagaggcctgctaaagaccagaatgctttgtttcctttccctcttcctctggcagaagcatgggaggatttttttctccagtcttcattgtgagaacctggta

SEQ ID NO: 25353 - DNA, 120 bp, synthetic construct
  source 1..120: mol_type = other DNA
gagtctcactctcatgccaggctggagtgcagtggtgcgatctcggctcactgcaatctccacctcccgggttcaagcaattctcctgtctcggcctcccaagtagctgggactacaggc

SEQ ID NO: 25354 - DNA, 120 bp, synthetic construct; identical to SEQ ID NO: 7786
  source 1..120: mol_type = other DNA

SEQ ID NO: 25355 - DNA, 120 bp, synthetic construct
  source 1..120: mol_type = other DNA
tctgatacctaattctaatttatgctagcttttctaacatttgatattcaacttctgattttgagtttatttttgtgtatggcctaagatgctattattcctgttgttattcatccatcc

SEQ ID NO: 25356 - DNA, 120 bp, synthetic construct
  source 1..120: mol_type = other DNA
tctccttctactttaagagtaacttcttcacaaaaggagctagatgatcctctgctttgcctctaatgctgaggaatgttgcacctacaactatcatggaagacgctgaaacctccatta

SEQ ID NO: 25357 - DNA, 120 bp, synthetic construct; identical to SEQ ID NO: 7787
  source 1..120: mol_type = other DNA

SEQ ID NO: 25358 - DNA, 120 bp, synthetic construct
  source 1..120: mol_type = other DNA
aaaaaaaaaaaaaaagaaaagaaaagaaaaagaagctataggacataggggagctagtcatatgtctgtcctactgagactctagatggcacaaggcaatggcacttgtgttagaaccag

SEQ ID NO: 25359 - DNA, 120 bp, synthetic construct
  source 1..120: mol_type = other DNA
gatagagatactaatcatttctctacacatctgccatgccatgggtgaagaagacagccaagttggtgaacagatctggaaaggttaccatcattcttgattgagctctgccctccaacc

SEQ ID NO: 25360 - DNA, 120 bp, synthetic construct
  source 1..120: mol_type = other DNA
caacccctgcctcccaggctcaagtgatgctcccatctcatccttccgagtagctaggactacaagtgcatgccaccatgcccagctaattaaaaaaatttttttttggtagagacagtg

SEQ ID NO: 25361 - DNA, 120 bp, synthetic construct; identical to SEQ ID NO: 7788
  source 1..120: mol_type = other DNA

SEQ ID NO: 25362 - DNA, 120 bp, synthetic construct
  source 1..120: mol_type = other DNA
gcacgatctcggctcactgcaatctctgcctccgaggttcaagctattctcttgcttcagcctcccaagtagctgggattacagtgcctgccaccacgcctggctaattttttgtgcttt

SEQ ID NO: 25363 - DNA, 120 bp, synthetic construct
  source 1..120: mol_type = other DNA
cccaagggttattcttttgatttggggaacagggttccttggccctattacccaccacattgttctccactctttgcatcctgagcatctccatctgcatttttcactcctgagtactgg

SEQ ID NO: 25364 - DNA, 120 bp, synthetic construct
  source 1..120: mol_type = other DNA
aagcttagagattctgtatccaccacaggcttagagaggttgtatccatcatacagttatgttgcatccaccatacatctagagatgttgtgtgcactatacaatcagcaatattgtgtc

SEQ ID NO: 25365 - DNA, 120 bp, synthetic construct; identical to SEQ ID NO: 7789
  source 1..120: mol_type = other DNA

SEQ ID NO: 25366 - DNA, 120 bp, synthetic construct
  source 1..120: mol_type = other DNA
gctttatgtgtgtgtattttccttgctgcctggtcaaggtctccaatcaatagtttaagactttttcacagttcattttcgaccaccgaagatttcctttaactttcctgcaaactcaaa

SEQ ID NO: 25367 - DNA, 120 bp, synthetic construct
  source 1..120: mol_type = other DNA
aaccaataacaacctggttcttcaatggtattcctgccatagctaagacaagcactgagtcctttaactgacctgcatcaaattgtttaggggagatttttccttctagtttgagtgttt

SEQ ID NO: 25368 - DNA, 120 bp, synthetic construct
  source 1..120: mol_type = other DNA
agaggcacctgagaaatgaagatgatgtttctgactcataactttctttgacataagggaacaataggagtcagaatataggatatacattcctctatcttctactcaattggttctcca

SEQ ID NO: 25369 - DNA, 120 bp, synthetic construct; identical to SEQ ID NO: 7790
  source 1..120: mol_type = other DNA

SEQ ID NO: 25370 - DNA, 120 bp, synthetic construct
  source 1..120: mol_type = other DNA
tcaagcgattctcctgcctcagcctcccggagtagctgggattacagacacgtgccaccatgcccggcaaactttttgtatttttagtacagacagggtttcacctccgcagtggtcatt

SEQ ID NO: 25371 - DNA, 120 bp, synthetic construct
  source 1..120: mol_type = other DNA
gtctcattatcattactaaccagtcctggagttttccctcaccatgaagatggaatttttaccatctgctttctctgctttgtgtggcaggaagataaaaaaataataataatggatatt

SEQ ID NO: 25372 - DNA, 120 bp, synthetic construct
  source 1..120: mol_type = other DNA
catccagtcatattgtatgaaattgcaacaaattcaaaaagatgccatcgtgggagtgtggtgagtaaaaaacagctttcatgaaactcaaatcttgaaagtcagatgctttctgggtct

SEQ ID NO: 25373 - DNA, 120 bp, synthetic construct; identical to SEQ ID NO: 7791
  source 1..120: mol_type = other DNA

SEQ ID NO: 25374 - DNA, 120 bp, synthetic construct
  source 1..120: mol_type = other DNA
ttgaaatgtcaagatcctttgattgcacatttggtttcctaggataaattattctagccaatggagcagaaactggctaatcaaaggcacagtgcacagttacacttctgtatatcattc

SEQ ID NO: 25375 - DNA, 120 bp, synthetic construct
  source 1..120: mol_type = other DNA
ttgataacttattcacagttgctggtgagttcaggcttaaatcatcagctgtcactcacaagtgtttacccttgaactttccgaatgagacatcaaacgtcttggtagtgggtgggttta

SEQ ID NO: 25376 - DNA, 120 bp, synthetic construct
  source 1..120: mol_type = other DNA
ttccaggggccggtcacggacaagctcatgaccagcacactcagatgtgacaatcagataacaagaggcaagagaagactttctgggaaataaaagatcatttttgtgatttctttaaat

SEQ ID NO: 25377 - DNA, 120 bp, synthetic construct; identical to SEQ ID NO: 7792
  source 1..120: mol_type = other DNA

SEQ ID NO: 25378 - DNA, 120 bp, synthetic construct
  source 1..120: mol_type = other DNA
aattattaagaatgccttaataataatccctctcattttatttcagaagacactattgtaatagcatggctaggaaggaaacacagctaattattaagatgaatcatttagcaaggtggg

SEQ ID NO: 25379 - DNA, 120 bp, synthetic construct
  source 1..120: mol_type = other DNA
actgatttttcctattagatggaaagaaccttcctgatcaggactggtgttgggggaatgttttccttatgaaatcagaagcagagcttctgtagggccgtccaagatcaggatgcttac

SEQ ID NO: 25380 - DNA, 120 bp, synthetic construct
  source 1..120: mol_type = other DNA
aagagtttcagaggtgcaccttggtagactcaggctttctctggatctcactggctgctcttatgagtccagaatggaagaggatgaggacaaatgcagggggatgttaggagaccacta

SEQ ID NO: 25381 - DNA, 120 bp, synthetic construct
  source 1..120: mol_type = other DNA
tgcctcaggctctctgcctgccgtgctctcacctcgcagacccacgtgatttcctcccgaacccccttcaggcctcggtccaaacatcaccctctcatcgaggtcttccttgaccacact

SEQ ID NO: 25382 - DNA, 120 bp, synthetic construct; identical to SEQ ID NO: 7793
  source 1..120: mol_type = other DNA

SEQ ID NO: 25383 - DNA, 120 bp, synthetic construct
  source 1..120: mol_type = other DNA
tacattgccaccttgtcacacctctagttaccattttctttatggtccaggtcctgaccagctctaaagatgggtcagctgctgtatttccaagaaccccatgacttccagggccccttg

SEQ ID NO: 25384 - DNA, 120 bp, synthetic construct
  source 1..120: mol_type = other DNA
cactttacaactgagcacctcccgctgctgcctgctgaacccttcagagtccttgccacaggccctatttactttttcctgagaaggtatgtgtgatgccaaagagagaaaagcagcatt

SEQ ID NO: 25385 - DNA, 120 bp, synthetic construct
  source 1..120: mol_type = other DNA
cttatatcaaatggtgtagaatttacatgtaacctaaacacttcctcctgtacactttaaatcatctctagatcccttacactacctaatacaaactaaatgctatataaataattgtta

SEQ ID NO: 25386 - DNA, 120 bp, synthetic construct; identical to SEQ ID NO: 7794
  source 1..120: mol_type = other DNA

SEQ ID NO: 25387 - DNA, 120 bp, synthetic construct
  source 1..120: mol_type = other DNA
ttttatcttctccagatagaaagaaatgtgataccttgcggattttgcggtttccttgttttgctggattgcaagtcctttagacataaacaaatgttctgtaccccgacatcggtggta

SEQ ID NO: 25388 - DNA, 120 bp, synthetic construct
  source 1..120: mol_type = other DNA
tcttagtgaggcctttgcgttatacttcagaaatattgtcagtatgactttgaagatgaaagtttgcccccaaaatcactctctgttatcattgtgaaaccagagatggaatggaaaaat

SEQ ID NO: 25389 - DNA, 120 bp, synthetic construct; identical to SEQ ID NO: 7795
  source 1..120: mol_type = other DNA

SEQ ID NO: 25390 - DNA, 120 bp, synthetic construct
  source 1..120: mol_type = other DNA
aaaaataaagaaatttgtagcctggggagtttggttttaaaatgcaaacacaggagttatgagttgagacttggacagggtgtcattttctttttaaagggcagcaatatgattctttga

SEQ ID NO: 25391 - DNA, 120 bp, synthetic construct
  source 1..120: mol_type = other DNA
acgctttagctgggaggccaggctgatttttaaaggcagaattggactatttactctaaaacagtaatgcacactgtttagaaagaaacattcctattctgggaggaaggaggagacaca

SEQ ID NO: 25392 - DNA, 120 bp, synthetic construct
  source 1..120: mol_type = other DNA
ttccaaatgagtaggcttttgagcaagagttttggagtcacagagatggggttaagaaagtgataatgtgcaatggcgattctcaagttcaaggagaaaaaataacatgcttttattggg

SEQ ID NO: 25393 - DNA, 120 bp, synthetic construct; identical to SEQ ID NO: 7796
  source 1..120: mol_type = other DNA

SEQ ID NO: 25394 - DNA, 120 bp, synthetic construct
  source 1..120: mol_type = other DNA
taagtgcacagctagaaaagtgggtagtgacgcactacagtcttgctgaacactgggtaagaaaatcatagcaaacgttgagtctgttttggaaatgttctaaaaccagactattaacac

SEQ ID NO: 25395 - DNA, 120 bp, synthetic construct
  source 1..120: mol_type = other DNA
attaataaatcacagctgcaaacgttaaattcttggcaggattctttattcagctgttttccccttgccccattacattccagatttgtggtctgcattatgtctggagccagaagtaag

SEQ ID NO: 25396 - DNA, 120 bp, synthetic construct
  source 1..120: mol_type = other DNA
ggctgaatattatgtggctgccgtgtatgagcatccatccatcctgagtctgaaccctctggctctcatcagccgccaagaggccttggagctcatgaaccagaaccttgacatctatga

SEQ ID NO: 25397 - DNA, 120 bp, synthetic construct; identical to SEQ ID NO: 7797
  source 1..120: mol_type = other DNA

SEQ ID NO: 25398 - DNA, 120 bp, synthetic construct
  source 1..120: mol_type = other DNA
gtgcattgcagcaggatccccaggtgatgctttcacatggcaagtatgagaagcccaggactagatccccagttctcaagtgtggttgtacataagaatcacgaggtaagtggtaaacac

SEQ ID NO: 25399 - DNA, 120 bp, synthetic construct
  source 1..120: mol_type = other DNA
tgggcgtgatgacctctctgagtcattcgaagcttcactgaagtagtaagcatctgcaagaatgccgtttgctcccttcagactgtttgaggctcgtttccggtctctatgtcggactac

SEQ ID NO: 25400 - DNA, 120 bp, synthetic construct
  source 1..120: mol_type = other DNA
ggggacaaaggagaggcccccctgggggcaaagagggaaatatcagaggttgcctaagaaaatgccctgctggaaaacacaaacccgaagggaagtttgggctgtaactctggtggcagg

SEQ ID NO: 25401 - DNA, 120 bp, synthetic construct
  source 1..120: mol_type = other DNA
aaacagtccctgccttagagcagggtggtcgggatggcctggacagccacagcaattaaaaaattgcaacattttaaaattttagtctataatatatatacaaaggctatgtgtatgggg

SEQ ID NO: 25402 - DNA, 120 bp, synthetic construct; identical to SEQ ID NO: 7798
  source 1..120: mol_type = other DNA

SEQ ID NO: 25403 - DNA, 120 bp, synthetic construct
  source 1..120: mol_type = other DNA
gccatcttctccacctttgaggacagctgtcatgatccccctggcatctgtcccccaggctgtatcctcagtcccttccacagttccttaggagactcagtttccaaaccttctactgaa

SEQ ID NO: 25404 - DNA, 120 bp, synthetic construct
  source 1..120: mol_type = other DNA
cagccacatgtctcattatgggtgtataaggcacttgctgtcaactaaaacaccttttcacatgagcagacacacatgctgccattgccatcctgtacttataaattataaaggtgattg

SEQ ID NO: 25405 - DNA, 120 bp, synthetic construct; identical to SEQ ID NO: 7799
  source 1..120: mol_type = other DNA

SEQ ID NO: 25406 - DNA, 120 bp, synthetic construct
  source 1..120: mol_type = other DNA
gagacatttggcaaatgacacactgaaacccagactgtggctgtagaattctcctgcattcacctttcaataatctgcccccagaggaaacacttaacacggttttgttgaaaccacgcc

SEQ ID NO: 25407 - DNA, 120 bp, synthetic construct
  source 1..120: mol_type = other DNA
ttgtttgttttccagcagcacttttatttttccttacacgatgacatgttgctggggcctattgttctcacataacagtagaaaaccaaaatttgttgtcatctcttcaaagaatcgaga

SEQ ID NO: 25408 - DNA, 120 bp, synthetic construct
  source 1..120: mol_type = other DNA
aagaaaggaaactgggtcctaagtcttggactttccaacccttacagaccggcagaacagaaacaactggttcaggagcccttgccagcctccagagaaatcccagaacacgcagccctg

SEQ ID NO: 25409 - DNA, 120 bp, synthetic construct
  source 1..120: mol_type = other DNA
agggttgaaatcaaagatatgtacagggtattaagcaaatctggttatatgttttaaaacaacttctaagacaaattgatggcaagtttgtgtgaaagttttatatcaaagttgttataa

SEQ ID NO: 25410 - DNA, 120 bp, synthetic construct; identical to SEQ ID NO: 7800
  source 1..120: mol_type = other DNA

SEQ ID NO: 25411 - DNA, 120 bp, synthetic construct
  source 1..120: mol_type = other DNA
tgactatatttctgtctcagtaggggcattcataggggaaaaacggagtctagtttcaagatgattaggctgggcagtcacttgggattgtaaccttcattcctcagaaggaaggggttc

SEQ ID NO: 25412 - DNA, 120 bp, synthetic construct
  source 1..120: mol_type = other DNA
tcacatcagacccaaaattttgcccagctcaggtttggttcctctcctcattcctggttgataataatctagtatgtatacataatttaaatgttattctccatgaaaaaccaaagtttt

SEQ ID NO: 25413 - DNA, 120 bp, synthetic construct; identical to SEQ ID NO: 7801
  source 1..120: mol_type = other DNA

SEQ ID NO: 25414 - DNA, 120 bp, synthetic construct
  source 1..120: mol_type = other DNA
tgcatctccatcttgccttatttttaggtttgagataatttttctttacatggtcattgctaagtgtgcaatgagatgatactgtactggaaggaacatacattggtatagtatttctgg

SEQ ID NO: 25415 - DNA, 120 bp, synthetic construct
  source 1..120: mol_type = other DNA
ggagtttgagaccagcctgatggtgaaaccccatctccactaaaaatacaaaatttagccaggtgtggtggcgcatgtctgtaatcccagctactcaggaggctgaggcacgagaattac

SEQ ID NO: 25416 - DNA, 120 bp, synthetic construct
  source 1..120: mol_type = other DNA
ccctttgatccagtaatttcacttgtaagactttattccaaagaaataatcaaaagatgcaatcaaagatttgtgtgaagtgtataattatgcaataagtgttttgagcacactatgcag

SEQ ID NO: 25417 - DNA, 120 bp, synthetic construct
  source 1..120: mol_type = other DNA
aaagttttttttttttccttttttttttgtggtggagtttcactttgtcacccaggctggagtgcaatggtgcgatctcagctcaccgcaacctctgcctcccgggttccagtgattctc

SEQ ID NO: 25418 - DNA, 120 bp, synthetic construct; identical to SEQ ID NO: 7802
  source 1..120: mol_type = other DNA

SEQ ID NO: 25419 - DNA, 120 bp, synthetic construct
  source 1..120: mol_type = other DNA
caggaaaaaaatttaaaagtttgcaatgcattccagaaataagtgtctcaaactttgctaatttgaattgttcatgccttctctgcctgccttctccaccttcctccctggggctggtgt

SEQ ID NO: 25420 - DNA, 120 bp, synthetic construct
  source 1..120: mol_type = other DNA
ttccgggccatcacagccagggaacacaggatgttgccaggtgtgggaaaaggcctttagggtggtcagagtcccgaagggagcctcctaattcccagttggggaatggagatttcaagc

SEQ ID NO: 25421 - DNA, 120 bp, synthetic construct; identical to SEQ ID NO: 7803
  source 1..120: mol_type = other DNA

SEQ ID NO: 25422 - DNA, 120 bp, synthetic construct
  source 1..120: mol_type = other DNA
tttcaatggagcttacacattccctccttccctcacatgaccccaggcacagttaatggttgttcctagaggactttgtctttgttccttggggatcaggtggagtgagacagtatcccc

SEQ ID NO: 25423 - DNA, 120 bp, synthetic construct
  source 1..120: mol_type = other DNA
ttcctgccatctgataacagactattctttgatgttttcattttcaggatgtacagattatagtgtttccagaagatggcattcatggattcaactttacaagaacatccatttatccat

SEQ ID NO: 25424 - DNA, 120 bp, synthetic construct
  source 1..120: mol_type = other DNA
gtgatctaagtcagggaccagaagctgtgacatgttaactaagattgataggagaccttaacatccccaaaatccaacccaaactcccaaagatccatgtgccacatgttcattccatta

SEQ ID NO: 25425 - DNA, 120 bp, synthetic construct; identical to SEQ ID NO: 7804
  source 1..120: mol_type = other DNA

SEQ ID NO: 25426 - DNA, 120 bp, synthetic construct
  source 1..120: mol_type = other DNA
agtagctgggactacaggcacccaccaccacgcccggctaattttttttgtgtgtgtatttttagtagagatggggtttcaccatgttagccaggatggtctcgatctcctgaccttgtg

SEQ ID NO: 25427 - DNA, 120 bp, synthetic construct
  source 1..120: mol_type = other DNA
tttttgtaaacatgttcaagtttttctgtaaaataaaatttttagaaatgaaatccctcaggccaggtgtggtggctcacacctgtaatcccagctacttgggaggctgaggcaggagaa

SEQ ID NO: 25428 - DNA, 120 bp, synthetic construct
  source 1..120: mol_type = other DNA
taaagagtaccaaatttcccgcttaaaaaactttgatttcactttacagccccagtcatacagtatgagtgcctctttttccatcctttggtcaatgcaagatagaataatcttttgagc

SEQ ID NO: 25429 - DNA, 120 bp, synthetic construct; identical to SEQ ID NO: 7805
  source 1..120: mol_type = other DNA

SEQ ID NO: 25430 - DNA, 120 bp, synthetic construct
  source 1..120: mol_type = other DNA
aatttgcacttctctctcactaatgagattgagcatcttttgagatgtttgtgggtcacttttctttgtccttctgtgaatcacctgtttatatcctttgcacattttcagtagtggttg

SEQ ID NO: 25431 - DNA, 120 bp, synthetic construct
  source 1..120: mol_type = other DNA
ctgagacgagaggattgcttgaggccaggagtttgagtccagcctgggcaatgtaacaagaccctgtctctgaaaaaaaaaaaaaagaaaagaaagaaaaaaaaaagaagaggaagcaaa

SEQ ID NO: 25432 - DNA, 120 bp, synthetic construct
  source 1..120: mol_type = other DNA
cgcgatctcggctcactgcaagctccgcctactgggttcacgccattctcctgcctcagcctcccgagtagctgggactacaggcatccaccaccacgcccggctaattttttgtatttt

SEQ ID NO: 25433 - DNA, 120 bp, synthetic construct
  source 1..120: mol_type = other DNA
ctttttttcctctaggtgctccagcgcctgagttgtatggccatcaggggagatatgttcttggtggccaatcttgggacaaaggagccttgtcatagcagtgacccaaggtgcccaaaa

SEQ ID NO: 25434 - DNA, 120 bp, synthetic construct; identical to SEQ ID NO: 7806
  source 1..120: mol_type = other DNA

SEQ ID NO: 25435 - DNA, 120 bp, synthetic construct
  source 1..120: mol_type = other DNA
acaggaagtggcatacacacccctctggagtccttttggtaccatgacatggaaaatcccaaaagtcaccttataattgcccaggtggccaaaaatccagtgggtctcattggtgcagag

SEQ ID NO: 25436 - DNA, 120 bp, synthetic construct
  source 1..120: mol_type = other DNA
aatgctcctcccacatttcactctgagatgatgtatgacaatttcaccctggtccctgtctggggaaaggaaggctatctccacgtctgttccaatggcctctgctgttatttactttac

SEQ ID NO: 25437 - DNA, 120 bp, synthetic construct; identical to SEQ ID NO: 7807
  source 1..120: mol_type = other DNA

SEQ ID NO: 25438 - DNA, 120 bp, synthetic construct
  source 1..120: mol_type = other DNA
ctatgggcgcttgtatgagagggactaggaaaagtgtgtggtctgtggggcggactctggccatcatgttgacagccttgcacttccacaggctacaagccctgggaccatctttctgcc

SEQ ID NO: 25439 - DNA, 120 bp, synthetic construct
  source 1..120: mol_type = other DNA
gtgtcttcctcttaaacctcaatcatcgagacattagggggtattttctgttcacatttatctttttcaagccacatcttcctctaacaaatctctcagtatgcgattggtctcaagcta

SEQ ID NO: 25440 - DNA, 120 bp, synthetic construct
  source 1..120: mol_type = other DNA
tgatcaagtgacacccaggacatgtaaatatttcataagccttaaacatttcctgaggtaagaaacaagctctcaaagcaaaagctcaattagaaatggcccttgtggggaaccttccca

SEQ ID NO: 25441 - DNA, 120 bp, synthetic construct; identical to SEQ ID NO: 7808
  source 1..120: mol_type = other DNA

SEQ ID NO: 25442 - DNA, 120 bp, synthetic construct
  source 1..120: mol_type = other DNA
cagctcatccagggattccagggaccttaataaatcacggtagctttgggcaagagttgggcacgttgcccgactgtgcaggatggattgatgctggtataatttgatctggagccctat

SEQ ID NO: 25443 - DNA, 120 bp, synthetic construct
  source 1..120: mol_type = other DNA
gcacagagcaggagcttcccatgttaggaattccagatgcaaaattatcagactcaatatggtgaagacatttttaggccactgatttctgtgtaatttgtgtccaatatttcaaagcca

SEQ ID NO: 25444 - DNA, 120 bp, synthetic construct
  source 1..120: mol_type = other DNA
ttttagttattttaaacagtatatgcttaaacatcacacgattttataaagcaagaaaaatgaaatgatctccctattcccccacggtgtaggcctccagatccttttctggcttttagg

SEQ ID NO: 25445 - DNA, 120 bp, synthetic construct; identical to SEQ ID NO: 7809
  source 1..120: mol_type = other DNA

SEQ ID NO: 25446 - DNA, 120 bp, synthetic construct
  source 1..120: mol_type = other DNA
gcagtccagaagcggccccagatgtggctacccaccgcccagtctgcttccctgcctcaaaccccagggagacagaaattacctaaaaatgcatatcattgccttatgccaagatgattc

SEQ ID NO: 25447 - DNA, 120 bp, synthetic construct
  source 1..120: mol_type = other DNA
ctgcaggatcctcattctgcccttctgggcagagcaccacgaactttccctgagttattttctaccaacaatttagaatgaattgctcgtgaagtagaaatgaggggaaaagcaactaat

SEQ ID NO: 25448 - DNA, 120 bp, synthetic construct
  source 1..120: mol_type = other DNA
gattatgtttttgtcgattgtgatcctgaaactcaggaagcaaatggcaatcttgaccacaacatggagacaggaaatcaaatgcatttttggctaaaccagacttgggggaagtggctt

SEQ ID NO: 25449 - DNA, 120 bp, synthetic construct
  source 1..120: mol_type = other DNA
aaaaaaccaggcctcctcacagactgccaagtcccagagcccaccatgtctgctctcaagacacaggcctgtccagagcccctgctgagggaaacccacccaggccacttttccccacag

SEQ ID NO: 25450 - DNA, 120 bp, synthetic construct; identical to SEQ ID NO: 7810
  source 1..120: mol_type = other DNA

SEQ ID NO: 25451 - DNA, 120 bp, synthetic construct
  source 1..120: mol_type = other DNA
tctcaggccagagaaaggtcctggtctcctggcttcagtctttcattccctaacctccctttgaatgttagttacctattcccacataacaaagtgccccaaaacttaatggcataaaac

SEQ ID NO: 25452 - DNA, 120 bp, synthetic construct
  source 1..120: mol_type = other DNA
cgaggtgacagtgaagatatcaaccaaggctgcagccggttgaaggcctcactggatttggagaatattattgattaaattgcgtcttccccaaaaaagatacgttgtagtcctaacccc

SEQ ID NO: 25453 - DNA, 120 bp, synthetic construct
  source 1..120: mol_type = other DNA
tcagaagaggagaagacacacacacagggagaagatgaccatgtgacaacaggggcagagatcacagggatgcctctactagacaaggcacaccagaaattgcttgccaacaaacaccag

SEQ ID NO: 25454 - DNA, 120 bp, synthetic construct; identical to SEQ ID NO: 7811
  source 1..120: mol_type = other DNA

SEQ ID NO: 25455 - DNA, 120 bp, synthetic construct
  source 1..120: mol_type = other DNA
cttcccctgaagcaaatgatccaagagagcacaggtggagccatgatgtcttttattaactagtctcagaagtcacactgcatcatttggcaccatcttattgagttacacaggtcagcc

SEQ ID NO: 25456 - DNA, 120 bp, synthetic construct
  source 1..120: mol_type = other DNA
cactctgctcaatccaaatcacagctctcccgtttctcacctcccaacagttgctgttcctcaggccaaagttcacattctgcacagcctcagctccgcctgacctctgagctcacatga

SEQ ID NO: 25457 - DNA, 120 bp, synthetic construct
  source 1..120: mol_type = other DNA
gaacactcatccatccttcaaggtctactctctcatcacagcttgtgactcttccactttttgaactggtgtttcccattcccagttcacagagccctttctcattgaactatttatctg

SEQ ID NO: 25458 - DNA, 120 bp, synthetic construct; identical to SEQ ID NO: 7812
  source 1..120: mol_type = other DNA

SEQ ID NO: 25459 - DNA, 120 bp, synthetic construct
  source 1..120: mol_type = other DNA
gtagtcacaaagaatgtttagaatgtttctcagacaggctgagaaaaaacacaacgaaacattatttccgtttggaaagtttttttatttttgtgttcagtactgaagtaaaacaaaaat

SEQ ID NO: 25460 - DNA, 120 bp, synthetic construct
  source 1..120: mol_type = other DNA
tttctttttgtttgagcaaaaaaaaaaaagaatatattaactcgtaactggggagtctaagaataaattctcttcagccattgctgaatctaggggctcaaatggtgtctctggacacag

SEQ ID NO: 25461 - DNA, 120 bp, synthetic construct; identical to SEQ ID NO: 7813
  source 1..120: mol_type = other DNA

SEQ ID NO: 25462 - DNA, 120 bp, synthetic construct
  source 1..120: mol_type = other DNA
ccgagttcaagcgattctcctgcctcagccttccgagtagctgggactacaggcacgtgccaccacgcccagctaattttttgtatttttatagagacagggtttcaccatgttagccag

SEQ ID NO: 25463 - DNA, 120 bp, synthetic construct
  source 1..120: mol_type = other DNA
cccggccagggctgtgatattctgatcagccagcactgagtcacatggccactattagggtgagggatgataggcttagctctgacctgaaattcatggattgaggggtggggactgttt

SEQ ID NO: 25464 - DNA, 120 bp, synthetic construct
  source 1..120: mol_type = other DNA
cttttttcctctgagcagaaatttcactgtgatgccagtcaggtattgctgccgtaagggccatagcaggagggagactgcaaatcttgattgaggagatcttaagaacagagtgattta

SEQ ID NO: 25465 - DNA, 120 bp, synthetic construct
  source 1..120: mol_type = other DNA
gaagcaggagagggaagcttatggagagagcaggctggcgggagcaggggctgtgagagagacagccagaccgtagcggtgtgacaggcagagagccaggcgatccatatcctgtctcct

SEQ ID NO: 25466 - DNA, 120 bp, synthetic construct; identical to SEQ ID NO: 7814
  source 1..120: mol_type = other DNA

SEQ ID NO: 25467 - DNA, 120 bp, synthetic construct
  source 1..120: mol_type = other DNA
tgtacaacacttcccacatttttctggggtcgttttgtgtaaccaataaaatatggcagatgcgatggcatgttacttctgaaattgggttataaaaggtactgcagaccgggcacggtg

SEQ ID NO: 25468 - DNA, 120 bp, synthetic construct
  source 1..120: mol_type = other DNA
gccggcatggtggcacacgcctgtagtcccagctagtcgggaggctgaggcagaagaatcgcttgaacccgggaggcggaggttacaatgagctgagatagcaccactgcactccagtct

SEQ ID NO: 25469 - DNA, 120 bp, synthetic construct
  source 1..120: mol_type = other DNA
ccctatggacagacccatttggcaaggaacagccaccagctagctgcatgagcgagccatgttggaagtgggtcctccagctgcagtcaagcttccagatgaccactgccctgggaaacg

SEQ ID NO: 25470 - DNA, 120 bp, synthetic construct; identical to SEQ ID NO: 7815
  source 1..120: mol_type = other DNA

SEQ ID NO: 25471 - DNA, 120 bp, synthetic construct
  source 1..120: mol_type = other DNA
aaagaagggtccatgctgaacaaacttgtttgctttgaaatcggaagttctagaggaggtattctgacagtggccaggaaaacctcctgcccgcagaattttgtctaatccaccccagac

SEQ ID NO: 25472 - DNA, 120 bp, synthetic construct
  source 1..120: mol_type = other DNA
gatcaacttaatcggactctctgggagtagggcccatcaatctgtgtttaacaagtcctccaggtgattccgatcctaatcaagtgtgagcccactgtctaatgcggtgcataccaaagc

SEQ ID NO: 25473 - DNA, 120 bp, synthetic construct; identical to SEQ ID NO: 7816
  source 1..120: mol_type = other DNA

SEQ ID NO: 25474 - DNA, 120 bp, synthetic construct
  source 1..120: mol_type = other DNA
gtaattatgtataatgtgatttgtaagataaggtataactttgggggtgttctaattctttaaaaattgttgatccgactatggatgtcttgcaactctcaaaaaatcacgtgtgaaagt

SEQ ID NO: 25475 - DNA, 120 bp, synthetic construct
  source 1..120: mol_type = other DNA
aatttattttttaaaatagagacagggtttctccatattggccaggctgaatctcaagtgatctgcctgctttggcctcccaaagtgttgggattacaggcgtgagccactgcgcccggc

SEQ ID NO: 25476 - DNA, 120 bp, synthetic construct
  source 1..120: mol_type = other DNA
tccaaatggctacaacagtatttgaagaactaacaagtttaaaaatgtaaaaggccagtaaggcaacattgggcactggggcaagtgaaggggagggaaggagcatggagtcaggggaga

SEQ ID NO: 25477 - DNA, 120 bp, synthetic construct; identical to SEQ ID NO: 7817
  source 1..120: mol_type = other DNA

SEQ ID NO: 25478 - DNA, 120 bp, synthetic construct
  source 1..120: mol_type = other DNA
tcccgggttcaagcgattctccttcctcagcctcctgaataactgggattacaggcatctgccaccacacttggctaattttttttttttttagatggaattttgcacttgttgcccaag

SEQ ID NO: 25479 - DNA, 120 bp, synthetic construct
  source 1..120: mol_type = other DNA
attttgtattttagtagagacggggtttcttcatgttggtcaggctggtctcaaactactgacctcagatgatctgcccgccttggcctcccaaagtgctgggattataggcatgagcca

SEQ ID NO: 25480 - DNA, 120 bp, synthetic construct
  source 1..120: mol_type = other DNA
aagaatggttgcaatccaaattgtttagtaactattagaggaacaaagaaggctgtgtcctctgaattataatgtgcatatcctctaaattgctgcatattaggggttgaagcatgctgg

SEQ ID NO: 25481 - DNA, 120 bp, synthetic construct; identical to SEQ ID NO: 7818
  source 1..120: mol_type = other DNA

SEQ ID NO: 25482 - DNA, 120 bp, synthetic construct
  source 1..120: mol_type = other DNA
atgtacctgtgcctctcaaggcctaaggtcctctctctgtaaaagaggggactacatgagatgatttcagctcaaatatccttggagactctcattgttttctagttgtaaattatgctt

SEQ ID NO: 25483 - DNA, 120 bp, synthetic construct
  source 1..120: mol_type = other DNA
ggcatgatctcggctcactgcaacctctgcgtcccgggttcaagcaattctcctgcctcagcctcccatgtagctgggattacaggctcctgccaccatgtctggctaatttttgtattt

SEQ ID NO: 25484 - DNA, 120 bp, synthetic construct
  source 1..120: mol_type = other DNA
cctactttgttattattatagatgtaagatacaatgaatttctctgagtttctctttaaagatttagcctgctaacttccttgacctttgttttcaaacctcaacttttctgttcctcct

SEQ ID NO: 25485 - DNA, 120 bp, synthetic construct
  source 1..120: mol_type = other DNA
caccactgtacctcacgtccccttcccctccatatttagaaaaatatttccaagtagccagtcaggtcagctcagattgcgcagtctgaccccagctcatgcgggagggacacagaggta

SEQ ID NO: 25486 - DNA, 120 bp, synthetic construct; identical to SEQ ID NO: 7819
  source 1..120: mol_type = other DNA

SEQ ID NO: 25487 - DNA, 120 bp, synthetic construct
  source 1..120: mol_type = other DNA
aagttccactaacttaagtttcactaagttccacttagtttctaagtttcaactatgaaacgtaatggcttgaacagccattttattttgctcatgaatttgggaaggactcagttatgc

SEQ ID NO: 25488 - DNA, 120 bp, synthetic construct
  source 1..120: mol_type = other DNA
gtggtctttcagcatgctggtctgaggatagtcagacttctaacaagacatctcaggtttcccagacagggtattataagagacaggaagaggaagctgccaatttcttaaagctgtggc

SEQ ID NO: 25489 - DNA, 120 bp, synthetic construct; identical to SEQ ID NO: 7820
  source 1..120: mol_type = other DNA

SEQ ID NO: 25490 - DNA, 120 bp, synthetic construct
  source 1..120: mol_type = other DNA
acagagaggctgaacaactggctcaatgccccccagagctgtatgtgagctaggttttgaacataagcagtttgtacatgggaaattaatgagctaattaggctatttattatcataact

SEQ ID NO: 25491 - DNA, 120 bp, synthetic construct
  source 1..120: mol_type = other DNA
tgggctcagaagattgtgcctatgggtgagtgatggactgttcgagggcaccttccacaggaatctttgtcagtttctctaggcatgaatcttgcaaacaatataaaagtcttcaagcaa

SEQ ID NO: 25492 - DNA, 120 bp, synthetic construct
  source 1..120: mol_type = other DNA
gcggatcacttgaggtcaggagttggagaccagcctggccaacgtggtgaaaacccatctctactaaaaatacgaaagttagctgggcatggtggtgcacacctataatcccagctcctc

SEQ ID NO: 25493 - DNA, 120 bp, synthetic construct; identical to SEQ ID NO: 7821
  source 1..120: mol_type = other DNA

SEQ ID NO: 25494 - DNA, 120 bp, synthetic construct
  source 1..120: mol_type = other DNA
gaacgtttgggtgccatggaaattagtaccaaggcaatcttgccaggcactcgggtatagcctttgtacatgtagcccacttttatcttgcccaaacttcagaccgatttttttttttaa

SEQ ID NO: 25495 - DNA, 120 bp, synthetic construct
  source 1..120: mol_type = other DNA
ccaggcaaggcacaccttcaatgctaccttatccctttagttttccctgactcttctgggaaaacgaactgctctccaatctgtattcaatgcattcctctagaatagcttattgagtac

SEQ ID NO: 25496 - DNA, 120 bp, synthetic construct
  source 1..120: mol_type = other DNA
ttcacatttgacagagtcgatgaaaactcaggaaggttatgtaacttgccaaaaatcatacaggttgtcctgtctgcctcaaaagtccacaaatttgaccacacagccctgctgcctccc

SEQ ID NO: 25497 - DNA, 120 bp, synthetic construct; identical to SEQ ID NO: 7822
  source 1..120: mol_type = other DNA

SEQ ID NO: 25498 - DNA, 120 bp, synthetic construct
  source 1..120: mol_type = other DNA
gggcactctaggtcagtggctcacttcagttcaaagactcccaagtgctttgccaaatgttcattagacacacatggcaggtaggatgttcccactcaacctttgatcttaatctccttc

SEQ ID NO: 25499 - DNA, 120 bp, synthetic construct
  source 1..120: mol_type = other DNA
tgacatctgctttttggaggacccagactaacagagttaatatttcaattttttattcgtttccttatcattaacgacttctattcactctaagatgaccatgtagattagggaactgaa

SEQ ID NO: 25500 - DNA, 120 bp, synthetic construct
  source 1..120: mol_type = other DNA
tcagtaggatgactttccttttatcctatgataggtcatcctactaatgactgtcctatcatttcatagataggacatctgaggttcagggaggtttaattatttgcccaaaggtcacac

SEQ ID NO: 25501 - DNA, 120 bp, synthetic construct; identical to SEQ ID NO: 7823
  source 1..120: mol_type = other DNA

SEQ ID NO: 25502 - DNA, 120 bp, synthetic construct
  source 1..120: mol_type = other DNA
ggaaaggtgctttaccttagctgctattcatgtggttttctctgcatccgttgctacccatgaagggaattacaactcaggaaaactgaccttttccacttctgattcgactccagacac

SEQ ID NO: 25503 - DNA, 120 bp, synthetic construct
  source 1..120: mol_type = other DNA
gtcttacaattgaacactaagaagccaccaaggatcacatttattgtgtttatatacaatgtgttgacacagaaatttacagcaaataaaaaatttacaaaccggacatatgactccatt

SEQ ID NO: 25504 - DNA, 120 bp, synthetic construct; identical to SEQ ID NO: 7824
  source 1..120: mol_type = other DNA

SEQ ID NO: 25505 - DNA, 120 bp, synthetic construct
  source 1..120: mol_type = other DNA
ccaagctgggcatggtgggtcatgcctgtaatcccagcactttgggaggccaaggaggatagatcacttgaggtcaggagttcaagacaagcctggccaacatggtgaaaccccgtctct

SEQ ID NO: 25506 - DNA, 120 bp, synthetic construct
  source 1..120: mol_type = other DNA
atgccactgcactccaggctgggcaacagagctagactctgtctcaaaaaaaaaaaaaaaaaaaaaaaaaaaagaaaaagaaaaagagctcctccacatccacactagcatttggtgttg

SEQ ID NO: 25507 - DNA, 120 bp, synthetic construct
  source 1..120: mol_type = other DNA
agatgcctgttaaggtttttggtccaattttaaaagttgcttgtgttcttatttgtgagttttaagggttctttgtatattttggataatagttctttatccgtcttttgcaattttttt

SEQ ID NO: 25508 - DNA, 120 bp, synthetic construct
  source 1..120: mol_type = other DNA
aaaaagtcattgtgaaacccaaggtcaggtagattttctcctaagagttttatagttttgcattttacatttagttctgtgatccattttgttaattattgggaaggatgtaagatctgt

SEQ ID NO: 25509 - DNA, 120 bp, synthetic construct; identical to SEQ ID NO: 7825
  source 1..120: mol_type = other DNA

SEQ ID NO: 25510 - DNA, 120 bp, synthetic construct
  source 1..120: mol_type = other DNA
tgagattgcactgaatctataaagttggcaagaactgacatcttaaaaatagtctttttattcatgaacggactatctctgcatttattttttctttgatttctaccaatagagttttgg

SEQ ID NO: 25511 - DNA, 120 bp, synthetic construct
  source 1..120: mol_type = other DNA
atatgagaaagtaattgatttttgtatatgaaccttgtatcttgcaatactggtataattacttattagttccaacttttaaaattcattctgattttctacataaatgatcatgtcatt

SEQ ID NO: 25512 - DNA, 120 bp, synthetic construct
  source 1..120: mol_type = other DNA
tccatgtcttgttcctgatcttagagtgcagtggcatgatcatggctcactgcagccatgaccacctgtgctcaagcaatcctcccacctcacccgcctgagcagctggaactataggtg

SEQ ID NO: 25513 - DNA, 120 bp, synthetic construct; identical to SEQ ID NO: 7826
  source 1..120: mol_type = other DNA

SEQ ID NO: 25514 - DNA, 120 bp, synthetic construct
  source 1..120: mol_type = other DNA
gcatgcgccgccatgcccggctaatttttattattattagaaacggtttctccatgttggtcaggctggtctcgaactcctcacctcaggtgatccgcccgcctcggcttcccaaagtgc

SEQ ID NO: 25515 - DNA, 120 bp, synthetic construct
  source 1..120: mol_type = other DNA
tctggaaaacactgtatagaattggtataatttcaccctgcgtgttcagtagaattcagcagtgaatccatctgggtctggtgctttctgttttggaaggttattattgattccatttct

SEQ ID NO: 25516 - DNA, 120 bp, synthetic construct
  source 1..120: mol_type = other DNA
cctttattatcctttaaacatctatgggctctgctctgtattgaagtctcttctcatttctgatattagttgtgtccttttttttccccctttagcttggctagagttttactgatgtta

SEQ ID NO: 25517 - DNA, 120 bp, synthetic construct
  source 1..120: mol_type = other DNA
tctttctctagtttcctaaggtgaacacatacatgactgattttagaacatttcttttgagacagagtttcactcttgttgcccaggctggagtgcaatggcgcgatctcagctcacggc

SEQ ID NO: 25518 - DNA, 120 bp, synthetic construct; identical to SEQ ID NO: 7827
  source 1..120: mol_type = other DNA

SEQ ID NO: 25519 - DNA, 120 bp, synthetic construct
  source 1..120: mol_type = other DNA
ttgaaagagctctagctttgttttgttccttctggtggctgctaggctgcaacaggaatgtgggctgttagttttcagggcttctacagctgaacagtgaaaaaggcaactaatccaagt

SEQ ID NO: 25520 - DNA, 120 bp, synthetic construct
  source 1..120: mol_type = other DNA
tttgccagttttatcacggctcttatgaagcagctagttttcggaggtcattcctcttgccattttcactgacatcatttagcaaaagctttttgaccatttgggctttaaagatgaaaa

SEQ ID NO: 25521 - DNA, 120 bp, synthetic construct; identical to SEQ ID NO: 7828
  source 1..120: mol_type = other DNA

SEQ ID NO: 25522 - DNA, 120 bp, synthetic construct
  source 1..120: mol_type = other DNA
tagtagacaggtatttcaattctaattaagatagtagacaagtaagagtcataggggaaaggggaatgagacaaccacaaggaaatgagaagtaacacaaaaagaggaatgaagcagaga

SEQ ID NO: 25523 - DNA, 120 bp, synthetic construct
  source 1..120: mol_type = other DNA
tttcagattaggttgtgctttgaaagggatgaacacagttaacacaccagagaggggactggtgctacattcttctggagactgaagtagggaagaggttggttttctacctttgaaaaa

SEQ ID NO: 25524 - DNA, 120 bp, synthetic construct
  source 1..120: mol_type = other DNA
tttatatctggactacccacactgtaagggtaccacaaaaagagaaggaacaggaacaaaggaaaggctaccaagcattcccatggaaaagttgaaacagcaacaaatcggttggcatca

SEQ ID NO: 25525 - DNA, 120 bp, synthetic construct
  source 1..120: mol_type = other DNA
gatgtgatgcacgcagaaggcacaaaccatacttgtgtggttgggcttgccttcttgtgcttctaccatcagtgtggaaacttctgtataacttttctattttagcccaggcccaagaat

SEQ ID NO: 25526 - DNA, 120 bp, synthetic construct; identical to SEQ ID NO: 7829
  source 1..120: mol_type = other DNA

SEQ ID NO: 25527 - DNA, 120 bp, synthetic construct
  source 1..120: mol_type = other DNA
cttacataatttagtattcagtgtgtgtctcaacttcaaaatcaacaatttcaacaaagaccagattgcacgtcagcagtcattagggggttaagagcaccgacaatggacatgactgcc

SEQ ID NO: 25528 - DNA, 120 bp, synthetic construct
  source 1..120: mol_type = other DNA
ccttgggcaaacactacttcatctccccctttcctcatctgttaaatggtgctataaatagtacctaccacgtagaacagttgtgtgggttaagagataatttatttcaagtacttacaa

SEQ ID NO: 25529 - DNA, 120 bp, synthetic construct
  source 1..120: mol_type = other DNA
ttaaagccctcttcacctgttcctcccatcgcctatttatatctacttgttctcacttctattatctaatcttgtacgtgtttccaattagctctcttgtatattttcatcatctttcca

SEQ ID NO: 25530 - DNA, 120 bp, synthetic construct; identical to SEQ ID NO: 7830
  source 1..120: mol_type = other DNA

SEQ ID NO: 25531 - DNA, 120 bp, synthetic construct
  source 1..120: mol_type = other DNA
gttttctgcccattcccactcccaagtatacagcaggcaagcagtatttgttgaataaatatatttgaaaatcccatatagataggttcatttaagtctaaaacaactttgctaaaaagt

SEQ ID NO: 25532 - DNA, 120 bp, synthetic construct
  source 1..120: mol_type = other DNA
cttttaaaaggtccaatataagccaaattaaccccaaaatttacagctacacttagagatctcctgaactaaatggcattgtttgagatgagtgtcttgttaaaggaggtcatttgctat

SEQ ID NO: 25533 - DNA, 120 bp, synthetic construct
  source 1..120: mol_type = other DNA
atgtataagttaaataaagcaaacaggcttttctactctgtgtgaggataagaaacactacagaacagggcctgaatgctttagacatacaaggtgtaaccataaaggaaatttctacgg

SEQ ID NO: 25534 - DNA, 120 bp, synthetic construct; identical to SEQ ID NO: 7831
  source 1..120: mol_type = other DNA

SEQ ID NO: 25535 - DNA, 120 bp, synthetic construct
  source 1..120: mol_type = other DNA
tagatgtggtaaatctaatagtgtgtcaaatgagtccttctggaaatcacttcagcagagaagtcaaacagcctgtaaaagagaagacatggcagaatgtgcgagattcatccttccaac

SEQ ID NO: 25536 - DNA, 120 bp, synthetic construct
  source 1..120: mol_type = other DNA
gactgcttggtgaggtagagtcacttggaagtgttcaaggtggaaagatcacccttgtagaagggactcctgcatttgttaagaggttagagactggatgaacctcaggtctctttcaat

SEQ ID NO: 25537 - DNA, 120 bp, synthetic construct
  source 1..120: mol_type = other DNA
tagaaaatgtagtccactgtcattaaaatgcatattcaccttcctactactaataattaggaagggttcattatgacttctttatattataaagaaaagatgggggattagatttataat

SEQ ID NO: 25538 - DNA, 120 bp, synthetic construct; identical to SEQ ID NO: 7832
  source 1..120: mol_type = other DNA

SEQ ID NO: 25539 - DNA, 120 bp, synthetic construct
  source 1..120: mol_type = other DNA
tgaaattgggtatcattttgttgcaatttatagaactttacccatacctgtaagaccctcaatgtatatgaaatcattttcactgggaaagtgacagttacagtaaaagcagaaccacac

SEQ ID NO: 25540 - DNA, 120 bp, synthetic construct
  source 1..120: mol_type = other DNA
aaatctttatttaaaagccgaaatatcagccttctctctctcttttgctatttgaaaggtagtcttcaatttggcaggcaactgcttctctctccaaatagtaacaggttacaaacatgc

SEQ ID NO: 25541 - DNA, 120 bp, synthetic construct
  source 1..120: mol_type = other DNA
tgattattcactttttcaaaactcatagatcagaataaacaaaaaatcccccaacccatggtggggacacaaaagtaacataagtgactaaggtgtgccattcatagagaggttgaagac

SEQ ID NO: 25542 - DNA, 120 bp, synthetic construct; identical to SEQ ID NO: 7833
  source 1..120: mol_type = other DNA

SEQ ID NO: 25543 - DNA, 120 bp, synthetic construct
  source 1..120: mol_type = other DNA
ctcaacatttaaaaccaaatctcagcttcatttccagaaatattgcagtttggtttaggtaatgtttcatttaatctactccagtttccacaaaatggcattttattaaaaaaacctttc

SEQ ID NO: 25544 - DNA, 120 bp, synthetic construct
  source 1..120: mol_type = other DNA
ctgttacaatagtgttgcttgtgtaagcaggttagagtgcacagtgtccccaattgttcctggcactgcaaaaccaaattaaacaattccacaaagaattctgacatcaatgtgttttcc

SEQ ID NO: 25545 - DNA, 120 bp, synthetic construct; identical to SEQ ID NO: 7834
  source 1..120: mol_type = other DNA

SEQ ID NO: 25546 - DNA, 120 bp, synthetic construct
  source 1..120: mol_type = other DNA
tgttattgaaactgcaataggagctaggttcattcctcatgatgggcaaagcttcaaagctgactgtttttgaggtgttggtataacggttaatggcattgaatgttaaggatgataaag

SEQ ID NO: 25547 - DNA, 120 bp, synthetic construct
  source 1..120: mol_type = other DNA
aattaagcatcctgagatgtatttcaccaaagacaaggaaataagcctaaagtacttcaactttagacatattttacattacttagcttataataaattgctgtaaccagcatgattcgc

SEQ ID NO: 25548 - DNA, 120 bp, synthetic construct
  source 1..120: mol_type = other DNA
gcaggcccagagaagaatgattccccaaggtctcacaacttatccgtatccatctgaattcacagaaaaaactgggctagaataagaaaaacaccacatatcgtgaatattctttcagga

SEQ ID NO: 25549 - DNA, 120 bp, synthetic construct; identical to SEQ ID NO: 7835
  source 1..120: mol_type = other DNA

SEQ ID NO: 25550 - DNA, 120 bp, synthetic construct
  source 1..120: mol_type = other DNA
cacagcaaaccaaggaggaaacatttggtacctcagttggtacaagactcagtcttgaggacggagcgggagagaagtgataatagtgtgatgccaagcttcaattataccatatggaac

SEQ ID NO: 25551 - DNA, 120 bp, synthetic construct; identical to SEQ ID NO: 832
  source 1..120: mol_type = other DNA

SEQ ID NO: 25552 - DNA, 120 bp, synthetic construct
  source 1..120: mol_type = other DNA
agcctcctgagtagctgggattacacgtgtgtgccaccatgaccagctaattttttatatttttagtagagatgggatttcgctatgttggccaggctggtctcaaactcctggcctcaa

SEQ ID NO: 25553 - DNA, 120 bp, synthetic construct
  source 1..120: mol_type = other DNA
tcaatgttgtatgtaactgtagttggttcattttcattgttatacagtatttcattgtgtgattatactatggtttagttatacatttcaactactgggcatctggttgcttccagttct

SEQ ID NO: 25554 - DNA, 120 bp, synthetic construct; identical to SEQ ID NO: 7836
  source 1..120: mol_type = other DNA

SEQ ID NO: 25555 - DNA, 120 bp, synthetic construct
  source 1..120: mol_type = other DNA
cctttgtaaagttcccattttgtcaagggtcaaagagaacaactgatgtccttccaagtttggcagcagtggctgaaggctgtccgtatttttaattaaattttatttgttcaaagtagc

SEQ ID NO: 25556 - DNA, 120 bp, synthetic construct
  source 1..120: mol_type = other DNA
gaacaacccattacataggccaggatgccttggatgagagcgggagtggggaaagaagcttgtttcaggtgtgttttctagtcagaatatgactaaaaacaggctcctctcctctgcatg

SEQ ID NO: 25557 - DNA, 120 bp, synthetic construct
  source 1..120: mol_type = other DNA
aagtagctaggattacaggcacatgccaccacacctggctaatttttgtatttttagtagagacggggttttgccatgttggcggggctggtctcgaactcctgacctcaggtgatccac

SEQ ID NO: 25558 - DNA, 120 bp, synthetic construct; identical to SEQ ID NO: 7837
  source 1..120: mol_type = other DNA

SEQ ID NO: 25559 - DNA, 120 bp, synthetic construct
  source 1..120: mol_type = other DNA
gcaaatattcactgagcctccacttgctcaggcactatttagaacactaagaatatatcagtgaatgcaactgacaaagatttcactgttcttgtggagcttacattcactttagtggag

SEQ ID NO: 25560 - DNA, 120 bp, synthetic construct
  source 1..120: mol_type = other DNA
gagcaggttaacaaggactgagaatgctatggtaggggtatctagcaagttgtagtaaagaatagttagaatatgcttcattgagaagatgaaactggagctaagatttgaaacaggtga

SEQ ID NO: 25561 - DNA, 120 bp, synthetic construct; identical to SEQ ID NO: 7838
  source 1..120: mol_type = other DNA

SEQ ID NO: 25562 - DNA, 120 bp, synthetic construct
  source 1..120: mol_type = other DNA
aattagctaggcctggtgatgcatacttatagtgctagctacttgggaggctgaggtgagaggttctcttgagcccaggagttcaaggttacaatcagctatgatctcaccactgtactc

SEQ ID NO: 25563 - DNA, 120 bp, synthetic construct
  source 1..120: mol_type = other DNA
ctggtagcagtaaagaaaaaagtgggcatactttagatctactttagaggtggagtcaatagtatatgctgatggactatacattgagtatgagtgagaggaatcaaggatgactctagg

SEQ ID NO: 25564 - DNA, 120 bp, synthetic construct
  source 1..120: mol_type = other DNA
ttctaggtttaagctgtttatcagacatccacatggatgtgtcaattaggcacgtggatatatagagactgtgagaagtctgggctggagatataaatctgggaatcctcagcattatag

SEQ ID NO: 25565 - DNA, 120 bp, synthetic construct
  source 1..120: mol_type = other DNA
tgggctggagatataaatctgggaatcctcagcattataggtagtatttaaaaccaaaggaactgatgagagcactagggagtcaatgtagatagagaaagcaaaaagaacgaagaattg

SEQ ID NO: 25566 - DNA, 120 bp, synthetic construct; identical to SEQ ID NO: 7839
  source 1..120: mol_type = other DNA

SEQ ID NO: 25567 - DNA, 120 bp, synthetic construct
  source 1..120: mol_type = other DNA
ggggtttgagaccagcctggccaatatggtgaaactccgtctctactaaaaatacaaaatttagccaggcgtcgtggcaggtgtcagtaatcccagctacctgggcaggctgaggcatga

SEQ ID NO: 25568 - DNA, 120 bp, synthetic construct
  source 1..120: mol_type = other DNA
aatggaagaatgagaggaataactgcggacagcaagagagtagttttgctgcaaaaggggacagagaaatatggcagtagctggcaggagcagtgagatttataaattattttttaagga

SEQ ID NO: 25569 - DNA, 120 bp, synthetic construct; identical to SEQ ID NO: 7840
  source 1..120: mol_type = other DNA

SEQ ID NO: 25570 - DNA, 120 bp, synthetic construct
  source 1..120: mol_type = other DNA
gtataaacagtaaatactaactttgctgtaacagatgatataggaattcggaagtacatctgttagataacttttcctatttcttttgcccttattcctttgccacaaactactcttcaa

SEQ ID NO: 25571 - DNA, 120 bp, synthetic construct
  source 1..120: mol_type = other DNA
ctctaggttaagggaagagaatatagaaccaacttaccattttcatctactgcaagcacacttgctccttttcccaaaagttcctgaaccaccattgttagcccatttcgggcagcaaca

SEQ ID NO: 25572 - DNA, 120 bp, synthetic construct
  source 1..120: mol_type = other DNA
caaagagcatttttgtcaacttgtgaagaccaagaggtacaaactcgagaaacctagtcctaataacaaagatgggggcagggagagcagaacctctgtgcagtgcactgtcacaccttg

SEQ ID NO: 25573 - DNA, 120 bp, synthetic construct
  source 1..120: mol_type = other DNA
ttcctccgttgttaaggaatgaggctggtaaagatacagactatacattaaaaactgtaaactgcagtagcataaattctaataggctttgaaaacagcttacaagcatcatgactaatt

SEQ ID NO: 25574 - DNA, 120 bp, synthetic construct; identical to SEQ ID NO: 7841
  source 1..120: mol_type = other DNA

SEQ ID NO: 25575 - DNA, 120 bp, synthetic construct
  source 1..120: mol_type = other DNA
aaaaaaatacattattgtcaatgttataataaaatttcagttcaaaagcattttaaataatatggcttttagttgtgatcattttagaaatgagttttgacagttgtaaaactattaaaa

SEQ ID NO: 25576 - DNA, 120 bp, synthetic construct
  source 1..120: mol_type = other DNA
aggctgcgttggttgcattgatgaggtttctatctgttatcttttccagtattaacaaggcactagtttcatgaccctataattgtggcagataagttataaaaacttgagcaccattaa

SEQ ID NO: 25577 - DNA, 120 bp, synthetic construct
  source 1..120: mol_type = other DNA
tgagggtaggagaagaggacaaaattaagattaaggaaagaggataattatgcttagacttgtgttccaaaacttatttggcttactggagactttgatacgccatggtgccttataagt

SEQ ID NO: 25578 - DNA, 120 bp, synthetic construct; identical to SEQ ID NO: 7842
  source 1..120: mol_type = other DNA

SEQ ID NO: 25579 - DNA, 120 bp, synthetic construct
  source 1..120: mol_type = other DNA
atataacatatatatcttcatataattgtatgagacaattatattgttgtataagtcacacactctaacaatggcaattaacatttattttgtgactgtgcactaaattttaaatactgt

SEQ ID NO: 25580 - DNA, 120 bp, synthetic construct
  source 1..120: mol_type = other DNA
gatctaggactcacattcaggcaatccaactccacagccagtgttcttaaccactatgttataaggccatggtaaagtagactcctcaatagtcagggcaaactaaaacattgtatccct

SEQ ID NO: 25581 - DNA, 120 bp, synthetic construct; identical to SEQ ID NO: 7843
  source 1..120: mol_type = other DNA

SEQ ID NO: 25582 - DNA, 120 bp, synthetic construct
  source 1..120: mol_type = other DNA
ttaatttgtgacatgctgtttttaagggtttacatattaggctacaaaagcactgcctgtacacaaacaaataggctcaatggagcttactaatttctctcatagaaatttgtactttca

SEQ ID NO: 25583 - DNA, 120 bp, synthetic construct
  source 1..120: mol_type = other DNA
accaccacttattacaactgctggacttttttccaggctttattcccatttagaaaactgttaactttgttaacaataatctttgggaaacaaattcgaaagagagggaaaaatatttac

SEQ ID NO: 25584 - DNA, 120 bp, synthetic construct
  source 1..120: mol_type = other DNA
ttaataatgggttttctgtaaattctctcacaccagccagtagttaaaatttatttcttattgaaaataaaacctttttggggggtagggcccagacgggatctcactctgtcacccagg

SEQ ID NO: 25585 - DNA, 120 bp, synthetic construct
  source 1..120: mol_type = other DNA
ttttttttggtagagatgcaggtcttgctatgttgaccaggctggtcttaaactcctggcttcaagtcatcctcccacttcagcctcccagattgttaggattataggcatgagccactg

SEQ ID NO: 25586 - DNA, 120 bp, synthetic construct; identical to SEQ ID NO: 7844
  source 1..120: mol_type = other DNA

SEQ ID NO: 25587 - DNA, 120 bp, synthetic construct
  source 1..120: mol_type = other DNA
accaggtattaaaattcaaaggagatactggcaaaaatcacaggtacatgtaagtgtttaaaggaaaaatgtaaaagtctctccctcatcccatctcccagatcccctctctggaatata

SEQ ID NO: 25588 - DNA, 120 bp, synthetic construct
  source 1..120: mol_type = other DNA
tggctctctgtatccgtgggttctgcatccatcaattcaaccaaccccaaattaaaaatatttgggggaaaaaaaaaacagagcagactttttttcttgtcatataccctaaatacagca

SEQ ID NO: 25589 - DNA, 120 bp, synthetic construct; identical to SEQ ID NO: 7845
  source 1..120: mol_type = other DNA

SEQ ID NO: 25590 - DNA, 120 bp, synthetic construct
  source 1..120: mol_type = other DNA
gtggcgcgatcttggctcactgcaacctctgcctcctgggttcaagtgattctcctgtctcagcctcccaagtagctggactacaggcgcccaccaccatgcccagctagcttttttcgt

SEQ ID NO: 25591 - DNA, 120 bp, synthetic construct
  source 1..120: mol_type = other DNA
ccggctaaaatcttattctttaatgttctgaagagcttcacagtatcaaagtatatcataaattatttaatctaattatggattttaaagtgattgctagtttaaaaaaattcttcatga

SEQ ID NO: 25592 - DNA, 120 bp, synthetic construct
  source 1..120: mol_type = other DNA
ctgcagtctcaacctcctgggctcaagtgatcctcccacctcagcctcctgagttgctaagacaacaggtgcaaggctaccacacctggctaattttttgatattttgtagagatgaagt

SEQ ID NO: 25593 - DNA, 120 bp, synthetic construct; identical to SEQ ID NO: 7846
  source 1..120: mol_type = other DNA

SEQ ID NO: 25594 - DNA, 120 bp, synthetic construct
  source 1..120: mol_type = other DNA
tatataaatagttgttgtattgtttagggaataatgacaaaaaaaaagtctgtacatgttcagcctaactatatttctgatggacattcagttgaattcaccgatgggggacccatggat

SEQ ID NO: 25595 - DNA, 120 bp, synthetic construct
  source 1..120: mol_type = other DNA
taatttaataccctaattactacaaataaaatgttgcttattttatttcattagtcatttgggatctactttaggaataagattcttacatggcctctttatacattttcatggtttaat

SEQ ID NO: 25596 - DNA, 120 bp, synthetic construct
  source 1..120: mol_type = other DNA
ccatcttttgtcagttcttttctctaatctagtagttttcaagtggattttgcccatcagcagatattgtatgtggcaatgcctacagacatttttgtttatcacaactgaaggtggggc

SEQ ID NO: 25597 - DNA, 120 bp, synthetic construct; identical to SEQ ID NO: 7847
  source 1..120: mol_type = other DNA

SEQ ID NO: 25598 - DNA, 120 bp, synthetic construct
  source 1..120: mol_type = other DNA
ccctcattctccaggtatatgggttcttaaggtgtggcctagggaaccctggggtgacgcaaaaaaaatatgaataaaaacacagatgagaacccaactattctcttaaattagctatga

SEQ ID NO: 25599 - DNA, 120 bp, synthetic construct
  source 1..120: mol_type = other DNA
aaaatttctcaattacaatttctaatacagtcagtatcaatccatagttcctgagaccaaagggtttgagaaccactcaccatctgagtacagactgagaaaagggaacagtggggcccc

SEQ ID NO: 25600 - DNA, 120 bp, synthetic construct
  source 1..120: mol_type = other DNA
tttgtgacctccagaaatcattactgggtgatatcaagcagacaatctcataactttctatcatcatttatgaaagatagataggatggtaaactgggtcctcctgagtttcagaggcta

SEQ ID NO: 25601 - DNA, 120 bp, synthetic construct
  source 1..120: mol_type = other DNA
gccagtgtttttctaaaacttggccatcatttcattttaattttaagaggttgttttctgttctgttggcatgcttccacttttctttccagctgtacaataattactagttaaagtaaa

SEQ ID NO: 25602 - DNA, 120 bp, synthetic construct; identical to SEQ ID NO: 7848
  source 1..120: mol_type = other DNA

SEQ ID NO: 25603 - DNA, 120 bp, synthetic construct
  source 1..120: mol_type = other DNA
acagttacagcagtacatttacaactaaatgctcttcctgaggaaaaatatctcactgtgtgatttttccaatggttaatcttcagggatatatttttttaaaaaccaagcagtaagtct

SEQ ID NO: 25604 - DNA, 120 bp, synthetic construct
  source 1..120: mol_type = other DNA
cattacagaaacaaatcaaacatcaatggcaaaatacagtatcttctttgttctagtatgagtactagtctctggccacttcactacactcatttctacttgccttagcgagtagaaatg

SEQ ID NO: 25605 - DNA, 120 bp, synthetic construct
  source 1..120: mol_type = other DNA
tattcaagtttttatggtgctatcagtactcagctgaaggataaccaacagtataacaggacaaacctcaagaacccaaaatgttctaacggcaaaagaatacaactcccaactttggca

SEQ ID NO: 25606 - DNA, 120 bp, synthetic construct; identical to SEQ ID NO: 7849
  source 1..120: mol_type = other DNA

SEQ ID NO: 25607 - DNA, 120 bp, synthetic construct
  source 1..120: mol_type = other DNA
gtagatctgctgtcataattaacattaatcttgaagctacactgaaattgaaaacaaattttaaaaacctctaatttctctactaaagcctgaagcttgaactttgacaacactgatgct

SEQ ID NO: 25608 - DNA, 120 bp, synthetic construct
  source 1..120: mol_type = other DNA
catctataacttcaaagtagctttatgcttccctacgtgaccttttatgagtctacctataaaagcgatgactgtgactgtgagcctgtaggaggccaaagaaaatctcttttaaccatg

SEQ ID NO: 25609 - DNA, 120 bp, synthetic construct
  source 1..120: mol_type = other DNA
aacatacatagatttcagtttagaatgtgatacatctcactgtttctcctacttttggttatttttcccctaatatgattgtatttagaaagtaaaagaacatggctgggtgcaatggct

SEQ ID NO: 25610 - DNA, 120 bp, synthetic construct
  source 1..120: mol_type = other DNA
acaatcaaaatacaagcacactatataaaagcaatggaaacattctaaaaacctcctaaaaatgcaaaatatttgtggaaataaggatctaagaaaaacttcaggctacatggtggctca

SEQ ID NO: 25611 - DNA, 120 bp, synthetic construct; identical to SEQ ID NO: 7850
  source 1..120: mol_type = other DNA

SEQ ID NO: 25612 - DNA, 120 bp, synthetic construct
  source 1..120: mol_type = other DNA
tctgttcactacacaatgatatgcatttgtgtttgtatacttaaccattgtagcaagcccagtgaagtgccgtatatccatgattgtctgctgtggctggatttgcatccatagatgctg

SEQ ID NO: 25613 - DNA, 120 bp, synthetic construct
  source 1..120: mol_type = other DNA
cacattcttcatggcctgtaactgcctgaaagaaaataatttaaaggtagtcaaacatattatgctaaacattacatgccaatttcagctaattaaaaactttaaagaccatactctcca

SEQ ID NO: 25614 - DNA, 120 bp, synthetic construct
  source 1..120: mol_type = other DNA
ggaagagagaaacttggtattcaatgaaaataatgatatttcaaaggtgaaaaaagattaaagtgtataagaaaataagtgagataatggaaaaagtcaaattgacattaattctactaa

SEQ ID NO: 25615 - DNA, 120 bp, synthetic construct; identical to SEQ ID NO: 7851
  source 1..120: mol_type = other DNA

SEQ ID NO: 25616 - DNA, 120 bp, synthetic construct
  source 1..120: mol_type = other DNA
tacgcccttctgtgatgcaacaattatttatcgaaacttactgtccatttccatcttgaatatccactgcattctgtggttctgcatttcctattaatagccgtaagcattctgaatgac

SEQ ID NO: 25617 - DNA, 120 bp, synthetic construct
  source 1..120: mol_type = other DNA
taatatgcaagaatgaaaactataggtaaaaagaaggtttctacggcctttgactgttaaagctggaataaatgtgaattcctcacagtaaaacatgacaggcagaccgcctacccagca

SEQ ID NO: 25618 - DNA, 120 bp, synthetic construct; identical to SEQ ID NO: 7852
  source 1..120: mol_type = other DNA

SEQ ID NO: 25619 - DNA, 120 bp, synthetic construct
  source 1..120: mol_type = other DNA
cgttgtagaatcaaccaaccctggaactgcatctgcctgatattgctttttttttttttttgagacagaatctcgctctgtcgcccaggctggagtgtagtggtgtgatcttggctcact

SEQ ID NO: 25620 - DNA, 120 bp, synthetic construct
  source 1..120: mol_type = other DNA
caccatctaggcatggctggtcttgaactcctgacctcatgatccacccacctcggcctcccaaagtgctgggattacaggcatgagccaccgtgcccagcctgcctttcgacattgtat

SEQ ID NO: 25621 - DNA, 120 bp, synthetic construct
  source 1..120: mol_type = other DNA
atgcatgtgttaagtccaaatgcataaaatgggcaagggtacaagtagaagtagtccaaagaaaagagcttttgaagtaagttaaatcctctgcaaaattcaggtcctgttaatatatac

SEQ ID NO: 25622 - DNA, 120 bp, synthetic construct
  source 1..120: mol_type = other DNA
gtgctgaatattccacagtatgttcccacagttatattaaatactaatagttattaaacttgtggcttaaatcacctctcctaccctagtccaatctgtatgctgcactctgccagcagc

SEQ ID NO: 25623 - DNA, 120 bp, synthetic construct; identical to SEQ ID NO: 7853
  source 1..120: mol_type = other DNA

SEQ ID NO: 25624 - DNA, 120 bp, synthetic construct
  source 1..120: mol_type = other DNA
gcattggttaactacttctaagggactggctaatgtctcagttcaatatttacctattgagagtgcaaccactccatgcaagctttaaattagttctgcatatgatctgcaattataatt

SEQ ID NO: 25625 - DNA, 120 bp, synthetic construct
  source 1..120: mol_type = other DNA
caatgaaactgaactcaagtgaccctcttgcctcagcctcccaagttaggtgggaatacaggcatgcgccaccaagtttggctttgcaaagtgatatataacttcactctttttcagaat

SEQ ID NO: 25626 - DNA, 120 bp, synthetic construct; identical to SEQ ID NO: 7854
  source 1..120: mol_type = other DNA

SEQ ID NO: 25627 - DNA, 120 bp, synthetic construct
  source 1..120: mol_type = other DNA
atatcacaatatggaatagttcttgcataaagtgctctgtaaagcctgtctgcataaatgtttaatgcagtacactggtaaaataagtcaaaacgtgtatcacttgttaaatgaaagatt

SEQ ID NO: 25628 - DNA, 120 bp, synthetic construct
  source 1..120: mol_type = other DNA
tgatgatagtcttgttgttggtattccctgagaatacaatcattttaccacttaaagtcaaaaatttccccagacagttgtagctcttggtaatctccttgggtctggaaacttttgaag

SEQ ID NO: 25629 - DNA, 120 bp, synthetic construct
  source 1..120: mol_type = other DNA
acctaagctttgacggtagtggggcttctgtctggagaaatgccttcaaagagtaaccagtaggtgtgacatagaattggccaatgttagcatctgcagccatcatcaaaagatgaatcc

SEQ ID NO: 25630 - DNA, 120 bp, synthetic construct; identical to SEQ ID NO: 7855
  source 1..120: mol_type = other DNA

SEQ ID NO: 25631 - DNA, 120 bp, synthetic construct
  source 1..120: mol_type = other DNA
acactgtatttaagttccctgaacactgggatactcctaatgtttatgaatgacggaggctttgtaaattcatttgtgtgaataaagttatttggtgaggtcaaataatccatatatgat

SEQ ID NO: 25632 - DNA, 120 bp, synthetic construct
  source 1..120: mol_type = other DNA
gctgcatgaataggtgtcctcttcaaaatgtaatcttttactaagattgaggctccctgattaatgagtacatccacacattcaacatggcccttaaaagctgcaagatctaggggtgtt

SEQ ID NO: 25633 - DNA, 120 bp, synthetic construct
  source 1..120: mol_type = other DNA
tagactgacttcctaaatacttgaataaatgtaaataagcaaacttgtcttcatattattatcctacttgagataatccaaacttctacatcgagaattcaggaagttaactacagatct

SEQ ID NO: 25634 - DNA, 120 bp, synthetic construct
  source 1..120: mol_type = other DNA
ttttcatgagtatacaatgcttggctcacggcagacattcaatggatgtgtgacacggattcatttaaagtcttgatttcaagtctgattctaaaaagcctgtgttttttttgttttgtt

SEQ ID NO: 25635 - DNA, 120 bp, synthetic construct; identical to SEQ ID NO: 7856
  source 1..120: mol_type = other DNA

SEQ ID NO: 25636 - DNA, 120 bp, synthetic construct
  source 1..120: mol_type = other DNA
cttgaatattcggatttctcaaattaaactgaccatacccaccccataatgtgccatagctaaaaaagaagtaattcttttagcaaagaaatgcataaccgagccctgcttgaatatcac

SEQ ID NO: 25637 - DNA, 120 bp, synthetic construct
  source 1..120: mol_type = other DNA
ggcacaatctcagctcactgcaacctccgcctccctgggttcaagcgattctcctgtctcagtctcccgagtagctgggattacaggcgcatgccaccatgccccagctaatttttgtat

SEQ ID NO: 25638 - DNA, 120 bp, synthetic construct; identical to SEQ ID NO: 7857
  source 1..120: mol_type = other DNA

SEQ ID NO: 25639 - DNA, 120 bp, synthetic construct
  source 1..120: mol_type = other DNA
ctctgggcctcactgatctctttataatgaatctgtgtagaaacttgactacttaagcttgactatctcaaagattaaagtgactgtaggtcacggaattctactgttttaggattacat

SEQ ID NO: 25640 - DNA, 120 bp, synthetic construct
  source 1..120: mol_type = other DNA
gctcacacctataatcccagcactttggggaggctgaggtggaaggatcatttgaacaggagtttggggccagcctgagcaacacagtgagatctcatctctgccaaaaataaataaaca

SEQ ID NO: 25641 - DNA, 120 bp, synthetic construct
  source 1..120: mol_type = other DNA
ctgcaacccagcctgggtgacagaatgagattgtatctctaaataaaaaaaaaaaaaaaaaaaaaatgaggttgggcatggtcactcacacctatatctcagcactttggcaggccaaca

SEQ ID NO: 25642 - DNA, 120 bp, synthetic construct
  source 1..120: mol_type = other DNA
cagaaggctgagggagggaggctcactggagctcaggaattcaagactgtagtgagccgtgattgtgccactacactccagcctggatgacagagtgagacaatgaaaaacaacagcaaa

SEQ ID NO: 25643 - DNA, 120 bp, synthetic construct; identical to SEQ ID NO: 7858
  source 1..120: mol_type = other DNA

SEQ ID NO: 25644 - DNA, 120 bp, synthetic construct
  source 1..120: mol_type = other DNA
ataatcatatttcattaagcctaatcactaaattatttcaatttttagtttaaaaacactatttagtatacctatggcatagcagcacttattcataatagccaagagaagaaagcaacc

SEQ ID NO: 25645 - DNA, 120 bp, synthetic construct
  source 1..120: mol_type = other DNA
gaaataagccagtcacacaacacaaaaaaatactgttatgattccacttaaatgaggtgtctagattagtcaaattcataggaacagaaggtaggctagtattaccagggactggggaaa

SEQ ID NO: 25646 - DNA, 120 bp, synthetic construct
  source 1..120: mol_type = other DNA
attagaaatggttaagaaggtacgttttatgctatgttttcttttttctaccattaccaccatatacacatacaaaatctctgacaaaaaaatagtaatgggggggcagagagagagaga

SEQ ID NO: 25647 - DNA, 120 bp, synthetic construct; identical to SEQ ID NO: 7859
  source 1..120: mol_type = other DNA

SEQ ID NO: 25648 - DNA, 120 bp, synthetic construct
  source 1..120: mol_type = other DNA
agacttatttactatgcatgtctgggagaggtgatggtgtttccaaggactcaaagggcaaagaagtagaaagcttcaagaatgctttcttagttatttagaacatgataggaagtatca

SEQ ID NO: 25649 - DNA, 120 bp, synthetic construct
  source 1..120: mol_type = other DNA
cttgtagtgttccacattaaattaaggatacatccttataagcattttactaaaaatcatggatctcacaaacacctggtgagagtaccctggtctcctgattctcaaagtacccccttc

SEQ ID NO: 25650 - DNA, 120 bp, synthetic construct
  source 1..120: mol_type = other DNA
ttccctaaccttctccatttagtgattgacactgaaaaaaaatttagaggaatcttaaagtggaagggacataacagacaatgtagccaaatcctatagtgtgagcaactaaaggaccag

SEQ ID NO: 25651 - DNA, 120 bp, synthetic construct; identical to SEQ ID NO: 7860
  source 1..120: mol_type = other DNA

SEQ ID NO: 25652 - DNA, 120 bp, synthetic construct
  source 1..120: mol_type = other DNA
ttgagtcaacacaaataggttattagatattttcagtaaaccagcagccatcaagtcggctatgaaggcagtactcacagccaagtgtaaagggcttattgttgctctattatctgaatc

SEQ ID NO: 25653 - DNA, 120 bp, synthetic construct
  source 1..120: mol_type = other DNA
attattctctcccacccacccagttcaaatccaccttagagtattatttggcaactcagcaaacttataaaacatgattattatgaaagtatactaaggaccacagactaagagctttga

SEQ ID NO: 25654 - DNA, 120 bp, synthetic construct; identical to SEQ ID NO: 7861
  source 1..120: mol_type = other DNA

SEQ ID NO: 25655 - DNA, 120 bp, synthetic construct
  source 1..120: mol_type = other DNA
gtgttttgaataaacaattttatatcacaacagacgtcaaatctatatacataggtctaaaattttggtgtgaatatccataacgtaggaaaatagttatttttgtagcagggctctaag

SEQ ID NO: 25656 - DNA, 120 bp, synthetic construct
  source 1..120: mol_type = other DNA
tctttaacctaaagtatctgttacacacatgaatatcttttccttgactttccttctggtttggtaaatttgggtgaatggtggtattctattccagaatcagaccacagcagaaataaa

SEQ ID NO: 25657 - DNA, 120 bp, synthetic construct
  source 1..120: mol_type = other DNA
aaaagacacagttatagttttttagaaacttatgaggaatattaatttaaaggggcaggagaagtaaatagtgtagacatgaacatggggtaatcagtagccctcttcagagatctaatt

SEQ ID NO: 25658 - DNA, 120 bp, synthetic construct
  source 1..120: mol_type = other DNA
ttattctcatttttgttacattattagactataaactcccattaggtctttcacaagaattcaggaatcttaccagctgaagacatagacggtgaccataagcagctgaataatgaactg

SEQ ID NO: 25659 - DNA, 120 bp, synthetic construct; identical to SEQ ID NO: 7862
  source 1..120: mol_type = other DNA

SEQ ID NO: 25660 - DNA, 120 bp, synthetic construct
  source 1..120: mol_type = other DNA
aatgcaaatgaaacattcatgagaatcttcttgattcaaagtggatacctcaaaagtctgtcagacagctttttttttcatatgtgaaggctatcttttacacagtctctatctatacca

SEQ ID NO: 25661 - DNA, 120 bp, synthetic construct
  source 1..120: mol_type = other DNA
aagctcaagaaaggatgttaaacaaaacaaaacctcaagaaaccaaggtcagaactcaatgaatctgaattagaggactaagaagaggtatataaacagagtaaagtggtaagaaggtat

SEQ ID NO: 25662 - DNA, 120 bp, synthetic construct
  source 1..120: mol_type = other DNA
taacactaccatttgatccagcaatcccattactgagtatctacccaggggaaaagaagtcattatttgaaaaaggcacttgcacatgcatgtttatagcagtacaattcgcaattgcaa

SEQ ID NO: 25663 - DNA, 120 bp, synthetic construct; identical to SEQ ID NO: 7863
  source 1..120: mol_type = other DNA

SEQ ID NO: 25664 - DNA, 120 bp, synthetic construct
  source 1..120: mol_type = other DNA
gctcaggggaccagtgcaccaaaatctcagaaatcatcaataaagaacttatctatgtaaccaaaaaccacctgttccccaggaactattgaaataaaatacaataaaaataaatttaat

SEQ ID NO: 25665 - DNA, 120 bp, synthetic construct
  source 1..120: mol_type = other DNA
agctttttgatatgctgctggattcagtttgccagtattttattgaggattttcgcattgatgttcatcagggatattggcctaaaattctcaaggctttggtatcaggatgatgctggc

SEQ ID NO: 25666 - DNA, 120 bp, synthetic construct
  source 1..120: mol_type = other DNA
tggacttttatttgtttggtaggctattaattattgcctcaatttcagaacctgttatttgtctattcagagattcaacttcttcctggtttagtcttgggagggtgtatatgtccaaga

SEQ ID NO: 25667 - DNA, 120 bp, synthetic construct; identical to SEQ ID NO: 7864
  source 1..120: mol_type = other DNA

SEQ ID NO: 25668 - DNA, 120 bp, synthetic construct
  source 1..120: mol_type = other DNA
gccctctctcaccactcctattcaacatagtgttggaagttctggctagggcaatcaggcaagagaaagaaataaagggtattcaattaggaaaagaggaagtcaaattgtctctgtttg

SEQ ID NO: 25669 - DNA, 120 bp, synthetic construct
  source 1..120: mol_type = other DNA
tcccatacaccaataacagacaaacagagagccaaatcatgagtgaactcccattcacaactgctacaaagagagtaaaatacctaggaatccaacttacaggggatgtgaaggacctct

SEQ ID NO: 25670 - DNA, 120 bp, synthetic construct; identical to SEQ ID NO: 7865
  source 1..120: mol_type = other DNA

SEQ ID NO: 25671 - DNA, 120 bp, synthetic construct
  source 1..120: mol_type = other DNA
gaacagaggcctcagaaataacaccacacatctacaaccatctgatttttgacaaacctgacaaaaactagcaatggggaaaggatttcttatttaataaatggtgctgggaaaactggc

SEQ ID NO: 25672 - DNA, 120 bp, synthetic construct
  source 1..120: mol_type = other DNA
ctagggcataccattcagggcataggcatgggcaaagacttcatgactaaaacaccaaaagcaatagcaacagaagccaaaatagacaaatgggatctaattaaactaaagagcttctgc

SEQ ID NO: 25673 - DNA, 120 bp, synthetic construct
  source 1..120: mol_type = other DNA
agaaaaaaacaaccccatgaaaaagtgggcaaaggatatgaacagacacttctcaaaagatgacatttatgcagccaatagacatacaaaaaaatgctcatcatcactggtcatcagaga

SEQ ID NO: 25674 - DNA, 120 bp, synthetic construct; identical to SEQ ID NO: 7866
  source 1..120: mol_type = other DNA

SEQ ID NO: 25675 - DNA, 120 bp, synthetic construct
  source 1..120: mol_type = other DNA
gtggcacatatacaccatggaatactatgccaccataaaaaaggatgagttcatgtcctttgcagggacacagatgaagctggaaaccatcattctcagcaaactatcacaagatcagaa

SEQ ID NO: 25676 - DNA, 120 bp, synthetic construct
  source 1..120: mol_type = other DNA
tgggggcctgggggagggatagcattaggataaatacctaatgtaaataatgtaaatgatgagttgatgggtgcagcaaaccaacatggcacatgtatacctatctaacaaacctgcacg

SEQ ID NO: 25677 - DNA, 120 bp, synthetic construct
  source 1..120: mol_type = other DNA
tgaggcgggcagatcatgaggccaagagatcaagaccatcctggccaacatggtgaaatcttgtctctaccaagagtacaaaaattagctgggtgtggtggcgggcgcctgtagtcccag

SEQ ID NO: 25678 - DNA, 120 bp, synthetic construct; identical to SEQ ID NO: 7867
  source 1..120: mol_type = other DNA

SEQ ID NO: 25679 - DNA, 120 bp, synthetic construct
  source 1..120: mol_type = other DNA
ctacctggggaaaaaattctttaatcaaatactccttattaaaagtttccaaaatcacactgaagtcatataaaaacaaatgaaaagaaattctaaagcaatgtaactgatctttcagta

SEQ ID NO: 25680 - DNA, 120 bp, synthetic construct
  source 1..120: mol_type = other DNA
tatcttcaatggcagcaaatattcatccatttaagtgcaattttgatatttatgtacagctaaaattctttggagtcaagcataataaaaaaaagaagattaagctgggtgcagtggctc

SEQ ID NO: 25681 - DNA, 120 bp, synthetic construct
  source 1..120: mol_type = other DNA
aggcatggtggcacacacctgtaatcccagctcctcgggaggctgaggcaggagaatcacttgaacccaggaggcggaggttgcagtaagctgagattgcaccattgcactccagcctgg

SEQ ID NO: 25682 - DNA, 120 bp, synthetic construct; identical to SEQ ID NO: 7868
  source 1..120: mol_type = other DNA

SEQ ID NO: 25683 - DNA, 120 bp, synthetic construct
  source 1..120: mol_type = other DNA
agtgctcactgggatgcagaaaaagcctgcaagtctgtaggaatactttacaggcaaaaacattttacccaagggcatttaaaaaaaatctttaatcaagttctctagatgttagtgata

SEQ ID NO: 25684 - DNA, 120 bp, synthetic construct
  source 1..120: mol_type = other DNA
taagcattatctctaacaaatgaaaaagattactgacactaagttaaatgacttttcccaaatccttttggctagaatatggcaaaccaaggactaaaccacctcaggtcttccctttat

SEQ ID NO: 25685 - DNA, 120 bp, synthetic construct
  source 1..120: mol_type = other DNA
tcattagagggtgggggcagaagagtctgtatactcttttttctgtttgcacattaacacatgttcattttatgaaacgcagacaattaagaaatgaagattctccataatctgtcctct

SEQ ID NO: 25686 - DNA, 120 bp, synthetic construct
  source 1..120: mol_type = other DNA
aaatcggaatgcatttcaaactatttaaatttctcctactcttaccctaccactcatgaaccctactattttgagttctgaggcaagttcagactgattcaaattcatgtgtcccatggc

SEQ ID NO: 25687 - DNA, 120 bp, synthetic construct; identical to SEQ ID NO: 7869
  source 1..120: mol_type = other DNA

SEQ ID NO: 25688 - DNA, 120 bp, synthetic construct
  source 1..120: mol_type = other DNA
aaggtccccatagtaaaaggcagagctagtatcaaacactgctcttacatatatatacacaataagcttaacaaggttgttgaatgtaagtcacatacaaaaggcaaatatatcttctat

SEQ ID NO: 25689 - DNA, 120 bp, synthetic construct
  source 1..120: mol_type = other DNA
aacctctacacacaaaaaactgcatgatcccatttttatgaagtttgaaaacagacaaaaataaactgccattagaagtcaaaatgtagcctcatttcctaagagtgttgctatggtcta

SEQ ID NO: 25690 - DNA, 120 bp, synthetic construct
  source 1..120: mol_type = other DNA
tgggattagtgtccttataaataaggcccaaaagagctctcattccttctaccatgtgaggatatggcaagaatatgccctcaaagaggaagtgggccttctccagacactgaatgtgct

SEQ ID NO: 25691 - DNA, 120 bp, synthetic construct; identical to SEQ ID NO: 7870
  source 1..120: mol_type = other DNA

SEQ ID NO: 25692 - DNA, 120 bp, synthetic construct
  source 1..120: mol_type = other DNA
ctgttgatgatggttatctcaggagagctggtatgaggggaatttcttccttataatcaggaaaaacagccctcaacctttccttctcttatatacatactacacacaggtgtggagaag

SEQ ID NO: 25693 - DNA, 120 bp, synthetic construct
  source 1..120: mol_type = other DNA
ttgctggattcttacatgatgtaaaataaagacacttcagaggacttgctgaatgactgtctaccaagaacgcaggcatcaggacaatgggggtaacaagcagaatgactagaatgagtc

SEQ ID NO: 25694 - DNA, 120 bp, synthetic construct; identical to SEQ ID NO: 7871
  source 1..120: mol_type = other DNA

SEQ ID NO: 25695 - DNA, 120 bp, synthetic construct
  source 1..120: mol_type = other DNA
actgaataatagcaattggaagctctgaggaatttgtctcttcttttagaaaatatttcattgttgctttggcagaatgagttatgcctgattctcttattactcaagctattcctggga

SEQ ID NO: 25696 - DNA, 120 bp, synthetic construct
  source 1..120: mol_type = other DNA
tgcctctggtatcccagaataattactgtggcttatattttccactaggctcccatggaacaaatcattgaatcaataaatgatggcactcgacaggctctctgggattttgatacttaa

SEQ ID NO: 25697 - DNA, 120 bp, synthetic construct
  source 1..120: mol_type = other DNA
cttagcaattacttgctcatactcaaatgggtacagtatggaaactccaagatttaaattgggtctttcggatcccaagtatcaagcctgatactttccagtgtatcaggctgtttagtg

SEQ ID NO: 25698 - DNA, 120 bp, synthetic construct; identical to SEQ ID NO: 7872
  source 1..120: mol_type = other DNA

SEQ ID NO: 25699 - DNA, 120 bp, synthetic construct
  source 1..120: mol_type = other DNA
tctctcagcggaatctggatcatgctgagctgtacccaataaccagtctgtgaaagtagtggtaaaggactacagatggtgataaaaggtataacttattttaagcaaatcaataaatca

SEQ ID NO: 25700 - DNA, 120 bp, synthetic construct
  source 1..120: mol_type = other DNA
tactttatattcttgcaaataaaatacacattactattgcctttaagattagaattttaggctgggcgcagtggctcactcctgtaatcccagcattttggaaggccaaggtgggcggat

SEQ ID NO: 25701 - DNA, 120 bp, synthetic construct; identical to SEQ ID NO: 7873
  source 1..120: mol_type = other DNA

SEQ ID NO: 25702 - DNA, 120 bp, synthetic construct
  source 1..120: mol_type = other DNA
gcaggtttggcacatatgtatacatgtgccacgttggtgtgctgcacccattaactcgtcacttacattaggtatacctcctaatgctatccctccccctcctccccaccccatgacagg

SEQ ID NO: 25703 - DNA, 120 bp, synthetic construct
  source 1..120: mol_type = other DNA
tttccagcttcatccatgttcctacaaaggacataaactcctccttttttatggctgcatagtattccatgatgtatatgtgccacattttcttaatccagtctatcattgatggacatt

SEQ ID NO: 25704 - DNA, 120 bp, synthetic construct
  source 1..120: mol_type = other DNA
ggtcaaatggtatttctagttctagatccttgatgaatcgccacactgtcttccacaatggttgaactagtttatagtcccaccaacagtataaaagtgttcctatttctccacatcctc

SEQ ID NO: 25705 - DNA, 120 bp, synthetic construct; identical to SEQ ID NO: 7874
  source 1..120: mol_type = other DNA

SEQ ID NO: 25706 - DNA, 120 bp, synthetic construct
  source 1..120: mol_type = other DNA
attctgttatatgaagtacattttataacatctttccccagaaaccattacttatttctgccaatggtatttttacttttcactgacccacaccatagggaattaccagacactgaaaat

SEQ ID NO: 25707 - DNA, 120 bp, synthetic construct
  source 1..120: mol_type = other DNA
catcatttattcttgttttcacttattcattcttggccaacatttacttattctgccatctaatttacctatttaagcaacatgtagtacctactacgtaccagattctgccagttcaat

SEQ ID NO: 25708 - DNA, 120 bp, synthetic construct
  source 1..120: mol_type = other DNA
ctctccctttccccatgatatagtcacggctgtagcctctaagaagtcaggtggaaaaaaacataaaagtgatattaagatgctcttttggcagataggacaagaagggacctttatctt

SEQ ID NO: 25709 - DNA, 120 bp, synthetic construct
  source 1..120: mol_type = other DNA
aaaaatacaaagaggaaacacaaatttgcaacaaaaacatccatatggaagatgccagtttatagaaatattgatcctccactctcactcctatggtacttacttgccatctgtgtctga

SEQ ID NO: 25710 - DNA, 120 bp, synthetic construct; identical to SEQ ID NO: 7875
  source 1..120: mol_type = other DNA

SEQ ID NO: 25711 - DNA, 120 bp, synthetic construct
  source 1..120: mol_type = other DNA
tatgaaataagatgaaaatgcagttatttcatcgcctccaggcagtagcagcaatcccagtcccagtcctttgagtgactttcaaataaccttcatattctgctcagaaatgtgaaaact

SEQ ID NO: 25712 - DNA, 120 bp, synthetic construct
  source 1..120: mol_type = other DNA
aaaaaaatgtaattaaccctgaattactttcaaccctctcaactcaaagcatttttcagaagccctctctgttatttgtagtatagaatgcctgaagtactaaaaattaatataaactgg

SEQ ID NO: 25713 - DNA, 120 bp, synthetic construct
  source 1..120: mol_type = other DNA
tgttcttcaaagtaattatggtgtcaaatagtttttattttcttctattcatttctgatttcctaccatgcataattctttttacttctcttctgcactggttctatcacatgcattgac

SEQ ID NO: 25714 - DNA, 120 bp, synthetic construct; identical to SEQ ID NO: 7876
  source 1..120: mol_type = other DNA

SEQ ID NO: 25715 - DNA, 120 bp, synthetic construct
  source 1..120: mol_type = other DNA
tatatttataacctatttcctccctcttactactgctctggaacaagatatgggcagtagaatccctcaccaagaaatgacttggagaaaggagaactgtatcattattttctaggtatt

SEQ ID NO: 25716 - DNA, 120 bp, synthetic construct
  source 1..120: mol_type = other DNA
aggctagggctgtggtagggactcaagaagaaaactgtgggtgagaacgaatatttggaagttactgacttcagctgggactctcaatgaatcatgatcagtgtacaagatgctaaattg

SEQ ID NO: 25717 - DNA, 120 bp, synthetic construct
  source 1..120: mol_type = other DNA
ccagtattcagcagaaggtttaggcactccaaattcctattgagagaaaatacagttagaaaacttaattgacagtgattttataatgaaattggtaggtttaaagaagcatgaaagcat

SEQ ID NO: 25718 - DNA, 120 bp, synthetic construct
  source 1..120: mol_type = other DNA
gaaataacacacgattcatgttgtcattgtttaaaaggaagatcacatttgcaaaagagattctgaggaggctttaggaaacaacttgcttataggtttttttttttttcttgaaacaga

SEQ ID NO: 25719 - DNA, 120 bp, synthetic construct; identical to SEQ ID NO: 7877
  source 1..120: mol_type = other DNA

SEQ ID NO: 25720 - DNA, 120 bp, synthetic construct
  source 1..120: mol_type = other DNA
tttaactggaaggttctctggcgaccttggaagaacaagaaaaccagtcacatgctcacaatccatctctacaacttagactgtgctggtgtactcttggttcaacgtactcgtcctctg

SEQ ID NO: 25721 - DNA, 120 bp, synthetic construct
  source 1..120: mol_type = other DNA
gaagcatgttccagaggccatgagttttagctgaagtttgttgctcgtatgaaccaactgcctaatttttccctggtggtactatttaaaacttagtccaaaatcttccaatctcaaact

SEQ ID NO: 25722 - DNA, 120 bp, synthetic construct
  source 1..120: mol_type = other DNA
gatgttctcatttgagaacatactttttaaagaaatagttttacttatccagaaattatgttcttttacagaaggcagtatttccttttgtaggtttattctctctctctctctcactca

SEQ ID NO: 25723 - DNA, 120 bp, synthetic construct; identical to SEQ ID NO: 7878
  source 1..120: mol_type = other DNA

SEQ ID NO: 25724 - DNA, 120 bp, synthetic construct
  source 1..120: mol_type = other DNA
taacagacatattattttacactaaagaattgtgtcatgaaacatcaagaatcacatcctcccctccaatcccaaacaaaactatgggttcttaagtgctagagtgcctgtttaaaaggc

SEQ ID NO: 25725 - DNA, 120 bp, synthetic construct
  source 1..120: mol_type = other DNA
ttgggtgagtccatttataggaactgttcagaacaggcaaattttatagagatgaaaagtagattagtggttgcctagggctgagggaagaaagaaatggagattaactgctaatggtct

SEQ ID NO: 25726 - DNA, 120 bp, synthetic construct
  source 1..120: mol_type = other DNA
ggttcaagcgattctcctgcctcagcctcccaagtagctgggattacaggtgctcaccaccacgcccagctaatttttttttgtattttttttttagtagagatgggctttcaccatgtt

SEQ ID NO: 25727 - DNA, 120 bp, synthetic construct; identical to SEQ ID NO: 872
  source 1..120: mol_type = other DNA

SEQ ID NO: 25728 - DNA, 120 bp, synthetic construct
  source 1..120: mol_type = other DNA
tgaagaaagaagttttctgcagcaatctgaaaagccgcttaaggctgccaaatggagggggaacattccatgtatgccacgcctaaagttaatagaacaggacagtatcttcattttaac

SEQ ID NO: 25729 - DNA, 120 bp, synthetic construct
  source 1..120: mol_type = other DNA
cttcggagagtaatttggttaaagtttgatggtgggcataacttattagccagctatttttctccaaaagtcaggtttctcaccttcagcactactgtcattatggactttgctggggaa

SEQ ID NO: 25730 - DNA, 120 bp, synthetic construct; identical to SEQ ID NO: 7880
  source 1..120: mol_type = other DNA

SEQ ID NO: 25731 - DNA, 120 bp, synthetic construct
  source 1..120: mol_type = other DNA
tagagcaacttgtacagatgtgaaagaaggcctaaatttctatctagatggctaaattaataagctcatgtaatttttttggaaaaagttacaaaacagataggtgcagtaccataccat

SEQ ID NO: 25732 - DNA, 120 bp, synthetic construct
  source 1..120: mol_type = other DNA
ttcaaacaaaatattacaatgggaactttaatttataaaataaatacaagcaaactgttctgaccaaaatgggggtgggggtaagaactccttcgtaggattccaaggaatccctgagct

SEQ ID NO: 25733 - DNA, 120 bp, synthetic construct
  source 1..120: mol_type = other DNA
ggacttttaagtacttctaggttaaaaataaagagatcacaaaaattaacagctctgatcaaaactgcgttattactcaaagtgagaaagaactggggtaacatacataaaaatacactg

SEQ ID NO: 25734 - DNA, 120 bp, synthetic construct; identical to SEQ ID NO: 7881
  source 1..120: mol_type = other DNA

SEQ ID NO: 25735 - DNA, 120 bp, synthetic construct
  source 1..120: mol_type = other DNA
gtcagacactggaccatataaagatcaggtcaaacgtactacatgaaaagtaataaaaaatgctgttcacatacaaactaatagatacagcaattttaactagatttcattcatagctca

SEQ ID NO: 25736 - DNA, 120 bp, synthetic construct
  source 1..120: mol_type = other DNA
aactactgtattaaaacaaaattaaacacgtttctttagagcaagacttcagagctttaatgtgcatactctgtcatcaagactgcatgcaatgcttcaaaaaatattggatcatgaacc

SEQ ID NO: 25737 - DNA, 120 bp, synthetic construct
  source 1..120: mol_type = other DNA
gtttagcttgcctgatattaatttaaacacaaaagaatacaaactcaagaaattaaaatcctgaaaatagttgcagatactcaacaggggaaaatgatacatgtataatgtatatacaga

SEQ ID NO: 25738 - DNA, 120 bp, synthetic construct
  source 1..120: mol_type = other DNA
aaacaaaagtatgaaagatacagctacgtggtattttatactctttaatattttattttcatgagctctgaaatcatgtattaaaaatacacaaaatgcgatgacaattcctcaatacca

SEQ ID NO: 25739 - DNA, 120 bp, synthetic construct; identical to SEQ ID NO: 7882
  source 1..120: mol_type = other DNA

SEQ ID NO: 25740 - DNA, 120 bp, synthetic construct
  source 1..120: mol_type = other DNA
aaattccatgcttacaatttataaaaattgggagtgggacagtaaggatgtgtctcccaagtttcagattcaaaatttcacactgctccaacatttccattctaagaaattctgaatcct

SEQ ID NO: 25741 - DNA, 120 bp, synthetic construct
  source 1..120: mol_type = other DNA
atattttctcaaatcacttaaaataataaatcagactggctgcacacatatatatttcatgtagaagttctaaaggagttccaaatatgaagaaaaacaatccctgatttaggttatctt

SEQ ID NO: 25742 - DNA, 120 bp, synthetic construct
  source 1..120: mol_type = other DNA
taaactacttagcagcttcctaatctcacagcaacattcagcatgccttctgcataggtactaaaatggaaatgtcacaagtattctaagtttatgctaacactgtacaacgcagatatt

SEQ ID NO: 25743 - DNA, 120 bp, synthetic construct; identical to SEQ ID NO: 7883
  source 1..120: mol_type = other DNA

SEQ ID NO: 25744 - DNA, 120 bp, synthetic construct
  source 1..120: mol_type = other DNA
ctacatcttactggtctgttgtacagagtaaatacaataatcctttgtaaaacactcagataacacatcagtgcttctcaggatatatttgttttaccattatttttcatgtaccagttg

SEQ ID NO: 25745 - DNA, 120 bp, synthetic construct
  source 1..120: mol_type = other DNA
cttttttttctctcttttttttttttgagacttgctttgttgcccaggctggagtacagtggtgtgatctcagctctcagcaacctccgcctcccgggttcaagtgattctcctgcctca

SEQ ID NO: 25746 - DNA, 120 bp, synthetic construct
  source 1..120: mol_type = other DNA
atccacccgcctcggcctcccaaagtgctaggattacaggcatgagccaccgcacctggactttttttttttttttttttcccttaaagagatgggggtcttggtctgtcagccaggctg

SEQ ID NO: 25747 - DNA, 120 bp, synthetic construct; identical to SEQ ID NO: 7884
  source 1..120: mol_type = other DNA

SEQ ID NO: 25748 - DNA, 120 bp, synthetic construct
  source 1..120: mol_type = other DNA
aaaacttgtaataataatttgattaacaaaatgatgaaatttggaagatataactatagttaacatttatgtatacatagcacgtttcacgcacagttttaaaacacttcatatggtcag

SEQ ID NO: 25749 - DNA, 120 bp, synthetic construct
  source 1..120: mol_type = other DNA
aacagagtgagattctgtctccccatctcccttcctcctaaaaagccaaaaccaaatctacttcatatatattatttaattctcacaaccctatcagattgataccattaatcttgtttt

SEQ ID NO: 25750 - DNA, 120 bp, synthetic construct; identical to SEQ ID NO: 7885
  source 1..120: mol_type = other DNA

SEQ ID NO: 25751 - DNA, 120 bp, synthetic construct
  source 1..120: mol_type = other DNA
cggggagaaggcacagttatttctttctgaactggagaaacaatgtggagttttctttttcttaatcacctcaaatcactttagcagaaaactaggagtattaagaaaaaaaaaaagaaa

SEQ ID NO: 25752 - DNA, 120 bp, synthetic construct
  source 1..120: mol_type = other DNA
aagcatttggtgtattttgcttagctgaccaaaatctattcttaaagaacaatgtgggtgggaaaacgtgtgcatataaatgaagcaatcagtgcagtaaggctcatgtcaagcagttct

SEQ ID NO: 25753 - DNA, 120 bp, synthetic construct
  source 1..120: mol_type = other DNA
ctagtcatctataacttgatcaaggtcagaaacaacaaaatggagaatgtagtaggaggaaaagattaagcaggaaaaaagagataatatggtaagaatatgagggttagtaaatcaaat

SEQ ID NO: 25754 - DNA, 120 bp, synthetic construct
  source 1..120: mol_type = other DNA
aaactcacagctatcaacatattgtgtgtaagagctggaagggatctgagaaatcaacatgggaaatgtgtttcaacaaaatttgacaataaaataattggacaattgcatataaatgag

SEQ ID NO: 25755 - DNA, 120 bp, synthetic construct; identical to SEQ ID NO: 7886
  source 1..120: mol_type = other DNA

SEQ ID NO: 25756 - DNA, 120 bp, synthetic construct
  source 1..120: mol_type = other DNA
aaatggcagtgcataaaacaggaagcccaatctctaccttttaaagacagcatcatgtgaaccaaaaaatgcatagtagctgacgacacaggtaaagttccgtaatttccataatactaa

SEQ ID NO: 25757 - DNA, 120 bp, synthetic construct
  source 1..120: mol_type = other DNA
gaaatagcctaactttcattaaagaaacattactgcgcctttgaggaaaaaactaacttttctcctcacaactgtctagatatttttctgggccctgattatccaaagtgcaggaattct

SEQ ID NO: 25758 - DNA, 120 bp, synthetic construct; identical to SEQ ID NO: 7887
  source 1..120: mol_type = other DNA

SEQ ID NO: 25759 - DNA, 120 bp, synthetic construct
  source 1..120: mol_type = other DNA
gtaatcaaaatgctctgaaaatcacattttaagcttaaacatttttactaatcctaaatggctcaattttgtgtctggttttcttcataccaccagatacagtttggcaagtgctcaaag

SEQ ID NO: 25760 - DNA, 120 bp, synthetic construct
  source 1..120: mol_type = other DNA
aatgctcaaaatctggattgcatgtgctctcttataaaattatatagtgaaagcatatttatttgggtacagaatattcattcatttgaggcaaggtctcacctgtcgcccaggctagag

SEQ ID NO: 25761 - DNA, 120 bp, synthetic construct
  source 1..120: mol_type = other DNA
taggactacaggataatttttaattttttttttggtagagatagaggtcttgctatgttgcccaggctggtcttgaactcctggcctcaagtgatcttctcgccttggcctcctaaagca

SEQ ID NO: 25762 - DNA, 120 bp, synthetic construct
  source 1..120: mol_type = other DNA
gctcactgcagccttgacctccaaggctcaaaaatcctcccacttcaacctcccaagtagctgggactacaagcatgagccaccatgccaagctcattttctatttttttgtggagccag

SEQ ID NO: 25763 - DNA, 120 bp, synthetic construct; identical to SEQ ID NO: 7888
  source 1..120: mol_type = other DNA

SEQ ID NO: 25764 - DNA, 120 bp, synthetic construct
  source 1..120: mol_type = other DNA
tctatccttccatccacccagttatttgatgctttttaaaattagatacagacatcatacatgtcacctctaaacacaacattaactagggttaaacatctgtttagtattttccttcta

SEQ ID NO: 25765 - DNA, 120 bp, synthetic construct
  source 1..120: mol_type = other DNA
catgcccctttcccagttgatccctcctcacaatggcaataattgttgtgatttttttcaattatagattctggaaccccatataaatggaattttattggttctagaaccttacataaa

SEQ ID NO: 25766 - DNA, 120 bp, synthetic construct; identical to SEQ ID NO: 7889
  source 1..120: mol_type = other DNA

SEQ ID NO: 25767 - DNA, 120 bp, synthetic construct
  source 1..120: mol_type = other DNA
atttccataggcatttggttcattcatctattagaagggaaaaaaatgcgaatgttaaagtagttttgctaattatcaatgttgtgagctattttagcaacctgtggttgcaatcaaatt

SEQ ID NO: 25768 - DNA, 120 bp, synthetic construct
  source 1..120: mol_type = other DNA
gaatataattcacatacacaatgtctacttcatgacaaaactgaataatacaaaagaggtatttcagggaaacgtaaactaatgtatttttaaaggcgttctaggtaaaggatttactat

SEQ ID NO: 25769 - DNA, 120 bp, synthetic construct
  source 1..120: mol_type = other DNA
acagatcaagatttaaaaaaaaatgaacggcatgttctatttatttaattcattttttgccacaaacttgggctctaaatatcttccagtgtcatatgcaggtattttatcacaagtaaa

SEQ ID NO: 25770 - DNA, 120 bp, synthetic construct
  source 1..120: mol_type = other DNA
cgaaacctctgcctcctaggctcaagtgattctcctgcctcagcctcctgagtaactgggattacatgcacacaccactaccaactggctaatatttgtattttagtagagacggggtgt

SEQ ID NO: 25771 - DNA, 120 bp, synthetic construct; identical to SEQ ID NO: 7890
  source 1..120: mol_type = other DNA

SEQ ID NO: 25772 - DNA, 120 bp, synthetic construct
  source 1..120: mol_type = other DNA
aaagagtctctatttagagtgggagctttgggtcaccaggtatcatgtatttggagactgaaatcaaccacatggacaaccaatcaagccatataatggagccccaataaaaaccgaaaa

SEQ ID NO: 25773 - DNA, 120 bp, synthetic construct; identical to SEQ ID NO: 7891
  source 1..120: mol_type = other DNA

SEQ ID NO: 25774 - DNA, 120 bp, synthetic construct
  source 1..120: mol_type = other DNA
cacagccttggaggaataagggtctcctgggagccctggtgttggtcgaggctgcccagggaggacccgaggttcaggcatcccagggagctggccatgccctctggggcctctcgtcct

SEQ ID NO: 25775 - DNA, 120 bp, synthetic construct
  source 1..120: mol_type = other DNA
cgaaccagagcctgcagggaggagagtaggctgagtggggtcttcctggggagccacatttggggacctgcctctgttggccctaccctctctccacgccaggccatcacagggccacca

SEQ ID NO: 25776 - DNA, 120 bp, synthetic construct
  source 1..120: mol_type = other DNA
atgaagagaccctggtgtggagctctttctgtcctcaggcatggaggactccaccctggggcactgttccaaaggtacaaaagcaaagaccccgacaggggtgctggagcccaccaatga

SEQ ID NO: 25777 - DNA, 120 bp, synthetic construct
  source 1..120: mol_type = other DNA
tcccactccaagtatcaggccaggcagggtctctgtatggagtttgctcccaggcctctgccactgttacctggcagggggcaggaggtgcctggcctctgggcattgccctctgggtca

SEQ ID NO: 25778 - DNA, 120 bp, synthetic construct; identical to SEQ ID NO: 7892
  source 1..120: mol_type = other DNA

SEQ ID NO: 25779 - DNA, 120 bp, synthetic construct
  source 1..120: mol_type = other DNA
acagcagtatccttattgccactagcccccagcatccttggggctcctactgtcacacagcagtctaggacatactagactacaagatcatttgcagaagggccccagagtcaagacgtc

SEQ ID NO: 25780 - DNA, 120 bp, synthetic construct
  source 1..120: mol_type = other DNA
tgggctttcccccttccacctcactcagccacctagatggtgccctgcttcccccctggacaagtagctggtcctgatggttttcccattccagggcccagatgactgccattgtaacag

SEQ ID NO: 25781 - DNA, 120 bp, synthetic construct
  source 1..120: mol_type = other DNA
ctgcagggttggccaagggctcgtcctctggtagcaggcgtctctgtctcttctgggaactccctttcatagtggacactgaaatggaagcaaggctgggtgaaccagagaaggctgcta

SEQ ID NO: 25782 - DNA, 120 bp, synthetic construct; identical to SEQ ID NO: 7893
  source 1..120: mol_type = other DNA

SEQ ID NO: 25783 - DNA, 120 bp, synthetic construct
  source 1..120: mol_type = other DNA
tgcagaagctccctggattatctaatgcacagccaaggctgagaaccattctaggtctttccagcccatggtgatccataccccctctgcactctcaggacactaaatatctgttattat

SEQ ID NO: 25784 - DNA, 120 bp, synthetic construct
  source 1..120: mol_type = other DNA
tcaagagattcttctgcctcagcctcccgagtagctgagatttcaggcatgcgccaccacacctgactaattttttgtgtgtttttagtagagacacggtttctccatgttggccaggca

SEQ ID NO: 25785 - DNA, 120 bp, synthetic construct
  source 1..120: mol_type = other DNA
catatcacccaacaagacgacaacccccttcagggcagggcccagggctgatgcttctgtatttccacgttaccttgcaccatggtgacccaaaaaggtacatgcacccttcaaggcttg

SEQ ID NO: 25786 - DNA, 120 bp, synthetic construct; identical to SEQ ID NO: 7894
  source 1..120: mol_type = other DNA

SEQ ID NO: 25787 - DNA, 120 bp, synthetic construct
  source 1..120: mol_type = other DNA
acctaaatccagtgatggaatcttattgtccacagtcttttgtggtatgtgctaccaccgaagatcctctcctaacctatcatgtgttcaatacgtctcagctcctagacttgctgaagc

SEQ ID NO: 25788 - DNA, 120 bp, synthetic construct
  source 1..120: mol_type = other DNA
ctgccatcgaggtcggcctcttacattaaggttcaggatggattggggcacaaaggcaagcaaaagacaccctacaaatttggggtaccctcttccaatccaacctggaacctgctgaca

SEQ ID NO: 25789 - DNA, 120 bp, synthetic construct
  source 1..120: mol_type = other DNA
ggcacgagccagggggttggtgcgtggatcttgtgggaagtcctccaagaagacaggtgactccatctcttccatctctatctcagcaaactggaggggtctctgattggccatgacggg

SEQ ID NO: 25790 - DNA, 120 bp, synthetic construct; identical to SEQ ID NO: 7895
  source 1..120: mol_type = other DNA

SEQ ID NO: 25791 - DNA, 120 bp, synthetic construct
  source 1..120: mol_type = other DNA
tagtccccgctctgaaactgatttactaggtgatattggacatctcacatgatctctgtgggccactatttcctcatgaataacccaaaaagacctaactaggtgtcattaaagaccttc

SEQ ID NO: 25792 - DNA, 120 bp, synthetic construct
  source 1..120: mol_type = other DNA
ttgtggggaggaaagggaaggggtgagatttggtagggaaatgtgggaaagagtgtgttgcatttgacacctctagtagatcaggtcattgattctgagtcccaggagaggtgggtggtg

SEQ ID NO: 25793 - DNA, 120 bp, synthetic construct; identical to SEQ ID NO: 7896
  source 1..120: mol_type = other DNA

SEQ ID NO: 25794 - DNA, 120 bp, synthetic construct
  source 1..120: mol_type = other DNA
ccaggctggagtgcagtggcacaatctgagctcactgtaacctctgcttcccgggttcaagtgattctcctgcctcagcctcctgagtagctgggattataggcatgtgccaccactccc

SEQ ID NO: 25795 - DNA, 120 bp, synthetic construct
  source 1..120: mol_type = other DNA
gccaccgtgcctggctagaaccgcttcgtatggcttacttgtttcttatcactgtacccagggctctcccaaagccccagcctaggccccactctccctcttgggttattgaatatctca

SEQ ID NO: 25796 - DNA, 120 bp, synthetic construct
  source 1..120: mol_type = other DNA
accccatgggtggaaatttcatgcccttcccaggcttccaggttgagaagtgttcttactcagtacagtcttctagattggtgatctttattgattggatatgtcatatatatatagttg

SEQ ID NO: 25797 - DNA, 120 bp, synthetic construct; identical to SEQ ID NO: 7897
  source 1..120: mol_type = other DNA

SEQ ID NO: 25798 - DNA, 120 bp, synthetic construct
  source 1..120: mol_type = other DNA
atcacttgaggtcaggagtttgagaccagtctggccagcatagcgaaaccccatctctactaaaaatacaaaaagtagcctggcatggtggtgtgtgcctgtgatcccagctactcagga

SEQ ID NO: 25799 - DNA, 120 bp, synthetic construct
  source 1..120: mol_type = other DNA
aaaaaaagcatcagtgttaatttcctgattttgtggttatgttgtggttacatagaagaattatgcaggataacgcccttgtaatacacattttgccttgaatacacacaatgccttgaa

SEQ ID NO: 25800 - DNA, 120 bp, synthetic construct
  source 1..120: mol_type = other DNA
taaaaatagccattgaaataaatttttgagcacagctcaaatgcatgtgtatttgggggttttataaattatgtgcattacagtgaacccaaaaatagaaataaaaccagataagataaa

SEQ ID NO: 25801 - DNA, 120 bp, synthetic construct
  source 1..120: mol_type = other DNA
agtgcagtggtgcaatctcacctcactgcaacctctgcctcccaggttccagtgatgctcccgcctcaacctcccaaatagctgggattacaagcgtatgccaccatgcccagctaattt

SEQ ID NO: 25802 - DNA, 120 bp, synthetic construct; identical to SEQ ID NO: 7898
  source 1..120: mol_type = other DNA

SEQ ID NO: 25803 - DNA, 120 bp, synthetic construct
  source 1..120: mol_type = other DNA
gctgggcacatgccgccacacctgactaatttttgtatttttggtagagatggggtttcgccgtgttggccaggctggtcttgaactcctgacctcaagtaacctgccaaccttggcctc

SEQ ID NO: 25804 - DNA, 120 bp, synthetic construct
  source 1..120: mol_type = other DNA
agcgccctggttctttttttgaggttgaaacatcttcaatcatggactacccagaactgtcttgacattttttcactcttctgggcttcctttttccctctatgtctccatcattggccc

SEQ ID NO: 25805 - DNA, 120 bp, synthetic construct; identical to SEQ ID NO: 7899
  source 1..120: mol_type = other DNA

SEQ ID NO: 25806 - DNA, 120 bp, synthetic construct
  source 1..120: mol_type = other DNA
gcccgtgggatctacctaaggcatttatggaggatctggtccgttctcagattcccatggggctccttggagaagctccccactcccattccttggctgcttctggactctggtccccca

SEQ ID NO: 25807 - DNA, 120 bp, synthetic construct
  source 1..120: mol_type = other DNA
gcaggagaaaggcaaaagttacccagatcacaccaactgcacttgacaaggccacccagttctttctgaacctttcagacagccagtcatttactaagaaacattggctgagttttgtgg

SEQ ID NO: 25808 - DNA, 120 bp, synthetic construct
  source 1..120: mol_type = other DNA
ggttttacaggctgtcatctcctgctcttcttccaaaatctttcaattccccaggcactgtggtctggcccaaatacccccaggcagacttgctgcagctctaacctgctccttcctgac

SEQ ID NO: 25809 - DNA, 120 bp, synthetic construct; identical to SEQ ID NO: 7900
  source 1..120: mol_type = other DNA

SEQ ID NO: 25810 - DNA, 120 bp, synthetic construct
  source 1..120: mol_type = other DNA
gctgaggagtgtgggaacagacccttgatgatctttgccctgcagaaaaccctcaggctccctctgagccctgaggggcatgaggactttgtgcccatggcctggggtcctccctctact

SEQ ID NO: 25811 - DNA, 120 bp, synthetic construct
  source 1..120: mol_type = other DNA
gatcttgagtgccgtgcggaccagggcaaagagtgtggcattgaaggtgactgtgccgtcgctgttcaggggcatgttcatgcccaccagccgctgtacagggagacgcagtggcctgcc

SEQ ID NO: 25812 - DNA, 120 bp, synthetic construct
  source 1..120: mol_type = other DNA
aatgatgagttgggtgacattgctgagacttcaggccctttgggaggaacttggggacccaggagatcccggctctacaatgcttcactccatcaggtcctcaccagtttccctctgcct

SEQ ID NO: 25813 - DNA, 120 bp, synthetic construct
  source 1..120: mol_type = other DNA
caccacgtccaggtgtttgattctccccctgcgggaggacacacagacttgtgtacctgctaccctcctccgctgccagaacctttctgctcagaggatgggcaatgggaaagaaagcca

SEQ ID NO: 25814 - DNA, 120 bp, synthetic construct; identical to SEQ ID NO: 7901
  source 1..120: mol_type = other DNA

SEQ ID NO: 25815 - DNA, 120 bp, synthetic construct
  source 1..120: mol_type = other DNA
ttttcattggcaccgtgactcccagaatagacataaaacagaacaaccagggaggtcagatcaaaagacaagcatggcaagagcagcttgtgagtgttgcctgagaaaaatcattttgga

SEQ ID NO: 25816 - DNA, 120 bp, synthetic construct
  source 1..120: mol_type = other DNA
tttggctcctgctgatggaggcactttaaagcacggttgctataggcaccaaacagacctgcactgtatcttggcaccatctcttaccagttacatggactggggcaacttacttaacct

SEQ ID NO: 25817 - DNA, 120 bp, synthetic construct
  source 1..120: mol_type = other DNA
ctcaggttcagagcaatgcaagagttagattcagtcagcctgggaggggcctgcgactctgcattttaatcaagctcagcttctgctggtcagaggaccgcactttgatttggggtctag

SEQ ID NO: 25818 - DNA, 120 bp, synthetic construct; identical to SEQ ID NO: 7902
  source 1..120: mol_type = other DNA

SEQ ID NO: 25819 - DNA, 120 bp, synthetic construct
  source 1..120: mol_type = other DNA
gtagtcaaaattgtccatgatgacagccacaaagaggttgatgacctgcaagagaagaaccaaggggtcccaacacagaaaggcaggtggtacagggttagggtgggggagctgggaggt

SEQ ID NO: 25820 - DNA, 120 bp, synthetic construct
  source 1..120: mol_type = other DNA
ctggccttgctaaattccttttgatgagtgctaaccaaaacaaaaaaaaaaagtaagaacttttggcagcctctctggagtatgaaaaagcacccaggaaacaaagccacactcaggatg

SEQ ID NO: 25821 - DNA, 120 bp, synthetic construct; identical to SEQ ID NO: 7903
  source 1..120: mol_type = other DNA

SEQ ID NO: 25822 - DNA, 120 bp, synthetic construct
  source 1..120: mol_type = other DNA
cagaagaggctcctgtcacctatctgctcctgcctggcccctcagaaggctggcagtcaggtggcagcagggtgtggacagatgagcaaactggggctgttgtccaatggtaaggaggtc

SEQ ID NO: 25823 - DNA, 120 bp, synthetic construct
  source 1..120: mol_type = other DNA
caagcaggagctaaactttagagaagagggcaaaatcaatctgattcaagttactagagggatgcactgttctgaccaaagcaaggcagggtcatatgtcacagaggcctcaaagagatt

SEQ ID NO: 25824 - DNA, 120 bp, synthetic construct
  source 1..120: mol_type = other DNA
ctgttgaatgaagaatctcaatgcatccgaggtgcatatgcatgacatgtttgcatttttccagtaactgctacaacctgctctgtagataacctccctccacctctccagctgggaaga

SEQ ID NO: 25825 - DNA, 120 bp, synthetic construct; identical to SEQ ID NO: 7904
  source 1..120: mol_type = other DNA

SEQ ID NO: 25826 - DNA, 120 bp, synthetic construct
  source 1..120: mol_type = other DNA
cagcaggcctgcagcccaggatcctcggttgcaatccaagctctagctcctgtgccctggccaagcataggcccctgcgccctacctgtggcagcgccccccaccccatctggagctttg

SEQ ID NO: 25827 - DNA, 120 bp, synthetic construct
  source 1..120: mol_type = other DNA
ttcactcagtggaggagcccagtgcaaaataaagctgtgggaccacttgttcaaaatgatgaatatcttcaaggcagtgacggcagagcatgcaaccaagcaggggacccttctgagtat

SEQ ID NO: 25828 - DNA, 120 bp, synthetic construct
  source 1..120: mol_type = other DNA
cgtgcctgaagagcagtagcacagcttgtgggaaggtctggaagttgttgttccggtttatttgggtcccatccaccaaggcgatcttcccaaacatctgcaagtcacaaagggccctga

SEQ ID NO: 25829 - DNA, 120 bp, synthetic construct; identical to SEQ ID NO: 7905
  source 1..120: mol_type = other DNA

SEQ ID NO: 25830 - DNA, 120 bp, synthetic construct
  source 1..120: mol_type = other DNA
gcatctgacactccagccatccacgatcagggaggttgtccctccttctttctcacgagcaaggcagggagggcggagggtccagcccgtgtgctgctcaggctcctcagggtccactga

SEQ ID NO: 25831 - DNA, 120 bp, synthetic construct
  source 1..120: mol_type = other DNA
ggcctgcagggcgggcgggagcgccagtcagtgtcttagggctccactgtgtgtctgcagccctgccctctgttagctccccagggctctgccttgcccagggctcccctggggcccacc

SEQ ID NO: 25832 - DNA, 120 bp, synthetic construct
  source 1..120: mol_type = other DNA
tcagcagcttgatcagcctcatgacacggaacaggcggaagaaggcgctggagatgcgggcactctcatctgggtcctgcggggcagcagccccagaggtcagtctgggggcagaacctc

SEQ ID NO: 25833 - DNA, 120 bp, synthetic construct
  source 1..120: mol_type = other DNA
ttgggcacagggctctggggctgttcagctgggaggcagggaagaggacgtggggcaccaggcagcgtggtgaagcccacacttgggagcagtggcagggatttgccctggggtgtggct

SEQ ID NO: 25834 - DNA, 120 bp, synthetic construct; identical to SEQ ID NO: 7906
  source 1..120: mol_type = other DNA

SEQ ID NO: 25835 - DNA, 120 bp, synthetic construct
  source 1..120: mol_type = other DNA
ctggactgtgtttccatctgcatagagggtgccagagagaacccgcactccatctcccagggctctgaggaagccgctatatccatgcacacttgactgcagagcctctgcccccacccg

SEQ ID NO: 25836 - DNA, 120 bp, synthetic construct
  source 1..120: mol_type = other DNA
cgtgccaggcaggctcgtgcagcctgaaattacaacgttcccgcagcctccacccaggcaatacagtcccccgctggaggccaggaaagtctgtggagaaaagagacgaagggaggggaa

SEQ ID NO: 25837 - DNA, 120 bp, synthetic construct; identical to SEQ ID NO: 7907
  source 1..120: mol_type = other DNA

SEQ ID NO: 25838 - DNA, 120 bp, synthetic construct
  source 1..120: mol_type = other DNA
gattcacatccatagtgccctgaggccagggtccgggcccctgtggaagtcccatctcccaggggcacagctcctctgggggagtctgaaatccccacagcagatgtttctctgtccagg

SEQ ID NO: 25839 - DNA, 120 bp, synthetic construct
  source 1..120: mol_type = other DNA
tgttctgcagccctgggtcaaaagaagtcattgttttatcttccaattatccacaggtagactgatccctggcatactggtcttctcattaaacaacagattttccctggggcagatttt

SEQ ID NO: 25840 - DNA, 120 bp, synthetic construct
  source 1..120: mol_type = other DNA
gcctggcttcagaagtttaaatgcaccccaggtgattctcatatgcaagcaaggatgacgaccagtgttctatacctgtgctatccaatatggtagccattagccacatgtgactatttg

SEQ ID NO: 25841 - DNA, 120 bp, synthetic construct
  source 1..120: mol_type = other DNA
ctgtccttgcagaaagttctaaccaatgtgctcccctagtcctttccctggtttgtacatcaggtatgtaaatcaatcttcacgtgactttaagcaaacactactggtaagggacatctg

SEQ ID NO: 25842 - DNA, 120 bp, synthetic construct; identical to SEQ ID NO: 7908
  source 1..120: mol_type = other DNA

SEQ ID NO: 25843 - DNA, 120 bp, synthetic construct
  source 1..120: mol_type = other DNA
ttgctcagagcccaccctgcccctcgctagctcagcgcccccaggggatctgagcagatggggttgtctgtcaccgtctgttctgtgcatggagggtgaacagggttcccaccctggccc

SEQ ID NO: 25844 - DNA, 120 bp, synthetic construct
  source 1..120: mol_type = other DNA
ccacaccccacctcaggcatccccagtgctgatccttccacccctatacccaactcaccctaaggttcaccccacaggctggcacagcctaagggctttctgttgagcagtgggcagttc

SEQ ID NO: 25845 - DNA, 120 bp, synthetic construct; identical to SEQ ID NO: 7909
  source 1..120: mol_type = other DNA

SEQ ID NO: 25846 - DNA, 120 bp, synthetic construct
  source 1..120: mol_type = other DNA
gctgtttctcattccacctccaaaccctcatccccttggtccagattctgggagccttcctgtcagctcaaccttcaaaatagatccagacactgatcccttctcacagcctccacagcc

SEQ ID NO: 25847 - DNA, 120 bp, synthetic construct
  source 1..120: mol_type = other DNA
tgttttagaactaaagtctgttcacacttaaaccctccaaagggttctcatctccctcagaataaaatccaagatcataaccatggccttcaagggcctagatgatctggcccctgcctt

SEQ ID NO: 25848 - DNA, 120 bp, synthetic construct
  source 1..120: mol_type = other DNA
tcttcaggcctctgctccagtgtcatatggacaccaccctcccattctcttccactctaagcctctaactccctttatgtttctgtataatactatgtacttgtcatacctgtcatatta

SEQ ID NO: 25849 - DNA, 120 bp, synthetic construct; identical to SEQ ID NO: 7910
  source 1..120: mol_type = other DNA

SEQ ID NO: 25850 - DNA, 120 bp, synthetic construct
  source 1..120: mol_type = other DNA
tctctatatttcaaaaacatattttttaaaaaagaagtaggactctaatcctcccactgccctgtttaaaaacctttagtgacttcccactgcctgctccataaagctgaagcccactct

SEQ ID NO: 25851 - DNA, 120 bp, synthetic construct
  source 1..120: mol_type = other DNA
catgccctgaaccttctttgcatttcctgcgctgtgcctctcctacagtagccctgcctgaggtgcttgctctcctctccagctccagtcaccacctccctttccttcaggcagatggca

SEQ ID NO: 25852 - DNA, 120 bp, synthetic construct
  source 1..120: mol_type = other DNA
ctctctgcccagcaggatgatagttccttgagggcagaagccgtgacttgtcattccatctttttaacccctggggttccatgttgtacacacagtgggcaccccacaaatatctgtgga

SEQ ID NO: 25853 - DNA, 120 bp, synthetic construct; identical to SEQ ID NO: 7911
  source 1..120: mol_type = other DNA

SEQ ID NO: 25854 - DNA, 120 bp, synthetic construct
  source 1..120: mol_type = other DNA
tctcccctttgctctttagttcccttcctccagagcagaaagtagtggtgggggggaggggagaattgttgggaactcaggatttggggtcctggtccagatagagatctctttcatccc

SEQ ID NO: 25855 - DNA, 120 bp, synthetic construct
  source 1..120: mol_type = other DNA
gggactgttcttcagaaacttcagagcaggcgagaatgtaagagaagctccaaggaagaggcgcccagagtctttctgtcattgtcaattctggctgcatgaagatctgcctgccctgtg

SEQ ID NO: 25856 - DNA, 120 bp, synthetic construct
  source 1..120: mol_type = other DNA
ccagcttctcatctggcccggtggcccccacactcaccctggccttgaaggccatgagcttgaggatcatctccagggtgaagatgatagtgaaggccacattgaggatgtctgagatgt

SEQ ID NO: 25857 - DNA, 120 bp, synthetic construct
  source 1..120: mol_type = other DNA
gcccccaaccctttcttgggccccctgctcactttgttttagctcagaaaactagaagctgctttagcaatcccctgagttccgccaaattttatgaacaccctccccctaccccaccac

SEQ ID NO: 25858 - DNA, 120 bp, synthetic construct; identical to SEQ ID NO: 7912
  source 1..120: mol_type = other DNA

SEQ ID NO: 25859 - DNA, 120 bp, synthetic construct
  source 1..120: mol_type = other DNA
cactatgaccctccttaaatctacttccttgtaagttttcccagggatctcttacccttttattagaaagtggatgaaattctacctcttccacaaaaccttccaggtagtttgggagga

SEQ ID NO: 25860 - DNA, 120 bp, synthetic construct
  source 1..120: mol_type = other DNA
gattgtctttccatatcaccatgacctagcagtgtgtgttcttatcattgggtgtgtcttgggcttctaggagcagggagcctagttacaccatcctatttatacagggcttaaggaatc

SEQ ID NO: 25861 - DNA, 120 bp, synthetic construct; identical to SEQ ID NO: 7913
  source 1..120: mol_type = other DNA

SEQ ID NO: 25862 - DNA, 120 bp, synthetic construct
  source 1..120: mol_type = other DNA
attaccgtactatttttatgcttgaattacctccttaataaaccataagtgcctggtgacaaggcctgtgcgcagttcacttctgtattccatgtagcacctcagcacacagtgcacaag

SEQ ID NO: 25863 - DNA, 120 bp, synthetic construct
  source 1..120: mol_type = other DNA
agatggtgttgagcatgatgagggcaaacatcaggtattcaaagtaggaggaggtgacaatgtaccacacctggtactggtatgggtttttgggaatgtagcacctcagtgggcgggcct

SEQ ID NO: 25864 - DNA, 120 bp, synthetic construct
  source 1..120: mol_type = other DNA
ctgtggccaggggctgtggctgaggactgtgaactgtttaggggaataatcctgttgggctttgggttccccttgagttatcacagcccattcccatgggtgctatagactagactgtgg

SEQ ID NO: 25865 - DNA, 120 bp, synthetic construct
  source 1..120: mol_type = other DNA
aatgcaggttctggggtcacccttaggcctctcttccctggctgaacctagggcttgggccagcaggaggcctgctggagctctgccctccacctctggcaggcagcccaggcacctggt

SEQ ID NO: 25866 - DNA, 120 bp, synthetic construct; identical to SEQ ID NO: 7914
  source 1..120: mol_type = other DNA

SEQ ID NO: 25867 - DNA, 120 bp, synthetic construct
  source 1..120: mol_type = other DNA
cccaatcctggaatggccctgcctttcaagaggttgccccatctatccctaatcaatcagtattaacaatctgccctgtgggcagagaggcatacacctatgggggactgcgtgcatttt

SEQ ID NO: 25868 - DNA, 120 bp, synthetic construct
  source 1..120: mol_type = other DNA
agaagggcaggctggctgcctggtcctacctgaccatgtccatgagggacctaggccccagccatcactcactgaggccatccctcgaaggtggagaccgtgaagagggacatcatggct

SEQ ID NO: 25869 - DNA, 120 bp, synthetic construct; identical to SEQ ID NO: 7915
  source 1..120: mol_type = other DNA

SEQ ID NO: 25870 - DNA, 120 bp, synthetic construct
  source 1..120: mol_type = other DNA
acactccctgccccgtgaccgtaaccctcccacagtgctccctgccccgtgactgtcccaccatgctccctgccccgtgaccgtcccactgtgctccctgccccatgtacctgcactcct

SEQ ID NO: 25871 - DNA, 120 bp, synthetic construct
  source 1..120: mol_type = other DNA
aacagtggaaggggggagggaaggcaggcatctgaaaaaaggagcccaagcccatctcttcctctcagaggcgtgaactcgcccttggggcagggccccagagcagcctcctttcttcac

SEQ ID NO: 25872 - DNA, 120 bp, synthetic construct
  source 1..120: mol_type = other DNA
gacatgagtgcagcttggcccctgcccctccctcggggagctgagcctctgagccccttacctcccgcactgctgcaggaggccttctgtggtctcccattatggaacaaggaggagggg

SEQ ID NO: 25873 - DNA, 120 bp, synthetic construct
  source 1..120: mol_type = other DNA
aggcccaggtaggggggctctgtgctcctctgcactgactttggccagagcagttaatccttttttttttttttcaaggctttgcagattatttattatagaattttttttaaattatac

SEQ ID NO: 25874 - DNA, 120 bp, synthetic construct; identical to SEQ ID NO: 7916
  source 1..120: mol_type = other DNA

SEQ ID NO: 25875 - DNA, 120 bp, synthetic construct
  source 1..120: mol_type = other DNA
tgagaaggggtttcaccatgttggtcaggctggttttgaactcccaacctcaagtgatccgcccgcctcggcttcccaaattgccgggattacaggcatgagccaccgcgtccagcagga

SEQ ID NO: 25876 - DNA, 120 bp, synthetic construct
  source 1..120: mol_type = other DNA
ctggcccttgccccccgctgcccctgccacacagatctgtgctgttcctatcacatgccctttttatggttgctggagcagaaggtgaaggtgaggcgggtggtactgggggtaagcaga

SEQ ID NO: 25877 - DNA, 120 bp, synthetic construct; identical to SEQ ID NO: 7917
  source 1..120: mol_type = other DNA

SEQ ID NO: 25878 - DNA, 120 bp, synthetic construct
  source 1..120: mol_type = other DNA
aaagggatgaggcagacacagacactgccctcaggggattctggggacccaagcttggcagaggagggggctggggagcaggaggtggacagccctcagttgggccagggggagaaggct

SEQ ID NO: 25879 - DNA, 120 bp, synthetic construct
  source 1..120: mol_type = other DNA
tctctcagagcctgttccctgccctcagcgaggatttggcttgtaaggccctcagctctagcagaggccctggctcaagtatggaaaacatactccatacatgtttgttgaatgaatgaa

SEQ ID NO: 25880 - DNA, 120 bp, synthetic construct
  source 1..120: mol_type = other DNA
gttggtgtatacttaggaatcaatttctctgtcctgcaaatgatctgagagccagagacatctggaaatcagggtttgtgtgagggacatctttgtagggctaattcctagagaggaact

SEQ ID NO: 25881 - DNA, 120 bp, synthetic construct
  source 1..120: mol_type = other DNA
ggaagatgggctgccgcagcccagctgcactgacggaggcggagtgtggggctgggatagggcgtatgcttggcacaggcctggcaggatgggaggaagcgggcaagggtgggaagggag

SEQ ID NO: 25882 - DNA, 120 bp, synthetic construct; identical to SEQ ID NO: 7918
  source 1..120: mol_type = other DNA

SEQ ID NO: 25883 - DNA, 120 bp, synthetic construct
  source 1..120: mol_type = other DNA
gacatcaaactaaccgttttcttgttttgtttgatagaattctaagtgcatgacaatagctttaagagatggggcttgaattgtatttaaatttcaactcagtagacacatgaccctctg

SEQ ID NO: 25884 - DNA, 120 bp, synthetic construct
  source 1..120: mol_type = other DNA
atgtgtttggtgtggtgaagacctatttttcaaaataaaatattctcatatggaaatctgtgcattcgaagacatctgttttcacaatgtggggctccttgtgcttgagagtgggcacca

SEQ ID NO: 25885 - DNA, 120 bp, synthetic construct; identical to SEQ ID NO: 7919
  source 1..120: mol_type = other DNA

SEQ ID NO: 25886 - DNA, 120 bp, synthetic construct
  source 1..120: mol_type = other DNA
ctgaggtttctggagcgaggaggcccctgtaacccctcccattcctctctggggctcctgcccgggccctctctcaccttcaaccccttggctctgttgatggctctgagtggtcggagc

SEQ ID NO: 25887 - DNA, 120 bp, synthetic construct
  source 1..120: mol_type = other DNA
atatcctgccctccacaccagctgcctttctgcctgaaaacactcccaccttccccttccctttcctccagccgtgagagtgtgcccgactccagggcacagccacccctgctatctgga

SEQ ID NO: 25888 - DNA, 120 bp, synthetic construct
  source 1..120: mol_type = other DNA
gtcggggagggagggaccacttcctcctctctgcatctcctgccagtctctagaacagagcgctgcccacttcactggtggcaacccacattccagctggtgacaacccacaggaccccc

SEQ ID NO: 25889 - DNA, 120 bp, synthetic construct
  source 1..120: mol_type = other DNA
cttgccgctgctcactcaagtcccatggagatgagggacacggccaccaccagcaggtccagcatgttgaagtaattgcggcagaaggaacccttgtgcaggaaggctccgtaggtcgtc

SEQ ID NO: 25890 - DNA, 120 bp, synthetic construct; identical to SEQ ID NO: 7920
  source 1..120: mol_type = other DNA

SEQ ID NO: 25891 - DNA, 120 bp, synthetic construct
  source 1..120: mol_type = other DNA
ataaaacttctccttcctggaaagcttcttgggcaatcccctctgccttgtggtttgctaagtcaggctgaacaagccctccaggactctaggggtcctaggccctctctcctccctctc

SEQ ID NO: 25892 - DNA, 120 bp, synthetic construct
  source 1..120: mol_type = other DNA
acaaatgcattttgcccttaaaatcgaacagggttgaaacctttcccagcattcagggacctatatgattttgtcttaatttgccttcccagactcggcacccaggcctcctgtatgtgc

SEQ ID NO: 25893 - DNA, 120 bp, synthetic construct; identical to SEQ ID NO: 7921
  source 1..120: mol_type = other DNA

SEQ ID NO: 25894 - DNA, 120 bp, synthetic construct
  source 1..120: mol_type = other DNA
ttctgcccccagagcccaccacccccaggatggctggaaccccgtgcatctgtgttgggaatgggtgagcagtgacgtgctgtggataaggtgtggaaaaggcgtgatagggcagagctg

SEQ ID NO: 25895 - DNA, 120 bp, synthetic construct
  source 1..120: mol_type = other DNA
ttttttttttttttttttttttttttttttgagatggagtctctctcgtcacccaggctggagtgcagtggcatgatctcagctcactgcaacctctgcctcccaggttcaagcaattct

SEQ ID NO: 25896 - DNA, 120 bp, synthetic construct
  source 1..120: mol_type = other DNA
acctcaggtgatccgcccgcctcggcctcccaaagtgctgggattacaggcgtgagccactgcgcccggccaccaggtctgctcttaagctaactgtatggaagaaaaatgcgagagttc

SEQ ID NO: 25897 - DNA, 120 bp, synthetic construct
  source 1..120: mol_type = other DNA
aatacaaaaaattagctgggtgtggtggcagacgcctgtaatcccagctacttgagaggctgaggcaggagaatcgcttgaacctgggaggtggaggttgcagtgagctgagatagtgcc

SEQ ID NO: 25898 - DNA, 120 bp, synthetic construct; identical to SEQ ID NO: 7922
  source 1..120: mol_type = other DNA

SEQ ID NO: 25899 - DNA, 120 bp, synthetic construct
  source 1..120: mol_type = other DNA
aggatctggggacagggcaggggcgggagcagccagtgagaggaggagggggcaacagtatcagcagcagcagcagcataaagcaggcagtcagagccattctgtgccccagcctgtgcc

SEQ ID NO: 25900 - DNA, 120 bp, synthetic construct
  source 1..120: mol_type = other DNA
ggcaggggtgctgagtggcagagagggtgaagcccgtcacctgatttctcatggaatcagcccggatggggtcttccgcagccagtgcagcgctgctgagcaggatgaagagcaggatga

SEQ ID NO: 25901 - DNA, 120 bp, synthetic construct
  source 1..120: mol_type = other DNA
gctgtgagctgctggaggctcaggcctcatcagcctccatcctgcggacgaacatggaatacacctcctgctcctccctggccaggagagaagtgcagccctgcacctgcagggtcctct

SEQ ID NO: 25902 - DNA, 120 bp, synthetic construct; identical to SEQ ID NO: 7923
  source 1..120: mol_type = other DNA

SEQ ID NO: 25903 - DNA, 120 bp, synthetic construct
  source 1..120: mol_type = other DNA
atatactagcattttaaacagggcacaagatcttaagctaaaacactgagtttctcatagtataactgtaggcatggagagtcagacagggttttttctagggcagggaagcagatgaga

SEQ ID NO: 25904 - DNA, 120 bp, synthetic construct
  source 1..120: mol_type = other DNA
gggacgtggtcgggggctcagcgggatctcaggctcatcttcctcgtcatcccctgtggggagagagagaggaattaggggtgtcttcccatgctttgctatgcccatggcttctgtgct

SEQ ID NO: 25905 - DNA, 120 bp, synthetic construct
  source 1..120: mol_type = other DNA
gagcgtcaagggtaggtaagggaagcccacaaccttccagaagtggggcaaggagcaagcccaagtaactttgtggctgcatgttgtgtctcaaggctcgatccacacagcctcaaatat

SEQ ID NO: 25906 - DNA, 120 bp, synthetic construct; identical to SEQ ID NO: 7924
  source 1..120: mol_type = other DNA

SEQ ID NO: 25907 - DNA, 120 bp, synthetic construct
  source 1..120: mol_type = other DNA
cattccaagcacattcactgagtctcatgacctcaagaggaagctgagtacccgaaatcctcagctcccagggtgggagaatcccgtgatcagacggtgggggcactattcaaagctggg

SEQ ID NO: 25908 - DNA, 120 bp, synthetic construct
  source 1..120: mol_type = other DNA
gagctactggattctactgtctccatcatggccacctgtaggggttctcaaatccaccaagtcacattccaatttttctgttcccccgagaagctagaactcttattccttggaatgagt

SEQ ID NO: 25909 - DNA, 120 bp, synthetic construct
  source 1..120: mol_type = other DNA
taattcttcgagttagcatatttgcatctttcccccgccttcttacttcctccacctatgcccagtttgttaatttcattgcacatatcttttgctgtaagccatttcaaactattttta

SEQ ID NO: 25910 - DNA, 120 bp, synthetic construct; identical to SEQ ID NO: 7925
  source 1..120: mol_type = other DNA

SEQ ID NO: 25911 - DNA, 120 bp, synthetic construct
  source 1..120: mol_type = other DNA
atgcattcattcattcaatttattgagtgcctcctctgagccaaacactgtgctgtgtggaacacaaaagtccccctggagcttagagtcactggggcaaacagatgctaatcagctgat

SEQ ID NO: 25912 - DNA, 120 bp, synthetic construct
  source 1..120: mol_type = other DNA
gtcaggtggcctggtaagattaattcagcctggttctgcttgtcctcttcttggtccagataaatgggatttctgcagcagtcactggctatttgcatttatgagatgtttgtggtttat

SEQ ID NO: 25913 - DNA, 120 bp, synthetic construct
  source 1..120: mol_type = other DNA
agacactggatagtgagtaatctgcctcatcacgacatatatgggcgtgtcctcatttatgatccattctgcatgactggcagggaagacttgtatacccacgtgtccctgtgcttcttg

SEQ ID NO: 25914 - DNA, 120 bp, synthetic construct; identical to SEQ ID NO: 7926
  source 1..120: mol_type = other DNA

SEQ ID NO: 25915 - DNA, 120 bp, synthetic construct
  source 1..120: mol_type = other DNA
cacctgggaagtcggctgaggggtagggatccttcacctcattgacattagattcaaactcatcgattttcagctgtaggaaggaacacaatgactataacaatgaaaaagaagttgcgg

SEQ ID NO: 25916 - DNA, 120 bp, synthetic construct
  source 1..120: mol_type = other DNA
ccagcaaggccagacaacttgcaaaagctcccacggggcaaggcctgagcccgccctagcctgtctgactctatcttcacatacccactgcttggttctccagaagggagttgagcttcc

SEQ ID NO: 25917 - DNA, 120 bp, synthetic construct
  source 1..120: mol_type = other DNA
gcagagtcagatgggaatgagcagggcagggctagcaatggtggaagccggtctgggcctctcagtggaacagcgggtgtcagggagaggaaatacctccttggtctggagtgggaagct

SEQ ID NO: 25918 - DNA, 120 bp, synthetic construct; identical to SEQ ID NO: 7927
  source 1..120: mol_type = other DNA

SEQ ID NO: 25919 - DNA, 120 bp, synthetic construct
  source 1..120: mol_type = other DNA
aaccagaaagttctcagggatctgctgaacctgacaacaccttcaggaggatcccacaccaagggctccaggggatctgtaggaggagtggcatcagcccccaaatgggaagggcagtgg

SEQ ID NO: 25920 - DNA, 120 bp, synthetic construct
  source 1..120: mol_type = other DNA
gctttgtactgggtttatacgagattcatagagtggaagcatggtttgcccaagatggctccaactctttagaaatgtctgaactccattgctggtccctctttttccatcttgcctcca

SEQ ID NO: 25921 - DNA, 120 bp, synthetic construct
  source 1..120: mol_type = other DNA
ttcgatgtagaactccaaccccgcccagaggcatagcgactcagtgacagggttgggaggggaattcccaggatccctccgcaggggagccctgcccaactggccaggctctgaggctct

SEQ ID NO: 25922 - DNA, 120 bp, synthetic construct; identical to SEQ ID NO: 7928
  source 1..120: mol_type = other DNA

SEQ ID NO: 25923 - DNA, 120 bp, synthetic construct
  source 1..120: mol_type = other DNA
tagctaaggagcctttggttgtaggtggaagggagcctgcagggcaggagttctgtctgcctgcatgtgggcaggacctaaccccactctcccagagctacccatgggaaggtgtggatc

SEQ ID NO: 25924 - DNA, 120 bp, synthetic construct
  source 1..120: mol_type = other DNA
ctgagctgcgtggagagccagtgaggcaaaacaagtgagacccatgcgaggcacacatgagttggggaacaacggtgcccttcctccccactccccatagtatcacattccaaggtgcag

SEQ ID NO: 25925 - DNA, 120 bp, synthetic construct; identical to SEQ ID NO: 7929
  source 1..120: mol_type = other DNA

SEQ ID NO: 25926 - DNA, 120 bp, synthetic construct
  source 1..120: mol_type = other DNA
ccccctaccgcatgggcctgggagctcccctccagccagagggcctggctacctagaaactggacacccttgacccccattttaagccctttcccccaccccctccctaagctcttttct

SEQ ID NO: 25927 - DNA, 120 bp, synthetic construct
  source 1..120: mol_type = other DNA
ggtccagtcttcccctgtcagtacctgtatggagggaggatagagggctcgggaacacagaggggcctgagagtcttctattgggaccgcattgaccgaagttctcctccaactctgtgg

SEQ ID NO: 25928 - DNA, 120 bp, synthetic construct
  source 1..120: mol_type = other DNA
ccgagatgggtggatcattcgaggtcaggaattcgagaccagcttggccaacatggtgagaccccatcactactaaaaatgcaaaaattagccaggcatggtggtgggcacctgtaatcc

SEQ ID NO: 25929 - DNA, 120 bp, synthetic construct; identical to SEQ ID NO: 7930
  source 1..120: mol_type = other DNA

SEQ ID NO: 25930 - DNA, 120 bp, synthetic construct
  source 1..120: mol_type = other DNA
gacgatcacacactgcctttctcactggtacaaaagggaggtgtcactcatgaaatatgggccactccagagaggaatgtttccacgtctacactaagaaaactcctccaggaggccagg

SEQ ID NO: 25931 - DNA, 120 bp, synthetic construct
  source 1..120: mol_type = other DNA
tcgggagaaaaagctccccttatctgactttgccctgagacctgagtggcacatgaaagcacgcatccggactcccaggccatccctaacccagtcatattatcctgcagtaggccagca

SEQ ID NO: 25932 - DNA, 120 bp, synthetic construct
  source 1..120: mol_type = other DNA
gacattgcactcaaccagcagatcagacaaggcttcctggagaaggtgatgcccaccttgatcttgaaggacaagaagcaggattcagcaaccgttcagaaggagggacacgcagaggga

SEQ ID NO: 25933 - DNA, 120 bp, synthetic construct
  source 1..120: mol_type = other DNA
atgacgatgaagaggaagagcagcagcagcagggaggcgatggagcggatggagttgagcagggatgccaccaggttgctcagcgacgtccaatatctgaaggaagaggaggcacaaggt

SEQ ID NO: 25934 - DNA, 120 bp, synthetic construct; identical to SEQ ID NO: 7931
  source 1..120: mol_type = other DNA

SEQ ID NO: 25935 - DNA, 120 bp, synthetic construct
  source 1..120: mol_type = other DNA
ttagcacagtacccagctcatgcaagtgacggataaatagtgcaagcagatgaacctctctccacttccctcaccacctcacaaaggccctgatagtctgtgttcctccttctttcttat

SEQ ID NO: 25936 - DNA, 120 bp, synthetic construct
  source 1..120: mol_type = other DNA
aaaaaaaacagagaaatgagttcaaagtggggaagtgattcttttttcacagaaggaggttatttcaaggagggagggaagtctgggcaagggaccagtggtgaacctgcacagatccca

SEQ ID NO: 25937 - DNA, 120 bp, synthetic construct; identical to SEQ ID NO: 7932
  source 1..120: mol_type = other DNA

SEQ ID NO: 25938 - DNA, 120 bp, synthetic construct
  source 1..120: mol_type = other DNA
gttggtggcacagccccggcatcactctccttcccttctcctgactcccagccttggctgtggctgggcctcaacccaggacgccccttcccttgtttccaaggcaccatggatgttttt

SEQ ID NO: 25939 - DNA, 120 bp, synthetic construct
  source 1..120: mol_type = other DNA
ccacatccagctagttttttgtatttttaatagagacagggtttcgtcatgttgcccaggctggtcttgaactcctgggctcaagcaatccactggcctcagcctcccaaaatgctggga

SEQ ID NO: 25940 - DNA, 120 bp, synthetic construct
  source 1..120: mol_type = other DNA
tgcccattgatttcttgcaagctaactcatatcatatttaacaggaagaggattttattactcttaattctactgaagttcattaagtctgctactctctcattcctatacacctccctc

SEQ ID NO: 25941 - DNA, 120 bp, synthetic construct; identical to SEQ ID NO: 7933
  source 1..120: mol_type = other DNA

SEQ ID NO: 25942 - DNA, 120 bp, synthetic construct
  source 1..120: mol_type = other DNA
ctctactaaaaatacaaaaagtagctgggtgtggtggcatgagcctgtagtcccagctactcgggaggctgaggcaagagaatcgcttgaacctgggaggcggaggttgcagtgagccga

SEQ ID NO: 25943 - DNA, 120 bp, synthetic construct
  source 1..120: mol_type = other DNA
tgtcaccgtcaaactcccgaaagttgtctatattgctctcttcacttcttcaccccctgccctgccacatttgctcttcacctcatccctacctggatgcaccctcactacttcaccaac

SEQ ID NO: 25944 - DNA, 120 bp, synthetic construct
  source 1..120: mol_type = other DNA
cttggtttctgtggtgccacatccttctgggtttcctctacttctctgtattttcctaagcctcctctgcagatgcattctttacatcagcaagtatagggtcttccagttctccccacc

SEQ ID NO: 25945 - DNA, 120 bp, synthetic construct
  source 1..120: mol_type = other DNA
ttcctaggcactaataaaggtaataggtgttgccccaaacattgaaaggaactggccacagccctgagccagattccttaaacccttatctaaagtccatgccctgaccccattgctgcg

SEQ ID NO: 25946 - DNA, 120 bp, synthetic construct; identical to SEQ ID NO: 7934
  source 1..120: mol_type = other DNA

SEQ ID NO: 25947 - DNA, 120 bp, synthetic construct
  source 1..120: mol_type = other DNA
tcagctgagactgctctgctgagttccagacctatttttctgtctgctaccttgacatatccattgggatgtctcaaaggcacatcaaactcaccatgcccaagacaaagctcagggata

SEQ ID NO: 25948 - DNA, 120 bp, synthetic construct
  source 1..120: mol_type = other DNA
gtgggcactgttcacatcatctccacatttggtcattgacagtgttttgacaacgattggcacattcacggtgctctcgagaagattggttgagatgaatgaatgaatgaattcatctga

SEQ ID NO: 25949 - DNA, 120 bp, synthetic construct; identical to SEQ ID NO: 7935
  source 1..120: mol_type = other DNA

SEQ ID NO: 25950 - DNA, 120 bp, synthetic construct
  source 1..120: mol_type = other DNA
accccagggattttacttgtttgcaacttgatttttatgttactatcttagtttagaatccttggaccatgagaggtagtgtatattggaccccatacctatataaggcactgataggat

SEQ ID NO: 25951 - DNA, 120 bp, synthetic construct
  source 1..120: mol_type = other DNA
agtgagattttggcttcccttccatgggggcagactttccagggccctggctctatgtaggtatgacagtgccagttcccacctcatgcaggtccagggccctgtctccagccctgcaca

SEQ ID NO: 25952 - DNA, 120 bp, synthetic construct
  source 1..120: mol_type = other DNA
agacttccttttcattccaggaaacatcattcttatgccttatgcagcagtgttacttgtttgtagtggggagggcactgagtttgtccaccgtgttgttggaactggtcagtcttttct

SEQ ID NO: 25953 - DNA, 120 bp, synthetic construct; identical to SEQ ID NO: 7936
  source 1..120: mol_type = other DNA

SEQ ID NO: 25954 - DNA, 120 bp, synthetic construct
  source 1..120: mol_type = other DNA
tcaccacaaaacctgtcatttaaaagtgtgtggcacctcccctcccactctttctctctcttgctcctgctttcgccatgtgacatgcctgccctccctttgccttccatcacgattgta

SEQ ID NO: 25955 - DNA, 120 bp, synthetic construct
  source 1..120: mol_type = other DNA
ttttttttttttttttgagacagagtctcgctctgtcaccaggctggagtgcagtggtgcaatctcggctcactgcaatctccaccttccaggttcaagcgattctcctgcctcagcctc

SEQ ID NO: 25956 - DNA, 120 bp, synthetic construct
  source 1..120: mol_type = other DNA
ccacctcagcctcccaaactgctgggattacaggcgtgagccaccgcgcccggcctcaggtattttttttatagcaacacaagaatggcctaacacaaggcccccatgagcaaacacatg

SEQ ID NO: 25957 - DNA, 120 bp, synthetic construct; identical to SEQ ID NO: 7937
  source 1..120: mol_type = other DNA

SEQ ID NO: 25958 - DNA, 120 bp, synthetic construct
  source 1..120: mol_type = other DNA
tcaataaatagttggtgaaagactgttgtttttgtagaatttgaacttgggtgcttagagttccaaattactagcaattttatgtccagtgatctgtgattggaataatctgcccggaca

SEQ ID NO: 25959 - DNA, 120 bp, synthetic construct
  source 1..120: mol_type = other DNA
aggagctgattaggtcatataatccagcactcatggtccataatttttagaaaaatgatgtcaatatctaattgacctcttctgcacaacctgtggtgccattggctgattttgacatca

SEQ ID NO: 25960 - DNA, 120 bp, synthetic construct
  source 1..120: mol_type = other DNA
gatgagaatcaccagccaatagaagaccttggacttcacgatgtcatggcacttccagcgaaagatgcggttccactgcctccaatgtcggctgagggaggggacagaggatggtctaca

SEQ ID NO: 25961 - DNA, 120 bp, synthetic construct; identical to SEQ ID NO: 7938
  source 1..120: mol_type = other DNA

SEQ ID NO: 25962 - DNA, 120 bp, synthetic construct
  source 1..120: mol_type = other DNA
aattaataatatctggggagggtgaggggaaatgagctttgacagtacaatctttttgggatgaattggcagcacttaccaaaatttaaagtctatatgctctgtttattaatgttttat

SEQ ID NO: 25963 - DNA, 120 bp, synthetic construct
  source 1..120: mol_type = other DNA
gcaagtctatttctagagttcctttggcagaagtggtcatactcatccacaactgttccctgcagcactgtttgtatcgccaaagaggggaaaaattaactacattatggcatattcatc

SEQ ID NO: 25964 - DNA, 120 bp, synthetic construct
  source 1..120: mol_type = other DNA
tcctttagtgtgtattatattcatttatttgacaaatatttggcaacacctcatatgtgctaggcactcttctagtccctgtggtgacagtagttaacataaacaaccccattatgtaaa

SEQ ID NO: 25965 - DNA, 120 bp, synthetic construct; identical to SEQ ID NO: 7939
  source 1..120: mol_type = other DNA

SEQ ID NO: 25966 - DNA, 120 bp, synthetic construct
  source 1..120: mol_type = other DNA
cttcctgaggggctcccggtttgtgcagcctctgctgtgtacactttccctcttccctcgcagaggtttccaacatgaatgacctcacccagctctgccctgatcagggtgaagtagcag

SEQ ID NO: 25967 - DNA, 120 bp, synthetic construct
  source 1..120: mol_type = other DNA
ctcagagcaggaactggccctattttcttaaaaaggctgcctttctaaaggattagacaagtgactctgaaaccactgaggggaagtaactggactctaccctcatgtctcagggagctg

SEQ ID NO: 25968 - DNA, 120 bp, synthetic construct
  source 1..120: mol_type = other DNA
ctggagacaggagagaaagagtcagccagccttcggggcccctctgggctggacacacctggactgggcacccgagacaagggcccattgaccagagacatctgcaacaatgggtcctag

SEQ ID NO: 25969 - DNA, 120 bp, synthetic construct; identical to SEQ ID NO: 7940
  source 1..120: mol_type = other DNA

SEQ ID NO: 25970 - DNA, 120 bp, synthetic construct
  source 1..120: mol_type = other DNA
ttggccttctcccgctccttggtgaattccctgaaatgagatgggggagccaggagaggaggagaagagggaacagtgtcaaggaaagactgagcttcctgaggacagacaagcccattc

SEQ ID NO: 25971 - DNA, 120 bp, synthetic construct
  source 1..120: mol_type = other DNA
atcctggagtactccttgccccttcctcatttctttcttctcatccatctcattgtctcctgccttgttttggggttccccttgcacattaggggttaatgacaaggcagtccattgcct

SEQ ID NO: 25972 - DNA, 120 bp, synthetic construct
  source 1..120: mol_type = other DNA
ccagttggcatggctggaagaaaaggacccaaggctccatgagggatcttcaggccagcagagggcagccctgggctatgaccacctgccccgcagggcaggaggaagaagacagcacag

SEQ ID NO: 25973 - DNA, 120 bp, synthetic construct; identical to SEQ ID NO: 7941
  source 1..120: mol_type = other DNA

SEQ ID NO: 25974 - DNA, 120 bp, synthetic construct
  source 1..120: mol_type = other DNA
tagcctacaaacctggacagcgtgttaccatactgcataccgtaggcgattgtatctgtggatctaaacatagctaaacatagagaaggtacagtaaagatacaatcttagcgcaccact

SEQ ID NO: 25975 - DNA, 120 bp, synthetic construct
  source 1..120: mol_type = other DNA
tcattagcaagatctagctgcaggttttatatctatcataatttcaaagtatggagtagttagtgtaaatactattcgcaacaactgtaatgtgacatgatttctattaggacaagtcat

SEQ ID NO: 25976 - DNA, 120 bp, synthetic construct
  source 1..120: mol_type = other DNA
aataaagataaatgtttcctatgcaagtttacagactcccagaattctatctatagactgcctggaaggaagcttctggaatgggatgataccaatggggaagaaggctgatggtgactt

SEQ ID NO: 25977 - DNA, 120 bp, synthetic construct; identical to SEQ ID NO: 7942
  source 1..120: mol_type = other DNA

SEQ ID NO: 25978 - DNA, 120 bp, synthetic construct
  source 1..120: mol_type = other DNA
taaagctcacacagccaccaagcagtagtgcagggatttaaatgtgggcattctagctccagagtctgtgtgcttaaccgaaagccccaccgcctcttagtgctaaggctccacttaggc

SEQ ID NO: 25979 - DNA, 120 bp, synthetic construct
  source 1..120: mol_type = other DNA
gaagggctcctgtgtgcctctcctctcttcctgctcaccaggaaggaagcgctcttggcccaactgagatgacagggaacccagggatgagccgagggcctgactcacagccccctgccc

SEQ ID NO: 25980 - DNA, 120 bp, synthetic construct
  source 1..120: mol_type = other DNA
tcttttctcccctggctacctttgaatttcttacccactcaggacacccagcaccaggttgaggatgaagaaggatcccagcaaaatgagggtgacaaaatagatccagggccactcatt

SEQ ID NO: 25981 - DNA, 120 bp, synthetic construct
  source 1..120: mol_type = other DNA
tcattaagactccacccaaccctgggggacaaggagagaagccacgctgggatattgaggggacatttttcctaacctgaggactagtctggaagaacttttccagcctgaggactagga

SEQ ID NO: 25982 - DNA, 120 bp, synthetic construct; identical to SEQ ID NO: 7943
  source 1..120: mol_type = other DNA

SEQ ID NO: 25983 - DNA, 120 bp, synthetic construct
  source 1..120: mol_type = other DNA
taatttgctctcctaatacacacttacaataaatatttgtactaatccttggtatttgcaaagcatttgacagttttacaatccccccacccccacaataggcggcgtcatattgtggtt

SEQ ID NO: 25984 - DNA, 120 bp, synthetic construct
  source 1..120: mol_type = other DNA
gggagcaatgccttccatcattgaaggatgaaataagaaatctagctcttaacaaacaccaaataaataatatactccaacaaagaaactcttactggagtgttgactgtgtgccgggca

SEQ ID NO: 25985 - DNA, 120 bp, synthetic construct; identical to SEQ ID NO: 7944
  source 1..120: mol_type = other DNA

SEQ ID NO: 25986 - DNA, 120 bp, synthetic construct
  source 1..120: mol_type = other DNA
acatattgtatcatggggatttccccataggatgctggggcacatacctgggaaccagaaagggacacacatcctgtatagattccccagggaggagcaagagggagctgtggtcacgca

SEQ ID NO: 25987 - DNA, 120 bp, synthetic construct
  source 1..120: mol_type = other DNA
cagtccatccctccatggtaatgcactggtacacggtgagcatggagaagccgaagttgtcgaagtgggtgatgccatggttgggccctggccagccgccccggcactcactgccattga

SEQ ID NO: 25988 - DNA, 120 bp, synthetic construct
  source 1..120: mol_type = other DNA
aacgacaggaggaaaggtgtataagagcaatttaagagaattgagcagtaagtctaaagacactctgctgaaaatgcaaaagacagcttcacatggagcagacggtgacagtgaagagga

SEQ ID NO: 25989 - DNA, 120 bp, synthetic construct
  source 1..120: mol_type = other DNA
aatctgagtgtcatttgtccccacagaactttaaaaaagaaggcagctgcctggctggagcagggctggaggtggagggctcacatgttctgacttgagagttctgtctgggaggtgaaa

SEQ ID NO: 25990 - DNA, 120 bp, synthetic construct
  source 1..120: mol_type = other DNA
gatgatgctttcttgtctctaaaatcctgtacttctgatgacatcctgcatctccttttatcttaggatgttttacagtctccttttgtgttcagagattagattggctcatcagaactg

SEQ ID NO: 25991 - DNA, 120 bp, synthetic construct; identical to SEQ ID NO: 7945
  source 1..120: mol_type = other DNA

SEQ ID NO: 25992 - DNA, 120 bp, synthetic construct
  source 1..120: mol_type = other DNA
caagatctcatgagaacaccagtgagacctccaaatttgggttgaaggtgtgatcaaaggtcacctcctatccatcctgataatgcttatgataggatgtagattgtggtggtgatggga

SEQ ID NO: 25993 - DNA, 120 bp, synthetic construct
  source 1..120: mol_type = other DNA
ggtgagtagagtcttctgagacactgaaggcctagaacagttattctggtgagttcaatgccagggcttatggaggaggctaagtcccagtgagctgctggcagggtagagcagccagtc

SEQ ID NO: 25994 - DNA, 120 bp, synthetic construct
  source 1..120: mol_type = other DNA
tccagaggctacatgagttgtgatttggcagcacacacacacagaagttgatgtgagagtccagcagcctctatcaagccaggcagtgaagagatttacaaaaagtgtaaaatagcgtca

SEQ ID NO: 25995 - DNA, 120 bp, synthetic construct; identical to SEQ ID NO: 7946
  source 1..120: mol_type = other DNA

SEQ ID NO: 25996 - DNA, 120 bp, synthetic construct
  source 1..120: mol_type = other DNA
cccattcagaccctattctgggtgcctgctctgagggtcagctcagactaaagctaaaactatgcgacaggaaatgtacacatagaaattcaagcttatcccatgcctatgtctccatct

SEQ ID NO: 25997 - DNA, 120 bp, synthetic construct
  source 1..120: mol_type = other DNA
gagctgcccttcctccaagtcccccttatccaggagaaacccattctcaaggtcaacagatgtgggcggcaatggctgagctccgggctccttcaccaggtagggtggctcccccttctg

SEQ ID NO: 25998 - DNA, 120 bp, synthetic construct
  source 1..120: mol_type = other DNA
tgaccataaagaggaccagcagggcgatgtgaaagagggggagcatggccttgaagatggagttcaggaccacctgcaggcctgcagaggcaggcagggaagggaaaagaggagtcgcct

SEQ ID NO: 25999 - DNA, 120 bp, synthetic construct
  source 1..120: mol_type = other DNA
gcagggacactgccacccactaggcacccccgacaccagccggaggggtctgagcactcggaaggctctgagggccttgacatccaagccggctcctttgctgctcattggggctgtgtg

SEQ ID NO: 26000 - DNA, 120 bp, synthetic construct; identical to SEQ ID NO: 7947
  source 1..120: mol_type = other DNA

SEQ ID NO: 26001 - DNA, 120 bp, synthetic construct
  source 1..120: mol_type = other DNA
atgcttatctggggaatttcacttaaaaggattctgacatcaagttcatactcagtgaaaagagtatggtgctccacttgtgaggtctactttgggtgctgaacgggggtgaggtatgtg

SEQ ID NO: 26002 - DNA, 120 bp, synthetic construct
  source 1..120: mol_type = other DNA
tttcctcctggctgcactttttgataatgccctttattttctttcctactggcctcctcttcctctcttaatttactcaaatttccattatcctttgaagtctacctcaaattcctttgc

SEQ ID NO: 26003 - DNA, 120 bp, synthetic construct; identical to SEQ ID NO: 7948
  source 1..120: mol_type = other DNA

SEQ ID NO: 26004 - DNA, 120 bp, synthetic construct
  source 1..120: mol_type = other DNA
cttatttataaaatgagggaaaacaggattgtggcaagaattaagtgagagggtacatgtaagcacatattaagtgcttgataaatgctattgttatcattacgtggtagttactcatgg

SEQ ID NO: 26005 - DNA, 120 bp, synthetic construct
  source 1..120: mol_type = other DNA
gaagttgttagggtgggccctcatccaatttgactggtgtccttataagaagaggaactctggacacacaaagagacaccaaggatgcacaggcacagaggagagactgtgtgaacccaa

SEQ ID NO: 26006 - DNA, 120 bp, synthetic construct
  source 1..120: mol_type = other DNA
ttaataaatgtccgtttttgtgaacccaaataacaggtactcaatacaggtctgtggaataaactaataaatgacagaggctgagaaacttatgaacatccagaaactgctggccagtgg

SEQ ID NO: 26007 - DNA, 120 bp, synthetic construct
  source 1..120: mol_type = other DNA
caacatggacagctcccttgctgggccggcctctaacagaggctgctccatgcagtggttagcacaatgctggagtcccaccccacctctaagatgctggtggtggtggcagtgggcaca

SEQ ID NO: 26008 - DNA, 120 bp, synthetic construct; identical to SEQ ID NO: 7949
  source 1..120: mol_type = other DNA

SEQ ID NO: 26009 - DNA, 120 bp, synthetic construct
  source 1..120: mol_type = other DNA
acactgccactccctcactttccacaggtctttactccaaattccttcactgaggccttttctggccactaagtgtaatgcgagccatctccagcatttcatgttcctctcctctgctta

SEQ ID NO: 26010 - DNA, 120 bp, synthetic construct
  source 1..120: mol_type = other DNA
gatttttgtccatttttttttcattactcgacttccagatattagaatgggttgaataaatgaaggatctgaggtacccaaaatgaaagtccccaggtggtttctggctttggcaccttt

SEQ ID NO: 26011 - DNA, 120 bp, synthetic construct
  source 1..120: mol_type = other DNA
ccgtcccacctgccctcacattggcttcctttaggcagccccttaaaggccgtgacactattacgcagggtgagtggagtgtggggtacactgtgtgtggggaacacaggtaagaagctg

SEQ ID NO: 26012 - DNA, 120 bp, synthetic construct; identical to SEQ ID NO: 7950
  source 1..120: mol_type = other DNA

SEQ ID NO: 26013 - DNA, 120 bp, synthetic construct
  source 1..120: mol_type = other DNA
atatacatatatatatatacacacatacatatgtacgtgtgtatatatatacacacacatacagatctatcctgattggtgctctctggagttacacaagggggtctgtacccccacaac

SEQ ID NO: 26014 - DNA, 120 bp, synthetic construct
  source 1..120: mol_type = other DNA
ggagccagactggggaactgggcactccattaatgatatggaagataatttatttttacttccaagtgagtaggtatgggaggcaagggaagaggtccccaaatggctcactattgtgga

SEQ ID NO: 26015 - DNA, 120 bp, synthetic construct; identical to SEQ ID NO: 7951
  source 1..120: mol_type = other DNA

SEQ ID NO: 26016 - DNA, 120 bp, synthetic construct
  source 1..120: mol_type = other DNA
cctggaattgggtgagtggtctcccctcctctgtaggacaggtttcctgggagtcaggcacaccattaaggaaaaagtgtaagggaggagagtgaagtcaaggcagcatttacaatttca

SEQ ID NO: 26017 - DNA, 120 bp, synthetic construct
  source 1..120: mol_type = other DNA
aagggaggagagtgaagtcaaggcagcatttacaatttcaggttgctgcaaccccagagggatagacagaagtggggttgaggcaaggaaaaacaggacctgaaatagtttcagtgctca

SEQ ID NO: 26018 - DNA, 120 bp, synthetic construct
  source 1..120: mol_type = other DNA
gtttcctcagcctgttagctccaaggcctgcctctttccaccatactccctccagcccaaccctggagtgcctggaattaaaactcagtaccatacaatccctgtgtgtgcacacagtgt

SEQ ID NO: 26019 - DNA, 120 bp, synthetic construct
  source 1..120: mol_type = other DNA
ggaaaaatgagggatagtcattccacagatatttattaagctctggactggatgccctgggtaagacctggctgtctccccaagatcaaagtcaccaaccttcctaaaacatcctaattt

SEQ ID NO: 26020 - DNA, 120 bp, synthetic construct; identical to SEQ ID NO: 7952
  source 1..120: mol_type = other DNA

SEQ ID NO: 26021 - DNA, 120 bp, synthetic construct
  source 1..120: mol_type = other DNA
ctgcctacactgtgttctattggtttccattatgttctattggttttcacagagctgttgtttgatgtcatgtctgtgggtggtcaccagggcttggcttcgacccacctcacactcagt

SEQ ID NO: 26022 - DNA, 120 bp, synthetic construct
  source 1..120: mol_type = other DNA
cctcttgctctccccgggtcccagtgtccagcaggtccgggccattccacccctaccgtctcctgcatccagctcctcctcttcaactgcccctgccattgattgctctcccctgcctgc

SEQ ID NO: 26023 - DNA, 120 bp, synthetic construct
  source 1..120: mol_type = other DNA
tccgtggcatgcaagatcctccataacatgacccttgctgacccctctggcctcgtcaccagcctgctggccaccccgtcaatcatgtggaatgactttcaggtcccctagctctctagc

SEQ ID NO: 26024 - DNA, 120 bp, synthetic construct; identical to SEQ ID NO: 7953
  source 1..120: mol_type = other DNA

SEQ ID NO: 26025 - DNA, 120 bp, synthetic construct
  source 1..120: mol_type = other DNA
tttatggcttgagaaggcaccgccaactggtgattctgatgcccttcccttagtgacatatggtcccccgacacagatgaaaatattttgggctcagggcttctgcccttgctgttctct

SEQ ID NO: 26026 - DNA, 120 bp, synthetic construct
  source 1..120: mol_type = other DNA
cttcttagcctgatttgtttttgtttttagctgttgtcaaaacttgactcgctatatatttgttaatttatttgacccatctctcctgacctgaatataacatcattgagagcagggact

SEQ ID NO: 26027 - DNA, 120 bp, synthetic construct
  source 1..120: mol_type = other DNA
ctgcacaccgtcgatatcactctgagatgaggtcagtgtaggcattgagtaagcatttggaaaattctatggcaatctgcagccacttccatgcatgtgggtggactatagaccattctg

SEQ ID NO: 26028 - DNA, 120 bp, synthetic construct; identical to SEQ ID NO: 7954
  source 1..120: mol_type = other DNA

SEQ ID NO: 26029 - DNA, 120 bp, synthetic construct
  source 1..120: mol_type = other DNA
ccctgatctctgagctcaggggaggacagtgagcccgtccaacttcgtgaggtgagagctcccttacctcaccccccaacaagggcctttattattaaatgtccccttcaaggaaattct

SEQ ID NO: 26030 - DNA, 120 bp, synthetic construct
  source 1..120: mol_type = other DNA
aggtacttccagagtcttgggttgaaaaaagcagggctgggaccgcacatcccctcaccctcccactgcctctattttcaggctgagtctgctatttccaagggtcagccagtcctgaat

SEQ ID NO: 26031 - DNA, 120 bp, synthetic construct
  source 1..120: mol_type = other DNA
taccacaccttcttcccctgcaatcctacccctagcacagtggcctggtcaggactccaggctcccaggctccccatgtgccccgctggagggttctgggatctacagagctcactgaaa

SEQ ID NO: 26032 - DNA, 120 bp, synthetic construct; identical to SEQ ID NO: 7955
  source 1..120: mol_type = other DNA

SEQ ID NO: 26033 - DNA, 120 bp, synthetic construct
  source 1..120: mol_type = other DNA
aggcttggcaggtgctactattagaagacagttttacaatattcctgattgctttcctcccggattccctcactttcttgttcccttaagctgacagctggactgggcccccttgcctca

SEQ ID NO: 26034 - DNA, 120 bp, synthetic construct
  source 1..120: mol_type = other DNA
ccctgggacccccaagaaagcaggacccagcctcgattcctgccttaagaagggtgcagaggacctataaccctgtcacctgcacactgcctgagacccagggcctgggcacattcccca

SEQ ID NO: 26035 - DNA, 120 bp, synthetic construct
  source 1..120: mol_type = other DNA
cacctcagttgtggacggaggtttgctccggctgtgctgtttttcctgtttcacagaggttggaagtgagacttagaggggaatgaggtgtctgctaaaggcaaggaggcgttgcctgct

SEQ ID NO: 26036 - DNA, 120 bp, synthetic construct; identical to SEQ ID NO: 7956
  source 1..120: mol_type = other DNA

SEQ ID NO: 26037 - DNA, 120 bp, synthetic construct
  source 1..120: mol_type = other DNA
ctgagggtcccagtagggctctgcatgctcagggtgaagggggctgggagagaaagggagaccagtgctgtcttgggtaatgaggataataatagctaagctttagtaagcacccgctta

SEQ ID NO: 26038 - DNA, 120 bp, synthetic construct
  source 1..120: mol_type = other DNA
agaaaaataatcatcacagattacaaagggctaacgcagtaatagaagaatgaatgaatctctttagcctagaaagcggatactctcaatagtattaatgtcataatacaagctcatcca

SEQ ID NO: 26039 - DNA, 120 bp, synthetic construct
  source 1..120: mol_type = other DNA
aagatggaaatttctccacaaagccagataagttttcctctctagtgagaaatgggctataataagttcttaaaaattcttatcttctctgccatgaatgaacatggctgaaggtggaga

SEQ ID NO: 26040 - DNA, 120 bp, synthetic construct; identical to SEQ ID NO: 7957
  source 1..120: mol_type = other DNA

SEQ ID NO: 26041 - DNA, 120 bp, synthetic construct
  source 1..120: mol_type = other DNA
tggccctcctctactggcaatgcatctgctcccagatgcaggagagggtgagagagactcgcacctttcagggccgaggcacacacaccttctggtgtctgatgcccaaagtttgtgctg

SEQ ID NO: 26042 - DNA, 120 bp, synthetic construct
  source 1..120: mol_type = other DNA
ggcccttgccatgacagctacattggtcctcaattcaagtgtcttcagaaagtgaagatgtaagctactctttgcaacattaactcctaacaagtccaaaaaaaaaaaagtacaagaaga

SEQ ID NO: 26043 - DNA, 120 bp, synthetic construct; identical to SEQ ID NO: 7958
  source 1..120: mol_type = other DNA

SEQ ID NO: 26044 - DNA, 120 bp, synthetic construct
  source 1..120: mol_type = other DNA
gggcagggaaaggcctcggatcccagtgtcacagcagaggccagacactcttccttggttcaaggtgaataggtcacaggaactgagacgggcttcccacatacaaccactgggagggca

SEQ ID NO: 26045 - DNA, 120 bp, synthetic construct
  source 1..120: mol_type = other DNA
aaaggaaggcccgacatatttccatcagcaagcaacaggaccaccaactcctccgtgttgcccagctcccactgagagtggacatacagtcatacccatacccaacacgcatcccagtct

SEQ ID NO: 26046 - DNA, 120 bp, synthetic construct
  source 1..120: mol_type = other DNA
tgaggaagccaaagcacagagggattaatttctccaggatcacatagctaccaagaggcagagccatgatatgtatagacagtttgattccagactccatggtctcaaccactatgccag

SEQ ID NO: 26047 - DNA, 120 bp, synthetic construct
  source 1..120: mol_type = other DNA
ctgtgggctgttagtgctgggaggtcagagaaggaagggaatgaacatttattgagcaactcttgtgtgccaggtcagacacgaggttgttgcactcatggatataacagtcctgaaaag

SEQ ID NO: 26048 - DNA, 120 bp, synthetic construct; identical to SEQ ID NO: 7959
  source 1..120: mol_type = other DNA

SEQ ID NO: 26049 - DNA, 120 bp, synthetic construct
  source 1..120: mol_type = other DNA
ggttggtttgacttgagaggccgtcctttcctgcgactccccagggagctagcaaagcttgggcaaaggctttcctccaaggctttcctccaaggcttctgttgttcagctattacagtg

SEQ ID NO: 26050 - DNA, 120 bp, synthetic construct
  source 1..120: mol_type = other DNA
ctaaaatccaggctttcattcatttccacagacccttttggagcaccatcacttctctgtacagtggcccaggctcaaaccaccctgtgctctgcaggtcctggatctctaaggggtgag

SEQ ID NO: 26051 - DNA, 120 bp, synthetic construct
  source 1..120: mol_type = other DNA
cgcattccagaccctataaaaagacaaacgccctggctgccagaggcttaggctccagcctcgtggaggacgctgcagcaacttgaaccccaggaatgcgacaggggcctggtggagcct

SEQ ID NO: 26052 - DNA, 120 bp, synthetic construct; identical to SEQ ID NO: 7960
  source 1..120: mol_type = other DNA

SEQ ID NO: 26053 - DNA, 120 bp, synthetic construct
  source 1..120: mol_type = other DNA
tagtaggacacatctccgcccctgcccctccccctcacaattccagttgttgccaaatgtcctctggggcagaactacttcccctccccaatcccttgaaaaccactgacctaggaggga

SEQ ID NO: 26054 - DNA, 120 bp, synthetic construct
  source 1..120: mol_type = other DNA
tatctaacctagcaatcctattccatcattctctctccggtgtcataacttctgctgctctaattccctttaactcagcttcacacgcctgcttgttctcttttgagttgaactaatctt

SEQ ID NO: 26055 - DNA, 120 bp, synthetic construct; identical to SEQ ID NO: 7961
  source 1..120: mol_type = other DNA

SEQ ID NO: 26056 - DNA, 120 bp, synthetic construct
  source 1..120: mol_type = other DNA
cctgcctcatgggcattcagtgtgataacacatataaggcattagaacagtgactgacaatatgcaagtaatcgataaatattgaatgtcattgttgctgctgctgctgctgatttgctg

SEQ ID NO: 26057 - DNA, 120 bp, synthetic construct
  source 1..120: mol_type = other DNA
gttaggggtttcaaggagagaagacacagagttaaagagaaatcagggacaaacgatgggcagggtgaagaggaattctttacctgaaataatcctttggcataactgttgggggttaga

SEQ ID NO: 26058 - DNA, 120 bp, synthetic construct
  source 1..120: mol_type = other DNA
aggctttttggctggtgagcctgctctgtggggcctgcatgatcaaagttccttctgttgatagataaagcactacaacttagaaggtcttcactcatccagttacctctctcaagtata

SEQ ID NO: 26059 - DNA, 120 bp, synthetic construct; identical to SEQ ID NO: 7962
  source 1..120: mol_type = other DNA

SEQ ID NO: 26060 - DNA, 120 bp, synthetic construct
  source 1..120: mol_type = other DNA
tagccccaggaaacccgggccccaagtctattaccctcagccagtgctggcagaagggatatggagggacactgccaagggagcctattcccacagacagcagtcacacccccggccctg

SEQ ID NO: 26061 - DNA, 120 bp, synthetic construct
  source 1..120: mol_type = other DNA
tgcaaatccaattacccatcagtggacacaggcacctgtatcaccacacatctgaagttgaactcaccaccttcctcctccctacccccatctgcagtcttggtaagtgatactgccatc

SEQ ID NO: 26062 - DNA, 120 bp, synthetic construct
  source 1..120: mol_type = other DNA
atctttaccatcaccagtgccttggcccagcctcccctgtttcctgcctggatgacttccctgggctccctgcccccttccctgcttcccatctcaccccacgtcaccccaatccatgct

SEQ ID NO: 26063 - DNA, 120 bp, synthetic construct
  source 1..120: mol_type = other DNA
atgcgctccttcacagccaggctacataatggggggcccagtacaagtgaaaatgtgggcccccacgttcaaacagtaggaaatgagtgctgatgaaggtactaaatataaagcttttcc

SEQ ID NO: 26064 - DNA, 120 bp, synthetic construct; identical to SEQ ID NO: 7963
  source 1..120: mol_type = other DNA

SEQ ID NO: 26065 - DNA, 120 bp, synthetic construct
  source 1..120: mol_type = other DNA
aatctctgcttcctgggaaacagtaagtacccagaatcggggagggccttggaggctcaacctcataggtcatttactgaatggactgcagcaatgtcagcccagggtagagacaaccag

SEQ ID NO: 26066 - DNA, 120 bp, synthetic construct
  source 1..120: mol_type = other DNA
tggcagaagtcaggaccttttgtgagccaaggttccaagcttgaggtgcatgtgccattgtcccaatggacttcacttacaaatcataaattcaaagataaaattaattaaaatctcaat

SEQ ID NO: 26067 - DNA, 120 bp, synthetic construct
  source 1..120: mol_type = other DNA
aacatcccatacttggggaagccttcctgatctcaagactagcttaggttctctgtcaatatgctaccataatatccccaaatcttgaacctttcccatttcattttaactacctgttta

SEQ ID NO: 26068 - DNA, 120 bp, synthetic construct; identical to SEQ ID NO: 7964
  source 1..120: mol_type = other DNA

SEQ ID NO: 26069 - DNA, 120 bp, synthetic construct
  source 1..120: mol_type = other DNA
gctgagcgaccttgggtatcaccgactttctctgggcttcacaattaaggggtcaggttaggagtcctcactgagcattcatttcccatagagctctgacatgccaggtggcatttgctg

SEQ ID NO: 26070 - DNA, 120 bp, synthetic construct
  source 1..120: mol_type = other DNA
ggttttgcaactccagcccacaaactaaagaaaaacatacacaggaccacgtgaaacagttaagggagccaattttgtttcaggatggaagatgacataaccattaagatgtaatttttt

SEQ ID NO: 26071 - DNA, 120 bp, synthetic construct
  source 1..120: mol_type = other DNA
acctcccaggctcaagcaatcctcccacttcagcctcccgagtagatggaacaagaggcatgcaccaccaggccccgctaattcaatttttgtagagacgggagtctctctatgttgccc

SEQ ID NO: 26072 - DNA, 120 bp, synthetic construct; identical to SEQ ID NO: 7965
  source 1..120: mol_type = other DNA

SEQ ID NO: 26073 - DNA, 120 bp, synthetic construct
  source 1..120: mol_type = other DNA
cactctccttccacactcaggagctcagagtgttttcccctcatagcaagcacacatttagaatcccagcttcccatcagctcaagatagattcccatggaaaccagcataaaggaaagg

SEQ ID NO: 26074 - DNA, 120 bp, synthetic construct
  source 1..120: mol_type = other DNA
cctgttgaaaaggtggttccattgttctgtcccctagggagcctgaggccactgtttataagagggcttcccctagaagtctttctgccgtcacccatcaccttggcaacacagcctgta

SEQ ID NO: 26075 - DNA, 120 bp, synthetic construct
  source 1..120: mol_type = other DNA
accccatctcaactaaaaatatgaaaattatctgggcatggtggcaggcgcctgtaatcccagctacttgggaggctgaggcaggagcatcacttgaacccaggaggcggaggttgcagt

SEQ ID NO: 26076 - DNA, 120 bp, synthetic construct; identical to SEQ ID NO: 7966
  source 1..120: mol_type = other DNA

SEQ ID NO: 26077 - DNA, 120 bp, synthetic construct
  source 1..120: mol_type = other DNA
tctcatccataaaacagaatgaggtggggaggaggtaggacagcttaatttttgaatattccttccagccctggcattttatggttccaggtatgtgttactgatgaaggggtgaagaga

SEQ ID NO: 26078 - DNA, 120 bp, synthetic construct; identical to SEQ ID NO: 953
  source 1..120: mol_type = other DNA

SEQ ID NO: 26079 - DNA, 120 bp, synthetic construct; identical to SEQ ID NO: 7967
  source 1..120: mol_type = other DNA

SEQ ID NO: 26080 - DNA, 120 bp, synthetic construct
  source 1..120: mol_type = other DNA
tcttccggcatgggcaggtacacggccagggccacacaattggcaaagatggtgagcaagatgatcgtctcgaagggcctggagccagggttaaggagagccctcgagtgaggcaaggga

SEQ ID NO: 26081 - DNA, 120 bp, synthetic construct
  source 1..120: mol_type = other DNA
gtacagtgaggaccaggttcctgccttgacctctggctccctctcctcaggaacaagtcactttcatgtagactccttggaatggcaaaggtctggtccctggctgagggctcctcagct

SEQ ID NO: 26082 - DNA, 120 bp, synthetic construct
  source 1..120: mol_type = other DNA
atggcatgggagggtaagggttgatgcagggtaaggttgagaactcactgagtaggactgggaaggagagatggagagatgaatgctgaatttccagagccatgtgcacatgctggtgtg

SEQ ID NO: 26083 - DNA, 120 bp, synthetic construct; identical to SEQ ID NO: 7968
  source 1..120: mol_type = other DNA

SEQ ID NO: 26084 - DNA, 120 bp, synthetic construct
  source 1..120: mol_type = other DNA
ggtttgatgtgggcgatataccgcctggccgagagcgggtcaggggaacagggctgaccctgaccccaaactatctctacttgccccacgtttctcttgtccttccagttatccctcatt

SEQ ID NO: 26085 - DNA, 120 bp, synthetic construct
  source 1..120: mol_type = other DNA
gtcactccttcctcccttccccaaataacccagatattttcatcattctccccaccagagcaaatgcaaacatagcatgagtttcaaagtccctgtccccagggtggcacgtctgagcta

SEQ ID NO: 26086 - DNA, 120 bp, synthetic construct
  source 1..120: mol_type = other DNA
agctcacctctgtccactgtcaccccccacccaacccaaacaagggagagttttctcaaagaggccatcgcatctttttttggtccctatcctattctaaaatgaggctggtgcttcaaa

SEQ ID NO: 26087 - DNA, 120 bp, synthetic construct
  source 1..120: mol_type = other DNA
cccactcaggcccaggaagccccaccaagtcctccttctcttcctcttcctcctcctcctcttcctcctcctcccccaccctcctcctcttcctcctcctcccccaccctcctcgtcttc

SEQ ID NO: 26088 - DNA, 120 bp, synthetic construct; identical to SEQ ID NO: 7969
  source 1..120: mol_type = other DNA

SEQ ID NO: 26089 - DNA, 120 bp, synthetic construct
  source 1..120: mol_type = other DNA
cttcatcctggggtgaggatggctccatggcttccctgggaatctggctttctcctgctcccccaccccagtgctttcccttccctgtgtccccaatgcccccgccttggggactaggct

SEQ ID NO: 26090 - DNA, 120 bp, synthetic construct
  source 1..120: mol_type = other DNA
tattttcaaaatatgagtttaatgacagaattagttagctagtattccacaaaaagtattgctctattttcaaaaaatttgcacagtgtcttacacatgtgctaaaagattgagaaaata

SEQ ID NO: 26091 - DNA, 120 bp, synthetic construct
  source 1..120: mol_type = other DNA
ggatttttttttttttcagtgcctcagggcatcagtatgaactccaattattgttgccctggccaattgtgggagtactgataactggagagttaattgactgctggataaagcaatctt

SEQ ID NO: 26092 - DNA, 120 bp, synthetic construct; identical to SEQ ID NO: 7970
  source 1..120: mol_type = other DNA

SEQ ID NO: 26093 - DNA, 120 bp, synthetic construct
  source 1..120: mol_type = other DNA
atgaccatcacttgaaataagtttaacaaagccatgagaatatgatttataagtttgcttccaaggctgagccttctctaagaaggatcatcttggctggaggagggatcccaactgatg

SEQ ID NO: 26094 - DNA, 120 bp, synthetic construct
  source 1..120: mol_type = other DNA
ttagaaagctgtcaattttgttactgtcataatcaaagacaagtaaacttgtgttaggggattgttcaccctagactgccatgttcaggcactgccatgacccttgatggtccagcaaag

SEQ ID NO: 26095 - DNA, 120 bp, synthetic construct
  source 1..120: mol_type = other DNA
aaagggagtgggaaaagagatgatggaaaagggaaaggagctggctgggtgtggggcagaattgcttgctgccaccttgtgctgtctgtatggtagtgggtgctgtgattttgttttcat

SEQ ID NO: 26096 - DNA, 120 bp, synthetic construct
  source 1..120: mol_type = other DNA
gaaagcacatcctcaatccagtcctccagctcctcagcagttggaagatcgtcatcatctggaatctccatccagacactgtcagcctgcagtgagggacaaaatgaatgagtgggtaaa

SEQ ID NO: 26097 - DNA, 120 bp, synthetic construct; identical to SEQ ID NO: 7971
  source 1..120: mol_type = other DNA

SEQ ID NO: 26098 - DNA, 120 bp, synthetic construct
  source 1..120: mol_type = other DNA
attaattttaaagtagcttacaaaataaatgaatgtagagttccctaggtgattgaacacctatcaacaggggagaaagacattgctaactggcccccattcttttttattttttttttg

SEQ ID NO: 26099 - DNA, 120 bp, synthetic construct
  source 1..120: mol_type = other DNA
tacaggcacccatgaccatgcctggctaatttttgtatttttagtagagatggggtttcaccatgttggccagctggtcttgaactcctgacctcaggtgatccacccatctcagcctcc

SEQ ID NO: 26100 - DNA, 120 bp, synthetic construct; identical to SEQ ID NO: 7972
  source 1..120: mol_type = other DNA

SEQ ID NO: 26101 - DNA, 120 bp, synthetic construct
  source 1..120: mol_type = other DNA
tggtgtgggttcccttttgtaaagagacctttttgtttgctgtttgactttgggggtaaatacaggagagtttacttgaagggaaagttccaaatcagtgattcaggaaaggctggcccc

SEQ ID NO: 26102 - DNA, 120 bp, synthetic construct
  source 1..120: mol_type = other DNA
aaaggctgggctactatagatgctctcacaatctaagctgtgtagcagaagacagggcaggccaagggtgcctgagcaagccttcacaggggatactcacatctgtgacattcaccaccc

SEQ ID NO: 26103 - DNA, 120 bp, synthetic construct
  source 1..120: mol_type = other DNA
ccgtcccatcacagtaactaggtcaccattggttaaaggtcttcaaaacagctgtgagcacttagcaaattgaagacttggccccagccttcaagcacttcaaataagcattaaataaaa

SEQ ID NO: 26104 - DNA, 120 bp, synthetic construct; identical to SEQ ID NO: 7973
  source 1..120: mol_type = other DNA

SEQ ID NO: 26105 - DNA, 120 bp, synthetic construct
  source 1..120: mol_type = other DNA
atggcctagtggggactagggatattcaggaatctggaaatcagaatagtctgaagatttcttctttgcaaaaaccaaggcaaacacatagaactggccagaagagagtctgggcatggt

SEQ ID NO: 26106 - DNA, 120 bp, synthetic construct
  source 1..120: mol_type = other DNA
acatttctatagtcccaactgctcaggaggctgaggcaggaggattgcttgagcctgggagcttaaggctgcagtaaattgagattatgccactgcactccagcctgggtgacacagtga

SEQ ID NO: 26107 - DNA, 120 bp, synthetic construct
  source 1..120: mol_type = other DNA
aacaaagctgtactgtatgcagtcttatatggccatgactttgttataattacccagtgctatgacattggtctcaagtgtcatggaagcctctgcctttgattcaccccctcctctaca

SEQ ID NO: 26108 - DNA, 120 bp, synthetic construct
  source 1..120: mol_type = other DNA
cctaatgataactaaacttgtactgattacttcaataagcatttacctaaagcagtcggtagaccaggctttagcatcatgtagacctagattggaatatcacatctatcactcactagc

SEQ ID NO: 26109 - DNA, 120 bp, synthetic construct; identical to SEQ ID NO: 984
  source 1..120: mol_type = other DNA

SEQ ID NO: 26110 - DNA, 120 bp, synthetic construct
  source 1..120: mol_type = other DNA
tcgtaggctagacactatgctaggtcctggggagaacacgatgaacatgacaggcacgctcgctttctctccacaaagttctgaactcgctgaaaaatgttcatctctgatttttattac

SEQ ID NO: 26111 - DNA, 120 bp, synthetic construct
  source 1..120: mol_type = other DNA
ctcacttgggtgggaccccgagggtcaagggttttcaactcctggactccagggagtaagccgaatcctttcagggtcagcaccaggccccaagttcaatactgccccaagggccaagac

SEQ ID NO: 26112 - DNA, 120 bp, synthetic construct
  source 1..120: mol_type = other DNA
gagccactcaccagaggaaagtcgtccgggtcgatccacaggatgctcagatcggggttgtcagtattgtcccgggcaacctgtttcaggatctccaggaattcgtagccatctgaaaca

SEQ ID NO: 26113 - DNA, 120 bp, synthetic construct; identical to SEQ ID NO: 7975
  source 1..120: mol_type = other DNA

SEQ ID NO: 26114 - DNA, 120 bp, synthetic construct
  source 1..120: mol_type = other DNA
ctagagtccccaataacatttgctctaaggaccaagaatgtctaagcctggacccttagttttctacaaccaggaattgctaaaaccttcaaaccaaacgagcttctgatttacagttgg

SEQ ID NO: 26115 - DNA, 120 bp, synthetic construct
  source 1..120: mol_type = other DNA
ttcagtcagcagcagtcattgccccaggggtgggatgattcctaagaaaagcagagaggagctttataagcttcaagaacacaaacttgttagctttaaaagcctaaaccttgaaggact

SEQ ID NO: 26116 - DNA, 120 bp, synthetic construct
  source 1..120: mol_type = other DNA
aacgtttagtaagagatagcatactctcaaccctcagcaccactccccagcccccagctagaaacagaaaaaatagtttagattctggaaggtccctgagaataataaactgtgcctgtg

SEQ ID NO: 26117 - DNA, 120 bp, synthetic construct; identical to SEQ ID NO: 7976
  source 1..120: mol_type = other DNA

SEQ ID NO: 26118 - DNA, 120 bp, synthetic construct
  source 1..120: mol_type = other DNA
agaccctggatcccttgggatagtggggttggggtggaggaccttaattatcagccccagcttccaccactcagtggtatacactcaaaattgaaatttaggttcagttctaaataataa

SEQ ID NO: 26119 - DNA, 120 bp, synthetic construct
  source 1..120: mol_type = other DNA
tatacgttgaatacaagtaactcaccagctacttgggaattcaattaactgtgctttctttgcacagtttttcttcttttgtctggagtctcagcaaacttgagctcctccctatggcct

SEQ ID NO: 26120 - DNA, 120 bp, synthetic construct
  source 1..120: mol_type = other DNA
ctattcttagcaactctactttgagtttttgagttggtgtagtcactgttgctagctcacactgaagattcaggctgagcccccttaggccttattacctgggaagcacagcgacctcta

SEQ ID NO: 26121 - DNA, 120 bp, synthetic construct; identical to SEQ ID NO: 7977
  source 1..120: mol_type = other DNA

SEQ ID NO: 26122 - DNA, 120 bp, synthetic construct
  source 1..120: mol_type = other DNA
cggtgatcttttaatccgtgctcataaccatattgcaaatgagattatgacaaacaccggagactgacagggccctaagcattagacttcatttatctgtcattgcagggctgggggtga

SEQ ID NO: 26123 - DNA, 120 bp, synthetic construct
  source 1..120: mol_type = other DNA
caggagagggaaatatggtgccaccttggttatctgtagagatagaaatcatagtacaaagaccacaaggaggaattcctccaaaacaacttcagttactgtttttagctgcagaaaata

SEQ ID NO: 26124 - DNA, 120 bp, synthetic construct; identical to SEQ ID NO: 7978
  source 1..120: mol_type = other DNA

SEQ ID NO: 26125 - DNA, 120 bp, synthetic construct
  source 1..120: mol_type = other DNA
caagaacttacctactacgttcctatttgacattctagagcaggttaagagatgaaaagaaaaactgaactgtgcaagaaaaatcaaatgggttgtagtttttttgtaaacgagtgaagt

SEQ ID NO: 26126 - DNA, 120 bp, synthetic construct
  source 1..120: mol_type = other DNA
taaggttgacattaaagctgaaaaagtttcctctagatccaagggcaggtttctgatgttcagggtgatgaattctgtaatggacaatgtctctgaccccaaatactttcaatgacagaa

SEQ ID NO: 26127 - DNA, 120 bp, synthetic construct
  source 1..120: mol_type = other DNA
taatgtttctctcctcatctttaaaacagagatgatgaaaatgatagcatctacttcgtcgggtagttgtgagttaaatgaatcagtatctctgaagcacttggacagtgcctggcatat

SEQ ID NO: 26128 - DNA, 120 bp, synthetic construct
  source 1..120: mol_type = other DNA
gttcagtgatctgggcactgggagtggggtagaggcagtcttggatccacgtggtacatgctgacagaaaactatatcacaaaagtgtacagcgtggggcagctccttccagctcctgtt

SEQ ID NO: 26129 - DNA, 120 bp, synthetic construct; identical to SEQ ID NO: 7979
  source 1..120: mol_type = other DNA

SEQ ID NO: 26130 - DNA, 120 bp, synthetic construct
  source 1..120: mol_type = other DNA
ctgtggatcctccctttttgaccaggaaggcaggtgtaggaagccgcatttcactttagtaattcaatgttaagcaaggactagtccactgttaaaattacatggatgaatgactgagtt

SEQ ID NO: 26131 - DNA, 120 bp, synthetic construct
  source 1..120: mol_type = other DNA
gggggaagtactattcagagatgtgtaggctaatagttatctagacaaagcaagtagaggactattctctgcagttatcagaaaagcatcagttctcaaaatcagaagagacccccgcaa

SEQ ID NO: 26132 - DNA, 120 bp, synthetic construct
  source 1..120: mol_type = other DNA
ttctaacagccaagaatcttatccttgcatccaattgaaatctcctttttttcacatgacgtttactccccaatttcttcctttatggacactggacattgttcttttttgttttgtttt

SEQ ID NO: 26133 - DNA, 120 bp, synthetic construct; identical to SEQ ID NO: 7980
  source 1..120: mol_type = other DNA

SEQ ID NO: 26134 - DNA, 120 bp, synthetic construct
  source 1..120: mol_type = other DNA
tgaacacttactgggtactgagtacttttacatttgatttttacaactagtcttgatggaggttaggaagattttatcatctccattttaaagaggatggaattaagacccaaggagagc

SEQ ID NO: 26135 - DNA, 120 bp, synthetic construct
  source 1..120: mol_type = other DNA
ctaccaatgttgctgccatcttccttcctcgagtgcttgagatttttaagcccagtgtgaaagcttcaacatcagggaagcaggggctgggacactgaggaaactgtccatggggtcagt

SEQ ID NO: 26136 - DNA, 120 bp, synthetic construct; identical to SEQ ID NO: 7981
  source 1..120: mol_type = other DNA

SEQ ID NO: 26137 - DNA, 120 bp, synthetic construct
  source 1..120: mol_type = other DNA
gtgggaatgagccttcaccaagccctaggggaccggtcccaggccaggcacagccaagtcaggagccaaggccacattcggcagaggctcatgtgtctcagaccaagcagtggtccagga

SEQ ID NO: 26138 - DNA, 120 bp, synthetic construct
  source 1..120: mol_type = other DNA
tggggtcctgcccttgcttgtgtggcaggtggacagataaacggccggggctggaaccacacagcttagaggttgtgtctaaagagggcactgggtctggagtttaaagaccttgcacag

SEQ ID NO: 26139 - DNA, 120 bp, synthetic construct; identical to SEQ ID NO: 7982
  source 1..120: mol_type = other DNA

SEQ ID NO: 26140 - DNA, 120 bp, synthetic construct
  source 1..120: mol_type = other DNA
agtagctgggactacaggtgcatgctaccatgcccagctaatttttgtatttttagtagagacggggtttcactatgttggccagactggtctcgaactcctgaccttgtgattcacccg

SEQ ID NO: 26141 - DNA, 120 bp, synthetic construct
  source 1..120: mol_type = other DNA
agacacaagggtgaataggacaggtcctctctcagaaagaccttgttggtctctagaccagagctcactcagtaaatatggaattctcaaaaagcagcccagcatctgaactggatcctt

SEQ ID NO: 26142 - DNA, 120 bp, synthetic construct
  source 1..120: mol_type = other DNA
cagctatgagacggcacttgagacatgtgaatacgctaccactccttaccacaccctctttctctgcctgtcttctcctggcgctaagatcccagaattggtgaaaaagtcaaatgatat

SEQ ID NO: 26143 - DNA, 120 bp, synthetic construct; identical to SEQ ID NO: 992
  source 1..120: mol_type = other DNA

SEQ ID NO: 26144 - DNA, 120 bp, synthetic construct
  source 1..120: mol_type = other DNA
caaaacttagccaggtgtggtggcccatgcctctaatcccagctactcgggaggctgaggcaggagaatcgcttgaacccgggaggtggaggttgcagtgagcagagatggtgccactgc

SEQ ID NO: 26145 - DNA, 120 bp, synthetic construct
  source 1..120: mol_type = other DNA
taaaccaaacttaaaatcaaaagctcaaggaggcagttagtggtcctacttgagacaattggtctcaaaaagatttttacaagaacctgaagcagtggaagcttggatggaacagagctt

SEQ ID NO: 26146 - DNA, 120 bp, synthetic construct
  source 1..120: mol_type = other DNA
agcatgcactcatgtagaaacgctgctttgcaaacctttcatcacatgttataaagaagatgtcagcctgacacagacacatctaggggtggtgaggaagacagtcattcattttcaaac

SEQ ID NO: 26147 - DNA, 120 bp, synthetic construct
  source 1..120: mol_type = other DNA
ctaagggcatgggatgagtacagcaggagagatctggcgattaggctcgagggccaggagagcagactctgcctcctggcaggtggaggtgggagtacagggttgctgccttccctcagc

SEQ ID NO: 26148 - DNA, 120 bp, synthetic construct; identical to SEQ ID NO: 7984
  source 1..120: mol_type = other DNA

SEQ ID NO: 26149 - DNA, 120 bp, synthetic construct
  source 1..120: mol_type = other DNA
ctcgatttcccactattcctataaccctgtgatcccgaacatgccactgcattgccctgggtctccgctttcttgtctttcaaatgttggaggtggaggagatggtgaagggcaatagag

SEQ ID NO: 26150 - DNA, 120 bp, synthetic construct
  source 1..120: mol_type = other DNA
cttcatgcttcccagtgaggtaagctctctcagcctcagcttcctcagttgtaataaaaataatgccttcctcatggggttcttgtgtacatataagtacacagtaagtgacaatcatca

SEQ ID NO: 26151 - DNA, 120 bp, synthetic construct; identical to SEQ ID NO: 7985
  source 1..120: mol_type = other DNA

SEQ ID NO: 26152 - DNA, 120 bp, synthetic construct
  source 1..120: mol_type = other DNA
ttttgcaggaatgacattcctagtcctgcagtcaggcccattgccccaggttacacatcagtgctctgcaggtaaatcactgattaaccacaaattcagagtcagggactttcacagaca

SEQ ID NO: 26153 - DNA, 120 bp, synthetic construct
  source 1..120: mol_type = other DNA
ccagcttgggctcttttggggaaaggcacagcttcaggcccagggatatttgtgcagggaggaggtggaagtagtttctggagcttgattcattacagcagcaatctcggtcaaacaggt

SEQ ID NO: 26154 - DNA, 120 bp, synthetic construct
  source 1..120: mol_type = other DNA
gctgctgcctatggcaactgcatctctgttcacataacaccagggatccgattctgtttgattatagcttgtaaaccttaggcaattggcttcctttgctatttgctcctccagggaaga

SEQ ID NO: 26155 - DNA, 120 bp, synthetic construct
  source 1..120: mol_type = other DNA
tagctttttcttgagaggtggagacaagggctagatcatgttgaaaagtgaaaaagacaagagagtgctcagataattcagaacataaatttggttttgatacaatggaatattattcgg

SEQ ID NO: 26156 - DNA, 120 bp, synthetic construct; identical to SEQ ID NO: 7986
  source 1..120: mol_type = other DNA

SEQ ID NO: 26157 - DNA, 120 bp, synthetic construct
  source 1..120: mol_type = other DNA
tctgtaagaaactatggaggctattagtgtattgccaaaaaagggaaggaaaagctggtctgccagtgaagattttggggctctgtcttggttggtcatctaactctctaatcatctgcc

SEQ ID NO: 26158 - DNA, 120 bp, synthetic construct
  source 1..120: mol_type = other DNA
gcagtttgtttaacttctccaaaccgctgtttcctgatctgtctagtggaaccatctctagatctctccctatgagtatacaagagactgaggtccccagcaaataccatgaaagtctac

SEQ ID NO: 26159 - DNA, 120 bp, synthetic construct; identical to SEQ ID NO: 7987
  source 1..120: mol_type = other DNA

SEQ ID NO: 26160 - DNA, 120 bp, synthetic construct
  source 1..120: mol_type = other DNA
tcattatttaggggaatgtttcctacttcatttcctaagcacagacaatattttatggattaaagtatacatttatcctattttcaggtagaattgtggttgatataggctagatggcaa

SEQ ID NO: 26161 - DNA, 120 bp, synthetic construct
  source 1..120: mol_type = other DNA
tatgtttgggcagcaaagcagaatgtttgaggttcttgaaagcatctccaaaaacactttataaaatcaactggagaaaaaaataaaatcccgctaggcttcccacaccatcggcagcaa

SEQ ID NO: 26162 - DNA, 120 bp, synthetic construct
  source 1..120: mol_type = other DNA
ggtgagattaaaagtgatatggtttggatctgtgtcccctacccaaatctcctgttgaaatgtaatccccaatgctggaggtggggcctggtgggagatgattggatcgtgggggtggtt

SEQ ID NO: 26163 - DNA, 120 bp, synthetic construct; identical to SEQ ID NO: 7988
  source 1..120: mol_type = other DNA

SEQ ID NO: 26164 - DNA, 120 bp, synthetic construct
  source 1..120: mol_type = other DNA
aggctgagcaaggagctgacttatggaagaatgcagtttccacatcctcacgatttcatccccttacccagatcaatcaatgaccccaattttccaggccctcaccttccatgatcctct

SEQ ID NO: 26165 - DNA, 120 bp, synthetic construct
  source 1..120: mol_type = other DNA
cagtgtgttggtccattgctgtgcagcgctgtaggaacctggtagtctataacattctgatttgttcacaccttttcttctcttagccgtgtgcacaattgaaaacgaactcatacttaa

SEQ ID NO: 26166 - DNA, 120 bp, synthetic construct
  source 1..120: mol_type = other DNA
caggttgaaggtttcctacctggatcactcttctctgcaaaggccacaatgtggatcccattcaaatcatcttcctgtatgagaaaagtaacaaaagttacacttccagctggagggatg

SEQ ID NO: 26167 - DNA, 120 bp, synthetic construct
  source 1..120: mol_type = other DNA
ggaaggaatgctgaggagcaactgccaggaatgcatagggtttggatcagggactcagataaatgagtttgcaagacaggaaaataccaaccacacgcaagacattagcactaaatgagc

SEQ ID NO: 26168 - DNA, 120 bp, synthetic construct; identical to SEQ ID NO: 7989
  source 1..120: mol_type = other DNA

SEQ ID NO: 26169 - DNA, 120 bp, synthetic construct
  source 1..120: mol_type = other DNA
gacactgctagaagtggcctctaggtgacttccttgaagtccttgcccagtcagtataggcctccagtgcatttctgaggctgcaggaattgtctggaatttgagcgtaaggaaggttga

SEQ ID NO: 26170 - DNA, 120 bp, synthetic construct
  source 1..120: mol_type = other DNA
gcagcaaggaccctatgccttgtgtctcctttgcaatgattattcctggagaaagaggagctagagcttggaaggggctctgctatcacaaatgtgattctcaggagacttggggaggaa

SEQ ID NO: 26171 - DNA, 120 bp, synthetic construct; identical to SEQ ID NO: 7990
  source 1..120: mol_type = other DNA

SEQ ID NO: 26172 - DNA, 120 bp, synthetic construct
  source 1..120: mol_type = other DNA
ttctaagaaagattaaatggaaaatattattattaaaaacaagacagtgggcactgccttggtcagattctctggagaatttaattttacagatacgcatgtgtgtgcctgtgtgtgccg

SEQ ID NO: 26173 - DNA, 120 bp, synthetic construct
  source 1..120: mol_type = other DNA
tctcctgccatcagatgggagtgagcgctgttaattctgtgaagcaggcttcatttctgtgtgccctgctagaacgcatttggaattggctttagaattaagaatccatatttgttttct

SEQ ID NO: 26174 - DNA, 120 bp, synthetic construct
  source 1..120: mol_type = other DNA
cctgtcactgtgtgcgtcacaaagattcagcatgcagacctgtattccacatccacaaggaagcaggccagcgctaggtgccaggcattttcaagtaataaactcacagagccagaaccc

SEQ ID NO: 26175 - DNA, 120 bp, synthetic construct
  source 1..120: mol_type = other DNA
tacccagatctctcatttggtctttaggttgtcttggaaattctgtttttaattgcatgaatcttccctcctcaactagatggaaagctcactaaaagaagggattatgccttaagataa

SEQ ID NO: 26176 - DNA, 120 bp, synthetic construct; identical to SEQ ID NO: 7991
  source 1..120: mol_type = other DNA

SEQ ID NO: 26177 - DNA, 120 bp, synthetic construct
  source 1..120: mol_type = other DNA
cctgctgtgtcctcacggtggaagggaccagctagctctctggggcatcttttagggcattaatcccaacatgagagttcagccctcaagacctaatcacttcccaacggccccatctcc

SEQ ID NO: 26178 - DNA, 120 bp, synthetic construct
  source 1..120: mol_type = other DNA
aatttattcccctgcagggtttgcagaaaatgttgtaaacttggatcaatggctcttaagttgaaagaggctggaaagagacctgtatataaagtaactgagtgcaagatttcccaaaga

SEQ ID NO: 26179 - DNA, 120 bp, synthetic construct
  source 1..120: mol_type = other DNA
gtctacttaatctgagctcttaaggacaggacagcaatgttagcttttataacctcattgtttagcacagaggttctttttaacgcctatagactcaaaaaaggagtatggcaataaaaa

SEQ ID NO: 26180 - DNA, 120 bp, synthetic construct; identical to SEQ ID NO: 7992
  source 1..120: mol_type = other DNA

SEQ ID NO: 26181 - DNA, 120 bp, synthetic construct
  source 1..120: mol_type = other DNA
ggtgaggtctccagggggaatgacagatcagcactgggtctccttttgccctgcctcagcttgacattctttgagtatttaaaataaataaatagctttccaatgtacacacagcaaata

SEQ ID NO: 26182 - DNA, 120 bp, synthetic construct
  source 1..120: mol_type = other DNA
tgagagaaagatcaatagttgttttagtcctagctggctttcccatcttatttaaatatttctcaatgtctcgggaagtagatgtctggggaagtggatgttgaagataaagacctttct

SEQ ID NO: 26183 - DNA, 120 bp, synthetic construct; identical to SEQ ID NO: 7993
  source 1..120: mol_type = other DNA

SEQ ID NO: 26184 - DNA, 120 bp, synthetic construct
  source 1..120: mol_type = other DNA
cgtggcccacagggatggcactctttagagcagtgacctgctagggggcccaggtagaggagggggtatggaaagtggctcctcagaggtcctttggatggactgatttctgtttctccc

SEQ ID NO: 26185 - DNA, 120 bp, synthetic construct
  source 1..120: mol_type = other DNA
gaacggggagggaaggaataaaccatttcagttgcccttttctctgcctggttaaattcaatacgctgctctcttccccaagttaagaacaattcaatatgcaataatgtggaaaatatg

SEQ ID NO: 26186 - DNA, 120 bp, synthetic construct
  source 1..120: mol_type = other DNA
tgcctctaatgtgtcaacagggagtatttctgtagcagtgtgggatatgtgaggacacaggctccccatctacagaacaccatggtcttgagtgatactgctatgacaggaaggaaagac

SEQ ID NO: 26187 - DNA, 120 bp, synthetic construct; identical to SEQ ID NO: 7994
  source 1..120: mol_type = other DNA

SEQ ID NO: 26188 - DNA, 120 bp, synthetic construct
  source 1..120: mol_type = other DNA
aacatggtgaaaccctgtctctactaaaaacacaaaaactagccaggtgtggtggtatgcacctgtaatcccagctacttgggaggctgagggaggagaatcacatgaacctgggaggca

SEQ ID NO: 26189 - DNA, 120 bp, synthetic construct
  source 1..120: mol_type = other DNA
gtgtggaatcctggattggattctgggccaggaaaaagagacgtttttcttttgcagtaaaggacattgatgggacaactggccaatttgaataatggtagtagacgtattatatcagtg

SEQ ID NO: 26190 - DNA, 120 bp, synthetic construct
  source 1..120: mol_type = other DNA
tatctatgtatctatgtagctagaagggatggtaaaatgttaacatttgggagatctaggtgaagagatattgaagttctttgcactattttggtacatctgaaattattttagggtaaa

SEQ ID NO: 26191 - DNA, 120 bp, synthetic construct
  source 1..120: mol_type = other DNA
aggctggagtgcagtggtgcaatcacagctaactgcaacttctgcctcccagatgaaagtgattctcttatatcagcctccagagtaggtgggactacaggcgcctgccaccatactcgg

SEQ ID NO: 26192 - DNA, 120 bp, synthetic construct; identical to SEQ ID NO: 7995
  source 1..120: mol_type = other DNA

SEQ ID NO: 26193 - DNA, 120 bp, synthetic construct
  source 1..120: mol_type = other DNA
ttgctccctggttctgttcatccatcacttcaaagaattaaacagataaatacttccgtgttaattcctttctcctccttcccagccctcacaccaaatggccccttgtggggacatagt

SEQ ID NO: 26194 - DNA, 120 bp, synthetic construct
  source 1..120: mol_type = other DNA
agtttctgactatgtcaaacggggctaaaatagtatttggtttttgtttgtttgtttggggagacagagtcttgctgtgttgcccaggctggagtgcagtggcattatcatgtctcactg

SEQ ID NO: 26195 - DNA, 120 bp, synthetic construct
  source 1..120: mol_type = other DNA
agctattggaagatccaaataaaaagatgcatgaaatgctttgaaaaatgctccacagcctttgttatttatgaacttctgtacataaggtgtgggttgggggtttatctccaaggccct

SEQ ID NO: 26196 - DNA, 120 bp, synthetic construct; identical to SEQ ID NO: 7996
  source 1..120: mol_type = other DNA

SEQ ID NO: 26197 - DNA, 120 bp, synthetic construct
  source 1..120: mol_type = other DNA
agctatagtcactgcaggaaattaactaagagcaattttgcctagtgagtagtaccaaagaggcttggattgatccatggagaactgtgttttaattgagcatgaagttgtccatgtttt

SEQ ID NO: 26198 - DNA, 120 bp, synthetic construct
  source 1..120: mol_type = other DNA
ctcagcctcccaagtagctggaactccaggcacatgcgaccatgctcggttactttttgcatttttttgtagagacagggttttgctatgttgcccaggctgctctcagacacctgaact

SEQ ID NO: 26199 - DNA, 120 bp, synthetic construct; identical to SEQ ID NO: 7997
  source 1..120: mol_type = other DNA

SEQ ID NO: 26200 - DNA, 120 bp, synthetic construct
  source 1..120: mol_type = other DNA
gcagccacagcattatgaaatgtaaaatgagatgatgcttcctttgcaaggcagggagagccctaaaaacccacttatcttctaaggaaacagacctgctctactctgctgtgtcagaca

SEQ ID NO: 26201 - DNA, 120 bp, synthetic construct
  source 1..120: mol_type = other DNA
ttccttcctcacagatagccaccactccagagagcccacagcaggcctggaatgagaaacctgagggggaaaacaggaaatctcggattttgtaggttaaaactgcctttgttttatcat

SEQ ID NO: 26202 - DNA, 120 bp, synthetic construct
  source 1..120: mol_type = other DNA
tctgaatattggcaaatagtgctggacatattaatatttgctcctccaagtactgccttcctgaaggaactaggactgtccaggtgagggggatcacagtactgcaggtccaatgaacac

SEQ ID NO: 26203 - DNA, 120 bp, synthetic construct; identical to SEQ ID NO: 7998
  source 1..120: mol_type = other DNA

SEQ ID NO: 26204 - DNA, 120 bp, synthetic construct
  source 1..120: mol_type = other DNA
tgcatagagtgttcatccttggctaagttacttaactattgagtccaattccttgatctgtaaaattgggataataataattactccctaaggttggagattagataaaatagtttccct

SEQ ID NO: 26205 - DNA, 120 bp, synthetic construct
  source 1..120: mol_type = other DNA
tcaaactctgcttgcaggtgcagacttagattcagaagtaataacatccctgctagtcattactgatcaacaaagccatactactgagttctgtactgctggggtactaactaggttgtt

SEQ ID NO: 26206 - DNA, 120 bp, synthetic construct
  source 1..120: mol_type = other DNA
ctcctcttctgtgtaaggtttgttggggatggcaatgggctcatccataaatggctcatagaagtcaacctcattcatcttcaaagataatttctttgcaacctgtaaccattagaaata

SEQ ID NO: 26207 - DNA, 120 bp, synthetic construct
  source 1..120: mol_type = other DNA
acataaaaacagatgtacagttttaacttcaatgttgaagtgacaggaacttatcacccaaggcctggctagactaatcttcttttgtgatcaaagaaggaaagataggaaggaaaaaga

SEQ ID NO: 26208 - DNA, 120 bp, synthetic construct; identical to SEQ ID NO: 7999
  source 1..120: mol_type = other DNA

SEQ ID NO: 26209 - DNA, 120 bp, synthetic construct
  source 1..120: mol_type = other DNA
gtttgtcagcagttatgaggtgactgaccatcttgctttgttctgggtggaagggctccctgggatgcaggactttcagtactgaaacttggacagaccccagtaagccaggatgatttg

SEQ ID NO: 26210 - DNA, 120 bp, synthetic construct
  source 1..120: mol_type = other DNA
ctgcacagctgctgaactcaggacctctgtttgtgaaatgatttcagaggcctggaatgtgcaacgctctatagaaaaccaaatgccactcttttctagttcagagctgtggttcaagaa

SEQ ID NO: 26211 - DNA, 120 bp, synthetic construct
  source 1..120: mol_type = other DNA
aggagctgggtattgcataagctcttacacaaggagatccattctgaggaaacattgatatccatatggtttttgtcatcaattgctatgaattccaggtcactatattctgaaaggcat

SEQ ID NO: 26212 - DNA, 120 bp, synthetic construct; identical to SEQ ID NO: 8000
  source 1..120: mol_type = other DNA

SEQ ID NO: 26213 - DNA, 120 bp, synthetic construct
  source 1..120: mol_type = other DNA
aataataacaaacatatggagtgcttatcacgtgccaggcactgctgccaggtgttttaggttgattctttgtttaattctcactttgattgtatgtggtaagaatgattatcatagtta

SEQ ID NO: 26214 - DNA, 120 bp, synthetic construct
  source 1..120: mol_type = other DNA
tgccaatgtctgggtccacagtgctgtctaagaatgtaaaaattggattgtcgtgtccttaatttaagtcttggaaatgctaagtaaaaatttcccagggatctcttcactgtctaccta

SEQ ID NO: 26215 - DNA, 120 bp, synthetic construct
  source 1..120: mol_type = other DNA
gttcaatggcacagtctcggctcactgcaatctccgcttcccaggttcgagcgattctcctgcctcagcctcccgagtagctgggattatgggcacaggccaccacacccagctaatttt

SEQ ID NO: 26216 - DNA, 120 bp, synthetic construct; identical to SEQ ID NO: 8001
  source 1..120: mol_type = other DNA

SEQ ID NO: 26217 - DNA, 120 bp, synthetic construct
  source 1..120: mol_type = other DNA
tctgttaactagttggaatagatttcaacaaagataagaaaactacaaagtacaatgccaattttctgacatgtgcatgtatatgaattttgatacaaatcatttttcctccagttagca

SEQ ID NO: 26218 - DNA, 120 bp, synthetic construct
  source 1..120: mol_type = other DNA
atcttctccactaactttgtttagtcacagcaccctttggctccagtgtgatttaaaaaagaaagtgatttttcgtctcattgttcactcagacagagagaggaacaggtcagtgggcgg

SEQ ID NO: 26219 - DNA, 120 bp, synthetic construct; identical to SEQ ID NO: 8002
  source 1..120: mol_type = other DNA

SEQ ID NO: 26220 - DNA, 120 bp, synthetic construct
  source 1..120: mol_type = other DNA
tattggtttgtttacttttgaactttctgtctttccatcttctctttcccacaataaactttaaattctaaagggcaggaatctgctttgctcaatgttgtgtccctggcactaagaaga

SEQ ID NO: 26221 - DNA, 120 bp, synthetic construct
  source 1..120: mol_type = other DNA
ataaccccatctcttgttcctcaatagattcttcttcctggatttcctaatgttttcagtagcttcataatttttgctgtcttaacgccaagacttgctatcttaagttattttgaggcc

SEQ ID NO: 26222 - DNA, 120 bp, synthetic construct
  source 1..120: mol_type = other DNA
tcagacctcaacaaagcacctccaggtccctctgagattccctaggatgtgttgtacaaacaggtcctttcagccacttcacatttattacttttctcctcttctgtcctagcactccct

SEQ ID NO: 26223 - DNA, 120 bp, synthetic construct; identical to SEQ ID NO: 8003
  source 1..120: mol_type = other DNA

SEQ ID NO: 26224 - DNA, 120 bp, synthetic construct
  source 1..120: mol_type = other DNA
accacccctctaaaaactaaggctttgttgctggacaaattaattggcctgcctctctattcctttcagctggattcttacccaggagcctctttagccacacctagtccattagaacca

SEQ ID NO: 26225 - DNA, 120 bp, synthetic construct
  source 1..120: mol_type = other DNA
atgaacaatggtgctcatagctggctaactattactgaatgcttcctgtgtgccaaaaaccagctaggcagtttgcatatattgcttctttctctggagtaaagtaggacagagcattga

SEQ ID NO: 26226 - DNA, 120 bp, synthetic construct
  source 1..120: mol_type = other DNA
aattcctcccttatgggagtgttgaaaggatgaagtgagaaaatccatgttaacttcttagcacacactctggcacaaagagacttcttagcacagactctggcacataaaaattttttt

SEQ ID NO: 26227 - DNA, 120 bp, synthetic construct
  source 1..120: mol_type = other DNA
ctcccacctcaagcctcccaagtagttcggactacaagtgtgtgccaccacacccagctaatttttgtattttttgtagagatggggtctcaccatgttgcccaggctggtctccaactc

SEQ ID NO: 26228 - DNA, 120 bp, synthetic construct; identical to SEQ ID NO: 8004
  source 1..120: mol_type = other DNA

SEQ ID NO: 26229 - DNA, 120 bp, synthetic construct
  source 1..120: mol_type = other DNA
cagaagtggttcatcatatacatgaactgaatgcaatctcatcccaccacgtcccttccctgcttcagctcactgacttcctcttgtttttcgcagaacacttgcttgaactaatcacag

SEQ ID NO: 26230 - DNA, 120 bp, synthetic construct
  source 1..120: mol_type = other DNA
gggcccacacgtttcccatctcagtgtataagaagataatggtgggtcatcacttttccttggatgttttcataaatatccttacatcctctgacttagtcatctttgtactcatcttaa

SEQ ID NO: 26231 - DNA, 120 bp, synthetic construct; identical to SEQ ID NO: 8005
  source 1..120: mol_type = other DNA

SEQ ID NO: 26232 - DNA, 120 bp, synthetic construct
  source 1..120: mol_type = other DNA
gtttacatagatgttatttaatattatttaagcccatagttccccccaaggagttggaattgactggcattcaaacgcccaagagaagacccattcaccacacttttatgaactgcaggt

SEQ ID NO: 26233 - DNA, 120 bp, synthetic construct
  source 1..120: mol_type = other DNA
tttcattctaactcactgctacttataatcatgccctctagagagagtgcagtttgccagaataaatgagccctaagtaagaaggaaattcgtctcacagtgtaaagtaacctcaatcac

SEQ ID NO: 26234 - DNA, 120 bp, synthetic construct
  source 1..120: mol_type = other DNA
cattttaaagttttcttttttattctgatgcctcaagaggatttcttaaacttaatcaagctcttgattgactatggtctcaaacttgagtccatactggccgaggcagtatgagatcag

SEQ ID NO: 26235 - DNA, 120 bp, synthetic construct
  source 1..120: mol_type = other DNA
aaatgctataagcctgagagtcaatgagcctgtgatttattcttaacaagattagcttctttccatttcatggaattccatttcccttaaccgtgtgaagtataagcctttgttagaatt

SEQ ID NO: 26236 - DNA, 120 bp, synthetic construct; identical to SEQ ID NO: 8006
  source 1..120: mol_type = other DNA

SEQ ID NO: 26237 - DNA, 120 bp, synthetic construct
  source 1..120: mol_type = other DNA
gtcagaaaagatatcctgtaacatcatagctggggtcgagaattgggtggaggggagaagttggctgagagcatttgaagaatgaatggagtgaaagtaaggaagtagaatggctaaagc

SEQ ID NO: 26238 - DNA, 120 bp, synthetic construct
  source 1..120: mol_type = other DNA
ttggaaagaatggcttaggcctgtgtcaggagcttcccttcctctcttggagagctggtctacatcactttaagatgaagaatggagcaaggtgacctccagatgggtgattcaaaatgt

SEQ ID NO: 26239 - DNA, 120 bp, synthetic construct; identical to SEQ ID NO: 8007
  source 1..120: mol_type = other DNA

SEQ ID NO: 26240 - DNA, 120 bp, synthetic construct
  source 1..120: mol_type = other DNA
atattagtatcacagacgttagtaactgggtgtggttgatggcaccagttagaaaccctgaccagaaatgcttggaataatatcatctgtcttacaaagaagaaccaaaccaatttgttg

SEQ ID NO: 26241 - DNA, 120 bp, synthetic construct
  source 1..120: mol_type = other DNA
aaactctgaagtcagattttgaatgtccaagttcatgtactgatagtacagctacaatgacaagaaagtgtaaaggctttacatcaagctctttctgaaaatcttgagattcaaataata

SEQ ID NO: 26242 - DNA, 120 bp, synthetic construct
  source 1..120: mol_type = other DNA
tatagcttttggtgaagaaatgggttcaggagacctctccctgctctttcatcctaaagtgggttaactgcgcaagaattttacagagtttattagctaaaaactagatttaaaactatg

SEQ ID NO: 26243 - DNA, 120 bp, synthetic construct
  source 1..120: mol_type = other DNA
atatataatgtactaacaaagtttatacatttaaaaacaaaaattcaaccttaaaaagaggttaaaatgattcactagcaattttattaaattttaagaatgattattaagatcagtaga

SEQ ID NO: 26244 - DNA, 120 bp, synthetic construct; identical to SEQ ID NO: 8008
  source 1..120: mol_type = other DNA

SEQ ID NO: 26245 - DNA, 120 bp, synthetic construct
  source 1..120: mol_type = other DNA
gtgaaactccatccttactaaaaatacaaaaaattagccaggcatggtggcaggcgcctgtaatcccagctactcaggaggctgaggcaggagagttgcttgaacccgggaggcagaggt

SEQ ID NO: 26246 - DNA, 120 bp, synthetic construct
  source 1..120: mol_type = other DNA
tccacatatacaagtgaagtctcttgtccaaggtgaccatcaagaatttgaagagatcatcatttaaaatcttgataaggaatttcatgttgctattttaagcataaaacctaatatcaa

SEQ ID NO: 26247 - DNA, 120 bp, synthetic construct
  source 1..120: mol_type = other DNA
accccgtctctactaaaaacactaaaattagccaggcgtggtggcgggcacctgtaatcccagctactcaggaggctgaggcaggagaatcacttgaacccaggaggcagaggttgcagt

SEQ ID NO: 26248 - DNA, 120 bp, synthetic construct; identical to SEQ ID NO: 8009
  source 1..120: mol_type = other DNA

SEQ ID NO: 26249 - DNA, 120 bp, synthetic construct
  source 1..120: mol_type = other DNA
ggtgtgctctttatcctaaccttgttttgcttccctcttatctgccatcctgagctacatggatgaagaggatagaggaacataaagatggaaacaaattgagacagacgaactgaaaag

SEQ ID NO: 26250 - DNA, 120 bp, synthetic construct
  source 1..120: mol_type = other DNA
cattcattttaagcactgtaaatggaggttttaatgaagcaaatgaaaagagggttaagttggggcatgggagacagaaaatgaatgggttgttgatgaggtgactaaggatgctagtgg

SEQ ID NO: 26251 - DNA, 120 bp, synthetic construct
  source 1..120: mol_type = other DNA
tcacccgctctaatgctgttcctctctccaaggctgagataccagaaaaaagcctacctcacgggggccatgctgccaaagcagttttaaatatgtacagtactcaagtgcttactcctc

SEQ ID NO: 26252 - DNA, 120 bp, synthetic construct
  source 1..120: mol_type = other DNA
gggaatatgtccaagggtgtggctgcactatgacaggtagccttggtggtcagctgtgggcttggccagcgatttttcacattctgtagccactgctaagcccatccctaccccaatttt

SEQ ID NO: 26253 - DNA, 120 bp, synthetic construct; identical to SEQ ID NO: 8010
  source 1..120: mol_type = other DNA

SEQ ID NO: 26254 - DNA, 120 bp, synthetic construct
  source 1..120: mol_type = other DNA
tctagcttttagactgatcggctggggttggcagacaacttacattctgagtcctcactcttgaaaaagccaatgagtttgatgtagtcttcaatgcgttcgaaggcttggacttccagt

SEQ ID NO: 26255 - DNA, 120 bp, synthetic construct
  source 1..120: mol_type = other DNA
gtagcggactttgtggttggtgcctcaaatatctattccattctccccacaatcccccagtgagcataccagcagtaccttctgaggaatagaacttaacttaaagagttaaatgattgg

SEQ ID NO: 26256 - DNA, 120 bp, synthetic construct
  source 1..120: mol_type = other DNA
ttattggatgtaaagtgttgctatgatctataaatatgtgaaataattaaatcaagctaattaacctatccatcacctcaaatattcatcattttttgtggtgagaacatttgaaattta

SEQ ID NO: 26257 - DNA, 120 bp, synthetic construct; identical to SEQ ID NO: 8011
  source 1..120: mol_type = other DNA

SEQ ID NO: 26258 - DNA, 120 bp, synthetic construct
  source 1..120: mol_type = other DNA
tttaaaaaaaaaaaaagctgaatagtattcccttgtgtatgtatagcacattttcttttctttctttttgagatggagtcatgctgtgttgcccaggctggagtgcagtggcacgatcta

SEQ ID NO: 26259 - DNA, 120 bp, synthetic construct
  source 1..120: mol_type = other DNA
ccatgcccagctaagtttttttatttttgtatttttagtagagatggggtttcaccgtattagccaggatggtctcgatctcctgaccttgtgatcagcccaccttggcctcccaaagtg

SEQ ID NO: 26260 - DNA, 120 bp, synthetic construct
  source 1..120: mol_type = other DNA
aatgggcaagtaactggcccaataaggacagatttgctgaaggctttgggaaaagttctttactcttaaaagggcaatgggaagccaaatttgtttttctgtcatgaaatatgaatgagg

SEQ ID NO: 26261 - DNA, 120 bp, synthetic construct; identical to SEQ ID NO: 8012
  source 1..120: mol_type = other DNA

SEQ ID NO: 26262 - DNA, 120 bp, synthetic construct
  source 1..120: mol_type = other DNA
tgagtcaatgagatggccaagcacagtgcgtcatgagatggcactttttttggtaaatgtagcttccaactcacttctgaccttccctctggtttttgacactgtagagaaagaatgata

SEQ ID NO: 26263 - DNA, 120 bp, synthetic construct
  source 1..120: mol_type = other DNA
tgagtttatctatggatgaaatatttttataatgtttgttcctatgtttgtctaagcatatggatatgaggctgtgctatgtccatggctgaaaaagtgtgatactggggggctgtttag

SEQ ID NO: 26264 - DNA, 120 bp, synthetic construct; identical to SEQ ID NO: 8013
  source 1..120: mol_type = other DNA

SEQ ID NO: 26265 - DNA, 120 bp, synthetic construct
  source 1..120: mol_type = other DNA
ggttctatctctccctatatttgaggagaggcagctccatgcagggtcactgtgtataaatacttacatccaagaggaactccaccaagacatcagctgcaaactcgccatcaaactcta

SEQ ID NO: 26266 - DNA, 120 bp, synthetic construct
  source 1..120: mol_type = other DNA
ggctgagggtttctgggtgacagtggggtcaggattagtggaactagcattaaccaaagaagcagttgccttgaaataacacttttgaagagctcctgaagtgaacatttaattggaaat

SEQ ID NO: 26267 - DNA, 120 bp, synthetic construct
  source 1..120: mol_type = other DNA
atacagctgatcccatgtcattctctttatcaaagaattgtaatggccactgcccacctgactccttaaccttgctttaaagtccctccaaaatctgtttccaaatctatccctttcatt

SEQ ID NO: 26268 - DNA, 120 bp, synthetic construct
  source 1..120: mol_type = other DNA
ttatatgaaaaggtgagtaaaggaaaagtcactgagcattattctctagacttagtttttcttgttctcccagcctggaatgacctccatcttgcttagcttcttcaggtctcagcttag

SEQ ID NO: 26269 - DNA, 120 bp, synthetic construct; identical to SEQ ID NO: 8014
  source 1..120: mol_type = other DNA

SEQ ID NO: 26270 - DNA, 120 bp, synthetic construct
  source 1..120: mol_type = other DNA
tcttcttattttgctgccctttagcacccttggtctgatgttgtgtaccttaacaaatgcttgttggaaaaatgcattttcctccttaggaatgttaaataaacaaagctggcatttagt

SEQ ID NO: 26271 - DNA, 120 bp, synthetic construct
  source 1..120: mol_type = other DNA
gctgtgtcccaaggcatgcatgaggtataagcagcctctggcacatgggcgggaaatggtagaggcaccatttgtaaatcaaaaggagcaatgtgccaggtattctttttgtttgtttgt

SEQ ID NO: 26272 - DNA, 120 bp, synthetic construct
  source 1..120: mol_type = other DNA
ttcatatataagtatatatgaaaaattatatattttttatatatgaaaaattatactatatatgtatattacaagcatgagacaccgtgtctggccctgccagattttcttgatatcaat

SEQ ID NO: 26273 - DNA, 120 bp, synthetic construct; identical to SEQ ID NO: 8015
  source 1..120: mol_type = other DNA

SEQ ID NO: 26274 - DNA, 120 bp, synthetic construct
  source 1..120: mol_type = other DNA
cccaaaatttttagatcactgggacactagtatttttctctaactaaatttgctggaaattctcccaaatgcaacttctcattaaaccaatgggaaggcagaagaagaatcaagagactg

SEQ ID NO: 26275 - DNA, 120 bp, synthetic construct
  source 1..120: mol_type = other DNA
tcactgcaagctctgcctcccaggttcacgccattctcctgcctcagcctcccgagtagtgggactacaggcacccgccaccatgcccggctaatttgtttgtatttttagtagagacgg

SEQ ID NO: 26276 - DNA, 120 bp, synthetic construct
  source 1..120: mol_type = other DNA
tacactgtgcccagccattaaactgtttttgactctagggaaagagtttaacatattttgctcccatactcaagggagaaaaatatccctcaatgtgtctccagggaaagagacatccca

SEQ ID NO: 26277 - DNA, 120 bp, synthetic construct; identical to SEQ ID NO: 8016
  source 1..120: mol_type = other DNA

SEQ ID NO: 26278 - DNA, 120 bp, synthetic construct
  source 1..120: mol_type = other DNA
cccaaagtgcccagacattcttaataactcattatcattgtatagtcctaaatagtttcctataatttaaatcttttttttaaaaaaagactggtcttcttgaaaataaaatagaaaaca

SEQ ID NO: 26279 - DNA, 120 bp, synthetic construct
  source 1..120: mol_type = other DNA
caaagatcctgttttataacccgctattttttttaatagccattcttcactggtcatgcagaaaaagccaaatgggcagtacatgtgtgtcagtgtttgaaaatcagaggagcgggccgg

SEQ ID NO: 26280 - DNA, 120 bp, synthetic construct
  source 1..120: mol_type = other DNA
agcctggccaacatggtgaaaccctgtctctcataaaaatacaaaaaaaaaaaatgaactgagcgtggtggcgtgtgactgtaatctcagctactcaagaggctgaggcacaagaatcgc

SEQ ID NO: 26281 - DNA, 120 bp, synthetic construct; identical to SEQ ID NO: 8017
  source 1..120: mol_type = other DNA

SEQ ID NO: 26282 - DNA, 120 bp, synthetic construct
  source 1..120: mol_type = other DNA
ctgttaccctggaattattactattaatgctgtcttttgttggctgcttcagccgcaaggcaacgaaataatacatgatgaaagaagagaatttttaactctctcagagagatcaccaca

SEQ ID NO: 26283 - DNA, 120 bp, synthetic construct
  source 1..120: mol_type = other DNA
ccaggaagaaaccctcttcatcgtactgatacaacaatctcttacatgattaatgtgaaaccattcaattcaggcctatatttacttttatgaaactcttctccaaccaaagatgaaggt

SEQ ID NO: 26284 - DNA, 120 bp, synthetic construct
  source 1..120: mol_type = other DNA
cacttacccagtttcttggcaagcttggcttctttcttggcatccaccatcacaaagcctatagctttatgttcaaggacctgggccacaagctgaagaaacaaatggaaagatgagtgt

SEQ ID NO: 26285 - DNA, 120 bp, synthetic construct; identical to SEQ ID NO: 8018
  source 1..120: mol_type = other DNA

SEQ ID NO: 26286 - DNA, 120 bp, synthetic construct
  source 1..120: mol_type = other DNA
tgggaacacaagaggacctaagaataaaggaggcctatgtcctcaatatccaaacattgcgctcaattcccccactcctgggcttgtgaagtaggaatgcccattgggtgaatagacctg

SEQ ID NO: 26287 - DNA, 120 bp, synthetic construct
  source 1..120: mol_type = other DNA
ttctctgggtagacaccagcatagatgatgacatcaagcacaagattggcattatgttaagcttcctgcaatgcagatatgagcaagtaggcaatacttgcttacttcaggactgagacc

SEQ ID NO: 26288 - DNA, 120 bp, synthetic construct
  source 1..120: mol_type = other DNA
agattaacatgcagttgtgagaaataatacagagagatatcttgtacattttacccagtttccctcaacagtaacatcttgcaaaacggaggtacaatgttacaaattggatattaacat

SEQ ID NO: 26289 - DNA, 120 bp, synthetic construct; identical to SEQ ID NO: 8019
  source 1..120: mol_type = other DNA

SEQ ID NO: 26290 - DNA, 120 bp, synthetic construct
  source 1..120: mol_type = other DNA
attcactcattaaaggatatgtgggttgttcccagtgattggctagtatgaatacagctgctataaagtttagtgtataggtttttgagttaaatattagtcttaatttctctgagataa

SEQ ID NO: 26291 - DNA, 120 bp, synthetic construct; identical to SEQ ID NO: 957
  source 1..120: mol_type = other DNA

SEQ ID NO: 26292 - DNA, 120 bp, synthetic construct
  source 1..120: mol_type = other DNA
tcatttttcaactggattgctttttggctgttgaattttgagagtttttttaaataccagtcctttttcagatatatggtttacaagcatttttttttactctgtatgtgtgttatttca

SEQ ID NO: 26293 - DNA, 120 bp, synthetic construct
  source 1..120: mol_type = other DNA
atttatcacttttttgtgttgagaacattcaatatcctaatcatttcatcttcttaataggatctttcacagaacaaaaattgtcaattttgatgaagtccagttgatcacttttttcat

SEQ ID NO: 26294 - DNA, 120 bp, synthetic construct; identical to SEQ ID NO: 8020
  source 1..120: mol_type = other DNA

SEQ ID NO: 26295 - DNA, 120 bp, synthetic construct
  source 1..120: mol_type = other DNA
atcaagtatatctgaaagcaggtagactatctcttttcactttattctttatttttctaaattgctttaactatcctagtcctttagcatttttgtataaacttcagaataatcttgttt

SEQ ID NO: 26296 - DNA, 120 bp, synthetic construct
  source 1..120: mol_type = other DNA
atttatttgatcttctttggtttctttcatcagcattgtatagttttcagcctacaagtctggcacacattttgttagatttatatctaatcagttaaattatttcagctactgtaaatt

SEQ ID NO: 26297 - DNA, 120 bp, synthetic construct
  source 1..120: mol_type = other DNA
tccttgggatttttctaggtagacaattttgtcacctgctaataatttcttcctttttctgcatgccattttatttctttatctttacttactgcactggtgagaacttctagcactatt

SEQ ID NO: 26298 - DNA, 120 bp, synthetic construct; identical to SEQ ID NO: 8021
  source 1..120: mol_type = other DNA

SEQ ID NO: 26299 - DNA, 120 bp, synthetic construct
  source 1..120: mol_type = other DNA
tatcttaaggtttttctttgcatatttattcttccctcccagaccttttcatctgttcccagcctctttctttctctctggcttctaactgtttcccttcttcgaagagcaaggattgtg

SEQ ID NO: 26300 - DNA, 120 bp, synthetic construct
  source 1..120: mol_type = other DNA
aataagcctacccccacccccacccctcattcagctttctcttatttcttttattttgcctgtaactaggcaacacttaagatgaaaggcatcatcagtgtttatgtatgactcatgttg

SEQ ID NO: 26301 - DNA, 120 bp, synthetic construct
  source 1..120: mol_type = other DNA
ccctgtgttctatttagtgctgtcaaaatcttaagttaaatgttcccttgtatatcactcagagtcagtaatgatggtacctaatggctttgcggtatagtaagtttccttactcctagt

SEQ ID NO: 26302 - DNA, 120 bp, synthetic construct; identical to SEQ ID NO: 8022
  source 1..120: mol_type = other DNA

SEQ ID NO: 26303 - DNA, 120 bp, synthetic construct
  source 1..120: mol_type = other DNA
aaacagagaacttaactctgatctctcctaggtacgcactaccatgttttatttggttttaggtagatccaaatgtgtgcctctcgtaggcatgtaaagcatggccttctggttatctta

SEQ ID NO: 26304 - DNA, 120 bp, synthetic construct
  source 1..120: mol_type = other DNA
cctggttaactaaatacagccaatcactgtcctgtgccatagatggagaaacagagcaggcaataacacatgggccaggatcccatgcctaactgagactttcccacctcctctttggca

SEQ ID NO: 26305 - DNA, 120 bp, synthetic construct
  source 1..120: mol_type = other DNA
ggagccaagggtgccaggtaggtgattcctgacatggcagccaggagcctctgctgggccagtggggcaggcaggagtctgtctacctctcacatttggcttggccttgcctccaccttt

SEQ ID NO: 26306 - DNA, 120 bp, synthetic construct; identical to SEQ ID NO: 8023
  source 1..120: mol_type = other DNA

SEQ ID NO: 26307 - DNA, 120 bp, synthetic construct
  source 1..120: mol_type = other DNA
ggtggattggtccaagtacttcacaagttcaagggccttgtgagccaaggagttagaagcacttgtcatcaaatacagtgacaaagagttacatacgtgagaaaaaaaggtagagtcaat

SEQ ID NO: 26308 - DNA, 120 bp, synthetic construct
  source 1..120: mol_type = other DNA
agtccatcctagtgaatggggttgtctcttatcggttggttatatgcagcctctgggcattggtcagtgctcattctttctagaaacattaggatttgctttaaccattgctgattcttt

SEQ ID NO: 26309 - DNA, 120 bp, synthetic construct
  source 1..120: mol_type = other DNA
tcactgaagccttgacctcccaggttcaagcaatcctcccacctcagtcccctgagtagctgggactacaggcctgcaccaacacacttggctaattgtctaagttttgtcgagataggg

SEQ ID NO: 26310 - DNA, 120 bp, synthetic construct; identical to SEQ ID NO: 8024
  source 1..120: mol_type = other DNA

SEQ ID NO: 26311 - DNA, 120 bp, synthetic construct
  source 1..120: mol_type = other DNA
cccagttgttaagtgcacagggcttggaatcagagacccgtattattgacttgtccacaagcctgtgctgtgactccagtgtaaaaagtggacaataccaatatctattcaatgggactg

SEQ ID NO: 26312 - DNA, 120 bp, synthetic construct
  source 1..120: mol_type = other DNA
atcttgtgccaattcaaaaatgccatagtgtaaagtgttataatggaaagagaacaattattaattgagaacctactgtgttaacaaaaatgtgtaagacacgtgtcagctccaagggcc

SEQ ID NO: 26313 - DNA, 120 bp, synthetic construct
  source 1..120: mol_type = other DNA
gatagagatcatcctggctaacacggtgaaacaccatctctgctaaaaaaaatacaaaagaattagccgggcttggtggcaggagcctgtagtcccagctactcgggagactgaggtagg

SEQ ID NO: 26314 - DNA, 120 bp, synthetic construct; identical to SEQ ID NO: 8025
  source 1..120: mol_type = other DNA

SEQ ID NO: 26315 - DNA, 120 bp, synthetic construct
  source 1..120: mol_type = other DNA
aaaacatcaagcttattcctggctcaggtgtttgcacaggatcacctccttcagctgtgctctcaagccctaggccagttgaagcttcagcttcttgcagggacgccttgttctaattca

SEQ ID NO: 26316 - DNA, 120 bp, synthetic construct
  source 1..120: mol_type = other DNA
ctcaaaaggcattccctgactcccaatctcaatttttccctttttacccttgatcatcacactccatgcttttcctttgcaaccatttcacagttgcaagtgcacattaatttatatgat

SEQ ID NO: 26317 - DNA, 120 bp, synthetic construct; identical to SEQ ID NO: 8026
  source 1..120: mol_type = other DNA

SEQ ID NO: 26318 - DNA, 120 bp, synthetic construct
  source 1..120: mol_type = other DNA
aagaagtcctgtgttaaaatcacattagaaaaaaagtgtgaaggacttaactactaggactggaagctctgatttggggatcgtctgagtagaagagtaatatgactaagttgtgtttgg

SEQ ID NO: 26319 - DNA, 120 bp, synthetic construct
  source 1..120: mol_type = other DNA
agttgagaatcagtcagacctggtaagtcttccttggttttggagagaaaagggagagagatcaaagaagagggaggaggcaaaatagtttgagggtctcccatgaggaaacaaagtgga

SEQ ID NO: 26320 - DNA, 120 bp, synthetic construct
  source 1..120: mol_type = other DNA
ctcgggggagaggtcctgcgtgagaggtcaaggcttgaggacaggtgacatctttgggagacgagtatgaaagaaagccacagggtcaagggctggctgtctcagaaggaagagaaagaa

SEQ ID NO: 26321 - DNA, 120 bp, synthetic construct; identical to SEQ ID NO: 8027
  source 1..120: mol_type = other DNA

SEQ ID NO: 26322 - DNA, 120 bp, synthetic construct
  source 1..120: mol_type = other DNA
gaccccacccaatccagtctcttcataggacttaccagctctaacccagggaaagacaggaagaaagttatatttgtaccatttcccaagaactgtctttgtagaggagaaagactaatt

SEQ ID NO: 26323 - DNA, 120 bp, synthetic construct
  source 1..120: mol_type = other DNA
tggggattactttctgcagggccaagaatctgaaaaaaaaaaagttgagcctcggggaaaatgtcacagatctctgctccaagtgaatgtccctcaggccagtcattaaaaacaccctgg

SEQ ID NO: 26324 - DNA, 120 bp, synthetic construct
  source 1..120: mol_type = other DNA
gagagccgacgtttctctccggtaatctcctgtcactttctgccgccctcaaagtaggcctgagctatgtatagctgggcagttggcatgtgatgtgttcacgaaggaggctggctcaat

SEQ ID NO: 26325 - DNA, 120 bp, synthetic construct; identical to SEQ ID NO: 8028
  source 1..120: mol_type = other DNA

SEQ ID NO: 26326 - DNA, 120 bp, synthetic construct
  source 1..120: mol_type = other DNA
taaccaacttgcctggggacacacagagcttaagtgacccagctaggatctcaaccctgacactctggctccagagcccgaactttcatctgttaccttttgttcctatacctgggcctc

SEQ ID NO: 26327 - DNA, 120 bp, synthetic construct
  source 1..120: mol_type = other DNA
acaagtacgtagtgaaagttccctaccaattaactacagggcaaaccccactacactaagtcagtggttttagaacctgggtgcacatcagcattccctggaggggcagccagtaaaaag

SEQ ID NO: 26328 - DNA, 120 bp, synthetic construct
  source 1..120: mol_type = other DNA
agagctgtggctcttccagtctctaacacaaaatcacaatcttttattgcgtagcattttgccatgtccaaactgacagaatgagggaagctgtccctgaaggccaggtttgttttgttt

SEQ ID NO: 26329 - DNA, 120 bp, synthetic construct
  source 1..120: mol_type = other DNA
cagtctggaagcccaggccctgacctcctctggtagtccctccctcaaactctccttgggaaaaagtttcacatgatactcagtgctttctggagccagagagatcatccctttttaaac

SEQ ID NO: 26330 - DNA, 120 bp, synthetic construct; identical to SEQ ID NO: 8029
  source 1..120: mol_type = other DNA

SEQ ID NO: 26331 - DNA, 120 bp, synthetic construct
  source 1..120: mol_type = other DNA
aaaacctctatgaggagcgtactgtggcttagattttataaaggaagcactcagccttgaggagctaagtgacccgcctgcagtcacacagctagtgcaaggactcaatcccagctggct

SEQ ID NO: 26332 - DNA, 120 bp, synthetic construct
  source 1..120: mol_type = other DNA
agaggtgtgtggtcgggctaacagttagatatccgaggccagagtaattgtgtgtgttgtataggtagaagcaggtgagcatgtgagggagtacctgttggctctcctggacacccagct

SEQ ID NO: 26333 - DNA, 120 bp, synthetic construct; identical to SEQ ID NO: 8030
  source 1..120: mol_type = other DNA

SEQ ID NO: 26334 - DNA, 120 bp, synthetic construct
  source 1..120: mol_type = other DNA
gcagagtagggctgctgagtaaagaaaaatcttgtgatttggaatcagattttatttcttacttttaattttactgccttatatcataatagcccttataatatttctgcagtggtgact

SEQ ID NO: 26335 - DNA, 120 bp, synthetic construct
  source 1..120: mol_type = other DNA
gttcaagaccagcccagccaacatgacgaaaccccgtatctactaaaaatacaaaaattagctgggcagggtggcacacgcctgtagtctcagctactcaggaggctgaggcagaagaat

SEQ ID NO: 26336 - DNA, 120 bp, synthetic construct
  source 1..120: mol_type = other DNA
tacctttgggaggaggtctacctcaggaatgttatgaataggtgtcctatttgggcttgcgcaataccgggggctttggagataggagtagtgagaaaaggttccaatggtctaaaaact

SEQ ID NO: 26337 - DNA, 120 bp, synthetic construct; identical to SEQ ID NO: 8031
  source 1..120: mol_type = other DNA

SEQ ID NO: 26338 - DNA, 120 bp, synthetic construct
  source 1..120: mol_type = other DNA
gccaaaccaaaataagtctgacctcatctaatttttcagagtggagcaggtgtgaatttggagattgccatttttggtcagtgaacagttggaaaaaaaatacctgaatcctgtgtgtgt

SEQ ID NO: 26339 - DNA, 120 bp, synthetic construct
  source 1..120: mol_type = other DNA
agtgctaaataggtttagaacaagggtcagccttataaagcttggaggcttctgcccacgtgcatatatattttgggctaagaatcccatggcttaaaaaaaatcaattttacccatatt

SEQ ID NO: 26340 - DNA, 120 bp, synthetic construct
  source 1..120: mol_type = other DNA
tatattttcagtataagcaatttatttctaattcttgacctttcccttcttcccctctccatccaaccatccagcaaacatttattaaattccaagtgccaagcaacagcccattggctc

SEQ ID NO: 26341 - DNA, 120 bp, synthetic construct
  source 1..120: mol_type = other DNA
caaacatgaagcaatccctttcagctgctccttggcatactggaagggacatgtcatttgaaacaaataggtttgggttcaaactctgcttcacaatctaatgttttatagctttgtgag

SEQ ID NO: 26342 - DNA, 120 bp, synthetic construct; identical to SEQ ID NO: 8032
  source 1..120: mol_type = other DNA

SEQ ID NO: 26343 - DNA, 120 bp, synthetic construct
  source 1..120: mol_type = other DNA
tttgatccccaatgttggaggtggggcctaatgggaggtcttggggtcatggaggtgaatcccttatgaatagattaatgtcctccgtgggtggggcagtgactgagtgagttctcactc

SEQ ID NO: 26344 - DNA, 120 bp, synthetic construct
  source 1..120: mol_type = other DNA
ttctgccatgagtggaagcagcctgtggccctagccagatacagatacccaatcttcaactttttcagacatcagaattgtgagccaaataaaccttttattctttataaattacctagt

SEQ ID NO: 26345 - DNA, 120 bp, synthetic construct
  source 1..120: mol_type = other DNA
gtgcatggaaagtgtgatttacataggttgtcagggagataacttctttgataaagtgacatttaagcatagacctaaaggaagtgagttcttatcatcaataaaagagggacatttccc

SEQ ID NO: 26346 - DNA, 120 bp, synthetic construct; identical to SEQ ID NO: 8033
  source 1..120: mol_type = other DNA

SEQ ID NO: 26347 - DNA, 120 bp, synthetic construct
  source 1..120: mol_type = other DNA
ttcaccagatgcagctgccaattttgaactttccagccactagaatcatgagccaagtaaacctctttttatagatgacccagcctcaggtattctgttatagcaacactaagcagactt

SEQ ID NO: 26348 - DNA, 120 bp, synthetic construct
  source 1..120: mol_type = other DNA
tttcccatggtttccattaaacatcataacatcttaatatcccacttccatctaccttcagggttcttagatttgccatctcttttggggaaagggctaatgtgccacagcaaccaaata

SEQ ID NO: 26349 - DNA, 120 bp, synthetic construct
  source 1..120: mol_type = other DNA
ttaaaagccaggcaattcaactagaaagatctcaaatagggtaatacttctcaagtcccagatcatttccttctaaggaggtccaaaggattagtcactgattgtgtgagtgatgggtca

SEQ ID NO: 26350 - DNA, 120 bp, synthetic construct; identical to SEQ ID NO: 8034
  source 1..120: mol_type = other DNA

SEQ ID NO: 26351 - DNA, 120 bp, synthetic construct
  source 1..120: mol_type = other DNA
acgacacagggatctcatttaaatgctaagtttgattctgagatatggcctgagattctttgtttttaacagggtccaagtgatgccatttgctactggtctggggtccgcctttttatt

SEQ ID NO: 26352 - DNA, 120 bp, synthetic construct
  source 1..120: mol_type = other DNA
gtagctgagctgctctcagccttggggtccacattttaagcgtcaggtttcaagtggccttcaaacttggctgcatcttaacagcactcagaaagcttttaaaaactgtagcatctggac

SEQ ID NO: 26353 - DNA, 120 bp, synthetic construct
  source 1..120: mol_type = other DNA
tcgactaagaacacgtgtaaaagttcaagtgactagtgaagaaaattcacattgataagcacccactatacttcaagcactcaattagtcattctattaatacatagatgaatttcttca

SEQ ID NO: 26354 - DNA, 120 bp, synthetic construct; identical to SEQ ID NO: 8035
  source 1..120: mol_type = other DNA

SEQ ID NO: 26355 - DNA, 120 bp, synthetic construct
  source 1..120: mol_type = other DNA
gcagaagaattgcttgaacccggaaggaggaggttgcagtgagctgagattgccccactgcactccagcctgggcaacagaataagactcagtcaaaaaaaaaagaagaagaagaagaag

SEQ ID NO: 26356 - DNA, 120 bp, synthetic construct
  source 1..120: mol_type = other DNA
tgcacatgagtcttgtcaatgatgatgctgggcacattgcaaagcctgaagaggctacagtcactctccgctaaagtttactttttattgatatacagatagtttaggagaccgaggccc

SEQ ID NO: 26357 - DNA, 120 bp, synthetic construct; identical to SEQ ID NO: 8036
  source 1..120: mol_type = other DNA

SEQ ID NO: 26358 - DNA, 120 bp, synthetic construct
  source 1..120: mol_type = other DNA
atggtagcagagcatcccaacagcctctattggtgagctaaaatgagaccttcttaagcaggaaaagcagaagaactacaccaagtgtacaccgggcagcagccttagactttgaactct

SEQ ID NO: 26359 - DNA, 120 bp, synthetic construct
  source 1..120: mol_type = other DNA
aagactccagataccctgactgagcaagggacctatttcaccctaaatgaatgaaccaagctttactgttcagaatctggaaagtattgcttgttccttatccatacattcaatgataca

SEQ ID NO: 26360 - DNA, 120 bp, synthetic construct
  source 1..120: mol_type = other DNA
agctgcctgaaaaaatcccccatagctttccttaatccaataaatgcatgttggttacaggttagtctatttagttgctattccccactctccaccctgccacccaaaacacatatacat

SEQ ID NO: 26361 - DNA, 120 bp, synthetic construct; identical to SEQ ID NO: 8037
  source 1..120: mol_type = other DNA

SEQ ID NO: 26362 - DNA, 120 bp, synthetic construct
  source 1..120: mol_type = other DNA
gtatagagggctcaggaactcacaatgtggaggccatgttgctcatgcctggccagctggggctccacctgtcatgttgtcatgtgaccagtgcatttatttagttgtgtttttgagtcg

SEQ ID NO: 26363 - DNA, 120 bp, synthetic construct
  source 1..120: mol_type = other DNA
ctattacgaagtttgattttaattcaggttgttttcatgaggcttctaatctagagggaaaaatccaacccatgtctccatggggggaaagagtaaggtagaaaggattagaaggaaact

SEQ ID NO: 26364 - DNA, 120 bp, synthetic construct
  source 1..120: mol_type = other DNA
aaaatggggcaaggcctaatttaataaatggcatggatgaggtgattggacatagccgacacaggctcagcaaagccttgagagcagagggaatgccaaacaggagtacatcgagagcga

SEQ ID NO: 26365 - DNA, 120 bp, synthetic construct; identical to SEQ ID NO: 8038
  source 1..120: mol_type = other DNA

SEQ ID NO: 26366 - DNA, 120 bp, synthetic construct
  source 1..120: mol_type = other DNA
catgccatctctcaagcacttcaacctgagggaaatggtgacatttctcaactcaggttgagaaatgaaggactttctctggcaatatttataggacatgataggagcagtggcttgcac

SEQ ID NO: 26367 - DNA, 120 bp, synthetic construct
  source 1..120: mol_type = other DNA
actaaatttactatcttggtggaagctgtaagagacagcatgcaaaattgcaactccctttataatttgtgttgacaccccaatagaaaaatgagaaaaggcatagaaaaataatttatg

SEQ ID NO: 26368 - DNA, 120 bp, synthetic construct
  source 1..120: mol_type = other DNA
agatccaaatatagggtaattattttaaaaatatgtatgatgatacagtggaatactatgctggtattaacattactgtttaataatatagaaatacaatatatggatgtgaaaaaaagc

SEQ ID NO: 26369 - DNA, 120 bp, synthetic construct
  source 1..120: mol_type = other DNA
ttttattgccttttagttcttttccacatactctgaaatttctaaatcatatatgctgctttgttgatgaagaatacccaaggaatcagaactgccagctgtttaagtcagggttacagc

SEQ ID NO: 26370 - DNA, 120 bp, synthetic construct; identical to SEQ ID NO: 8039
  source 1..120: mol_type = other DNA

SEQ ID NO: 26371 - DNA, 120 bp, synthetic construct
  source 1..120: mol_type = other DNA
agggacaaaaatcttaccctaaagaaatgaggccctcttggccaaattttaggaaaaagctagcaggtggaaaaatacttgagagccatcagaatatttgctgttttgccagtaaattcc

SEQ ID NO: 26372 - DNA, 120 bp, synthetic construct
  source 1..120: mol_type = other DNA
cttccatgttcagctgtgagccacttgagggtctcattttccccgtatccacagcatctatcccagggccccaacaaaaattaggtggcagatgcatgactaattgaatggtatttcaag

SEQ ID NO: 26373 - DNA, 120 bp, synthetic construct; identical to SEQ ID NO: 8040
  source 1..120: mol_type = other DNA

SEQ ID NO: 26374 - DNA, 120 bp, synthetic construct
  source 1..120: mol_type = other DNA
gtgtgtgtgtctgtgtgtgtctgtatatactgggtcatagtcggttatgataaaaagtgtcagaagccgccttaagctgcgagggggaagggagctgcctcccctccagctatttgtccg

SEQ ID NO: 26375 - DNA, 120 bp, synthetic construct
  source 1..120: mol_type = other DNA
tctagaggattaagaggacaaaatagatgttttgaccatgaagaaagtttaaaggcatgttcgctctttccactcatggacttcccggagccattttttcccttgatgctgcgcctgaca

SEQ ID NO: 26376 - DNA, 120 bp, synthetic construct
  source 1..120: mol_type = other DNA
tgtacagctggcatcatcagacccgggtccagaggctgagcaactctgtttaaggaagactcttgaaaccatcttaaacaggctacccagaagccccttgggcgttttcgcactgatttc

SEQ ID NO: 26377 - DNA, 120 bp, synthetic construct
  source 1..120: mol_type = other DNA
acctacttaatagaattattgtaaggattaaacaagctaacacataccaagtgcttagaacagtccctgcacttagtaagcatttaatcaacattattattatttaatcatttcttaagc

SEQ ID NO: 26378 - DNA, 120 bp, synthetic construct; identical to SEQ ID NO: 8041
  source 1..120: mol_type = other DNA

SEQ ID NO: 26379 - DNA, 120 bp, synthetic construct
  source 1..120: mol_type = other DNA
gcacccactgtgaaaagggcactcttggatcaaaggtgtctggagggatggtaagcccaggggaagtttctgttcatgattttgcatagtctttggggacagatatacttgggggagcta

SEQ ID NO: 26380 - DNA, 120 bp, synthetic construct
  source 1..120: mol_type = other DNA
ttttttaaaaaaaattagaatcagaaatgaatgtccttgcctgtactggccacccaaaggcattcttttggagttctaggctaactggacagcgatgagcatataggggagaatccttat

SEQ ID NO: 26381 - DNA, 120 bp, synthetic construct; identical to SEQ ID NO: 8042
  source 1..120: mol_type = other DNA

SEQ ID NO: 26382 - DNA, 120 bp, synthetic construct
  source 1..120: mol_type = other DNA
aacctgagttctctgattgtgctggttaataaactgtaattctcaaatatccctttcacaggtttgcgcctgggctaggcgtggagactgatgaggcatcttggtgcccactagcattct

SEQ ID NO: 26383 - DNA, 120 bp, synthetic construct
  source 1..120: mol_type = other DNA
caggcaggccatgtaatgcggataaaataagaactgacttcagctctgccctaaagtcacaccaagaactttctgagaaaaaaaatcacataaatgaatatgctgctcagaagatctgca

SEQ ID NO: 26384 - DNA, 120 bp, synthetic construct
  source 1..120: mol_type = other DNA
catggggagatttgagggagcaaagtgggcacactgaatgaaatccacaagtagtccctggatttcatttcagccaacagttttaacaatagtttctacattctatctgggaaacaatgg

SEQ ID NO: 26385 - DNA, 120 bp, synthetic construct
  source 1..120: mol_type = other DNA
tcttcatttgaagagttaggacccacccctcattgttcacacatcccagctgtgtgacaagggcatctgattcacgtgaggccaaaataaagcagagttcagtatatattctctgcatcc

SEQ ID NO: 26386 - DNA, 120 bp, synthetic construct; identical to SEQ ID NO: 979
  source 1..120: mol_type = other DNA

SEQ ID NO: 26387 - DNA, 120 bp, synthetic construct
  source 1..120: mol_type = other DNA
tttgggaaaacttttgtttctcgttcccaaatatgctgtgtgcagaatagaggacagaagactgttagaggccttgttgagccaaggagagagcagacaggctgattttctctcttcttt

SEQ ID NO: 26388 - DNA, 120 bp, synthetic construct
  source 1..120: mol_type = other DNA
ggctgagttttatgacgggcccggtgctgaagggcagggaacaacttgatggtgctactttgaactgcttttcttttctcctttttgcacaaagagtctcatgtctgatatttagacatg

SEQ ID NO: 26389 - DNA, 120 bp, synthetic construct; identical to SEQ ID NO: 1025
  source 1..120: mol_type = other DNA

SEQ ID NO: 26390 - DNA, 120 bp, synthetic construct
  source 1..120: mol_type = other DNA
tttccctcctggattgttaacatcttggaatacttccccaggcagtctggaagttattggtctcttgcaataattttatgttcctctttgtctgctggattctttgtaaggttagaatat

SEQ ID NO: 26391 - DNA, 120 bp, synthetic construct
  source 1..120: mol_type = other DNA
tgagcattgttttctgaataagaatgcctttcaaatatcatggattaagaacagtctaaaggaagattctacgcattatcagaatcattgaatatatttctgtaaaatggctacaagata

SEQ ID NO: 26392 - DNA, 120 bp, synthetic construct; identical to SEQ ID NO: 8045
  source 1..120: mol_type = other DNA

SEQ ID NO: 26393 - DNA, 120 bp, synthetic construct
  source 1..120: mol_type = other DNA
tagtcatgaaaatgctgaacaaattggaatacaaacttccatagaaataaatatttaagtgctaaatgtaaagatagctaggagaaattattagacaatttttattgcacataactaaac

SEQ ID NO: 26394 - DNA, 120 bp, synthetic construct
  source 1..120: mol_type = other DNA
ggaggggtagatatacaatgaaatgtcttcagttatattcagcccatggacacaaaagaaaagaaacacccattttccttgttcccttaatttcctctcctccttacccctcctctcctt

SEQ ID NO: 26395 - DNA, 120 bp, synthetic construct; identical to SEQ ID NO: 8046
  source 1..120: mol_type = other DNA

SEQ ID NO: 26396 - DNA, 120 bp, synthetic construct
  source 1..120: mol_type = other DNA
gactacaaacttaggggttttagctcaaaaaattgcaacatatttgtagttgcctcgtggttgcaagctttttataagcactgtggctatttttcttcccaatccaactttagtgggggg

SEQ ID NO: 26397 - DNA, 120 bp, synthetic construct
  source 1..120: mol_type = other DNA
taagctcaaaaagagttgaaagagaactgttcagcctattttttttgtcatgagtaaaagtaaagttgaagtgacttaagacagtacatcttatgttccctgtgggttttacaaggaaat

SEQ ID NO: 26398 - DNA, 120 bp, synthetic construct; identical to SEQ ID NO: 8047
  source 1..120: mol_type = other DNA

SEQ ID NO: 26399 - DNA, 120 bp, synthetic construct
  source 1..120: mol_type = other DNA
ttcctgtagattataaacatgccaagttttaagtacaaagatgcgtcacctagtggctgacaagccaggttaccatttacataacgaatgccaatattaatgttatgtagctggctttgg

SEQ ID NO: 26400 - DNA, 120 bp, synthetic construct
  source 1..120: mol_type = other DNA
caatggtaacaatattcagagtctttttggaaattagcttaaatgttacggccacttaaaaattctacatatgactattgtttaaatacatttttcatgtctctgatgtagtccttattt

SEQ ID NO: 26401 - DNA, 120 bp, synthetic construct
  source 1..120: mol_type = other DNA
ttgagtttctatattttgctacagtgataattccagtaaaataaactgtaggcctctagttgttttagaattttaaaactgtaaatggactcagagaatcagtttcttattagacgtcat

SEQ ID NO: 26402 - DNA, 120 bp, synthetic construct; identical to SEQ ID NO: 8048
  source 1..120: mol_type = other DNA

SEQ ID NO: 26403 - DNA, 120 bp, synthetic construct
  source 1..120: mol_type = other DNA
ttcttaattttgtaactatttgtcattgaaaggagatactaaaaaaattatatatcgtcctagaaagtacatgaactaataatgcatttctaaaggtgaaaaaagaataggtatttttct

SEQ ID NO: 26404 - DNA, 120 bp, synthetic construct
  source 1..120: mol_type = other DNA
cactttgtgtttttcatccatgataccttgtatttacttacctgagctttttttctagggaaagaaaaatgctcaggtaataacagagccttgaaaaatttggattttcaaaactaccta

SEQ ID NO: 26405 - DNA, 120 bp, synthetic construct
  source 1..120: mol_type = other DNA
gaaagcaaatccactggaacaattctgggaaagaaggaaagactgtgattaaatgcctcttaactacttcagattcctggattgatgtcttatctacaggcttctttttaaaaatcaaga

SEQ ID NO: 26406 - DNA, 120 bp, synthetic construct; identical to SEQ ID NO: 8049
  source 1..120: mol_type = other DNA

SEQ ID NO: 26407 - DNA, 120 bp, synthetic construct
  source 1..120: mol_type = other DNA
gaaagatgttattgcttttgctggacatgaggaacagttgtaaagtttccaggtctacaataactttctggaaccctctcagtgaactgtttcttgtaaaagttttccctaagataaaag

SEQ ID NO: 26408 - DNA, 120 bp, synthetic construct
  source 1..120: mol_type = other DNA
caaaggggaaactttgcctgtttcatgtcaagatgacaacggaaaaaatgagatagctattcttacataaatcatttgtgaactgcagttgggggagttacattaaccaccagagtttca

SEQ ID NO: 26409 - DNA, 120 bp, synthetic construct
  source 1..120: mol_type = other DNA
cagattaactaataaaacccttgtttttttccatgactgaggtcaagcactgctgtttaaaatgtagtcttaatgaacaaaatgaaacgttgaaagaggacgagtcaaaatgcccaaaag

SEQ ID NO: 26410 - DNA, 120 bp, synthetic construct; identical to SEQ ID NO: 8050
  source 1..120: mol_type = other DNA

SEQ ID NO: 26411 - DNA, 120 bp, synthetic construct
  source 1..120: mol_type = other DNA
ggtactattgttgttagaaccctacttttttgtatatagcaaaatgtatgcagggtttctgagtcacacatttattctgttggtggtctggatgtcatcagggtagctttagagatataa

SEQ ID NO: 26412 - DNA, 120 bp, synthetic construct
  source 1..120: mol_type = other DNA
tatctagattcagattttaaccttgcagggataaaaaatcatatgggacagagctttggagttggcttctttaatcgtactcagttttgaaatagcagaaagaaaatagaatgcagtaat

SEQ ID NO: 26413 - DNA, 120 bp, synthetic construct
  source 1..120: mol_type = other DNA
aggattatgacagctgtaagctcataaggcctttgggagtatgaagcaaaatagatattcaaactactcagagcagtccctacaagataggaggtactatagcactagttttactaacgc

SEQ ID NO: 26414 - DNA, 120 bp, synthetic construct; identical to SEQ ID NO: 8051
  source 1..120: mol_type = other DNA

SEQ ID NO: 26415 - DNA, 120 bp, synthetic construct
  source 1..120: mol_type = other DNA
aaagattaatcttttagacaattctaaaagattaatcttttagacaattctaaaagattaattgaattctaaaagattaatcaacttaaaggacatttctaaggagattgaaaaagcata

SEQ ID NO: 26416 - DNA, 120 bp, synthetic construct
  source 1..120: mol_type = other DNA
aattattcacctagaatgtctacagatactttcttcagagtcctttttgttaagtaatctaacatattttaagatactctgataaatacataagcagcagaaaaaatattttattaaaat

SEQ ID NO: 26417 - DNA, 120 bp, synthetic construct
  source 1..120: mol_type = other DNA
ttatgataatttatatatcatatctgtgattcttagattttcagattatacaacatcttttcccagataaggatttagtaagaagagaaaaggaaaaaacattcacttttcattcaagcc

SEQ ID NO: 26418 - DNA, 120 bp, synthetic construct
  source 1..120: mol_type = other DNA
ttaacatgaagaatggaaacaaaaaaatcacaaaatagtaagctttatgcacatctaaaaatataaaattatgttatttggctttatttttctctaaaattccaaaatagaaaactagga

SEQ ID NO: 26419 - DNA, 120 bp, synthetic construct; identical to SEQ ID NO: 8052
  source 1..120: mol_type = other DNA

SEQ ID NO: 26420 - DNA, 120 bp, synthetic construct
  source 1..120: mol_type = other DNA
tgaagagaataatatgagatgacttacttctaaatcccattttctattctatttctaaatgttgcaaatggctaactagagcatttttattcctctagaaacaaaacattcttttccttg

SEQ ID NO: 26421 - DNA, 120 bp, synthetic construct
  source 1..120: mol_type = other DNA
aataaaggaagctatacaaaactatttttttcagcaaaggtaactaaggtagaaaaacagagaaagggctaattttcagccacaagtttttacaggaactgacttctcaggagagccaaa

SEQ ID NO: 26422 - DNA, 120 bp, synthetic construct
  source 1..120: mol_type = other DNA
caaaacatacatgcaccatgttgactgtcatgtgcaggtgagaagagaaaaatattttaagaatatgataatttttaaaattgcactaaaataatctttatattgaggcctccgtgtttt

SEQ ID NO: 26423 - DNA, 120 bp, synthetic construct; identical to SEQ ID NO: 8053
  source 1..120: mol_type = other DNA

SEQ ID NO: 26424 - DNA, 120 bp, synthetic construct
  source 1..120: mol_type = other DNA
aagatatgcctgatccagaggcaatgagctaaaagaatcatctgtacaatctaacaatgcttttgaggatggatctggagggcttaaaatacacattattaatgggaaaatcttgggctg

SEQ ID NO: 26425 - DNA, 120 bp, synthetic construct
  source 1..120: mol_type = other DNA
ccaaacccaaattttcggaccttttctgcagactggtgaacttagtacttaaatatgaaacgccagttctgtctagagaacaaaatgagtttaatgcatagactcacctgttattactct

SEQ ID NO: 26426 - DNA, 120 bp, synthetic construct
  source 1..120: mol_type = other DNA
actaagaattaagaaatgctgttttaaaagcttaggaaatgtatatagaaaatatatcccatgttctcatatatgtgtttcagacataggggaggaattagaataaattttctaaataaa

SEQ ID NO: 26427 - DNA, 120 bp, synthetic construct
  source 1..120: mol_type = other DNA
caagtgtcttgtacaatatcattaaatttgtatcagaacacataaatggaaatgaggtggggaagcaattgcagtactttctagagtctaggttttgaaattctttttggtgaacattta

SEQ ID NO: 26428 - DNA, 120 bp, synthetic construct; identical to SEQ ID NO: 8054
  source 1..120: mol_type = other DNA

SEQ ID NO: 26429 - DNA, 120 bp, synthetic construct
  source 1..120: mol_type = other DNA
ttactggcaaactatcatactaattgtcaagaactaaagttgtatttaaccacaatacacagctaatgccttaagaattgagaccaggttttgttttggcaattcctaagctgattcata

SEQ ID NO: 26430 - DNA, 120 bp, synthetic construct
  source 1..120: mol_type = other DNA
ttccctattatttttacttattccttgccaatgtttattttaaaaacatctttttcttttctttttggtgatttggaaatgtctttacatccatatgggatatacaatatattatgtcat

SEQ ID NO: 26431 - DNA, 120 bp, synthetic construct; identical to SEQ ID NO: 8055
  source 1..120: mol_type = other DNA

SEQ ID NO: 26432 - DNA, 120 bp, synthetic construct
  source 1..120: mol_type = other DNA
tttaaatgcttgtgtgatatacattgatgttaattcttactataaatgaaattaaaatatctgctggtcttaaggaaaattgactatggtgtgccaattttatgttaacaagcagatatg

SEQ ID NO: 26433 - DNA, 120 bp, synthetic construct
  source 1..120: mol_type = other DNA
cagagtaacaaaaatcacctttcagcaaaacctaaggaaacttcacgtcatctaacttgtttttcagctgttgaaggaggatgttcccatcttggtcagtcctatgcggatagagatgtc

SEQ ID NO: 26434 - DNA, 120 bp, synthetic construct; identical to SEQ ID NO: 8056
  source 1..120: mol_type = other DNA

SEQ ID NO: 26435 - DNA, 120 bp, synthetic construct
  source 1..120: mol_type = other DNA
ctgggttactaaataatatgcaaattctgtgtcttgtttaacttgtttcttttccatttattagcctactcgccctcctaatggtcaaggacctcaaggccccaagggagatccagtaag

SEQ ID NO: 26436 - DNA, 120 bp, synthetic construct
  source 1..120: mol_type = other DNA
caaacaacagactgagaatccataattgtacgtgtaaagatttcaatttcccaaacttcatattatgtcttcacccccatgatcagtttaaagaaaatgtgtaggtcaatatacaaagga

SEQ ID NO: 26437 - DNA, 120 bp, synthetic construct; identical to SEQ ID NO: 8057
  source 1..120: mol_type = other DNA

SEQ ID NO: 26438 - DNA, 120 bp, synthetic construct
  source 1..120: mol_type = other DNA
tcctggcccccctggaatctgtgaatcatgccctactggtcctcaggtataacaattacggtacttaaaaaattccctcataaaactatctagttcatcttctttctttactcgatatta

SEQ ID NO: 26439 - DNA, 120 bp, synthetic construct
  source 1..120: mol_type = other DNA
tcataatgctaatgtcattgctactatatccttggaaaatttgctaatttctcagcagatatatagcatacacattatgtttaagaagtgaactatgaacttaacaaaaaaaattaacct

SEQ ID NO: 26440 - DNA, 120 bp, synthetic construct; identical to SEQ ID NO: 8058
  source 1..120: mol_type = other DNA

SEQ ID NO: 26441 - DNA, 120 bp, synthetic construct
  source 1..120: mol_type = other DNA
ctagtaaccaaacagaacctaactctagacctggaacttagaatttaaaaaaagcttcaaagaaatctaataagcatatgagcctttctactattttttggtttattttctatggagatg

SEQ ID NO: 26442 - DNA, 120 bp, synthetic construct
  source 1..120: mol_type = other DNA
tgtattatatgatctcgagactcttttggcctcaaacagcctatgatcctatgtttgtaatgatgtagctactgcttagaaataatagcttaagtaagcgcataataggaaaaattgggg

SEQ ID NO: 26443 - DNA, 120 bp, synthetic construct
  source 1..120: mol_type = other DNA
ccacatcttttggcacacaaaaacctatcagtagacagtagatgttgcatgcacttctaaatgctttttaaaagaattatgaactgtctgttaaaatgatcatatctatttgtctccttg

SEQ ID NO: 26444 - DNA, 120 bp, synthetic construct; identical to SEQ ID NO: 8059
  source 1..120: mol_type = other DNA

SEQ ID NO: 26445 - DNA, 120 bp, synthetic construct
  source 1..120: mol_type = other DNA
aaatggaaatatacaaactattgttttataaatttactatcagtatttagaaacagcatgttacaaaactgaagcatactgttttcagcttgctgaaggttttctagtttaatctgtatt

SEQ ID NO: 26446 - DNA, 120 bp, synthetic construct
  source 1..120: mol_type = other DNA
ttacattattattttagatacttgattataggatttctagtgtgccaataaatgtttttctgcactgagtttggctgccaagcgagaaattgcttcttcaccagtgcaatataaccctaa

SEQ ID NO: 26447 - DNA, 120 bp, synthetic construct
  source 1..120: mol_type = other DNA
tttcattacagtaatgtttgcttgctaagatcttcattatagatctcatgaatagttatcaaaaagttatcaaaagatgagatatagttgttcatagttttaacaatgcgagtgtcattg

SEQ ID NO: 26448 - DNA, 120 bp, synthetic construct; identical to SEQ ID NO: 8060
  source 1..120: mol_type = other DNA

SEQ ID NO: 26449 - DNA, 120 bp, synthetic construct
  source 1..120: mol_type = other DNA
cttggtaaaattaaaccacattaatttgcatgtaatatgacttttagttcaaaaccattcagttttgatggattgcaatgaatggaatgaaatacattaacttcattctgatctaaaaat

SEQ ID NO: 26450 - DNA, 120 bp, synthetic construct
  source 1..120: mol_type = other DNA
catattctactcactagggatctccaggataccaaggaccccctggtgaacctgggcaagctggtccttcagtaagtaacaattaaatttatatttagtaagtcgataattccatatgga

SEQ ID NO: 26451 - DNA, 120 bp, synthetic construct
  source 1..120: mol_type = other DNA
ctatcttagagacactagttaataaaggaattccctcatcattagccatcaaaatagtccacttcccagagctgataaaaattctgtatatattaaatatagatttcatttttctgtaaa

SEQ ID NO: 26452 - DNA, 120 bp, synthetic construct
  source 1..120: mol_type = other DNA
aggatatgctctgtaaataagcaagtaaaatagtttaaatacaacatttcatgacatttagaaatacctttatatttagatatatttaatattcctaaacgtgtagaaatgcatttggat

SEQ ID NO: 26453 - DNA, 120 bp, synthetic construct; identical to SEQ ID NO: 8061
  source 1..120: mol_type = other DNA

SEQ ID NO: 26454 - DNA, 120 bp, synthetic construct
  source 1..120: mol_type = other DNA
agaagaaaaaaaaatgttattcaaaatattgttgtcttaacaacattttagttaatactaatttttgagtagctatacagtatttgcgtttctatatatatcatttgttgaattccaaaa

SEQ ID NO: 26455 - DNA, 120 bp, synthetic construct
  source 1..120: mol_type = other DNA
ttaatgaacttgagaagttatagataccttcaattcaatggcattccttctttccctcttaatctccaatggcaaattcttttcactggcttatgttatttcagtgattagaagcacctg

SEQ ID NO: 26456 - DNA, 120 bp, synthetic construct
  source 1..120: mol_type = other DNA
atgcaaagtaaccattttgcttattggctacaatgtattttctcatacatgagcacctacgtattctttatttctctacctagggagaatcaggtagacccggacgacctggagagcgag

SEQ ID NO: 26457 - DNA, 120 bp, synthetic construct; identical to SEQ ID NO: 8062
  source 1..120: mol_type = other DNA

SEQ ID NO: 26458 - DNA, 120 bp, synthetic construct
  source 1..120: mol_type = other DNA
actaagtttgtttgttgaccaaactagtcattttttgcaaaataaaggagttgatttctagtgtataaagtactcttgaaaaatatcgttttcttactaccactatcagaaaaataaaaa

SEQ ID NO: 26459 - DNA, 120 bp, synthetic construct
  source 1..120: mol_type = other DNA
ttataataaaatctatgaaactcatgtttgctactctatagttaaggcaactttcttatcagactaaattgcactttctagttttcatgttttcctgttgtaaaatcagtatgaaatatc

SEQ ID NO: 26460 - DNA, 120 bp, synthetic construct
  source 1..120: mol_type = other DNA
aataattttgctggttttatacatttcctagggcttcgatggacgaaatggagaaaagggtgaaacaggtgctcctggattaaaggtaaatcacaacaaaaatcatattttcataagtaa

SEQ ID NO: 26461 - DNA, 120 bp, synthetic construct
  source 1..120: mol_type = other DNA
taacgcttccatgaaaaatgacaacttgaagagtctagattagaaatagttgagcatcttagtataacttatcaattacttcactttagtctttaagtttttaaatacagaaattgagat

SEQ ID NO: 26462 - DNA, 120 bp, synthetic construct; identical to SEQ ID NO: 8063
  source 1..120: mol_type = other DNA

SEQ ID NO: 26463 - DNA, 120 bp, synthetic construct
  source 1..120: mol_type = other DNA
cgaggacggccaggacttcctggggctgcagtgagtatagctgctaacatcacacaattacaacccaaagtgacagatttttacagcctcagtaaagtttcaggctgtaaaaatatgtta

SEQ ID NO: 26464 - DNA, 120 bp, synthetic construct
  source 1..120: mol_type = other DNA
cttttcatatgtcatttgagccattatatctgcattcagtcctgaaaacacagactccaatccttctacatttgattgttgctgtatatatcagaattgtaataattgactttaaaatac

SEQ ID NO: 26465 - DNA, 120 bp, synthetic construct; identical to SEQ ID NO: 8064
  source 1..120: mol_type = other DNA

SEQ ID NO: 26466 - DNA, 120 bp, synthetic construct
  source 1..120: mol_type = other DNA
cccaatacttaatattgtatatacactcctgtgattaaaactgacactgagcccataaacaaaatctaggttctgacactcattctgcttgatcaactgctaacatttgaatggtgctcc

SEQ ID NO: 26467 - DNA, 120 bp, synthetic construct
  source 1..120: mol_type = other DNA
ttgtagactggagtacaaaagcccagggaaaagtagcctgcactaagtcacagaattcatggcaaagtagggagaaaccaagaatttctaactttagatttcactcttttcttattttac

SEQ ID NO: 26468 - DNA, 120 bp, synthetic construct
  source 1..120: mol_type = other DNA
aaagagctcttgaaattgtatttaattttttcagggccctcctggtcctcctggaactgccggattccctggatcccctggtgctaaggtaaacatgtgtttctatagaagggtataaaa

SEQ ID NO: 26469 - DNA, 120 bp, synthetic construct; identical to SEQ ID NO: 8065
  source 1..120: mol_type = other DNA

SEQ ID NO: 26470 - DNA, 120 bp, synthetic construct
  source 1..120: mol_type = other DNA
aactgactacacaaggttttaccattagggtgaagttggacctgcagggtctcctggttcaaatggtgcccctggacaaagaggagaacctggacctcagggacacgctggtgctcaagg

SEQ ID NO: 26471 - DNA, 120 bp, synthetic construct
  source 1..120: mol_type = other DNA
tactttgaaaaaattgttgcttagtgctctaaaatgatcctcctgtgacacatactgatttgattagtagtaaaaatgatagtttttgactgttgcactattccagaattcatgattttt

SEQ ID NO: 26472 - DNA, 120 bp, synthetic construct
  source 1..120: mol_type = other DNA
atgtatcatttaataatttatacgaagtacatattatctctaatttatttagataatgatgattcttttgaccacatttcatatgttgtgttatagttggaggattcacttaatctctac

SEQ ID NO: 26473 - DNA, 120 bp, synthetic construct; identical to SEQ ID NO: 8066
  source 1..120: mol_type = other DNA

SEQ ID NO: 26474 - DNA, 120 bp, synthetic construct
  source 1..120: mol_type = other DNA
agccggtgctaatggtgctcctggactgcgaggtggtgcagtaagttgccttgttttttctctgttgactgaaaggtatagtttaattccatcaacaaaaaattaatagcaaaattttgc

SEQ ID NO: 26475 - DNA, 120 bp, synthetic construct
  source 1..120: mol_type = other DNA
tactttagggtgagcctggtaagaatggtgccaaaggagagcccggaccacgtggtgaacgcgtaagttttactgcaacagatctggttatttcttgaaaaaatgcaacataattagaaa

SEQ ID NO: 26476 - DNA, 120 bp, synthetic construct
  source 1..120: mol_type = other DNA
aggatggatcacctggagaacctggtgcaaatgggcttccaggagctgcaggagaaagggtacgttttccatggggcatctaaaagaaaagcagcatcactgtcatctaaataaaactac

SEQ ID NO: 26477 - DNA, 120 bp, synthetic construct; identical to SEQ ID NO: 8067
  source 1..120: mol_type = other DNA

SEQ ID NO: 26478 - DNA, 120 bp, synthetic construct
  source 1..120: mol_type = other DNA
tttcctggctttgtaactaaagccacttacttaccctctatgagaatcctttacttatctgttaattggaaagcatttatctgagcatcgttgcaagagtacagtaaactaaaatgcctg

SEQ ID NO: 26479 - DNA, 120 bp, synthetic construct
  source 1..120: mol_type = other DNA
atgttcacaaagttgctttaaaattttttcaatatggcaatccaagctaagataactgattttatgtataaatgtttcagcaacacacgaaccctttttaaaagttcaaatgacgtcctc

SEQ ID NO: 26480 - DNA, 120 bp, synthetic construct
  source 1..120: mol_type = other DNA
cagaggagctgctggagaacctggcagagatggcgtccctggaggtccaggaatgagggtacagagaaacatttgtttgaatgacactttaatttagacagaagaaaggcaagacaaatg

SEQ ID NO: 26481 - DNA, 120 bp, synthetic construct
  source 1..120: mol_type = other DNA
acttaagccgagatagttcaaggagaagagaagatagaacacttgccttagatactttatagacaggaaaaaagatgtgcaaatctgaggcttcacatgtaagtgaaaatatcaaaatca

SEQ ID NO: 26482 - DNA, 120 bp, synthetic construct; identical to SEQ ID NO: 8068
  source 1..120: mol_type = other DNA

SEQ ID NO: 26483 - DNA, 120 bp, synthetic construct
  source 1..120: mol_type = other DNA
atatatatagcatgctttaatcttctctttatcaaacctttattaatgtaattttttcttattagggaagtcaaggagaaagtggtcgaccaggtcctcctgggccatctggtccccgag

SEQ ID NO: 26484 - DNA, 120 bp, synthetic construct
  source 1..120: mol_type = other DNA
tcaaaactcagtctcctcttcaaagcatggaggagtatatgaaaatcaaattgcatgtaggaagggagctaaatatataattggttatggttgtatgtgtgtgtatggagcaggcagata

SEQ ID NO: 26485 - DNA, 120 bp, synthetic construct
  source 1..120: mol_type = other DNA
accctgtctccactaaaaatacaaaaattagccaggcatggtggcatgtgcctgtaatcctagctacccaggaggctgaggcaagagaatcactagaacccggggggcagaggctacagt

SEQ ID NO: 26486 - DNA, 120 bp, synthetic construct; identical to SEQ ID NO: 8069
  source 1..120: mol_type = other DNA

SEQ ID NO: 26487 - DNA, 120 bp, synthetic construct
  source 1..120: mol_type = other DNA
taatctgtattatttctacttccctaactgttcttgtttttagggtcctcctggaaagaatggtgaaactggacctcagggacccccagggcctactgtaagttcactcatataaaattg

SEQ ID NO: 26488 - DNA, 120 bp, synthetic construct
  source 1..120: mol_type = other DNA
taaatgctagcattgagtttagagtgtacatgtgtgctttgggtccaggtcctcccttttcttcacatcactacttttataattaagcaacaggcctgttgaaatggatactgtagacta

SEQ ID NO: 26489 - DNA, 120 bp, synthetic construct
  source 1..120: mol_type = other DNA
atgtcacggcatatctgactgtcaaatttttttgtgtccctaatagattataatttatctgaagcttaacttgtgattctgtctttcatctggaaataaaattttaggcaatgttaatag

SEQ ID NO: 26490 - DNA, 120 bp, synthetic construct; identical to SEQ ID NO: 8070
  source 1..120: mol_type = other DNA

SEQ ID NO: 26491 - DNA, 120 bp, synthetic construct
  source 1..120: mol_type = other DNA
ttctataagccatgtttgaggtaattacctaatacaaatatgattctttctagggcttgcctggtacaggtggtcctccaggagaaaatggaaaacctggggaaccagtaagttacgttt

SEQ ID NO: 26492 - DNA, 120 bp, synthetic construct
  source 1..120: mol_type = other DNA
acaaagacaaattatttaaaagataactattatatagagtttgaattttaccataaaatagagagttcatagtttcaagatttgaaaaattatacagtatgccaacatgacaaatgtgta

SEQ ID NO: 26493 - DNA, 120 bp, synthetic construct; identical to SEQ ID NO: 8071
  source 1..120: mol_type = other DNA

SEQ ID NO: 26494 - DNA, 120 bp, synthetic construct
  source 1..120: mol_type = other DNA
aatctggaaggtccaattctctgacattcataatcactacagaatcaaatacgggcttaaaatttcaaacggaaaaatattgccaatatgttgattctatgtaggaaaactgttttggta

SEQ ID NO: 26495 - DNA, 120 bp, synthetic construct
  source 1..120: mol_type = other DNA
cacccagctgttcaactatttttaagtatacaaatttctagattgttcacaatataataacctagtggcctgattcaaaatgatgcaagttaaggtgctttgtttttagctttgggttgt

SEQ ID NO: 26496 - DNA, 120 bp, synthetic construct
  source 1..120: mol_type = other DNA
aaggaggaaaggtaactccacagcattccattcacctaggtttaaaaaatgcatttgatttccttctgatcatttattatttctcacttattttcagggtgctgctggtcctcctgggcc

SEQ ID NO: 26497 - DNA, 120 bp, synthetic construct; identical to SEQ ID NO: 8072
  source 1..120: mol_type = other DNA

SEQ ID NO: 26498 - DNA, 120 bp, synthetic construct
  source 1..120: mol_type = other DNA
tactcctcttcttggctgattttcactgaagatactttgaatctgatgacattggcttttatttgacagggtgaaccaggcggtccaggtgctgatggtgtcccagggaaagatggccca

SEQ ID NO: 26499 - DNA, 120 bp, synthetic construct
  source 1..120: mol_type = other DNA
ctatatctatggctacttgatagatctacagtgactaaagaatgaaaaagcctcaagagtacgataaaggtcacaaactagcatttgtgagtcactaaaatctgagataatcactgaaat

SEQ ID NO: 26500 - DNA, 120 bp, synthetic construct
  source 1..120: mol_type = other DNA
tgaacaattgatgctgtacacacagcaaattatacaaacctcaaggacaacatactcagtgaagaaaattcagtcaccaagggatacatactgcatgattccattcctacaatatttgca

SEQ ID NO: 26501 - DNA, 120 bp, synthetic construct; identical to SEQ ID NO: 8073
  source 1..120: mol_type = other DNA

SEQ ID NO: 26502 - DNA, 120 bp, synthetic construct
  source 1..120: mol_type = other DNA
ataaatgcttcgcttttgacagactaagtagataagccgtcattcaggtaaaaagagtgctcaatacttcagttttgtaatataagtaaaactactatttgaaaatttcaagttgaaaaa

SEQ ID NO: 26503 - DNA, 120 bp, synthetic construct
  source 1..120: mol_type = other DNA
ctacaatggagataaagataaatgaatcaataaactattgctgaatcctattttctcccagagttatccccaaagaggcttgtgtttactgagctctgcagtatttacacattgagagaa

SEQ ID NO: 26504 - DNA, 120 bp, synthetic construct; identical to SEQ ID NO: 8074
  source 1..120: mol_type = other DNA

SEQ ID NO: 26505 - DNA, 120 bp, synthetic construct
  source 1..120: mol_type = other DNA
catactttttaaccccatacagacagtagctacttatgcttccctttttggcagttttgccctcagttccctgagcctcaatttggagatattatcttcaaaaaccatataaggaaccat

SEQ ID NO: 26506 - DNA, 120 bp, synthetic construct
  source 1..120: mol_type = other DNA
tttgtaattaggtatttcttaagcctatagaatctttgcctgagactccttctagatttaaaagtcttgaccttcaggatttaagactctggaaagatatttagtaaatggtttttaaaa

SEQ ID NO: 26507 - DNA, 120 bp, synthetic construct
  source 1..120: mol_type = other DNA
cagtaggaggcagaaggaatcaatggttctggtattttccactcctaattttattgagaagtggcaaagtcttcagaagtttattggctactctgcacatttcctgcttaaaggaaagaa

SEQ ID NO: 26508 - DNA, 120 bp, synthetic construct
  source 1..120: mol_type = other DNA
tggtttccctggtgctcctgtaagtgtgaatatttatacatacatgtcccatagcccaggatctctatcttgctgaaaaattacaaaagtatagtcaagtttggtttctagtctcatttt

SEQ ID NO: 26509 - DNA, 120 bp, synthetic construct; identical to SEQ ID NO: 8075
  source 1..120: mol_type = other DNA

SEQ ID NO: 26510 - DNA, 120 bp, synthetic construct
  source 1..120: mol_type = other DNA
cttaaatccggtctttctcaaaaaaatttactggtgctgattttcaaatgtttaatccttagagacacttcctccctccctaatggcaaataatgcacagtttatgctttcttggtcatg

SEQ ID NO: 26511 - DNA, 120 bp, synthetic construct
  source 1..120: mol_type = other DNA
taataagccaattgtatcataaagagtgtcagctgagagattgctgttgttgttgcatgtagggacagaatggtgaacctggtggtaaaggagaaagaggggctccgggtgagaaaggtg

SEQ ID NO: 26512 - DNA, 120 bp, synthetic construct
  source 1..120: mol_type = other DNA
gttctaatggaaaaacatggaggtttatcagtaatttaatattttatactgagatagcatgtcatagtgtcaagaatataatctttatatgaatatagtccaagtatgaatctcagcacc

SEQ ID NO: 26513 - DNA, 120 bp, synthetic construct; identical to SEQ ID NO: 8076
  source 1..120: mol_type = other DNA

SEQ ID NO: 26514 - DNA, 120 bp, synthetic construct
  source 1..120: mol_type = other DNA
gttctacttttgaaattcaaaaatatattaccatttcacagggtgctgctggcttccctggtgctcgtggtcttcctggtcctcctggtagtaatgtaagtaattgttaaagtcttttct

SEQ ID NO: 26515 - DNA, 120 bp, synthetic construct
  source 1..120: mol_type = other DNA
aaatgcactttttattataaatattcaaatttcaaacaattatttgtagggtaacccaggacccccaggtcccagcggttctccaggcaaggatgggcccccaggtcctgcgggtaacac

SEQ ID NO: 26516 - DNA, 120 bp, synthetic construct; identical to SEQ ID NO: 8077
  source 1..120: mol_type = other DNA

SEQ ID NO: 26517 - DNA, 120 bp, synthetic construct
  source 1..120: mol_type = other DNA
agtcattttccactacactcttccttcctttggtagccttcagagatcacttaaccatatcaaggatgaaaagtttttctgtcactggagtaaattagccaggagataatttttttttat

SEQ ID NO: 26518 - DNA, 120 bp, synthetic construct
  source 1..120: mol_type = other DNA
tctcaaacacctcttttaggaaacttgtgaatattcttcaatttgttgactgtcagttttgaagggggaaatagtgttagcttatagatcttggaaagtctttcattaatgctagttatc

SEQ ID NO: 26519 - DNA, 120 bp, synthetic construct
  source 1..120: mol_type = other DNA
tattagggctcgtattatggcactttaagtacttctttcaacaaaatgttatgtaatattgtcataaaattaatatttcatatttaagtgtgttcaattgatatgatatttctggtaagt

SEQ ID NO: 26520 - DNA, 120 bp, synthetic construct
  source 1..120: mol_type = other DNA
tacaatgtacagtattctgaattagataatcaatgtaactattcagccctttgccatccagagtcactgagcaagttagaaaatgcaagaagcttgctcccccatattttttcccatagc

SEQ ID NO: 26521 - DNA, 120 bp, synthetic construct; identical to SEQ ID NO: 8078
  source 1..120: mol_type = other DNA

SEQ ID NO: 26522 - DNA, 120 bp, synthetic construct
  source 1..120: mol_type = other DNA
atgtctaagagtgtaaatatggccacatagcaaagttcttctatctctaataacagaaattctttcattacaatttaggatagacttaaaagctcttgttcattagtatttacccaatga

SEQ ID NO: 26523 - DNA, 120 bp, synthetic construct
  source 1..120: mol_type = other DNA
tattatttttaaagaatttaaaattaatattatttataattaacaaatcataattgtatacatttataaggtacaatgtgatgttttaatatatgtatacaatgtggaatgattaaagca

SEQ ID NO: 26524 - DNA, 120 bp, synthetic construct; identical to SEQ ID NO: 8079
  source 1..120: mol_type = other DNA

SEQ ID NO: 26525 - DNA, 120 bp, synthetic construct
  source 1..120: mol_type = other DNA
ctggatcagatggtcttccaggccgagatggatctcctggtggcaaggtataataaacacatgtgcaattgatttgtgttatcaaaataagtgatcatcatgtttattttgtacctatga

SEQ ID NO: 26526 - DNA, 120 bp, synthetic construct
  source 1..120: mol_type = other DNA
gtgagttcccaaaagcagcatctgtcttgtttgtctatttccttcaataaagacatttgtaggtagaaggtagaatgtcagatctgccaaccaaaatatccactgtcatttgttttacag

SEQ ID NO: 26527 - DNA, 120 bp, synthetic construct
  source 1..120: mol_type = other DNA
tatatgctgggtaaatgcaaggccaagttaacagggctcttgcccaacttttctgtctagatcccctgagaaagctataaacagggctttagcactttgaaggcaaaaacaatattaact

SEQ ID NO: 26528 - DNA, 120 bp, synthetic construct; identical to SEQ ID NO: 8080
  source 1..120: mol_type = other DNA

SEQ ID NO: 26529 - DNA, 120 bp, synthetic construct
  source 1..120: mol_type = other DNA
caaatataaactttcctttaatgacaatgatatggaaagcagttcaggatctaaaagttctttggagccaaggatagaaacatcagttgttagggatccatgcaatgatcagtccaaaat

SEQ ID NO: 26530 - DNA, 120 bp, synthetic construct
  source 1..120: mol_type = other DNA
aatatgtatgtgtgtatatgacttcaattcaaaatatgtttctaaagggtcctcaaggcccacgtggtgacaaaggtgaaacaggtgaacgtggagctgctggcatcaaaggacatcgag

SEQ ID NO: 26531 - DNA, 120 bp, synthetic construct
  source 1..120: mol_type = other DNA
tatgtactagaagagatgagaaatggatttgaaggctaatttgaaacaacaatcagcatgacacaatgggaagattaaagaaagaaaaaaaatttcatcatgatccccatgtttcttgat

SEQ ID NO: 26532 - DNA, 120 bp, synthetic construct; identical to SEQ ID NO: 8081
  source 1..120: mol_type = other DNA

SEQ ID NO: 26533 - DNA, 120 bp, synthetic construct
  source 1..120: mol_type = other DNA
ccattggaccaccagggcctcgaggtaacagaggtgaaagaggatctgaggtaagacatcacttatacgtatgtgtatttaatttgctacaatcttccaattttcagaaacacagcgcat

SEQ ID NO: 26534 - DNA, 120 bp, synthetic construct
  source 1..120: mol_type = other DNA
tacctttttaaaaatttgatcaggtatccatcgtatcagaataatgacatctgcccaattaaccaaataaaccctgtccacattgctatcccactagagatctcagaattacaacattca

SEQ ID NO: 26535 - DNA, 120 bp, synthetic construct
  source 1..120: mol_type = other DNA
aaacaattatcccaacaaattacactcccctctgtcatgtcaatattggaattgtagctcacaggtgtttgcttacatcagtcatccagaaggaagaatgatagagaaaacttgtgctct

SEQ ID NO: 26536 - DNA, 120 bp, synthetic construct
  source 1..120: mol_type = other DNA
gatgacacaatgaatgaattatttttaaggcattttcttggactagcaatgtattcttagagtggcgactgaatgtgcatacctcaatgatccatgttttactcattctagggctcccca

SEQ ID NO: 26537 - DNA, 120 bp, synthetic construct; identical to SEQ ID NO: 8082
  source 1..120: mol_type = other DNA

SEQ ID NO: 26538 - DNA, 120 bp, synthetic construct
  source 1..120: mol_type = other DNA
tcaagagtggtatgtttggtagtctttcatcttcatggcaataggattacagagaaagctgcttagattagaatgggaacgaaaaaacatctactttcaatggaaagctgaaatagtact

SEQ ID NO: 26539 - DNA, 120 bp, synthetic construct
  source 1..120: mol_type = other DNA
gttgtagtataaattgtaagttatttgagtataaagtaacatatctttttttctcaggattaaatatacataatttgatgcagacaattataatctgattattgtaatatttacttattg

SEQ ID NO: 26540 - DNA, 120 bp, synthetic construct
  source 1..120: mol_type = other DNA
tgaaaagcaaaattatttcaagttttcaaatatcttgacatggaacactgcctttgctaggagtcatttctagaaattacttaaaataggagacaagcatcaatcatagggatttcagct

SEQ ID NO: 26541 - DNA, 120 bp, synthetic construct; identical to SEQ ID NO: 8083
  source 1..120: mol_type = other DNA

SEQ ID NO: 26542 - DNA, 120 bp, synthetic construct
  source 1..120: mol_type = other DNA
actggattttataaccaattcccattcttttttgtgactattcaggagaatactgggttgaccctaaccaaggatgcaaattggatgctatcaaggtattctgtaatatggaaactgggg

SEQ ID NO: 26543 - DNA, 120 bp, synthetic construct
  source 1..120: mol_type = other DNA
tggtttggagagtccatggatggtggttttcaggtaggaaaggatatacctttttttaaataagtcacctctatatcctttgtattcttcctatatgttcatcacaaagcaaagttacta

SEQ ID NO: 26544 - DNA, 120 bp, synthetic construct
  source 1..120: mol_type = other DNA
acacatactacatgaatccctcgcgtgcagttacaactgaaatgtttgatctgttttatttgttccctattacagtttagctacggcaatcctgaacttcctgaagatgtccttgatgtg

SEQ ID NO: 26545 - DNA, 120 bp, synthetic construct; identical to SEQ ID NO: 8084
  source 1..120: mol_type = other DNA

SEQ ID NO: 26546 - DNA, 120 bp, synthetic construct
  source 1..120: mol_type = other DNA
attacatacattgcatctactgattcattgcagggaatgttaaatgcaacaaaatggatcttagcctccagatgaaaaccagttgaaataaaagcatttaaaatttaaatccataatgca

SEQ ID NO: 26547 - DNA, 120 bp, synthetic construct
  source 1..120: mol_type = other DNA
attgttatttgtgaacaaagggaaaactcacttctaatattagcgaatttcattgtgagagacctatcctctttttaataaaccatttataaacctgttagcaatggccggaaccaggcc

SEQ ID NO: 26548 - DNA, 120 bp, synthetic construct
  source 1..120: mol_type = other DNA
tcctgaggatgcactggtctatagcaattgccctgctgcatttactaagaatccttacaaggcatttgtttaagaatattgtttatcaactaagaagattacagctttgaagtagagcag

SEQ ID NO: 26549 - DNA, 120 bp, synthetic construct; identical to SEQ ID NO: 8085
  source 1..120: mol_type = other DNA

SEQ ID NO: 26550 - DNA, 120 bp, synthetic construct
  source 1..120: mol_type = other DNA
gcaagtgaccgacaaaattccagttatttatttccaaaatgtttggaaacagtataatttgacaaagaaaaatgatacttctctttttttgctgttccaccaaatacaattcaaatgctt

SEQ ID NO: 26551 - DNA, 120 bp, synthetic construct
  source 1..120: mol_type = other DNA
gcagagcaatgactgtgctcaccagtaaaagataacctttctttctgaaatagtcaaatacgaaattagaaaagccctccctattttaactacctcaactggtcagaaacacagattgta

SEQ ID NO: 26552 - DNA, 120 bp, synthetic construct
  source 1..120: mol_type = other DNA
tatttttaaagccacaattattttaatattggatatcaactgcttgtaaaggtgctcctcttttttcttgtcattgctggtcaagattactaatatttgggaaggctttaaagacgcatg

SEQ ID NO: 26553 - DNA, 120 bp, synthetic construct; identical to SEQ ID NO: 8086
  source 1..120: mol_type = other DNA

SEQ ID NO: 26554 - DNA, 120 bp, synthetic construct; identical to SEQ ID NO: 8087
  source 1..120: mol_type = other DNA

SEQ ID NO: 26555 - DNA, 120 bp, synthetic construct
  source 1..120: mol_type = other DNA
gcgtgtaccaggtgtcgcgcacgtcgggcggggccgggggcctggggtcgctgcgggccagccggctggggaccacccgcacgccctcctcctacggcgcaggcgagctgctggacttct

SEQ ID NO: 26556 - DNA, 120 bp, synthetic construct
  source 1..120: mol_type = other DNA
agaacgcggcgctcgccgccgaagtgaaccggctcaagggccgcgagccgacgcgagtggccgagctctacgaggaggagctgcgggagctgcggcgccaggtggaggtgctcactaacc

SEQ ID NO: 26557 - DNA, 120 bp, synthetic construct
  source 1..120: mol_type = other DNA
cctggggtctggggtcccgctgtcagcacctgccttctcccggggcccgggaccctctcctgccccatgtggagaaagggtcctccacctgtgtgtttcaaggggccgtgacctccaggt

SEQ ID NO: 26558 - DNA, 120 bp, synthetic construct; identical to SEQ ID NO: 8088
  source 1..120: mol_type = other DNA

SEQ ID NO: 26559 - DNA, 120 bp, synthetic construct
  source 1..120: mol_type = other DNA
gactgtgtctttttacaaggtgaatggacaggctggagaaaaagggagtaggtgggggtcacagctctcagagagcttgggaggacctgactgtagacttcaccaggctccaagaacgaa

SEQ ID NO: 26560 - DNA, 120 bp, synthetic construct
  source 1..120: mol_type = other DNA
ctgggaaccagaaacacagaggtggataaaatagacacagtttctaaccccagggaggtcacacagtctggtggggacatagacttcaagggtgtggctcctgggcagagattgggccac

SEQ ID NO: 26561 - DNA, 120 bp, synthetic construct
  source 1..120: mol_type = other DNA
gtttccactgccagctttatcacccgcaactgtctgtctttctgtctgtcccacccaggctgcaggaggagattcagttgaaggaagaagcagagaacaatttggctgccttccgagcgg

SEQ ID NO: 26562 - DNA, 120 bp, synthetic construct; identical to SEQ ID NO: 8089
  source 1..120: mol_type = other DNA

SEQ ID NO: 26563 - DNA, 120 bp, synthetic construct
  source 1..120: mol_type = other DNA
agcttcaggaacagcaggtccaggtggagatggacatgtctaagccagacctcactgccgccctcagggacatccgggctcagtatgagaccatcgcggctaagaacatttctgaagctg

SEQ ID NO: 26564 - DNA, 120 bp, synthetic construct
  source 1..120: mol_type = other DNA
catgctcccttgctcatccctacccgtgccctgcatccttctcatttttgggcccctttctctgcccttaggtgtcagacctgacccaggcagccaacaagaacaacgacgccctgcgcc

SEQ ID NO: 26565 - DNA, 120 bp, synthetic construct; identical to SEQ ID NO: 8090
  source 1..120: mol_type = other DNA

SEQ ID NO: 26566 - DNA, 120 bp, synthetic construct
  source 1..120: mol_type = other DNA
ggttcaacatggcctggacctgaccatctggagttgcctgccagccccaaagctttctttgggctgctagtgtcctcttcccttccttgacctgggttccccctctcctgcagaacgatt

SEQ ID NO: 26567 - DNA, 120 bp, synthetic construct
  source 1..120: mol_type = other DNA
atctgcgcgagtaccaggacctgctcaacgtgaagatggccctggatgtggagattgccacctaccggaagctgctggagggagaggagagccggtgaggggccaggcaggagcccgagt

SEQ ID NO: 26568 - DNA, 120 bp, synthetic construct
  source 1..120: mol_type = other DNA
cccagtctggagtgcaatggcaccatcttggctcactgcaacctccgcctcctgggttcaagcaattctcctgcctcagcttcccgagcagctgggattacaggcgcctaccaccacgcc

SEQ ID NO: 26569 - DNA, 120 bp, synthetic construct
  source 1..120: mol_type = other DNA
tgagccaccgcacccggcgtggaaacaattttatacaagaggccactgctctattaattgcagagaattaaccaaggccacctgggtaaaaagcaatttaattaacagcatttataaaaa

SEQ ID NO: 26570 - DNA, 120 bp, synthetic construct; identical to SEQ ID NO: 8091
  source 1..120: mol_type = other DNA

SEQ ID NO: 26571 - DNA, 120 bp, synthetic construct
  source 1..120: mol_type = other DNA
gacacagacgtcatgctcagagcaacccacctctagacacagaaaacaacatacaactggaaagggacaccagggaaccttgtgggataacagaaatgttctatatcttttttttttttt

SEQ ID NO: 26572 - DNA, 120 bp, synthetic construct
  source 1..120: mol_type = other DNA
tgggattacaggcgtgtgccaacacactcagctgattttttgtatttttagtagagatgaggtttcaccatgttggtcaggctggactctaactcctgacctcaagtaattcgcctgcct

SEQ ID NO: 26573 - DNA, 120 bp, synthetic construct
  source 1..120: mol_type = other DNA
tgcctggcctagaaatgttctatatcttgatttggactggtagttacacagacgtggacattgatcaaaactcattgaattgtacattaaagatctgtgcatttcactgtatgtaaattt

SEQ ID NO: 26574 - DNA, 120 bp, synthetic construct; identical to SEQ ID NO: 8092
  source 1..120: mol_type = other DNA

SEQ ID NO: 26575 - DNA, 120 bp, synthetic construct
  source 1..120: mol_type = other DNA
cgtgccagcagttcacagttgaaataatgatccttccagaagagactattcctgggacagctctagctggccttcgaccccattccttgagcagtatgggtggtgggagtgctggggtcc

SEQ ID NO: 26576 - DNA, 120 bp, synthetic construct
  source 1..120: mol_type = other DNA
tggtgcaatctccgctcactgcaagctccacctcctgggttcgcaccattctcctgcctcaccctcctgagtatctggaactacaggtgcccgccaccatgcccggctaattttttgtat

SEQ ID NO: 26577 - DNA, 120 bp, synthetic construct; identical to SEQ ID NO: 8093
  source 1..120: mol_type = other DNA

SEQ ID NO: 26578 - DNA, 120 bp, synthetic construct
  source 1..120: mol_type = other DNA
ggagtttaggtagaggtggatgaggcaacttatgacagagagagctttttatgtgattatattgtattgtatttaccatgtcccctgcaccttcttggagtattgggcctcaggaagcag

SEQ ID NO: 26579 - DNA, 120 bp, synthetic construct
  source 1..120: mol_type = other DNA
caagccccaccttggctgcttgtcgaacacctccagtttgctggagcaagatgttggatgcacgtttggaaaaaaatgccaaatcttagcaaagccaaacaatgaaaagaacgagctctt

SEQ ID NO: 26580 - DNA, 120 bp, synthetic construct
  source 1..120: mol_type = other DNA
ctcctttcctagatcaaaccttttctatcttcgatgtacatttccatcaggaaaaaaaacacgctgcgctccagcgagtcacaacattcatcacaggctggttgctagctaaggaaattc

SEQ ID NO: 26581 - DNA, 120 bp, synthetic construct; identical to SEQ ID NO: 8094
  source 1..120: mol_type = other DNA

SEQ ID NO: 26582 - DNA, 120 bp, synthetic construct
  source 1..120: mol_type = other DNA
ggagtgcagtggtgcaatctcggctcaccgcaacctccgcctcccaggttcaagcaattctcctgcctcagcctcctgagtagctgggattacaggcatgtgccaccacgcccccctaat

SEQ ID NO: 26583 - DNA, 120 bp, synthetic construct
  source 1..120: mol_type = other DNA
gcacctggccctgaaatcttaaagggagataggtactgtaaggtcctctaaagagtgtcttgagactgggctttggggttctatcttgaagaaggggagtcccaggagacaaatgtgtgc

SEQ ID NO: 26584 - DNA, 120 bp, synthetic construct
  source 1..120: mol_type = other DNA
tggagcaaatctgttggctcctgagaccatctaaactatgggacaggcgctggggactgcagaaccacctgctgggtgctgggctgaaggaaaggtgttaaagtcttgaagaagtaacaa

SEQ ID NO: 26585 - DNA, 120 bp, synthetic construct; identical to SEQ ID NO: 8095
  source 1..120: mol_type = other DNA

SEQ ID NO: 26586 - DNA, 120 bp, synthetic construct
  source 1..120: mol_type = other DNA
gctccattctctggctagcacatggttggactgggcttctcttcctccccaggtcgtcagtgaggccacacagcagcagcatgaagtgctctaaagacagagaccctctgccaccagaga

SEQ ID NO: 26587 - DNA, 120 bp, synthetic construct
  source 1..120: mol_type = other DNA
ggtccccaacagcgacatagcccatccctgcctggtcacagggcatgccccggccacctctgcggaccccagctgtgagccttggctgttggcagtgagtgagcctggctcttgtgctgg

SEQ ID NO: 26588 - DNA, 120 bp, synthetic construct
  source 1..120: mol_type = other DNA
gccccgcagacctccccagcccctagcccaggagagagaaagccaggcaggtagccagggggactagcccctgtggagactggggggcttgaaattgtccccgtggtctcttactttcct

SEQ ID NO: 26589 - DNA, 120 bp, synthetic construct; identical to SEQ ID NO: 8096
  source 1..120: mol_type = other DNA

SEQ ID NO: 26590 - DNA, 120 bp, synthetic construct
  source 1..120: mol_type = other DNA
ttttttgtggcactttttaatagtacgtctccgtgaacatattatatcacttctgggactacatatttttgagagcagaggccatatcttacatacagtagataccaaataaattttaac

SEQ ID NO: 26591 - DNA, 120 bp, synthetic construct; identical to SEQ ID NO: 8097
  source 1..120: mol_type = other DNA

SEQ ID NO: 26592 - DNA, 120 bp, synthetic construct
  source 1..120: mol_type = other DNA
gtctagatagtgcataacaaattactgacgacaaatcctaagtgcgttaaagtaaaattttaagaccaaaagcacatgaatgcactcagttatgataatgtgagatgatacagtattttc

SEQ ID NO: 26593 - DNA, 120 bp, synthetic construct
  source 1..120: mol_type = other DNA
gcttttcttcacaggcctgtaagctccccaaattctaaagcctgtgagtttttcttgctctgtatttcatttacatgaacttttccctcaatgttataaattataaatgcttgtggtaaa

SEQ ID NO: 26594 - DNA, 120 bp, synthetic construct
  source 1..120: mol_type = other DNA
aaacctatcctagttttaaaatactactatagtttatgtcttttcccatttaattaaagttttcaaaataaaatgattgcatgatattccatcatcatatcacaatagtgatagctgctg

SEQ ID NO: 26595 - DNA, 120 bp, synthetic construct; identical to SEQ ID NO: 8098
  source 1..120: mol_type = other DNA

SEQ ID NO: 26596 - DNA, 120 bp, synthetic construct
  source 1..120: mol_type = other DNA
ttcttttggataaatcccttttacttgatttcattggtaattctgcatcacatcttgtgtatattgacaccctctgctcctttcacctctggctttctgagcctctcattccctattggt

SEQ ID NO: 26597 - DNA, 120 bp, synthetic construct
  source 1..120: mol_type = other DNA
tttcacctctggctttctgagcctctcattccctattggttaactcatgtccttggtgcctgggagttttccaattggccctgttcccaggggaacactccttaagctgaaaagtctcgt

SEQ ID NO: 26598 - DNA, 120 bp, synthetic construct
  source 1..120: mol_type = other DNA
ccaaacagttgctgccttctggacagtcacttgttccacctgctgttgacctttctagttctatttatctctggagatttggcaattctgatttttaaaaatatatgcaacttactttgc

SEQ ID NO: 26599 - DNA, 120 bp, synthetic construct
  source 1..120: mol_type = other DNA
tagaaagtagaaaccacagggaacaatgtacattctgaaatgcttaatttgcagacattgtgaaattttactcatcaatgtgtttcaactctttggtacatttctagcattttgcttaat

SEQ ID NO: 26600 - DNA, 120 bp, synthetic construct; identical to SEQ ID NO: 8099
  source 1..120: mol_type = other DNA

SEQ ID NO: 26601 - DNA, 120 bp, synthetic construct
  source 1..120: mol_type = other DNA
aagtaaacagaaaagatgtggctagcagaaactccacaattctaacctctcagctatgcccagattttctgtagggatacaaaggtacagtcacaaagggaagagagaatgaaacaaaac

SEQ ID NO: 26602 - DNA, 120 bp, synthetic construct
  source 1..120: mol_type = other DNA
atgctccaaatccatgacacagtaaaattcctctataaaacaagatttagggtgtgttcttttaaattaaagtgctctgtttacctgactagctatttcaaagctctagcttctttttgt

SEQ ID NO: 26603 - DNA, 120 bp, synthetic construct
  source 1..120: mol_type = other DNA
acatttaagcaaaagtaataggttctgcttcttagctattgatgggataaagaacacaaggacaggtggggagagaagagcttcttggaagaaagatcagatcctacttctcaagatttc

SEQ ID NO: 26604 - DNA, 120 bp, synthetic construct; identical to SEQ ID NO: 8100
  source 1..120: mol_type = other DNA

SEQ ID NO: 26605 - DNA, 120 bp, synthetic construct
  source 1..120: mol_type = other DNA
atggaaaaagctcgtagatgtatgccactttctttgctttgtggtttctcaagatattttttgaagcaaggcctgacttacaacattttataaataactaatgggaattttggcaaactc

SEQ ID NO: 26606 - DNA, 120 bp, synthetic construct
  source 1..120: mol_type = other DNA
tgatgaagtgacagtcgcaaacataattttcacattggctaaaaattttcaagttgagaaaaagaattctttaggcaatatgcagtctgatcttagccaggtacctaacacacatgtgca

SEQ ID NO: 26607 - DNA, 120 bp, synthetic construct; identical to SEQ ID NO: 8101
  source 1..120: mol_type = other DNA

SEQ ID NO: 26608 - DNA, 120 bp, synthetic construct
  source 1..120: mol_type = other DNA
caccatgtctatcatgtaaaatttatgccacagaaaattagtatgtgctgagaataaaaaacctaacttttattatttctcttttttcctttatgacctgggcaatataatttgatgaat

SEQ ID NO: 26609 - DNA, 120 bp, synthetic construct
  source 1..120: mol_type = other DNA
ttctctgctaaaaatacaaaaattaaccaggcgtggtggtaggtgcctgtaatcccagctactcaggaggctgaggcagaagaattgcttgaacctgggaggcagaggttgcagtgagcc

SEQ ID NO: 26610 - DNA, 120 bp, synthetic construct
  source 1..120: mol_type = other DNA
cttagtgtcctacatgaaagaaaagaaacacacacacaaacctgtagatgaaaactttacagccatgtgctctagacacacaaatgtctaggcggtagtatttttactagatcctcaaaa

SEQ ID NO: 26611 - DNA, 120 bp, synthetic construct
  source 1..120: mol_type = other DNA
aggtcctcaacttaagatggctcgatctgatatttcaactttatgatggtgtcaaagaaatatgcattcagcattctcctacacttatgagactacatcccaataagcttattttaagtt

SEQ ID NO: 26612 - DNA, 120 bp, synthetic construct; identical to SEQ ID NO: 8102
  source 1..120: mol_type = other DNA

SEQ ID NO: 26613 - DNA, 120 bp, synthetic construct
  source 1..120: mol_type = other DNA
aacagctgacatagggtacacctcaacctcatgaatgcttggattgggagtagcagaagcagaagttcactcactagtgtcctgaagttctttcacatcatctgaagctttttaaaaaca

SEQ ID NO: 26614 - DNA, 120 bp, synthetic construct
  source 1..120: mol_type = other DNA
ttcatcttgcactttctcatagaagcacagtccttctagtctctgttttaaaaggctacatatgactgcactgggaaggcatcaaatgactacagtacaaacaaagtatttaatgaatga

SEQ ID NO: 26615 - DNA, 120 bp, synthetic construct
  source 1..120: mol_type = other DNA
aggattctctgtttcaagcctaagtaagtggaagaagggcaccattgtgtaaataactcaggagaacctgatttgatgtggtagtatgtgtttgtctttttgcatgagtttgaagtgcta

SEQ ID NO: 26616 - DNA, 120 bp, synthetic construct; identical to SEQ ID NO: 8103
  source 1..120: mol_type = other DNA

SEQ ID NO: 26617 - DNA, 120 bp, synthetic construct
  source 1..120: mol_type = other DNA
tcttgctgcttttcatttgctgaagaagcaccagccatttcttcgggaaactctttatgattttgcctcctcgagaattttacctgccttttcagttaagcatcaagatttatcacactg

SEQ ID NO: 26618 - DNA, 120 bp, synthetic construct
  source 1..120: mol_type = other DNA
tgggaaaggtgaataagagcatcatggcaagatgtcagcagtaaagcagagtggagactgaagctaaattgttcccaactcaggcgttctctgctcatagaacaatagcagtggctaagg

SEQ ID NO: 26619 - DNA, 120 bp, synthetic construct
  source 1..120: mol_type = other DNA
agaaagcttaagtgacttctcaaatcccacagctagtaaggatagagccggaatttgcatcaagacactcttacttggaagtcttagcacttggggttactatgacgactgccaaacagc

SEQ ID NO: 26620 - DNA, 120 bp, synthetic construct; identical to SEQ ID NO: 8104
  source 1..120: mol_type = other DNA

SEQ ID NO: 26621 - DNA, 120 bp, synthetic construct
  source 1..120: mol_type = other DNA
gaattgtacatgtgacttgtttaaaatcatttattattatcaggagtgccttttaggtggaccgctctgtatgactctcatgcttcaaaactattttttattcaagtgacttacaatggc

SEQ ID NO: 26622 - DNA, 120 bp, synthetic construct
  source 1..120: mol_type = other DNA
aaatatggcaataacaatgcactgaaaatgtctccaaaacaaactctacattttaaaaaatgtataacaggaatctaaggaaggggtcttacttctctgattcagggagtgcgaaatccc

SEQ ID NO: 26623 - DNA, 120 bp, synthetic construct; identical to SEQ ID NO: 8105
  source 1..120: mol_type = other DNA

SEQ ID NO: 26624 - DNA, 120 bp, synthetic construct
  source 1..120: mol_type = other DNA
ctattaagtttcattttgttttactgttttaaaatttaaatagtttggctcatttctacatttgttaaaattgtaatcttaaaatattaaaaaaataactttacaaacacacagatatga

SEQ ID NO: 26625 - DNA, 120 bp, synthetic construct
  source 1..120: mol_type = other DNA
cagaactgtaaatgtgttgtcatacagtaaatatccacatcccaattctaattacaccattcttgttgttaacacagagcactgcttctaataaaagcatggcatagttctacagtttca

SEQ ID NO: 26626 - DNA, 120 bp, synthetic construct
  source 1..120: mol_type = other DNA
aaaacaaaaaaaaggaataattcactttatgagagaagaaaagagagacagatttttaaaatatttggattctttagcccatatggaaattaaaaaaaaaaaaaaaactggagagagaaa

SEQ ID NO: 26627 - DNA, 120 bp, synthetic construct; identical to SEQ ID NO: 8106
  source 1..120: mol_type = other DNA

SEQ ID NO: 26628 - DNA, 120 bp, synthetic construct
  source 1..120: mol_type = other DNA
agcaaggtctctacaattttccattaggttgtgcttcaaatagtctataataaggacttgaattaattacattttattgcactataaattggctgttgtcattatacccaaatgtaacaa

SEQ ID NO: 26629 - DNA, 120 bp, synthetic construct
  source 1..120: mol_type = other DNA
gaccaaagagattccatccaaataatgagagaaaaacccccacaaatagcatcttctgctttaaaaaattcttggtttgtaattttttttaaaagtcataaagccactggctttcagaga

SEQ ID NO: 26630 - DNA, 120 bp, synthetic construct
  source 1..120: mol_type = other DNA
cccagccaccgatcctcttccttcatagttatatgtcaggacatagtcttgggcatgcttgtgattttcatcttgattacacagatacactttctgccaaggggaaaaacacaacgtttt

SEQ ID NO: 26631 - DNA, 120 bp, synthetic construct; identical to SEQ ID NO: 8107
  source 1..120: mol_type = other DNA

SEQ ID NO: 26632 - DNA, 120 bp, synthetic construct
  source 1..120: mol_type = other DNA
gtttctaaggtacaagttgtcagatgggaaatattagcacaaagccatgagacagtaatttaaatctcatcacacattatttagtaattctttcaattaaaaaaataggaggggaagtaa

SEQ ID NO: 26633 - DNA, 120 bp, synthetic construct
  source 1..120: mol_type = other DNA
tataaagtttaaagaaaattaaaatagatttgtaggccacttaggaaaactcacttcaccaagacggggctgagtaaaactgtgccactccgagtaagtgtatctgcagttgtccacctc

SEQ ID NO: 26634 - DNA, 120 bp, synthetic construct
  source 1..120: mol_type = other DNA
tgatcccacggtgccacaaactccctgagcagaagcgcccacagtttgggttgtgaagccattcgcagaatactgaaatgaaaacaatttgcattagggataatacagagaggaacacaa

SEQ ID NO: 26635 - DNA, 120 bp, synthetic construct; identical to SEQ ID NO: 8108
  source 1..120: mol_type = other DNA

SEQ ID NO: 26636 - DNA, 120 bp, synthetic construct
  source 1..120: mol_type = other DNA
gcctcgccaacatggtggaactccgtctctactaaaaatacaaaaatcagctgggcatggtagtaggcacctgtaatcccagctactcgggaggctaaggcacaggaatcgcttgaacct

SEQ ID NO: 26637 - DNA, 120 bp, synthetic construct
  source 1..120: mol_type = other DNA
tcttcaatccttcctacatctcacacctcaaaataaacactgttgtctcacatatacttactctgcttagtttaaattaattcccttttacctgactaaagcagaaacagaagtaatgat

SEQ ID NO: 26638 - DNA, 120 bp, synthetic construct
  source 1..120: mol_type = other DNA
taactgcaacattaaacccttgccatctaaatatatatgaataaactaggcagggaaaataacaagaacaccaaagctttggccactagttatttatgttgcatttttggaaactctaat

SEQ ID NO: 26639 - DNA, 120 bp, synthetic construct; identical to SEQ ID NO: 8109
  source 1..120: mol_type = other DNA

SEQ ID NO: 26640 - DNA, 120 bp, synthetic construct
  source 1..120: mol_type = other DNA
cttcccacgatgatcaaggcttgtagtgattttattgttgccagaaaatgtaaaaccatgttggtaaaccgtgaataattaaaagcagcatttttacagcacaaacagcagttgaaatat

SEQ ID NO: 26641 - DNA, 120 bp, synthetic construct
  source 1..120: mol_type = other DNA
catcatgtaaatcaaagtcattttatctgtttcaggggacccatgacattctatggtaaattgcctgataccaaaagaacttttctgagaaaagatcattttagaaggaatacgcattat

SEQ ID NO: 26642 - DNA, 120 bp, synthetic construct
  source 1..120: mol_type = other DNA
ttggttgtttagacgtcccagaagccccacagaccagcgtaaacaggatgcctggaggaagaaagaaatatacttgagtttatcataaaataatatgaagttataaatgtacaatggtta

SEQ ID NO: 26643 - DNA, 120 bp, synthetic construct
  source 1..120: mol_type = other DNA
aatagcatatctacttaaacttttaaacagatatgctataattatgttacatgttctgtttctacattgaattttatgtctataataactaagacactagaactatacataaatgcactt

SEQ ID NO: 26644 - DNA, 120 bp, synthetic construct; identical to SEQ ID NO: 8110
  source 1..120: mol_type = other DNA

SEQ ID NO: 26645 - DNA, 120 bp, synthetic construct
  source 1..120: mol_type = other DNA
ctttaaagggtattatttgaattcaagaaaggacttaagacttacaaaagagcaatgctatgcccaacaatattgcaaggatggcccactttccaagttgtactcctccaccgccaatcc

SEQ ID NO: 26646 - DNA, 120 bp, synthetic construct
  source 1..120: mol_type = other DNA
gtcacacagtgtaacatccaatgaagtgacactagacatgccaagtctatctctcactgttataggtactacatatgagccaaatggaggatcattctgataggaaagacgtgctgctgt

SEQ ID NO: 26647 - DNA, 120 bp, synthetic construct
  source 1..120: mol_type = other DNA
gcatagctgctagaagattctaaatgtgaatggctagagtagttctaatctatacccattgcaaacatattacatataaaagtttgtctatgctgcctcttaaacaaagtcttttggctc

SEQ ID NO: 26648 - DNA, 120 bp, synthetic construct
  source 1..120: mol_type = other DNA
tttcttttacacatgcttcatcgaagtaatagtctgaaattctggatgttttcctttacttcattttcaaaaattgtgccaaataaacataaatacttgtgacttactgtcagagactaa

SEQ ID NO: 26649 - DNA, 120 bp, synthetic construct; identical to SEQ ID NO: 8111
  source 1..120: mol_type = other DNA

SEQ ID NO: 26650 - DNA, 120 bp, synthetic construct
  source 1..120: mol_type = other DNA
gactagatatactactactctaaatgcagataccaggtcccatagaataatccctctcccacatagctgcccagtatgacattctcattttctgcatagtatttgaagctctaaatacaa

SEQ ID NO: 26651 - DNA, 120 bp, synthetic construct
  source 1..120: mol_type = other DNA
tcctaatgtgtcatggtgtattacatgcattatctcatttactcccccaaaaatcccattttagtaaattgatgctcaaagacaataaatagcacggtcagatttacttaactaacaaac

SEQ ID NO: 26652 - DNA, 120 bp, synthetic construct
  source 1..120: mol_type = other DNA
tttaaaataacaaagatgttgacaaacatacagctgccaaagttttattttgctaagtaagactattgggaaaaaaaaatgtccactttctatcaacactatttaaaaattaatatcatg

SEQ ID NO: 26653 - DNA, 120 bp, synthetic construct; identical to SEQ ID NO: 8112
  source 1..120: mol_type = other DNA

SEQ ID NO: 26654 - DNA, 120 bp, synthetic construct
  source 1..120: mol_type = other DNA
aatttgtcataacaggaaattgagggatattcactgaaagcatggggctgaaaaacattcaagggcatttaaaaagcaagcctcattcagtggttctagagtcacgaaagctggtagacc

SEQ ID NO: 26655 - DNA, 120 bp, synthetic construct
  source 1..120: mol_type = other DNA
acttatcactgtagatccttctgggctaaagacaaaagtacacatggggaaccgagttaggggagaatcccaaggagaatacaatagacatgaaatagtcagaagtcaatacagtggcag

SEQ ID NO: 26656 - DNA, 120 bp, synthetic construct
  source 1..120: mol_type = other DNA
ggcagcccacatacactgatggaacaataagagagaataggggatcgattcaggaccactctgaaggcccatttagctcagactccccctggggttcactgaggttgtcatttggcttgt

SEQ ID NO: 26657 - DNA, 120 bp, synthetic construct; identical to SEQ ID NO: 8113
  source 1..120: mol_type = other DNA

SEQ ID NO: 26658 - DNA, 120 bp, synthetic construct
  source 1..120: mol_type = other DNA
attagagacacactagagagacctactcccaacacacaaaaactgagaaactttcattggtgtttcccacatggtgaattttctcctatttcatacaaaaaaaaaaaagtatcgcagaca

SEQ ID NO: 26659 - DNA, 120 bp, synthetic construct
  source 1..120: mol_type = other DNA
tggataggctcatcaggatcaaccgcaacaatctccgcagatgacatggtgggtttgcagatgatcactgtctttttaggtatgaatgggctgttatcattcacgtcttgaagtataatg

SEQ ID NO: 26660 - DNA, 120 bp, synthetic construct
  source 1..120: mol_type = other DNA
cctataatgtagaagttacaatgacaagcagtcacaagctatgtcctcagggaatgttacaagaaaaatagtattactttcatatgggttgtacaaacaatgactgctattaagatgtgt

SEQ ID NO: 26661 - DNA, 120 bp, synthetic construct; identical to SEQ ID NO: 8114
  source 1..120: mol_type = other DNA

SEQ ID NO: 26662 - DNA, 120 bp, synthetic construct
  source 1..120: mol_type = other DNA
agtacatgggaatattcaaagggcagaagactccaggagtagaaaattacttgaaaactgaaataatcactgtgggttgtagcctaagtaattcatctatctgtatattcaatagaaact

SEQ ID NO: 26663 - DNA, 120 bp, synthetic construct
  source 1..120: mol_type = other DNA
caggagttcgagaccagcctgaccaacatggagaaagcctatctctactaaaaatacaaaattagccaggcatggtggcacatgcctataatatcagctactcgggaggttgaggcaaga

SEQ ID NO: 26664 - DNA, 120 bp, synthetic construct
  source 1..120: mol_type = other DNA
aaagaaagaaagaaacttacaggatgacgactttatataaagcactgcactggaaaatctgggggattcaaagatgaaacagccatggacccacgccacagattagtaatgcagttgtga

SEQ ID NO: 26665 - DNA, 120 bp, synthetic construct; identical to SEQ ID NO: 8115
  source 1..120: mol_type = other DNA

SEQ ID NO: 26666 - DNA, 120 bp, synthetic construct
  source 1..120: mol_type = other DNA
gaactggttctaaaccgtgggccacagagaaagagcaggtgaaggcaactacaagactagtagttaatatgggcaaagtgggagagagggaaaaaacaaaaacagaaagcaaagcaaaca

SEQ ID NO: 26667 - DNA, 120 bp, synthetic construct
  source 1..120: mol_type = other DNA
ccagtcaaaagattaattcattctatccaagacgtctctgaaacaggtatgtttagaatcttcaaagacataaagaggggtaaccaattaaacaagaatgaaattacagctcaaattcca

SEQ ID NO: 26668 - DNA, 120 bp, synthetic construct; identical to SEQ ID NO: 8116
  source 1..120: mol_type = other DNA

SEQ ID NO: 26669 - DNA, 120 bp, synthetic construct
  source 1..120: mol_type = other DNA
ctcagaattttaaaccaagtcaaagtgtcacttaagtatgaggccaatattaaaatatttttcagaacaacaaaactgagagagtttaaaattcacattccacaattgaaaaaaatatag

SEQ ID NO: 26670 - DNA, 120 bp, synthetic construct
  source 1..120: mol_type = other DNA
aaggaagcaggtggataatatatatttcatgtatctggcatatgtttctattcattagagcagaataatttctgtccctcaacttctcctgttctcatgctatgtggtgttaccttgctc

SEQ ID NO: 26671 - DNA, 120 bp, synthetic construct
  source 1..120: mol_type = other DNA
gaactctatagtgcttgctcttctacaactgggataaatgcttcaatttccttccagtagatgtttacagttgctcactgattaaactccaatctttttttgcacattgtgattaatact

SEQ ID NO: 26672 - DNA, 120 bp, synthetic construct
  source 1..120: mol_type = other DNA
tcttctagtaataatataattctacatggacaaaggctaattccaaatatgaagtcacatgaggtgcactatccatggtttcatgctttatgtgcatgatgctcttcagtcaaatgtttt

SEQ ID NO: 26673 - DNA, 120 bp, synthetic construct; identical to SEQ ID NO: 8117
  source 1..120: mol_type = other DNA

SEQ ID NO: 26674 - DNA, 120 bp, synthetic construct
  source 1..120: mol_type = other DNA
cagtatccatgagggaggagaggtttccattagggagtggcagggagaacccaaatgaaattagccagtatagattttagaaaaaggtttttcaaaaaatgacacacttttgtataatct

SEQ ID NO: 26675 - DNA, 120 bp, synthetic construct
  source 1..120: mol_type = other DNA
acatttattctatatcacaatgatgataagcagtgccccatctcaattccataacaaatatttgatctctcaatcacttaaactcctctgcaacagacgagaatgtagaataaaattata

SEQ ID NO: 26676 - DNA, 120 bp, synthetic construct; identical to SEQ ID NO: 8118
  source 1..120: mol_type = other DNA

SEQ ID NO: 26677 - DNA, 120 bp, synthetic construct
  source 1..120: mol_type = other DNA
aaattcatgttatagaaattatattttatgcaccaaacgcgtctcataaataatcatcatactcatatttctctcaattttatagaatgcacagaacataattttacattttatatgatt

SEQ ID NO: 26678 - DNA, 120 bp, synthetic construct
  source 1..120: mol_type = other DNA
atattgttagcttcctgtaaaaagttagagctgttttccaggactgcactgtgtaagtatgttttccaggactgcactatgtaagtatgttctcactttcctacaaagtgaacactttaa

SEQ ID NO: 26679 - DNA, 120 bp, synthetic construct
  source 1..120: mol_type = other DNA
cttggctaactgcaacctccacctcctgggttcaagcaattctcctgcctcagcctcccgagtagctcggattacaggtgcatgccactacacccagctaatttttaatatttttggtag

SEQ ID NO: 26680 - DNA, 120 bp, synthetic construct
  source 1..120: mol_type = other DNA
aagttttactaaaataattttctcaatttttaataattttaactttaataaattatggtctcaagtgtttctaagagtaaattattttataattacatctaaaactgagaaggctattag

SEQ ID NO: 26681 - DNA, 120 bp, synthetic construct; identical to SEQ ID NO: 8119
  source 1..120: mol_type = other DNA

SEQ ID NO: 26682 - DNA, 120 bp, synthetic construct
  source 1..120: mol_type = other DNA
tgccatttttgatggtctctgcctctctatccaggcttctgaaaactttgattgatcctgtattttcatcaatggtgacccaccctgttggatcagttaatttcttatacctgttggtaa

SEQ ID NO: 26683 - DNA, 120 bp, synthetic construct
  source 1..120: mol_type = other DNA
tctgggtcatatgctttatatccattgcttgttgttcccacttctgcattttctttcatgcgaacagtctgtattggagggttacactcagggccctcatcctgatcttctacattaaca

SEQ ID NO: 26684 - DNA, 120 bp, synthetic construct
  source 1..120: mol_type = other DNA
agcaaatgtattgaaaaatcagatgaactcatttaatatttggcaatgctaacgagtatatataatgttaaatttggaaatatgttaagtgtcatgttgggaataaccacgagaatatga

SEQ ID NO: 26685 - DNA, 120 bp, synthetic construct
  source 1..120: mol_type = other DNA
ccccactgctcatgatagtgagtgagttctcacaagatctggttgttcaaaagtgtgtagcacatccccctttgctctgtctctcctgttgccatgtgaagatgggcttgcttccccttt

SEQ ID NO: 26686 - DNA, 120 bp, synthetic construct; identical to SEQ ID NO: 8120
  source 1..120: mol_type = other DNA

SEQ ID NO: 26687 - DNA, 120 bp, synthetic construct
  source 1..120: mol_type = other DNA
cttgtcttaccctcctaagatgaataaaattatttgtacctggtatgaggaagagaaaaaaatgggtaaatttttttaaaatgcttttaagaggagcaagacaagaaaatacaaagctta

SEQ ID NO: 26688 - DNA, 120 bp, synthetic construct
  source 1..120: mol_type = other DNA
tagtgaaaccatgccctagaagacagaaattttttcaggtcttggacttcacacaaatttccttctgagaataccaaggattaggggaggggttaggtgaagaaagagacaagatttaaa

SEQ ID NO: 26689 - DNA, 120 bp, synthetic construct; identical to SEQ ID NO: 8121
  source 1..120: mol_type = other DNA

SEQ ID NO: 26690 - DNA, 120 bp, synthetic construct
  source 1..120: mol_type = other DNA
gaataacctctccatggggctgaccaagagtaactcttgatttgggaaattcagtaagtaaataaaggctccttgacccaaacacagaaaaactgggctaggaaaagtctggcactgtcc

SEQ ID NO: 26691 - DNA, 120 bp, synthetic construct
  source 1..120: mol_type = other DNA
aatatattctttccattgtatatgaagaacagagcatttgcatttacttatatacctattttattctacatttatcagaattcctttctttccattaaattctagcatgctattctatga

SEQ ID NO: 26692 - DNA, 120 bp, synthetic construct
  source 1..120: mol_type = other DNA
gtataattagctctccagttagcagtattcactaagtccttatcctcaacagtaactcgtaagatttccacatcaactgtattttcttccactgatgtcacatactaaaataataaaagc

SEQ ID NO: 26693 - DNA, 120 bp, synthetic construct; identical to SEQ ID NO: 8122
  source 1..120: mol_type = other DNA

SEQ ID NO: 26694 - DNA, 120 bp, synthetic construct
  source 1..120: mol_type = other DNA
gagccactgcgccaggccagagatgtgcatattaaacaattaaaactggtctatacatttttctttaattaatatcatacacttacagaagtacgagtaaatgttggcaagtggtcattt

SEQ ID NO: 26695 - DNA, 120 bp, synthetic construct
  source 1..120: mol_type = other DNA
ttaattattgggggaaagcaccaacattataattgaaatcttactttacactccataatttttttgcactaagaatttaagaagtgcattattacatttcacagcattcgtgtattagaa

SEQ ID NO: 26696 - DNA, 120 bp, synthetic construct; identical to SEQ ID NO: 8123
  source 1..120: mol_type = other DNA

SEQ ID NO: 26697 - DNA, 120 bp, synthetic construct
  source 1..120: mol_type = other DNA
acagcaatgactcttaaaatagtcttttaacaaaacaataaaatgaaatttcttcctgcaaaaaatatagattttaagggtttatgttacatttaagagatcatctaaactgacatgaag

SEQ ID NO: 26698 - DNA, 120 bp, synthetic construct
  source 1..120: mol_type = other DNA
acatctgaagcatttaaatattttaaagtgtttctccttataactttcatttatcataagtgattgagatatgggagaattaaaaacaatacagtaataatgctttccggactgagcatt

SEQ ID NO: 26699 - DNA, 120 bp, synthetic construct
  source 1..120: mol_type = other DNA
tcttcttctataagatggtgatgcttacctttcctacctaatttatctcttttcataagacaaaatagcatgttaaaatctatcctcatcttctacctagaatgttcacccttctcttac

SEQ ID NO: 26700 - DNA, 120 bp, synthetic construct
  source 1..120: mol_type = other DNA
ctcctccctcataaccaatcacatgtgtagacttgaaaaataatggccttatttcaactgaaaaattttaaaacatcatgctactgtactttcaagaaggaatacatattttgtttgtag

SEQ ID NO: 26701 - DNA, 120 bp, synthetic construct; identical to SEQ ID NO: 8124
  source 1..120: mol_type = other DNA

SEQ ID NO: 26702 - DNA, 120 bp, synthetic construct
  source 1..120: mol_type = other DNA
gactatagttttatgaaagtattttgtaaaacataaagttaatctgtcacttcagggaaaacaactatttgttgccaatgataaattggagatttcaaacaaaaatgagaagcttggaaa

SEQ ID NO: 26703 - DNA, 120 bp, synthetic construct
  source 1..120: mol_type = other DNA
gaccaatgcacaatatagaatgatgtactggtaaaatggtcactcaaagtgtaagatagagcaatggattttaacgtaataaagtacaaaaggtcattgttgaggattcagagtccacat

SEQ ID NO: 26704 - DNA, 120 bp, synthetic construct; identical to SEQ ID NO: 8125
  source 1..120: mol_type = other DNA

SEQ ID NO: 26705 - DNA, 120 bp, synthetic construct
  source 1..120: mol_type = other DNA
gtgtaacaatttttactgttattttataagaattttaactgttaacatgtaattaatttattatttttaatatttaaattaatatataatttaaactttccttagttttaaacattaaca

SEQ ID NO: 26706 - DNA, 120 bp, synthetic construct
  source 1..120: mol_type = other DNA
ttgagaccaaagcttttgagaacctctaccctaatccatgagggatagaggaaggaagagaaaattaatctgaagatttaagacttaagaatcaaataaaatacctgataaacatctatt

SEQ ID NO: 26707 - DNA, 120 bp, synthetic construct
  source 1..120: mol_type = other DNA
tactaagctagggtattgcagtagaaagagacagaatatagatttaaaacaatcttggaggtaaaaacatgctttaggaagtgatgtgattcaggggggccaagagacatcaaatacaat

SEQ ID NO: 26708 - DNA, 120 bp, synthetic construct; identical to SEQ ID NO: 8126
  source 1..120: mol_type = other DNA

SEQ ID NO: 26709 - DNA, 120 bp, synthetic construct
  source 1..120: mol_type = other DNA
attttgttttaatactgtaaatatgtttatatcaggaaatctgattgtatgaaacaaacaattcagaaaagaatgaattagcagttcaaaaccagcatactccaaggttatttagtgatc

SEQ ID NO: 26710 - DNA, 120 bp, synthetic construct
  source 1..120: mol_type = other DNA
ttaatgtttatgttacctctctgtctagctgagatgatgttgtggtgatcacgcctgtagttggatgcatagaaaatagggtgggtgatggtggcacctgcccaatgatggagtacttca

SEQ ID NO: 26711 - DNA, 120 bp, synthetic construct
  source 1..120: mol_type = other DNA
tatttcattccttttcacccacctcaaaaaagttctggaccacattattacatggcaaagtcatggcttttataaatttgcagacctctccatacagtatcacttcctttcaaatattct

SEQ ID NO: 26712 - DNA, 120 bp, synthetic construct; identical to SEQ ID NO: 8127
  source 1..120: mol_type = other DNA

SEQ ID NO: 26713 - DNA, 120 bp, synthetic construct
  source 1..120: mol_type = other DNA
tctttaagactacatctccaattagtgaaagacttattctttttgggctatgttctcttacatccatccatccataggatgacagcataacatttattaactcctatttgtcaggcactg

SEQ ID NO: 26714 - DNA, 120 bp, synthetic construct
  source 1..120: mol_type = other DNA
acacagctagtgaaacacagagtaaaattccacccagagtcccttattcttgctgctgggatacgctgcttctcaacggacatagtgaaactaaatgtatgaattgaaacacagttaatt

SEQ ID NO: 26715 - DNA, 120 bp, synthetic construct
  source 1..120: mol_type = other DNA
ttgggtagttatcattttcatcctctattttgattattaggggcagtggaagttctggagtatacccatctggagttgttgcaaaggcaattatctgtgaagagagtaaaataaggagaa

SEQ ID NO: 26716 - DNA, 120 bp, synthetic construct
  source 1..120: mol_type = other DNA
cattttggctttaacttggagactgttcagaactacagtatgagtctcaccatttgttattgttctgggatatggatataattttaatgccaaagaggtgcctaatttcatgattcaata

SEQ ID NO: 26717 - DNA, 120 bp, synthetic construct; identical to SEQ ID NO: 8128
  source 1..120: mol_type = other DNA

SEQ ID NO: 26718 - DNA, 120 bp, synthetic construct
  source 1..120: mol_type = other DNA
gtaaactgtggtggaatacagtttaatttttttgtttttataatatgaatttcaataccaattttctcataacagctatcatagaaaggccagaacatcctaggtactcagaaggccagg

SEQ ID NO: 26719 - DNA, 120 bp, synthetic construct
  source 1..120: mol_type = other DNA
aagcaaaatgaccaagtcctgttgggaaatcaaaccagcattaggttaaattctttcatattaactcactttccagcataggaaattaaccagatgattaaaggactgagtaagcttagg

SEQ ID NO: 26720 - DNA, 120 bp, synthetic construct; identical to SEQ ID NO: 8129
  source 1..120: mol_type = other DNA

SEQ ID NO: 26721 - DNA, 120 bp, synthetic construct
  source 1..120: mol_type = other DNA
ctaaaaatacaaaaaattagctgggtatcatggtgcgtgcctgtgatcccagctactcaggaggctaaggtgggaggatcacttgaaccccggagccagagattgcagtgagccgagatt

SEQ ID NO: 26722 - DNA, 120 bp, synthetic construct
  source 1..120: mol_type = other DNA
caggaacaatctaatggaatccaatattatttattctatgaaaatattttttgtttcaagtcaattatgtgctattagggagtagccagagcattggtgacaaactcagaaagcagaaaa

SEQ ID NO: 26723 - DNA, 120 bp, synthetic construct
  source 1..120: mol_type = other DNA
aatacaagtttccagtgtctctctccacataaaataaattccgaggttcttggtcaactccaggacctcttatggaatagtatatggtatagttttgggccgtgtcagattgaacctaga

SEQ ID NO: 26724 - DNA, 120 bp, synthetic construct
  source 1..120: mol_type = other DNA
taaattaaaacagcaatagaataagaaagtccaattgagaaatttcaagagcaaggcatgagtaaaataatgtagtgcatcttagttctccagaataactaaaggaatatttgacaggct

SEQ ID NO: 26725 - DNA, 120 bp, synthetic construct; identical to SEQ ID NO: 8130
  source 1..120: mol_type = other DNA

SEQ ID NO: 26726 - DNA, 120 bp, synthetic construct
  source 1..120: mol_type = other DNA
tctttatatcaggataactgacacaactgttttctaacaatttctcaactttaatatgctcttctctcagctgtattaaatttgttggtggggtataaaaaggattctcccttgctatgt

SEQ ID NO: 26727 - DNA, 120 bp, synthetic construct
  source 1..120: mol_type = other DNA
agccaggtatgcttggctcatgcctgtaatcccagcattttgggaggttgagatgggagatcatttcagcctaggagttcaaaaccagcctaagcaacatagtgagatctcatcgctaca

SEQ ID NO: 26728 - DNA, 120 bp, synthetic construct; identical to SEQ ID NO: 8131
  source 1..120: mol_type = other DNA

SEQ ID NO: 26729 - DNA, 120 bp, synthetic construct
  source 1..120: mol_type = other DNA
tcactcacatatttatacacaactattacaaataacttcatactcagtgtcataatggtaagagatggaaactatagactcccacagcagaaagaaagaaaacggtacctgttgaaggaa

SEQ ID NO: 26730 - DNA, 120 bp, synthetic construct
  source 1..120: mol_type = other DNA
gacaggaaaaaataataaagtcaatgactactttattctcaaacattaaacaatgacacatctttctcctctcaggaggattagctgggtaggggtgagaccatgggagtgcttgaaaac

SEQ ID NO: 26731 - DNA, 120 bp, synthetic construct
  source 1..120: mol_type = other DNA
tgatttggtggaaatatggaagaaagagagatggaactggaagcctagaagcaaaactgaaaaaaaaattactgttgccccattgccatgcaaaaacatgggagagagatatgcaaagaa

SEQ ID NO: 26732 - DNA, 120 bp, synthetic construct
  source 1..120: mol_type = other DNA
aactctcaaactgctgcagtgaggaatggctaatggttgaatacaagttattttgatcttgggtgtcacaacacaatagcatgcatgtggtccaaacctcctcctaaaatagttatctat

SEQ ID NO: 26733 - DNA, 120 bp, synthetic construct; identical to SEQ ID NO: 8132
  source 1..120: mol_type = other DNA

SEQ ID NO: 26734 - DNA, 120 bp, synthetic construct
  source 1..120: mol_type = other DNA
catttatgtagccttgtatacctttgtttgatgctccaaaaagacaaatattttcttcttttcttggttctcagtgttggaaagtaatatggtaaaacttctcttctccgaggacaatag

SEQ ID NO: 26735 - DNA, 120 bp, synthetic construct
  source 1..120: mol_type = other DNA
caatcatttttaaagtaaaacataggatatagttttaacagtaatgtatgcacgtggggagagccaaaaacttaaaattcattatactgacacttgtaaatttttgaaaggacacataaa

SEQ ID NO: 26736 - DNA, 120 bp, synthetic construct; identical to SEQ ID NO: 8133
  source 1..120: mol_type = other DNA

SEQ ID NO: 26737 - DNA, 120 bp, synthetic construct
  source 1..120: mol_type = other DNA
cagagtgaaatatttaagaataaaaatccaaaaacagtatctttaaactaaaaaaaacagtttcagtactatttctcaattttttagaggcatgttaaatgtctttatcttttctctaaa

SEQ ID NO: 26738 - DNA, 120 bp, synthetic construct
  source 1..120: mol_type = other DNA
atactacattagttttatctactggtcccaacagagttatcattctaaaaattacactaattttaaaataccacagcaaatcaggatttattttgtatgtgtgtttttattttaagtttc

SEQ ID NO: 26739 - DNA, 120 bp, synthetic construct
  source 1..120: mol_type = other DNA
gatgctctcgccctcccagaacccccaacaagccccacttgtgttgttccccactctgtgcctacatgttcacattgctcagctcccacttataagtgagaacatgcagtgtttgatttt

SEQ ID NO: 26740 - DNA, 120 bp, synthetic construct; identical to SEQ ID NO: 8134
  source 1..120: mol_type = other DNA

SEQ ID NO: 26741 - DNA, 120 bp, synthetic construct
  source 1..120: mol_type = other DNA
cttatataaatgttaattatattacatattgactacactaaatattaattttaaaatatttaattaaatataaatacatgaatttatatttataattatatgtgatttatgttattataa

SEQ ID NO: 26742 - DNA, 120 bp, synthetic construct
  source 1..120: mol_type = other DNA
aagcttgtaaactcaaagagttatgtatgctcttcagctttgtttactatattgtaaaacgtatgtaataacttcactgattaactcagtgggtacagtgacgatccaacaacagcctag

SEQ ID NO: 26743 - DNA, 120 bp, synthetic construct
  source 1..120: mol_type = other DNA
tatcaaatcaataatatcctaaacaaaaagtaaatgcttttaaagacaaacattaacttattgccatgaagtgatttggagaatatttatgtgttactccacacaataggcacataactt

SEQ ID NO: 26744 - DNA, 120 bp, synthetic construct
  source 1..120: mol_type = other DNA
gcaacatatacgtaaacacactgaaatttaattttgttctgtctgaaactttacaatggatgtttctcaaagattcacattctttttttctagttttacaaacatctttgaccaaaagca

SEQ ID NO: 26745 - DNA, 120 bp, synthetic construct; identical to SEQ ID NO: 8135
  source 1..120: mol_type = other DNA

SEQ ID NO: 26746 - DNA, 120 bp, synthetic construct
  source 1..120: mol_type = other DNA
tgctaaacggattcaatggctagagcagtgaacaaagccaagtccttgcctcacgaagattacatgataataagaagcaaaagaaatacacaaatgcacaaatgtcacataatgccaagg

SEQ ID NO: 26747 - DNA, 120 bp, synthetic construct
  source 1..120: mol_type = other DNA
aagaaatacacaaatgcacaaatgtcacataatgccaaggcagcgagagataaatgtcacgacaaaaataaagcagggagagagggtgacaacgagaatacctgagcgtaaatgaagtga

SEQ ID NO: 26748 - DNA, 120 bp, synthetic construct; identical to SEQ ID NO: 8136
  source 1..120: mol_type = other DNA

SEQ ID NO: 26749 - DNA, 120 bp, synthetic construct
  source 1..120: mol_type = other DNA
agcaggaatctaagagtggggtaatggttacttgggctaaggtaataatgttggagaagatgaaaaatggttggattaagacaattctttgaataacagtatcttggacatccatccatt

SEQ ID NO: 26750 - DNA, 120 bp, synthetic construct
  source 1..120: mol_type = other DNA
aagacaaatgtaatgatagggaagtacagggagctatgggagagcagaggtaatagtgatatctaaaagccaggtgaggtcacctgaagagcggctacaagtgagacaggctaagaggag

SEQ ID NO: 26751 - DNA, 120 bp, synthetic construct
  source 1..120: mol_type = other DNA
atgggctcaaagaagtgggtgtgggccagattttgaacggcattagcaaagcacatggatcttttttcctaacgagaatgagaaaccaaagatttacttggagcaaataaattaaataag

SEQ ID NO: 26752 - DNA, 120 bp, synthetic construct
  source 1..120: mol_type = other DNA
ggataacatttttcaaacatcctaaagcatcaaagagctaacaaaatagcaagcaattgctaggccaaaactgaagataaagctggaacacacagtgataagaggaactcaggaacaact

SEQ ID NO: 26753 - DNA, 120 bp, synthetic construct; identical to SEQ ID NO: 8137
  source 1..120: mol_type = other DNA

SEQ ID NO: 26754 - DNA, 120 bp, synthetic construct
  source 1..120: mol_type = other DNA
ataagaattgataagtacttttgcaatgtgatctttataaattataacacaacacaaatgggaaaacactagaagcaatccaattaaactcagaaacaagacaggctctccaaggtcact

SEQ ID NO: 26755 - DNA, 120 bp, synthetic construct
  source 1..120: mol_type = other DNA
ttgatatgactgtttacctggaaaacccaagcaaatcaaccattacattactataaaacaagaagagacttaagtaaggaagcagaaataaccatgaaaatatggttagtcttcataccc

SEQ ID NO: 26756 - DNA, 120 bp, synthetic construct
  source 1..120: mol_type = other DNA
aaaatacaaaaaaaaaaaattagccaggcgtggtggcgggcaccggtagtcccggctactcgggaggctgagggaggagaatggtgtgaacccgagaggcagagcttgcagtgagcagag

SEQ ID NO: 26757 - DNA, 120 bp, synthetic construct; identical to SEQ ID NO: 8138
  source 1..120: mol_type = other DNA

SEQ ID NO: 26758 - DNA, 120 bp, synthetic construct
  source 1..120: mol_type = other DNA
agcaatgaaaggctatcaaccctagcagatattacaaatcatataaaatctcaacaattaaatcaatatggtactggcatatgaatagaatgatatttgacccacaggaattggaaaaga

SEQ ID NO: 26759 - DNA, 120 bp, synthetic construct
  source 1..120: mol_type = other DNA
ttgttgaacttttgggtgtctgccaagtgtgaaatggcattttaatgtaattttttattcatattttattatgagtgaggttgacatatttttataacttaagagccattttactacttt

SEQ ID NO: 26760 - DNA, 120 bp, synthetic construct
  source 1..120: mol_type = other DNA
tgactttgcttgttgtgtttttggttggttagaggtgttttttcgccatgaagaagtatgtatatatgtactcttatataattgtttttctcaattgtaataaattggctttcgaaatct

SEQ ID NO: 26761 - DNA, 120 bp, synthetic construct; identical to SEQ ID NO: 8139
  source 1..120: mol_type = other DNA

SEQ ID NO: 26762 - DNA, 120 bp, synthetic construct
  source 1..120: mol_type = other DNA
tcctcccacctcagcctcccaagtagatgggattataggtatgcaccaccatgcctggctaatttttgtattttttgtagagaaggggttttgccatgttccccagtctggtcttgaact

SEQ ID NO: 26763 - DNA, 120 bp, synthetic construct
  source 1..120: mol_type = other DNA
ctactgatacacctgcccacatatgaaatgacatacattcaaatttattcattgtgacattatttgtaatagcagaagtgacaggtacaagtgaatagacccctgagctgtctttgaatg

SEQ ID NO: 26764 - DNA, 120 bp, synthetic construct
  source 1..120: mol_type = other DNA
aggaacaggcatatggtactgacatatattgaaatacaggacactaaaagaaaaacaacattgtttgggaagataataaatgctgtgtcacacatcacagtcagtagagtgatacaaagg

SEQ ID NO: 26765 - DNA, 120 bp, synthetic construct; identical to SEQ ID NO: 8140
  source 1..120: mol_type = other DNA

SEQ ID NO: 26766 - DNA, 120 bp, synthetic construct
  source 1..120: mol_type = other DNA
aaaagacaacagaaaaagaagaaaaagacaagacgctaggtagggagtcagaccctgagtggtcagaaagattaaaaaaaaaggcgggggggagtgaatgtcaagaataagggcaaaagc

SEQ ID NO: 26767 - DNA, 120 bp, synthetic construct
  source 1..120: mol_type = other DNA
tctgaagaaacattaagaagtgaggaaaagctgatttgtggaatggtgaaggattacttgggtatatgggaaggaaggaaggtaaaggatcctaccctcctaccaaagatatttctcccc

SEQ ID NO: 26768 - DNA, 120 bp, synthetic construct; identical to SEQ ID NO: 8141
  source 1..120: mol_type = other DNA

SEQ ID NO: 26769 - DNA, 120 bp, synthetic construct
  source 1..120: mol_type = other DNA
caaggaatggaaattcaatttcagtgtattcagtgataccccacctcctcctaaacagaatctgagataacacacagaaagctctctctgcaggtatatgcagagcaatgccacgcattg

SEQ ID NO: 26770 - DNA, 120 bp, synthetic construct
  source 1..120: mol_type = other DNA
ctgctgtgtacttggccctttctatgttattaatatgccctgagaattcagttaagggtttgaagtccattgagctcctcgagaaagacattctaataacagtaacaattaccaattcat

SEQ ID NO: 26771 - DNA, 120 bp, synthetic construct
  source 1..120: mol_type = other DNA
tgtccttcaagattgattggcgcccaacgccttctgcttaagacaaggagcacttttccacacctgtcgatttttttcctcttccagggagccaggaaaagtccaatcggactttttata

SEQ ID NO: 26772 - DNA, 120 bp, synthetic construct; identical to SEQ ID NO: 8142
  source 1..120: mol_type = other DNA

SEQ ID NO: 26773 - DNA, 120 bp, synthetic construct
  source 1..120: mol_type = other DNA
agtcctcaggagcaaagggtcaagatcccctcccccacccgccacttccccccgcccttctctcagagtaaacaattcccagaaaggcgagcagttccctttttcacccaaggacactcg

SEQ ID NO: 26774 - DNA, 120 bp, synthetic construct
  source 1..120: mol_type = other DNA
acgttcccggggaaggtgccagaggccagctggacggccccggcgcactcccgccccggcgcactcccgccccggcgcactccgaccccggcgcactcccgccccggcgcaccctgctcc

SEQ ID NO: 26775 - DNA, 120 bp, synthetic construct
  source 1..120: mol_type = other DNA
tcaggtcgcgatcctcttcctatctgccctcccccacccccgccaactccattttctagccacccagaggccccttcaccccagcttttcccgccacccccacctatccccgttccccta

SEQ ID NO: 26776 - DNA, 120 bp, synthetic construct
  source 1..120: mol_type = other DNA
ggctgcctccatggagagggctcggggcaggtcgcgggccgagcgtcgggccggggtaggagggctccgcggggcgagggccgcggccggagcgcagtctgggcccgctgctcaggagga

SEQ ID NO: 26777 - DNA, 120 bp, synthetic construct; identical to SEQ ID NO: 8143
  source 1..120: mol_type = other DNA

SEQ ID NO: 26778 - DNA, 120 bp, synthetic construct
  source 1..120: mol_type = other DNA
ctgcccagcagaagccctgactgcacaaagactcactcctgagtgcgcggtcggccccggctccgccctgcccgctgccctcggcgacggccgtggtccctgccctggggtcaattacag

SEQ ID NO: 26779 - DNA, 120 bp, synthetic construct
  source 1..120: mol_type = other DNA
gcggtgcggcggcgggaggcggaggcgagggtgcgatggcgcggagcccgggacgcgcgtacgccctgctgcttctcctggtaagtgccgcaagcgggacaggggagccaccgccgggga

SEQ ID NO: 26780 - DNA, 120 bp, synthetic construct
  source 1..120: mol_type = other DNA
cgagatccgacctggggcttcggaaaatcctcttggctggagccaggagagtaagttgcgacctatcgaagttgtgttttccttcccgcgtcacccaggccccagcgcccttttctgtgg

SEQ ID NO: 26781 - DNA, 120 bp, synthetic construct; identical to SEQ ID NO: 8144
  source 1..120: mol_type = other DNA

SEQ ID NO: 26782 - DNA, 120 bp, synthetic construct
  source 1..120: mol_type = other DNA
ttcaaaagttttccaatattaaagataataaacatatgtaatagtttgaagccttattcatttaaaaggttacagaaaatggaagtgtagcgccccctcccccacgccccacccctcact

SEQ ID NO: 26783 - DNA, 120 bp, synthetic construct
  source 1..120: mol_type = other DNA
aaaggggttttaataaagtgacagttatgctgcaaatataggtgtgagttcaccttccagagagttcacaaatatgtgtttacagagattagatgcaaaatcatactcagttttcttacg

SEQ ID NO: 26784 - DNA, 120 bp, synthetic construct
  source 1..120: mol_type = other DNA
tgtgtgtgtgtctcaaaacggaaaaaggcgtgactgaatccagtctagagatttccatgaactctcaggtggaagagcatgataattagggcgtccaggcctagcacacagttcattttc

SEQ ID NO: 26785 - DNA, 120 bp, synthetic construct; identical to SEQ ID NO: 8145
  source 1..120: mol_type = other DNA

SEQ ID NO: 26786 - DNA, 120 bp, synthetic construct
  source 1..120: mol_type = other DNA
attttagcaatttgatacttttaccttattgggcagtaataaacatctcctttagaaagcgactatagccaatggaacaggagcaaaattcttggactgttctatgtattttctataaaa

SEQ ID NO: 26787 - DNA, 120 bp, synthetic construct
  source 1..120: mol_type = other DNA
aaatggaaagcaactcatctgacagaagtagttgccaaggaaacaggtcctttattggaaggaatataaattgtagtctgttagatcagagttcagttgcaaataacggaatttactcta

SEQ ID NO: 26788 - DNA, 120 bp, synthetic construct
  source 1..120: mol_type = other DNA
gctatttaaagcaagaataggtttatttcggggcactaaactgactacctaagtgtaggaaggattgagaagactgccatttgagctgtcagtaatgacttcaaagccacacagcagagc

SEQ ID NO: 26789 - DNA, 120 bp, synthetic construct
  source 1..120: mol_type = other DNA
ccacatctgctaggatgcataacaacatggatgcttgtaccttgcctcttggtgttcacaaatctagtagctggacactagagccataataagatgactacaaagaacccagctccatac

SEQ ID NO: 26790 - DNA, 120 bp, synthetic construct; identical to SEQ ID NO: 8146
  source 1..120: mol_type = other DNA

SEQ ID NO: 26791 - DNA, 120 bp, synthetic construct
  source 1..120: mol_type = other DNA
ttttaactaacttcggactgaaatttagtatttctttaaattatgagtgtggggaagacactgcacagtagtgtgagcagtagctgtgactatcacaatagaattcataaatacctttac

SEQ ID NO: 26792 - DNA, 120 bp, synthetic construct
  source 1..120: mol_type = other DNA
aaaaatgctgataactatttcaatataattgggttcattgataatcccctgtattttattttatacatttgaaatcattaatctgagaaggggttcataggcctcgccagattgccaagg

SEQ ID NO: 26793 - DNA, 120 bp, synthetic construct
  source 1..120: mol_type = other DNA
tttgggttcgactaatgaagcttgtgctttaaaatcaaactacattttaaggattcaatgatagcagatcacactgtgagcagatatatttagtagggtattagtttgctaggactgctg

SEQ ID NO: 26794 - DNA, 120 bp, synthetic construct; identical to SEQ ID NO: 8147
  source 1..120: mol_type = other DNA

SEQ ID NO: 26795 - DNA, 120 bp, synthetic construct
  source 1..120: mol_type = other DNA
atgccccaaaataatgacctcagcttggttaaatctgcagagaccctatttccaaataagctcacattctgaggtactggtggttagcacttcaatatattatcttttaggggtcataat

SEQ ID NO: 26796 - DNA, 120 bp, synthetic construct
  source 1..120: mol_type = other DNA
atggtgaatattgaagccataagaataatcaattatcatatccaaggattttagaaacatggatttcttactggtttttgtttctaaaagttagtaggtaatgggaaaatggcagctctt

SEQ ID NO: 26797 - DNA, 120 bp, synthetic construct; identical to SEQ ID NO: 8148
  source 1..120: mol_type = other DNA

SEQ ID NO: 26798 - DNA, 120 bp, synthetic construct
  source 1..120: mol_type = other DNA
tagaaactttaggctgggcacagtggctcacgcctgtaatcccagcactttgggaggccaaggtgggcggatcacctgaggtcaggagtttgagaccagcctggccagcatggtgaaacc

SEQ ID NO: 26799 - DNA, 120 bp, synthetic construct
  source 1..120: mol_type = other DNA
gccgagattgtgccactgcactccagcctgggtgacagagggagactctgtcaaaaaaaagaaggaaggaaggagggaagaaaggaagggagggagggaggaaggaagaaaggaaggaag

SEQ ID NO: 26800 - DNA, 120 bp, synthetic construct
  source 1..120: mol_type = other DNA
catatagtctacatatgatgagaaactatcttctcagttttgttttttattaagtttttgtcatatgcaaagcttggtgattagagtgaagaagctggaacaacagaattcctaccgtgg

SEQ ID NO: 26801 - DNA, 120 bp, synthetic construct
  source 1..120: mol_type = other DNA
catgttctgccctcatggtgcttacagtctaatgaatggtataacaagtaaatggctaacttccaaatgggtaacgataagaagagtaataatagagaaacgtagtaccatggagcctat

SEQ ID NO: 26802 - DNA, 120 bp, synthetic construct; identical to SEQ ID NO: 8149
  source 1..120: mol_type = other DNA

SEQ ID NO: 26803 - DNA, 120 bp, synthetic construct
  source 1..120: mol_type = other DNA
aggaaagagtcaagaaagaagagataggatttgagtgattaagtataattgcgcccagttaaaaagagaggcaacaggcattgaggacttggtaagctgagatcaaagccaggcagaaaa

SEQ ID NO: 26804 - DNA, 120 bp, synthetic construct
  source 1..120: mol_type = other DNA
gtatttagttcccaaggtccagggatgctaagactctacattctgcagaaccttcaagaattgggcacgtgtgaagaatttttctatccaaaatgcttatagcacccacattgagaaaca

SEQ ID NO: 26805 - DNA, 120 bp, synthetic construct
  source 1..120: mol_type = other DNA
gtgataggcaaagtaagaggttctaagtagggatttattttacttgtctggaccctctttttgaaaggcaaatatctcttgggttgattacgccttgatacattcgtccactcaacaaat

SEQ ID NO: 26806 - DNA, 120 bp, synthetic construct; identical to SEQ ID NO: 8150
  source 1..120: mol_type = other DNA

SEQ ID NO: 26807 - DNA, 120 bp, synthetic construct
  source 1..120: mol_type = other DNA
tcttcttttaaaaccattaatcatatcatttcttgtttcagttatcgccttcctttgctttctcagtattctggggttcctttcacttacaggaacctgcagtgcttctcaccccttttt

SEQ ID NO: 26808 - DNA, 120 bp, synthetic construct
  source 1..120: mol_type = other DNA
aatccatgctcgtcattgagccgcactgccctgctctctgttatgtagcatctctccgccctactcagatactttccccaggacctaagcttaacatgtctacaatctgtcttctggaaa

SEQ ID NO: 26809 - DNA, 120 bp, synthetic construct
  source 1..120: mol_type = other DNA
ctatctcattgccattcccctgatactgttcctcattccatctccctgacttagtaatttaatctctgaactgtctcctgccttttatcttgcacagtactgccaaaaaatcttcagaat

SEQ ID NO: 26810 - DNA, 120 bp, synthetic construct; identical to SEQ ID NO: 8151
  source 1..120: mol_type = other DNA

SEQ ID NO: 26811 - DNA, 120 bp, synthetic construct
  source 1..120: mol_type = other DNA
attaaggtttcctacctcatagtagtttgatcctcctattaaactgtaagcttcttcagagcaagatctttgtatcttttatctataaactagctaaatgccttgggcacggacgtattc

SEQ ID NO: 26812 - DNA, 120 bp, synthetic construct
  source 1..120: mol_type = other DNA
tttttttttttttttcttttttttgagatggagtctctctctttcaccaggctggagtgcagtggtgcagtctcggctcactgcagcttccgcctcccaggttccagcgattctcctgcc

SEQ ID NO: 26813 - DNA, 120 bp, synthetic construct; identical to SEQ ID NO: 8152
  source 1..120: mol_type = other DNA

SEQ ID NO: 26814 - DNA, 120 bp, synthetic construct
  source 1..120: mol_type = other DNA
gatttaatgaaagttaataatgggtgaaactgaatcaaacccaggttcacctggcaccaaatgcctgtctgtcaacccagaggcatcatcgtgaattccccttacagcagtttgctacag

SEQ ID NO: 26815 - DNA, 120 bp, synthetic construct
  source 1..120: mol_type = other DNA
ataatcctgcaaaactgtacatataactttctaaagcccttgattttcactcttttcaattttgctgatccacttatttgagaccaatgaaacgcctgcttcccactttagaccttggaa

SEQ ID NO: 26816 - DNA, 120 bp, synthetic construct
  source 1..120: mol_type = other DNA
ttactgacaggccagtgccatctaatggtaaaaaaggacagtctgaagctcttggttttcttaaactgcccagtgaaaagaaatcattttcttcattttacttttcagttcaggaatata

SEQ ID NO: 26817 - DNA, 120 bp, synthetic construct
  source 1..120: mol_type = other DNA
acctaccaataaaagagtaaaatattttttacatgtctagtcatttaataaatgctattttgaattgaaattgtattttagttagtttgcttgtttgagcaatccaacgacttcaaggaa

SEQ ID NO: 26818 - DNA, 120 bp, synthetic construct; identical to SEQ ID NO: 8153
  source 1..120: mol_type = other DNA

SEQ ID NO: 26819 - DNA, 120 bp, synthetic construct
  source 1..120: mol_type = other DNA
tcatccttttttatggctgcatagtattccatggtgtatatgtaccacattttctttatccagtctatcattgatgggcatttgggttggttccaagtttttgctgttgtgaatagtgcc

SEQ ID NO: 26820 - DNA, 120 bp, synthetic construct
  source 1..120: mol_type = other DNA
cgccacactgtcttccacaatggttgaactaatttacagtcccaccaacagtgtaaaagcattcctatttctccatatcctctccagcatctgttgtttcctggctttttaatgatcgcc

SEQ ID NO: 26821 - DNA, 120 bp, synthetic construct
  source 1..120: mol_type = other DNA
tctgttcatatccttcacccaccttttgatagggctgagtgtttttttcttgtaaatttgtttaagttccttgtagattctggatattagccctttgtcagatggatagattgcaaaaat

SEQ ID NO: 26822 - DNA, 120 bp, synthetic construct
  source 1..120: mol_type = other DNA
tgttttagtcatgaagtctttgccaatgcctatatcctgaatggtattgcctaggttttcttctaggatttttatggttttaggtcttacatttaagtctttaatccatcatgagttaat

SEQ ID NO: 26823 - DNA, 120 bp, synthetic construct; identical to SEQ ID NO: 8154
  source 1..120: mol_type = other DNA

SEQ ID NO: 26824 - DNA, 120 bp, synthetic construct
  source 1..120: mol_type = other DNA
catctcggctcactgcaacctccgcctcctgggttcaagtgattcttgtgcctcagcctccctagtagctgggattacaggcatgcaccaccacacctggctaatttttgtatttttagt

SEQ ID NO: 26825 - DNA, 120 bp, synthetic construct; identical to SEQ ID NO: 8155
  source 1..120: mol_type = other DNA

SEQ ID NO: 26826 - DNA, 120 bp, synthetic construct
  source 1..120: mol_type = other DNA
gtcagacactctaaggcgggactcagtaatctgtgttttatcaaggtgattctaatgccactcaagcttgaaaaccactgttaacatcccaattagaaaataaaaataactggagtagaa

SEQ ID NO: 26827 - DNA, 120 bp, synthetic construct
  source 1..120: mol_type = other DNA
agcattgctaaatgcatattttaaaattctatgagttaataaaaagctttcaaagaaactgtcttcctctttgtaactaacttcaatatgactcacctaaaatcatatttgttacattca

SEQ ID NO: 26828 - DNA, 120 bp, synthetic construct
  source 1..120: mol_type = other DNA
gttcaaaatattgctctttttttttaaattagcaattgtgaaaaatataattacatatttaaatcagctgttgagtgagactgctataggagtatataaatgtctagatcatctgtaagt

SEQ ID NO: 26829 - DNA, 120 bp, synthetic construct; identical to SEQ ID NO: 8156
  source 1..120: mol_type = other DNA

SEQ ID NO: 26830 - DNA, 120 bp, synthetic construct
  source 1..120: mol_type = other DNA
ccactccctttattttatctcattttatttctttcagattatttcagccaaagttgaaagctctttaagaatggattggggataaaccagggatcctctgggcagtttttgatttgacct

SEQ ID NO: 26831 - DNA, 120 bp, synthetic construct
  source 1..120: mol_type = other DNA
ttaaagaaccactggcaagtgccacgtcctctgtgtttgagttctaaagatagtccgttgagcacactgcttaccttctagtaatttctcgctgaatggacattagaagccattatagtg

SEQ ID NO: 26832 - DNA, 120 bp, synthetic construct
  source 1..120: mol_type = other DNA
attaaagtttaagggatcacctcaccataaaaccactgaacacttcaagattctctactttaaaggaaagacttctgacagagaacctgtcagccaggaggagctgtcatccagtgactc

SEQ ID NO: 26833 - DNA, 120 bp, synthetic construct
  source 1..120: mol_type = other DNA
aaacaaagagtacattgattgatggtgtttggtattccctcatgcctctgcaggaaaaaaaaaaaaatcttttgccagataccaggaagtccagtttttataagatgtgcaggatccaat

SEQ ID NO: 26834 - DNA, 120 bp, synthetic construct; identical to SEQ ID NO: 8157
  source 1..120: mol_type = other DNA

SEQ ID NO: 26835 - DNA, 120 bp, synthetic construct
  source 1..120: mol_type = other DNA
aaacttacagagtggacaggttttttaaaaagtgccagggagtgggaatggaggactaaggcagagagtttctgcttgttccagtcatgttacttgcagtatactacccactagagatgt

SEQ ID NO: 26836 - DNA, 120 bp, synthetic construct
  source 1..120: mol_type = other DNA
agccatggtgtcttaacctcggcacttggccagttgcagccagataacacttagttgtaagggctatcatgtgcattgtaggatgtttgacagcatctctggtttctacccactagatgc

SEQ ID NO: 26837 - DNA, 120 bp, synthetic construct
  source 1..120: mol_type = other DNA
tggagaacgattggtctaaattaagaatgtgttctgtgagatagaggatcttaaggaaccagatccaaattatttagaaagcagtggctgagatcttaactgctcagtcaaataaacaga

SEQ ID NO: 26838 - DNA, 120 bp, synthetic construct; identical to SEQ ID NO: 8158
  source 1..120: mol_type = other DNA

SEQ ID NO: 26839 - DNA, 120 bp, synthetic construct
  source 1..120: mol_type = other DNA
cgctgtcccaattcacagcagattagccttgcctgtgtcacgctggctccctagatgctcagcaatttaataccagccttttgagagaagaaaagaaacattacattaaagatgtacaaa

SEQ ID NO: 26840 - DNA, 120 bp, synthetic construct
  source 1..120: mol_type = other DNA
gatgactcccaaatttttatctccgggcataacttcttttctgagctactaactcctatatccaaaaggccattcacacagaacacataaaaacggctcttacctcccatttcacccctc

SEQ ID NO: 26841 - DNA, 120 bp, synthetic construct; identical to SEQ ID NO: 8159
  source 1..120: mol_type = other DNA

SEQ ID NO: 26842 - DNA, 120 bp, synthetic construct
  source 1..120: mol_type = other DNA
acataaactggttgtatcatttccaaacataaaagcttccagtggcttcctctcacactcaggataaaacccaaagtcctctccctgactgggtactggcctatccctgtgacatcatca

SEQ ID NO: 26843 - DNA, 120 bp, synthetic construct
  source 1..120: mol_type = other DNA
ccaagtcactctctactatcctgaccctgctttaattttttttattgctcttatcaaaacctggtctgtctttgtctccccagtatgtaagcatccaacagggtaagaatattgtgttac

SEQ ID NO: 26844 - DNA, 120 bp, synthetic construct
  source 1..120: mol_type = other DNA
tgaatgccagtcactgcaatagttacatttcatatatttctttaatttgcacatcagccctgcaaaatggatgtatcctagttaggtggctttcagatgcaagtaacaaaacccaactaa

SEQ ID NO: 26845 - DNA, 120 bp, synthetic construct; identical to SEQ ID NO: 8160
  source 1..120: mol_type = other DNA

SEQ ID NO: 26846 - DNA, 120 bp, synthetic construct
  source 1..120: mol_type = other DNA
ctaatcagtgaggagaatcttttgtagggtctcctgatacctcattgaccaaaattctcttacacatttatgcctaaaccagccaatatcaaagtaaatgggcatacataccatgctttg

SEQ ID NO: 26847 - DNA, 120 bp, synthetic construct
  source 1..120: mol_type = other DNA
agagaaaatgccaataagctagacaattgaaaatgtctgccacagtatgtattactctcctgttacagataaggaaattcagactaaagcatcttgtctggcaggatctcctccccgctt

SEQ ID NO: 26848 - DNA, 120 bp, synthetic construct
  source 1..120: mol_type = other DNA
atgtggctattgcacaccagctagtatggtgtgacagaaagggcacttcagctctgtgatgttctttccaaaaatgcataatactgatctaatcgtgagaaaaacaacagataaacccaa

SEQ ID NO: 26849 - DNA, 120 bp, synthetic construct; identical to SEQ ID NO: 8161
  source 1..120: mol_type = other DNA

SEQ ID NO: 26850 - DNA, 120 bp, synthetic construct
  source 1..120: mol_type = other DNA
agtaaaaacatattttaaaagaaatgtgtgctaggtaattgttgaaactggatgttagctatatgggtgtgcatgttactattcactctgcttttatacatgtttgcaatttaaagtgat

SEQ ID NO: 26851 - DNA, 120 bp, synthetic construct
  source 1..120: mol_type = other DNA
cagacttcattgactgttgtttgtacctaaacaaacaaatgatatttcatgtcacattctacaatcttgctcctcaaaatttggtctgagaacccacaacattgctatcatctgaaacct

SEQ ID NO: 26852 - DNA, 120 bp, synthetic construct
  source 1..120: mol_type = other DNA
gtgattttctgcatttctgagcaaatcacatctagaaagtaaattccaataaaaatcagtgaagatgctcatatgatgaatttacgtttgactagaggactgtaaattacttccgttttc

SEQ ID NO: 26853 - DNA, 120 bp, synthetic construct; identical to SEQ ID NO: 8162
  source 1..120: mol_type = other DNA

SEQ ID NO: 26854 - DNA, 120 bp, synthetic construct
  source 1..120: mol_type = other DNA
ctcagcctctcgagtagctgggactacaggcacccaccaccacgggcagctaatatttttttgtatttttagtagagacagggttttaccgtgttagccaggatggtctcgatcatcaga

SEQ ID NO: 26855 - DNA, 120 bp, synthetic construct
  source 1..120: mol_type = other DNA
ctctgatccaggcactgatctttctcttcaaaaattcccacccaaggaacatgcagagagaagtgatctatctcagcattgctttcccttgcttttcataccatgccacctttgaaaata

SEQ ID NO: 26856 - DNA, 120 bp, synthetic construct
  source 1..120: mol_type = other DNA
catgattgttcatctgccccagagaagcccacactagaagctgaacatctgctctccttgagtttctctttggaatggagagccaagaacatgaactgacaatggaaaggaaagaaagag

SEQ ID NO: 26857 - DNA, 120 bp, synthetic construct; identical to SEQ ID NO: 8163
  source 1..120: mol_type = other DNA

SEQ ID NO: 26858 - DNA, 120 bp, synthetic construct
  source 1..120: mol_type = other DNA
tggtttgccaatcagaaggaaataaatgtattgattagccaatggagaaggaagataaaaggttagtggaaggattaaggttcttgaagataaatgtgggagaacaaatagagttgcaaa

SEQ ID NO: 26859 - DNA, 120 bp, synthetic construct
  source 1..120: mol_type = other DNA
ataagagtgaataggtacagaggtgtgactagagtcatctcctaaagtttggaatgcctattttagaaatgcaataagggtaaggcaatgacaaagtgacgatataatttatagtgtgag

SEQ ID NO: 26860 - DNA, 120 bp, synthetic construct
  source 1..120: mol_type = other DNA
gaaagagcagctatttgagagcatgaatgtgtaagggatctattcagccactgtggcctcctctagcgatattgccagtacatggtcagaactaaagagaataataggtttctagagttg

SEQ ID NO: 26861 - DNA, 120 bp, synthetic construct; identical to SEQ ID NO: 8164
  source 1..120: mol_type = other DNA

SEQ ID NO: 26862 - DNA, 120 bp, synthetic construct
  source 1..120: mol_type = other DNA
gtcattatgttaactgaataagccaggcacagaaatacaaatacaacatcttctcacttatatgtgggagctaaaagttttgatctcatgggcatcgagaatagaatgatagaatccaga

SEQ ID NO: 26863 - DNA, 120 bp, synthetic construct
  source 1..120: mol_type = other DNA
agcagggtgactatagtttacaataacctattatacatatcaaagcagctagaagagaattatttaaatgtttctagcataatgaaaagacaagtatttaaggtaattgacatcccaagt

SEQ ID NO: 26864 - DNA, 120 bp, synthetic construct
  source 1..120: mol_type = other DNA
aagcaagatgggagttttttgggcaaatttaagagtaagcataactgtatttagaacagtactaggtcatgatgaagtcccaagtgtgacagtgcctatgaagaaccaaagaaaagagtt

SEQ ID NO: 26865 - DNA, 120 bp, synthetic construct
  source 1..120: mol_type = other DNA
ctgggtgtggggtacattacatactggtggcctcgaggaaaagtaagcaggtcctggagaacacaagataaaaaccataggatgcggagtaaaggatgagagaatgtctaagatttcaca

SEQ ID NO: 26866 - DNA, 120 bp, synthetic construct; identical to SEQ ID NO: 8165
  source 1..120: mol_type = other DNA

SEQ ID NO: 26867 - DNA, 120 bp, synthetic construct
  source 1..120: mol_type = other DNA
atcaaataattttattttacagatctgctttaacgttggaagtggacttcacttacaggtgaggaaacaaagggattatttctgccttctgactcaggagggttaattccatggcaaaca

SEQ ID NO: 26868 - DNA, 120 bp, synthetic construct
  source 1..120: mol_type = other DNA
tatccaggggtattcagtgcagcagtttttgacaatgtaaatatccaccaataggtgaatgttaaaaccatttatggtacatgaaagaatgtccatgacgaggtgctgaatgaaaatcgg

SEQ ID NO: 26869 - DNA, 120 bp, synthetic construct
  source 1..120: mol_type = other DNA
atgaatactttgtgaggtataaatgaaaaagtaatttcaattttttgtcatagaaaattttgttcaagtaaaaaaaaaaatcaatgacctagtgataaccagagtacatattttgaagta

SEQ ID NO: 26870 - DNA, 120 bp, synthetic construct; identical to SEQ ID NO: 8166
  source 1..120: mol_type = other DNA

SEQ ID NO: 26871 - DNA, 120 bp, synthetic construct
  source 1..120: mol_type = other DNA
aaaccacaaaccaccacagaaaaatgaaacttcattttcagttaataagaaaaaacgtttttgacatgatctgttattttttactttgccaatttgtaaggctactaaatgattctttaa

SEQ ID NO: 26872 - DNA, 120 bp, synthetic construct
  source 1..120: mol_type = other DNA
gcttgaggcttgagtctaggagttcaaggccagcttaggcaacatggtgaaaccccatagctactaaaaatacaaaaattagccagatgtggtggtgcatgcctgtaatcccagcttctt

SEQ ID NO: 26873 - DNA, 120 bp, synthetic construct
  source 1..120: mol_type = other DNA
aaccagaaaaaaccctacacttttactagcttggagacaatctcttgaggccctatgcagtttgctagaatatatatattcccttttagacaatgaagcctcataggaaatacgaagcat

SEQ ID NO: 26874 - DNA, 120 bp, synthetic construct
  source 1..120: mol_type = other DNA
attttggcaatattctattgttataggtcttaagcacaagaaatgaaaataagctgcttcctaaacatcctcatttagtgcggcaaaagcgcgcctggatcaccgcccccgtggctcttc

SEQ ID NO: 26875 - DNA, 120 bp, synthetic construct; identical to SEQ ID NO: 8167
  source 1..120: mol_type = other DNA

SEQ ID NO: 26876 - DNA, 120 bp, synthetic construct
  source 1..120: mol_type = other DNA
aagatgcagcatcattggcaaaaatatagataactttgagttttgatttaactaagagtaaagggatttggcactggtaacacaaaatgttcagtgctcaaaagaggatgtcataaaatg

SEQ ID NO: 26877 - DNA, 120 bp, synthetic construct
  source 1..120: mol_type = other DNA
caaggggtccaatttttttgataaattatgtgatagtgttgctactctatatttcaaagttggcatgcacaaacataaacccttcatttttttccccccaaagcttttcttcataagttc

SEQ ID NO: 26878 - DNA, 120 bp, synthetic construct; identical to SEQ ID NO: 8168
  source 1..120: mol_type = other DNA

SEQ ID NO: 26879 - DNA, 120 bp, synthetic construct
  source 1..120: mol_type = other DNA
ggaaaagggattacagagccaccttttggtatatttgtctttaacaaagatactggagaactgaatgttaccagcattcttgatcgagaagaaacaccattttttctggtaagaagaata

SEQ ID NO: 26880 - DNA, 120 bp, synthetic construct
  source 1..120: mol_type = other DNA
agctaacaggttacgctttggatgcaagaggaaacaatgtagagaaacccttagagctacgcattaaggttcttgatatcaatgacaacgaaccagtgttcacacaggatgtctttgttg

SEQ ID NO: 26881 - DNA, 120 bp, synthetic construct
  source 1..120: mol_type = other DNA
gttgagtattacctacagaacaaatgataagaaagcagttcagaactgctttccttataggtttaaaggactttacatgccattgcttttaccctcagaacagatagggtagattaatgt

SEQ ID NO: 26882 - DNA, 120 bp, synthetic construct; identical to SEQ ID NO: 8169
  source 1..120: mol_type = other DNA

SEQ ID NO: 26883 - DNA, 120 bp, synthetic construct
  source 1..120: mol_type = other DNA
aatactattataaacaaatctgtgcccttatacagcaatttttcaggactctaccctcagccttgccttcatcttgtttttactattgttatatcccattcacgcttatgtcctcatcca

SEQ ID NO: 26884 - DNA, 120 bp, synthetic construct
  source 1..120: mol_type = other DNA
ttagacatctttatttctaatgccagatactcttgtgatgaaaatcaatgcaacagatgcagatgagcccaataccctgaattcgaaaatttcctatagaatcgtatctctggagcctgc

SEQ ID NO: 26885 - DNA, 120 bp, synthetic construct
  source 1..120: mol_type = other DNA
cagtttctcctctctttttcttttctaattttcttattttgttctgtattccttatccataggataactcttggaattactctcttttagggatgtgctgtccaatatgggccatgtgac

SEQ ID NO: 26886 - DNA, 120 bp, synthetic construct
  source 1..120: mol_type = other DNA
ttttttgtgatcattgcatgttaaaataatattttagatatcatagattaaataaaatatacttgtttaaaattgttatcatgtgtttctttttaaaatgtggctactagaagatttaaa

SEQ ID NO: 26887 - DNA, 120 bp, synthetic construct; identical to SEQ ID NO: 8170
  source 1..120: mol_type = other DNA

SEQ ID NO: 26888 - DNA, 120 bp, synthetic construct
  source 1..120: mol_type = other DNA
cgtacaagagtaaaatgtggttgatcataaagtacactctttgtcatcagatataaatcatcatccaagtgcactacgttcagtatttcttagagaaatgattggccgggcgtggtggct

SEQ ID NO: 26889 - DNA, 120 bp, synthetic construct
  source 1..120: mol_type = other DNA
tgggtgtggtggcgggcacctgtagtcccagctactcgggaggctgaggcaggagaatggtgtgaacccaggggacagagcttgcagtgagctgagatcgcgccactgcactccagcctg

SEQ ID NO: 26890 - DNA, 120 bp, synthetic construct
  source 1..120: mol_type = other DNA
ttacacctaaaattctactctataccttttcacataaaactagaatggaaaagtgttactttgcattagtagtgtgattttaaacaagctgctatttctaaaggacggaaagtttagcca

SEQ ID NO: 26891 - DNA, 120 bp, synthetic construct; identical to SEQ ID NO: 8171
  source 1..120: mol_type = other DNA

SEQ ID NO: 26892 - DNA, 120 bp, synthetic construct
  source 1..120: mol_type = other DNA
cagaaccatagtaaggggacctcatggaagagaagaagtgacatctgagaagccgttctctaggacacatactataagaatcaaatctctggggaattctggacaaagttcacccagttt

SEQ ID NO: 26893 - DNA, 120 bp, synthetic construct
  source 1..120: mol_type = other DNA
caatagtggctcctttgtgcagactatctcctgataatatcaccaatgacttattgaagaatttgactatctacaactcccgaggcttttctgttcttctgcaaaagctctgactgcaag

SEQ ID NO: 26894 - DNA, 120 bp, synthetic construct
  source 1..120: mol_type = other DNA
acccagctggacatttttcattgctctgcaggaacacagcagctacactttgacagtagaagcaagagatggcaatggagaagttacagacaaacctgtaaaacaagctcaagttcagat

SEQ ID NO: 26895 - DNA, 120 bp, synthetic construct
  source 1..120: mol_type = other DNA
tatttgtatttcattgaaataaaaatcatgtgttcatgttttgcagcttgaagggatggttgaagaaaatcaagtcaacgtagaagttacgcgcataaaagtgttcgatgcagatgaaat

SEQ ID NO: 26896 - DNA, 120 bp, synthetic construct; identical to SEQ ID NO: 8172
  source 1..120: mol_type = other DNA

SEQ ID NO: 26897 - DNA, 120 bp, synthetic construct
  source 1..120: mol_type = other DNA
agctcatttccaggctttcttgcagctcatacctggcgatcacattctcacatcacaatctcttgcctctactgagtatcccctcaattactacctctgattttatctacttaagagtaa

SEQ ID NO: 26898 - DNA, 120 bp, synthetic construct
  source 1..120: mol_type = other DNA
ggcatggcggcacatgcctgtagtcccagctactaaagaggcttaggtgagaggatagcttgaacccaagaggcggaggctgcagtgagccgtggtcacactgctgcactccagcctggg

SEQ ID NO: 26899 - DNA, 120 bp, synthetic construct; identical to SEQ ID NO: 8173
  source 1..120: mol_type = other DNA

SEQ ID NO: 26900 - DNA, 120 bp, synthetic construct
  source 1..120: mol_type = other DNA
gccgggtgtggtggctcaggcctgtaatcccatcccagcactttgggaggccgaggagggcggatcacgaggtcaggagttcgagaccagcctggccaacatggtgaaaccccatctcta

SEQ ID NO: 26901 - DNA, 120 bp, synthetic construct
  source 1..120: mol_type = other DNA
tcgtgccattgccctcaagcctgggcaatagagtgagattccgtctcaagaaatataggtaaggaataatatcagtgtattttaagtagcttatattagaattgccttaccagattttaa

SEQ ID NO: 26902 - DNA, 120 bp, synthetic construct
  source 1..120: mol_type = other DNA
tctgacagtggaaagaggaataatggtgatataaatgtataacagaatagggaagaattaacttgaggtttcatgataattgagcaccacttattgacagctactatatgcatttaagct

SEQ ID NO: 26903 - DNA, 120 bp, synthetic construct; identical to SEQ ID NO: 8174
  source 1..120: mol_type = other DNA

SEQ ID NO: 26904 - DNA, 120 bp, synthetic construct
  source 1..120: mol_type = other DNA
tttttgtgtagctgcacagtgtgtttgtgtcttaagctaaggctcattacaaaagagtcaaaaagttaagaaaatatttaaaagtttatagagaagttatggtaagctaagcctaattta

SEQ ID NO: 26905 - DNA, 120 bp, synthetic construct
  source 1..120: mol_type = other DNA
tcagagtaactttcagtcttgcaagcaccacttatggtgagtgctctatacagctgtaccatttttcaaatctttactatcatatttttactataccttttctatgtttaagcatgttta

SEQ ID NO: 26906 - DNA, 120 bp, synthetic construct
  source 1..120: mol_type = other DNA
accatctaggtatgtgtgagttcactctgtgatgtttgcacctcaacaaaattgcctaactgcatttctcatttctcaaatcattaagcaatgcatgactgtatttttagtgtactatga

SEQ ID NO: 26907 - DNA, 120 bp, synthetic construct; identical to SEQ ID NO: 8175
  source 1..120: mol_type = other DNA

SEQ ID NO: 26908 - DNA, 120 bp, synthetic construct
  source 1..120: mol_type = other DNA
cccaagatcaaagcagatgcagtgtctgggcaggtcccgctttctggcttatacacagtgccttcttgttgtatcatcacatagtggaacatccaacaagctccactaggcgtcttttga

SEQ ID NO: 26909 - DNA, 120 bp, synthetic construct
  source 1..120: mol_type = other DNA
gattgacaacaccaattattggcaaaaatatagagaaactggattgctagtggaattgtaacatgatgcaggcagtttgacagtttcttttaaaagttacacaagagtagttatatgacc

SEQ ID NO: 26910 - DNA, 120 bp, synthetic construct
  source 1..120: mol_type = other DNA
aatgtccatcagctggtgagtagataaacagaatgtggtgtattcatatgatggaatactaatgagcaataaaaaggaatgaagtactgatacaagctacaacacggatgaacctcaaaa

SEQ ID NO: 26911 - DNA, 120 bp, synthetic construct; identical to SEQ ID NO: 8176
  source 1..120: mol_type = other DNA

SEQ ID NO: 26912 - DNA, 120 bp, synthetic construct; identical to SEQ ID NO: 1147
  source 1..120: mol_type = other DNA

SEQ ID NO: 26913 - DNA, 120 bp, synthetic construct
  source 1..120: mol_type = other DNA
gaagctgtccaaaaaggataaaggagatgaacggatatttttaaatatggaaatagagatagtaaatagtcacatgagaaaaattcacagctttgttaacaaattaacaaataaacttac

SEQ ID NO: 26914 - DNA, 120 bp, synthetic construct
  source 1..120: mol_type = other DNA
ccctcacacagcgctcttgatactgaaaattttccatttgctttggagcattatggctatttatgactaacactatgaaacacttatggccccaatacctagcttttatttatttattta

SEQ ID NO: 26915 - DNA, 120 bp, synthetic construct
  source 1..120: mol_type = other DNA
ttttttcatggtcttggcctttggatactaatgacatctggctggaagattttatttctcatccggcatatatcatgccatcaaacaagcatgtcaagtgcaagagtgacttaaataaac

SEQ ID NO: 26916 - DNA, 120 bp, synthetic construct; identical to SEQ ID NO: 8177
  source 1..120: mol_type = other DNA

SEQ ID NO: 26917 - DNA, 120 bp, synthetic construct
  source 1..120: mol_type = other DNA
actttaggtagttcttttagtaataggatataggtcaacagaggaaaaataatgtgtataaaaatgctgagagcagtattaattacatttagaaattgtgatagcccaaatgcctaatta

SEQ ID NO: 26918 - DNA, 120 bp, synthetic construct
  source 1..120: mol_type = other DNA
tgtgctattacaaagaactatttgaagaaaggttaatcttttatggaattaacagcaaaccagatattaataggtattatgctaaaaaagaggagagtggggttctttgtttaaacagat

SEQ ID NO: 26919 - DNA, 120 bp, synthetic construct
  source 1..120: mol_type = other DNA
agggacagagctcacagagctaccactacttattttcactaaaataaacccatagaacacattttaaggaatactgatttatactgaatgcccactaattttttacattagaaaaaaaat

SEQ ID NO: 26920 - DNA, 120 bp, synthetic construct; identical to SEQ ID NO: 8178
  source 1..120: mol_type = other DNA

SEQ ID NO: 26921 - DNA, 120 bp, synthetic construct
  source 1..120: mol_type = other DNA
tacagtaatttcaacatttaggaaaataaattggtaatacttcctaaacatccttaacatttatgactatccagattgacagaatttttatttgcttggtgtcagtataagagttggact

SEQ ID NO: 26922 - DNA, 120 bp, synthetic construct
  source 1..120: mol_type = other DNA
tccctttcaggaagtagattatgaagaaatgaagaatcttgacttcagtgttattgtcgctaataaagcagcttttcacaagtcgattaggagtaaatacaagcctacacccattcccat

SEQ ID NO: 26923 - DNA, 120 bp, synthetic construct
  source 1..120: mol_type = other DNA
atagatcaagcaaaggccaaataattggaaattttcaagcttttgatgaggacactggactaccagcccatgcaaggtaagagagagtgacacgtgtatttctttattttaaattatttt

SEQ ID NO: 26924 - DNA, 120 bp, synthetic construct; identical to SEQ ID NO: 8179
  source 1..120: mol_type = other DNA

SEQ ID NO: 26925 - DNA, 120 bp, synthetic construct
  source 1..120: mol_type = other DNA
atggggaaaccagctttacttaacgcatatatcttgggaatgaatcttcatttaaacctatttgtttcagagattaatgagcctcctacactgtttatgtttgtcttgatcatggtgacc

SEQ ID NO: 26926 - DNA, 120 bp, synthetic construct
  source 1..120: mol_type = other DNA
ttacatcttagatctcagtgccgtgccacggaaagaccattctctacagagctgttatttatggagctctagttactgttactgcagttgaatttaaagaatccccacctgctgtcccag

SEQ ID NO: 26927 - DNA, 120 bp, synthetic construct; identical to SEQ ID NO: 8180
  source 1..120: mol_type = other DNA

SEQ ID NO: 26928 - DNA, 120 bp, synthetic construct
  source 1..120: mol_type = other DNA
acctcttaatatgatcatactgcatattagactccaacataagaatttccgagggttacaaacatgaaaatcatagcagtccctgtgtaccagtgcttcctaaaacattgtatttaagtg

SEQ ID NO: 26929 - DNA, 120 bp, synthetic construct
  source 1..120: mol_type = other DNA
aaacagcttccaccatattttctgtagtgccttggtgacattctttggcccactatggtcctcttgagttatgtggtctagttggtctagttttaattttctcagctctataacctcaca

SEQ ID NO: 26930 - DNA, 120 bp, synthetic construct
  source 1..120: mol_type = other DNA
cacttattgaagcttctgtttcccaccaaattattgacttttggctgctgttttgtttgtttgtttgtttgtttgtttgtttaggggccatgaatacatcaaaagattgtgtgttctgcc

SEQ ID NO: 26931 - DNA, 120 bp, synthetic construct
  source 1..120: mol_type = other DNA
agataaggaatggaggcacaaccaagttaaattattttccaaatgtttacctaactaattagtggttgttattttgaaacactgataaggggctgggtgtggtgggttcatgcctggcat

SEQ ID NO: 26932 - DNA, 120 bp, synthetic construct; identical to SEQ ID NO: 8181
  source 1..120: mol_type = other DNA

SEQ ID NO: 26933 - DNA, 120 bp, synthetic construct
  source 1..120: mol_type = other DNA
ttcttaaatgagattaagcaaacacattgtgaaatgtaatccctatttctaagactctgcctttattatcagtatgaatgttggtaaaccatagacagcaacttatgtctaagctttaaa

SEQ ID NO: 26934 - DNA, 120 bp, synthetic construct
  source 1..120: mol_type = other DNA
taaatattgctataaattagccactcattcctgtgtgcctcgaagccacttaatagaaaataaattaacaatttgattgagcaaaccaagatactcatatgtttggttggtactggtatt

SEQ ID NO: 26935 - DNA, 120 bp, synthetic construct
  source 1..120: mol_type = other DNA
tctgcttcagcctcccaaatagctggaattacaggtgcccaccaccacacccagataatttttgtatttttagtagagatggggttttaacctgttggtcaggctggtcttgaactcctg

SEQ ID NO: 26936 - DNA, 120 bp, synthetic construct; identical to SEQ ID NO: 8182
  source 1..120: mol_type = other DNA

SEQ ID NO: 26937 - DNA, 120 bp, synthetic construct
  source 1..120: mol_type = other DNA
ctcggctcactgcaacctccacctcctgggttcaagcagttctcctgccacagcctcctgaggagctgggattacaggcacgtgccaccatgcccggcattttttgtgtttttagtagag

SEQ ID NO: 26938 - DNA, 120 bp, synthetic construct
  source 1..120: mol_type = other DNA
tcattgatttttaaagttgatgtttgtaaatgttgctaacgcccccaataaacaacagaacataagactgctcttctccaccagtgcttattgtataactaagttattccccaaaagttt

SEQ ID NO: 26939 - DNA, 120 bp, synthetic construct
  source 1..120: mol_type = other DNA
gttgcaggaataagaaaggtccaatttaagtgtgacatgcagtaaagagaggggcttttaggatggttttgcaaaattaaaaacattcaaaacaaatgcctgtaataagaacatatttaa

SEQ ID NO: 26940 - DNA, 120 bp, synthetic construct; identical to SEQ ID NO: 8183
  source 1..120: mol_type = other DNA

SEQ ID NO: 26941 - DNA, 120 bp, synthetic construct
  source 1..120: mol_type = other DNA
tgtaatcccagcactttgggaggccaaggcaggtggatcacgaggtcaagagatcgagaccattctggccaacatggtgaaaccccgtctctactaaaaatacaaaaattagctgggcat

SEQ ID NO: 26942 - DNA, 120 bp, synthetic construct
  source 1..120: mol_type = other DNA
aaaacaaaaacaaaaacctaatctcaccccagcacagttgcttgtgtctgtagtcccagctactcaggcaactgagatggttggaacacttgagcccaggagtttgagaccagcctggac

SEQ ID NO: 26943 - DNA, 120 bp, synthetic construct
  source 1..120: mol_type = other DNA
tcacatttctacttggtaagtggattaaaagatattacttggtccaaatttgaaacatatctaggatagaaaatgtcctaagtggttagtaccttctccactccaaattggcaagggaat

SEQ ID NO: 26944 - DNA, 120 bp, synthetic construct; identical to SEQ ID NO: 8184
  source 1..120: mol_type = other DNA

SEQ ID NO: 26945 - DNA, 120 bp, synthetic construct
  source 1..120: mol_type = other DNA
cattgacaaaccacctggcatggcagaaaaatggaaaatagcacgccaagaaagtaagcaaaatcactggactacatagaaatctaaatattaagcatgatatctaaaatatttgtaagt

SEQ ID NO: 26946 - DNA, 120 bp, synthetic construct
  source 1..120: mol_type = other DNA
ctaaaatgtcttgaaggtagctgggtattccctaaatagcccttgaagtagttttgtctggtaaggtgaggagtaccaagcctttgtcagcaccacaatcgtagtagtttgccttctaaa

SEQ ID NO: 26947 - DNA, 120 bp, synthetic construct; identical to SEQ ID NO: 8185
  source 1..120: mol_type = other DNA

SEQ ID NO: 26948 - DNA, 120 bp, synthetic construct
  source 1..120: mol_type = other DNA
gggtggttctgaatgcagaaaagtctatccagaaaactattttgttttaaacaactagggttcatttcagtaaaatttcaaagacaatagtcagttttttttttaatttacagctttatt

SEQ ID NO: 26949 - DNA, 120 bp, synthetic construct
  source 1..120: mol_type = other DNA
ttccttatatatttcagtgatctgaattaacaaaacctcccagccaggtgcggtggctcacgcctgtaatcccagcactttgggaggccaaggcaggcggatcatgaggtcaggagatcg

SEQ ID NO: 26950 - DNA, 120 bp, synthetic construct
  source 1..120: mol_type = other DNA
tgaacccagaaggcagagcttgcagtgagccgagattgtgccactgcactccagcctgggtgacagagcaagactctgtctcaaaaaaaaaactccctatgatccttatactctaaaatt

SEQ ID NO: 26951 - DNA, 120 bp, synthetic construct
  source 1..120: mol_type = other DNA
tggatcacttgaggtcaggagtttgagaccagcctggccaacatggtgaaactccatctctactataaatacaaaaattagctgggcatggtggtgggcacctgtaatcccagctactca

SEQ ID NO: 26952 - DNA, 120 bp, synthetic construct; identical to SEQ ID NO: 8186
  source 1..120: mol_type = other DNA

SEQ ID NO: 26953 - DNA, 120 bp, synthetic construct
  source 1..120: mol_type = other DNA
gtgttgagaacaaaaaaagaagggactagagaaaacaagatcagcccatcattgaaaatgattaacgctgaggatgggtaccatgggggttatgctcttctctttattactatgtttgaa

SEQ ID NO: 26954 - DNA, 120 bp, synthetic construct
  source 1..120: mol_type = other DNA
cctagacccacacacattggttacagctaatcatcatgaaagtaggtgtccaggtctgaacctttgctatttaaactgcatattcagggcctatagacaaattttaatgagcacacttca

SEQ ID NO: 26955 - DNA, 120 bp, synthetic construct; identical to SEQ ID NO: 8187
  source 1..120: mol_type = other DNA

SEQ ID NO: 26956 - DNA, 120 bp, synthetic construct
  source 1..120: mol_type = other DNA
atgtaagtctttaaaagccactctgttgtgcttttgggaatctgagtgcactcctggagatgtgttactatggtagtcattgatttcttcacagttattctttaaccacactagagcact

SEQ ID NO: 26957 - DNA, 120 bp, synthetic construct
  source 1..120: mol_type = other DNA
aatgtatatccttttctggtttcagtaacttaggaactattggcataaacttcactggtattcccattttgatgagctctgtgagggcagcatgctgtctgttctcttcactgctgtatt

SEQ ID NO: 26958 - DNA, 120 bp, synthetic construct
  source 1..120: mol_type = other DNA
aaaaaagatgtgttgcatgactttgggttatgggcacaaggttttttacaaacccagtttattccaatcaatcctgctttgtacattcaacttatcagagctccgcctccctgatattcc

SEQ ID NO: 26959 - DNA, 120 bp, synthetic construct; identical to SEQ ID NO: 8188
  source 1..120: mol_type = other DNA

SEQ ID NO: 26960 - DNA, 120 bp, synthetic construct
  source 1..120: mol_type = other DNA
ccaggccgcacagcaggaggtgagtggtggaagagtgagtgaagcttcatctgtatttacagccactccccatcactcgtgttaccacctgagctctacctcctgttagaccagtgctgg

SEQ ID NO: 26961 - DNA, 120 bp, synthetic construct
  source 1..120: mol_type = other DNA
agatgggaccatctagttgcagaaaaataagttcagggctcccactgattctacattatggtgagttgtataattatttcattatatattacaatgtaataataatagaaataaagtaca

SEQ ID NO: 26962 - DNA, 120 bp, synthetic construct
  source 1..120: mol_type = other DNA
ttagagccattggtagatgtgcaattgaaagcacagcactcaacagtctgcagtgtacttttataccatcatctccatgctatggctacatatacagatacataacggtaaatgacttgt

SEQ ID NO: 26963 - DNA, 120 bp, synthetic construct
  source 1..120: mol_type = other DNA
tctcagattccctggagcctaatgtggtacttggcacataatagacacttgatgaatgtttgttaaaattgttgaattgccactggctgatttcagtcttcttattaatcgtagtagctg

SEQ ID NO: 26964 - DNA, 120 bp, synthetic construct; identical to SEQ ID NO: 8189
  source 1..120: mol_type = other DNA

SEQ ID NO: 26965 - DNA, 120 bp, synthetic construct
  source 1..120: mol_type = other DNA
gatttggatactatctgaacctagtcttggtattccactcagcagccacagacagcctctttttgatgaacaaggccttgaatctgtaagactccctcatcctgccttcgggttttggag

SEQ ID NO: 26966 - DNA, 120 bp, synthetic construct
  source 1..120: mol_type = other DNA
aatttagaaatatatcaaggttaaccttatctgtgttcaattttgtgtctgtacagtggtaccacttttactgctgatgtgccattgcggaaagggcgccaaaggctttacccccatacc

SEQ ID NO: 26967 - DNA, 120 bp, synthetic construct
  source 1..120: mol_type = other DNA
gtgtttcttacatgtttggttgagtgagtaaagtgatcactatggatttcactcatgtgcctttgttaagcaaagagttcaaatgacagcatattttgtgtttgttgctggggcagaatt

SEQ ID NO: 26968 - DNA, 120 bp, synthetic construct; identical to SEQ ID NO: 8190
  source 1..120: mol_type = other DNA

SEQ ID NO: 26969 - DNA, 120 bp, synthetic construct
  source 1..120: mol_type = other DNA
tggcttaatcctaaaatgggcattccaagatcaacatgatgattcatccgcagcatggtccccagttccctcttccttgtttttcttccatggttgagttccattcccacactgtcctca

SEQ ID NO: 26970 - DNA, 120 bp, synthetic construct
  source 1..120: mol_type = other DNA
acattgaccacagtttagtcaggtggctatacctagtggcatcagaggcttagaaatatagtctttattttgggtggccatggatccaggtcaaaacaaagttaagaattctgtaactat

SEQ ID NO: 26971 - DNA, 120 bp, synthetic construct; identical to SEQ ID NO: 8191
  source 1..120: mol_type = other DNA

SEQ ID NO: 26972 - DNA, 120 bp, synthetic construct
  source 1..120: mol_type = other DNA
gtaggaggtatggccaaggaagccacgatgaaaggaagtagctctgcttccattgtcaaagggcaacatgagatgtccgagatggatggaaggtgggaagaacacagaagcctgctttct

SEQ ID NO: 26973 - DNA, 120 bp, synthetic construct
  source 1..120: mol_type = other DNA
ctgaacgaagaattcttaagaaattatttcactgatgtaaggatgagttttatgtattggtggtggggggtggggggaacatttgtatgtgaatgtgatattattagggtaatcattgcc

SEQ ID NO: 26974 - DNA, 120 bp, synthetic construct
  source 1..120: mol_type = other DNA
agtaaccatgatcttagttctcacacaggcatatttctcacttacagttatgtttttgccagtcagtcagctctgctttccttcatgatgtcttcatatcaagatgcacactgagagagc

SEQ ID NO: 26975 - DNA, 120 bp, synthetic construct; identical to SEQ ID NO: 8192
  source 1..120: mol_type = other DNA

SEQ ID NO: 26976 - DNA, 120 bp, synthetic construct
  source 1..120: mol_type = other DNA
ttgctattatgagggtccaccaaaaaatgatgagaaaagttccaggaagatgatcagatgcaataaggaagctcatgctagaattgaggaattagaagcagaactgaaaataaaagtata

SEQ ID NO: 26977 - DNA, 120 bp, synthetic construct
  source 1..120: mol_type = other DNA
ctctccaaaaatacaaaaaattagctgggcatgctggcacacacctgtagtcccagctactcagaaggctgaggtagggggatcacttgagcctggaaagccaaggatgcagtgagctgt

SEQ ID NO: 26978 - DNA, 120 bp, synthetic construct
  source 1..120: mol_type = other DNA
atgagggatagttcataatgaaaaatgagtcagttcatcaggaggcctgaaactcctaaatatgtcagaacctaataacagaaatttttaaaacttaaagcaaaaacaactgaaagagaa

SEQ ID NO: 26979 - DNA, 120 bp, synthetic construct
  source 1..120: mol_type = other DNA
tgatactgacagaacactctatgcaacagaagcagaatacacatgctttttcatatagactgtattctagaacattaaataaatgtaaataacttttaaagaactgcagtcatacaatgt

SEQ ID NO: 26980 - DNA, 120 bp, synthetic construct; identical to SEQ ID NO: 8193
  source 1..120: mol_type = other DNA

SEQ ID NO: 26981 - DNA, 120 bp, synthetic construct
  source 1..120: mol_type = other DNA
gataaacattttaccagactaattaggatattaagagattaagcacaaactatggatgttagaaataaaataaagaactttactacagatcttacagacatagtaagaataattttttaa

SEQ ID NO: 26982 - DNA, 120 bp, synthetic construct
  source 1..120: mol_type = other DNA
aggaaagcaagttacttctgtccccctcttctaaatttgcaaattattagcgtgctttcccactttctgctcctttttaacctcccatctttcataccatccttcacccaccttcaagta

SEQ ID NO: 26983 - DNA, 120 bp, synthetic construct; identical to SEQ ID NO: 8194
  source 1..120: mol_type = other DNA

SEQ ID NO: 26984 - DNA, 120 bp, synthetic construct
  source 1..120: mol_type = other DNA
ctctctctcactgacacacattcacacacattctcttacattactatagtacagttaacaaatgtagaactttaatattgacatagtccatatttcagtttagccaactatcacactatc

SEQ ID NO: 26985 - DNA, 120 bp, synthetic construct
  source 1..120: mol_type = other DNA
tttttaagaatacagtccagttgtgtcgtaggatctctctcaatttgtgtttccctgatggttccttgtaattaaattcacattactgcattttgaacaggaatatagagtcttgtttta

SEQ ID NO: 26986 - DNA, 120 bp, synthetic construct
  source 1..120: mol_type = other DNA
ggtttattctcaggaagaaactgaatcgctgaatgcttctattggttgttgcagttttattgaaggagagctagatgaccgcttcttagatgatttgggacttaaattcaagacactagc

SEQ ID NO: 26987 - DNA, 120 bp, synthetic construct; identical to SEQ ID NO: 8195
  source 1..120: mol_type = other DNA

SEQ ID NO: 26988 - DNA, 120 bp, synthetic construct
  source 1..120: mol_type = other DNA
gccacagagccttattgtgacagagagggtgtatgctccagcttctaccttggtagatcagccttatgctaatgaaggtacagttgtggtcactgaaagagtaatacagcctcatggggg

SEQ ID NO: 26989 - DNA, 120 bp, synthetic construct
  source 1..120: mol_type = other DNA
tatagcagtaggacagaatgtgacagtgacagaaagagttctagcacctgcttccactctgcaatccagttaccagattcccactgaaaattctatgacggctaggaacaccacggtgtc

SEQ ID NO: 26990 - DNA, 120 bp, synthetic construct
  source 1..120: mol_type = other DNA
ctcctaaacagcagtcagccacaaactgacccagagtttaattagcagtgactaatttcatgtttccaatgtacctgatttttcatgagccttacagacacacagagacacatacacatt

SEQ ID NO: 26991 - DNA, 120 bp, synthetic construct; identical to SEQ ID NO: 8196
  source 1..120: mol_type = other DNA

SEQ ID NO: 26992 - DNA, 120 bp, synthetic construct
  source 1..120: mol_type = other DNA
acagtctgagcaccagctatggtgctcataacttctttaagacttgaaccctttcaatctgtgtgattcattaaattggaccattgatgataagaatacacattgtatgtttctgtgcac

SEQ ID NO: 26993 - DNA, 120 bp, synthetic construct
  source 1..120: mol_type = other DNA
aactgtggtcaggagtttgagatcagccaggccaacctggtgaaaccccgtctctactaaaaatacaaaaattagctgggcgtgatggtgggcgcctgtaatcccagctacttgggaggc

SEQ ID NO: 26994 - DNA, 120 bp, synthetic construct
  source 1..120: mol_type = other DNA
aaaaaaatagcattatacctcttccttgtctcaaccgccatgaaaattctgaacactccaaattcagttgaataatccaaaacaaaatttataagtataaaataattttacttcttatag

SEQ ID NO: 26995 - DNA, 120 bp, synthetic construct; identical to SEQ ID NO: 8197
  source 1..120: mol_type = other DNA

SEQ ID NO: 26996 - DNA, 120 bp, synthetic construct
  source 1..120: mol_type = other DNA
cttcccttttctacaagttaatttttttacaaatcatttgggttatctcctaaataggttatattttattgcttctagaaacaatgtttcaaaatatatgtgcattatcagtaataattt

SEQ ID NO: 26997 - DNA, 120 bp, synthetic construct
  source 1..120: mol_type = other DNA
gtgtcatgcaaaggatttatatagtgtgctcccactaactgtacagatcaggacacatatttttagacatctaagtctgtagcttaaatggaggttactcttccatcatctagaattgtt

SEQ ID NO: 26998 - DNA, 120 bp, synthetic construct
  source 1..120: mol_type = other DNA
tagtatatgaaaatgtaaatatcacttgtgtactcaaacaaaagttggtcttaagcttccaccttgagcagccttggaaacctaacctgcctcttttagcataatcacattttctaaatg

SEQ ID NO: 26999 - DNA, 120 bp, synthetic construct; identical to SEQ ID NO: 8198
  source 1..120: mol_type = other DNA

SEQ ID NO: 27000 - DNA, 120 bp, synthetic construct
  source 1..120: mol_type = other DNA
ggaggagactcgctccgccgccgaccaacaccaacacccagctccgacgcagctcctctgcgcccttgccgccctccgagccacagctttcctcccgctcctgcccccggcccgtcgccg

SEQ ID NO: 27001 - DNA, 120 bp, synthetic construct
  source 1..120: mol_type = other DNA
gcgccggcccgcctcgcttatgcctcggcgctgagccgctctcccgattgcccgccgacatgagctgcaacggaggctcccacccgcggatcaacactctgggccgcatgatccgcgccg

SEQ ID NO: 27002 - DNA, 120 bp, synthetic construct; identical to SEQ ID NO: 8199
  source 1..120: mol_type = other DNA

SEQ ID NO: 27003 - DNA, 120 bp, synthetic construct
  source 1..120: mol_type = other DNA
cagagggggcgtcgggcccgcgcggggctgtcccctgcctgctggacacggctgcagccgcctttgtcccagcccgcgaatgggaggtcaggcgaggtggggctgcgaccacaaaaccca

SEQ ID NO: 27004 - DNA, 120 bp, synthetic construct
  source 1..120: mol_type = other DNA
ccgagaccacgactgcaacgactcctggactcctcggccacccaaggacgtttgtatcaaggctgcgcgtcccggcggcgcggggtcctgtcccgaggaggcgcttcggcttcccctgtc

SEQ ID NO: 27005 - DNA, 120 bp, synthetic construct
  source 1..120: mol_type = other DNA
ccctgcctctgagccttttgtttcctcctttttaaaaacaccggatgaaagaccccagtgtgccttggatcgcagagcgccggccgcatgtctgctttgatccagaatgtgtgggcaggg

SEQ ID NO: 27006 - DNA, 120 bp, synthetic construct
  source 1..120: mol_type = other DNA
agcttctccggatcccagcggaaacagaccgagggcgtcatttgggtgggtggggaagagatcctgtccctgctttgaccgggtctcgggagctggactctagatgcccacgtgagccgt

SEQ ID NO: 27007 - DNA, 120 bp, synthetic construct; identical to SEQ ID NO: 8200
  source 1..120: mol_type = other DNA

SEQ ID NO: 27008 - DNA, 120 bp, synthetic construct
  source 1..120: mol_type = other DNA
ccaagcaatagaaggaatgaaaacttgggttttcattacatttgttttaaaattttgccagccatttaaatctgaaatttaaattttctcccgcagtcctccaggatttgagatgcacat

SEQ ID NO: 27009 - DNA, 120 bp, synthetic construct
  source 1..120: mol_type = other DNA
actatgcttttgctagcttggatttcttatcttttaaatagacaataatcagtactattaatcgaatatttcactcccttggcttcttataccttttgtaggggagtaaaactttaataa

SEQ ID NO: 27010 - DNA, 120 bp, synthetic construct; identical to SEQ ID NO: 8201
  source 1..120: mol_type = other DNA

SEQ ID NO: 27011 - DNA, 120 bp, synthetic construct
  source 1..120: mol_type = other DNA
actacaaaatagcccacaaatgctgacttctgcgttttcaaataatagcgaccgcctgaaggcagggcatgtcgcagtttttctggtggcattctggttttgtgtggagggatatgtttg

SEQ ID NO: 27012 - DNA, 120 bp, synthetic construct
  source 1..120: mol_type = other DNA
ttttttttagcatgaaaactagtataaaaactattggttgactttaaactcatttatttcaaaaactgctactttatggctgaattattaatagattggtgatttttgagatgagtgttt

SEQ ID NO: 27013 - DNA, 120 bp, synthetic construct
  source 1..120: mol_type = other DNA
ttacccgtttttaggacagtattagatctcattgtatcctaattccctctttttcccccgaccacctgcctgttctttgtgtctttgttttagattgaatggaatctgcaactacttaat

SEQ ID NO: 27014 - DNA, 120 bp, synthetic construct; identical to SEQ ID NO: 8202
  source 1..120: mol_type = other DNA

SEQ ID NO: 27015 - DNA, 120 bp, synthetic construct
  source 1..120: mol_type = other DNA
tcatatacattttaaagttagtcttaaattaggttttaagagaagcttatttcttactatgagacaaacaggtcaatttgcctgaattttagagcggggggacccctaaggatcacttag

SEQ ID NO: 27016 - DNA, 120 bp, synthetic construct
  source 1..120: mol_type = other DNA
cctgtgccttcacagcctgacttttagaatggacaggcctgtaattacaccatgcaagtatctcaaattccattaattccttaattcagcaagtatttaccgagcattgactgcattctg

SEQ ID NO: 27017 - DNA, 120 bp, synthetic construct
  source 1..120: mol_type = other DNA
acgtgacttcagagacttcacaaggaggtgagagaacatctgtcgtgggggcactgggaagactttataaaggaagtggtgtcgaactagactttggagtatttcagctgtgtcaggatg

SEQ ID NO: 27018 - DNA, 120 bp, synthetic construct
  source 1..120: mol_type = other DNA
gcatccttttttgaccaaggcattggagaccttgaatgccccggagagggatttggataggcagagggaagctggtgcaggttttcactgaagccattgaaagtctcctccattggagga

SEQ ID NO: 27019 - DNA, 120 bp, synthetic construct; identical to SEQ ID NO: 8203
  source 1..120: mol_type = other DNA

SEQ ID NO: 27020 - DNA, 120 bp, synthetic construct
  source 1..120: mol_type = other DNA
ttaataatagttaccattacccagcaaatacctgtgatgtgccttgtataggatgtttgttatctcaagcctcataacaaacttcccagtttacagatgggaagctgaggttaaaatatt

SEQ ID NO: 27021 - DNA, 120 bp, synthetic construct
  source 1..120: mol_type = other DNA
aagattaaacctgcagtgtgagaattcaccttttctacttgtaaacccttttctatctgagttattacttatttttaatctgttgaattcctcagtctgcgttcctgtgaaatatttcat

SEQ ID NO: 27022 - DNA, 120 bp, synthetic construct; identical to SEQ ID NO: 1173
  source 1..120: mol_type = other DNA

SEQ ID NO: 27023 - DNA, 120 bp, synthetic construct
  source 1..120: mol_type = other DNA
tgctgcagctgggagcagtgcctcaccccttgattttctccatctccctcccgctgggctggtcccagtggccctgccgcttgaaaacgttcagatgtggttctgattttgaagtcacgg

SEQ ID NO: 27024 - DNA, 120 bp, synthetic construct
  source 1..120: mol_type = other DNA
atggctcaccaccgacaccttgggctggaagggctcatgaatgtgaaatctacatttcatgaaaatgaagacagtttagtgagaagctgcagcaaacagatcaaaggttctgcttggaat

SEQ ID NO: 27025 - DNA, 120 bp, synthetic construct
  source 1..120: mol_type = other DNA
cccacctcagcctctcgagtagcttgggaccacaggcgtgcgccaccatacacaactaattaaaattttttttttttttttgtagagacaaggtctcgctatcttgcccaggctggtctt

SEQ ID NO: 27026 - DNA, 120 bp, synthetic construct; identical to SEQ ID NO: 1174
  source 1..120: mol_type = other DNA

SEQ ID NO: 27027 - DNA, 120 bp, synthetic construct
  source 1..120: mol_type = other DNA
ccagcactttgggaggccgaggtgggcggatcacaaggtcaggagttccagcccagcctagccaatatggtgaaaccccgtctctactaaaaatacaaaaattagctgggcgtggtggcg

SEQ ID NO: 27028 - DNA, 120 bp, synthetic construct
  source 1..120: mol_type = other DNA
actccgtgaaaaaaaaaaagaaagaaagaaatttcagaaccataacaacagcagcagcctccgcaagtaagagctatcactaagtgaggtctccgcctctgcagtgcccctctgagcctc

SEQ ID NO: 27029 - DNA, 120 bp, synthetic construct
  source 1..120: mol_type = other DNA
tgggcgtggactccaactgtgccctacttcaaagtccttctgaagttaatgatatgtgatcagttttccactatcccacaaacacaatctgccaaacacacagtgtgaaaatcgagaaaa

SEQ ID NO: 27030 - DNA, 120 bp, synthetic construct
  source 1..120: mol_type = other DNA
aggctgtctttctaaaatctatagagacaaaaaatccaccatgtttgctcactgctggagtgggaatggggaggggagagctgtgctctctggttgagcttttgaaatcagggtaatgag

SEQ ID NO: 27031 - DNA, 120 bp, synthetic construct; identical to SEQ ID NO: 8206
  source 1..120: mol_type = other DNA

SEQ ID NO: 27032 - DNA, 120 bp, synthetic construct
  source 1..120: mol_type = other DNA
tttgctcttgttgcccaggctggagggcaatggcgcgatctcggctcactgcaacctccacctcccaggttcaagcgattctcctgcttcagcctcctgagtagctgggattacaggcat

SEQ ID NO: 27033 - DNA, 120 bp, synthetic construct
  source 1..120: mol_type = other DNA
gggattacaggcgtgagccaccgtacccggctagtgaatcttagaggtaaagtatcatccttaaatgaagtattaaaaatatatttttctttttatgaaagatcctttcaagaaactcaa

SEQ ID NO: 27034 - DNA, 120 bp, synthetic construct; identical to SEQ ID NO: 8207
  source 1..120: mol_type = other DNA

SEQ ID NO: 27035 - DNA, 120 bp, synthetic construct
  source 1..120: mol_type = other DNA
tccaagtgtctaatgagcaacatagttattataaaagtatttttataaaacaaagagagtaactcttcatttaaaaactttgtttttgcctataatgtccctctttgaaatatttgtctt

SEQ ID NO: 27036 - DNA, 120 bp, synthetic construct
  source 1..120: mol_type = other DNA
gtgcaatctcggctcactgcagcctctgcctcccaggttcaaccatctcatctcagcctcccatctcagcctcccgagtagctgggacttacaggcgtgtgccttcatgcccagctgttt

SEQ ID NO: 27037 - DNA, 120 bp, synthetic construct
  source 1..120: mol_type = other DNA
gagccacggcacccaaccttgtcttgtatttttaaaaataatatttttggcaacacatgtaaagctaatgccttaggacagctagttttggagtcctatttttaaagaaaaatgtttttt

SEQ ID NO: 27038 - DNA, 120 bp, synthetic construct
  source 1..120: mol_type = other DNA
tgcaaatatttggaatccttacttgtttaaacaagttttaggatgaacttaaaaaaaaagtatgtgcaggtaggttctttgtaatatgactcatttatctctcagaagagttaaaaactt

SEQ ID NO: 27039 - DNA, 120 bp, synthetic construct; identical to SEQ ID NO: 1177
  source 1..120: mol_type = other DNA

SEQ ID NO: 27040 - DNA, 120 bp, synthetic construct
  source 1..120: mol_type = other DNA
tttatccattatagaattttgcattttcccaaactgcactatatgaattaaatttaattcaattagcatgaataaatttatttaccatgaacttaacatagacatttgtattattttcag

SEQ ID NO: 27041 - DNA, 120 bp, synthetic construct
  source 1..120: mol_type = other DNA
ccaacagatggagatagaaatttctgagattaaaaaaaaatctaaaattgtgtagtcaataacatatatatatataatctgacttagaaaggtttgaattacagcttttaaaaaaatgca

SEQ ID NO: 27042 - DNA, 120 bp, synthetic construct
  source 1..120: mol_type = other DNA
tgtctctactaaaaatacaaaaattagctttgcgtggtggcagtgtgcctgtaatcccagctacttgggaggctgaggcagaagaatcacttgaacccaggatgtggaggttgcaatgag

SEQ ID NO: 27043 - DNA, 120 bp, synthetic construct; identical to SEQ ID NO: 8209
  source 1..120: mol_type = other DNA

SEQ ID NO: 27044 - DNA, 120 bp, synthetic construct
  source 1..120: mol_type = other DNA
cggtctgtttccaaagggaattcttggccacacctaagactgaagttggattcttacagatgaaagatagaagtagaccttgttttaaggatcagacgcggtcttgaaaagttgtgtata

SEQ ID NO: 27045 - DNA, 120 bp, synthetic construct
  source 1..120: mol_type = other DNA
acttaagctttttattttttcaacccttcaaaggattagatttctgtgcattccccattcctatacagttgttaatttatttactaagatgctgtgcaaaacatgtaagttttttagtgg

SEQ ID NO: 27046 - DNA, 120 bp, synthetic construct
  source 1..120: mol_type = other DNA
gaaaccccatctctattaaaaatacaaaaaaaaaaaaatagctgggcgtggtggtgcatgcctgtagtcccagctactccagaggctgaggcaggagaatcacttgaacccaggaagtgg

SEQ ID NO: 27047 - DNA, 120 bp, synthetic construct
  source 1..120: mol_type = other DNA
gaagaatttatttggtattattagcagcatataaagttacctgttgtttttttttttttttaagttcaaatatgggtaggcaagggaaggcaggcaaggtgtcttctctttataggatgt

SEQ ID NO: 27048 - DNA, 120 bp, synthetic construct; identical to SEQ ID NO: 8210
  source 1..120: mol_type = other DNA

SEQ ID NO: 27049 - DNA, 120 bp, synthetic construct
  source 1..120: mol_type = other DNA
atagttttagatttgcagaaaagttacaaaatagtacaaagtttgtgtataccctcacccagtttcccatgcctccatcattttatttttttttaacagcggggttttatgctgtgttgc

SEQ ID NO: 27050 - DNA, 120 bp, synthetic construct
  source 1..120: mol_type = other DNA
ggcacacattattaaatcatttaggaaactctgactttccattgtgctaagagacaactctttcatttatctgcttgggactggcattctttgtgggaatcaccttcggagccaaattgc

SEQ ID NO: 27051 - DNA, 120 bp, synthetic construct; identical to SEQ ID NO: 8211
  source 1..120: mol_type = other DNA

SEQ ID NO: 27052 - DNA, 120 bp, synthetic construct
  source 1..120: mol_type = other DNA
tcatttcctgtataattcggagtggaagacagagactggttgcattggtggtgggtgggggcagtcttggtttcgagagctggatggctctggcaccacctcccctgggcctgcctggag

SEQ ID NO: 27053 - DNA, 120 bp, synthetic construct; identical to SEQ ID NO: 1180
  source 1..120: mol_type = other DNA

SEQ ID NO: 27054 - DNA, 120 bp, synthetic construct
  source 1..120: mol_type = other DNA
ctgaaggtaggaagagccaacttcttgtagcacatccgtgaggacttttcacagacattaaataatcacttggtctgctttaaatctctctgaaaccaaactacagtaggctgtgctgtg

SEQ ID NO: 27055 - DNA, 120 bp, synthetic construct; identical to SEQ ID NO: 8212
  source 1..120: mol_type = other DNA

SEQ ID NO: 27056 - DNA, 120 bp, synthetic construct
  source 1..120: mol_type = other DNA
tttttacagacagggtctcactctgtcaccgaggcaagagtgcagtgctgtgatcatagctcactgtagcctccaactcgtgggctcaagtgatcctcccacctcagctgcctgagtagc

SEQ ID NO: 27057 - DNA, 120 bp, synthetic construct
  source 1..120: mol_type = other DNA
tgcctgccttggcttcccaaagcactgggattacaggtgtgaaccactgtgtccggccaatatttttgtagagtaagcttttttctcctctcctacctttccttcagcccgacttgccag

SEQ ID NO: 27058 - DNA, 120 bp, synthetic construct
  source 1..120: mol_type = other DNA
gtgtcattgtcattgccagaagtgtgtttttataactcagagagatatatttctggattggatcctggacctgggaggggaaaacttgctgtgaatgacattattgggctaattggtgaa

SEQ ID NO: 27059 - DNA, 120 bp, synthetic construct
  source 1..120: mol_type = other DNA
gatatttgggggttaaaaagccatgttctcaaatgattcagaaaaaaataatatgtatacatagataaatatatgctgaaatatttgggggtagaagggcatggttattctcaagtggtt

SEQ ID NO: 27060 - DNA, 120 bp, synthetic construct; identical to SEQ ID NO: 8213
  source 1..120: mol_type = other DNA

SEQ ID NO: 27061 - DNA, 120 bp, synthetic construct
  source 1..120: mol_type = other DNA
ccggggcctattcactgacctctttcacgtagtgtttagagacacgctttttcagaacagactacagagagatgtgtgtcttcttaacctatttgtaatgttggtttaacaatgagaacc

SEQ ID NO: 27062 - DNA, 120 bp, synthetic construct
  source 1..120: mol_type = other DNA
atgatttacgtgactttttgatactttcccttctgagaaatgcaacctggcatgtttctgttcctgggttgggatggatcttcatgtgcaccatcaatttagtatgattttttttttcag

SEQ ID NO: 27063 - DNA, 120 bp, synthetic construct
  source 1..120: mol_type = other DNA
ataactgagacatcctaggatctcatcgaatccagattagaaatcatggagttcgtggtatttgctgtgtgaagtcttcattttaaaacactagcattcacctttgctccgagtttgcta

SEQ ID NO: 27064 - DNA, 120 bp, synthetic construct; identical to SEQ ID NO: 8214
  source 1..120: mol_type = other DNA

SEQ ID NO: 27065 - DNA, 120 bp, synthetic construct
  source 1..120: mol_type = other DNA
cagcaaactagcttggctccagttctagttgtttcgagtgtctgatttgaaacatactccttgaaatgttcctcgcagtggcccgattcctttacacaaaacaaaatagcagacaccagt

SEQ ID NO: 27066 - DNA, 120 bp, synthetic construct
  source 1..120: mol_type = other DNA
caacgtgcaataaataaaaacaggttagggaaatagtgtcatatttgctaacatttctgtttagagaaaagaggttcatttgactaaagccaagtaaaagcagcaaatataaaattccag

SEQ ID NO: 27067 - DNA, 120 bp, synthetic construct; identical to SEQ ID NO: 8215
  source 1..120: mol_type = other DNA

SEQ ID NO: 27068 - DNA, 120 bp, synthetic construct
  source 1..120: mol_type = other DNA
tggtgaaaccctgtctctattaaaaatacaaaaattagcctggcgtggtggcacatgcctgtagtctcagctactcaggagcctgaggcaggagaatcacttgaatccaggaggcagagg

SEQ ID NO: 27069 - DNA, 120 bp, synthetic construct
  source 1..120: mol_type = other DNA
aggaaaaactctgtgcataagaggccccatctgtaccactgtaccataatggtacagtgtccttgtcacaatgagattcccattatatgagacttgtgtgtaaatatgaaagatcagcat

SEQ ID NO: 27070 - DNA, 120 bp, synthetic construct
  source 1..120: mol_type = other DNA
ttaacatactgaagcaaggggaaggttagcattcagcaaatgtgactttaaaagccaagtgcaaatttaaaagacagtccacaaactttggttcatgaatctccgtctgtttaccttctt

SEQ ID NO: 27071 - DNA, 120 bp, synthetic construct; identical to SEQ ID NO: 8216
  source 1..120: mol_type = other DNA

SEQ ID NO: 27072 - DNA, 120 bp, synthetic construct
  source 1..120: mol_type = other DNA
catgacccagggcttcctttgaaggcagcacaaatgttcccaaggaaaggtttgcttacttggtattttgcaactttattatgtatctctaatacaaagtgaccatttcattataggtgt

SEQ ID NO: 27073 - DNA, 120 bp, synthetic construct
  source 1..120: mol_type = other DNA
caaatgtggctcgccgcagcctcaacctcctgggctcaagcaatcctcccacttcagcctatcaagtagttgggctatcggcatgtgccatacctagcaaattaaaaaaaaattttttgt

SEQ ID NO: 27074 - DNA, 120 bp, synthetic construct
  source 1..120: mol_type = other DNA
tcaagtcaagcttagtttaataaatataaaaatgagacccttagagttggaaacaaagactataaggcagaaaaatgtagtctgaatttgttctactactacctggggcccagggtacta

SEQ ID NO: 27075 - DNA, 120 bp, synthetic construct; identical to SEQ ID NO: 8217
  source 1..120: mol_type = other DNA

SEQ ID NO: 27076 - DNA, 120 bp, synthetic construct
  source 1..120: mol_type = other DNA
gctccaagggtggtggaggctacacttgtcagagtggctctggctgggatgagttcaccaaacatgtcaccagtgaatgtttggggtggatgaggcagcaaagggtaagcagcttcttga

SEQ ID NO: 27077 - DNA, 120 bp, synthetic construct
  source 1..120: mol_type = other DNA
ctcctatacaatttgaaaagtggtcttctattttggaatgaatgagatttcagtgtggcttggggaatcagcctcattgctttatagtcatcctttatcacacaggtcatatttaacatg

SEQ ID NO: 27078 - DNA, 120 bp, synthetic construct
  source 1..120: mol_type = other DNA
ctgttttactcataggtacttgaaaaaaagcccattgtggcagttcatttaaaatggtcatagattggaggagctggaaacagtgaaactagccattctggtttaggctcattggttgct

SEQ ID NO: 27079 - DNA, 120 bp, synthetic construct; identical to SEQ ID NO: 8218
  source 1..120: mol_type = other DNA

SEQ ID NO: 27080 - DNA, 120 bp, synthetic construct
  source 1..120: mol_type = other DNA
tggttgtaagaaagcttggtttgattagttgttagactaattcagcagtggttctaaaatttctcaactcctttaaaatttttgtgtattctttcctaagtagtgaggacttcagtgact

SEQ ID NO: 27081 - DNA, 120 bp, synthetic construct
  source 1..120: mol_type = other DNA
caaatctatttgtatgtttttcaaatttccttctaatcttcgagcacatttcttgaggattttatatgtagtgccacccaagggtacaaagattatggtccctagtcctgaaaatgaatg

SEQ ID NO: 27082 - DNA, 120 bp, synthetic construct
  source 1..120: mol_type = other DNA
ggaagacatagcggagctgatggggcttaactacatcttaaggatccacaatgatgggcaaaacagccttccaatcaaattagtttgaaatgtcatatctcctaaagttttcttagtatg

SEQ ID NO: 27083 - DNA, 120 bp, synthetic construct; identical to SEQ ID NO: 8219
  source 1..120: mol_type = other DNA

SEQ ID NO: 27084 - DNA, 120 bp, synthetic construct
  source 1..120: mol_type = other DNA
tatgtcgttttctaacagaagcaattgataagcgatgctttccgggttaggcacgcagccctcatggttgcaaacaaactaaaagctgtttgattgcttactgcaggttcgctctgggat

SEQ ID NO: 27085 - DNA, 120 bp, synthetic construct
  source 1..120: mol_type = other DNA
gctgataagggaactgttgccccagcagccagtcaggaggcaggcactcctgagccaggtttttgttttgttttcccgatttgtgtttgccgatggacaggtcagatacgatacacctgg

SEQ ID NO: 27086 - DNA, 120 bp, synthetic construct
  source 1..120: mol_type = other DNA
aaccttctgttgtctgactctgaaatggctcccctttctgaagccttgccaagtgtattagaacatggatgtggcttagaacaatgtgttttatgttcttgctgcaatcccagattggaa

SEQ ID NO: 27087 - DNA, 120 bp, synthetic construct; identical to SEQ ID NO: 8220
  source 1..120: mol_type = other DNA

SEQ ID NO: 27088 - DNA, 120 bp, synthetic construct
  source 1..120: mol_type = other DNA
tgaatccttgagtagatatagtgacttccctttgaagtggcccatagggagttttgcatcctaaaagggaatggtatatcctggattttaaaaagccaataattacatccatcaagacaa

SEQ ID NO: 27089 - DNA, 120 bp, synthetic construct
  source 1..120: mol_type = other DNA
ttataacatatcatacatatatatgcacacatatgttctgtgcacatgcttgcttgcctgtgcacaggtagatttggttttttttttttttcagaagacatgatcttggttttcaggttc

SEQ ID NO: 27090 - DNA, 120 bp, synthetic construct
  source 1..120: mol_type = other DNA
ccatttgggaacctttaaaaaatattctggcttcaaaaatactccatatttacatctttggttctatctgaagtaaagccgtgatggtgtgcgtaagtgaaacaggtgcaaaggggcaac

SEQ ID NO: 27091 - DNA, 120 bp, synthetic construct
  source 1..120: mol_type = other DNA
tcggcgactatcgctggcagctggacaaaatcaaagccgacctggtacttgtctgtgtttcattttagagtcttcaaaatatctaccgaaggatcgtgtaattactcaatcccagggagt

SEQ ID NO: 27092 - DNA, 120 bp, synthetic construct; identical to SEQ ID NO: 8221
  source 1..120: mol_type = other DNA

SEQ ID NO: 27093 - DNA, 120 bp, synthetic construct
  source 1..120: mol_type = other DNA
tcctaggtggtaattaaaacattatttctactgagcaaagccatatgtcatcccgacacccgctcccatgctgaaaaaagtcagacttgaaactgggttgagaattacagcataaaatca

SEQ ID NO: 27094 - DNA, 120 bp, synthetic construct
  source 1..120: mol_type = other DNA
ggggcttacttttgtccacctgagcccctgaccaactttctccttcatttctctaagacctagggaatcctaaatgatgtctttaaactttaagacaattttctaacacgtgagtcttta

SEQ ID NO: 27095 - DNA, 120 bp, synthetic construct
  source 1..120: mol_type = other DNA
tttctttctatggagggatctgaggccagtatctgaagaaaaggaggcttagaagggccactcttttctatacaatccacaaggggatttatatctacctgctttttgttgtcttctagc

SEQ ID NO: 27096 - DNA, 120 bp, synthetic construct; identical to SEQ ID NO: 8222
  source 1..120: mol_type = other DNA

SEQ ID NO: 27097 - DNA, 120 bp, synthetic construct
  source 1..120: mol_type = other DNA
ctaaaagttgttttcagaagtcagtccctactgctgttctgttttcaagttgtgtcacataaatggcacttgttaagtacttgcagttgaagcaagaaaacgttgccacttgtgaattgt

SEQ ID NO: 27098 - DNA, 120 bp, synthetic construct
  source 1..120: mol_type = other DNA
ttctcaagatagaggtctaccagatcgtcatcacaattttatgacactcagtcatatcagttacttgattcataagaggagagatttccattcttttgcctatttgtgtcatcatatctt

SEQ ID NO: 27099 - DNA, 120 bp, synthetic construct; identical to SEQ ID NO: 8223
  source 1..120: mol_type = other DNA

SEQ ID NO: 27100 - DNA, 120 bp, synthetic construct
  source 1..120: mol_type = other DNA
cagaaaagataaatgttcgaggtgatggatatcccacttatcctgatttgatcattatacattgtatacatgtgtccagatatcatgtgtacccccaaatatgtacaactatatcagtaa

SEQ ID NO: 27101 - DNA, 120 bp, synthetic construct
  source 1..120: mol_type = other DNA
gagttcgagaccagcctggccaactggtgaaaccccgtctctactaaaaatacaaaaattagcaggacgtggtggtgcatgtctgtaatcccacctactcgggaagctgaggcaggagaa

SEQ ID NO: 27102 - DNA, 120 bp, synthetic construct
  source 1..120: mol_type = other DNA
tcattgcagatttggatgggtcttttcccataccaggtggtcagtgaatgcacaaggttaacatttttcctatccgtgtgattttttttttaaagggaccacaggtttaatctttaaacc

SEQ ID NO: 27103 - DNA, 120 bp, synthetic construct; identical to SEQ ID NO: 8224
  source 1..120: mol_type = other DNA

SEQ ID NO: 27104 - DNA, 120 bp, synthetic construct
  source 1..120: mol_type = other DNA
gctcagaaacaggaggccttctccgtaagttcaccccacgcggctgtagatgcttgtcttgagcctgttgccttgaagagctggggtctcggggaatgattggtctattaataatttaat

SEQ ID NO: 27105 - DNA, 120 bp, synthetic construct
  source 1..120: mol_type = other DNA
cacatgttctcacttaggagtgggaactaaatgatgagaatacatggatacatcgagggcaacaacacacactggggcctttcggagggcagagggtggaggtggaaggagggagaggat

SEQ ID NO: 27106 - DNA, 120 bp, synthetic construct
  source 1..120: mol_type = other DNA
aataaaagttaaaaagaaaaagaggggcaataccttgtttaatatcccagaagaccgtagtttgtttagagaggataagaactggtacgttcagataacccaggatgtgtgtggcactgc

SEQ ID NO: 27107 - DNA, 120 bp, synthetic construct
  source 1..120: mol_type = other DNA
gcctctgccacatcctctcctgtagcaaacatccttttcagccttaaaaatgctgtgattcttgaggaaaacagcgtgattctttggcattgttcatttccaaaatgcagttttgtattt

SEQ ID NO: 27108 - DNA, 120 bp, synthetic construct; identical to SEQ ID NO: 8225
  source 1..120: mol_type = other DNA

SEQ ID NO: 27109 - DNA, 120 bp, synthetic construct
  source 1..120: mol_type = other DNA
gtgccaactttattttctattttgggatcaataccctacaccaggggttggcaaactcttttcaggaaaggaccagacaatcagtattttagactttcaggccatttggtctctgttaca

SEQ ID NO: 27110 - DNA, 120 bp, synthetic construct
  source 1..120: mol_type = other DNA
agctatagtttggtgaccgctgccctagactgccatctttgggccacgctcaaggctgacattagctggtaccactggtatggccatactgcttgttaaaaaacacagaaagttccatat

SEQ ID NO: 27111 - DNA, 120 bp, synthetic construct
  source 1..120: mol_type = other DNA
gtgctagccccagtgacagttctgattggtcagtatctctgctatttgggtgatacatattttgactaagactcctcatggtgtctatttgtgaaagctgattttaaaatttagttttga

SEQ ID NO: 27112 - DNA, 120 bp, synthetic construct; identical to SEQ ID NO: 8226
  source 1..120: mol_type = other DNA

SEQ ID NO: 27113 - DNA, 120 bp, synthetic construct; identical to SEQ ID NO: 1194
  source 1..120: mol_type = other DNA

SEQ ID NO: 27114 - DNA, 120 bp, synthetic construct
  source 1..120: mol_type = other DNA
gatgacaatccttgaaacagaactactagatgaaattgctcattgagttgctgttcattcactgatcactctcatccttcacagttttttgaagaggcgcagtctactgaagcatacctg

SEQ ID NO: 27115 - DNA, 120 bp, synthetic construct
  source 1..120: mol_type = other DNA
tgtgcctgatcagggagataaaacacatgccttggatgcagttggctctgattagtattattgtacaatgcacgcccagagccaagcaagcattttcttcagcttccagtggcttttctc

SEQ ID NO: 27116 - DNA, 120 bp, synthetic construct; identical to SEQ ID NO: 8227
  source 1..120: mol_type = other DNA

SEQ ID NO: 27117 - DNA, 120 bp, synthetic construct
  source 1..120: mol_type = other DNA
gattttattcaccattgcagaaagaacgagagaaaatccttgaatacaagcgtcaggtgcagaacttggtaaacaagtctaagaagattgtacagctgaagcctcgtaacccagactaca

SEQ ID NO: 27118 - DNA, 120 bp, synthetic construct
  source 1..120: mol_type = other DNA
aaagcaacatttaatctagagttcaataatcaccacagtcaatgtctttgatctatgaaatcagcagctatggaacaaaagcagcagctctgttctgaatcatatggtagttgtcaataa

SEQ ID NO: 27119 - DNA, 120 bp, synthetic construct
  source 1..120: mol_type = other DNA
aatgatgcttttatgttgcatataaagtgaatgtctctcactatgggtgacacagtgagaccaaataaataaataaaatgtagctcacttcatgtataccttttaggctcacatgtatta

SEQ ID NO: 27120 - DNA, 120 bp, synthetic construct; identical to SEQ ID NO: 8228
  source 1..120: mol_type = other DNA

SEQ ID NO: 27121 - DNA, 120 bp, synthetic construct
  source 1..120: mol_type = other DNA
catgaatgtgagggcagaggaagagggcaggtgtttatacctgaagcttagacacacgatgccttgccataataaacaccttctaaaaaaaggaaccttgtgaaggtcaccttcactttg

SEQ ID NO: 27122 - DNA, 120 bp, synthetic construct
  source 1..120: mol_type = other DNA
ctgaggttaggagtttgagaccagcctgaccaacatggagaaactctgtctctactaaaaatataaaattagccaggtgtggtggtacatgcctgtaatcccagctactcgggaggttga

SEQ ID NO: 27123 - DNA, 120 bp, synthetic construct
  source 1..120: mol_type = other DNA
actgtagtggggccagagtgaataatacttgtcatgcacttcaaaggcatcattttaaggttctccttttcttagaaaatcagttgttatacatgtagctacaaatataaaatgccttta

SEQ ID NO: 27124 - DNA, 120 bp, synthetic construct; identical to SEQ ID NO: 8229
  source 1..120: mol_type = other DNA

SEQ ID NO: 27125 - DNA, 120 bp, synthetic construct
  source 1..120: mol_type = other DNA
ttgtaggtttttgtgcagtggtgtgagcgtgtccaggtttcccatttgggatgaagtgtgaaagcctggctctagcatgttttccctttgtgcctcttaggattgagcagtactacgaag

SEQ ID NO: 27126 - DNA, 120 bp, synthetic construct
  source 1..120: mol_type = other DNA
gccacttaggctgcctggagggagggcagcgctgccccccgcagtgcctgtgtccaacagttcaaccttcttgctgtgtagcagtgcttttgtgtctcgtcaagcaagtcagctcagccc

SEQ ID NO: 27127 - DNA, 120 bp, synthetic construct
  source 1..120: mol_type = other DNA
aaagtcatgcactcctgtaagattctggaccctatgctcctttgatgtaatggaaagttaggtcataaaggattaactgggtatcacaaaagtaaaaggtgggatagaattcttggaaga

SEQ ID NO: 27128 - DNA, 120 bp, synthetic construct; identical to SEQ ID NO: 8230
  source 1..120: mol_type = other DNA

SEQ ID NO: 27129 - DNA, 120 bp, synthetic construct
  source 1..120: mol_type = other DNA
gtgggtggcattttttggccaactcttcttgattgcattgtggggcagtcataaatcccaaatcacttctgcctgtctcctttcagctgaaaacaatgcggcaggaagattacatgaaga

SEQ ID NO: 27130 - DNA, 120 bp, synthetic construct
  source 1..120: mol_type = other DNA
accagaccctggtcattcagctccctggctatccccagcaccagacaggtcggcttgggacatctttctctttgtatcaaccatccataccattttaaaaagaagggagtttgcataaaa

SEQ ID NO: 27131 - DNA, 120 bp, synthetic construct; identical to SEQ ID NO: 8231
  source 1..120: mol_type = other DNA

SEQ ID NO: 27132 - DNA, 120 bp, synthetic construct
  source 1..120: mol_type = other DNA
agcagaccagggatcttctcaccacatcacagtgaaaattaacgagcttaaggtaggtatctgctagtattttgcctggttaccctgtatatttttatttacctgtaaatgaataaaaaa

SEQ ID NO: 27133 - DNA, 120 bp, synthetic construct
  source 1..120: mol_type = other DNA
ctgttcgtttgtgtgttgttgaatcaggctaccgtccatctcaaaagttttcacaaccattaatttggcttcttgcagagaacaacctatgatatgggttagacagggggaatgatcttt

SEQ ID NO: 27134 - DNA, 120 bp, synthetic construct
  source 1..120: mol_type = other DNA
caaccaagcctgggcacactgcactggaaggcctaaatagagatattctaagaggatcacatttacagtgctaatgaggccatactcaagaaagaaatagaaggtcaactcctctctctt

SEQ ID NO: 27135 - DNA, 120 bp, synthetic construct; identical to SEQ ID NO: 8232
  source 1..120: mol_type = other DNA

SEQ ID NO: 27136 - DNA, 120 bp, synthetic construct
  source 1..120: mol_type = other DNA
aattgtgacacaatggtaagtgtgtatctaaatatatctaaacgtcgaaaagatacaataaaaatacagtattataatcttacgggggctggatgcaggggcacatgcctgtaatcccag

SEQ ID NO: 27137 - DNA, 120 bp, synthetic construct
  source 1..120: mol_type = other DNA
tgtttatatgtatgtatgtacatatgtgtgtgtgtatatatcttaagggaccaccattgtgtatacagttcatcattgaccaaaacatcattagtagacacatgactatacacacacaca

SEQ ID NO: 27138 - DNA, 120 bp, synthetic construct
  source 1..120: mol_type = other DNA
gaccagcatgaccaacatggtgaaaccccatctctactaaaaagtacaaaaattagctgggtgtggtggcgtgcgcctgtaatctcagctactcaggaggctgaggcaggagaatcgctt

SEQ ID NO: 27139 - DNA, 120 bp, synthetic construct; identical to SEQ ID NO: 8233
  source 1..120: mol_type = other DNA

SEQ ID NO: 27140 - DNA, 120 bp, synthetic construct
  source 1..120: mol_type = other DNA
gtaatcttgtagtgtatattgaaattttgctgagagtagattttaggtgctcttaccacacatacaaaaaaagataaccatggaagttgactgatgtgttaatttacttacctgatgtaa

SEQ ID NO: 27141 - DNA, 120 bp, synthetic construct
  source 1..120: mol_type = other DNA
tgattcacaagcaattgctgaggttctcaaccagcttaaagatatgcttgccaacttcagaggttctgaaaagtactgctatttacagaatgaagtatttggactatttcagaaactgga

SEQ ID NO: 27142 - DNA, 120 bp, synthetic construct
  source 1..120: mol_type = other DNA
acagtttctctgttactagagatttacttacatccttctgtggtttggagagcatgttaattccgctagcctcgcatgttaattccactattctgaactataatgttatcttagaactaa

SEQ ID NO: 27143 - DNA, 120 bp, synthetic construct; identical to SEQ ID NO: 8234
  source 1..120: mol_type = other DNA

SEQ ID NO: 27144 - DNA, 120 bp, synthetic construct
  source 1..120: mol_type = other DNA
gtggcccaacttacaggaactaattcagatctgagctcccaattataaagcctcactgggttttcatgagttttgaggattattgggtttcagtggccacacaggttgacatcagttgtc

SEQ ID NO: 27145 - DNA, 120 bp, synthetic construct
  source 1..120: mol_type = other DNA
aaactttaatatgttcatattattattataacaggatagcacaaagaacaagattattggaacaaatactgggaaatgcaattcagtaaatatatttccctggattgactgttaacactt

SEQ ID NO: 27146 - DNA, 120 bp, synthetic construct; identical to SEQ ID NO: 1202
  source 1..120: mol_type = other DNA

SEQ ID NO: 27147 - DNA, 120 bp, synthetic construct; identical to SEQ ID NO: 8235
  source 1..120: mol_type = other DNA

SEQ ID NO: 27148 - DNA, 120 bp, synthetic construct
  source 1..120: mol_type = other DNA
ctcttggaaggagtagctgccttgagttagcattctccaaaagtttatgaaaattaaatcttagaccaaaaaaaatgcctttctgcaaataagagtttaaaaaatctctggaatatgaat

SEQ ID NO: 27149 - DNA, 120 bp, synthetic construct
  source 1..120: mol_type = other DNA
atcattttctatttttttcatgtgtttttatgattgaataatattccattgtttggcagtgccacattttgttgatcttttcatcagttgatacctgagttgtttccagtttttggctgt

SEQ ID NO: 27150 - DNA, 120 bp, synthetic construct
  source 1..120: mol_type = other DNA
ataagataatgattttattgtatctatttccccccaggttatgggacctggagaaacaaatcaagcaattgaggaattatcgtgataactatcaggctttctgcaagtggctctatgatg

SEQ ID NO: 27151 - DNA, 120 bp, synthetic construct; identical to SEQ ID NO: 8236
  source 1..120: mol_type = other DNA

SEQ ID NO: 27152 - DNA, 120 bp, synthetic construct
  source 1..120: mol_type = other DNA
agaaagtaacctcttacagatagtaagttaaagggcttgcttctcttctctgaatggaaaaaatgctcatctcctaagctgtaactataaaaatatgagacaagtacatgtagtaataaa

SEQ ID NO: 27153 - DNA, 120 bp, synthetic construct
  source 1..120: mol_type = other DNA
tctggcaaacgagacaaatcagaggaagtacaaaaaattgctgaactttgcgccaattcaattaaggtatgttggtttcataaagaatgttggtatttcaccaagattattattaactgc

SEQ ID NO: 27154 - DNA, 120 bp, synthetic construct; identical to SEQ ID NO: 1204
  source 1..120: mol_type = other DNA

SEQ ID NO: 27155 - DNA, 120 bp, synthetic construct
  source 1..120: mol_type = other DNA
tagctgggattacaggcatgcaccaccatgcccggctaattttatatttttagtagagacagggtttctccgtgttggtcaggctggttttgaactcccgatctcaggggatctgcccgg

SEQ ID NO: 27156 - DNA, 120 bp, synthetic construct; identical to SEQ ID NO: 8237
  source 1..120: mol_type = other DNA

SEQ ID NO: 27157 - DNA, 120 bp, synthetic construct
  source 1..120: mol_type = other DNA
tcctgcctgtcttccttaccattgctgatttcatcccattacagggtaccactttaagaggtttaatagcaggttatgtgccctccagtgtgagtcattgatgtatgatacattttcaga

SEQ ID NO: 27158 - DNA, 120 bp, synthetic construct
  source 1..120: mol_type = other DNA
aaagatgtcagagactatcgtacctgtcagatggtttaggggaaacagcctggagagatgagaatgggatacatttttggccctttgttttgctgtactttcttttgctgattttggaat

SEQ ID NO: 27159 - DNA, 120 bp, synthetic construct; identical to SEQ ID NO: 8238
  source 1..120: mol_type = other DNA

SEQ ID NO: 27160 - DNA, 120 bp, synthetic construct
  source 1..120: mol_type = other DNA
tgcttgtttgtaagtctggggttacttccatgctccaatacgctgctttaaatgaacttaagtaatagtcataatattgcaacaactttgccaaacaaaagtcacttgatttaatgtttg

SEQ ID NO: 27161 - DNA, 120 bp, synthetic construct
  source 1..120: mol_type = other DNA
aatataatttatgaaatcataagcttttgattttgaaagaaattacctcattttacagatgaggtagctcagactcaaagataatatatcatttgctaagagcatatgagcagctggtgc

SEQ ID NO: 27162 - DNA, 120 bp, synthetic construct
  source 1..120: mol_type = other DNA
tctttcttggaatgtgaggtgtttttcttttgacataatctctgatttcattccacagctgaaaaataccaagatcgaagttttggaagaggagctcagactggcccgagatgccaactc

SEQ ID NO: 27163 - DNA, 120 bp, synthetic construct; identical to SEQ ID NO: 8239
  source 1..120: mol_type = other DNA

SEQ ID NO: 27164 - DNA, 120 bp, synthetic construct
  source 1..120: mol_type = other DNA
cgagattgaaaggttgagggttctactgcaggaagaaggcacccggaagagagaatatgaaaatgagctggcaaaggtaagaaaccactataatgaggagatgagtaatttaaggaacaa

SEQ ID NO: 27165 - DNA, 120 bp, synthetic construct
  source 1..120: mol_type = other DNA
gaaaccagcttgatagactttcaagggaaaatcgagatctgaaggatgaaattgtcaggctcaatgacagcatcttgcaggccactgagcagcgaaggcgagctgaagaaaacgcccttc

SEQ ID NO: 27166 - DNA, 120 bp, synthetic construct
  source 1..120: mol_type = other DNA
ctgccaagaccattcaggacaaaaataaggagatcgagagactcaaagctgagtttcaggaggaggccaagcgccgctgggaatatgaaaatgaactgagtaaggtaagaaacaattatg

SEQ ID NO: 27167 - DNA, 120 bp, synthetic construct
  source 1..120: mol_type = other DNA
cagaaggaagaggataccagtggctaccgggctcagatagacaatctcacccgagaaaacaggagcttatctgaagaaataaagaggctgaagaacactctaacccagaccacagagaat

SEQ ID NO: 27168 - DNA, 120 bp, synthetic construct; identical to SEQ ID NO: 8240
  source 1..120: mol_type = other DNA

SEQ ID NO: 27169 - DNA, 120 bp, synthetic construct
  source 1..120: mol_type = other DNA
aagcaaacagtagtgcgacggagacaataaacaaactgaaggttcaggagcaagaactgacacgcctgaggatcgactatgaaagggtttcccaggagaggactgtgaaggaccaggata

SEQ ID NO: 27170 - DNA, 120 bp, synthetic construct
  source 1..120: mol_type = other DNA
aagagctggaaggcatgaggaggtcgctgaaggagcaagccatcaaaatcaccaacctgacccagcagctggagcaggcatccattgttaagaagaggagtgaggatgacctccggcagc

SEQ ID NO: 27171 - DNA, 120 bp, synthetic construct; identical to SEQ ID NO: 8241
  source 1..120: mol_type = other DNA

SEQ ID NO: 27172 - DNA, 120 bp, synthetic construct
  source 1..120: mol_type = other DNA
tgcagatcagcaacaaccggaccctggaactgcaggggctgattaatgatttacagagagagagggaaaatttgagacaggaaattgagaaattccaaaagcaggctttagaggtattca

SEQ ID NO: 27173 - DNA, 120 bp, synthetic construct
  source 1..120: mol_type = other DNA
ctctactacttcctgtcataatccaggtaactgctttaaaataatttcaatgctgtgtgccctgctgttctttaattgcatcaaatgctgatctctgggtagcctgtgtttggccctgct

SEQ ID NO: 27174 - DNA, 120 bp, synthetic construct
  source 1..120: mol_type = other DNA
tcaaatgctgatctctgggtagcctgtgtttggccctgcttttaagaacactaatacatgtataacttcctccgaatgttccattctacttcttagaagttagctcttatttagtgagct

SEQ ID NO: 27175 - DNA, 120 bp, synthetic construct; identical to SEQ ID NO: 8242
  source 1..120: mol_type = other DNA

SEQ ID NO: 27176 - DNA, 120 bp, synthetic construct
  source 1..120: mol_type = other DNA
ttgtattgcttcattaagtatgttcatctagctgtaacaggtgagatgtaggtgtagcaggtatgataacctgaaacaaaactccccacattttttcaaagcataattattgttaagagt

SEQ ID NO: 27177 - DNA, 120 bp, synthetic construct
  source 1..120: mol_type = other DNA
atagtaagtatgaagccatttattgaagtggcaacatatacagaatttttcccacaaatttgtaaaataacaagctcacagtgtatccagggacaatatagaaagaaaaaataagcaagg

SEQ ID NO: 27178 - DNA, 120 bp, synthetic construct
  source 1..120: mol_type = other DNA
ccatttctttcttcttcaattccaggcatctaataggattcaggaatcaaagaatcagtgtactcaggtggtacaggaaagagagagccttctggtgaaaatcaaagtcctggagcaaga

SEQ ID NO: 27179 - DNA, 120 bp, synthetic construct; identical to SEQ ID NO: 8243
  source 1..120: mol_type = other DNA

SEQ ID NO: 27180 - DNA, 120 bp, synthetic construct
  source 1..120: mol_type = other DNA
gattctaccagggagacacagtcacagttagaaacagaacgctcccgatatcagagggagattgataaactcagacagcgcccatatgggtcccatcgagagacccagactgagtgtgag

SEQ ID NO: 27181 - DNA, 120 bp, synthetic construct
  source 1..120: mol_type = other DNA
aagtcagtggaagaagttgcttctgaaatccagccattccttcggggtgcaggatctatcgctggagcatctgcttctcctaaggaaaaatactctttggtagaggccaagagaaagaaa

SEQ ID NO: 27182 - DNA, 120 bp, synthetic construct
  source 1..120: mol_type = other DNA
gacttcgatgaccgtcagcagatatatgcagcagaaaaagctatcactggttttgatgatccattttcaggcaagacagtatctgtttcagaagccatcaagaaaaatttgattgataga

SEQ ID NO: 27183 - DNA, 120 bp, synthetic construct
  source 1..120: mol_type = other DNA
tatcgatccctgaatgatccccgagatagtcagaaaaactttgtggatccagtcaccaaaaagaaggtcagttacgtgcagctgaaggaacggtgcagaatcgaaccacatactggtctg

SEQ ID NO: 27184 - DNA, 120 bp, synthetic construct; identical to SEQ ID NO: 8244
  source 1..120: mol_type = other DNA

SEQ ID NO: 27185 - DNA, 120 bp, synthetic construct
  source 1..120: mol_type = other DNA
ggtctggtgggcattgagttcaaagagaagctcctgtctgcagaacgagctgtcactgggtataatgatcctgaaacaggaaacatcatctctttgttccaagccatgaataaggaactc

SEQ ID NO: 27186 - DNA, 120 bp, synthetic construct
  source 1..120: mol_type = other DNA
tttaccagttgacatagcatataagaggggctatttcaatgaggaactcagtgagattctctcagatccaagtgatgataccaaaggattttttgaccccaacactgaagaaaatcttac

SEQ ID NO: 27187 - DNA, 120 bp, synthetic construct; identical to SEQ ID NO: 8245
  source 1..120: mol_type = other DNA

SEQ ID NO: 27188 - DNA, 120 bp, synthetic construct
  source 1..120: mol_type = other DNA
ctggtagatagaaagacaggcagtcagtatgatattcaagatgctattgacaagggccttgttgacaggaagttctttgatcagtaccgatccggcagcctcagcctcactcaatttgct

SEQ ID NO: 27189 - DNA, 120 bp, synthetic construct; identical to SEQ ID NO: 1212
  source 1..120: mol_type = other DNA

SEQ ID NO: 27190 - DNA, 120 bp, synthetic construct
  source 1..120: mol_type = other DNA
gtgattgaccaagacatggccaccaggctgaagcctgctcagaaagccttcataggcttcgagggtgtgaagggaaagaagaagatgtcagcagcagaggcagtgaaagaaaaatggctc

SEQ ID NO: 27191 - DNA, 120 bp, synthetic construct
  source 1..120: mol_type = other DNA
cgcgccgcacagaggctgcaagacaccagcagctatgccaaaatcctgacctgccccaaaaccaaattaaaaatatcctataaggatgccataaatcgctccatggtagaagatatcact

SEQ ID NO: 27192 - DNA, 120 bp, synthetic construct; identical to SEQ ID NO: 8246
  source 1..120: mol_type = other DNA

SEQ ID NO: 27193 - DNA, 120 bp, synthetic construct
  source 1..120: mol_type = other DNA
tagctcatcttaaataagcagtacacttggatgcagtgcgtctgaagtgctaatcagttgtaacaatagcacaaatcgaacttaggatttgtttcttctcttctgtgtttcgatttttga

SEQ ID NO: 27194 - DNA, 120 bp, synthetic construct; identical to SEQ ID NO: 8247
  source 1..120: mol_type = other DNA

SEQ ID NO: 27195 - DNA, 120 bp, synthetic construct
  source 1..120: mol_type = other DNA
gtttgtgttttaatttaatatgtttataagcatgtataaacatttagcatatttttatcataggtctaaaaatatttgtttactaaatacctgtgaagaaataccattaaaaaactattt

SEQ ID NO: 27196 - DNA, 120 bp, synthetic construct
  source 1..120: mol_type = other DNA
ggggcaggcccaggacaagcagcttggctactccccctctgctggctgcccgaccggcagagggggctccatgtggcaggagctaggctcccaacgcccactgttcttgccaccctctgg

SEQ ID NO: 27197 - DNA, 120 bp, synthetic construct; identical to SEQ ID NO: 8248
  source 1..120: mol_type = other DNA

SEQ ID NO: 27198 - DNA, 120 bp, synthetic construct
  source 1..120: mol_type = other DNA
cctctgagagggaggcgggaagggtaggcgcggagagcaggctccattctgggtcgagtggaggactggctcccagggtgagttcacaccagtgctcccagctggcggctgctcagtctc

SEQ ID NO: 27199 - DNA, 120 bp, synthetic construct
  source 1..120: mol_type = other DNA
accgccaccacgggctcccgcttgctgggggaacctgggagcgggagcgggggcaggggcggaggtcagggtcctggccagggcccctcaatccctcagaggcttcactgggctcccccg

SEQ ID NO: 27200 - DNA, 120 bp, synthetic construct
  source 1..120: mol_type = other DNA
gcccagcacggcgggcaggacgaggcctttgcttgtgcaacctagagagggccgacgccatcagcactgccactctgcccctgccccatcccctaccctgttgtgctggcccatgtgggc

SEQ ID NO: 27201 - DNA, 120 bp, synthetic construct
  source 1..120: mol_type = other DNA
acctagagggcccagccaggccttttgggtcatgcctctgcccctcaaggctgatggagatggcgttttcagggaggatggatggggtaacgtgaggaaactgaggctcgggagtacaga

SEQ ID NO: 27202 - DNA, 120 bp, synthetic construct; identical to SEQ ID NO: 8249
  source 1..120: mol_type = other DNA

SEQ ID NO: 27203 - DNA, 120 bp, synthetic construct
  source 1..120: mol_type = other DNA
ggggggaactgatggagaggctagagggggcgtcctgcagggagaggcctcaaggaaggcaaggccagcacccaccctcaaagggcctctgtctcacccaggagactccatcctcccagc

SEQ ID NO: 27204 - DNA, 120 bp, synthetic construct
  source 1..120: mol_type = other DNA
cctgctctaggctgctatggctctgggaagccctcctcctgccccttctgggccgctttctctggggtcccccttgccatgtgctatgtgcccaggccgtttctcagggctgcccgctgt

SEQ ID NO: 27205 - DNA, 120 bp, synthetic construct
  source 1..120: mol_type = other DNA
aaagagagagcagtatgtggcacctttgggaggcggcttccaggtttactccctggctccgtgaccccagcccaccctagagccttggctttgaatcccatctccaccgcttcgtagctg

SEQ ID NO: 27206 - DNA, 120 bp, synthetic construct; identical to SEQ ID NO: 8250
  source 1..120: mol_type = other DNA

SEQ ID NO: 27207 - DNA, 120 bp, synthetic construct
  source 1..120: mol_type = other DNA
agtgttgtgactggcaaatacagaaagccaggagtgtgtgtcctttgtccgcctctcttccctcaggtctcctgttctttgagattacactggtgaccatactacatggatgtgcgggtg

SEQ ID NO: 27208 - DNA, 120 bp, synthetic construct
  source 1..120: mol_type = other DNA
tcccaccagaaagctctcgggtggcagaaagtgctgctggcagccagactgccaggccacatgcctgattaaggctccgcccctcaccagctggccccacatccctgtgggctgccatgt

SEQ ID NO: 27209 - DNA, 120 bp, synthetic construct
  source 1..120: mol_type = other DNA
cggttttgggtatgggtactgtgtagaagtggaggaggaagctgaagcgcgggtcaccctcggggcttggggacagcaggctcacacagttgcccttggccgcccggccctggatgagtt

SEQ ID NO: 27210 - DNA, 120 bp, synthetic construct; identical to SEQ ID NO: 8251
  source 1..120: mol_type = other DNA

SEQ ID NO: 27211 - DNA, 120 bp, synthetic construct
  source 1..120: mol_type = other DNA
agaaaggcggagaggaagttccaggagctgggaggcccgaggggtgacaggcatgccaggtacctgcacaaagctctgctgccccggctcgatggtgttggaggcctggaggaagtgtgg

SEQ ID NO: 27212 - DNA, 120 bp, synthetic construct
  source 1..120: mol_type = other DNA
gtgtggggaggaacaggcatcatggccctgtggagttgcctgactctctttttttttttttttgagacggagtctcgctctgtcgcccaggctggagtgcagtggtgcgatctcagctca

SEQ ID NO: 27213 - DNA, 120 bp, synthetic construct
  source 1..120: mol_type = other DNA
ttcaccatgttagccaggatggtctcaatctcttcacctcgtgatctgcccgcctcggcctcccaaagtgctgcgattacaggcgtgagccactgcgcccggccctttttttttttttta

SEQ ID NO: 27214 - DNA, 120 bp, synthetic construct; identical to SEQ ID NO: 8252
  source 1..120: mol_type = other DNA

SEQ ID NO: 27215 - DNA, 120 bp, synthetic construct
  source 1..120: mol_type = other DNA
ccatctcacccgctgtggtgatgagctcgacaggatattgaccaccgcctgcggggataaagccagggagctggtcagagccagaaaggaccccagagggtatcccacccaatacgccca

SEQ ID NO: 27216 - DNA, 120 bp, synthetic construct
  source 1..120: mol_type = other DNA
ggcaccaaccaggctggtcctgatacctttttggccccagctcttacctcattgctgatcatacttgctgacacctgcatgccacagctggagtaagcactgcgcaagacaaacttgtca

SEQ ID NO: 27217 - DNA, 120 bp, synthetic construct; identical to SEQ ID NO: 8253
  source 1..120: mol_type = other DNA

SEQ ID NO: 27218 - DNA, 120 bp, synthetic construct
  source 1..120: mol_type = other DNA
acaggcacgtgccaccatgcccggctacttttttgtatttttagtagagatagggtttcaccatgttggccaggctggtctcaaactcctgacctcaggtgatccacctgcctcggcctc

SEQ ID NO: 27219 - DNA, 120 bp, synthetic construct
  source 1..120: mol_type = other DNA
aatcccagcactttgggaggctgaggcaggtggatcatgaggtcaggagatcgagaccatcctggctaacatgatgaaaccccgtctctactaaaaatacaaaaaaattagccgggcgtg

SEQ ID NO: 27220 - DNA, 120 bp, synthetic construct
  source 1..120: mol_type = other DNA
tattccttcaagttccacatataatcatcactcacagccccaagggcatgcaaaccctgcaagcataatccagtctcaggcctggcgtgggcgaagtgttcctataaagagccagatagt

SEQ ID NO: 27221 - DNA, 120 bp, synthetic construct; identical to SEQ ID NO: 8254
  source 1..120: mol_type = other DNA

SEQ ID NO: 27222 - DNA, 120 bp, synthetic construct
  source 1..120: mol_type = other DNA
aggcacaagaatcgcttgaacctgagaggaggaggctgcagtgagccgagatcacatcattgcactccagccttggtgacagagcgagacctcgtctctaaaacaagaaaaagaaggcca

SEQ ID NO: 27223 - DNA, 120 bp, synthetic construct
  source 1..120: mol_type = other DNA
cacacctgtaatcccagcactttgggaggccgaggtgggcggatcacaaggtcaggagttcgagaccagcctgaccaacatagtgaaaccccgtctctgctaaaaaaaaaaatacaaaaa

SEQ ID NO: 27224 - DNA, 120 bp, synthetic construct
  source 1..120: mol_type = other DNA
agcccgggcaatagtgtgagactgtcttaaaaaaaaaaaaaaaaaaaaaaagccaggcgtggtggtgcacgcctgtattcccaactactcaggaggctgaggcaggagaatcacttgaac

SEQ ID NO: 27225 - DNA, 120 bp, synthetic construct; identical to SEQ ID NO: 8255
  source 1..120: mol_type = other DNA

SEQ ID NO: 27226 - DNA, 120 bp, synthetic construct
  source 1..120: mol_type = other DNA
tatagtctggagacagcgaagaggttgaggtgttctcgtaaatcagtggtgaaaattcaaatcatctttgggaaagtgggttggcaacatgtattgaaacttcattcattttgacccagt

SEQ ID NO: 27227 - DNA, 120 bp, synthetic construct
  source 1..120: mol_type = other DNA
tatttataatactacagaattgggaacaacctaaatgtgtaacaagggaagaggagttaattatagcatgtcaatatgatggaataatatgtgcttattaaacatgatattaggtacagc

SEQ ID NO: 27228 - DNA, 120 bp, synthetic construct; identical to SEQ ID NO: 8256
  source 1..120: mol_type = other DNA

SEQ ID NO: 27229 - DNA, 120 bp, synthetic construct
  source 1..120: mol_type = other DNA
cgggttcaagcgattctcctgcctcagcctcctgagtagctgggactacaggcgtgcaccaccacgtccggctaattttttctattttagtagagacagggtttcaccgtgttgcccagg

SEQ ID NO: 27230 - DNA, 120 bp, synthetic construct
  source 1..120: mol_type = other DNA
tcttgctctgttgcccaggctggagtgcagtggcatgatcttggctcactgcaagctccgcctcccgggttcaggccattctcctgcctcagcctcccaagtagctgggactacaggcgc

SEQ ID NO: 27231 - DNA, 120 bp, synthetic construct
  source 1..120: mol_type = other DNA
gagtctctctctgtcacccaagctggagtacagtggtgcgatctcagctcactgcaagctctgcctcccgggttcacaccattctcctgcctcagcctcccgattagctgggactacagg

SEQ ID NO: 27232 - DNA, 120 bp, synthetic construct; identical to SEQ ID NO: 8257
  source 1..120: mol_type = other DNA

SEQ ID NO: 27233 - DNA, 120 bp, synthetic construct
  source 1..120: mol_type = other DNA
ctggtctcaaactcctgacctcaagtgatccacccatcttggcctcccaaagtgctgagattacaggcgtgaaccaccatgcctggcctgtgtaggtattctgctaagtgaccagccagc

SEQ ID NO: 27234 - DNA, 120 bp, synthetic construct
  source 1..120: mol_type = other DNA
tcaccacgtggtaggtaccattatcaattccattatacaagtgggaaaactaaggcttgcagagggacgtgacttgcccccctgcctgggctaggaccccaagagtcttgggctagggga

SEQ ID NO: 27235 - DNA, 120 bp, synthetic construct
  source 1..120: mol_type = other DNA
gagcagctccgggctacaagtgtccttgggaggagtggtctggatcggtgcgggtgaggtctgcagcctaccacctgtggggtagcagaggcaggccaggcggctggtcactgtgtgatc

SEQ ID NO: 27236 - DNA, 120 bp, synthetic construct
  source 1..120: mol_type = other DNA
ggttcaagcgattctcaggctcttctatgattagctactcccattgttcccatgtgcagatgagaaaaatgaggctcagagaggctgatgtaccttgcccaagctcacacagaggtgctt

SEQ ID NO: 27237 - DNA, 120 bp, synthetic construct; identical to SEQ ID NO: 8258
  source 1..120: mol_type = other DNA

SEQ ID NO: 27238 - DNA, 120 bp, synthetic construct
  source 1..120: mol_type = other DNA
gcctggccccttccctcacgtatgggcataggtgatttgtccttcagctcagctcgggggttcacctttccaggaaacttccctgatccagaggttgggagtttgggttttgtgtcccgg

SEQ ID NO: 27239 - DNA, 120 bp, synthetic construct
  source 1..120: mol_type = other DNA
caccttcaccgtcaccgtccggggcctgcggggagacagacgcggatggaacactgaagcggacaggccaggcggggagcgaggcctggcgtcgggtgggcggcggctgcactcttacct

SEQ ID NO: 27240 - DNA, 120 bp, synthetic construct
  source 1..120: mol_type = other DNA
cggcggggctggggctgggactggggtggggctttataagggaccggagagggggcggggggggtcaggggggtggtctctcggggtggggactagtgtcaggggcggggcgagagccat

SEQ ID NO: 27241 - DNA, 120 bp, synthetic construct
  source 1..120: mol_type = other DNA
ccatgtcctggctggcttccagcatgcagaaggacagtgacccctgggctgcagagacacgcgcacctcagtcccttccctcagcagccctgcacctaacagagccccgccctcacccac

SEQ ID NO: 27242 - DNA, 120 bp, synthetic construct; identical to SEQ ID NO: 8259
  source 1..120: mol_type = other DNA

SEQ ID NO: 27243 - DNA, 120 bp, synthetic construct
  source 1..120: mol_type = other DNA
tttaggtcagaacctggcatattccacatgcttcaatctgatatttggtggaggagccatcactgtcccaaggcagcactggcttgtggcatgtgaactgtggcacagcgtgtcccctcc

SEQ ID NO: 27244 - DNA, 120 bp, synthetic construct
  source 1..120: mol_type = other DNA
ctctgggggtcattcagctcagcagcagaggtgatggggcccctctcagctgcccactcaaggatctgggtcttggggaaggatggcagctctgtggtgttgacccccgggggctcttgg

SEQ ID NO: 27245 - DNA, 120 bp, synthetic construct
  source 1..120: mol_type = other DNA
ctgagagaaagaggccggagctgagaatgctggctggtggatctgcagtcagcccggagccccctagcagtcagatcagccccttctcccttgcatacctggggggccagatgaacacac

SEQ ID NO: 27246 - DNA, 120 bp, synthetic construct
  source 1..120: mol_type = other DNA
cactgtgagggtctacagggggcaacgtctaccttgcccatccttgcacagtgcttgacacgtagtacgcactgagagagatttgtctgactttgtgctgggccctgggcccatcacagg

SEQ ID NO: 27247 - DNA, 120 bp, synthetic construct; identical to SEQ ID NO: 8260
  source 1..120: mol_type = other DNA

SEQ ID NO: 27248 - DNA, 120 bp, synthetic construct
  source 1..120: mol_type = other DNA
tcagaaactagacatgcatcaagtcatttgaaacaatagaagacagaattttatttaataagaaacaaaggagccagacagatctcctggttggacagggatggggagtctgggtggctt

SEQ ID NO: 27249 - DNA, 120 bp, synthetic construct
  source 1..120: mol_type = other DNA
aagctgttggggccactgactgagctcttagtgtacagtctccaaagccaagggcattgagctgaatgaaacagcagcagcagaagggcaaaagggcttcgggttggatttaaaaatatt

SEQ ID NO: 27250 - DNA, 120 bp, synthetic construct
  source 1..120: mol_type = other DNA
tgggaggccgaggcgggtggatcccctgaggtcaggagttcgagaccagcctagccaacacggtatgaaacactgtctctactaaaaatacaaaaaatgaggtgggggtggtggcaggtg

SEQ ID NO: 27251 - DNA, 120 bp, synthetic construct; identical to SEQ ID NO: 8261
  source 1..120: mol_type = other DNA

SEQ ID NO: 27252 - DNA, 120 bp, synthetic construct
  source 1..120: mol_type = other DNA
gcggaatgggaaagggctgggacactggctttacagctgggttgggaaagggatctgatccttgagtcagcccctgtaaaatggggatacagcagggcacgacgtctgttggtcgcctgg

SEQ ID NO: 27253 - DNA, 120 bp, synthetic construct
  source 1..120: mol_type = other DNA
gccggcggctactgcgaccttccggctggcgggcgcgtttcatgttcctgcctcaccctgggctgcacggactcagatcgggaagggggaggatccatggtaaaggccacgccccctctg

SEQ ID NO: 27254 - DNA, 120 bp, synthetic construct
  source 1..120: mol_type = other DNA
gtctgactgtctctgtgctgtccctgtcaccagtccggaagcttctcccctgtcccccacgcccaacttcgctcaagcctgcctccctcccgcagtgggcatgtttctttctatgcctct

SEQ ID NO: 27255 - DNA, 120 bp, synthetic construct; identical to SEQ ID NO: 8262
  source 1..120: mol_type = other DNA

SEQ ID NO: 27256 - DNA, 120 bp, synthetic construct
  source 1..120: mol_type = other DNA
agtgtgaagaaccaactaaatgtctctcctaatcccacttcccagccataaccactgttaacacgttaggttttctcctggcccttttcctctgtctttaaatattttcaaatatatgtc

SEQ ID NO: 27257 - DNA, 120 bp, synthetic construct
  source 1..120: mol_type = other DNA
tcaacctgactcccacctcttggtctagactctttactgtagtcctggtgccctctgggttctctctggtagagaccattggcttcaccaggcaggaccctggtgaataatgtcaagatg

SEQ ID NO: 27258 - DNA, 120 bp, synthetic construct
  source 1..120: mol_type = other DNA
caagtgcagtgggattcccagggcctggagatgcaggaagacactgctgtttacactgaggaccagaagcacctctcggggccaggtgccattttgcttggatgcctggagagtcagctc

SEQ ID NO: 27259 - DNA, 120 bp, synthetic construct
  source 1..120: mol_type = other DNA
cctgctctgtccaccctcacctcccagtgcccagggtagtgcctgtccctctggccatcctcagggaattcacaataaacaaatgaaggaggtaagcccggcaaatctgaagagagaaaa

SEQ ID NO: 27260 - DNA, 120 bp, synthetic construct; identical to SEQ ID NO: 8263
  source 1..120: mol_type = other DNA

SEQ ID NO: 27261 - DNA, 120 bp, synthetic construct
  source 1..120: mol_type = other DNA
caggtggatcacctgaggtcaggagttcgagactagtctgtccaacatggtgaaaccccgtctttactaaaaatacaaaaaattagccaggtggggtggtggtggatgcctgtaattcca

SEQ ID NO: 27262 - DNA, 120 bp, synthetic construct
  source 1..120: mol_type = other DNA
ctccagcctgggcaacaagaatgacgctccgtctcaaaaaaaaaaacaaaaaacaaacaaaaaaaagggatgagcctgaacttcatccatcaaggatcaaatgagaacctgttgtgtact

SEQ ID NO: 27263 - DNA, 120 bp, synthetic construct; identical to SEQ ID NO: 8264
  source 1..120: mol_type = other DNA

SEQ ID NO: 27264 - DNA, 120 bp, synthetic construct
  source 1..120: mol_type = other DNA
caatgatgtatacatttagaatgtttttataacaacagcaatacctacctaccacgtaaatagggcctattaaatcccagcagtgttctaagtgctttacacattaactcatttaatcct

SEQ ID NO: 27265 - DNA, 120 bp, synthetic construct
  source 1..120: mol_type = other DNA
caggttcaagcaattctcctgcctcagcctcccgagtagctggaactgcaggtgcccaccacgacgcatggctaattttttgtatttttactagagatggagtttcaccatgttggccag

SEQ ID NO: 27266 - DNA, 120 bp, synthetic construct
  source 1..120: mol_type = other DNA
ttctcctgcctcagcctcccgagtagctgggactataggcgcccactaccatgcctggctaagttttgtatttttagtagagacggggtttcaccatgttggtcaggctggtctcgaact

SEQ ID NO: 27267 - DNA, 120 bp, synthetic construct
  source 1..120: mol_type = other DNA
ccaggctggaacccagtggcacaatctcagctcactacaacctctgcctcctgggttcaagcaattctcctgcctcagcctcctgagtagctaggactacaggcgtgtgccaccacacca

SEQ ID NO: 27268 - DNA, 120 bp, synthetic construct; identical to SEQ ID NO: 8265
  source 1..120: mol_type = other DNA

SEQ ID NO: 27269 - DNA, 120 bp, synthetic construct
  source 1..120: mol_type = other DNA
caagcaattctcctgcctcagcatcctgagtagctgggactacaggcgattgccaccatgcctggctaatttttgtatttttagtagagatggggtttcagcatgttggccagactggtc

SEQ ID NO: 27270 - DNA, 120 bp, synthetic construct
  source 1..120: mol_type = other DNA
ccactattcttattttcacttacagatgagggaaccaagaccctgagaggtgaagtcatttgcctttgatgacacaggaagtcagccaggggctgggattcgtgcccaggtaggcctgtg

SEQ ID NO: 27271 - DNA, 120 bp, synthetic construct; identical to SEQ ID NO: 8266
  source 1..120: mol_type = other DNA

SEQ ID NO: 27272 - DNA, 120 bp, synthetic construct
  source 1..120: mol_type = other DNA
ttcaagtgattctcctgccttagcctcccaagtagctgggactacaggtgcatgccaccatgcccagctaatttttgtatttttagtaaagatggggtttcgccatgttggccaggatgg

SEQ ID NO: 27273 - DNA, 120 bp, synthetic construct
  source 1..120: mol_type = other DNA
tccttccctagcacatttttctaaccttattcccaagaagaaaaagaacacagcaatctacaagccagtgtctattgaaagaatgacctcaaagactttctgaactagtggcatgtgaac

SEQ ID NO: 27274 - DNA, 120 bp, synthetic construct
  source 1..120: mol_type = other DNA
ccaacgtggagaaaccccgtctctactaaaaatactaaattagccaggtgtggtggcgcatgcctgtaatcccagctactcgggaggctgaggcaggagaatcgcttgaaccccaggagg

SEQ ID NO: 27275 - DNA, 120 bp, synthetic construct
  source 1..120: mol_type = other DNA
ccaccaactcaggaggacaaagacaaatgtaatttgctgaaacacagactcccagtgctctcatacaaaagctgccagtctaaaagatgatccaaaagctcttttcaaagttatgaaaaa

SEQ ID NO: 27276 - DNA, 120 bp, synthetic construct; identical to SEQ ID NO: 8267
  source 1..120: mol_type = other DNA

SEQ ID NO: 27277 - DNA, 120 bp, synthetic construct
  source 1..120: mol_type = other DNA
ataattactctttgcttttaagtttcctctttaaaacacaaaaagaacaaataataatatttcattttcaatgtgtcacaaatattttgtttcctttttttaggctcctcaagtgaagca

SEQ ID NO: 27278 - DNA, 120 bp, synthetic construct; identical to SEQ ID NO: 8268
  source 1..120: mol_type = other DNA

SEQ ID NO: 27279 - DNA, 120 bp, synthetic construct
  source 1..120: mol_type = other DNA
gttcaagcgattctcctgcctcagcctcccgagcagctgggactacaggtgtgcgccaccatgcccaactaatttttgtaattttttctttttttgagatggagtcttgctctgttgccc

SEQ ID NO: 27280 - DNA, 120 bp, synthetic construct
  source 1..120: mol_type = other DNA
ttttgtatttttagtagagatggggtttcaccatcttggccaggctggtctcgaactcctgacctcatgatccctacgcctcagcctcccaaagtgctgggattataagcgtgtgccacc

SEQ ID NO: 27281 - DNA, 120 bp, synthetic construct; identical to SEQ ID NO: 8269
  source 1..120: mol_type = other DNA

SEQ ID NO: 27282 - DNA, 120 bp, synthetic construct
  source 1..120: mol_type = other DNA
gtacagtggcgtgattgctcactgcaacttccgcccctcaggctcaagtgatcctcccgccttagcctcccaagtagctgggactacaggcatacaccagtatgcctggctaatttttat

SEQ ID NO: 27283 - DNA, 120 bp, synthetic construct; identical to SEQ ID NO: 1234
  source 1..120: mol_type = other DNA

SEQ ID NO: 27284 - DNA, 120 bp, synthetic construct
  source 1..120: mol_type = other DNA
tggatagtcagatcatggccaggacacagcacagcctgtggtgcatgaggacatccatccgccatcccatggtgacacccacaggccaagcatgctgcagaagccagagtgcagtctggt

SEQ ID NO: 27285 - DNA, 120 bp, synthetic construct; identical to SEQ ID NO: 8270
  source 1..120: mol_type = other DNA

SEQ ID NO: 27286 - DNA, 120 bp, synthetic construct
  source 1..120: mol_type = other DNA
gaaactcaggggggctggaaagctgggtgctcaggttctctgagctgcagggccaagctgaaaaacagctggttaccagaaaaacccagtcagggtttctacagcaaacatttccctccc

SEQ ID NO: 27287 - DNA, 120 bp, synthetic construct
  source 1..120: mol_type = other DNA
cagccttcctcatgggaccctgggaattccgcagtctggccagcccctcacccccagcccggccagcctgcgcctacccagccccctccctgagtgggtgggcgggagaccgcgtttcta

SEQ ID NO: 27288 - DNA, 120 bp, synthetic construct
  source 1..120: mol_type = other DNA
tcttctaggagtggagcctcagggctgcctgcagcccccaccctcccagggcctgactggaggcggtcagattggagccagccgtccctctgtccaccccagaaaactcagatggtccta

SEQ ID NO: 27289 - DNA, 120 bp, synthetic construct; identical to SEQ ID NO: 8271
  source 1..120: mol_type = other DNA

SEQ ID NO: 27290 - DNA, 120 bp, synthetic construct
  source 1..120: mol_type = other DNA
acccaccaccatgctcagctaatttttgtatttttagtagagacggggtttcgcccatgtcggccaggctggtctcgaactcctgacccaaatgatccacccacttcggcctcccaaagt

SEQ ID NO: 27291 - DNA, 120 bp, synthetic construct
  source 1..120: mol_type = other DNA
tccaaggagagccatccacagtttaggggctgggaagcatgggtccagttagaggtgggctgcagctggtgagaactacaaatctctcagccatgcctcgctgtggcatcctatctctga

SEQ ID NO: 27292 - DNA, 120 bp, synthetic construct
  source 1..120: mol_type = other DNA
tctccagccagatggccacagagtgggttttcagaatgccctggagagatatgcttcttcctcagctgagggggcccctggtacctccagcctttctggtggtcagcccacgtgtcctca

SEQ ID NO: 27293 - DNA, 120 bp, synthetic construct; identical to SEQ ID NO: 8272
  source 1..120: mol_type = other DNA

SEQ ID NO: 27294 - DNA, 120 bp, synthetic construct
  source 1..120: mol_type = other DNA
tccaacagatattgattcctgggctgacttcgagcttaacaccaaagattcagcagtaagagggcaggcacaatccctgctcagcctgtctgaccctccccaacccccaatcctgcccct

SEQ ID NO: 27295 - DNA, 120 bp, synthetic construct
  source 1..120: mol_type = other DNA
ctcatcactgtggttctgacagccagcaagggtgctcatgtgtccacatgtggacagctcagcccggatacccaaactccaccatgcctgcctccccaagtagccaactcaaccatcctt

SEQ ID NO: 27296 - DNA, 120 bp, synthetic construct; identical to SEQ ID NO: 8273
  source 1..120: mol_type = other DNA

SEQ ID NO: 27297 - DNA, 120 bp, synthetic construct
  source 1..120: mol_type = other DNA
tctgggggagctaaggtccctcccggctctctctctctgcctgagtggtgttgcctgcccctctggtcaagagtgagtcagtgctggggcctgacaggctgtgtctgttcaggggtgggt

SEQ ID NO: 27298 - DNA, 120 bp, synthetic construct
  source 1..120: mol_type = other DNA
cgggaattgctgagacaccaggctggtttcctgtctccgagggtcaggatgtgaccctgggccccctcccggaatccaggctccggcctgcccttcagggacccagcgagatccagcccc

SEQ ID NO: 27299 - DNA, 120 bp, synthetic construct
  source 1..120: mol_type = other DNA
atggacgggaaagccacttctctgtgccagagatcgaagaagccggccataggtcaggagggatccggctggctgctaaaagccaccacccccactaccacgtccagccccatgccgcta

SEQ ID NO: 27300 - DNA, 120 bp, synthetic construct
  source 1..120: mol_type = other DNA
acctgcggccccctgaagccccatttgctgatcccaccactcataccagggctgctgatgccacctctgcctccctggctctaccttctgtctgcatcatcaacacaggctgggcacaga

SEQ ID NO: 27301 - DNA, 120 bp, synthetic construct; identical to SEQ ID NO: 8274
  source 1..120: mol_type = other DNA

SEQ ID NO: 27302 - DNA, 120 bp, synthetic construct
  source 1..120: mol_type = other DNA
tcaaacgattctcttgcctcagcctctctaatagctgggattacaggcacctgccaccacgcctggctaatttttgtatttttagtagagatgcggtttcgccatgttggccaggctagt

SEQ ID NO: 27303 - DNA, 120 bp, synthetic construct
  source 1..120: mol_type = other DNA
aaattattcaactgatacgaagacattctgtaaacggtaacaaccctggcaaaatggggatgttcacagaggagaaatggaacccagagagaaataataataacaataaccgtagccacc

SEQ ID NO: 27304 - DNA, 120 bp, synthetic construct; identical to SEQ ID NO: 8275
  source 1..120: mol_type = other DNA

SEQ ID NO: 27305 - DNA, 120 bp, synthetic construct
  source 1..120: mol_type = other DNA
attatttgaggtcaggagttcaaaactagcctctccaacatggtgaaaccctgtctctactaaaaatacaaaaattagctgggcatggtggcagacgcctgtaatcccagctacaggagt

SEQ ID NO: 27306 - DNA, 120 bp, synthetic construct
  source 1..120: mol_type = other DNA
gagaaaggtgtgtctaccagcaagtggggagaaggaccaccctctgcacaccagatgctatgcgaggtgctggccagggacagatccaggactgaaccctgggtttcctggaccccagat

SEQ ID NO: 27307 - DNA, 120 bp, synthetic construct
  source 1..120: mol_type = other DNA
ggagattttgttgtcatgaactcaaggatccttggaatatggcatgagttacagtggccccctgccatgcccctaaaatccctccaagaactgttattgcccacgggataaagatcaaac

SEQ ID NO: 27308 - DNA, 120 bp, synthetic construct; identical to SEQ ID NO: 8276
  source 1..120: mol_type = other DNA

SEQ ID NO: 27309 - DNA, 120 bp, synthetic construct
  source 1..120: mol_type = other DNA
ttgagcaattagggttgggggatcccagtcacccagaggaggcacagggacctgaacattaaaacaaacaatgcgaactaacagaggcagtcgtattttgaatatcattaccaaatttga

SEQ ID NO: 27310 - DNA, 120 bp, synthetic construct
  source 1..120: mol_type = other DNA
ccgatattggtggtctgagcactttcttatcactgcacaaacgcaaggcaacttaacagttttgggggcagattggccataagtttacccggagctgacacggcgaagtcagtatcggga

SEQ ID NO: 27311 - DNA, 120 bp, synthetic construct
  source 1..120: mol_type = other DNA
tgaactctggccctgggcacgtcactccatcgctctcagccagcctcagtttccttctccaagaagtggggataataacagaccctggcagatgagccttgggaggcttaatacatgtga

SEQ ID NO: 27312 - DNA, 120 bp, synthetic construct; identical to SEQ ID NO: 8277
  source 1..120: mol_type = other DNA

SEQ ID NO: 27313 - DNA, 120 bp, synthetic construct
  source 1..120: mol_type = other DNA
tctcctgcctcagcctcccaagtacagctgggattacaggcatgcgccactatgcctagctaatttttgtatttttattttatttttatttttttattttttatttttttgagacagagt

SEQ ID NO: 27314 - DNA, 120 bp, synthetic construct
  source 1..120: mol_type = other DNA
caccaccacgcccaactaatttttgtatttttagtagagatggggtttcaccatgttggccagaatggtctcgatctcctgacctcgtgatctacccgcctcggcctcctaaagtgctgg

SEQ ID NO: 27315 - DNA, 120 bp, synthetic construct
  source 1..120: mol_type = other DNA
caacactcacctggtcccccccacccatctggctcttctctactcagctcttcccacctgagtcttctggtggcacccaaaagactgccctgatccagaccctgcccctagaaatgccac

SEQ ID NO: 27316 - DNA, 120 bp, synthetic construct
  source 1..120: mol_type = other DNA
ttcctctgagcccccacccgaccctgccatgggacactcaccgttgggaactccaggaagaggacatggacttcaaggatggcattgggggcctgagccacgcagcccttcgagacctgg

SEQ ID NO: 27317 - DNA, 120 bp, synthetic construct; identical to SEQ ID NO: 8278
  source 1..120: mol_type = other DNA

SEQ ID NO: 27318 - DNA, 120 bp, synthetic construct
  source 1..120: mol_type = other DNA
tttaagtattagtatattgcaaatattgcatggaacgtacttatactaaattttcattgtttatctgaaattcggatttcactgggccccatgtatatatgtgtgtgtgtatatatacat

SEQ ID NO: 27319 - DNA, 120 bp, synthetic construct
  source 1..120: mol_type = other DNA
ttttttttttttttttgagatggagttttgctcttcttgcccaggctggagtgcaatggtgtgatcttggctcaccgcaacctccgcctcctgggttcaaatgattctcctgcctcagcc

SEQ ID NO: 27320 - DNA, 120 bp, synthetic construct; identical to SEQ ID NO: 8279
  source 1..120: mol_type = other DNA

SEQ ID NO: 27321 - DNA, 120 bp, synthetic construct
  source 1..120: mol_type = other DNA
gcagctaggattacaggcatgcaccaccatgcctggctaattttttgtatttttagtaaagatggggcttctccatgttggtcaggctcgtcttgaactcccaacctcaggtgatccgcc

SEQ ID NO: 27322 - DNA, 120 bp, synthetic construct
  source 1..120: mol_type = other DNA
agctcactgcagcctcagcctcaacctcccaggctcaagtgatcctcccacctcggcctcctgagtagctggaactataggcatgcaccaccacatccagctaatttttgcatttttata

SEQ ID NO: 27323 - DNA, 120 bp, synthetic construct
  source 1..120: mol_type = other DNA
ttcatttgatgtatctggcaaccctaacttcatggcagggcctaggtgtgaacccaagtctccctccaggtaaggcaggagctgagctcaggagacaaagcttcccctctcttgcctcaa

SEQ ID NO: 27324 - DNA, 120 bp, synthetic construct; identical to SEQ ID NO: 8280
  source 1..120: mol_type = other DNA

SEQ ID NO: 27325 - DNA, 120 bp, synthetic construct
  source 1..120: mol_type = other DNA
cttgtcgcgctcacttcctgttttcttggagatcaaagatgggcgcggagagactggcttcatgtccagccaaggccggctcagaggagggggcagggaggcttcttctgaaccctgggc

SEQ ID NO: 27326 - DNA, 120 bp, synthetic construct
  source 1..120: mol_type = other DNA
ctgtcttgggaaggagaagatctggatgaggacttctggctgccacgggggcccaggccttatatgtcgtctctctgaccctatcctacatgtcccagggactctggagtgcctggacat

SEQ ID NO: 27327 - DNA, 120 bp, synthetic construct
  source 1..120: mol_type = other DNA
cctggtctataaaatgacaacagagcccacatgatccacagaggtggctgggaggactccatgagactgggcacatggcaattctttcttaaatttctatttgtttatttttcagacaag

SEQ ID NO: 27328 - DNA, 120 bp, synthetic construct; identical to SEQ ID NO: 8281
  source 1..120: mol_type = other DNA

SEQ ID NO: 27329 - DNA, 120 bp, synthetic construct
  source 1..120: mol_type = other DNA
ggtgaagtggcgggatggggtggcctccaggtgacggtcctctgggatggagaggtcactgggatctccctcaccccaacaaaatcaagggctggtgccatctcctgtctccagtccctc

SEQ ID NO: 27330 - DNA, 120 bp, synthetic construct
  source 1..120: mol_type = other DNA
gacgggacaggtcaaagtctcacagcacatggttgaccaggccgggcctcggacccgcgtctcccaacatgacccagtgtctggcctgcagattatcgcagcgcctccctccttcccttt

SEQ ID NO: 27331 - DNA, 120 bp, synthetic construct
  source 1..120: mol_type = other DNA
attatgtaatgatcagataacaggcctggcggggagatcagataagaggtccatttattttggggccttttcgaatcctggccgcccccaccccgcagacgagaatggggagacaggagg

SEQ ID NO: 27332 - DNA, 120 bp, synthetic construct
  source 1..120: mol_type = other DNA
ctgggggcctgggtgactggaaccccaagtgagagacccagaagccacctcccaccactgtcccctctccaccctcgccacccatgtgcacacagcacctcccagatttccagagggcta

SEQ ID NO: 27333 - DNA, 120 bp, synthetic construct; identical to SEQ ID NO: 8282
  source 1..120: mol_type = other DNA

SEQ ID NO: 27334 - DNA, 120 bp, synthetic construct
  source 1..120: mol_type = other DNA
cccagacagtctggctccagcaagcagcaggcattcacaggctgagtgtgtcagtttgatggggtaacccctgttgagtgcctggtactaagtaggtgccccagacacagaagctgtgaa

SEQ ID NO: 27335 - DNA, 120 bp, synthetic construct
  source 1..120: mol_type = other DNA
ctataacctccccgtcccaggttcaagcgattctcatgcctcagcctcctgagtaactacaagtggaccaccacactcagctaatttttgtattttttgtagagacggggtttcgccgta

SEQ ID NO: 27336 - DNA, 120 bp, synthetic construct
  source 1..120: mol_type = other DNA
ccccgggccactctttacccttttcaggcccaattacagcctcacaggtttcccagcatccagcccagccactgcccccagccaccaggaggtctcagcatgccttggccccgggctccc

SEQ ID NO: 27337 - DNA, 120 bp, synthetic construct; identical to SEQ ID NO: 8283
  source 1..120: mol_type = other DNA

SEQ ID NO: 27338 - DNA, 120 bp, synthetic construct
  source 1..120: mol_type = other DNA
cagaccaacactcatcctttgtttgaccacctggccttttttttttaattttggagagtcggggtcttgctctgtttcccaggctggagtgcagtggtgcaatcatagctcactgcaacc

SEQ ID NO: 27339 - DNA, 120 bp, synthetic construct
  source 1..120: mol_type = other DNA
aggctggtcttgaatgcctggccgcaagtgatcctcccaccttagcctcccaaaacgttgggattacaggcatgagccaccatgcccagcccctagcaaacttctattcatccttcaaaa

SEQ ID NO: 27340 - DNA, 120 bp, synthetic construct
  source 1..120: mol_type = other DNA
ctgcactcccagcagacagtgagtttttccaggacaaggagagtccacagcattccatgtcccaatcagttagtccagggctcagagcaaacatccacttccactggatacagtgagttc

SEQ ID NO: 27341 - DNA, 120 bp, synthetic construct; identical to SEQ ID NO: 8284
  source 1..120: mol_type = other DNA

SEQ ID NO: 27342 - DNA, 120 bp, synthetic construct
  source 1..120: mol_type = other DNA
cagtaggggctacctgcgtcaggagtaagaaccccttcccctcccttgttcagatgtgctctcgccattactccattcttgaatcgcacccttctgtagaagtaaaaattgccttgctga

SEQ ID NO: 27343 - DNA, 120 bp, synthetic construct
  source 1..120: mol_type = other DNA
gggtgacccacatcaagtccccccaccattctgggactctgtttccctatggctagtgggtggggaagagcgggggtggataggacatattctaagttctactaggggtctgacagtctg

SEQ ID NO: 27344 - DNA, 120 bp, synthetic construct
  source 1..120: mol_type = other DNA
agaaaaggctgagtgcctgcggggagaagatcaggcaagaggaagatccccatcctctccactgtggcagcacactgcagtgcttaggcccagggcttgagccccagtggctcatttcag

SEQ ID NO: 27345 - DNA, 120 bp, synthetic construct; identical to SEQ ID NO: 8285
  source 1..120: mol_type = other DNA

SEQ ID NO: 27346 - DNA, 120 bp, synthetic construct
  source 1..120: mol_type = other DNA
agagccaagggtaaacagttctttaggtctccagcattcaggtcacaaaagttgtggggaaaagaagctgaatttggaagcagacggcctggagttgaaatctggacctgtcatttgtcc

SEQ ID NO: 27347 - DNA, 120 bp, synthetic construct
  source 1..120: mol_type = other DNA
gccctggggcaaaagaatgggtctgtcgcccgagggcccagcaccaacacatccgtgaccacaagcaagtccctctgtccctctgggtcacgtctgtctggctggggtgagggagaatgc

SEQ ID NO: 27348 - DNA, 120 bp, synthetic construct
  source 1..120: mol_type = other DNA
ggtctcgctcttgcgccactgacccttctccagcaagtcccagactccaacacagacagccagcagcatggggactttaagtcctccagcaaaggatcctccacactcaggaacactctt

SEQ ID NO: 27349 - DNA, 120 bp, synthetic construct; identical to SEQ ID NO: 8286
  source 1..120: mol_type = other DNA

SEQ ID NO: 27350 - DNA, 120 bp, synthetic construct
  source 1..120: mol_type = other DNA
gttagaaaaaaaaactagtaagccatctaccaccatactaacggtacctgtatcaataaaggagttccgaggtgattttttcccttttctctattttttttgaggggcaagctgaggcag

SEQ ID NO: 27351 - DNA, 120 bp, synthetic construct
  source 1..120: mol_type = other DNA
catcacaacctccacctcccagggtcaagcgattctcctgcctcagcctcccaagtagctgggattacaggcgcccaccactacgcctggctaatttttgtatttttagtagagacaagg

SEQ ID NO: 27352 - DNA, 120 bp, synthetic construct; identical to SEQ ID NO: 8287
  source 1..120: mol_type = other DNA

SEQ ID NO: 27353 - DNA, 120 bp, synthetic construct
  source 1..120: mol_type = other DNA
gaggatgaggcaggagaactgcttgaacccgggagacggaggttgcagcgagcctagattgtgccattgcactgcagcctgggtgacaagagcaagactgtctcaaaaaaatttaaaaaa

SEQ ID NO: 27354 - DNA, 120 bp, synthetic construct
  source 1..120: mol_type = other DNA
ttctctgtgcatattgtacattattactattttattgttgccaaaatggaattattgttgtttgggcacctaacagtgtgtccctgacatccgtccatggcagtgttcatatgactctgc

SEQ ID NO: 27355 - DNA, 120 bp, synthetic construct
  source 1..120: mol_type = other DNA
atctttacagagttggacgaataactttagaaggctgactactgaaggctgatttgtgagggtatcaagtcacatgcaaggtacagttttaggagattcttacaagtggtgcccccaaat

SEQ ID NO: 27356 - DNA, 120 bp, synthetic construct
  source 1..120: mol_type = other DNA
actgaaggctgatttgtgagggtatcaagtcacatgcaaggtacagttttaggagattcttacaagtggtgcccccaaattctagacccatttctaggaggtcagggtcactccgacccc

SEQ ID NO: 27357 - DNA, 120 bp, synthetic construct
  source 1..120: mol_type = other DNA
ctggtgcactgggaccagctcctacctgctcacaggaacagacggatacgtttccaggagtttttccaactggctgttacatagctattactatatatttttaaaaggtcatgaatgtcc

SEQ ID NO: 27358 - DNA, 120 bp, synthetic construct; identical to SEQ ID NO: 8288
  source 1..120: mol_type = other DNA

SEQ ID NO: 27359 - DNA, 120 bp, synthetic construct
  source 1..120: mol_type = other DNA
tgagctccccaccccgttgttaattattcagcagcatatcactgcctttgatcctttaaaaccaggccctaaatgtctgcatggacctttctctaacgaccaagaggaagagagtgttac

SEQ ID NO: 27360 - DNA, 120 bp, synthetic construct
  source 1..120: mol_type = other DNA
actgcctttgatcctttaaaaccaggccctaaatgtctgcatggacctttctctaacgaccaagaggaagagagtgttactgcagcgacaaatacgagagagggagatcttggagctcag

SEQ ID NO: 27361 - DNA, 120 bp, synthetic construct
  source 1..120: mol_type = other DNA
ttcgccctatcacaccttactaggagcaaacatttagggagccgcaggccgggagtcaaatccctgctaagtcacttaatatgtctgagactcagtttcctgtcaatcaggtggtgggca

SEQ ID NO: 27362 - DNA, 120 bp, synthetic construct; identical to SEQ ID NO: 8289
  source 1..120: mol_type = other DNA

SEQ ID NO: 27363 - DNA, 120 bp, synthetic construct
  source 1..120: mol_type = other DNA
cactcctgcaccctttctggggatcagggaggtaggagggaggcagggcagggccctgcagccttggcctgttcaaagggtttgaggagctgcccaaaggccctggggaaggtgagctgg

SEQ ID NO: 27364 - DNA, 120 bp, synthetic construct
  source 1..120: mol_type = other DNA
ccacttcgctcagaggcccgaaggcagtcccccaggatcacaccacaaggaagtgcctatgtgagatttgaacccagagacggtgctcagagcccaggctgtgggccctccttcccatcc

SEQ ID NO: 27365 - DNA, 120 bp, synthetic construct
  source 1..120: mol_type = other DNA
agaccagggttaaagtgaaagagtcagcccagtttgcccgaggctttctttcaacactgaaagtcctgcataaccatttagttccagcaaactgggagggttggtgaccctccagagccc

SEQ ID NO: 27366 - DNA, 120 bp, synthetic construct
  source 1..120: mol_type = other DNA
ggggctgaggctgcagctggccagcagcagggcaacagccagagggagcgtgccgcggtccatgctgtccacgtgggggcctgtgcgctgggccttatcctgtgtccagtggcagggctg

SEQ ID NO: 27367 - DNA, 120 bp, synthetic construct; identical to SEQ ID NO: 8290
  source 1..120: mol_type = other DNA

SEQ ID NO: 27368 - DNA, 120 bp, synthetic construct; identical to SEQ ID NO: 8291
  source 1..120: mol_type = other DNA

SEQ ID NO: 27369 - DNA, 120 bp, synthetic construct
  source 1..120: mol_type = other DNA
tattggcaaatgaaatgggctgagggggtagagacaagatattttcaagcttctgagagatttacaaagccaagttcttcaactattgaaagtgaaattgaaaggtcacagacaattgaa

SEQ ID NO: 27370 - DNA, 120 bp, synthetic construct
  source 1..120: mol_type = other DNA
gttacagtcagaaacatggaaaatatgctgttcaaaattgttggctcaggaataaataaaatccagacttggactattaaaaatatcaaagtgatccactgtgtgccaactccattttcc

SEQ ID NO: 27371 - DNA, 120 bp, synthetic construct
  source 1..120: mol_type = other DNA
attttaatacacctctatcacatggttccataggtgcagcgttagaaggaaattttgagttatattttaatctcttacccaaggtacaaaccccctttgtaacagccattcagctcattc

SEQ ID NO: 27372 - DNA, 120 bp, synthetic construct; identical to SEQ ID NO: 8292
  source 1..120: mol_type = other DNA

SEQ ID NO: 27373 - DNA, 120 bp, synthetic construct
  source 1..120: mol_type = other DNA
gtcctacctagtttctccgcccaccaccttcatgccatcttatttcctcttattttcactaccacgaaatgctttcctgcccttagggatttaaaaaattatttcatatcgacggattga

SEQ ID NO: 27374 - DNA, 120 bp, synthetic construct
  source 1..120: mol_type = other DNA
agcaattggatacagtctgggattatccctttgtaattagatgagcattgactaacgaaagatgtttaggggaaaaaaaaatggaacagaacacctaaggcttgccaaaactgtgtatat

SEQ ID NO: 27375 - DNA, 120 bp, synthetic construct
  source 1..120: mol_type = other DNA
tttaaaagtcacaagatgaattaggtcatgtttcagaaatgactctacaatctaaatttctcacaagcaagtcaggttaatgacaccagactctgctactttcaatggataaaacaaggg

SEQ ID NO: 27376 - DNA, 120 bp, synthetic construct; identical to SEQ ID NO: 8293
  source 1..120: mol_type = other DNA

SEQ ID NO: 27377 - DNA, 120 bp, synthetic construct
  source 1..120: mol_type = other DNA
acctctatgcacgtgtgggccagtcaccgaaatttcattaccacttggtgtatacatttaacaagtctttggtcttaataagcaccattacaaaccctcacattaagggcattattattc

SEQ ID NO: 27378 - DNA, 120 bp, synthetic construct
  source 1..120: mol_type = other DNA
aaattaatgaagtattggaactgaatacttgtaatttggtttctaagttgtgtacatattacagtgcatttataaatctagtttgaaaatttactagcaccaaataggtaccataaatgg

SEQ ID NO: 27379 - DNA, 120 bp, synthetic construct; identical to SEQ ID NO: 8294
  source 1..120: mol_type = other DNA

SEQ ID NO: 27380 - DNA, 120 bp, synthetic construct
  source 1..120: mol_type = other DNA
tgtttttcttttaattatttggtctctggatggtgaattaatgaagcaaaacctggattttcatcttcagattatcacccagttcaccactgaggtagtctttgtcatatttgtcttcta

SEQ ID NO: 27381 - DNA, 120 bp, synthetic construct
  source 1..120: mol_type = other DNA
gtgaagtggaggtagctgatcccttccttttggttgattttaaagaagccatcttcatttccagattcgatcaagtatctgttgtgattcgtcagagttgtaagagctggaaggagttct

SEQ ID NO: 27382 - DNA, 120 bp, synthetic construct
  source 1..120: mol_type = other DNA
cacattggcttctgtctcagactgatcctggaaagacacatggcaatatgttaaatacaatgtacatatgccacttagctctcatattaaagaaaaaatgactcaaatttcacactaata

SEQ ID NO: 27383 - DNA, 120 bp, synthetic construct
  source 1..120: mol_type = other DNA
aggttgaaatcatttgtatctggaggtctcaaaatgtagtccctgaacaagctgcatcagcatcacctgggaatctgttagaaatgcaaattctcggcatcaccccagaactactgaatc

SEQ ID NO: 27384 - DNA, 120 bp, synthetic construct; identical to SEQ ID NO: 8295
  source 1..120: mol_type = other DNA

SEQ ID NO: 27385 - DNA, 120 bp, synthetic construct
  source 1..120: mol_type = other DNA
tctgagttgactgaaaggctgcagcagccgtaggcaaaggaaaccaggctgcttcagctccacgttatttttgtctacaatccaagttccctcacactccacatggctcttttcagtaga

SEQ ID NO: 27386 - DNA, 120 bp, synthetic construct
  source 1..120: mol_type = other DNA
atttgacttttttttggcgagacagaggaaatgagcaagtatgtgaaaaccttcaaatggccactcccgaaaagcagcaagaaactccagaaagccccacagcctcttgtaaaatacagc

SEQ ID NO: 27387 - DNA, 120 bp, synthetic construct; identical to SEQ ID NO: 8296
  source 1..120: mol_type = other DNA

SEQ ID NO: 27388 - DNA, 120 bp, synthetic construct
  source 1..120: mol_type = other DNA
agttgtgagatacagcccttgcttgtccactggaggatcagctagttctgagaactacattgaggtcctctgtttggcctctaattcccagttccctgaatgtattgatttccttctact

SEQ ID NO: 27389 - DNA, 120 bp, synthetic construct
  source 1..120: mol_type = other DNA
atgagggaggccatgtaacttgggaggctaaataaaaatggcttctttttatgaaacaggctccatgggagtgagcaaggtgtgagacatcactgttgagtttcttgcattctcccactt

SEQ ID NO: 27390 - DNA, 120 bp, synthetic construct
  source 1..120: mol_type = other DNA
ataataaactatgaagatatgccgtatataaaatgcatgtatcagagtttgcccaactgtgggaaactgtttcaagtcattcaaaaccactagggccactggctccgactcatgtgaaga

SEQ ID NO: 27391 - DNA, 120 bp, synthetic construct; identical to SEQ ID NO: 8297
  source 1..120: mol_type = other DNA

SEQ ID NO: 27392 - DNA, 120 bp, synthetic construct
  source 1..120: mol_type = other DNA
ttcctatatacccttaggattcaaaatatgttgccaatgaacagaatatctgttgtatttcaaagcagtttataggttcctactgtttcccccaatcttgccagagtccaatacatttcc

SEQ ID NO: 27393 - DNA, 120 bp, synthetic construct
  source 1..120: mol_type = other DNA
gcgcatgcgtatacattcacacaatgattaaattattaggaggtaaactgcaaatttgcaggctttggttcctttctcagaactcctttccagtattttcatatcccgggagcaccactt

SEQ ID NO: 27394 - DNA, 120 bp, synthetic construct
  source 1..120: mol_type = other DNA
acaaacatctgggaatttgtgtctgattgctggcattctgtgtgcttcccacgaaacattcttctacctacccagatccaaaatgaatcacttgatgtttgtatgtcaagaaatcaaaga

SEQ ID NO: 27395 - DNA, 120 bp, synthetic construct; identical to SEQ ID NO: 8298
  source 1..120: mol_type = other DNA

SEQ ID NO: 27396 - DNA, 120 bp, synthetic construct
  source 1..120: mol_type = other DNA
ggtgaaaccccgtttctattaaaaatacaaaaaattagccgggcgtggtggcgggcacctgtagtcccagctactccagaggctgaggcaggagaatcgcgtgaacccgggaggcagagc

SEQ ID NO: 27397 - DNA, 120 bp, synthetic construct
  source 1..120: mol_type = other DNA
tggtgaagtgttttttttgtttttctttttttaaccaggaaaatacagtaagtgtttcaatgcacctttggtaaaatttaatgtaaattcaagtctgaaatgtaaaatataatttaaaac

SEQ ID NO: 27398 - DNA, 120 bp, synthetic construct
  source 1..120: mol_type = other DNA
tgcagggtgagcccagttctgtcatgggttggcagagaggtgtatttacagagagatgaatcacttcccaacaagatgtgaagatcaagagaataagatagagaagtcatatagcgagat

SEQ ID NO: 27399 - DNA, 120 bp, synthetic construct; identical to SEQ ID NO: 8299
  source 1..120: mol_type = other DNA

SEQ ID NO: 27400 - DNA, 120 bp, synthetic construct
  source 1..120: mol_type = other DNA
ctggaagccggcgggacacatgcacttgtagctccccagggtgttgtgacaggaggctcctccgcagatgtgagcgctgaggcattcgttttcatctgcaggcaaaataagaagcggcat

SEQ ID NO: 27401 - DNA, 120 bp, synthetic construct
  source 1..120: mol_type = other DNA
agcaacagcagagaaagatgcgggcatggatgtggcttcttgctatgttgtgagtaaacatggaagatgaaacatggaagatgaagtcaaatgcaccaggcagagggcattagaggatgg

SEQ ID NO: 27402 - DNA, 120 bp, synthetic construct
  source 1..120: mol_type = other DNA
aaccaacatggggctggtccgtagctaagatttagggttcaaggggggaggaaaggaatcttgcagttctctgcgtacttgcttcacaagtgcccagcgaggagacaaatctctcaaaag

SEQ ID NO: 27403 - DNA, 120 bp, synthetic construct
  source 1..120: mol_type = other DNA
cttccttttcaaaattctgcaaaagcccccaggtacctgttctgggagatgaataatgccttctggtatgtctgctcccatcaccgaatcggccccctccttattcaaaccagcctcctg

SEQ ID NO: 27404 - DNA, 120 bp, synthetic construct; identical to SEQ ID NO: 8300
  source 1..120: mol_type = other DNA

SEQ ID NO: 27405 - DNA, 120 bp, synthetic construct
  source 1..120: mol_type = other DNA
gccttctcttcacttagcgaataaccacttcctatggaagagaggaaggggaagggaatgaatgtttattagatacctattttatgatagataggatacaggtattgaccatttccttag

SEQ ID NO: 27406 - DNA, 120 bp, synthetic construct
  source 1..120: mol_type = other DNA
caggtctgttggactgcaaaggccatccatgcgctttcctttataccacagtgcctctcaagagacgctccacatttaagctggtgcttcctttctcctgtaattagtttaccttctttg

SEQ ID NO: 27407 - DNA, 120 bp, synthetic construct
  source 1..120: mol_type = other DNA
tggataaaagtggtggggaaggatgctcacttgtatatacttagtatatattcacatttcctacctgcctgcctgcctgccttccctccttccatgtctccttccctcctaccttctttc

SEQ ID NO: 27408 - DNA, 120 bp, synthetic construct; identical to SEQ ID NO: 8301
  source 1..120: mol_type = other DNA

SEQ ID NO: 27409 - DNA, 120 bp, synthetic construct
  source 1..120: mol_type = other DNA
taaattgaggacgaagtgtgcaatagagagcaacagaaaccactggcaccaagctccatgtcaaacaaagaatgaagaacgaagcatatttacttcattggagagaacacccctgggctg

SEQ ID NO: 27410 - DNA, 120 bp, synthetic construct
  source 1..120: mol_type = other DNA
agccatctgcttcttgctgggaccctgactaataaaacctgcaaggcgtgggtatatgagggggaagacttgtcattctatagcttagatttattctgtgttttttcctccaaagagcag

SEQ ID NO: 27411 - DNA, 120 bp, synthetic construct; identical to SEQ ID NO: 8302
  source 1..120: mol_type = other DNA

SEQ ID NO: 27412 - DNA, 120 bp, synthetic construct
  source 1..120: mol_type = other DNA
taggttggagaggtaggatggagtagagcacagattaaaataagaaattggcaaatattcagtgtttacagtttgaaaacagcatgtttgtgcactcgccctttttatcaatatacaaac

SEQ ID NO: 27413 - DNA, 120 bp, synthetic construct
  source 1..120: mol_type = other DNA
ttggtacttagattggtgagggttttgtttgttttataaaaagagacaattcgaattttaccaaaatagcattaaagtctgaaaactactccttaaaagtggattgaaacccaccactct

SEQ ID NO: 27414 - DNA, 120 bp, synthetic construct; identical to SEQ ID NO: 8303
  source 1..120: mol_type = other DNA

SEQ ID NO: 27415 - DNA, 120 bp, synthetic construct
  source 1..120: mol_type = other DNA
gcaatttggcatttggagacattaagaaccccaaacttcttctgacttctaaatcaacttgtttttttagagtgtccagccaggagatgatcttcacgagaccagagcagaatctccagg

SEQ ID NO: 27416 - DNA, 120 bp, synthetic construct
  source 1..120: mol_type = other DNA
cctttcctctcttatgtttttttcacttagctccagtgttattaaaatgacctaaataatgagaacagacaggctcataaactgggtgttgaatcaacaaagttcactctggaagttctg

SEQ ID NO: 27417 - DNA, 120 bp, synthetic construct; identical to SEQ ID NO: 8304
  source 1..120: mol_type = other DNA

SEQ ID NO: 27418 - DNA, 120 bp, synthetic construct
  source 1..120: mol_type = other DNA
cttgcagtggcacttcacagacgcttgctgaatgaacataaacaagtgaatgtgacacttgaaaggcagctctacatcagaaagttaagagttgtgggttctagttccaagcatgtcaca

SEQ ID NO: 27419 - DNA, 120 bp, synthetic construct
  source 1..120: mol_type = other DNA
tggcttctggtatccctccaaactcacaatgttttgattctctgatgtgcattaagagttattttcccatgacattgtagaatcaaagatgacatcatttcaatttaatgagagagtcag

SEQ ID NO: 27420 - DNA, 120 bp, synthetic construct; identical to SEQ ID NO: 8305
  source 1..120: mol_type = other DNA

SEQ ID NO: 27421 - DNA, 120 bp, synthetic construct
  source 1..120: mol_type = other DNA
tagtttgctgttttgcaaagactgttacttacctcgggtttcaaccaggttagggcaattttaaatgagtatttgttgcttcaataacacatttacagcttcagaaagcaagcagtgttt

SEQ ID NO: 27422 - DNA, 120 bp, synthetic construct
  source 1..120: mol_type = other DNA
tgatgttctggcagccatgctggcagcggtggttaccctcacactcgtccacgtctgaaaaagaagcagagccaccatgatgccaactcaacatctctctctgaagccagatggattcta

SEQ ID NO: 27423 - DNA, 120 bp, synthetic construct
  source 1..120: mol_type = other DNA
taagtccaaggagaaaatcattcagagagccctggcaaagtctacaaataaaaattgtcaggaaattagtgcaaagcccaaagcactctctgggacagctctgtaagttataagttattt

SEQ ID NO: 27424 - DNA, 120 bp, synthetic construct; identical to SEQ ID NO: 8306
  source 1..120: mol_type = other DNA

SEQ ID NO: 27425 - DNA, 120 bp, synthetic construct
  source 1..120: mol_type = other DNA
acacgactctctaagatacaggacctgtgcacactattttagctgagtgcccccctgggctcagatctgctatctcatagaggctgatgatgaaggtgccaatagccacacaggccacct

SEQ ID NO: 27426 - DNA, 120 bp, synthetic construct
  source 1..120: mol_type = other DNA
ggcaaatgcccttagacccgcacagattgatgtcagaggtgcattcattgttatctatgagaagcagtgggggcaaagaggggttaaaattccccaaagctctctttgtatcatttaaaa

SEQ ID NO: 27427 - DNA, 120 bp, synthetic construct
  source 1..120: mol_type = other DNA
ccaacagcagaggaaatagaaaataatcccttaaaagaatcgctacaatccatgtaggattttttcctctcctactcaccaatgcaggacgtatggtgttgggtaaatccgggaggacat

SEQ ID NO: 27428 - DNA, 120 bp, synthetic construct; identical to SEQ ID NO: 8307
  source 1..120: mol_type = other DNA

SEQ ID NO: 27429 - DNA, 120 bp, synthetic construct
  source 1..120: mol_type = other DNA
caattctaattggagaaatgcaggaattcctcaacaaaggaatttcaaataaatcatgacattttaaacaaatttttaaatgaagcgaaagatgaatgattctgcaaattttccagagct

SEQ ID NO: 27430 - DNA, 120 bp, synthetic construct
  source 1..120: mol_type = other DNA
aaatctgatttctttagtcgtgattcttcttaggataaaccaaaattgagcaatcaggaaggaaacaaagcaaaggaaaaattcattttaatagctaaaggcacttttaataaaactgcc

SEQ ID NO: 27431 - DNA, 120 bp, synthetic construct
  source 1..120: mol_type = other DNA
tagtgaatatacaaaaattagctgggtgtggtggtgtgtgcatgtaatcccagctacctgggaggcagaggttgcagtgagctgagatcgcaccactgcactccagcctgggcaacagag

SEQ ID NO: 27432 - DNA, 120 bp, synthetic construct; identical to SEQ ID NO: 8308
  source 1..120: mol_type = other DNA

SEQ ID NO: 27433 - DNA, 120 bp, synthetic construct
  source 1..120: mol_type = other DNA
tcagtgccagctttgccagtgactgcttccactccacagggccagttcctggctagagtaacatctggagtggacctacactgagagaccctcccgagacctgtcctagttccggcttct

SEQ ID NO: 27434 - DNA, 120 bp, synthetic construct
  source 1..120: mol_type = other DNA
ggctggagcatcatgacacatttgctgaagctcacctgcaacaggtgaggaagatgactcagtgatttctcctaacaccatttcatgagtacaacacatgaagaacagcagcacttgctg

SEQ ID NO: 27435 - DNA, 120 bp, synthetic construct
  source 1..120: mol_type = other DNA
cccacggccacccttctggcttcctccttctcagtgactgtggtgcaactatctgcactattcatttgatatttagttatatataccaagtaagtggaagaatttgaaccttatgggaaa

SEQ ID NO: 27436 - DNA, 120 bp, synthetic construct
  source 1..120: mol_type = other DNA
aaacttttgagaattttctgcccccagaggttagaaaaaatgctataaatttgttttgcttgttacagataatatatacaatgagagatattttccccttgaatttggttcttcatttat

SEQ ID NO: 27437 - DNA, 120 bp, synthetic construct; identical to SEQ ID NO: 8309
  source 1..120: mol_type = other DNA

SEQ ID NO: 27438 - DNA, 120 bp, synthetic construct
  source 1..120: mol_type = other DNA
caccctccacccttctagcctcttctcagttcagtggtacacacagctgcatcattcatttgatatttagttatatataccaagtaagtggaagaacttaagctttatgagaaaaaatag

SEQ ID NO: 27439 - DNA, 120 bp, synthetic construct
  source 1..120: mol_type = other DNA
gaaaaagactccactctatcctttaccttccttacttctgtatgtttctataaatttccttcaaagtttcatggcatgacatgatatctcttgctctaccacttggtctatcttttcttc

SEQ ID NO: 27440 - DNA, 120 bp, synthetic construct; identical to SEQ ID NO: 8310
  source 1..120: mol_type = other DNA

SEQ ID NO: 27441 - DNA, 120 bp, synthetic construct
  source 1..120: mol_type = other DNA
accttcctggaaacctgaactatatagctataaagaataaatacaaaaaacagaaagcagagaggaggtcaccaattaagaatctgccccaccagagccattgaagctggccctgctatc

SEQ ID NO: 27442 - DNA, 120 bp, synthetic construct
  source 1..120: mol_type = other DNA
tggaggcattaaccccagggaagcacctcctgcctgtagagcaggtctttcggcttgcctgtggagttcttacaggcaaaggaatgcagccatgtgtcaggagctaggtgaggggcaatg

SEQ ID NO: 27443 - DNA, 120 bp, synthetic construct
  source 1..120: mol_type = other DNA
tggttgcactcgttcagatctatgatcaaagaaatacagcgtgactgtgcatctaaaaatgatgtgtacacgctcaatttccacagggtctaacgaagaattttagtttcggggaaagaa

SEQ ID NO: 27444 - DNA, 120 bp, synthetic construct; identical to SEQ ID NO: 8311
  source 1..120: mol_type = other DNA

SEQ ID NO: 27445 - DNA, 120 bp, synthetic construct
  source 1..120: mol_type = other DNA
cattaatatgtagggggtcacttcagtgtaaatactaataaattgtgttactatattttgggcctaagaaattaaaccagtaagatgacagcataaatttaatatgtaacagtagctata

SEQ ID NO: 27446 - DNA, 120 bp, synthetic construct
  source 1..120: mol_type = other DNA
cttctaaatgtatatttttctcttctggatccatagaacagccaccccatctagacatatttggctttttgtgtcatctcatgccattaagcttgcctcctgctgacatctaataaatga

SEQ ID NO: 27447 - DNA, 120 bp, synthetic construct
  source 1..120: mol_type = other DNA
aatcctgaaaaagttcaaattacataatattggggaaatgagatgaacttctgtcctctggtgaggggggaaactaaccagggctctgaggtggatgacagtgctgggtttttgcagcct

SEQ ID NO: 27448 - DNA, 120 bp, synthetic construct; identical to SEQ ID NO: 8312
  source 1..120: mol_type = other DNA

SEQ ID NO: 27449 - DNA, 120 bp, synthetic construct
  source 1..120: mol_type = other DNA
ctttttttttaaatcacatccagttccattattctgccttcagccacatctttccaatacaaacacaaatccttcttaacctccttcttcccctttcacttctaattccctcccaagaag

SEQ ID NO: 27450 - DNA, 120 bp, synthetic construct
  source 1..120: mol_type = other DNA
acagtctgacacttcctcatcctgctctagttaaggagcttgtgcttttccagatgcaattgtgtctaattgccaggatatcagcatgatttatacttcttttatgcaatacagtttggc

SEQ ID NO: 27451 - DNA, 120 bp, synthetic construct
  source 1..120: mol_type = other DNA
aaaaattatattctgagtagccaattgacttatagtaaacggtttaaaaagttgaagactcgctggaatgcagagggagggtcctaagcacacacagcttaatcaagtggaccaaggcca

SEQ ID NO: 27452 - DNA, 120 bp, synthetic construct; identical to SEQ ID NO: 8313
  source 1..120: mol_type = other DNA

SEQ ID NO: 27453 - DNA, 120 bp, synthetic construct
  source 1..120: mol_type = other DNA
ctggagccgatctgacacatgttttgtagcacctctgtgaagcagtacccttcccgattgtctggaagggacattatatggcaaaggggatgtcaggaaattttaagagcaaacaaaata

SEQ ID NO: 27454 - DNA, 120 bp, synthetic construct
  source 1..120: mol_type = other DNA
acaaataagacattcagtaagtaggcagaaagacattggcctagacaagcttataactctctctgctcccagaaatacaggggaatagccatgcttacagacagaggggcagagaaacat

SEQ ID NO: 27455 - DNA, 120 bp, synthetic construct
  source 1..120: mol_type = other DNA
caatcacagtcattacggcatctccaaaatatgaacattttttatccttcctcagattttgacattttcttgtattttaaataagaagtctgggtttccagcatcccagtgtggaggctg

SEQ ID NO: 27456 - DNA, 120 bp, synthetic construct; identical to SEQ ID NO: 8314
  source 1..120: mol_type = other DNA

SEQ ID NO: 27457 - DNA, 120 bp, synthetic construct
  source 1..120: mol_type = other DNA
ctaatctgttcacatggctcaaaatttaaaaggtataaaagagacttcaattcattcttaactgtttggtttcattgaaagactgaaaacagaaagagccatctgaatcttttatagaag

SEQ ID NO: 27458 - DNA, 120 bp, synthetic construct
  source 1..120: mol_type = other DNA
caccaaactcccctcctgaaaagcaaccaattctggggccgatttctaatgtatccttccagagctggattatgcatataaaagcaaatacatacataatatgtgtatgtgtgtgtgcac

SEQ ID NO: 27459 - DNA, 120 bp, synthetic construct
  source 1..120: mol_type = other DNA
aaaaggactctcaaagtgttatttcaagtgaaggagggaaaaatgtgaatatcagcatatgaaagaaatattttaatacatgttagaataatatctgtaatggtcaatattgatctgggg

SEQ ID NO: 27460 - DNA, 120 bp, synthetic construct; identical to SEQ ID NO: 8315
  source 1..120: mol_type = other DNA

SEQ ID NO: 27461 - DNA, 120 bp, synthetic construct
  source 1..120: mol_type = other DNA
gaggttgagaattactgatccaggaggatccagtgtgtgacaattaatctacatattttctgattctgtgcttttagaatctgttctttaattcctgcttcaatctgtattgtacagagt

SEQ ID NO: 27462 - DNA, 120 bp, synthetic construct
  source 1..120: mol_type = other DNA
gtcaaataggaaatattttaggctttgtgggtcatatggtctcagttgcaaccacttagctctgccattgtggcatgaaagtagccatggacaatatgcaaatgaatggttatacctatg

SEQ ID NO: 27463 - DNA, 120 bp, synthetic construct
  source 1..120: mol_type = other DNA
cagctgaggagctttaaaaaaatatcagtgcctggatgctactctagacaagaccagattttctggaggtagatcccaatggttttgagatattcctgattcagaggtacctggcatttg

SEQ ID NO: 27464 - DNA, 120 bp, synthetic construct; identical to SEQ ID NO: 8316
  source 1..120: mol_type = other DNA

SEQ ID NO: 27465 - DNA, 120 bp, synthetic construct
  source 1..120: mol_type = other DNA
acacagccttctccatcaggtctccgctgatacccgggtccacagatgcacatatatgtgccaatgaggttcttgcattccatttgtttttcagtacagtcatgttttccctcttcacac

SEQ ID NO: 27466 - DNA, 120 bp, synthetic construct
  source 1..120: mol_type = other DNA
ttcactactggctgtatttccttctgctctgttgagtatgatctctaaagaatggaaaggaatcttctaaccacctttgaacttgaagaaattgctccctaatcaactgatgacctcttc

SEQ ID NO: 27467 - DNA, 120 bp, synthetic construct
  source 1..120: mol_type = other DNA
agtggcccgatctcagctcacttcaacctctgcctcccgggttcaagtgattctcatacctcagtctcccaagtatctgggattacaggcatgcaccaccacgcctggctaatttttttt

SEQ ID NO: 27468 - DNA, 120 bp, synthetic construct
  source 1..120: mol_type = other DNA
gcctggctgtccctttatgttttatactcctttgttgaagcatgatttctaattcttgttgactaattgaactaaaagggcctcatgtaattataatataatggatatatcttaatataa

SEQ ID NO: 27469 - DNA, 120 bp, synthetic construct; identical to SEQ ID NO: 8317
  source 1..120: mol_type = other DNA

SEQ ID NO: 27470 - DNA, 120 bp, synthetic construct
  source 1..120: mol_type = other DNA
tcaaactcctgacctctggttatccacccacctcggcctcccaaagtgctgggattacaggcataagccaccgtgcctggccaatatgacattatttttatatgataatattagtaaaca

SEQ ID NO: 27471 - DNA, 120 bp, synthetic construct
  source 1..120: mol_type = other DNA
ttttctggacttggttgggccttcctcagtctttactttctgtcctattgtacttctttatttttctatctttcccgtttacatgctctgagctgagaaatttgaaatttattctgcata

SEQ ID NO: 27472 - DNA, 120 bp, synthetic construct
  source 1..120: mol_type = other DNA
aagagcaaactctatgattactgcagtttgtgaaatagagcctagttcagtgcttaggaaattgcaggtgttcaggaggtatttttaatggagatggtttagctaaagtagattccacgt

SEQ ID NO: 27473 - DNA, 120 bp, synthetic construct; identical to SEQ ID NO: 8318
  source 1..120: mol_type = other DNA

SEQ ID NO: 27474 - DNA, 120 bp, synthetic construct
  source 1..120: mol_type = other DNA
ggactatttatattccaattcccagccttctcctactaagggaagctttgagggacatctcccctcacagataaagcttcctggcttagatgaccttgaacacgatgactcacctttgca

SEQ ID NO: 27475 - DNA, 120 bp, synthetic construct
  source 1..120: mol_type = other DNA
cacagagcagaggattctgggcacattcatttatatctgcagcagaggagagtaagtaaataagggatcatggacagcaacaaaagggaacctaccaattgaactaaaactctaaaactt

SEQ ID NO: 27476 - DNA, 120 bp, synthetic construct; identical to SEQ ID NO: 8319
  source 1..120: mol_type = other DNA

SEQ ID NO: 27477 - DNA, 120 bp, synthetic construct
  source 1..120: mol_type = other DNA
aaacaattgtggtcagaacagaaaccaactcctccaatattgttaaccacctctctttcccccaaacaaagaggctcctgtgaaataacagcaattcttctgcccaagcaaatagtgttc

SEQ ID NO: 27478 - DNA, 120 bp, synthetic construct
  source 1..120: mol_type = other DNA
ctgttaatggaaaaaaagtcatttctgcagactgcagagtttggaaccatcagaatgtgttttggaaaagcaggattaaaatagaccatctcaactatcatgttgctccccaaggccagt

SEQ ID NO: 27479 - DNA, 120 bp, synthetic construct
  source 1..120: mol_type = other DNA
catttgatagatcatatctgatgaagagctctctttgctaccaactttattctctgccttcacctctccttcattctttccttaggccagtgaatccctacttgagagtgtatcagatca

SEQ ID NO: 27480 - DNA, 120 bp, synthetic construct
  source 1..120: mol_type = other DNA
ggaaccaccctttgagagccactgctctagacactccctccctttccttctttccatacattccaccaggcttacggatggacacttttcagatgcttatatattacaggcaaccgcttt

SEQ ID NO: 27481 - DNA, 120 bp, synthetic construct
  source 1..120: mol_type = other DNA
aagaaggagaaagtgagagtaagaaagaaggtattaaacaacacggaagcatctaaatataagtggtagggaaacaccaatgagaactctctgtgatatacagtgtagatgtgccatgaa

SEQ ID NO: 27482 - DNA, 120 bp, synthetic construct; identical to SEQ ID NO: 8320
  source 1..120: mol_type = other DNA

SEQ ID NO: 27483 - DNA, 120 bp, synthetic construct
  source 1..120: mol_type = other DNA
cgcaggtgcattcaaaacctccaatcacattcttgcaggttccatttccacaaggattgccaacagaacattcatcagtatctgcaagaaaccaggaatgtgtccaaaacatgatgaatt

SEQ ID NO: 27484 - DNA, 120 bp, synthetic construct
  source 1..120: mol_type = other DNA
tgcaaactctgcctctcaggttcaagtgaatctcatgcctcagcctcctgagtagctggaattatgggtgcacatcaccacgctcaggtaatttttgtatttttagtagagacagggttt

SEQ ID NO: 27485 - DNA, 120 bp, synthetic construct; identical to SEQ ID NO: 8321
  source 1..120: mol_type = other DNA

SEQ ID NO: 27486 - DNA, 120 bp, synthetic construct
  source 1..120: mol_type = other DNA
gctctaagggttaaaaaaaaaaaggcccctatcactcgtcaaaagtttctgcttgtttaaagcagaaatacatccacagtttggccttacattacatcactccccaagaagccttaaaca

SEQ ID NO: 27487 - DNA, 120 bp, synthetic construct
  source 1..120: mol_type = other DNA
ttgaaaccagatggtttacattaggaagaggaaaggctagaaaaaaatatgtttaggttatgaccgctctaaaacacaggcggagagaacaaatctttgaccagagacctaaaatgtgtg

SEQ ID NO: 27488 - DNA, 120 bp, synthetic construct
  source 1..120: mol_type = other DNA
cacctagaatactcaccattcttattctgacacatcccttggggagaatatctccccttaggaaagaaataattttgagaaataacattgatattttagctatctaaggcacagaagagt

SEQ ID NO: 27489 - DNA, 120 bp, synthetic construct; identical to SEQ ID NO: 8322
  source 1..120: mol_type = other DNA

SEQ ID NO: 27490 - DNA, 120 bp, synthetic construct
  source 1..120: mol_type = other DNA
ttagagctgcaaaggtaattagaaatgttattttacttgcataatattatattctaaggcctagaaaagctaaaaaaactgcttaaactcccacagccatagctggagctgaaatcttca

SEQ ID NO: 27491 - DNA, 120 bp, synthetic construct
  source 1..120: mol_type = other DNA
gatccttggatttaagttagagttagtgttgattaagggtcaaaggccagccagaggagccattatttgacattttaaaaacagggttacaaaaaaaagattgtgtactggttatatagc

SEQ ID NO: 27492 - DNA, 120 bp, synthetic construct
  source 1..120: mol_type = other DNA
ttaaaaaatttcacaaagactttcattatgatgttgtcctttctagtatctcttctgatatgtccagtgtctgccttcaccattaggctgtaaggtccatgaaaggaaggaacttgtctt

SEQ ID NO: 27493 - DNA, 120 bp, synthetic construct
  source 1..120: mol_type = other DNA
tgggacctgatggtgactcactagtattctaaatgaatgatgtatgagtggatggataaaacttatttcagtgccatcttggtacctatattcatggctatacagtgaatactgtatagc

SEQ ID NO: 27494 - DNA, 120 bp, synthetic construct; identical to SEQ ID NO: 8323
  source 1..120: mol_type = other DNA

SEQ ID NO: 27495 - DNA, 120 bp, synthetic construct
  source 1..120: mol_type = other DNA
caagatagatggagaaaaataagaataactagagaagaagcagattgagaatactgagaaatgctgagaatccagcacaggcaactgaccaactgctgaatcatcaggtcccacgatgat

SEQ ID NO: 27496 - DNA, 120 bp, synthetic construct
  source 1..120: mol_type = other DNA
acatgctgtgcatattgataaatgatggaaaaaacaagcccagaaaccagaggaagttatttaacgagactccctaagatgttgtgtctactccttgggcatctgtgattcatgacataa

SEQ ID NO: 27497 - DNA, 120 bp, synthetic construct
  source 1..120: mol_type = other DNA
attgtgttactgtctttaaggcctacagtcttacttacatcatggccagtctgcaccctgcatggcccagagagaaatgcagatgacagacataccatcaggttccgtggggcagagctc

SEQ ID NO: 27498 - DNA, 120 bp, synthetic construct; identical to SEQ ID NO: 8324
  source 1..120: mol_type = other DNA

SEQ ID NO: 27499 - DNA, 120 bp, synthetic construct
  source 1..120: mol_type = other DNA
gtcactatttcaaagtaacccgatgtgaatccaataaaatccaaaactgacagttttcaaaactgacatctgtcagtgacttcaggattggaaagtccacagaaggaatcattcacaaga

SEQ ID NO: 27500 - DNA, 120 bp, synthetic construct
  source 1..120: mol_type = other DNA
tactgtgatatcacactttgtggtttattctgtgtcccctaaactctggaactaaaataaaatcccagatcacaggcacagaacaaatacagaagtggcaactttgtagatgggcaaaaa

SEQ ID NO: 27501 - DNA, 120 bp, synthetic construct
  source 1..120: mol_type = other DNA
tttttaaaagaagcttgtttagctcaacacagagagggaaggaagaggagggcagggctgtgggtgggtgggaacagaatagtctttctttgaaagaatatatttcaatattgattattg

SEQ ID NO: 27502 - DNA, 120 bp, synthetic construct; identical to SEQ ID NO: 8325
  source 1..120: mol_type = other DNA

SEQ ID NO: 27503 - DNA, 120 bp, synthetic construct
  source 1..120: mol_type = other DNA
tgcctttttcattcacttccatcactgtttttcaatcccaggaaccatactatcataaccacctaagcacttctgttaagacagtctcaccagcttttatttcatgacaaagaagacaat

SEQ ID NO: 27504 - DNA, 120 bp, synthetic construct
  source 1..120: mol_type = other DNA
taccaagttatgtaaatcaaattcaggtagcctccccagtaaacctgctcaacctttcatggctaccaactcatccagataaatcatctctctaatttctattccacttccccatctgtt

SEQ ID NO: 27505 - DNA, 120 bp, synthetic construct
  source 1..120: mol_type = other DNA
tctgccacccaaatgtttgctttgctgagaaacttcaagactgaacaaattcttgtttcttggagaacacttttgatctcttttattcttcaagttctttgtcacatataatgttttgta

SEQ ID NO: 27506 - DNA, 120 bp, synthetic construct; identical to SEQ ID NO: 8326
  source 1..120: mol_type = other DNA

SEQ ID NO: 27507 - DNA, 120 bp, synthetic construct
  source 1..120: mol_type = other DNA
tcttttgtgccaggctctgtccacctgagtcccatggcattcgctttttaaaaaacattatccacggttctgtggaattttctcatttcatgagcaatagaagtctgactcctaatttgt

SEQ ID NO: 27508 - DNA, 120 bp, synthetic construct
  source 1..120: mol_type = other DNA
gcattggggaagagagctgtgcttgcccacatacttcaggactcactgggatgcctgtttaccagtccatctgcaaagagcccttaatgacctcgaaatttcatcagaactacaaaagtc

SEQ ID NO: 27509 - DNA, 120 bp, synthetic construct; identical to SEQ ID NO: 8327
  source 1..120: mol_type = other DNA

SEQ ID NO: 27510 - DNA, 120 bp, synthetic construct
  source 1..120: mol_type = other DNA
agaccactgacaactaccaacaagctgaaatcaaccggagaactctcaaccctctccttcttacttcccaaataactagttgaaaagtaaaaagttaatcagatcattagaataacaaca

SEQ ID NO: 27511 - DNA, 120 bp, synthetic construct
  source 1..120: mol_type = other DNA
gaggaaattgagcttccaaaagattaaatgacttgctctagactaaatatggcagggctgggaccccaaactcaattttttgaaccttaaatgatatccagtgcctcttccatatttggt

SEQ ID NO: 27512 - DNA, 120 bp, synthetic construct
  source 1..120: mol_type = other DNA
tttcatctcccttccccggaattcatgaaactagtttgtgtatgtagatatccatacacaactgtattgtttagaaaagtctaaacagttttctgggacttaagtacatactgtgttatg

SEQ ID NO: 27513 - DNA, 120 bp, synthetic construct
  source 1..120: mol_type = other DNA
tgacaagtattattcctaaaaatgaacaatggcccagcaagaatcctgatcagtttaaatttatttttgttttcttggagaatttgtgatataagggatggttaccatattgtgggggca

SEQ ID NO: 27514 - DNA, 120 bp, synthetic construct; identical to SEQ ID NO: 8328
  source 1..120: mol_type = other DNA

SEQ ID NO: 27515 - DNA, 120 bp, synthetic construct
  source 1..120: mol_type = other DNA
agaaacagagctttgccatgtttgaaaaataagaccaccacaaataaacatgcagcattgaaagcccaaagccttcaaagacacttaccttggcaccttcttccactggaggacaaggaa

SEQ ID NO: 27516 - DNA, 120 bp, synthetic construct
  source 1..120: mol_type = other DNA
acactcatcaatatctaaaagaatcacatgagtcaaacaaagtcaaaacacgatggagacatcatcaggtaccaaacacacaatgtggacacacaaagggcaactgagtttccaaactct

SEQ ID NO: 27517 - DNA, 120 bp, synthetic construct; identical to SEQ ID NO: 8329
  source 1..120: mol_type = other DNA

SEQ ID NO: 27518 - DNA, 120 bp, synthetic construct
  source 1..120: mol_type = other DNA
ttgatccaaatttactcccctccaaccacccacagaacttttcccaataccctatgctatagccctaaaactgtgaattttacaagaacactaagactcatgaaaataagtataatccta

SEQ ID NO: 27519 - DNA, 120 bp, synthetic construct
  source 1..120: mol_type = other DNA
aactgtacacttagaattgtggcatgttttctttagtatattatacatcttagctcctgtacagtggtagttaagagtagccaataagaagtttgaatggcttgagtaaccatatgtcct

SEQ ID NO: 27520 - DNA, 120 bp, synthetic construct
  source 1..120: mol_type = other DNA
gcttgggttggtcaataaaacatacgattacctatggaaaaatatgcccactctattccaacaaactcacttatctttcctcctgactttcagcaggaatttttagtgaacaaagtggta

SEQ ID NO: 27521 - DNA, 120 bp, synthetic construct
  source 1..120: mol_type = other DNA
gggctctttatttttatatttgtgcaaaggtttctactcacaccaaaatgtacttgcattatacaactttattctcaagaggcccaactaaggaaaagttgagaaattaaccttattatc

SEQ ID NO: 27522 - DNA, 120 bp, synthetic construct; identical to SEQ ID NO: 8330
  source 1..120: mol_type = other DNA

SEQ ID NO: 27523 - DNA, 120 bp, synthetic construct
  source 1..120: mol_type = other DNA
tgtacatgccaacttattaggatagggccaaatattgtagaatgggcacattcattgactgtgcagttatttttctttctatatatattctgttcaatttagcgaacttatgtattgata

SEQ ID NO: 27524 - DNA, 120 bp, synthetic construct
  source 1..120: mol_type = other DNA
aataaaatttctaattgacgatattaaaagtagagaaaattctcattgtggattagatgcagacctgtttaaagtcaggggtgtgaactaggtgacttcttgaaaatcctttcaacccta

SEQ ID NO: 27525 - DNA, 120 bp, synthetic construct; identical to SEQ ID NO: 8331
  source 1..120: mol_type = other DNA

SEQ ID NO: 27526 - DNA, 120 bp, synthetic construct
  source 1..120: mol_type = other DNA
tttgctgagaatttatttgaaataagacatttccactgctctataggtaaaaacaaaatagacaaacgatataaccacattcatccaaccttgaatgtggtcatttaaagtttttaaatg

SEQ ID NO: 27527 - DNA, 120 bp, synthetic construct
  source 1..120: mol_type = other DNA
atcatatgatcagtcatatgcacagaacaaaataacttcattagagattagcatgataattagtgcttcttgtcttgccagaaggatgagaccatgtcatacctatgcccttgcatttgt

SEQ ID NO: 27528 - DNA, 120 bp, synthetic construct
  source 1..120: mol_type = other DNA
cattttgaagactgtatccaggtgggcaaatgcatctgtaggacccatccaagttttgacaggtacctggtgcacattttctgggttctagaagacattcattgatatctgcaaagaaaa

SEQ ID NO: 27529 - DNA, 120 bp, synthetic construct
  source 1..120: mol_type = other DNA
ggagaaaaataagcaataataaaaataagctttatcagctttcaaaaatgtatagcataacaaccatattttattttacctgcatcaaattaaatgtttccagaaaattgtagcatgtga

SEQ ID NO: 27530 - DNA, 120 bp, synthetic construct; identical to SEQ ID NO: 8332
  source 1..120: mol_type = other DNA

SEQ ID NO: 27531 - DNA, 120 bp, synthetic construct
  source 1..120: mol_type = other DNA
agcctttatagggaggattaatataattctactctgacttttcctccaggtttccagaaagaagcattagaacagagactgcatgattccttgagtggtctctggaagcattctttccag

SEQ ID NO: 27532 - DNA, 120 bp, synthetic construct
  source 1..120: mol_type = other DNA
aagaccccactgtattaatgcattggccatttctgcaaagattcccatttccacttgcacattcatcaacatctgcagaaaaatccccaacaatcctttaatatattccaaagatgtcat

SEQ ID NO: 27533 - DNA, 120 bp, synthetic construct
  source 1..120: mol_type = other DNA
gctttaagcacctatacacatttaacaataagattacattattatattagagactgacaatttacattcaaatttcctatcagtttttccttgattttcctttagattttatttttaaat

SEQ ID NO: 27534 - DNA, 120 bp, synthetic construct; identical to SEQ ID NO: 8333
  source 1..120: mol_type = other DNA

SEQ ID NO: 27535 - DNA, 120 bp, synthetic construct
  source 1..120: mol_type = other DNA
taagcattttaataaaagtaatggatatagttacagtggttccctcttatctatggttttgctttctgggggttcagttatccaaggtcagctgctacccaaaaataggtgagtatagta

SEQ ID NO: 27536 - DNA, 120 bp, synthetic construct
  source 1..120: mol_type = other DNA
accatgcctaatttataaattaaactttaggtatgtatgtgtaggaaaaaacatggtatatagagggttcagtactatctgtggtttcaggcatctgctgggggtctcagaatgtatccc

SEQ ID NO: 27537 - DNA, 120 bp, synthetic construct
  source 1..120: mol_type = other DNA
agagatgatgctaattacaaagaacacatataaaactgacttcctttgctgatgcacaattttgcacacgcacctatacagtcattgttgtgagaaaggatgaaaccatgattgcagcgg

SEQ ID NO: 27538 - DNA, 120 bp, synthetic construct
  source 1..120: mol_type = other DNA
gttacacggttacagtggctaaagagcattttagggttcaccaggcctcatccataggctgagaacttcttgatgttggtatcagctccagcagcagtcatccctgcaagataccaggca

SEQ ID NO: 27539 - DNA, 120 bp, synthetic construct; identical to SEQ ID NO: 8334
  source 1..120: mol_type = other DNA

SEQ ID NO: 27540 - DNA, 120 bp, synthetic construct
  source 1..120: mol_type = other DNA
gaacaacttccaccaatgatgacttctctcacttttctaaactaccccaaagagatggcacttaatttgttcttttcatacatgcttgcattcttattcgccttttgattggtccgtact

SEQ ID NO: 27541 - DNA, 120 bp, synthetic construct
  source 1..120: mol_type = other DNA
aaatttaatgaaagaaagttgttactgctggtttgaaagaatgaggcaccatgaagagggacaaggatgaaatgagagagagagagagtggaaggtaacaacggagaatagcaaaatgta

SEQ ID NO: 27542 - DNA, 120 bp, synthetic construct; identical to SEQ ID NO: 8335
  source 1..120: mol_type = other DNA

SEQ ID NO: 27543 - DNA, 120 bp, synthetic construct
  source 1..120: mol_type = other DNA
tgtcagtgctcttgtcattactctggagaagatacaactttatgagaaatgttcccaaatggatgaacccagtcatagccaaagtcaaggacttaaacattactatattaattgttcttt

SEQ ID NO: 27544 - DNA, 120 bp, synthetic construct
  source 1..120: mol_type = other DNA
aaatcagcatcctgataatagagaaatcaggaaagagatttaaaatcctgagctctttttcctctagaaaaatgattaacttttctttgcctttgtaggatttataaatttgcctttgag

SEQ ID NO: 27545 - DNA, 120 bp, synthetic construct
  source 1..120: mol_type = other DNA
ttaatatctttttcaatttaccccttagtcaattttttctaaactgacagccaaatgaataacaaaggaagaggtttatcatgttcagattgccaaagattaaataggatatcactgctg

SEQ ID NO: 27546 - DNA, 120 bp, synthetic construct; identical to SEQ ID NO: 8336
  source 1..120: mol_type = other DNA

SEQ ID NO: 27547 - DNA, 120 bp, synthetic construct
  source 1..120: mol_type = other DNA
acttctagctatcattctcaggagtaatcctagctctaaactaagttagtgaaacagatatatttatttttgcatcaaaatggattaaaacttactctcatttaccaggcatagtcagag

SEQ ID NO: 27548 - DNA, 120 bp, synthetic construct
  source 1..120: mol_type = other DNA
tatcggcctacgcagcaccacagactgtggaattaattgaagtattttgtctagttaagatttggtgccttaagtcatggatagttcatggcttcctttgtaaatttatatcaaagtcaa

SEQ ID NO: 27549 - DNA, 120 bp, synthetic construct
  source 1..120: mol_type = other DNA
cgtctacacagggctccttttagcatgtgacaacctgaacactgtctctttctttttactctcatccattcaaaaggaagccctctcatcttgcttctgccagtctttaagttctaaatt

SEQ ID NO: 27550 - DNA, 120 bp, synthetic construct; identical to SEQ ID NO: 8337
  source 1..120: mol_type = other DNA

SEQ ID NO: 27551 - DNA, 120 bp, synthetic construct
  source 1..120: mol_type = other DNA
tggacatctcctccatttcatgtgtccgggatgccactgttatggttatctcctatttagtagatgaatcatcataccatttagaagttccaagtgaagtggagtatatcattatgaggg

SEQ ID NO: 27552 - DNA, 120 bp, synthetic construct
  source 1..120: mol_type = other DNA
tgcagaaatgctatttaacaaattatgattattcccttttgagaaaatgaatttaaagtgagccaactgcttcccagtataggcagaggagactgatttccgatcttgaggaagggtgtc

SEQ ID NO: 27553 - DNA, 120 bp, synthetic construct
  source 1..120: mol_type = other DNA
gtctcatatctgagttccacaaggaaatggagagccttaaggatcttattagaaagggatccccaattaggaatttcctttcatctactgccctatttcatgatggtttaaataaatgaa

SEQ ID NO: 27554 - DNA, 120 bp, synthetic construct; identical to SEQ ID NO: 8338
  source 1..120: mol_type = other DNA

SEQ ID NO: 27555 - DNA, 120 bp, synthetic construct
  source 1..120: mol_type = other DNA
tagcatcctgagctcagatatctaattattctctcagctctctcagcaataatgtgggtgctatggccaggtgtgatttgggatttgaaataatgtgcttatgaattcaaataaggatct

SEQ ID NO: 27556 - DNA, 120 bp, synthetic construct
  source 1..120: mol_type = other DNA
taagacataaataaagacatttctagaatgaggtcttcaacccaacaggctgaatggttgcaaaactcaagttaattccctttcttctgaggatttcaatgaataaaggaaatcaagctt

SEQ ID NO: 27557 - DNA, 120 bp, synthetic construct
  source 1..120: mol_type = other DNA
aatgacttaagctccagcaggctatggctgaatgtcttatcttgatctataaatagctctgtcccacttcttacctgagtgtgaaatggtgtgaaatgactcattctatattatcagcaa

SEQ ID NO: 27558 - DNA, 120 bp, synthetic construct
  source 1..120: mol_type = other DNA
tgccaagtttctctagggtattgtggttcatatcagagacgtccctgcttttcctgtcctgtatttttaatacatggatagcaacagctctgttgacaaaatgctaaatacttacacatt

SEQ ID NO: 27559 - DNA, 120 bp, synthetic construct; identical to SEQ ID NO: 8339
  source 1..120: mol_type = other DNA

SEQ ID NO: 27560 - DNA, 120 bp, synthetic construct
  source 1..120: mol_type = other DNA
tgagatattattttgtttctgggctgaaacagcagtcttttaaattttcacaccactggctacaagataccatcagatactgaataacttcaccgtacactgaagttgataacatgccaa

SEQ ID NO: 27561 - DNA, 120 bp, synthetic construct
  source 1..120: mol_type = other DNA
gctaataaaggctgttgatgtttgctgccttcagtgagtgaccctttccctgtaagatgactgggaagaaaagcgatggctttgtttgttctgtttctgcagattaatctgacccagctc

SEQ ID NO: 27562 - DNA, 120 bp, synthetic construct; identical to SEQ ID NO: 8340
  source 1..120: mol_type = other DNA

SEQ ID NO: 27563 - DNA, 120 bp, synthetic construct
  source 1..120: mol_type = other DNA
gagttcatcaatctaaatcttaactcatatattcttcagcttaactatctgaaaataaatccagatatctgaagcttcatgaagacaaactcttgggtaggcatgtccagcctgtggggc

SEQ ID NO: 27564 - DNA, 120 bp, synthetic construct
  source 1..120: mol_type = other DNA
actcgtcaatatctacgagcagaagagaactgaatttgaaggagaacagaatctggtgtccagtcaacaaagcctctcacatgaaaacaaatttatattttattttgatctgttctattg

SEQ ID NO: 27565 - DNA, 120 bp, synthetic construct
  source 1..120: mol_type = other DNA
acttagcactaaaaagaaatgagctatcaagccatgaaaagacatggaagaaaattaaatatggccaggtgcggttgctcacacctgtaatcctagcactttgggaagctaaggcgggcg

SEQ ID NO: 27566 - DNA, 120 bp, synthetic construct
  source 1..120: mol_type = other DNA
agctggggcaggagaaccgtttgagcctgggagatggaggtagcagcgagccaagatcatgccattgcattccagcctgggcaacaagtgcaaaactccaagtccaaaacaaacaaacaa

SEQ ID NO: 27567 - DNA, 120 bp, synthetic construct; identical to SEQ ID NO: 8341
  source 1..120: mol_type = other DNA

SEQ ID NO: 27568 - DNA, 120 bp, synthetic construct
  source 1..120: mol_type = other DNA
taatgtaaatcatcagagtggactctgagtgataatgatgtcaacggagattcaattgtaacaaatgcaccactctgatggaggatgctgatgatgggggaggctgtgcatgtgtagggg

SEQ ID NO: 27569 - DNA, 120 bp, synthetic construct
  source 1..120: mol_type = other DNA
ttatctaaactttcccacttagtaatatttataaatgcaaggcttgatttatgaccacatatggactctaatgatgctcacatctaaaaaaaagtcatgaaacttggctgctagggccag

SEQ ID NO: 27570 - DNA, 120 bp, synthetic construct; identical to SEQ ID NO: 8342
  source 1..120: mol_type = other DNA

SEQ ID NO: 27571 - DNA, 120 bp, synthetic construct
  source 1..120: mol_type = other DNA
acctgctcaaattactaccacaaggcaatcaaatcaagaaaacctaacatgggagttatcataaaactactgaaaacaaaccaactctcattaaaacagaaaagattttggataatggat

SEQ ID NO: 27572 - DNA, 120 bp, synthetic construct
  source 1..120: mol_type = other DNA
aaaagttactacatgtccatgctatatcatggggcaaaatacatgtttccctcttccctgctccagtggaacaatctaatttacagactaagtccaataaaggggatggcctataacaca

SEQ ID NO: 27573 - DNA, 120 bp, synthetic construct
  source 1..120: mol_type = other DNA
gtggaaaaccctcaggactgtcagtcagtcagtgggggttcctgtctaaggcaggtggattgtgcctctctgggcaacagacacaggagcaggagtgtgtctgccttgggttacaaggga

SEQ ID NO: 27574 - DNA, 120 bp, synthetic construct; identical to SEQ ID NO: 8343
  source 1..120: mol_type = other DNA

SEQ ID NO: 27575 - DNA, 120 bp, synthetic construct
  source 1..120: mol_type = other DNA
ccacagaatgctaccctgacagcaaaatgccttgcattggtacagttgcatgtgtttaatctcatggatctagcaaggtctaagttgacttggtggtcatgggtggtcttgtctatgggt

SEQ ID NO: 27576 - DNA, 120 bp, synthetic construct
  source 1..120: mol_type = other DNA
gcatgctgagcatgtttgagagggggaaaagtgcggctgtgagggaggcagccaactctagcactgtaagatcatctgccgtgggttccctctcccacatccatgcttcctctccaggta

SEQ ID NO: 27577 - DNA, 120 bp, synthetic construct
  source 1..120: mol_type = other DNA
gtaagggacatgtgcccacttggacacagtaactgaaagcctggtgacaggaacttaacaagtatgtggttaggactataactttacttgtggtatataagttgtcttcagtatagacaa

SEQ ID NO: 27578 - DNA, 120 bp, synthetic construct
  source 1..120: mol_type = other DNA
atagaaaattattccaactatcctgggcacatggtatatttaataaccagtaatgtcccttttactaaaatgtaagagaactatctttcccagatgcaggaaaaaatatgaagtgctata

SEQ ID NO: 27579 - DNA, 120 bp, synthetic construct; identical to SEQ ID NO: 8344
  source 1..120: mol_type = other DNA

SEQ ID NO: 27580 - DNA, 120 bp, synthetic construct
  source 1..120: mol_type = other DNA
ctaatattaacacactgtgtgttgggggaaaggggctgggaatgtgcctcctggtttttccactgaagttagtgaattttttttttttgcatgaaatttcatgttgttccacaccatgcc

SEQ ID NO: 27581 - DNA, 120 bp, synthetic construct
  source 1..120: mol_type = other DNA
ttaccttcacaaaccaacaacttgtcattatagaagaatcccactggacattcacatcggaagctgccaaccatgttgatacacactccattttcacagacccctgggatctcccggcac

SEQ ID NO: 27582 - DNA, 120 bp, synthetic construct; identical to SEQ ID NO: 8345
  source 1..120: mol_type = other DNA

SEQ ID NO: 27583 - DNA, 120 bp, synthetic construct
  source 1..120: mol_type = other DNA
gcctatatttagggaaaaaggcagaggtgagctggtaaagaaccacagaggagcacatggtcatatggaactctgatctttcaaattccagtttaactcccccttcctacttcatgtggc

SEQ ID NO: 27584 - DNA, 120 bp, synthetic construct
  source 1..120: mol_type = other DNA
tgggcttggctctccaacactgtgttatggttccttagcactctacatgacaggtagtaagtgctcaattcaaatttgttcagttaagagcaagtgtctggcagtgtgttggtgagcact

SEQ ID NO: 27585 - DNA, 120 bp, synthetic construct
  source 1..120: mol_type = other DNA
cccatctctgtcttacccactctgaactcctgaccactgaagtgccctctaggataagagtagtaatagtagtaataatggtaatagtattaatagtgacagtatctcatttgctgcatg

SEQ ID NO: 27586 - DNA, 120 bp, synthetic construct
  source 1..120: mol_type = other DNA
gtaatagtattaatagtgacagtatctcatttgctgcatgactggtacatttctcaagcattcaacctgtatttattggctgaattatcacagccaccccatgagatggtctcggtacta

SEQ ID NO: 27587 - DNA, 120 bp, synthetic construct; identical to SEQ ID NO: 8346
  source 1..120: mol_type = other DNA

SEQ ID NO: 27588 - DNA, 120 bp, synthetic construct
  source 1..120: mol_type = other DNA
tattatagtcaggagcctttgcaaggtacatactttgcttgcatacttgtgagaagatgatcacggactgaagtggagcctacaagagctgctgcaattttagaagaaccacactctata

SEQ ID NO: 27589 - DNA, 120 bp, synthetic construct
  source 1..120: mol_type = other DNA
atctcaaagggttcattgctattttgaatacacgcaattatgtctttagatctttcacacctttgtcattcatgtcatgaaaatgccatataaagttacatcacaactgtgtatcataag

SEQ ID NO: 27590 - DNA, 120 bp, synthetic construct
  source 1..120: mol_type = other DNA
agtctaatttccagccattgttaggtataaaatagcaaaaggatatattaaaaattatattttcttttcctgtcaggattttatttgaacttcaacttagtgaagtttatattttaagac

SEQ ID NO: 27591 - DNA, 120 bp, synthetic construct; identical to SEQ ID NO: 8347
  source 1..120: mol_type = other DNA

SEQ ID NO: 27592 - DNA, 120 bp, synthetic construct
  source 1..120: mol_type = other DNA
atttggactagatgaagtctgaagcctttccagctctcctagtggacaacgctaatgttctttctagtctttgcttactgccaaacttggagggcagccttgctggggtacatgcctggt

SEQ ID NO: 27593 - DNA, 120 bp, synthetic construct
  source 1..120: mol_type = other DNA
gccaatgtcatttagcagtttttctttccaaaccatgaagtttctttggacgtggacgagactgtggagccatatggatttggcactaagggagccaggctgattgctggaccagactct

SEQ ID NO: 27594 - DNA, 120 bp, synthetic construct; identical to SEQ ID NO: 8348
  source 1..120: mol_type = other DNA

SEQ ID NO: 27595 - DNA, 120 bp, synthetic construct
  source 1..120: mol_type = other DNA
cagatgacctgaggagattccatgtaagataaaattgatccacgaaaggactttatgtaaacaatctacacgtaaggattggtgtgaagtcacttaacctggtcttagtcagaaggaagg

SEQ ID NO: 27596 - DNA, 120 bp, synthetic construct
  source 1..120: mol_type = other DNA
cccttaatcatgaacaacaaatgttgttgccaattaggtggagctgcacagggtgtttgcacagtttgtttcaaactaagaatcagtgtttcaataaagtgaaaggcattgtttaatatt

SEQ ID NO: 27597 - DNA, 120 bp, synthetic construct
  source 1..120: mol_type = other DNA
tgacaaagcctggcctttgacttccacagagtgtagcaaactcatctgcaatgattaaacaaaggtgggatgggaggataggggtcagcaaagaacaataattggactgaaaaaaattat

SEQ ID NO: 27598 - DNA, 120 bp, synthetic construct; identical to SEQ ID NO: 8349
  source 1..120: mol_type = other DNA

SEQ ID NO: 27599 - DNA, 120 bp, synthetic construct
  source 1..120: mol_type = other DNA
tgacatcagatctattaatgactaatttgggtcaatcaaccaaccttcaccagtttttcagtttttggagctggatttcatttggtacagctctgtcatattctctccctctccctctct

SEQ ID NO: 27600 - DNA, 120 bp, synthetic construct
  source 1..120: mol_type = other DNA
agcagtcccttctaactgtgagattttgtgattccagatcatgactgtaactggtaaggtatggtatcaatctaagcttcagatggccattgccttattggtcacgctcagtgaaaatca

SEQ ID NO: 27601 - DNA, 120 bp, synthetic construct
  source 1..120: mol_type = other DNA
tcacttccaacactgtaacgccagctgacattggtcacctaaagaaattacagggactcttaaaatatgtgcagatttcacagctaatgaaaagccatgactgaatttggtgaatatcca

SEQ ID NO: 27602 - DNA, 120 bp, synthetic construct
  source 1..120: mol_type = other DNA
tagtctacattaagggtttccaaagtggtctccagaggaatatgcaataatccattaggataaaaaagaaaatgcgaggacttctatctatctttggaaaaatctaatctttaaaaaaat

SEQ ID NO: 27603 - DNA, 120 bp, synthetic construct; identical to SEQ ID NO: 8350
  source 1..120: mol_type = other DNA

SEQ ID NO: 27604 - DNA, 120 bp, synthetic construct
  source 1..120: mol_type = other DNA
gaaacaaaatctgaagttcatgtaactttcatattatgaaatacgattctcctgattttttccaaccatttaaaatgtagaaatccttcttagcttgcaggccattcaaaagtagatggt

SEQ ID NO: 27605 - DNA, 120 bp, synthetic construct
  source 1..120: mol_type = other DNA
gggacagatttggcccatggggtgtattttgccaagccctggtctagaaacattttgcagggtggaggtaaatcagaattctaagtggtggttattatattatttctggagtaaacaatg

SEQ ID NO: 27606 - DNA, 120 bp, synthetic construct
  source 1..120: mol_type = other DNA
agaataccctaatcaattccttgcatgataatttcaactaacccaaatcataatcttggcaaatgatgtcatcatcatatacataatgcacagcatataccatatgatataagaacagta

SEQ ID NO: 27607 - DNA, 120 bp, synthetic construct; identical to SEQ ID NO: 8351
  source 1..120: mol_type = other DNA

SEQ ID NO: 27608 - DNA, 120 bp, synthetic construct
  source 1..120: mol_type = other DNA
tttgtaggctgcctttaactatttttggaacaagtttagctttaaataagtaaaaagacaaggaattatgtttcccttactgtcacattgatttgtctaatgtttacagtcttttagata

SEQ ID NO: 27609 - DNA, 120 bp, synthetic construct
  source 1..120: mol_type = other DNA
gttcggctggaatgaccagcaccaactgtgaatttaaatcatgagccgtttttttccctgtaaagataaacaatgcacactttgcttccttcgctaagactgatttccccaacaattcat

SEQ ID NO: 27610 - DNA, 120 bp, synthetic construct; identical to SEQ ID NO: 8352
  source 1..120: mol_type = other DNA

SEQ ID NO: 27611 - DNA, 120 bp, synthetic construct
  source 1..120: mol_type = other DNA
cttgactttgataaggacacaaaaaacttgctcttacacaactttctagctacctatgctgctacaagataaaggactttgagaaatacattccctgatatttcatgccacagaactaag

SEQ ID NO: 27612 - DNA, 120 bp, synthetic construct
  source 1..120: mol_type = other DNA
tgtaggtcagcactgtaaatataattgtacaaagatacacccaaaagtcaaacaaaagaagtactattaactgttgtttgggattttccaacatacattttagagaaaactcccaaccac

SEQ ID NO: 27613 - DNA, 120 bp, synthetic construct
  source 1..120: mol_type = other DNA
tgtgagctctcttcctctttgtagatgagaaccaaacatgcattactgagaaaagcttggacttacccatgcaattatttcccccattcacttgcatgtagtctggaggacagatacagg

SEQ ID NO: 27614 - DNA, 120 bp, synthetic construct; identical to SEQ ID NO: 8353
  source 1..120: mol_type = other DNA

SEQ ID NO: 27615 - DNA, 120 bp, synthetic construct
  source 1..120: mol_type = other DNA
ctagcctggccaacatggtgaaaccccatctctactaaaaatacaaaaattagccaggcgtggtggtgcacacctgtagtcccagctactctactcgggaggctgaggcaggagaattgc

SEQ ID NO: 27616 - DNA, 120 bp, synthetic construct
  source 1..120: mol_type = other DNA
ggaactcttgccttctgacatgaggcattatcaaatataataatgagtctcctaataaattaacctataatatcctcaaaggtaggcagagatagaaatgtggagaaattaaaatatcaa

SEQ ID NO: 27617 - DNA, 120 bp, synthetic construct
  source 1..120: mol_type = other DNA
atatttcacatcctctccccacttccaaatgaaggagttgattctaatctttgttaactccatgggtcttagagctgtgccatatacactgtgatgttcaactaatactcaataaggttg

SEQ ID NO: 27618 - DNA, 120 bp, synthetic construct; identical to SEQ ID NO: 8354
  source 1..120: mol_type = other DNA

SEQ ID NO: 27619 - DNA, 120 bp, synthetic construct
  source 1..120: mol_type = other DNA
ggaacactgaaattggacctgtgccattcatgtaaaaaatggcttttctgaagagcatggaaaaatattttgtaagcataaatgaggctatggtccagcagaataagattctgtttttct

SEQ ID NO: 27620 - DNA, 120 bp, synthetic construct
  source 1..120: mol_type = other DNA
actgctaaattctattttcctagtaaccatattctggttttgcaggtcagttcttgatatctgcaagaccttatcatcctaccaggaccatttaccatcacacactcgtgtatcttcatt

SEQ ID NO: 27621 - DNA, 120 bp, synthetic construct
  source 1..120: mol_type = other DNA
ggcattcctttagcattgtaaataaacccaaggaaattcaagttgtgtgtgctttaagacaaaggaaacacaattaccttccaatataacggtgataggatttggtcggaaaccttcccc

SEQ ID NO: 27622 - DNA, 120 bp, synthetic construct; identical to SEQ ID NO: 8355
  source 1..120: mol_type = other DNA

SEQ ID NO: 27623 - DNA, 120 bp, synthetic construct
  source 1..120: mol_type = other DNA
catcttcatttttatgttctgttcagcctactttctgggaactacagcttcccttaataatcttaattggcttctttccaaaaccctttccaaatagagccttaggaaaagctgttctct

SEQ ID NO: 27624 - DNA, 120 bp, synthetic construct
  source 1..120: mol_type = other DNA
tttcccccattaattctttcatccaagtattttacccagaaacatttatttcagtggtatgcaccaggacggtgatatgtacaggacatgtgaataagaatgtctgtaacctgctgcatc

SEQ ID NO: 27625 - DNA, 120 bp, synthetic construct
  source 1..120: mol_type = other DNA
tgaaattatatgtacacatgcctatatgtatatattccagttctaactctggtccagatctggtgtggtgtggatatctattgttttgctactgtcattaatctacaaagctgactcccc

SEQ ID NO: 27626 - DNA, 120 bp, synthetic construct; identical to SEQ ID NO: 8356
  source 1..120: mol_type = other DNA

SEQ ID NO: 27627 - DNA, 120 bp, synthetic construct
  source 1..120: mol_type = other DNA
gacaactagtggagtcctaatgtgcaccaggtgtgctctttgtaccaacacagcactgtgcctgctctttcttctctttctgaggcctattttgaattatagcgcttatgtttaggtcat

SEQ ID NO: 27628 - DNA, 120 bp, synthetic construct
  source 1..120: mol_type = other DNA
ccttcagcaaaaaaagaatccatacctatcccaacatacgctataagcagtagccactgaattttgccaaagaagctacatctaattctgaatcataatacaggactcacttggaaaaac

SEQ ID NO: 27629 - DNA, 120 bp, synthetic construct
  source 1..120: mol_type = other DNA
ataacaatggaataatcttccattttatagttgcttaactaattgcttctcttcaaaccccgggacactgagtctggcgtacagccttccaaactagtcaatagatgagaagaggagaga

SEQ ID NO: 27630 - DNA, 120 bp, synthetic construct
  source 1..120: mol_type = other DNA
taccctagtctggaaaatctttaaagtaatgctatctgcttttcacttacacagaagtgagatgttacctgccctacctgatcttttagtgtgagccaaccaggaatattttctgactct

SEQ ID NO: 27631 - DNA, 120 bp, synthetic construct; identical to SEQ ID NO: 8357
  source 1..120: mol_type = other DNA

SEQ ID NO: 27632 - DNA, 120 bp, synthetic construct
  source 1..120: mol_type = other DNA
tatacaaacacaaaagcatcaggcagaatctttctactggggttgaaaattcaaacccacttcaggaactgttcaaaaaccgtaatttacttttactgagaaactaaaaagtgcccatga

SEQ ID NO: 27633 - DNA, 120 bp, synthetic construct
  source 1..120: mol_type = other DNA
gctgttttcaaaataatacacagtatgcttgcttctctgaaaagtttttaaggtcttaccaacacagccaactcgagttgggttcagttcaaaatcaggtgggcagtcacagatatagct

SEQ ID NO: 27634 - DNA, 120 bp, synthetic construct; identical to SEQ ID NO: 1314
  source 1..120: mol_type = other DNA

SEQ ID NO: 27635 - DNA, 120 bp, synthetic construct
  source 1..120: mol_type = other DNA
cttccacttcagagataaaacacctcaggaaggaaatatgatatagtctttggtggtctttccccagaacacatttaccattcaaatttgtcatcaggataaaatataactttgggccgg

SEQ ID NO: 27636 - DNA, 120 bp, synthetic construct
  source 1..120: mol_type = other DNA
aaaaaattagccaggcgtggtggtgggtgcctgtagtcccagctactcgggaggctgaggcaggagaatggcatgaacctgggaggcggagcttgcagtgagccaagatggtaccactgt

SEQ ID NO: 27637 - DNA, 120 bp, synthetic construct
  source 1..120: mol_type = other DNA
taactttggcactaggaaaaatattccagtcaaggtaactgaaggcaaaacactgttgtgacctcggtcaaccaaaaattcagacacaggttttaagaaaatatattgagtatatgtggc

SEQ ID NO: 27638 - DNA, 120 bp, synthetic construct
  source 1..120: mol_type = other DNA
tctctcccatcatccatgctgagttgaatatttccctttcagtttctattccaaaaatatgtacagaattccagatatttaggacatgggttttggcaaattccactctgtacaattcct

SEQ ID NO: 27639 - DNA, 120 bp, synthetic construct; identical to SEQ ID NO: 8359
  source 1..120: mol_type = other DNA

SEQ ID NO: 27640 - DNA, 120 bp, synthetic construct
  source 1..120: mol_type = other DNA
tccagagcatttgcagggtggtggtggtggtcatgatctggagagcccctgagtcatggtttgtttaggtggttgaaaagaccagattttttccggaaatttgaactcatacagaacata

SEQ ID NO: 27641 - DNA, 120 bp, synthetic construct
  source 1..120: mol_type = other DNA
agagaaccgagtgtcagtctgctgggtgcctgtagtttttctaagctttttctaatgttccctgagagtccttggctcaacaagaaaatgatttatacactagagataggtggctgagct

SEQ ID NO: 27642 - DNA, 120 bp, synthetic construct; identical to SEQ ID NO: 8360
  source 1..120: mol_type = other DNA

SEQ ID NO: 27643 - DNA, 120 bp, synthetic construct
  source 1..120: mol_type = other DNA
caatcagttccaggtctgagaaaaggtatctgtgattcttaatacttcccccttgcttttcttgtcttctgtgacggcccttgtgtagtcccagggaggctccaatagctgggtcccccg

SEQ ID NO: 27644 - DNA, 120 bp, synthetic construct
  source 1..120: mol_type = other DNA
agttccaaagacacagatgttcggaagggagcactcatcaatatcttggggggagggagaaaaaagcaaaaaacttaacttatatttttctaaaaaaaacctgccaaatataattaggca

SEQ ID NO: 27645 - DNA, 120 bp, synthetic construct
  source 1..120: mol_type = other DNA
cagtctctattacatgccaagcagcgggctgagcattttatagatacatatctcatttgtagtgttccacgtaggtccacatcactttcgtaaagtaagaggcaagcaagccaccttacg

SEQ ID NO: 27646 - DNA, 120 bp, synthetic construct
  source 1..120: mol_type = other DNA
tccctagtcctatggcatgtgtttgcctttgttgacggagattggaaaaccgcacacgcttcttccaggcctctgtctctgcctcctgttaacattcttcgtgtgcagttgacacacagt

SEQ ID NO: 27647 - DNA, 120 bp, synthetic construct; identical to SEQ ID NO: 8361
  source 1..120: mol_type = other DNA

SEQ ID NO: 27648 - DNA, 120 bp, synthetic construct
  source 1..120: mol_type = other DNA
catagctaatgactgattttgagttcacgtcttgttaacaaggaacaactattaactaatacattaatcagggtcttgtttaaacttctactgacaatcgttatcatttgtttatttcta

SEQ ID NO: 27649 - DNA, 120 bp, synthetic construct
  source 1..120: mol_type = other DNA
tgtctgaccaacacttatcagaatgacagagcctaaagctgagcgataccatgccatatggcagtatcccaagggtcccctattgaacagatttgcaaaactgttccatgttcatatatg

SEQ ID NO: 27650 - DNA, 120 bp, synthetic construct; identical to SEQ ID NO: 8362
  source 1..120: mol_type = other DNA

SEQ ID NO: 27651 - DNA, 120 bp, synthetic construct
  source 1..120: mol_type = other DNA
cagctgaggttttctgtgcagcaagagaaatggtcagctggaaacctaatccctctacaaactgaactgaccagcttagaaatgaagctaaaacacacctcagtttaaaaaaaaaaaaaa

SEQ ID NO: 27652 - DNA, 120 bp, synthetic construct
  source 1..120: mol_type = other DNA
cgcattcacagcggtatcctcctggtgcattgaggcactggccattgccacagagattcaggttctcagagcactcatcaaggtctacagccagaaagaaacacacgttactcttcctcg

SEQ ID NO: 27653 - DNA, 120 bp, synthetic construct
  source 1..120: mol_type = other DNA
atgaaatttacatgtggctgattcagaatcctgaatgataatttaccctgaatgatataaaatgaataagccgaaggaatcatgcaaactaaggcctgttcaagaagggtcatccgcatg

SEQ ID NO: 27654 - DNA, 120 bp, synthetic construct
  source 1..120: mol_type = other DNA
aaaagtgcaaaagaatggcaaccatagggagaagaaaaattccatctgcttaatctctacctagttttcttaataatcacaggcatttaaatatcaaacacataaaccacacatgcctaa

SEQ ID NO: 27655 - DNA, 120 bp, synthetic construct; identical to SEQ ID NO: 8363
  source 1..120: mol_type = other DNA

SEQ ID NO: 27656 - DNA, 120 bp, synthetic construct
  source 1..120: mol_type = other DNA
taatttatgtaatgacaagtctaatcatgtatgtttacatgtgtatagaagtttatgttaattctatggctattaattagagccaaaaagaaaatttcattaatatattattgcaaaact

SEQ ID NO: 27657 - DNA, 120 bp, synthetic construct
  source 1..120: mol_type = other DNA
gatgatggcctgttggagagaaatacatactgttcttctaatctagaacatctaatcccttctccttacatagttccctacagcaagcttatccttgtgttggtacagaaaggaagtcat

SEQ ID NO: 27658 - DNA, 120 bp, synthetic construct
  source 1..120: mol_type = other DNA
ttgtaactattataaggcctagctgacttgaggtggagaatggtatgacttttttggtatcattttatgttagagcacagatcactgtaaatgatgtgataatggcacctaaatatctat

SEQ ID NO: 27659 - DNA, 120 bp, synthetic construct; identical to SEQ ID NO: 8364
  source 1..120: mol_type = other DNA

SEQ ID NO: 27660 - DNA, 120 bp, synthetic construct
  source 1..120: mol_type = other DNA
catggtattcttgcagtctgcatgctggctgcacatatgggttccattggaacattcgtccagatcttatagaaaaaggttatatcattattaacagaaagggtggtatttaaaaccaat

SEQ ID NO: 27661 - DNA, 120 bp, synthetic construct
  source 1..120: mol_type = other DNA
ccacccgggactgcagctacatttgaagcttcctgctgtattggtacatacagcatgtttgccacagttgtgtgctccaatttcacattcattgatgtctggaaaaatgagcagtgattt

SEQ ID NO: 27662 - DNA, 120 bp, synthetic construct; identical to SEQ ID NO: 8365
  source 1..120: mol_type = other DNA

SEQ ID NO: 27663 - DNA, 120 bp, synthetic construct
  source 1..120: mol_type = other DNA
tgctagtatttttagtaagtcaactatggagtaatgatgcacattattttcatatcttgtatagacaaaaaatacaaacttgttggcaaattagaaaatttttgcattatattctatata

SEQ ID NO: 27664 - DNA, 120 bp, synthetic construct
  source 1..120: mol_type = other DNA
ataagccatcttttccctagcttcttagagtcctagcacattggagagccaagccttcttgtatatttcatgtaaaactcaagttaatccaatggggattttgtcagaatataaggaata

SEQ ID NO: 27665 - DNA, 120 bp, synthetic construct
  source 1..120: mol_type = other DNA
cataaagtactaagtgaaaattttccaaaacgagcccattctataatgggttaccctcataatcaactttgtcattaactaagaacaagaactcataaatatggtactctatatggaaac

SEQ ID NO: 27666 - DNA, 120 bp, synthetic construct
  source 1..120: mol_type = other DNA
tgcctttttgtttacttatgaagcccaattaaatgatttgaaagtgtttgcaaacatgctatctgccaagtgttccatctgaagctctgaaatggtcctgggatctttggcttcttcata

SEQ ID NO: 27667 - DNA, 120 bp, synthetic construct; identical to SEQ ID NO: 8366
  source 1..120: mol_type = other DNA

SEQ ID NO: 27668 - DNA, 120 bp, synthetic construct
  source 1..120: mol_type = other DNA
gcagaactagcacaaatactcccaagcagggctgtcgaaacttctttctgcctcaggtaattgctcccctcagaggtaatgcaacaaatcaccatttttgtggagttttgcctaaatttc

SEQ ID NO: 27669 - DNA, 120 bp, synthetic construct
  source 1..120: mol_type = other DNA
ctcgtaattccattctcccaatctcagtttctcagaagaagacaaagaagttgggccctacaagtcagtgaggggcagagccaggacctcctgaaactcagtttccccatctggtgattg

SEQ ID NO: 27670 - DNA, 120 bp, synthetic construct
  source 1..120: mol_type = other DNA
cgatctcggttcacagcaacctccgccacctgggttcaagcaattctcctgcctcagcctccctagtagctgggattacaggtgcctgccaccacgcctggctttttttttttttttttt

SEQ ID NO: 27671 - DNA, 120 bp, synthetic construct; identical to SEQ ID NO: 8367
  source 1..120: mol_type = other DNA

SEQ ID NO: 27672 - DNA, 120 bp, synthetic construct
  source 1..120: mol_type = other DNA
taatgaccagaggtactcttattttatgagtattatcattttcatatggcttttaccttccatgtttaatcttgcaattaagaaaattatcatttctttttaatggaaagtctcctttaa

SEQ ID NO: 27673 - DNA, 120 bp, synthetic construct
  source 1..120: mol_type = other DNA
agaaactatatttacaacaggctgtgtatcatgggcttttgggtaataggagagagtaactcaggagccaatattcaattctccattttgtgactatttgtataagttattatctcaatg

SEQ ID NO: 27674 - DNA, 120 bp, synthetic construct
  source 1..120: mol_type = other DNA
cattaattgtttctgtggcagacttggactgtaattcatcataaaagcaaacagaaggggaaagtgagccataaggaaaacaagcaaacaaaaatgctgtattgaaacactcttcaataa

SEQ ID NO: 27675 - DNA, 120 bp, synthetic construct; identical to SEQ ID NO: 8368
  source 1..120: mol_type = other DNA

SEQ ID NO: 27676 - DNA, 120 bp, synthetic construct
  source 1..120: mol_type = other DNA
gtctcctggatcctaacctggcagagctgtgcactgcagaaactccttgattaggcattgaggaagagggcgttaccatgaatggagaggccaaacgtgaaggctacttggatttcttaa

SEQ ID NO: 27677 - DNA, 120 bp, synthetic construct
  source 1..120: mol_type = other DNA
cactgactgttggtggttgaaatatatgattctctcctatgaaccaagatccaccagagacatttctcttatgaaagaaaccagctagtttccaatatggaattacccagaaatcccgct

SEQ ID NO: 27678 - DNA, 120 bp, synthetic construct; identical to SEQ ID NO: 8369
  source 1..120: mol_type = other DNA

SEQ ID NO: 27679 - DNA, 120 bp, synthetic construct
  source 1..120: mol_type = other DNA
ggaatgtaagtcagtgggtggattctgaacattgctaaagtgattgggggaaaaaacatgtttatttgttaaaatggaaatactcagtaatgacagggagctgaaatatttagacaaaac

SEQ ID NO: 27680 - DNA, 120 bp, synthetic construct
  source 1..120: mol_type = other DNA
agataaataagtagacatattccttttgtctgcttgcttatccaattaggcaagatacctatctctacttacattagttgcctggaacattattagcaaagccatcaccaaggtaacctg

SEQ ID NO: 27681 - DNA, 120 bp, synthetic construct
  source 1..120: mol_type = other DNA
cattttgccccagatttttaaaaacacgttttcaagtataccaaacttactgtttggttaagccatttccaatcaaatgtgatgcccttccacaggtcagggctgttacttacccaagga

SEQ ID NO: 27682 - DNA, 120 bp, synthetic construct
  source 1..120: mol_type = other DNA
ggtactactccttcagatgagaatatcacatgccatgttactctggtatcaaaggggcataaaactcaagtcttcctacagtgctagctggattttagcaaattggaaaatcattttagg

SEQ ID NO: 27683 - DNA, 120 bp, synthetic construct; identical to SEQ ID NO: 8370
  source 1..120: mol_type = other DNA

SEQ ID NO: 27684 - DNA, 120 bp, synthetic construct
  source 1..120: mol_type = other DNA
agactagaagcaatggctttcactaaaatggcctctagacactgtgtctatgtttcatttgacaatagcttttatttattgaccagcactgcgccaacagcattgtatacattatatgtc

SEQ ID NO: 27685 - DNA, 120 bp, synthetic construct
  source 1..120: mol_type = other DNA
tgacccagttagctagaatttggagcattgaattctagagacctctttcttatggggaatgaaggttgttccatgagattaacttctttcataagcatcactgcctctgggttgaatttc

SEQ ID NO: 27686 - DNA, 120 bp, synthetic construct; identical to SEQ ID NO: 8371
  source 1..120: mol_type = other DNA

SEQ ID NO: 27687 - DNA, 120 bp, synthetic construct
  source 1..120: mol_type = other DNA
aacattccagcttcatgcttcttctcataatttggctagcatctgttatttttgaaccaacaataatattattgcccttatcctacatatcaataaatttgaaatagcattattggccag

SEQ ID NO: 27688 - DNA, 120 bp, synthetic construct
  source 1..120: mol_type = other DNA
ataagagcttgccaaactggtttttggaattaaagactgttatttattaagaaattattcagttacctaattcaagctcaccatggtttccattatgttttaaattatgttatatgccat

SEQ ID NO: 27689 - DNA, 120 bp, synthetic construct
  source 1..120: mol_type = other DNA
attagcacagagtaacttcttccatttggcatttaataggatagtctcctacaaatattgtgaaaacattttctcatgtgctattggtaacagacaacattgcaaatggtttcattatca

SEQ ID NO: 27690 - DNA, 120 bp, synthetic construct; identical to SEQ ID NO: 8372
  source 1..120: mol_type = other DNA

SEQ ID NO: 27691 - DNA, 120 bp, synthetic construct
  source 1..120: mol_type = other DNA
acctttttccccccacaggtcaagaaaaaaacctgcaacttggatccaatataaacgatgacaaatttcaaagaagtggaagctaaattaatgaaaaatgttatgcaaaatgttttataa

SEQ ID NO: 27692 - DNA, 120 bp, synthetic construct
  source 1..120: mol_type = other DNA
cttttttgccggagtagcccatatcacagtggcagataaatgagcctttcgtgttttcacaggtcccacttaggcagatatttggattcaggtcacactcattgacatctgtaaaacata

SEQ ID NO: 27693 - DNA, 120 bp, synthetic construct
  source 1..120: mol_type = other DNA
tttagaggccaatttacatttgctcttcattctttacattgcaagctcattattcagactggctttcatctggcccataagcagcaggccagttaatcaaataaacagatgggctccatg

SEQ ID NO: 27694 - DNA, 120 bp, synthetic construct
  source 1..120: mol_type = other DNA
gcagcaggccagttaatcaaataaacagatgggctccatgctgagtttagagctcgtttatgtgacagtctagaaaactttttagaacagcatactctattgcaggatgaaaagtttaat

SEQ ID NO: 27695 - DNA, 120 bp, synthetic construct; identical to SEQ ID NO: 8373
  source 1..120: mol_type = other DNA

SEQ ID NO: 27696 - DNA, 120 bp, synthetic construct
  source 1..120: mol_type = other DNA
agagaaagaaaaactaggtgaatcctacaattgcccgagattactgaataggagagttttaacttcatggcataaggaggaggtaccagatggagccaggcactgtccttgagttgagga

SEQ ID NO: 27697 - DNA, 120 bp, synthetic construct
  source 1..120: mol_type = other DNA
gaaagcaatgccagagatttgctaagagtcttctgcaagtattcagatgagtagtgaccagcacattcatataaggaaacaaactactcaaggctggggaaagcactacccaagaaaatg

SEQ ID NO: 27698 - DNA, 120 bp, synthetic construct
  source 1..120: mol_type = other DNA
cacagggaattgggtagaatatccagaagggtcttacctcactaacagagcaaaattacccctagactaagtgtagcttaaaagcttaaaagcaagactttgaaagggatccatgtgttt

SEQ ID NO: 27699 - DNA, 120 bp, synthetic construct
  source 1..120: mol_type = other DNA
aatgaagcaggaaaatatgacctaaaataaggaagaaagtcaatttattcaaatgacctagaaccaatgcagatgacagaattaggagacaaagacactaaaagttgttataactgtatt

SEQ ID NO: 27700 - DNA, 120 bp, synthetic construct; identical to SEQ ID NO: 8374
  source 1..120: mol_type = other DNA

SEQ ID NO: 27701 - DNA, 120 bp, synthetic construct
  source 1..120: mol_type = other DNA
aaagtaatggataggcataaaagaaatgtccatctggagctgacgaatggccagtcagtcctcataacatatctgacaagagtaccatttaatagccacaagaaagctctctttggaatg

SEQ ID NO: 27702 - DNA, 120 bp, synthetic construct
  source 1..120: mol_type = other DNA
gaaaaattctgtcttctttgcttacctacacaagtcttcatgtcttcagatgccatgaatccatcataacacaagcacctgtactctccagggatatttgtgcactgaccaccatcacag

SEQ ID NO: 27703 - DNA, 120 bp, synthetic construct; identical to SEQ ID NO: 8375
  source 1..120: mol_type = other DNA

SEQ ID NO: 27704 - DNA, 120 bp, synthetic construct
  source 1..120: mol_type = other DNA
ttattataaatcttattttccctattgtcaaattataaatgcctgaattctatcaactgttttagcaatattttaaggtaagaattacttgaaataaccatacctacttagatgctctta

SEQ ID NO: 27705 - DNA, 120 bp, synthetic construct
  source 1..120: mol_type = other DNA
gcgattctcctgcctcagcctcccaagtagctgggattacaggcatgtgccaccacacccaactaattttgtatttttagtagaaatggggtttcaccatgttggtcaggctggtcttga

SEQ ID NO: 27706 - DNA, 120 bp, synthetic construct
  source 1..120: mol_type = other DNA
tttaagggacatttttctaggtcagtaaaataattttggttcctaaatccaaattctcttcttaagccaagccaaaatcaaagcctatgttattacccactttgtttctcacctctacct

SEQ ID NO: 27707 - DNA, 120 bp, synthetic construct; identical to SEQ ID NO: 8376
  source 1..120: mol_type = other DNA

SEQ ID NO: 27708 - DNA, 120 bp, synthetic construct
  source 1..120: mol_type = other DNA
ggtactatggtaagctctgtaaatactattttatgcaggcaatttgaacttcattttatagatgaggattctaataataggtatcttgattaaggatacagttaaaatatatgacaaaca

SEQ ID NO: 27709 - DNA, 120 bp, synthetic construct
  source 1..120: mol_type = other DNA
aggcattagtgcaaatcccggctgacagctacattcatagctgccttcagagtttgtgcagaaggtttcacaaccaccattcattatgctgcattcatcaatgtctaaaagaaatgaaaa

SEQ ID NO: 27710 - DNA, 120 bp, synthetic construct
  source 1..120: mol_type = other DNA
ttaagaggcagggcctttaaaagaggtaatcatcctatgagggctctaccctcatggtgggatcggtgctgttataaaagatcaagttcagccccctcttgctctctttcaccctcgtgc

SEQ ID NO: 27711 - DNA, 120 bp, synthetic construct
  source 1..120: mol_type = other DNA
tcaggtattctattacagtatcacaaaaatgggctaacacacctccctctgtgtttatgagcatggcacatttttaacatttccaggcatacgtcaaataaaggggaaaaagcattctag

SEQ ID NO: 27712 - DNA, 120 bp, synthetic construct; identical to SEQ ID NO: 8377
  source 1..120: mol_type = other DNA

SEQ ID NO: 27713 - DNA, 120 bp, synthetic construct
  source 1..120: mol_type = other DNA
ttgattggctgaggttccaatctttttcaataacctgagttgaagttctgagttgtcctgggccatgtttcagaaaactttgggctgatttatggttttgggtggaaaccatgtgagact

SEQ ID NO: 27714 - DNA, 120 bp, synthetic construct
  source 1..120: mol_type = other DNA
actaaacctacagagggctgaccacaaagcaaaattcttgtcccacaaaaacccatctttaaggagagccaggcatagcctcaattgcagtgtaagatatgaacattccatggtcttctt

SEQ ID NO: 27715 - DNA, 120 bp, synthetic construct; identical to SEQ ID NO: 8378
  source 1..120: mol_type = other DNA

SEQ ID NO: 27716 - DNA, 120 bp, synthetic construct
  source 1..120: mol_type = other DNA
gatccaaagatcgtgagccactataaaaagaatattgcagggaaacaagaaagataagtaaaagtagcgatgaaaacaaaactcagagtacatagagtgttttagggagagatgaaataa

SEQ ID NO: 27717 - DNA, 120 bp, synthetic construct
  source 1..120: mol_type = other DNA
gggttgcaggcacactgatacttccctatgaggttcacgcaacggccattggggcacaggtgtgcactcagctcacattcattgatgtctgtcgggaaaataagaagaacaaacacccaa

SEQ ID NO: 27718 - DNA, 120 bp, synthetic construct
  source 1..120: mol_type = other DNA
gggcattcacagcggtaacttccctctgtgttatggcaaacaccacctcggcataggagaggatctctctgacactcatcaatatctgcaaaatggaaatgaccatgttaaaggtggggg

SEQ ID NO: 27719 - DNA, 120 bp, synthetic construct; identical to SEQ ID NO: 8379
  source 1..120: mol_type = other DNA

SEQ ID NO: 27720 - DNA, 120 bp, synthetic construct
  source 1..120: mol_type = other DNA
tctagaagtgttggacagacatcttgtaaagggacctctactacagcttctgtctcaattgtcctctcttccgcctgggtatccatttcaggtgttaaaatcacttctcaagggcccaca

SEQ ID NO: 27721 - DNA, 120 bp, synthetic construct
  source 1..120: mol_type = other DNA
acctggaacataggctatgagccatcaaagcttcatggaatccttctctttctgtgttgatcaaatgatcccaaacttacccatgcagttcttcatcatcatgaatccactttcatagcc

SEQ ID NO: 27722 - DNA, 120 bp, synthetic construct
  source 1..120: mol_type = other DNA
cgtcaatgtctgcacaaaaacagcaagtggcagcaaatgagtctcaggacagccttaattcttgcgacaatatgttaaagataaagagttttaaaggacgtcccctctcctggcccttaa

SEQ ID NO: 27723 - DNA, 120 bp, synthetic construct; identical to SEQ ID NO: 8380
  source 1..120: mol_type = other DNA

SEQ ID NO: 27724 - DNA, 120 bp, synthetic construct
  source 1..120: mol_type = other DNA
tttcaaatttctacattttataaagcattgttaaagaagcaaataatgtgtctattcagacttctagggcccagcacactgcctgacacatagtgaatatttaaccactacttgctgagt

SEQ ID NO: 27725 - DNA, 120 bp, synthetic construct
  source 1..120: mol_type = other DNA
ctgtttggtgcttttttggatatgccaaaaatataaaaatttcaaagatataatttataatttaaattatttgcaaataatttgtacaatttaaaaatattttcttaatgtatatacctt

SEQ ID NO: 27726 - DNA, 120 bp, synthetic construct
  source 1..120: mol_type = other DNA
gccatctgagtagctgggattacaggtgtgcaccaccatgcctagatatttttttttttttttttttttttttttttgtagacacagggtttcaccatgttgcccaggctggtcttgaac

SEQ ID NO: 27727 - DNA, 120 bp, synthetic construct; identical to SEQ ID NO: 8381
  source 1..120: mol_type = other DNA

SEQ ID NO: 27728 - DNA, 120 bp, synthetic construct
  source 1..120: mol_type = other DNA
acgtaactgacatttaagagggccacctagaaactatctgaaactatctctccatacagaacaattttaacccccaggacttcttggaccaaacagttaaaaacaaaaagttcatacttt

SEQ ID NO: 27729 - DNA, 120 bp, synthetic construct
  source 1..120: mol_type = other DNA
gaaaacgtaacattgtacctttgaagaaaggctttccatttgtaatttcttttgtggcaaatccgggtcctctcggacacagctcctcgtactcaggagtatttctcatgggacactcct

SEQ ID NO: 27730 - DNA, 120 bp, synthetic construct
  source 1..120: mol_type = other DNA
ggatatctgtcagagggaatcaagggaggttaaatagagccacacggcttccactgccccaaactgccaacactctgttaggtaaaatactgcacacataataatttgctgtatacttat

SEQ ID NO: 27731 - DNA, 120 bp, synthetic construct; identical to SEQ ID NO: 8382
  source 1..120: mol_type = other DNA

SEQ ID NO: 27732 - DNA, 120 bp, synthetic construct
  source 1..120: mol_type = other DNA
attgttggagcgtgtctgccctagtgcaatcaccttttcctccgacccacttcatttttggaaaggtggaatgatgaactctggaaagaggactgctttacttgagattaaagagaaaaa

SEQ ID NO: 27733 - DNA, 120 bp, synthetic construct
  source 1..120: mol_type = other DNA
ttataaagaagagcagaaagcctagcagagcagaggtcagaagagctggattttggtcctcttctgtaactcagtggattgtcttcaataaattatcctaaacctgaatttccacatctg

SEQ ID NO: 27734 - DNA, 120 bp, synthetic construct
  source 1..120: mol_type = other DNA
ttgaaatgtaagatgtatcttccttctctttctccttcacaatggggtcattaacaatatatctaactccctgggtttcctctaacgttagaaagtttttgaagtctttatattcagctt

SEQ ID NO: 27735 - DNA, 120 bp, synthetic construct; identical to SEQ ID NO: 8383
  source 1..120: mol_type = other DNA

SEQ ID NO: 27736 - DNA, 120 bp, synthetic construct
  source 1..120: mol_type = other DNA
taggccggactgcagtggcactatctcggctcactgcaagctccaactcccgggttcatgccattctcctgcctcagcctcccgagtagctgggattacaggtgcccgccaccgtgcctg

SEQ ID NO: 27737 - DNA, 120 bp, synthetic construct
  source 1..120: mol_type = other DNA
gagccatcgcacccggcccacttttttaactacctacaatagtcttcactgagcctacacttcaaagtaatgtggtttcagatgcaaagtacaggtaagcatcatttccagagtcatgaa

SEQ ID NO: 27738 - DNA, 120 bp, synthetic construct
  source 1..120: mol_type = other DNA
ttagatgcatgagatgtgcgatctcaaacttgccactatcacgagcccatagggacttaggacttagagttctaaggacttagggttggggtgagacaatttggctagaggatcccattt

SEQ ID NO: 27739 - DNA, 120 bp, synthetic construct; identical to SEQ ID NO: 8384
  source 1..120: mol_type = other DNA

SEQ ID NO: 27740 - DNA, 120 bp, synthetic construct
  source 1..120: mol_type = other DNA
aactgtgatgctagtgatttaaggaatagttgcatatcaacagaaactacagttgctgcttactatttgaaagactgtcaaaggagtggccatggaccctatcggacatgctgaattttg

SEQ ID NO: 27741 - DNA, 120 bp, synthetic construct
  source 1..120: mol_type = other DNA
ttcctgtggcatccaaagtcattccactgggacactgacacttgaatgaccccctagtgttaacacacaggccatttttacacactcctgggaacacttcacattcatctatatctaaaa

SEQ ID NO: 27742 - DNA, 120 bp, synthetic construct
  source 1..120: mol_type = other DNA
agtagtttgtgtagaatttctagggtgcctgaatagcaaccagaacgagcccacctattactaaatatgtaagagtttctccattggtttcagggaataacttttgagttgtagagacag

SEQ ID NO: 27743 - DNA, 120 bp, synthetic construct
  source 1..120: mol_type = other DNA
atgagaccagatgtctggaaatgagtagagaagcaaaaacctggtttttcaaactagcaaagaagaaacagcttgaagttcagcatagaaaaatatcccaccaaggaatatgtgggccag

SEQ ID NO: 27744 - DNA, 120 bp, synthetic construct; identical to SEQ ID NO: 8385
  source 1..120: mol_type = other DNA

SEQ ID NO: 27745 - DNA, 120 bp, synthetic construct
  source 1..120: mol_type = other DNA
atacacactgtgtctctatttagaagaaataactttccacaacaggaatgttgaaaaaatattctgaatctttccttgtaagagagatcaatggggagagggtggaatctacctttttgg

SEQ ID NO: 27746 - DNA, 120 bp, synthetic construct
  source 1..120: mol_type = other DNA
gaccttgggtgggggttgtagtgtgcctctttgttttaacagggaaaaaacttcatttcatcccacatatgggactaattgctgtttttaaaatttttcagctgctgtgtcatgtcaggt

SEQ ID NO: 27747 - DNA, 120 bp, synthetic construct; identical to SEQ ID NO: 8386
  source 1..120: mol_type = other DNA

SEQ ID NO: 27748 - DNA, 120 bp, synthetic construct
  source 1..120: mol_type = other DNA
gttctcattattttttttctctgctgcatatttctccctgtgaagttatatgacagctttatccagtccgagttaacacaaacattcattatgcacacaaaaatgtatggtttataagta

SEQ ID NO: 27749 - DNA, 120 bp, synthetic construct
  source 1..120: mol_type = other DNA
tttgcagttctgacatagtgtaagaaacatgaaagatgacctggaacatgaagtagattgtgttgctataagtatgagataacaaaatgtttctgcgattgcataggtgaggaagaacag

SEQ ID NO: 27750 - DNA, 120 bp, synthetic construct
  source 1..120: mol_type = other DNA
aagtgatagctaagagggaaactgaaggtagctttctctcttgctgttcacctgaaaataggaatcacactatagaattactttaacctgaatatagaaaactcaagtctataatttgga

SEQ ID NO: 27751 - DNA, 120 bp, synthetic construct
  source 1..120: mol_type = other DNA
gaaacccttatgaagtttagtcatgaataccggtttctttacatcaattagctttttgaaagataatctgtacctataaaaagctcagaacccctaaccacaaggttcccaagagagctg

SEQ ID NO: 27752 - DNA, 120 bp, synthetic construct; identical to SEQ ID NO: 8387
  source 1..120: mol_type = other DNA

SEQ ID NO: 27753 - DNA, 120 bp, synthetic construct
  source 1..120: mol_type = other DNA
ggctccattgatgttgatctcacatcgcccatcaatgacagtctgccagcaagtgcccttgatggtttctgcagaggagggaataatatttaatagaatctatataaaaattcaaacata

SEQ ID NO: 27754 - DNA, 120 bp, synthetic construct
  source 1..120: mol_type = other DNA
taaacatagaaaaatcattctcagaaagataaatacctatgcagatggtttttgttggatccaaagtactttcagaagaacattcacaaataaaagagcctgggctgttcttgcagactc

SEQ ID NO: 27755 - DNA, 120 bp, synthetic construct
  source 1..120: mol_type = other DNA
acatatccttaatcccacacagtaaagctgggctaaatagtttttcctacactagatggaatgccaaaataataactctatagtatagactagtacatctctatagtatagaatacggga

SEQ ID NO: 27756 - DNA, 120 bp, synthetic construct; identical to SEQ ID NO: 8388
  source 1..120: mol_type = other DNA

SEQ ID NO: 27757 - DNA, 120 bp, synthetic construct
  source 1..120: mol_type = other DNA
acaaaacttccaggagtatttctacattgtccattgtcacaaaggagactgttcagtacacattcattaatatctgcaaagtcaatgaaaataaacacttaaaaagggcccaaactttgc

SEQ ID NO: 27758 - DNA, 120 bp, synthetic construct
  source 1..120: mol_type = other DNA
acagaggcttgacctggttttaaactaagtatctaaactaaatatctacaaagcctaaagtcactaggctatttaattcacttatttctttagcaggaagaaaatacagatttgctggaa

SEQ ID NO: 27759 - DNA, 120 bp, synthetic construct
  source 1..120: mol_type = other DNA
gtccaactttgaaatgtgttagttccagaatgggtgtttcttccttataataattcaaattgtctccaggtatgattataaagtacaaagtaatctgtagcatttatgattgtcatgggg

SEQ ID NO: 27760 - DNA, 120 bp, synthetic construct; identical to SEQ ID NO: 8389
  source 1..120: mol_type = other DNA

SEQ ID NO: 27761 - DNA, 120 bp, synthetic construct
  source 1..120: mol_type = other DNA
tactaaagatatgtatatgctgtgctaacatccgaagtataaagtgtccatttgcccagtcctctaagctactcaaaggcagttttctcccagcaatgaaagaaggaatgcattatgcag

SEQ ID NO: 27762 - DNA, 120 bp, synthetic construct
  source 1..120: mol_type = other DNA
gtttttcccagttgaatccacttcatatcctgaattgcatatacatttataggtcccacgaaggttttcacagattccatttgggcaaatatcaggatctagtgcacattcatttatatc

SEQ ID NO: 27763 - DNA, 120 bp, synthetic construct; identical to SEQ ID NO: 8390
  source 1..120: mol_type = other DNA

SEQ ID NO: 27764 - DNA, 120 bp, synthetic construct
  source 1..120: mol_type = other DNA
tttcttccatctaccctgcactactctacactgcaaccattcttaccatcctaaaaacaaggtattatatcgttctcatggttcaaactttcataggttcaacaatatcctcaagataaa

SEQ ID NO: 27765 - DNA, 120 bp, synthetic construct
  source 1..120: mol_type = other DNA
actaaaatataaattctttgtttacttatcccagacttcacactcttctatgaacatataatgccctcttcactctgtgtcaggaatgcttggagcaggcctatttacaggtcaaaagcc

SEQ ID NO: 27766 - DNA, 120 bp, synthetic construct
  source 1..120: mol_type = other DNA
caactgaggagggaatctcatagtcaaggcaggtgcagaatgacaaccagtgaatggatagtctcaaatcctggtgcctgactcttctataaattagggttgactttttttttttcttcc

SEQ ID NO: 27767 - DNA, 120 bp, synthetic construct
  source 1..120: mol_type = other DNA
actaatcatactgaatgaactgacaatcaattcagccagtccatgttctttcagatctccctgaatcaaactatgtagctttatattaataaaataatcccttcctctttcttgtcacct

SEQ ID NO: 27768 - DNA, 120 bp, synthetic construct; identical to SEQ ID NO: 8391
  source 1..120: mol_type = other DNA

SEQ ID NO: 27769 - DNA, 120 bp, synthetic construct
  source 1..120: mol_type = other DNA
aatcctagagcccacagtgccccggctgctctgccactgaaggcttctgagcatcccagatacatggcacagtgatggccagagagggagtcaggccagactagtgtaaagggatcaact

SEQ ID NO: 27770 - DNA, 120 bp, synthetic construct
  source 1..120: mol_type = other DNA
attccgctgcaataaattaacagatagtaaatgattcccttgtttgcagaacaggtagatcctgcccttggttttgcacacatcatttcctccaaagtgagtagaaccaaacttaagtgg

SEQ ID NO: 27771 - DNA, 120 bp, synthetic construct; identical to SEQ ID NO: 8392
  source 1..120: mol_type = other DNA

SEQ ID NO: 27772 - DNA, 120 bp, synthetic construct
  source 1..120: mol_type = other DNA
tttctctctgcaaattctctagcctcctctcacaagagcaacaacagaatacctactcttgcatttaagtgtatttttaaagttaatatgtatcaggatactggattcattctctatggt

SEQ ID NO: 27773 - DNA, 120 bp, synthetic construct
  source 1..120: mol_type = other DNA
taccatgttttatatacaattccaacaatacttaacataagagtgaatgatgaaaatgtagaactaactggaatcacactatccaaggaaaggaaactagtgtccccttaagttgccaat

SEQ ID NO: 27774 - DNA, 120 bp, synthetic construct
  source 1..120: mol_type = other DNA
ggcttattgtagaggctgactgcacctcactgctgaagcaaatagttcctatcccctgcatgccagagaattgcatcctgatgacattggaggtaaatgagttatacaaccaaagattat

SEQ ID NO: 27775 - DNA, 120 bp, synthetic construct
  source 1..120: mol_type = other DNA
acagatgggaaggtgtgtttgaaagccaggtgtgggaacaaaaagaaattcatcttttttattctgctgtatcagcaaaaagctaaaatatgcatgaaatactgtaagtaataaaacaag

SEQ ID NO: 27776 - DNA, 120 bp, synthetic construct; identical to SEQ ID NO: 8393
  source 1..120: mol_type = other DNA

SEQ ID NO: 27777 - DNA, 120 bp, synthetic construct
  source 1..120: mol_type = other DNA
tattataaacacatagtgaggggtaggtgttgatgagctaactccgcgtagtgccatggagacagtgacatgagggatccatgagaaaatccccccgaattaccctcctgtgggtttaac

SEQ ID NO: 27778 - DNA, 120 bp, synthetic construct
  source 1..120: mol_type = other DNA
ttgctgaacaatgtgaatcagctccagcaaccagtgagaaacagcttcatatgtagcttgcctgacttgcagaccacaaagatgaacttcagattttgtatatttggagtctctccctca

SEQ ID NO: 27779 - DNA, 120 bp, synthetic construct
  source 1..120: mol_type = other DNA
tgaatgaaactacttccatgtgtggacccttttttgggtaaattcattcaaatataagacaaaagttagtggaaccgggccttacatttaactctctttaagctttactgttgctttggt

SEQ ID NO: 27780 - DNA, 120 bp, synthetic construct; identical to SEQ ID NO: 8394
  source 1..120: mol_type = other DNA

SEQ ID NO: 27781 - DNA, 120 bp, synthetic construct
  source 1..120: mol_type = other DNA
tttctgttactgcaacaaaaactggactaagacaactgcttaaagaaatctggtcttttggtcacctttttataaacccacataatttccctgtggattttaagaattctttggaagtgc

SEQ ID NO: 27782 - DNA, 120 bp, synthetic construct
  source 1..120: mol_type = other DNA
caccaaggttcctggattctaaatcttggctcttccaatcattcaacatgtgaacaagtcacctgtactcttgtgtgccagctttcatgatacttgtctgtattgcaaattcaaagtagg

SEQ ID NO: 27783 - DNA, 120 bp, synthetic construct
  source 1..120: mol_type = other DNA
ataaacacatattgaactgattggtgatcatacataaaatgataatttctatattattcaccgggtgaagtcattagccagagcagtttttttctttaaataggcatccctcatttcctt

SEQ ID NO: 27784 - DNA, 120 bp, synthetic construct; identical to SEQ ID NO: 8395
  source 1..120: mol_type = other DNA

SEQ ID NO: 27785 - DNA, 120 bp, synthetic construct
  source 1..120: mol_type = other DNA
agtgtattttaatttccaactgttactttcaaatactatcatttttaaaataacaaatcttttaaaattatgatttactctttaatttgtttcctttagggcagaaataaactgactaaa

SEQ ID NO: 27786 - DNA, 120 bp, synthetic construct
  source 1..120: mol_type = other DNA
acattgttttaatttcagtaatctattcttgttttataaatagaaataatttacaactggacaggaccttttggattatctaaggcaactcattttgtagatgaagtgtctaaggatagc

SEQ ID NO: 27787 - DNA, 120 bp, synthetic construct; identical to SEQ ID NO: 8396
  source 1..120: mol_type = other DNA

SEQ ID NO: 27788 - DNA, 120 bp, synthetic construct
  source 1..120: mol_type = other DNA
tatggtgaaacctcgtctctactaaaaatacaaaaattagccgggcgtggtggcgcacacgtgtaatcccagctactcaggagtttgaggcagagaatcacttgaacccgggaggcggag

SEQ ID NO: 27789 - DNA, 120 bp, synthetic construct
  source 1..120: mol_type = other DNA
aaatcaatacgtgggatgtaaacaaaatttacaaatggccttttggaaagctagtggaaatagtcaagtaatatgacagttatttacttttacgctgtgtaaaagtctgcttttataata

SEQ ID NO: 27790 - DNA, 120 bp, synthetic construct
  source 1..120: mol_type = other DNA
acaaggcaaggtgcatgtattgcaaacagcttgagtattattgaggtaggagagtttatacgagaggcacaaatgcaatgcctattccaaataattatgaggcttagataagtacctgtg

SEQ ID NO: 27791 - DNA, 120 bp, synthetic construct
  source 1..120: mol_type = other DNA
aattccacaaatgcaaagacctcaatggtggcagaaggctggcagtacgagggcatctccatgataccacatacctgaattctgtgcaggacacggctggcaaggttccccaaatgcata

SEQ ID NO: 27792 - DNA, 120 bp, synthetic construct; identical to SEQ ID NO: 8397
  source 1..120: mol_type = other DNA

SEQ ID NO: 27793 - DNA, 120 bp, synthetic construct
  source 1..120: mol_type = other DNA
tgaggcccttcaatgctggaattatatctcacttattttgtctttctcgggcctgtgcagagcaggcacttaataaatgttgaattaatgatggatgaatgttgaatctcacatcctgct

SEQ ID NO: 27794 - DNA, 120 bp, synthetic construct
  source 1..120: mol_type = other DNA
aatatgtagatgttggtcaactaagctgtgttatctttaccaccaggaagacagtctcctgctatgccctatccttttccaattcaaatggcttactgagtacctttcttaaaaataatc

SEQ ID NO: 27795 - DNA, 120 bp, synthetic construct
  source 1..120: mol_type = other DNA
gacatcaattctctattaaaatgttcatcatgagataatagcatatgcacatcaatttcaatgaccaatatcaacaaaggaggcctggagaaaactgaagacagctacgggattagggaa

SEQ ID NO: 27796 - DNA, 120 bp, synthetic construct; identical to SEQ ID NO: 8398
  source 1..120: mol_type = other DNA

SEQ ID NO: 27797 - DNA, 120 bp, synthetic construct
  source 1..120: mol_type = other DNA
gcagagaaaggcacttattaaaaatgaagtgacatttatctaaaattataacatgttgacaattatgttttaacccttgaaaatggggaagataggaaataatatgcagcatcagcaaca

SEQ ID NO: 27798 - DNA, 120 bp, synthetic construct
  source 1..120: mol_type = other DNA
gtatccaaaataatcacaaaggcaaaaacagaatcagaggaaggagaacaatggctgctaaaagacaaagggttttgtgaaatgtataaccagggtagctcttccagggctctcagaaat

SEQ ID NO: 27799 - DNA, 120 bp, synthetic construct
  source 1..120: mol_type = other DNA
gtcttggctctctgggaaaattcgcctaaaattaaaggatatacaactaaagccttgatggaacaccacagaaaaagaacagaaaatgaatatagattattttcatgaccattcttggcc

SEQ ID NO: 27800 - DNA, 120 bp, synthetic construct; identical to SEQ ID NO: 8399
  source 1..120: mol_type = other DNA

SEQ ID NO: 27801 - DNA, 120 bp, synthetic construct
  source 1..120: mol_type = other DNA
atcagctgggcatgatggcatgcggctataatcccagcaacttgggaggctgaggcgcaagaattacttgaacccaggaagcagaggttgcagtgagctgagattgtgccactgcactcc

SEQ ID NO: 27802 - DNA, 120 bp, synthetic construct
  source 1..120: mol_type = other DNA
ctcctgaccttaaaaaggcaaattgagagtaaaacaccttcgtgttttacttagcttgtgttgtttggcacaaaatatattcgggtggtccaaggttctgtgtacagattgtatttgaaa

SEQ ID NO: 27803 - DNA, 120 bp, synthetic construct; identical to SEQ ID NO: 8400
  source 1..120: mol_type = other DNA

SEQ ID NO: 27804 - DNA, 120 bp, synthetic construct
  source 1..120: mol_type = other DNA
acatctttgtgggctcagaactaagtgctcagggctaggagaaaatcttaccctatggcataaagacaaaaattataaaaaggaagaaatccagtatacatgggattaatttcttttttc

SEQ ID NO: 27805 - DNA, 120 bp, synthetic construct
  source 1..120: mol_type = other DNA
gaatgctaaagtcagaacaaaccatccatatcatcagcactttcaaattaatagaacaaccaatttattgataggatactatttcactggttgccaatggttgccaaacctggtttcatc

SEQ ID NO: 27806 - DNA, 120 bp, synthetic construct
  source 1..120: mol_type = other DNA
ttatgtattctcctaggtctgctcacaaaggggctttcatatctctttctattatttttttttggaagcctaattccaaatattccagcaatcattctcttcccttttcttttttacttg

SEQ ID NO: 27807 - DNA, 120 bp, synthetic construct; identical to SEQ ID NO: 8401
  source 1..120: mol_type = other DNA

SEQ ID NO: 27808 - DNA, 120 bp, synthetic construct
  source 1..120: mol_type = other DNA
gcaccataggactttattctgctttcctctaccttgaatagcttgaccctctacacttctgcatctgaaactatgcccagaagctctaagtgcagcattttagcagattttctggacctg

SEQ ID NO: 27809 - DNA, 120 bp, synthetic construct
  source 1..120: mol_type = other DNA
agacaggagacactaagcacaaatttgtctccagtaacttttcttaggaccccaattctcaacagcaaaaataaaaatcctcatttttgcttcgatacctggggcaatgagattatttca

SEQ ID NO: 27810 - DNA, 120 bp, synthetic construct
  source 1..120: mol_type = other DNA
ctgtgtcttaagatgcctagaggaaattatgaggaagagatcattgcaaataacagtctacactattctgtccaggtaaagatgtaagaggtggcaaataacagccaccaagaagcctaa

SEQ ID NO: 27811 - DNA, 120 bp, synthetic construct; identical to SEQ ID NO: 8402
  source 1..120: mol_type = other DNA

SEQ ID NO: 27812 - DNA, 120 bp, synthetic construct
  source 1..120: mol_type = other DNA
cgtccatctgatgccagctggaatccaggtttgcaaatacatttaaaactgccatcttcattgatacacattccattaaggcacatgttccttatgctgcattcatccatatctgaaaat

SEQ ID NO: 27813 - DNA, 120 bp, synthetic construct
  source 1..120: mol_type = other DNA
tcatccaaataagatcatctaaggaaggagaagatgggacatatgaaatacatatctcaagttcttgagttttggcatgtgcatgcaaactctagggctagatgtataggtatatctatt

SEQ ID NO: 27814 - DNA, 120 bp, synthetic construct
  source 1..120: mol_type = other DNA
tgctctgaatatgaacataagtcaaaactaagattagtggaatttgaaatgtatttaggctacatcctaattcttttaaagatgaaaaccagaagataacttgtagtttgaagcaatttt

SEQ ID NO: 27815 - DNA, 120 bp, synthetic construct; identical to SEQ ID NO: 8403
  source 1..120: mol_type = other DNA

SEQ ID NO: 27816 - DNA, 120 bp, synthetic construct
  source 1..120: mol_type = other DNA
aatatgtattttatgaatattatctattacatattcagaaatacatatatacataatatatatacacatattacatatatagaaaatatacataacatgtatttttacattatatctatt

SEQ ID NO: 27817 - DNA, 120 bp, synthetic construct
  source 1..120: mol_type = other DNA
gtacaaattctgattgtaaaaaattagaaagtatgaaattgtgccacagaagtttcatcacaccagggatctttaaatggcaagctctcctagcatattaaaatgttatttgattcacac

SEQ ID NO: 27818 - DNA, 120 bp, synthetic construct
  source 1..120: mol_type = other DNA
tattgaaactgcaatggaaggagaggactaacattagtatactattattaccttcacagttcttcccatctcgtgtaacatgaaagcccgcattacacacgcaatgaaaactgccatctg

SEQ ID NO: 27819 - DNA, 120 bp, synthetic construct; identical to SEQ ID NO: 8404
  source 1..120: mol_type = other DNA

SEQ ID NO: 27820 - DNA, 120 bp, synthetic construct
  source 1..120: mol_type = other DNA
tcaaataatgtgatatttagggttatcagagttgaaaagacatgataaaaaacctgtataatggcattagatgtaactctaatttctaataagactccttaaatccgaagtctgtaaaca

SEQ ID NO: 27821 - DNA, 120 bp, synthetic construct
  source 1..120: mol_type = other DNA
atctcagaacaatacaacatatgctatttttttaaacaatcaccttaattctgcctgaaaaccgtcaatcacatctctaaaatgtccatcttccttataccaattctggtttacgtgcag

SEQ ID NO: 27822 - DNA, 120 bp, synthetic construct
  source 1..120: mol_type = other DNA
gccaaggtacacaacagagcttgacacggaagtgttaaaataacaataactgaaacaacctgtatctgatttctcccttaaatattaacaatctacccaaagtggatagcatggttccct

SEQ ID NO: 27823 - DNA, 120 bp, synthetic construct
  source 1..120: mol_type = other DNA
acagggaccaagaaactatgtggagttggatgcgagcattcctatctatgcagagttgaggtcacatttgtctgagtataagtgccctaaatatcccctgaacaatgagcacgtgcgttc

SEQ ID NO: 27824 - DNA, 120 bp, synthetic construct; identical to SEQ ID NO: 8405
  source 1..120: mol_type = other DNA

SEQ ID NO: 27825 - DNA, 120 bp, synthetic construct
  source 1..120: mol_type = other DNA
ttcagaatgtcatggggttccccattgccctataagacaaatttaaagcttgtcattcaaagttctcctctactgtgtttctgcccatccttctatccccttctactcggcccctcactt

SEQ ID NO: 27826 - DNA, 120 bp, synthetic construct
  source 1..120: mol_type = other DNA
aggcagtgctttaagtattcaggtcatcctcagtctccaatactaagtctcagattgataacaaccacatacatgagtttatactggctggtccttgccccagctgagtgctctcaataa

SEQ ID NO: 27827 - DNA, 120 bp, synthetic construct; identical to SEQ ID NO: 8406
  source 1..120: mol_type = other DNA

SEQ ID NO: 27828 - DNA, 120 bp, synthetic construct
  source 1..120: mol_type = other DNA
gaagagcttttgctaaaagaggcaaataagattaactcttgtcaatggctaccaattttctaaagtgatataaacctcgctatcttttacttaacttttaaaaaacttttaagtttaggg

SEQ ID NO: 27829 - DNA, 120 bp, synthetic construct
  source 1..120: mol_type = other DNA
cctccaaccctccaccctccaataggccccggtgtgtgttggtcccttctatgtgtccatgtgtcaccatttagctcccacttaaaagtgagaacatgcagtatttggttttctgttcct

SEQ ID NO: 27830 - DNA, 120 bp, synthetic construct
  source 1..120: mol_type = other DNA
tccagtctatcattgatgggcccttttatttaactttaacagagtatttgcctgttttttttttctgtctttactgaattaatgatacagttcattttgtgcttaatttagagatagaga

SEQ ID NO: 27831 - DNA, 120 bp, synthetic construct
  source 1..120: mol_type = other DNA
tcttatttatttctgttttagaaactcagtacataagagtcatttaataaaaggcatattgggtggcttaataaattagttaataaacctgatgggaaattttttatgaggggacattta

SEQ ID NO: 27832 - DNA, 120 bp, synthetic construct; identical to SEQ ID NO: 8407
  source 1..120: mol_type = other DNA

SEQ ID NO: 27833 - DNA, 120 bp, synthetic construct
  source 1..120: mol_type = other DNA
aaaataacttcaatgcttgccagattttatgacactgtctttcagaatgacaataggtggaactaagttcaaaaaagccacgggactgtattagtctcttccggcatgggttatttaaac

SEQ ID NO: 27834 - DNA, 120 bp, synthetic construct
  source 1..120: mol_type = other DNA
cactgacaggtgtacgaaccctggttgttaatacactcaccaccagcacaggggtttttctcacattcatcaacatctgcaaagcacaatgtattttagtgcaaaattacatagcaatac

SEQ ID NO: 27835 - DNA, 120 bp, synthetic construct
  source 1..120: mol_type = other DNA
gatcttttttctttccactacaatatgtcattagccatttgaagactggttgagcagttaaagtgtattattttcatgtgtcattttgcagagaaaaattccaaacatgtagcaactcaa

SEQ ID NO: 27836 - DNA, 120 bp, synthetic construct; identical to SEQ ID NO: 8408
  source 1..120: mol_type = other DNA

SEQ ID NO: 27837 - DNA, 120 bp, synthetic construct
  source 1..120: mol_type = other DNA
aaatttagcaaagataacccacttgtccacatgcttcttagtgccagatacagatttgacctcacattccgcaaccctgagttagatgttcccacttctactcagctctggatgacctct

SEQ ID NO: 27838 - DNA, 120 bp, synthetic construct
  source 1..120: mol_type = other DNA
acttattttaaaaacaagttgataggagctgagtgttcttatccaatccaaaaattgattattctttcattacatttcctcccttcaccagcttaaatgcctcatcagcaatttaaactt

SEQ ID NO: 27839 - DNA, 120 bp, synthetic construct
  source 1..120: mol_type = other DNA
cttttggtagggtgtcttaaattggagttaccagaaatgatttgagtatcttttacaatgaaagttaaaagtaactttaataggcagaataatgacctcccaaatatgctcatgtcttaa

SEQ ID NO: 27840 - DNA, 120 bp, synthetic construct; identical to SEQ ID NO: 8409
  source 1..120: mol_type = other DNA

SEQ ID NO: 27841 - DNA, 120 bp, synthetic construct
  source 1..120: mol_type = other DNA
ctactaacctacagagctgaaagataatttaaatttgtattgtattaagccaccaagtttggggtaagttgttacagcagcaatagaaaaccagtagagtcaaggaacagaattacaaca

SEQ ID NO: 27842 - DNA, 120 bp, synthetic construct
  source 1..120: mol_type = other DNA
tgacagagatagcggaccaactggcagtaatcagtaacgtttactggcagcacccctagaagaacattaagccccattaaaattattttaactatggtatctttcatcagtacttaatct

SEQ ID NO: 27843 - DNA, 120 bp, synthetic construct
  source 1..120: mol_type = other DNA
actggggagctcacaacccagctgcagcctgcttttctctgccctcttcaccacctcactctcaaacctctagtttgcagaaataacaaaggcagagagatattggtattgaactactta

SEQ ID NO: 27844 - DNA, 120 bp, synthetic construct; identical to SEQ ID NO: 8410
  source 1..120: mol_type = other DNA

SEQ ID NO: 27845 - DNA, 120 bp, synthetic construct
  source 1..120: mol_type = other DNA
aaaataactagatgatttttgaattcttacttggtggctcccgagatggatacagatattccactggtggtcgagggaccggaatttgaggtccaggaggaaagccaggaggaacaggga

SEQ ID NO: 27846 - DNA, 120 bp, synthetic construct
  source 1..120: mol_type = other DNA
agctgagctgtagcttatgatcataggcccacagaagtcatccttatttttttaaagatatttttgaataaaattgatcctcaaaattcacaggtcaactggagaaaagaaaaagaacca

SEQ ID NO: 27847 - DNA, 120 bp, synthetic construct
  source 1..120: mol_type = other DNA
tggaaaacataaaagtactactttctccatccagtcccacctgtggattccacagggctctacagaatacattaaaaaatttgaattttattttatgcgcagtgcaaaaccactggatgt

SEQ ID NO: 27848 - DNA, 120 bp, synthetic construct; identical to SEQ ID NO: 8411
  source 1..120: mol_type = other DNA

SEQ ID NO: 27849 - DNA, 120 bp, synthetic construct
  source 1..120: mol_type = other DNA
gatagcagatttggtgggtagaaaccaagttccattttgaacataggagttttgagatatcagacatccaagtggagctatcacttcgcagttgtaaaagacagtgtgaagcttagacga

SEQ ID NO: 27850 - DNA, 120 bp, synthetic construct
  source 1..120: mol_type = other DNA
gaaccctgaagaatactgattcgtaaaagaaagcaatatcaatggagaagtggcccataagggaggagaaacaccaaggggtgtgggtcgggtatgaatgctgcatagtgaccctctgaa

SEQ ID NO: 27851 - DNA, 120 bp, synthetic construct; identical to SEQ ID NO: 8412
  source 1..120: mol_type = other DNA

SEQ ID NO: 27852 - DNA, 120 bp, synthetic construct
  source 1..120: mol_type = other DNA
atttaacttattttcagacagtaataggtcttactgaaatgcattcatatttcaacctcacgggacattctgccaatttacatgaggttaaataggaaagtactgttggtactttctggt

SEQ ID NO: 27853 - DNA, 120 bp, synthetic construct
  source 1..120: mol_type = other DNA
tactgacgtacttgaatgtatttgtaaaggaattctatgttgttcatgcttccctgactcaagatgtctcaatcctgtttgtcaaccaacagtgattcttcctatagatttatcatctgt

SEQ ID NO: 27854 - DNA, 120 bp, synthetic construct
  source 1..120: mol_type = other DNA
gccctgcaaattgcacataacaggaattcattaactatgtgttaattttattaaatgacagttacattaaggaactcactttgcttccaagcatttgtaggtaccaattcggcctttctt

SEQ ID NO: 27855 - DNA, 120 bp, synthetic construct; identical to SEQ ID NO: 8413
  source 1..120: mol_type = other DNA

SEQ ID NO: 27856 - DNA, 120 bp, synthetic construct
  source 1..120: mol_type = other DNA
ggaacatttggacaaacaaaaacctacctgcaagttattttgctctataaatctgttttgcccaaggcctctgagggctgtgcatctctcagtggtatacctgggaggacagctccctgt

SEQ ID NO: 27857 - DNA, 120 bp, synthetic construct
  source 1..120: mol_type = other DNA
acatcaaagctgctgattcctaagttaacatatgcattttaaaagccattctcctggtacctaagccatgtcttagtaggaagtcatgtgcttctaaacagtgatctactaaatggtccc

SEQ ID NO: 27858 - DNA, 120 bp, synthetic construct
  source 1..120: mol_type = other DNA
tcaattggtgggaaagatgttgcctaataagttgctctctgtatttgaatgcctcctataagcaagattttgctaaatactatggaagtgtaaaaagcatgagaaatatgagactacaat

SEQ ID NO: 27859 - DNA, 120 bp, synthetic construct
  source 1..120: mol_type = other DNA
ggagcacttccagctgcaggtacctcgggatattcatggattaggtcatgtttgagcagatccttaacaagaaaagaggatatataacaggcaaggatggcaggagtagggagaaagagc

SEQ ID NO: 27860 - DNA, 120 bp, synthetic construct; identical to SEQ ID NO: 8414
  source 1..120: mol_type = other DNA

SEQ ID NO: 27861 - DNA, 120 bp, synthetic construct
  source 1..120: mol_type = other DNA
ctcaattagtcaaaaggtgtctcctttttctcccctagacacaattttttaaactgaacttcactgactcatactttgggaaaggtacatggcaatggtggatttcagagactagttagg

SEQ ID NO: 27862 - DNA, 120 bp, synthetic construct
  source 1..120: mol_type = other DNA
aaggaaaaaaaaaacaagcaggacttagcaggaaggaaagagtccaatgttaggaaaaaggaaatgtgtctcctgaacaacttacctgaaaaattctgaaagctgagttttactctactg

SEQ ID NO: 27863 - DNA, 120 bp, synthetic construct; identical to SEQ ID NO: 8415
  source 1..120: mol_type = other DNA

SEQ ID NO: 27864 - DNA, 120 bp, synthetic construct
  source 1..120: mol_type = other DNA
atcggccggcatcacagcagcactgcattttggttatggactgtggcagctggttagagcagcgcccgtttgtcagagctgtgtaacagtatcctgggcgaacatctgaggacaaagaaa

SEQ ID NO: 27865 - DNA, 120 bp, synthetic construct
  source 1..120: mol_type = other DNA
gctacggcaggattaactcacacctctgccccccggaagggaagctgcgagcgctgcacaggaacagtgctcagtcagaaatccctggtctcacaccttttgcccctgtgtgctagtgca

SEQ ID NO: 27866 - DNA, 120 bp, synthetic construct
  source 1..120: mol_type = other DNA
agaaaatcactagcagtgacagtttattatttataaagacatgtctctatgctgaagagagactgggttgtccctggtttcaaactgcttaattcgagccattttaggaaaatatgtaaa

SEQ ID NO: 27867 - DNA, 120 bp, synthetic construct
  source 1..120: mol_type = other DNA
cactttgcatttagatccaatgcttattaatcaagatttccttttgtcttagggccctaacagattttataaggtactagttatttataacttcaaaatggcccttgattccaagttctt

SEQ ID NO: 27868 - DNA, 120 bp, synthetic construct; identical to SEQ ID NO: 8416
  source 1..120: mol_type = other DNA

SEQ ID NO: 27869 - DNA, 120 bp, synthetic construct
  source 1..120: mol_type = other DNA
gagatcatataaaattaaattttgaaaagcaaataatatcgtcaatatgcttgttatttaaagcaggggtctctaacccccaggggccccaatccccagttctggtctgtggcgtgttag

SEQ ID NO: 27870 - DNA, 120 bp, synthetic construct
  source 1..120: mol_type = other DNA
agcactagattctcataggatggtgaaccctattgtgaactgcgcatgcgagggttctaggttgtgtgttcccaatgagaatctaatgcctgatgatctgccaatgtctcccatcaccct

SEQ ID NO: 27871 - DNA, 120 bp, synthetic construct
  source 1..120: mol_type = other DNA
aattaatttaatacactttattgtgtataataaattaatattgtgtattaatttaattaatttaatataatacactttattgtgtataataaagtgcacaataaatgtaatgtacttgaa

SEQ ID NO: 27872 - DNA, 120 bp, synthetic construct; identical to SEQ ID NO: 8417
  source 1..120: mol_type = other DNA

SEQ ID NO: 27873 - DNA, 120 bp, synthetic construct
  source 1..120: mol_type = other DNA
ccaacctagacaaaccataaaagaaaattatgggtcagttttaaaggatacaagattatttccgaaaagtacttaaaaccactagccagtataaatgtgctttccagaatttttttgtgg

SEQ ID NO: 27874 - DNA, 120 bp, synthetic construct
  source 1..120: mol_type = other DNA
gaagcctcaggtggtacctcccccgtcaagagggcagagaaattgaacttcctacattctaatttgtaatgccttaaaaccactaatactttatatacttgggaattagtaaatatttgg

SEQ ID NO: 27875 - DNA, 120 bp, synthetic construct
  source 1..120: mol_type = other DNA
gtcaaaacccagtgtaaacacttgaccaaattatggaatttgtacatataattttcagcatgggctatctttcagagcaaaactagggcctacagttgccaatgacaaaagcttaatggg

SEQ ID NO: 27876 - DNA, 120 bp, synthetic construct
  source 1..120: mol_type = other DNA
tattgcccatctggctgacttatatgttaaatcaatggatcacaaactcttgatcaaaatggtgaatgttgggggtaaaaaaaattacaaatcaagtttgggttactggcagtccctgat

SEQ ID NO: 27877 - DNA, 120 bp, synthetic construct; identical to SEQ ID NO: 8418
  source 1..120: mol_type = other DNA

SEQ ID NO: 27878 - DNA, 120 bp, synthetic construct
  source 1..120: mol_type = other DNA
ccacaaacaccttccattttaaatctgccctggccaagacatctggcgaagaggaggaggaaatctcactcttttctccccttttgaatcacttggcccttattctcaggacccagaaat

SEQ ID NO: 27879 - DNA, 120 bp, synthetic construct
  source 1..120: mol_type = other DNA
tgtgaggctcaaactagggaaaggacatctttatgactcctaggagtcgaagagagagaacacaacaatataaaaagacaaccctacaggcaatattacaaatgccacaggaagatcaca

SEQ ID NO: 27880 - DNA, 120 bp, synthetic construct; identical to SEQ ID NO: 8419
  source 1..120: mol_type = other DNA

SEQ ID NO: 27881 - DNA, 120 bp, synthetic construct
  source 1..120: mol_type = other DNA
ggcagaaaggtcacttggatcattttgtatgacaagtgtctaattatgggcacaacagagttgcaaagaagaaacggggcttgcctagggatctggcaagaaagagtgaactgcatccag

SEQ ID NO: 27882 - DNA, 120 bp, synthetic construct
  source 1..120: mol_type = other DNA
ctcaatctcagctgcttcccatctacaatactgctgtgaaatgaacatcaagtcagataatttacataaaacacctcataccctgtgatccatgaatcttagttcccttccattcctcct

SEQ ID NO: 27883 - DNA, 120 bp, synthetic construct
  source 1..120: mol_type = other DNA
ttaatcctcatgtagtttgaagctctcttaaaatccttaaatatcagactgtgcactttggaacttgaattttaatctagaacactgcacttttaaagaagtcttaacaattattaaatc

SEQ ID NO: 27884 - DNA, 120 bp, synthetic construct
  source 1..120: mol_type = other DNA
tctcctgcttcagcctcctgagtagctgggattacaggcacccgccacgacgcctggcaaatttttgtatttttagtagagacagggtttcaccatgttggccaggctggtcttgaactc

SEQ ID NO: 27885 - DNA, 120 bp, synthetic construct; identical to SEQ ID NO: 8420
  source 1..120: mol_type = other DNA

SEQ ID NO: 27886 - DNA, 120 bp, synthetic construct
  source 1..120: mol_type = other DNA
aagtcctaatggaaaactaccgagggtttgagcaagagtgttatttaatcgaagcactattttaggaagataaatctgacaagatggattgtagagaagccaagaagcagggagaccaat

SEQ ID NO: 27887 - DNA, 120 bp, synthetic construct
  source 1..120: mol_type = other DNA
acattaattaatagactgaagatacctgtaaggtctcctggatcatccctcttttatgggaggcaaaacgtctccaaaatgaccacaaggtgcctctgttctttaagagggcagtcaact

SEQ ID NO: 27888 - DNA, 120 bp, synthetic construct; identical to SEQ ID NO: 8421
  source 1..120: mol_type = other DNA

SEQ ID NO: 27889 - DNA, 120 bp, synthetic construct
  source 1..120: mol_type = other DNA
ccctggaaacagccatcattaaaaagtaaaaaccgcatggagaacagtcaattcaaaggtagatgctgcttctttcaacacagacttacccaaaagatttaccaaattcaacagattagg

SEQ ID NO: 27890 - DNA, 120 bp, synthetic construct
  source 1..120: mol_type = other DNA
catgttttgcattaagttaaactctcctactaattattttatattctgtatcacttcttgcgctgcttttcaatctattttccacaacgcggatactggaatcctacagaagagatcttg

SEQ ID NO: 27891 - DNA, 120 bp, synthetic construct
  source 1..120: mol_type = other DNA
acgtccccttcaaagagggacttgctgcccaggaggctgggaatactgtcaacacacggtctttggctctcagccccttctaagattgcctgagtcgcagagagccacctcgcccgaggt

SEQ ID NO: 27892 - DNA, 120 bp, synthetic construct
  source 1..120: mol_type = other DNA
gggccagtggaggctgttgatgggctgcaccccagcttgccttctctgcacgctcttgcctcttcctcttctcttctgcaggtgttgatcccaaggacatcctctaataaacatcctgaa

SEQ ID NO: 27893 - DNA, 120 bp, synthetic construct; identical to SEQ ID NO: 8422
  source 1..120: mol_type = other DNA

SEQ ID NO: 27894 - DNA, 120 bp, synthetic construct
  source 1..120: mol_type = other DNA
atggccaggctgacaccgttaaaactgggaaaggcttacaacccccaataagaacatttattctacaggctaagtactctcttcatttataagacaaaatagagttctaagtgaaccaga

SEQ ID NO: 27895 - DNA, 120 bp, synthetic construct
  source 1..120: mol_type = other DNA
taaaccaaacaatatttcactgcttatattagagtcaatgctaacataaacagcactgtcattgcaaaattatgtaacggtaaaggtgcatattctattctgacagatagaaatttcatt

SEQ ID NO: 27896 - DNA, 120 bp, synthetic construct
  source 1..120: mol_type = other DNA
aagagcctacaggattcaaagcttcatttaaggatagaggaagctataattgtaattaagaagaatgtacctttttcaaagtgtccctaaaagttagtatctgagtcctacaacacctgc

SEQ ID NO: 27897 - DNA, 120 bp, synthetic construct; identical to SEQ ID NO: 8423
  source 1..120: mol_type = other DNA

SEQ ID NO: 27898 - DNA, 120 bp, synthetic construct
  source 1..120: mol_type = other DNA
tctggtgcccaggtacgcctcttgcattacactgaggccttcagaaaactgacatgaatcaaacctgaaataagagcaaagaggcccatcatttataaagtgaggctaaacccaagtctc

SEQ ID NO: 27899 - DNA, 120 bp, synthetic construct
  source 1..120: mol_type = other DNA
atgtcatagtgcacacctccctgagttcacatagattaagataaaatgggactaggccaaattgttacatttgaaagagcttaaacgacttcaaattccccttaatatgtccccttctca

SEQ ID NO: 27900 - DNA, 120 bp, synthetic construct
  source 1..120: mol_type = other DNA
taacaaataaaagcaagagttctatctattaccaggctgtggtggaaagttcccgacagcaaaggccagaataaggtgtttgaataggattgactcacactctgaaactcattcatatga

SEQ ID NO: 27901 - DNA, 120 bp, synthetic construct; identical to SEQ ID NO: 8424
  source 1..120: mol_type = other DNA

SEQ ID NO: 27902 - DNA, 120 bp, synthetic construct
  source 1..120: mol_type = other DNA
tgtccatgaccccactggcttcttgctgtgaccttaagaagagtcacaaatggcagatctcttccttccttattcgccacctgtcctttgtttctgctccttcccatccttcagtctcat

SEQ ID NO: 27903 - DNA, 120 bp, synthetic construct
  source 1..120: mol_type = other DNA
gcatcaccatctattacttggctatctagaagctccatccaagattgtggacttgacaagagaaacctgatcctgacagttaacctgatcctgactgcctagatactaatacaatgagag

SEQ ID NO: 27904 - DNA, 120 bp, synthetic construct; identical to SEQ ID NO: 8425
  source 1..120: mol_type = other DNA

SEQ ID NO: 27905 - DNA, 120 bp, synthetic construct
  source 1..120: mol_type = other DNA
atgctgcatccgccgcccgatcacaacttgaaaatggagtctgaattcttatccatgctgcatccgccgcccgatcacaacttgaaaatggagtctgaattcttatccatgctgcatccg

SEQ ID NO: 27906 - DNA, 120 bp, synthetic construct
  source 1..120: mol_type = other DNA
tgaattcttatccatgctgcatccgccgcctcatcacaacttgaaaatggagtctgaattcttatccatgctgcatccgccgcctgatcacaacttgaaaatggagtctgaattcttatc

SEQ ID NO: 27907 - DNA, 120 bp, synthetic construct
  source 1..120: mol_type = other DNA
acttgaaaatggagtctgaattctggaactggaaagaacccccacatagcatcttgttcaaccccctcatttgaaagctgaagtaactcagagatggtaattgacttatctaagatcaca

SEQ ID NO: 27908 - DNA, 120 bp, synthetic construct; identical to SEQ ID NO: 8426
  source 1..120: mol_type = other DNA

SEQ ID NO: 27909 - DNA, 120 bp, synthetic construct
  source 1..120: mol_type = other DNA
attatggagtgcatggatttaaaagctacacttttaaaaaggtcctgtgcatcatgcagtgctattataattgctaaaggctgggctggcgataatctaaatcccaaaatattagtggtt

SEQ ID NO: 27910 - DNA, 120 bp, synthetic construct
  source 1..120: mol_type = other DNA
tgttcatgtgttctttcagcatgcgtactctacagtcattggaaagatcaacaaagaaggtgggcatgaactctttccttttttctcaaatcacagctataaatctcaatcttttccttc

SEQ ID NO: 27911 - DNA, 120 bp, synthetic construct
  source 1..120: mol_type = other DNA
tttagtttttggaaagagggacattttaggaaggaagtgagaattctgcaagaggaagatctcatggaaagcaactcgaataatggcattctcagatctgagagcgtgagggttagcatc

SEQ ID NO: 27912 - DNA, 120 bp, synthetic construct
  source 1..120: mol_type = other DNA
caatggcaaaggtaccaggacattttcacaagggcacagaaccccatggttatactcatcatctttctagggaacatattcagtgattacgggccagacttcctgggttccctctattgg

SEQ ID NO: 27913 - DNA, 120 bp, synthetic construct; identical to SEQ ID NO: 8427
  source 1..120: mol_type = other DNA

SEQ ID NO: 27914 - DNA, 120 bp, synthetic construct
  source 1..120: mol_type = other DNA
ctgtttttatcttgctgctgactttcacatgtagctggaaaatttttgtgtgtggaaaaggattaagtaatagactgagtttttggtccactggatacaccaccataataggtttcttag

SEQ ID NO: 27915 - DNA, 120 bp, synthetic construct
  source 1..120: mol_type = other DNA
acaaaatcaattctactcaggctggaagccatcataatttcagaaaacaaaacacagactggacaagtcataaggactatactcccctcaatcttgaagctgattatatattctgaagct

SEQ ID NO: 27916 - DNA, 120 bp, synthetic construct
  source 1..120: mol_type = other DNA
tatagatatatgtgtgtctatataaagatatgtgtgtgtgtatatgtgtgtgtgtgtgtatatatatatgtgtatgtgtgtgtgtgtgtgtatatggcccgaaaatctattccagaataa

SEQ ID NO: 27917 - DNA, 120 bp, synthetic construct; identical to SEQ ID NO: 8428
  source 1..120: mol_type = other DNA

SEQ ID NO: 27918 - DNA, 120 bp, synthetic construct
  source 1..120: mol_type = other DNA
acaactaccccgaataactatgtataacatgttcaagaatgcagtatcaattataaattcaatgatgatttataacctaaaaacaattccaactcataaagatagttctatcagagttag

SEQ ID NO: 27919 - DNA, 120 bp, synthetic construct
  source 1..120: mol_type = other DNA
atccagcccagacaaataacttagaatgtactcactgttagagtctaggggcataaatataacagcatctgttttcaataaaaatgcatccatctaagtgaaacctcaaggtggggtgag

SEQ ID NO: 27920 - DNA, 120 bp, synthetic construct; identical to SEQ ID NO: 8429
  source 1..120: mol_type = other DNA

SEQ ID NO: 27921 - DNA, 120 bp, synthetic construct
  source 1..120: mol_type = other DNA
gtttgactaacattaaaagcttttcatttgataggcaattaccatcccccagaaaagaaaatcatgagcatgtactaggagcataaatataagggttaatagatcaatctgcctccccac

SEQ ID NO: 27922 - DNA, 120 bp, synthetic construct
  source 1..120: mol_type = other DNA
acattttaaaccaaatgttggttcaaaaatatttcatgtttttaatatttaatttgattcagatggacctcttgttttgggtctataaaagtggaaaaagctacagggtttttctggtcc

SEQ ID NO: 27923 - DNA, 120 bp, synthetic construct
  source 1..120: mol_type = other DNA
tttacacattcacagggatgacaaagacagaaggatttaggaataatttgcaaacaagcttgtttctaatgttgagttttgcctgcccccactacaccccccaactgcaaagcataagat

SEQ ID NO: 27924 - DNA, 120 bp, synthetic construct; identical to SEQ ID NO: 8430
  source 1..120: mol_type = other DNA

SEQ ID NO: 27925 - DNA, 120 bp, synthetic construct
  source 1..120: mol_type = other DNA
ttgattaataatgttccataagaagtcacaagtattttttgttttcccaccttccatgtttcctaatgtagaggagagtgcattaacttttgcgggttttagcacatatgcagcaaagta

SEQ ID NO: 27926 - DNA, 120 bp, synthetic construct
  source 1..120: mol_type = other DNA
ctacctttaagagttgtactgagtgatttagttaaaacggaatttattgaaggtcactcagactacacgagacagctaatgtttttgcgcaaatgaagtggaaatgttcacttcacattc

SEQ ID NO: 27927 - DNA, 120 bp, synthetic construct
  source 1..120: mol_type = other DNA
ggccaccagaagccacttttgtaaatgtcagtgagatcatgtctttccccagctcaacgtgcaagtgtgtactatgtcctggggagttcgacatgacttctctgatcttttacccatttt

SEQ ID NO: 27928 - DNA, 120 bp, synthetic construct
  source 1..120: mol_type = other DNA
cccacgatgtctcatcctccaggtctgtgctccaatgccactttagccacgagcccttcccttgacagtccaacagcaacacctggctgctggctctaatcatccttccttccctgttta

SEQ ID NO: 27929 - DNA, 120 bp, synthetic construct; identical to SEQ ID NO: 8431
  source 1..120: mol_type = other DNA

SEQ ID NO: 27930 - DNA, 120 bp, synthetic construct
  source 1..120: mol_type = other DNA
acagtctaatgtattctttttgaaacctggaagcttaatgtgctctttagtttcactcttcattgagtaaagaaaaaagtgattgctgtttataagatctcaacctgtgttcttgagaaa

SEQ ID NO: 27931 - DNA, 120 bp, synthetic construct
  source 1..120: mol_type = other DNA
atatcttaacccacagatacatgattatatgtggaaaatcattaaattatgttttctagccaatttcagttttgtcttagaccagaattttccattctcttgatgtgttgaatgtatttt

SEQ ID NO: 27932 - DNA, 120 bp, synthetic construct
  source 1..120: mol_type = other DNA
ggtctgaagacagaataagctcctttatgaacccatttgcccacagcccctcacatctgacccaaggactggaaacaccagcaaggagcaagagccacaacctggtggcagaatctctta

SEQ ID NO: 27933 - DNA, 120 bp, synthetic construct; identical to SEQ ID NO: 8432
  source 1..120: mol_type = other DNA

SEQ ID NO: 27934 - DNA, 120 bp, synthetic construct
  source 1..120: mol_type = other DNA
gatgggcagctgaggcagttaaaagtctagctctctggtcactgtcaacaagttcatgggtattagctaactttgtaatcccaagatgaacaaattcttcaaaactcactgggattttct

SEQ ID NO: 27935 - DNA, 120 bp, synthetic construct
  source 1..120: mol_type = other DNA
gatacatttaagggcatccaaaggagctgtatgttgtacatgggagctgaaggccaggaatgacaatatcagaagtggaatttattgaagtggaatgtaatggagacccacaaaactgtg

SEQ ID NO: 27936 - DNA, 120 bp, synthetic construct; identical to SEQ ID NO: 8433
  source 1..120: mol_type = other DNA

SEQ ID NO: 27937 - DNA, 120 bp, synthetic construct
  source 1..120: mol_type = other DNA
taaaagccaaaaacagagtaagggcttctacgggaggcaggagaagcagctagcaggcgacatctggggatatttaaaactgtgaaacaaatcctaatttattttggacttgtaaaaaaa

SEQ ID NO: 27938 - DNA, 120 bp, synthetic construct
  source 1..120: mol_type = other DNA
ctaccttgttcacaaaccttgctttgtgtttctacacagcactgccataatgcactgcatcgctgtaaacagaatcacaccacccctggagtcagaggtacatacaaacacctctggggt

SEQ ID NO: 27939 - DNA, 120 bp, synthetic construct
  source 1..120: mol_type = other DNA
gctgacactacttttccattctcttcaacttcattggagaatggctctccagagcaaataagattaatccattaataattccatcagcccgggtttaccttgacaagctcccgtgcggat

SEQ ID NO: 27940 - DNA, 120 bp, synthetic construct; identical to SEQ ID NO: 8434
  source 1..120: mol_type = other DNA

SEQ ID NO: 27941 - DNA, 120 bp, synthetic construct
  source 1..120: mol_type = other DNA
acctacaaaatagggatgaaaacatcagttgttacccactttgaaaacggcattgtgaggatcaggcgagctaatggaaaactctttacaactgtgaattgctatacaaatgtaacatgg

SEQ ID NO: 27942 - DNA, 120 bp, synthetic construct
  source 1..120: mol_type = other DNA
ttccagtctattgttatttagggctgagaaagcaaagaattttgaagcttgcagtgaggcaagtcatggcaccttcttcctgggagttccttcaataaaagaaatggttatctgtttctt

SEQ ID NO: 27943 - DNA, 120 bp, synthetic construct
  source 1..120: mol_type = other DNA
atcattgtaacccctaggcaaaaggaccatcttaaagcaaaacagggataagctaagtccacaagagaatttccaatcagagcagtctaccaccagctataagatctgcctctttttttt

SEQ ID NO: 27944 - DNA, 120 bp, synthetic construct; identical to SEQ ID NO: 8435
  source 1..120: mol_type = other DNA

SEQ ID NO: 27945 - DNA, 120 bp, synthetic construct
  source 1..120: mol_type = other DNA
ctatttactaaggaaaaaaggacaacttttcattacagtaccagcaagagtcaacattctggatcgtaacaatgttttggcaatagctgaatcttatctgctggcatccctctatcctgt

SEQ ID NO: 27946 - DNA, 120 bp, synthetic construct
  source 1..120: mol_type = other DNA
accacctctgttcaatggtgttgcagaaacagcactgctctgatgcccatgctgtaagatcaaccttctgaagaattccaaaaacaaaactccatgccagtcatatatgtaaagaagact

SEQ ID NO: 27947 - DNA, 120 bp, synthetic construct
  source 1..120: mol_type = other DNA
aattttagattttagtagtcacatattaattttaatgtgtattatgaaacagcataaatatatcagactcatgatttcacagttatgtctgctatgaggatgatgaattgaaaaaccttt

SEQ ID NO: 27948 - DNA, 120 bp, synthetic construct; identical to SEQ ID NO: 8436
  source 1..120: mol_type = other DNA

SEQ ID NO: 27949 - DNA, 120 bp, synthetic construct
  source 1..120: mol_type = other DNA
aaacaagtattaaatactgagctgttgaataaatctcagccctcatttcgttctttcgatgaagaaaaagtcactcagcactgcagtaatttggaacaaaatctctttaaaatgcaggaa

SEQ ID NO: 27950 - DNA, 120 bp, synthetic construct
  source 1..120: mol_type = other DNA
ctttagacaattgagaaaaggcagtagcatataaacaaatgtaattacacctaaagaaacccttgataacgtattgattatattatcgtacgtaagattttgtgtgtatgcatgtgtgtg

SEQ ID NO: 27951 - DNA, 120 bp, synthetic construct
  source 1..120: mol_type = other DNA
atgattttaattgctgcataattttccatcaagttataacagaatgtgttcagtaattttcttactgtctatcatttaaattgcctctaattcttcattattacacatagcattcagtgt

SEQ ID NO: 27952 - DNA, 120 bp, synthetic construct; identical to SEQ ID NO: 8437
  source 1..120: mol_type = other DNA

SEQ ID NO: 27953 - DNA, 120 bp, synthetic construct
  source 1..120: mol_type = other DNA
attgccaaggttcaggatagatacaaatatggtgttttgtgagtgacaccagcaaaatccagacactctacaaaatgctaatacaaatctgattcagttctgtctgccactgattcataa

SEQ ID NO: 27954 - DNA, 120 bp, synthetic construct
  source 1..120: mol_type = other DNA
agttgttaattctgacaatctatattaggcatcccaacagtccacagggatccaatttattaagtatactatatatttggcgaatactttatgtagaatagaaactatggacttagtaca

SEQ ID NO: 27955 - DNA, 120 bp, synthetic construct
  source 1..120: mol_type = other DNA
acaaaaattgctgattgtagagggagaggcataatctggatgaaataaaattggatctaaaaatgtcttggaaggtaaatgctgtattaacatggttttcaaatgtcattccgatttggc

SEQ ID NO: 27956 - DNA, 120 bp, synthetic construct
  source 1..120: mol_type = other DNA
tatttacaattattcccatagcacttacatgatattaagctaaatttacatactcttttttttttttttttcagatagtctcagcattagacagggagtgtgcttaactcaaagcttgtg

SEQ ID NO: 27957 - DNA, 120 bp, synthetic construct; identical to SEQ ID NO: 8438
  source 1..120: mol_type = other DNA

SEQ ID NO: 27958 - DNA, 120 bp, synthetic construct
  source 1..120: mol_type = other DNA
atgctgtggtctacagcattatttcactttcatttgtaatcagacttcaccccgaagcaaatgcatcgtttacagggaaagaatattctgtggtacaatgaattctcgtccctcctgccc

SEQ ID NO: 27959 - DNA, 120 bp, synthetic construct
  source 1..120: mol_type = other DNA
tccatgacatagagggtcacagcacacttatttctcccaggtaggttggcctggggaacattaggctcctaatgtgtggaatttcaatacaactttctgaggaaggagttcagagaactt

SEQ ID NO: 27960 - DNA, 120 bp, synthetic construct
  source 1..120: mol_type = other DNA
gcttttgtaaaatgctgatgcctgggtcccaccctgtcctcccccagttttccccatggaacccgattcagtagatgtggcatggggcccaggcatatacgtcttgcaaaagctccccaa

SEQ ID NO: 27961 - DNA, 120 bp, synthetic construct; identical to SEQ ID NO: 8439
  source 1..120: mol_type = other DNA

SEQ ID NO: 27962 - DNA, 120 bp, synthetic construct
  source 1..120: mol_type = other DNA
ctaccagctcatcaaagcaaacaacaaagtcaaaatttaggaaggttgatcatccactactgcagtgtcctaatagttagtagaattcccatttccagtctctttccttctagttttaca

SEQ ID NO: 27963 - DNA, 120 bp, synthetic construct
  source 1..120: mol_type = other DNA
tacaaggcctatttagcatcagtaacaccaaaagtcaactcttgattcattccagaattgcactatcacggagatcgtctgaaattcttccgggactcctgattttataaaatataaagt

SEQ ID NO: 27964 - DNA, 120 bp, synthetic construct
  source 1..120: mol_type = other DNA
gaaagggaatatagggatagaggaacaaggtaaattacaccacaaggaaacaaccagaaaactcagaacatgtgatattttctaaggcaattgtctagaacttttccaaaagcaaattac

SEQ ID NO: 27965 - DNA, 120 bp, synthetic construct; identical to SEQ ID NO: 8440
  source 1..120: mol_type = other DNA

SEQ ID NO: 27966 - DNA, 120 bp, synthetic construct
  source 1..120: mol_type = other DNA
gggaacaattattcaatataagtggaaagtatatgtgtatactttatattattccttcaactttaagtttgaaattttttataataaaatttcaggggaaagaaattcctttcaggccta

SEQ ID NO: 27967 - DNA, 120 bp, synthetic construct
  source 1..120: mol_type = other DNA
gattacctatttaacatggtctatacagtgttattaaaagaatacaaccttttggcaaaatttaccaaactgtattatgcaaaatgtttacctttaacaaactgcttctgaggtatggct

SEQ ID NO: 27968 - DNA, 120 bp, synthetic construct; identical to SEQ ID NO: 8441
  source 1..120: mol_type = other DNA

SEQ ID NO: 27969 - DNA, 120 bp, synthetic construct
  source 1..120: mol_type = other DNA
ttgaaataatcatttacctgatattatttgttccttcactataaatcctacaagtcattactgactttcatcttcctgtaaagttatctctacttttactagaaaaaaaaagactgggag

SEQ ID NO: 27970 - DNA, 120 bp, synthetic construct
  source 1..120: mol_type = other DNA
atggtctgcaaattccactttaaagaaccagttggctctgattcattcccttttaaaacagcttgtatgaaatgccacgttaaaccaaacactgaagtttgaccacagagcatcagctat

SEQ ID NO: 27971 - DNA, 120 bp, synthetic construct
  source 1..120: mol_type = other DNA
atattctctccaatccaaaaacaagattagtagcccaagaggaaagggtcttatgattaaatataaaaattgtcaggggcaacatattcttaaattaacctgtatatcataaaagtacct

SEQ ID NO: 27972 - DNA, 120 bp, synthetic construct; identical to SEQ ID NO: 8442
  source 1..120: mol_type = other DNA

SEQ ID NO: 27973 - DNA, 120 bp, synthetic construct
  source 1..120: mol_type = other DNA
tgcacaacaatgtgaatgtacttaatgccaccaaactgtacacaaagaagtggttaaaatggtaaattttatcttatgtatactttaacacaataaaaagaaaattctagctggcacagt

SEQ ID NO: 27974 - DNA, 120 bp, synthetic construct
  source 1..120: mol_type = other DNA
aatgtagctgggtgtgatggtaggcgcctgtactcccagctactcaagaggctgaggtgtgaggatcgcttgccgtagtgagccgcgatcacaccactgctctcaagcctgggcaacaga

SEQ ID NO: 27975 - DNA, 120 bp, synthetic construct
  source 1..120: mol_type = other DNA
acagaatcatgggtttccttaatgcattcgacaaatacttattgagccacaaccctgtatcagtgaatagcacaacataaaacctctgttcacatggagtttgcaatcttgtggaggagg

SEQ ID NO: 27976 - DNA, 120 bp, synthetic construct; identical to SEQ ID NO: 8443
  source 1..120: mol_type = other DNA

SEQ ID NO: 27977 - DNA, 120 bp, synthetic construct
  source 1..120: mol_type = other DNA
gctcaaagctcaataaaaagccactgaaaataaaagccactgttatttgagaagtgtgctcctttaagggctcaggagttgaaatggaaagggtttcagggaggctactgaaggatttga

SEQ ID NO: 27978 - DNA, 120 bp, synthetic construct
  source 1..120: mol_type = other DNA
tggtcatttgctgaaacggggaaactagggaagattaggctgtaaatactaataatccgttaacaagttcttcccattctcacaataaggtacctggtgtagaacaggtaacttgaatta

SEQ ID NO: 27979 - DNA, 120 bp, synthetic construct
  source 1..120: mol_type = other DNA
aaatttcttttccttcccttcctttttgtgagcaagcatttactcctatcatattcagacatttatgtataaacattagggttgagattcttacttcaaacacacttggtgaattttcac

SEQ ID NO: 27980 - DNA, 120 bp, synthetic construct; identical to SEQ ID NO: 8444
  source 1..120: mol_type = other DNA

SEQ ID NO: 27981 - DNA, 120 bp, synthetic construct
  source 1..120: mol_type = other DNA
agataaacggcagggagatggttttgatacattggttggcaaatgttatttctagaattggctttttatcaaatatccatgtgctaatagatatgtggtatataggttgtttgtatatct

SEQ ID NO: 27982 - DNA, 120 bp, synthetic construct
  source 1..120: mol_type = other DNA
tttggaagaaaatgtctgatgaatgaaaaattcctgagactgtttccagctcagagtctggcactgaactcagctgaagaaagacaagttggaagaaagtacaagcattactcagaacac

SEQ ID NO: 27983 - DNA, 120 bp, synthetic construct
  source 1..120: mol_type = other DNA
acgtgctcagatatcaaatacaacagatgatccatattcttagacaccaacaactaaggcagcagaccctagaactgagttttcactgttattttatggtcgtccatttttcagacctgc

SEQ ID NO: 27984 - DNA, 120 bp, synthetic construct; identical to SEQ ID NO: 8445
  source 1..120: mol_type = other DNA

SEQ ID NO: 27985 - DNA, 120 bp, synthetic construct
  source 1..120: mol_type = other DNA
actagaaaaaagatttaaagttgctcctgagactataagtcctacaactactaaatcatgtactgtctgaacactgacagggcactgtgttactctgttccctcttaccacttactagag

SEQ ID NO: 27986 - DNA, 120 bp, synthetic construct
  source 1..120: mol_type = other DNA
aaataataagagacagcattaaaagtggtttaaaatgccccaagagggaagccaaacaccacaattttctccaactgtggaagaaaaaacaacttgagccagattttagctctctggatg

SEQ ID NO: 27987 - DNA, 120 bp, synthetic construct
  source 1..120: mol_type = other DNA
aagtgttataatttaaaatacatcatattcgccatcctgggatttcactactaatatttaaaattcacaactcctgcacaaagcaagtgttcttaggaactatgctcatgcaaatgcttt

SEQ ID NO: 27988 - DNA, 120 bp, synthetic construct; identical to SEQ ID NO: 8446
  source 1..120: mol_type = other DNA

SEQ ID NO: 27989 - DNA, 120 bp, synthetic construct
  source 1..120: mol_type = other DNA
cagctggctccagaaagagttggagagagcatttggtttttgcttccagccctgggtaaagccctgctatagtacctgcccttgggtttcttataacctgggatttccttacagtaaatc

SEQ ID NO: 27990 - DNA, 120 bp, synthetic construct
  source 1..120: mol_type = other DNA
gcacttggactcaatacagtgccttcatttattcctttttggaagaagaacgtgttctttcatcaaattcttaaaagtgtccatggctcagaaaaggtaataatcccctgcactatttaa

SEQ ID NO: 27991 - DNA, 120 bp, synthetic construct
  source 1..120: mol_type = other DNA
acagacaaaaaaacgactccagttctccccttcctttacttgtaattccaaagggagccacatagaaacataaacctgcatgaaagtcatcactgccctctataaattgatagctaactt

SEQ ID NO: 27992 - DNA, 120 bp, synthetic construct
  source 1..120: mol_type = other DNA
cagaacacagtgcagggctagaacctaaagacaataagcctaaaagtgaggaggcctgcacgccagtctcagctcagcaactaatttgctgttcgtctcgagttagacacatcactctct

SEQ ID NO: 27993 - DNA, 120 bp, synthetic construct; identical to SEQ ID NO: 8447
  source 1..120: mol_type = other DNA

SEQ ID NO: 27994 - DNA, 120 bp, synthetic construct
  source 1..120: mol_type = other DNA
cttctttattgcccctcctctgaaattcaattgctactgctttagtgtagaccctcatttccctttgccctgctggagtgaacctaacttcagttagaccctaaaacgctctgtgaaatg

SEQ ID NO: 27995 - DNA, 120 bp, synthetic construct
  source 1..120: mol_type = other DNA
tccaccaaattcctccacttggaagtctcccctgacgacttactccttccctcctctgtggcactaaccaaactccatggtaaactctcacttatatgattgtctttcatcagattgtga

SEQ ID NO: 27996 - DNA, 120 bp, synthetic construct
  source 1..120: mol_type = other DNA
ggaggatgcaaaatgacatatctttaagttagtctaaatccttaatcttttgaactattcattccctttgctcaagatgtaattaactacttataattccgtgaatctatcatgcttgat

SEQ ID NO: 27997 - DNA, 120 bp, synthetic construct; identical to SEQ ID NO: 8448
  source 1..120: mol_type = other DNA

SEQ ID NO: 27998 - DNA, 120 bp, synthetic construct
  source 1..120: mol_type = other DNA
ctctactcccttgcctggccttttgttaaaaacaacagttgaatttgcaatatagagcaaagataaaggtgacatgcagatcaagtccaagcctggattcatgaagaccttgttcttttt

SEQ ID NO: 27999 - DNA, 120 bp, synthetic construct
  source 1..120: mol_type = other DNA
ttcccattagttgttttccctaatcctctcccttctcccaccctccgccctccaaaaggcccagtgtgtgctattctcctctatgcgtccatctgttctcatcatttagttcccacttat

SEQ ID NO: 28000 - DNA, 120 bp, synthetic construct; identical to SEQ ID NO: 8449
  source 1..120: mol_type = other DNA

SEQ ID NO: 28001 - DNA, 120 bp, synthetic construct
  source 1..120: mol_type = other DNA
ttccaacaacagtgtataagtgttcctttttctccacaacctctgcagcatctgttattttttgactttttaatagcagctttaataggtgttagatggtatctcattgtggttttataa

SEQ ID NO: 28002 - DNA, 120 bp, synthetic construct
  source 1..120: mol_type = other DNA
tcctcaacctcctgggctcaagcaatcctcccacctcagcctcccaaatagctgagactacaggcacatgtcaccatgcctgcctatttttttattttttgtagagatggggtctcccta

SEQ ID NO: 28003 - DNA, 120 bp, synthetic construct
  source 1..120: mol_type = other DNA
atcaccaccagctaccatatacctccaaattcattcctgacataagaaaaattaacccctatttgtttaagtcactgtggttgggttttgcatcatttgcatccaaactcatttctaact

SEQ ID NO: 28004 - DNA, 120 bp, synthetic construct; identical to SEQ ID NO: 8450
  source 1..120: mol_type = other DNA

SEQ ID NO: 28005 - DNA, 120 bp, synthetic construct
  source 1..120: mol_type = other DNA
tcatattccccaaatcaacttaatttttcttcctcgaaacctagtaagatatctaatgttgagacatgactcaactctgatcatctccgttaatccactgttctctgatgtacacatatt

SEQ ID NO: 28006 - DNA, 120 bp, synthetic construct
  source 1..120: mol_type = other DNA
accctctttctctattctattttttaaataattgagatattttgaatgtgatatgccctatatactaccgtcaattgaaagtaaagaccaccatcccctcccctcagttcccaaatgtta

SEQ ID NO: 28007 - DNA, 120 bp, synthetic construct
  source 1..120: mol_type = other DNA
tggattgaaaagaaagcaaagaactatgtaaatgcctaggtaggttcccgggagacagtaaaaggtaagtattgcattcacagtgacattcaacctttaaatagggtaacggtactgaca

SEQ ID NO: 28008 - DNA, 120 bp, synthetic construct
  source 1..120: mol_type = other DNA
tcactcctttctctctactctgtgagtgtgagatgagccattttttttttccagatgttattgttaatttcaaaagattcatccagaccttggaaagtcttctaatgacaagtctgattt

SEQ ID NO: 28009 - DNA, 120 bp, synthetic construct; identical to SEQ ID NO: 8451
  source 1..120: mol_type = other DNA

SEQ ID NO: 28010 - DNA, 120 bp, synthetic construct
  source 1..120: mol_type = other DNA
cttttggtgtttctgattctaaaagctgtgctttccccactactttgccttcctcaaaatgacggtacaatgtacacaagggtaaatcaaaacacagagcggcaaagttattttctcaat

SEQ ID NO: 28011 - DNA, 120 bp, synthetic construct
  source 1..120: mol_type = other DNA
gattaaatcacagcagtcgagattgaagcaacgttcaaatcagtttcaggaccttgttctcatactcctaaatcttgagctaacaaagccttcagtgcagtgttggagtgttgtttgcaa

SEQ ID NO: 28012 - DNA, 120 bp, synthetic construct; identical to SEQ ID NO: 8452
  source 1..120: mol_type = other DNA

SEQ ID NO: 28013 - DNA, 120 bp, synthetic construct
  source 1..120: mol_type = other DNA
acacattatatctgcaaactgaaatggaagtgtcttatatacctatgtgaccatgggcaaattatttactttctgatccacagttttcttaattataaatagggatgataatagggtgtt

SEQ ID NO: 28014 - DNA, 120 bp, synthetic construct
  source 1..120: mol_type = other DNA
ttaattggtttcttcaacgtgagacagaataagccattatttgtacactatagaaatgtaagggcatgttaagatgttatgcagtatgttctatttaaacatggcatgcagtgatgatgt

SEQ ID NO: 28015 - DNA, 120 bp, synthetic construct
  source 1..120: mol_type = other DNA
gtaaatctcacatactgttccttcacatcttgttcccttccttgtccctttcctgtgttttcttcttgatccaaggctaaactgtcccagccctgaaaatctgtgctcggttaaaaactg

SEQ ID NO: 28016 - DNA, 120 bp, synthetic construct; identical to SEQ ID NO: 8453
  source 1..120: mol_type = other DNA

SEQ ID NO: 28017 - DNA, 120 bp, synthetic construct
  source 1..120: mol_type = other DNA
aagagaagcatataggttataacctaccaaatggtaggttccttaggaggagagagtcttgtttatctctgaactcttatcttctatccccaacttcctggaatagaagacactcaatat

SEQ ID NO: 28018 - DNA, 120 bp, synthetic construct
  source 1..120: mol_type = other DNA
tctccaactcagcaggttatcagaactgaatgtacccaactcatctaaatgcaaagataataaataggcttttgccttctacatttctaatgggggtttctgaaagaaactttccactag

SEQ ID NO: 28019 - DNA, 120 bp, synthetic construct
  source 1..120: mol_type = other DNA
cccaggggaaaatgcaacatctatgattttaattttttaccctcatagatcacatccatgcacaattcaactacttaatggggtaaggctgtaggtgagtgcaacaaacctcacgaacct

SEQ ID NO: 28020 - DNA, 120 bp, synthetic construct
  source 1..120: mol_type = other DNA
agaaggatttaagaaccaagcttcaaccatggcagattcgaaatccagccaatgccagccaaatatgagctcgaaagcattcataagaagaggctaaggtttacaaaacaatcctttttg

SEQ ID NO: 28021 - DNA, 120 bp, synthetic construct; identical to SEQ ID NO: 8454
  source 1..120: mol_type = other DNA

SEQ ID NO: 28022 - DNA, 120 bp, synthetic construct
  source 1..120: mol_type = other DNA
caaccctgcccattcttagccctgtgtcattgtttaatctcagtaagcctcaatcccctcacgtgtcaagcggagagaatttaaggttgttaagatttgggtgaaatattatatgtgaaa

SEQ ID NO: 28023 - DNA, 120 bp, synthetic construct
  source 1..120: mol_type = other DNA
tgatttaattcaagaaaaagcttcttaaagtaacgcgaaacatcctgaatcacctggcccacttacagacttttcgaatgcccttctttgtagtgaactgtgcaggtgaaggaaggtctt

SEQ ID NO: 28024 - DNA, 120 bp, synthetic construct; identical to SEQ ID NO: 8455
  source 1..120: mol_type = other DNA

SEQ ID NO: 28025 - DNA, 120 bp, synthetic construct
  source 1..120: mol_type = other DNA
attttcactaaatcatgttactactctggatgccggcctgatacatcctggtgccaagtggcaactggtttcccctgcagaggagcaacagaaggggcagcagagtcctttttcaccttg

SEQ ID NO: 28026 - DNA, 120 bp, synthetic construct
  source 1..120: mol_type = other DNA
gtcagcgacaaagttgagtgaatgaagttcatgccaagtattcattgagaaggctgggcaagataggtccaggttggggaagggaagagaaaacgatgagatgaaggttaaaggaaagga

SEQ ID NO: 28027 - DNA, 120 bp, synthetic construct
  source 1..120: mol_type = other DNA
tcacttaaaaataaaaacttaacactcaccttgaatactatgcctgaaatataattaagccatcaccaggagatgaatttgccaggactaaggcttgaggtctgaataagtaggcttctc

SEQ ID NO: 28028 - DNA, 120 bp, synthetic construct; identical to SEQ ID NO: 8456
  source 1..120: mol_type = other DNA

SEQ ID NO: 28029 - DNA, 120 bp, synthetic construct
  source 1..120: mol_type = other DNA
ttcaacattattagcataaggtttagttttagaccttggtaattccaggagagagggtttaaattattagacctattccaagccaggatataaaaccctttctaaacaggtactccccca

SEQ ID NO: 28030 - DNA, 120 bp, synthetic construct
  source 1..120: mol_type = other DNA
gttttggctgttttggcacactaacaactagctttggaaattctatacctaagaagttaggcagaattatgaaaaagcaaagaaaaagcacacaaattagcaaaatatctggctacagca

SEQ ID NO: 28031 - DNA, 120 bp, synthetic construct
  source 1..120: mol_type = other DNA
ggtctgtttttctgacaatcaatgtttataattccatgaaaatttttgaagtatcgtgggagtacctataggtgctgtatagctctgacttgctggttaaagcttagtcagtgagctatg

SEQ ID NO: 28032 - DNA, 120 bp, synthetic construct
  source 1..120: mol_type = other DNA
gattatctgaaagttcagactaggaagcaggtgaataaaaaggtattccctcactcaacacatgccccaagagttttggtcaatgcaaagagcagaagccagaagtcttcttagaaatca

SEQ ID NO: 28033 - DNA, 120 bp, synthetic construct; identical to SEQ ID NO: 8457
  source 1..120: mol_type = other DNA

SEQ ID NO: 28034 - DNA, 120 bp, synthetic construct
  source 1..120: mol_type = other DNA
gaggagtctgactcaagtaaaaggcctgcggaggacacagaccaaggacaagcaggcagacctctgtgaggagccagggtccggagcaaagcacagtttttacaatcctcaagaacctct

SEQ ID NO: 28035 - DNA, 120 bp, synthetic construct
  source 1..120: mol_type = other DNA
ggtttctacagtattcaagggcagactggattcactctggcatcggaaaagaggttgaaagagatgatggcatatcagaagattaggacgatagaggaaagttttcatatctaagcagca

SEQ ID NO: 28036 - DNA, 120 bp, synthetic construct
  source 1..120: mol_type = other DNA
gagttaagtttgtctatttctacttagtacatgtggaaggcaaaacgaagtaacagatgctacacaggagaagccaggctcacataataaagagttttgaggcaagaaggcagaattcat

SEQ ID NO: 28037 - DNA, 120 bp, synthetic construct; identical to SEQ ID NO: 8458
  source 1..120: mol_type = other DNA

SEQ ID NO: 28038 - DNA, 120 bp, synthetic construct
  source 1..120: mol_type = other DNA
atgtggtaaggattaaatgtgataatacgtaacaaatgcttgccttactgggtgctcaaagagcagttgctagtatcatttaggagaggatgagagagtcaaatgttattctctgaggtt

SEQ ID NO: 28039 - DNA, 120 bp, synthetic construct
  source 1..120: mol_type = other DNA
cttcgtatgagcacattttgatactctaattacaatgcgagcttctaaaattgcaaacccatggcttcaatttcctttggatttttccaaaagacttcaacaaatgttgacggagcccca

SEQ ID NO: 28040 - DNA, 120 bp, synthetic construct; identical to SEQ ID NO: 8459
  source 1..120: mol_type = other DNA

SEQ ID NO: 28041 - DNA, 120 bp, synthetic construct
  source 1..120: mol_type = other DNA
gatttgcccaaggtcacccaaaaccccagtgatgagtggtctgtcagggaggggctttaaaataatgagtataagtgctaaaacaaaatgacttgtcttttcaagccaattagtgatttc

SEQ ID NO: 28042 - DNA, 120 bp, synthetic construct
  source 1..120: mol_type = other DNA
ctgccctttggaaatgttcattaccttctgctacagggacacctagattctagagtatgtgtttttgtagcctgggcagagtcagagcaatcacctactaaggccctacaatgaatgtta

SEQ ID NO: 28043 - DNA, 120 bp, synthetic construct
  source 1..120: mol_type = other DNA
aatattcactgaaaagtcttcccataacttccctctgcccagttcctatggccaaacaggtaacaaatttattggcaccctgaatattcatccagcaaggtttttatgaaaacacaagta

SEQ ID NO: 28044 - DNA, 120 bp, synthetic construct
  source 1..120: mol_type = other DNA
cttcagatgaaaattttcctactctcagactatggaaaaagtatctctaaattaaagatttcagctcctaatttagcgtatgtttttactcatccttaaagctcatcttgaaatggttta

SEQ ID NO: 28045 - DNA, 120 bp, synthetic construct; identical to SEQ ID NO: 8460
  source 1..120: mol_type = other DNA

SEQ ID NO: 28046 - DNA, 120 bp, synthetic construct
  source 1..120: mol_type = other DNA
taagctcagttcaccgaaactcctcagaaccctctacaaaaagcagagattgggccagaatgctataaagttcctctccacaggtccgtgctgtgatgctgggacatcttcagtaatttt

SEQ ID NO: 28047 - DNA, 120 bp, synthetic construct
  source 1..120: mol_type = other DNA
gttattttgttgcccaatggtggccatgttgtgtattacaaatagggaattgagtcaatgtaagagaactccaaatggaatacccttttgtgcatgggcatgaacgttttaggtgtcgcc

SEQ ID NO: 28048 - DNA, 120 bp, synthetic construct; identical to SEQ ID NO: 8461
  source 1..120: mol_type = other DNA

SEQ ID NO: 28049 - DNA, 120 bp, synthetic construct
  source 1..120: mol_type = other DNA
agctggggtcttccagtctaaaccaggcaaggagaacagcccacacaagctttctgatttaatttaaactggaagggaaacatttatgtattgttttaatcaatagtttggaggactcta

SEQ ID NO: 28050 - DNA, 120 bp, synthetic construct
  source 1..120: mol_type = other DNA
ccagtacctagtactacagtccttagcacagactatgtcttcaatagatacatgagagacagtgaatgaatgaacagatgaacaatcaaatgaaccaagatgttttactcatagtcctgt

SEQ ID NO: 28051 - DNA, 120 bp, synthetic construct
  source 1..120: mol_type = other DNA
gaagatatgggtgaaaacaggcggccagctctccttttctgaagctaacttgagagagagaaagagacttttaggtaaatatttttaatggtaatgtgataaagagaaactaaggaagca

SEQ ID NO: 28052 - DNA, 120 bp, synthetic construct
  source 1..120: mol_type = other DNA
aaataaattaattaatgagtatcatatgaaggagattgcctcttgtaaatcagctgtcctgcagggagcaggcagggaggagggaaaaaaaccctatctattaaatctgttttgaacaaa

SEQ ID NO: 28053 - DNA, 120 bp, synthetic construct; identical to SEQ ID NO: 8462
  source 1..120: mol_type = other DNA

SEQ ID NO: 28054 - DNA, 120 bp, synthetic construct
  source 1..120: mol_type = other DNA
ctggggaatactgaagaaaggtgcagagccgtagaggcacagtcacccctgaatccagaacaattttaaaaatgcagattttttgtgatacattttaatcttgatatatttcaaaaaatg

SEQ ID NO: 28055 - DNA, 120 bp, synthetic construct
  source 1..120: mol_type = other DNA
tttctctttccaagcatctggatccttttatatactatattgttccagtgggtggtctggaagttttaggggaaggctgtaatgtttggtatgggaggcaggcatgcagaaagctcaaga

SEQ ID NO: 28056 - DNA, 120 bp, synthetic construct
  source 1..120: mol_type = other DNA
acagacaccaacaccaccctgactattcaacagtcacttgagaaggctttttattgtataggattatttgttggacagcaccccttgcaaccagatcaataaaacaaacttattagaatc

SEQ ID NO: 28057 - DNA, 120 bp, synthetic construct
  source 1..120: mol_type = other DNA
gacactttggggagaattaagttgaagtttctggactcaatgtctctgtctaaactgctttcagtgattcaggactttttttttttgtctaggtatatctttgccttctcaaatgcttat

SEQ ID NO: 28058 - DNA, 120 bp, synthetic construct; identical to SEQ ID NO: 8463
  source 1..120: mol_type = other DNA

SEQ ID NO: 28059 - DNA, 120 bp, synthetic construct
  source 1..120: mol_type = other DNA
tcatcaccatgaatgtgcaaagcacagtaatcatgattactttcctatgtaccaagtattagaccaagtgccttacatatagaatctcaattcatcctctttaaattccaggcgagaagc

SEQ ID NO: 28060 - DNA, 120 bp, synthetic construct
  source 1..120: mol_type = other DNA
tctcacctcccctattcctccccagacccagcaaagtgcatggtgtatagtaagtgcatcatacatattaaatagatacatgaaaagttccctttctccagagagaaataaagctagaaa

SEQ ID NO: 28061 - DNA, 120 bp, synthetic construct; identical to SEQ ID NO: 8464
  source 1..120: mol_type = other DNA

SEQ ID NO: 28062 - DNA, 120 bp, synthetic construct
  source 1..120: mol_type = other DNA
aaaaaagaaaaagaaaatgctaactttccactaatctcagcaaataaaaactcctatatattttgtagacttcaaatgtctgtacccagggaaaccattactcaacagtgtataaaacga

SEQ ID NO: 28063 - DNA, 120 bp, synthetic construct
  source 1..120: mol_type = other DNA
ataatggcatctaatgcatgatttgcatttgagcctgaggaattaaaaatttaatagagcagctgagtattttaaatcttttggaagaattgaaaaagaaatatgaactcttacacaccc

SEQ ID NO: 28064 - DNA, 120 bp, synthetic construct
  source 1..120: mol_type = other DNA
tttgctgtaatcatctgtagtaagaatagcagaatcacactaatatgtgctgaaggctgaggatacagcccctggaggttttgacaacacatttccaccacagatttaccacccttttca

SEQ ID NO: 28065 - DNA, 120 bp, synthetic construct; identical to SEQ ID NO: 8465
  source 1..120: mol_type = other DNA

SEQ ID NO: 28066 - DNA, 120 bp, synthetic construct
  source 1..120: mol_type = other DNA
aaatgcaaatgaaaccataattctcctttgacatggatgcttaaaatcatagactgtgagatctggaaaggacttcagagatcttctagttcaaccccttggatttatagaggaacagct

SEQ ID NO: 28067 - DNA, 120 bp, synthetic construct
  source 1..120: mol_type = other DNA
ggttatttaaaaatcacatttacgttgctgtctgcattgtttttcatagccttggcactcaaagtgtgacctgtggcccagcagcagccgcatcaccatcacccgggagtttgatggaaa

SEQ ID NO: 28068 - DNA, 120 bp, synthetic construct
  source 1..120: mol_type = other DNA
accagactaaaagctggttcacagatttgtgagaactgttttgtgtccagtctgtgatgaggtaaacacagaaattaagagtaaacctttaggaacgtttttatcaatttcatggagtaa

SEQ ID NO: 28069 - DNA, 120 bp, synthetic construct; identical to SEQ ID NO: 8466
  source 1..120: mol_type = other DNA

SEQ ID NO: 28070 - DNA, 120 bp, synthetic construct
  source 1..120: mol_type = other DNA
tgcacacgttgtcaactaatacaacctacaagtctgtggtcagatattctacttctatctcaactgtatggacttaatactctttctgtttgttttggttttggtttcttacactcactg

SEQ ID NO: 28071 - DNA, 120 bp, synthetic construct
  source 1..120: mol_type = other DNA
agccattttttccaaactaatcctaggacttaacacagttggcttatctaaggatcaaacctgcggttatgacctcattaacatcacgttctagcaaataagattctttacataaatcta

SEQ ID NO: 28072 - DNA, 120 bp, synthetic construct; identical to SEQ ID NO: 8467
  source 1..120: mol_type = other DNA

SEQ ID NO: 28073 - DNA, 120 bp, synthetic construct
  source 1..120: mol_type = other DNA
acaaaagagcaatgttattgctcttatttattctgcagtcatggagctaaaaaagaaagcctttcagtcagctaaggagagagagctggtgtgaatgtgctgaccagcccaggcaaactg

SEQ ID NO: 28074 - DNA, 120 bp, synthetic construct
  source 1..120: mol_type = other DNA
tggtctgttgactaatagtgagggtacattgtttgctggaaagcagagttcacaagccccagagaaaggccaaagatctagtataaactagctggaggctattcagaaaccaagggcaat

SEQ ID NO: 28075 - DNA, 120 bp, synthetic construct; identical to SEQ ID NO: 8468
  source 1..120: mol_type = other DNA

SEQ ID NO: 28076 - DNA, 120 bp, synthetic construct
  source 1..120: mol_type = other DNA
taaaaatatttattgaatctttgaaagcacaaagactttctaatcttaaaagccatagataaatcacgaggaaaaggaccacatgtaaaatgaaaataaaaatatatgtacactaataca

SEQ ID NO: 28077 - DNA, 120 bp, synthetic construct
  source 1..120: mol_type = other DNA
attatttaaaaaatccctatgatggcaagaatgaggtgaaaccaaaacttagacatgcaggtgcacacgtgaccacattcataataggtagtaagggctttaaagtgcctgtagccatcc

SEQ ID NO: 28078 - DNA, 120 bp, synthetic construct
  source 1..120: mol_type = other DNA
attaaagctaagggtagagcccaaatgcttaaaaaatgaaaacacagggttatatagtattttaaaatgtgtatgtgtggaaaacatataatacaaactgaatttatgttgtgattgcaa

SEQ ID NO: 28079 - DNA, 120 bp, synthetic construct
  source 1..120: mol_type = other DNA
gtaggtagtttcttcgctacttcccaaactttcttaaatgagcatattaaacattaatagcagtcactcagggacctatgagtattttctccaatttctctgcacttttctaaattaaaa

SEQ ID NO: 28080 - DNA, 120 bp, synthetic construct; identical to SEQ ID NO: 8469
  source 1..120: mol_type = other DNA

SEQ ID NO: 28081 - DNA, 120 bp, synthetic construct
  source 1..120: mol_type = other DNA
attagtttgttaaaaaaaaaaacaaagacccctcaaagaataggaagcaaagagcccccaaggatcagtactggggattgtctaaaacggcatttttaaaaaaatcttggagagaaagtg

SEQ ID NO: 28082 - DNA, 120 bp, synthetic construct
  source 1..120: mol_type = other DNA
aattcatgatggcagtcacctctggagagaggaatggcaaaggaactagggagaaaaagagggacataagctttatctgagatgctctggttcgttcatttaaaattcatgaaatgttga

SEQ ID NO: 28083 - DNA, 120 bp, synthetic construct
  source 1..120: mol_type = other DNA
ttattagtcactgcactgttttgcatttaaatttttttaaaaaacaagaggcgaagggctccaaacagagacaagtagactagttgcgaacatctgttaagtgtgaaaagggggaacaat

SEQ ID NO: 28084 - DNA, 120 bp, synthetic construct; identical to SEQ ID NO: 8470
  source 1..120: mol_type = other DNA

SEQ ID NO: 28085 - DNA, 120 bp, synthetic construct
  source 1..120: mol_type = other DNA
taactcatatcatgatgcccattaatcttaaaatggtgcataaagtgatagctatcacattgttgtactaaccatcactatgatctcatatcacaacagaatataataaattgtaaatta

SEQ ID NO: 28086 - DNA, 120 bp, synthetic construct
  source 1..120: mol_type = other DNA
agactaaataagcttcagcacatgtaaaatcatggtcataagaaagaaaatatatattaccctcctaaggcatagctctcaattaatgatttgtggccagcaaggagatcttggattctc

SEQ ID NO: 28087 - DNA, 120 bp, synthetic construct
  source 1..120: mol_type = other DNA
tcaagagaccctgggcagtaccatcaaagaactcttctctgatgagggtaggctgtgcagacaggccaggacgccatggatttttagaagccagtgatggtcactcctctactgactgtg

SEQ ID NO: 28088 - DNA, 120 bp, synthetic construct; identical to SEQ ID NO: 8471
  source 1..120: mol_type = other DNA

SEQ ID NO: 28089 - DNA, 120 bp, synthetic construct
  source 1..120: mol_type = other DNA
tagagaagtgattcttctgtgaatggctaatggaagctttctcatctgacaaatcagtaagaatgtcaaatggaaggagcagcatggatgaagcatggcactgcaaacatatactgtaga

SEQ ID NO: 28090 - DNA, 120 bp, synthetic construct
  source 1..120: mol_type = other DNA
tggcaaaggagtctggactttttcctaaaggcagtaggaagtggttaatgatccaatgcatgttttaaaaatataactcttacttgcccattcaaaaaaaaaaaaacatattaagcacct

SEQ ID NO: 28091 - DNA, 120 bp, synthetic construct; identical to SEQ ID NO: 8472
  source 1..120: mol_type = other DNA

SEQ ID NO: 28092 - DNA, 120 bp, synthetic construct
  source 1..120: mol_type = other DNA
gaggttatgttagatgaaaataacacaaaagcaccattttactcaacagttaggcattcctataggttaaacataaaaacgggttccagaagggaacatttgcagattagagacgggaaa

SEQ ID NO: 28093 - DNA, 120 bp, synthetic construct
  source 1..120: mol_type = other DNA
ctctagcatggactttagagtcttgcaactcgtattaaatgttaaagtctccacactccaaataatgctctggcaaggaaatggtaaaccagctttagagctccgctcaattctttatgt

SEQ ID NO: 28094 - DNA, 120 bp, synthetic construct
  source 1..120: mol_type = other DNA
gtacccattatctgaattgtgagcattgtacccaataggtaatttttcaactttcaccctcctcctaccttctcacctttggtagtctccaatgtccatcattccactctctctgtccaa

SEQ ID NO: 28095 - DNA, 120 bp, synthetic construct
  source 1..120: mol_type = other DNA
aggaagagaaatcattatattaaaaagacgcctgtactcatatttttatcacagcactattcccaaagcaaagatatagaatcaacataaggattcatcaatggagggctggataaagaa

SEQ ID NO: 28096 - DNA, 120 bp, synthetic construct; identical to SEQ ID NO: 8473
  source 1..120: mol_type = other DNA

SEQ ID NO: 28097 - DNA, 120 bp, synthetic construct
  source 1..120: mol_type = other DNA
cttcatggtgaactacctgccgtttccctgacaacgttgtcttcttcttccaggtcgtatcctttcttgcaagtcatttcatttttcatcaactcttacatattcttttaggctctacaa

SEQ ID NO: 28098 - DNA, 120 bp, synthetic construct
  source 1..120: mol_type = other DNA
ttatcactctgtactggactccttcatttacccatgggttgatcccaacagaccataagctggagggcaggaaccttgttttattggtctttgtgccttagcacatccagtgcctgctgg

SEQ ID NO: 28099 - DNA, 120 bp, synthetic construct; identical to SEQ ID NO: 8474
  source 1..120: mol_type = other DNA

SEQ ID NO: 28100 - DNA, 120 bp, synthetic construct
  source 1..120: mol_type = other DNA
gaaggtagataagggatcttggaggaggggtctctgtgaaaaataagctactgtgtttcccattcaatgcctcagcaccaaattttattatttttattgccctcatataaggaattcatg

SEQ ID NO: 28101 - DNA, 120 bp, synthetic construct
  source 1..120: mol_type = other DNA
ttttttctgatgcccaacatcaattggactataaatctgtcatatactactactcgtttaggtctctccaagttataacccatgtggtccagccaagatacagagattcccaaaaatgct

SEQ ID NO: 28102 - DNA, 120 bp, synthetic construct
  source 1..120: mol_type = other DNA
aaataactaggtcacaatagtgttctcaagattctgaatccctaattacaattcccccatgataaaggcatgagggtacatatttacatgaaccaaagtttttcctttctcaagccaagt

SEQ ID NO: 28103 - DNA, 120 bp, synthetic construct
  source 1..120: mol_type = other DNA
aattccaagggggggcattcaaacatctaccaccactctttcctggcctacttaaatcgccctttttttcctctcattttatccattgtaatatgctctggcattttcacaataagaatg

SEQ ID NO: 28104 - DNA, 120 bp, synthetic construct; identical to SEQ ID NO: 8475
  source 1..120: mol_type = other DNA

SEQ ID NO: 28105 - DNA, 120 bp, synthetic construct
  source 1..120: mol_type = other DNA
cttcagctggcaccacatgattgatttgtgcagcctaacaattcaaaaagaaattaagctgttactatgtgcttgttactaaagtaatatttatctttatacaaaccaaccatcgtttac

SEQ ID NO: 28106 - DNA, 120 bp, synthetic construct
  source 1..120: mol_type = other DNA
tcaaaccttctaaggttggcaagtagttcaaattcatttttagttcattcattaaaagggagaaagtggaaagaaaaatcaaatctgcatgggaagaagcacaaagcagctacatccaca

SEQ ID NO: 28107 - DNA, 120 bp, synthetic construct; identical to SEQ ID NO: 8476
  source 1..120: mol_type = other DNA

SEQ ID NO: 28108 - DNA, 120 bp, synthetic construct
  source 1..120: mol_type = other DNA
taagaaaatgtggcacatatacaccatggaatactatgcagccataaaaaatgatgcattcatgtcctttgtagggacatggatgaaattggaaaccatcattctcagtaaactatcgca

SEQ ID NO: 28109 - DNA, 120 bp, synthetic construct
  source 1..120: mol_type = other DNA
ggagggatagcattgggagatatacctaatgctagatgacgagttagtgggtgcagcacaccagcatggcacatgtatacgtatgtaactaacctgcacaatgtgcacatgtaccctaaa

SEQ ID NO: 28110 - DNA, 120 bp, synthetic construct
  source 1..120: mol_type = other DNA
acagctttgaaaggagggcaggcagggcaaatgcaatttgaggcacagagatttcaccacgagcactgaatcttgcttgtatgtcataacaaatatctggatgtagcaattagagcagag

SEQ ID NO: 28111 - DNA, 120 bp, synthetic construct
  source 1..120: mol_type = other DNA
ttatataattcctgtttggcctactgctgaattttaataatggccattatttttcttcttatattacaatttcatctacatacagttgaatatatagctctactaccatctcaaaaaagc

SEQ ID NO: 28112 - DNA, 120 bp, synthetic construct; identical to SEQ ID NO: 8477
  source 1..120: mol_type = other DNA

SEQ ID NO: 28113 - DNA, 120 bp, synthetic construct
  source 1..120: mol_type = other DNA
gtggtagggtccacagctttttagcaacccaatacgactaaaagaattgccactagtattaacttcctgaagttaacaaaggagtctattaaataaataatgaataaaccagagtcagtg

SEQ ID NO: 28114 - DNA, 120 bp, synthetic construct
  source 1..120: mol_type = other DNA
ggtatttctcaatccagcctcttagtttcattttcttttccttccttgtccagtttttccaattgcttctaagccaacagatcctcatacctacccacaccatggcgctatcaaagaaga

SEQ ID NO: 28115 - DNA, 120 bp, synthetic construct; identical to SEQ ID NO: 8478
  source 1..120: mol_type = other DNA

SEQ ID NO: 28116 - DNA, 120 bp, synthetic construct
  source 1..120: mol_type = other DNA
gaccgggttgttctgagcacccacaggaaggcatgggaaaaaaagaaacatctactttaggccattccagtgatgctagactatgccaaaagccacacacccaaatctgaatttcttctg

SEQ ID NO: 28117 - DNA, 120 bp, synthetic construct
  source 1..120: mol_type = other DNA
tattttcagccacagattagctacagttactattctatcctaaagagataaacgaaagccaattataatttcataatcaagtatagcgagccagaggggtaggaaactacccaccaaaac

SEQ ID NO: 28118 - DNA, 120 bp, synthetic construct
  source 1..120: mol_type = other DNA
cattgagtaactgaggctgggtgagctcagaacatcatcacagcaatgcaccaacaaatcatgcactacaccatcaacccatgtcctattgcaaaaagtgatcagctgtatatatgccag

SEQ ID NO: 28119 - DNA, 120 bp, synthetic construct
  source 1..120: mol_type = other DNA
ataattctaaatttccagtagtttttatatgacagaaactgcaaatctcctgatacgtgcagcaagaaaacaaagaggtcataaaagaaaaccaattctcaactcttcctggaatacaca

SEQ ID NO: 28120 - DNA, 120 bp, synthetic construct; identical to SEQ ID NO: 8479
  source 1..120: mol_type = other DNA

SEQ ID NO: 28121 - DNA, 120 bp, synthetic construct
  source 1..120: mol_type = other DNA
ggtgtgaaaaatgagaggaaagaacaaagatagagctaaaattaaaagatagttaataataacaaaaggtaatgctagcgaccacagtgagctctaaaagcaagcaaatacatgttggag

SEQ ID NO: 28122 - DNA, 120 bp, synthetic construct
  source 1..120: mol_type = other DNA
gaagggttgccccaaggactgactaaggtggtatatgttcataagtgctgcataaatggaagggatgacataaatgtggcatctctgaggtattaacacttcacagaatacacttggctc

SEQ ID NO: 28123 - DNA, 120 bp, synthetic construct; identical to SEQ ID NO: 8480
  source 1..120: mol_type = other DNA

SEQ ID NO: 28124 - DNA, 120 bp, synthetic construct
  source 1..120: mol_type = other DNA
ttagatgcagtaagaatttattcttctaaagcccacaaaaccacatgtggtattagaaaaaaatgacatgaccaaacagtgtgttgctaggtggttgttgttattgttcacgtaaaccat

SEQ ID NO: 28125 - DNA, 120 bp, synthetic construct
  source 1..120: mol_type = other DNA
catccaaaggcgttccccagggacaagactgcaggcatccattcaaaagtatgcattatctcaaaatgtttgacgcctaaacaaaccatttttgtggtgtacttgcatttttttggacac

SEQ ID NO: 28126 - DNA, 120 bp, synthetic construct
  source 1..120: mol_type = other DNA
aagggcattggaaacctataagaagagctctctcatcttaacaaagttggtattccagaggctcctctgggaagagtctcatggtcagccggagccatcaaacttctaatgtgctataga

SEQ ID NO: 28127 - DNA, 120 bp, synthetic construct; identical to SEQ ID NO: 8481
  source 1..120: mol_type = other DNA

SEQ ID NO: 28128 - DNA, 120 bp, synthetic construct
  source 1..120: mol_type = other DNA
ctaactttagtcctctgggactaacacttttagtcctttgcaacaaaagaagaatggcacatggttccatgagtaaaagcatcccccactcccatccaacctgaccaggccgtatttgta

SEQ ID NO: 28129 - DNA, 120 bp, synthetic construct
  source 1..120: mol_type = other DNA
gctaagtacctcttatatttcgttattggccttttctgaatagacaagttcattttcccttctgtacctgtatgtcagtaaaagtaagcaaatctttcaggaatttttggttagctattg

SEQ ID NO: 28130 - DNA, 120 bp, synthetic construct
  source 1..120: mol_type = other DNA
acaactgcaacagttgaatgtgtactaaagaaaagcacacggttgatgtgcttctttcttgatgttgacctttctatatccagctcaagaatgttgggtttcatctgaataggggatcca

SEQ ID NO: 28131 - DNA, 120 bp, synthetic construct
  source 1..120: mol_type = other DNA
aatgatacttgtcaaccaagattaccctcattttcatgtgaatttaaaatagttaacatttcttatacatgtattatgtgccagatcctgtgctaagtactttgtggatgatctcactta

SEQ ID NO: 28132 - DNA, 120 bp, synthetic construct; identical to SEQ ID NO: 8482
  source 1..120: mol_type = other DNA

SEQ ID NO: 28133 - DNA, 120 bp, synthetic construct
  source 1..120: mol_type = other DNA
gttctgaaaataatttcactatcattttgtctcattcataaaaagtaaagaataacaaccccaggagccatgagaacaggaaagtcctgggtacactcccagttggctccgtcaagggat

SEQ ID NO: 28134 - DNA, 120 bp, synthetic construct
  source 1..120: mol_type = other DNA
tagcttattctgcttggcaatgtggagaacactgtagaaagaaatgaggcctaaataaggtctgaaaagaaatagcccaatcccactccaaattatgccgtctgaaaaaataaataaata

SEQ ID NO: 28135 - DNA, 120 bp, synthetic construct
  source 1..120: mol_type = other DNA
cttctccatagtagaacaagaaagttccaaaattttctccagttttcaagtgaagttttcaaatgattatataaagaatgagtcaaaatttacttctggcttcgcttttgccttttaacg

SEQ ID NO: 28136 - DNA, 120 bp, synthetic construct; identical to SEQ ID NO: 8483
  source 1..120: mol_type = other DNA

SEQ ID NO: 28137 - DNA, 120 bp, synthetic construct
  source 1..120: mol_type = other DNA
tcccaatctattgtttacttataaagctcttctcaaacagttcagagacaaaagattatcaccgagggaatatggcaggaaagttggagaacattttttttcatgcgttcacttcctaca

SEQ ID NO: 28138 - DNA, 120 bp, synthetic construct
  source 1..120: mol_type = other DNA
taaacactccctctcatcgacttcaagagcccacagttaaattatgtaaatcaacaaatatttaatagatacctactctcttcacagctctaagcttggtagtgaaataggaagaagtat

SEQ ID NO: 28139 - DNA, 120 bp, synthetic construct; identical to SEQ ID NO: 8484
  source 1..120: mol_type = other DNA

SEQ ID NO: 28140 - DNA, 120 bp, synthetic construct
  source 1..120: mol_type = other DNA
gaagccatgaaacagaattctagatggttttatgctgatagaagtatttcaacacaaaaatcaataaatgcacatggaaaaaaagttttttgacaaggtgaatatgctcattctttacct

SEQ ID NO: 28141 - DNA, 120 bp, synthetic construct
  source 1..120: mol_type = other DNA
ctaaaatgtctgatgtaatccttaaagtgaatggcaaaaaccaaaaatttaatagattcactgagcaactgaaatgtgggtggggtccgggaggccagaggtggccatgtcagcaaagtt

SEQ ID NO: 28142 - DNA, 120 bp, synthetic construct
  source 1..120: mol_type = other DNA
gagacttaaacttgaccttgaaagaaaaggatctaaccagtatagaaaagggagctctagctctaagaatatctcatactcctagttctagaagtagtacccccagtggctgataagaac

SEQ ID NO: 28143 - DNA, 120 bp, synthetic construct; identical to SEQ ID NO: 8485
  source 1..120: mol_type = other DNA

SEQ ID NO: 28144 - DNA, 120 bp, synthetic construct
  source 1..120: mol_type = other DNA
ccagatctccaagatgaagacattaaaggtgttaagggaaaacaaattggaaagaagaaattctaaaattcatgggcttggagatgtgagttaaactaagtaaaaacagtttccttcctg

SEQ ID NO: 28145 - DNA, 120 bp, synthetic construct
  source 1..120: mol_type = other DNA
tctacaaaaagtactttggcacatcgtcgggaccatgaagccccatgtatttgtccaacatatgttcataaaccaaaaacagcatagactctctagagaccataactactgggaacataa

SEQ ID NO: 28146 - DNA, 120 bp, synthetic construct
  source 1..120: mol_type = other DNA
acatacaaaggggcattttttaatcccaatatcctgcttcagacagaaattgtacagaagcacagttcaatagaatggaagggcatcgtggagaagcttgcaataggccctcccttcttt

SEQ ID NO: 28147 - DNA, 120 bp, synthetic construct; identical to SEQ ID NO: 8486
  source 1..120: mol_type = other DNA

SEQ ID NO: 28148 - DNA, 120 bp, synthetic construct
  source 1..120: mol_type = other DNA
tataacatgagattgagctttatcacttatatttgatcaaacttctactaagacagagaacctgagaaattaggctcagctctgaggccccagttcttttttttaatggtttacttttca

SEQ ID NO: 28149 - DNA, 120 bp, synthetic construct
  source 1..120: mol_type = other DNA
ggatatgtattactggaagttctagagttgtgctgtccaagatgatagccacatgtggatattagctggtccaaactgagatgtggtataatatatgcattggatttcaacgacttagaa

SEQ ID NO: 28150 - DNA, 120 bp, synthetic construct
  source 1..120: mol_type = other DNA
ccttttactttttcatgtggctacaagaaaagttaaaattatatatgtggctcacattatatttctattgttcagtactgttctactgtttgaacatctaagatcgaaaagtggttcaaa

SEQ ID NO: 28151 - DNA, 120 bp, synthetic construct
  source 1..120: mol_type = other DNA
ttaacagttgtactaaatgattagctttgataacacaagagaatgttagaatcaaaatttcaattgaaccaccaagggaacagatgccacattctaagtcaagtgtgatattttgatgca

SEQ ID NO: 28152 - DNA, 120 bp, synthetic construct; identical to SEQ ID NO: 8487
  source 1..120: mol_type = other DNA

SEQ ID NO: 28153 - DNA, 120 bp, synthetic construct
  source 1..120: mol_type = other DNA
agggactgtcaaatgcctggaaactgtctggccagatgcttggacaatggttccaatgagcatttgctaacgtgtcaatagtttgcactccagcaatttatcgtggcagaaaaaatgcat

SEQ ID NO: 28154 - DNA, 120 bp, synthetic construct
  source 1..120: mol_type = other DNA
actggatgcccagcgactgaggaagaaaatgtcagcaacagtcagaacacagatgcctctgcccccattaaaggaactataggggagaaagtccaaaacagaccagatgatttcatctac

SEQ ID NO: 28155 - DNA, 120 bp, synthetic construct
  source 1..120: mol_type = other DNA
cctgcgagacagaggagcatgtgtgccctcagtgtatacagttacccagccacaaaaaaacgagtgtgtgtgtcaaaagatgcaattcctggaactattctaggaaaatctagtttattc

SEQ ID NO: 28156 - DNA, 120 bp, synthetic construct; identical to SEQ ID NO: 8488
  source 1..120: mol_type = other DNA

SEQ ID NO: 28157 - DNA, 120 bp, synthetic construct
  source 1..120: mol_type = other DNA
acgccattctcccgcttcagcctcccgagtaactgggactataggtgcccaccaccacgcccggctaattttgtttttctatttgtagtagagacagggtttcacagtagagccaggatg

SEQ ID NO: 28158 - DNA, 120 bp, synthetic construct
  source 1..120: mol_type = other DNA
gaggttcatagaggccttcagtgtagtttagtaatgacagtttactgccttttgcttttggaaagaagaaaatatacatagttcacagagctctgccttccaaaggcacatggagaatgg

SEQ ID NO: 28159 - DNA, 120 bp, synthetic construct; identical to SEQ ID NO: 8489
  source 1..120: mol_type = other DNA

SEQ ID NO: 28160 - DNA, 120 bp, synthetic construct
  source 1..120: mol_type = other DNA
ttgaaagtcattcaataaaatcattagaaagatatctgtgcaaaatcatttttacatcatcagagaaacaaggtgtgaggacaagtttctcaaacgtcaactgcacatataagaaggagg

SEQ ID NO: 28161 - DNA, 120 bp, synthetic construct
  source 1..120: mol_type = other DNA
gaagagctagttcactttcaactgttctgcttctctaatgaactaaggattatttcaatcctctcatttttattctactccactttggccccaattgttccttttccttaaggctatcag

SEQ ID NO: 28162 - DNA, 120 bp, synthetic construct
  source 1..120: mol_type = other DNA
acacagaacaaatgcaccaggatttagaagagtccacgtgcatgctaatattctgaggatacatgatgagcagcttcagatggagaaatgagagaaaacttcttgctatttgcatttatg

SEQ ID NO: 28163 - DNA, 120 bp, synthetic construct
  source 1..120: mol_type = other DNA
gcttttgatcccaaacagctaaaatgtgtgattacccactgtagtcactagaattaacagtaaattactgtaggctgtttctgaaaactcaaatgcctcctcaaaagggaaaaaaaaaaa

SEQ ID NO: 28164 - DNA, 120 bp, synthetic construct; identical to SEQ ID NO: 8490
  source 1..120: mol_type = other DNA

SEQ ID NO: 28165 - DNA, 120 bp, synthetic construct
  source 1..120: mol_type = other DNA
tgccttttcatcttgacttccattctaagattcatagttctaggtttcttcttaccgttcctcagaaaagtctttagagttatgagtggcccctttccagtgaggtcttcagagttacga

SEQ ID NO: 28166 - DNA, 120 bp, synthetic construct
  source 1..120: mol_type = other DNA
ggcttaggagccagaatgtctaggttcaggcctctattttaccacttataagctgtcccttcttggacaaggcacttgatctctctttgcctctgcttattcctccataagatgggactt

SEQ ID NO: 28167 - DNA, 120 bp, synthetic construct; identical to SEQ ID NO: 8491
  source 1..120: mol_type = other DNA

SEQ ID NO: 28168 - DNA, 120 bp, synthetic construct
  source 1..120: mol_type = other DNA
acatgaccctgaaaagtctcatccactcatatgattcactgtgtttaatacaaaggcatttaacaagattttaaatgtgcattctgaggcaagatggcaagagaaagggattccacacag

SEQ ID NO: 28169 - DNA, 120 bp, synthetic construct
  source 1..120: mol_type = other DNA
taatctgataacaaatgctaacatactgtaccactgagctaagaagtgattaagttctactagttgctcaaggcccaagcaaagagaaggcaaagggtcggagtaggaggcaacaagaaa

SEQ ID NO: 28170 - DNA, 120 bp, synthetic construct
  source 1..120: mol_type = other DNA
tgctcacaagggctaatacctaagctaaatgaatgaacttgagcaagatgtgacaataggtagtggtggggactatgacaaactagaagatgtatttaaaggtattcctattcagctttt

SEQ ID NO: 28171 - DNA, 120 bp, synthetic construct
  source 1..120: mol_type = other DNA
aatggtaaaatatatcattgctacctgcccactggggatgaggctggccagccaagaatgtttttaaacaaacttatcttaatgacaaaaagctgcaagtaagactaattgctttataat

SEQ ID NO: 28172 - DNA, 120 bp, synthetic construct; identical to SEQ ID NO: 8492
  source 1..120: mol_type = other DNA

SEQ ID NO: 28173 - DNA, 120 bp, synthetic construct
  source 1..120: mol_type = other DNA
tgcatccctgttaactgaaaaatgacagtcttgtggacctgaaagatcattcttctgaaagatgggaccaaattcaattagatatcaacattgtaatcagctctgtttagcatgaaacca

SEQ ID NO: 28174 - DNA, 120 bp, synthetic construct
  source 1..120: mol_type = other DNA
atgggtcgtgtactgtgcatcacacagtaaggctagaattaagaagatgaagaaactatagttgctcctgaaaacttatgctctagtgagggagattggaaacttgctgttttgatgcaa

SEQ ID NO: 28175 - DNA, 120 bp, synthetic construct
  source 1..120: mol_type = other DNA
gcctcccggatctgcactttaaaaaataaacatcacatcccagttaaaacagaatacaaccaacctaggtacttatccagtaataagcaccacaataagtataccaacccaccatcggaa

SEQ ID NO: 28176 - DNA, 120 bp, synthetic construct; identical to SEQ ID NO: 8493
  source 1..120: mol_type = other DNA

SEQ ID NO: 28177 - DNA, 120 bp, synthetic construct
  source 1..120: mol_type = other DNA
tccactaccacaaatgcctgaaaatctgccacttggggatgaatttgattttgaaaatcaccactgggaaaattctatggagtcaacagatatttacaccttagtgcagatttcaggata

SEQ ID NO: 28178 - DNA, 120 bp, synthetic construct
  source 1..120: mol_type = other DNA
tggacaaagatcaaatctttgaagaaatcactgtggaatggttcaatatcatgccctttattttagactgtgttatcatcaatatcaactatgagcatcaatagtctttgcagcaaatct

SEQ ID NO: 28179 - DNA, 120 bp, synthetic construct
  source 1..120: mol_type = other DNA
tttcacacaccactcctcaagctacacattaacaattttaatctcctacaacttccctgattaagtaataaggccacagaatgatattgcctagaagaaatagtttttagtactctggac

SEQ ID NO: 28180 - DNA, 120 bp, synthetic construct; identical to SEQ ID NO: 8494
  source 1..120: mol_type = other DNA

SEQ ID NO: 28181 - DNA, 120 bp, synthetic construct
  source 1..120: mol_type = other DNA
accactctctgctctttgttttcctctattacatgttttaaatgacatattcaacatctgctactgaatctttactttccatcttagaataagatgtctatacaactttggctaaaagtg

SEQ ID NO: 28182 - DNA, 120 bp, synthetic construct
  source 1..120: mol_type = other DNA
gattattagtaagaccaaagttcagggaaaaaaacttaagaatattgcatatccacacatatctcaatatcatacttgtatttttaggtaggcaaatcaggtagaatgtttcttttaatt

SEQ ID NO: 28183 - DNA, 120 bp, synthetic construct; identical to SEQ ID NO: 8495
  source 1..120: mol_type = other DNA

SEQ ID NO: 28184 - DNA, 120 bp, synthetic construct
  source 1..120: mol_type = other DNA
agagcttaatccttacccttacagaagaaagttctcccctttttatcctgatgccaactggtaattatgtatacactcataactgagtaccaccaaattagcaaataactgaatttaggt

SEQ ID NO: 28185 - DNA, 120 bp, synthetic construct
  source 1..120: mol_type = other DNA
aagtagccatgcagacccaatgtctgtgcaaattagtaacagctttaggtaccagcatgtctttacgtaaatgattttaaaaaccattacctctttcacactggggtccagtaaatccgt

SEQ ID NO: 28186 - DNA, 120 bp, synthetic construct
  source 1..120: mol_type = other DNA
gtaacacttgtggtcctctggaaggacaacaataaaatgtctaaagtcaccctggtgtttgttttggacggtcactctacagttacacatactcagatattcctcagtccactcttaggt

SEQ ID NO: 28187 - DNA, 120 bp, synthetic construct; identical to SEQ ID NO: 8496
  source 1..120: mol_type = other DNA

SEQ ID NO: 28188 - DNA, 120 bp, synthetic construct
  source 1..120: mol_type = other DNA
aaatctagagatgcttcagggcaggatattttgcttgttagaaatgacattaaaataagaattgaaagttcatgtgctgaacaactcctctttgtacaagttcctgtaactcgtgcatgc

SEQ ID NO: 28189 - DNA, 120 bp, synthetic construct
  source 1..120: mol_type = other DNA
cccagctgaaatcttactgctccatgaggctcccccaaaacctccattcaaattccttgctccttatatattttctatacatttttccatacattaccctatagcagccatgaagttgag

SEQ ID NO: 28190 - DNA, 120 bp, synthetic construct
  source 1..120: mol_type = other DNA
tgcaatgttcatgtcaagggcaggctcacagccaatgactaaacacagcattaggatactaaagcctggctatttccacccatcatggaactctttgatgggcactttttgccctgggtt

SEQ ID NO: 28191 - DNA, 120 bp, synthetic construct
  source 1..120: mol_type = other DNA
cattccctcctacttctgcttcctctttcctttattcttcacgggtcttttccccaataaattctcttttatgtctaattctgtcttgatattttcttggcataagaggacctgaactga

SEQ ID NO: 28192 - DNA, 120 bp, synthetic construct; identical to SEQ ID NO: 8497
  source 1..120: mol_type = other DNA

SEQ ID NO: 28193 - DNA, 120 bp, synthetic construct
  source 1..120: mol_type = other DNA
catagccttagttaggacttgtcttcctgctcctgttttgtcctcctccagttgcgcttccacactgtgatctttctcactgtaaaccttcgtaagtgaagggtaataaggttggtattt

SEQ ID NO: 28194 - DNA, 120 bp, synthetic construct
  source 1..120: mol_type = other DNA
ttagaggaactactgaggtccctgtgttccagttccctcatctgccagagggtaacatttatgtcctctaatacaaagagttgttgtcatattaaatgagttaacacacatagagttcta

SEQ ID NO: 28195 - DNA, 120 bp, synthetic construct; identical to SEQ ID NO: 8498
  source 1..120: mol_type = other DNA

SEQ ID NO: 28196 - DNA, 120 bp, synthetic construct
  source 1..120: mol_type = other DNA
cacccacactgcggaggctgcctctcctctctccaggctgggctacacaaaactcaaccaatattcttctcccactgcagtgtgtggatggtgatacagtttggctgtgtcaccacccaa

SEQ ID NO: 28197 - DNA, 120 bp, synthetic construct
  source 1..120: mol_type = other DNA
gggggagttttcctgcacaagctctttctgcctgctgccatccatgtaagacgtgacttgttgctccctgccttccaccatgattatgaagcctccccagccatgtggaactgtaagtcc

SEQ ID NO: 28198 - DNA, 120 bp, synthetic construct
  source 1..120: mol_type = other DNA
cattattaatcctaataaatatatacacaaaagcaaaaattagaaacgccctgaataacgcccaccattgaggattcattaaataaacagtcaaacatccaggtaatagagtactaggca

SEQ ID NO: 28199 - DNA, 120 bp, synthetic construct
  source 1..120: mol_type = other DNA
tatacagtaagaactcatgtaccaaatatgcattacaagtctagaagatactatctggaatgatgaaatcacgaataattttactttttgtatttttaaacttttccaaattttctgtag

SEQ ID NO: 28200 - DNA, 120 bp, synthetic construct; identical to SEQ ID NO: 8499
  source 1..120: mol_type = other DNA

SEQ ID NO: 28201 - DNA, 120 bp, synthetic construct
  source 1..120: mol_type = other DNA
tctggaatgaacaagaattctgctcctttggtggtgactagaaatcaaggagatcaggcaagcaaggtggtgaaggtaaatgagaggaaaatgaatcaaacaacctgtaaccaatcaagg

SEQ ID NO: 28202 - DNA, 120 bp, synthetic construct
  source 1..120: mol_type = other DNA
tctctttattctacttgtctacaaacaggttaacatctagaatacttataactacagtgtacttacgttgtccacagtgagtccctatgtatcctttctggcatagacagtgatcgtcac

SEQ ID NO: 28203 - DNA, 120 bp, synthetic construct; identical to SEQ ID NO: 8500
  source 1..120: mol_type = other DNA

SEQ ID NO: 28204 - DNA, 120 bp, synthetic construct
  source 1..120: mol_type = other DNA
aattagccaggcgtaatggcgcatgcctgtaatcccagccactccggaggctgaggcaagagaatcgcttgaacctgggggggcagaggttgtagtgagcggagatcgcaccactgtact

SEQ ID NO: 28205 - DNA, 120 bp, synthetic construct
  source 1..120: mol_type = other DNA
acaactcaatgtcatttctgtaatttataccaacaagaaagtattgccttgagtaaccatatgagacaagattatgatggcaataattttcccgtgaaaagatttagaatcccaggtaga

SEQ ID NO: 28206 - DNA, 120 bp, synthetic construct
  source 1..120: mol_type = other DNA
gaaaatacctacaaagacatttaataacaacactgcctgacgacagggacagctggatttgcctgagaaagagctgcttgtttaaactgtaacctcaaactaaataagatcctcattttc

SEQ ID NO: 28207 - DNA, 120 bp, synthetic construct; identical to SEQ ID NO: 8501
  source 1..120: mol_type = other DNA

SEQ ID NO: 28208 - DNA, 120 bp, synthetic construct
  source 1..120: mol_type = other DNA
gaagaaggttcgataattttagctaaggagaagagaatatcttctttctacacaaaagcagaaatctgctgtttatgctcactcttcctgaagcacaggggccaaatcttctcttcagag

SEQ ID NO: 28209 - DNA, 120 bp, synthetic construct
  source 1..120: mol_type = other DNA
tacacaaatctcagcctgccaacagggaaggaaagtgcagaacccactatcttctatacccttccttttacagcacaaagaagttaggttgagttgaaagttaaatgccttttcaacaac

SEQ ID NO: 28210 - DNA, 120 bp, synthetic construct
  source 1..120: mol_type = other DNA
tgcccactatgtcctatgactccatcccctgatctacttatcagtcattcattcactcaatgaacatttctgagtgcctactatgtgccatgcaaaacacccggcactttccttgtccta

SEQ ID NO: 28211 - DNA, 120 bp, synthetic construct
  source 1..120: mol_type = other DNA
cccatttcaaatattgcttccttccgctaatcttttctgatatctcccaaaccaaatgtgagccctctctcctttccaattacttcatatttctcttttgaagcatatattatataatcc

SEQ ID NO: 28212 - DNA, 120 bp, synthetic construct; identical to SEQ ID NO: 8502
  source 1..120: mol_type = other DNA

SEQ ID NO: 28213 - DNA, 120 bp, synthetic construct
  source 1..120: mol_type = other DNA
ggaaactgattgcagttattttaggctcttatgattccgttaaaacatctcagccaagatgcttttttaactaaaaatctgtctatacgtatacaaagaaaaaaaatgatttagtgaaaa

SEQ ID NO: 28214 - DNA, 120 bp, synthetic construct
  source 1..120: mol_type = other DNA
tgtcatctgtcaagcagcataggaactcagccttcaaactgatttcaattaaagcagttcatgccaagagctaatttccattcccacatgagcaacaaagccatttaactactttgagat

SEQ ID NO: 28215 - DNA, 120 bp, synthetic construct
  source 1..120: mol_type = other DNA
ccctgatatatattttttaccctgtctttcaggcaaaccttttccagcataaaatattctttctttaaaaaataaaagcactcattcagacttgtgaaacaagaagacatcaaggaacca

SEQ ID NO: 28216 - DNA, 120 bp, synthetic construct; identical to SEQ ID NO: 8503
  source 1..120: mol_type = other DNA

SEQ ID NO: 28217 - DNA, 120 bp, synthetic construct
  source 1..120: mol_type = other DNA
tcttaaaaaagccaactgaaacctaggggttcctcctacacccataatgatgctgtattctttactggatgcactaagtaccccaagtcagaagatattcctaaactcaatctgtgttaa

SEQ ID NO: 28218 - DNA, 120 bp, synthetic construct
  source 1..120: mol_type = other DNA
cgtaaagggtttcatgtaaggctcaataacccagagctaacagaaaatgttgccatctccccatatccataaaagatcccaaattaattttgtgttcatatcagatgtcagtcagtcatt

SEQ ID NO: 28219 - DNA, 120 bp, synthetic construct
  source 1..120: mol_type = other DNA
aaaagaacaatgtgagcacgctatgggaatgagagagaggcagggctggcacctggatctcaatacctcaggtaatgattttctttgggatgcattaggtttggaatgattctaaagacc

SEQ ID NO: 28220 - DNA, 120 bp, synthetic construct; identical to SEQ ID NO: 8504
  source 1..120: mol_type = other DNA

SEQ ID NO: 28221 - DNA, 120 bp, synthetic construct
  source 1..120: mol_type = other DNA
aaggacaagttaaatgacagtagtgataaaggtgcttccataaagggtggagtagaaagcaaagagttcaaccatttctaaggacaagtctgagtagattccatgcatgcttctcctccc

SEQ ID NO: 28222 - DNA, 120 bp, synthetic construct
  source 1..120: mol_type = other DNA
ttcctctgaatgtccccacactttcaggatggttgcaccatactccctcaaacttgctaacacactggtctagaattgttctgctggccttcttacacccttagagctcagatttgcatt

SEQ ID NO: 28223 - DNA, 120 bp, synthetic construct; identical to SEQ ID NO: 8505
  source 1..120: mol_type = other DNA

SEQ ID NO: 28224 - DNA, 120 bp, synthetic construct
  source 1..120: mol_type = other DNA
tctgggtggcagagcaagaccctgtctcaaagaataagtaaataaaaataaaactatgaaaccatcagaaaaaagttggagaaaatcttcagaatctaggagtagacaaagcattcctag

SEQ ID NO: 28225 - DNA, 120 bp, synthetic construct
  source 1..120: mol_type = other DNA
gtgataaaatgcctgcaaataacatatctgataaacagctagtatttagagtatacaaagaattctcaaaactcaacaatgaaataacaaacaattcaattagcatctgggcaaaagagg

SEQ ID NO: 28226 - DNA, 120 bp, synthetic construct
  source 1..120: mol_type = other DNA
aaatacaaaaaacttagtggggcatggtggtgtgcccctgtagtcccagctactcaagaggctgaggtgggaggataacttgagcctgggagacggaggttgcagtgagctgagatcgca

SEQ ID NO: 28227 - DNA, 120 bp, synthetic construct; identical to SEQ ID NO: 8506
  source 1..120: mol_type = other DNA

SEQ ID NO: 28228 - DNA, 120 bp, synthetic construct
  source 1..120: mol_type = other DNA
actatcatacaacttagaaattgcatttctgtgtatttatcccagagaacataagatttgtgttcacaccacaaacttgtacacaaatgttcatagcagcttagttcaaataataaagaa

SEQ ID NO: 28229 - DNA, 120 bp, synthetic construct
  source 1..120: mol_type = other DNA
caacctagatgactctccagagaattctgatgagtgaaaaaagccacttccaaaaggttacatattctgtgattccatttatataacatttgtgaaatgaaaaaattatagaaatgtaga

SEQ ID NO: 28230 - DNA, 120 bp, synthetic construct
  source 1..120: mol_type = other DNA
ttgtgatatcctggttctgctcttgtactatagtcttgcaagatgtcacaatggggaaaactaaataaagaatacccaggatatttctgatttcttacaactgccatggttggaatgttc

SEQ ID NO: 28231 - DNA, 120 bp, synthetic construct; identical to SEQ ID NO: 8507
  source 1..120: mol_type = other DNA

SEQ ID NO: 28232 - DNA, 120 bp, synthetic construct
  source 1..120: mol_type = other DNA
ttatctcagaatatgaagtttaatttttagcattcttaaagtgtaaagagtaaaacagaatgagaagatttcaaaattacaaaatataaactgtaggaattacaaaatagaaaatacaaa

SEQ ID NO: 28233 - DNA, 120 bp, synthetic construct
  source 1..120: mol_type = other DNA
tctaaatgtttgtgtccccacaaaattcatatgttgaaacttagtccctaatgggagagtatggagcagtggggcctttggggaggtgattaagttatgcaggcagagccctcatgaaag

SEQ ID NO: 28234 - DNA, 120 bp, synthetic construct
  source 1..120: mol_type = other DNA
gcctcttgatcttggacttcccagcctctagaactgtaaaaaaatacatttttattgtttataaatgacccagtctacagtattttgttatagaagcccaaactgacaaatatatatgta

SEQ ID NO: 28235 - DNA, 120 bp, synthetic construct; identical to SEQ ID NO: 8508
  source 1..120: mol_type = other DNA

SEQ ID NO: 28236 - DNA, 120 bp, synthetic construct
  source 1..120: mol_type = other DNA
tctctcattcaggtcactaagagatcattttctattctcagagtcacaggacactcaagtcaaaaaccacctgaaagaacaacacttcttccattctgttcatattcaagtgggaaaact

SEQ ID NO: 28237 - DNA, 120 bp, synthetic construct
  source 1..120: mol_type = other DNA
cacatgtagtgaatgcaaacatttcactgagtagaattgtccttctattagcaggaaagttagcaaagtgatcaggatgttctgtggaatggcacagctgttccctagaacatcactcca

SEQ ID NO: 28238 - DNA, 120 bp, synthetic construct
  source 1..120: mol_type = other DNA
tagacaatattagtgcagagagaatcaaagccaacaattttaaagatttcaagtaaccccaaagatcctgatgaaaccagaacctcctccttacactactctcatccacaagctacttgg

SEQ ID NO: 28239 - DNA, 120 bp, synthetic construct; identical to SEQ ID NO: 8509
  source 1..120: mol_type = other DNA

SEQ ID NO: 28240 - DNA, 120 bp, synthetic construct
  source 1..120: mol_type = other DNA
tgttagttggttcagggaccaatctgagagatggggtctattcccaactttataactgcacttcttttccaaccctgagatgcttatgcttcagcggcagcctggaagtcacccttatag

SEQ ID NO: 28241 - DNA, 120 bp, synthetic construct
  source 1..120: mol_type = other DNA
atgtctgacaccaagctgagatcaaggaaaactatgctacacattcagtgcaataagcaagagtcccagcccatagggcaatttctatcccaattgtaactggctgtatttagtaaaagg

SEQ ID NO: 28242 - DNA, 120 bp, synthetic construct
  source 1..120: mol_type = other DNA
tctaggaaacactcataggagagtgggaaagtgagacaaaaagagaaggaagctaataaagtacattatcaaatctattatcactgtgaacagcgagggctcggtcccactggggaactt

SEQ ID NO: 28243 - DNA, 120 bp, synthetic construct
  source 1..120: mol_type = other DNA
atctgttgttggttaaaagtctgcttccaggtccactaacccccagcacttccagcttgccctgcatgcagacctggcatgctctctggccagaaaagtatacaaagctctcaggaagag

SEQ ID NO: 28244 - DNA, 120 bp, synthetic construct; identical to SEQ ID NO: 8510
  source 1..120: mol_type = other DNA

SEQ ID NO: 28245 - DNA, 120 bp, synthetic construct
  source 1..120: mol_type = other DNA
tatgactcacttgcccaaacccccaaaagaaaaacaacagaacaagcaagaaaaggttctgaagaatgaactgtggatattcatctggcatcacagaaagtggcaacattctgaaaggaa

SEQ ID NO: 28246 - DNA, 120 bp, synthetic construct
  source 1..120: mol_type = other DNA
cagtaccacaaggaagcatgcctagatttcttgagccaaaaatgtccattaaacaaccatttcattgagcaccttttatggtgtttacactggagatacaaagatgaataaggcgatacc

SEQ ID NO: 28247 - DNA, 120 bp, synthetic construct
  source 1..120: mol_type = other DNA
tgggcagaacagagaaggcagatgttctagtgaaaaaatgtattgcaggaaagaggaaagccaaaatcaaatttaggagaaaatggggtataaccacataaaataatattatatataatg

SEQ ID NO: 28248 - DNA, 120 bp, synthetic construct; identical to SEQ ID NO: 8511
  source 1..120: mol_type = other DNA

SEQ ID NO: 28249 - DNA, 120 bp, synthetic construct
  source 1..120: mol_type = other DNA
tccacagcactcaatccatcagaagcccaggacaggctatgaagagaaaaccaaacaaacaaattaaatcctgcatctaaacatatttatatgatcacaagaaatatattattatattaa

SEQ ID NO: 28250 - DNA, 120 bp, synthetic construct
  source 1..120: mol_type = other DNA
tgcagtggcgcaatctctgctcactgcaagctccgtctcccaggttcatgccattctcctgcctcagcctcccgagtagctgggactacaggcatgtgccaccatgcccagctaattttt

SEQ ID NO: 28251 - DNA, 120 bp, synthetic construct
  source 1..120: mol_type = other DNA
tccagcctattgtaaatgtttaatgtttaatttttatcctgttctgaattccatcaacagtctgagagaagaatgctggaatctactgctagagtactgattctacagtcaggaagccat

SEQ ID NO: 28252 - DNA, 120 bp, synthetic construct; identical to SEQ ID NO: 8512
  source 1..120: mol_type = other DNA

SEQ ID NO: 28253 - DNA, 120 bp, synthetic construct
  source 1..120: mol_type = other DNA
tacagaaggctaagaaagggttctattataaagttcattgagaaaaatccaaataccattatatttctcttttagtgatccaattttggtcttagaccataatgtgccaaataaaggaga

SEQ ID NO: 28254 - DNA, 120 bp, synthetic construct
  source 1..120: mol_type = other DNA
gaactaagtgattcttaatgtcccttcagctctaaatttccccattatactactggagttttctgaaaactggacattatttcataggtacaacaactgtaaaagctcatgaagggcagg

SEQ ID NO: 28255 - DNA, 120 bp, synthetic construct
  source 1..120: mol_type = other DNA
tcaatagaggaacctctgttatcatttgagatctttcttagtctttccactgatcttcgtctggtgatctatctccttcctttcccctctgtctaagagtcaggtctgctcttggtccct

SEQ ID NO: 28256 - DNA, 120 bp, synthetic construct; identical to SEQ ID NO: 8513
  source 1..120: mol_type = other DNA

SEQ ID NO: 28257 - DNA, 120 bp, synthetic construct
  source 1..120: mol_type = other DNA
gttttctatttacttacggacaatacactgatttccgccaggtaaggttttccatccagggcaacagtaagcattataacgtgatccacagacattgggtctaaaacaaaaacagaagaa

SEQ ID NO: 28258 - DNA, 120 bp, synthetic construct
  source 1..120: mol_type = other DNA
atgctgggttggtagcttgggacactaacatagtgatatcaacagggacatcccttaatatcacctatgcatatggcccatcagggaaataaaaaccagagatacaaaatgtagcacatt

SEQ ID NO: 28259 - DNA, 120 bp, synthetic construct; identical to SEQ ID NO: 8514
  source 1..120: mol_type = other DNA

SEQ ID NO: 28260 - DNA, 120 bp, synthetic construct
  source 1..120: mol_type = other DNA
aggtaatgaattcaagaccagcctggccaacatggtgaaaccccatctctaccaaaaatacaaaaattagcttggcatggtggcacgcacctgtagtcccagctacttggggggctgagg

SEQ ID NO: 28261 - DNA, 120 bp, synthetic construct
  source 1..120: mol_type = other DNA
cttgataacagcagttacaagaaaataaaatcagtgtcactctgggtttcttgtttacagacagttcatcacatgtcttggagtagaaactccattcagaatccagatgatccacattta

SEQ ID NO: 28262 - DNA, 120 bp, synthetic construct
  source 1..120: mol_type = other DNA
gcctaagcattgatgctagctgctagcgatcaggggctaataaggaaggtcaaatgttttgcaatcaatttcacaaactaggagcaattccaaagcttactggtataaacactgtaaacc

SEQ ID NO: 28263 - DNA, 120 bp, synthetic construct; identical to SEQ ID NO: 8515
  source 1..120: mol_type = other DNA

SEQ ID NO: 28264 - DNA, 120 bp, synthetic construct
  source 1..120: mol_type = other DNA
tacccagcagcccaggccttctctaaggatagagaggaaatgattggatagaggtgaaatatgtgcatgatgttagagcctgtgtgagctcagtatatttctgtgtacaatggcacaatg

SEQ ID NO: 28265 - DNA, 120 bp, synthetic construct
  source 1..120: mol_type = other DNA
cagcattatcatcctgatggaatcatcttctgacccaggttactcagccagtggaaacacaaggaataaaggaagaaagatgttatggagaattttaagtcaaaggctctcaaccctttg

SEQ ID NO: 28266 - DNA, 120 bp, synthetic construct
  source 1..120: mol_type = other DNA
acgcacaaaccttccaaacttttattataaaagttctctcaatttgaaatgacaatccaggccaaagtcaaccacctcaaaccttctccagcaacagcccattagaacagctccgctgga

SEQ ID NO: 28267 - DNA, 120 bp, synthetic construct
  source 1..120: mol_type = other DNA
ctgacataatatgtcacagtcatagtgtctgacaaaaatatgtatgtcataacacatacacaagatgaagaagctcagaaacaaaggatccagaataacaatttcagtcctacaaagcaa

SEQ ID NO: 28268 - DNA, 120 bp, synthetic construct; identical to SEQ ID NO: 8516
  source 1..120: mol_type = other DNA

SEQ ID NO: 28269 - DNA, 120 bp, synthetic construct
  source 1..120: mol_type = other DNA
gaagaagaagagagaaagagggtacagatactttagtgagctaagtccccatctttcaaagcaagaaaccagtgggtactgtttaaatctagatacagaggtacaaacatggtagatggt

SEQ ID NO: 28270 - DNA, 120 bp, synthetic construct
  source 1..120: mol_type = other DNA
gttaccttaagagatgagaacccggggaagcagagagagagttctcttgctttcttatctaatattcatccacaactgttcattttaaaatatacgctcttctatttccatcgtctttca

SEQ ID NO: 28271 - DNA, 120 bp, synthetic construct
  source 1..120: mol_type = other DNA
tcttaaggttctttataattttgggttggacttattttatttgcatcctctgactttctatgagttttaaaactttatcattaacaagtaacatgttatttaatttcagctgtttcaacc

SEQ ID NO: 28272 - DNA, 120 bp, synthetic construct; identical to SEQ ID NO: 8517
  source 1..120: mol_type = other DNA

SEQ ID NO: 28273 - DNA, 120 bp, synthetic construct
  source 1..120: mol_type = other DNA
ttaataaagttactctttcgggtcaatgaaagtatagcatccatacctctttctcttttcacttcatgagccatccccatcaacccccatcactccaacacacacacacaaagtcggatt

SEQ ID NO: 28274 - DNA, 120 bp, synthetic construct
  source 1..120: mol_type = other DNA
ctttgaggtaatttttattgttataatgtttaacactaaaaaaaaaactatggcttaagaaggtcaaacaacctggccaaggtcacatagcttagacgtgtctaatggagatttgaactc

SEQ ID NO: 28275 - DNA, 120 bp, synthetic construct; identical to SEQ ID NO: 8518
  source 1..120: mol_type = other DNA

SEQ ID NO: 28276 - DNA, 120 bp, synthetic construct
  source 1..120: mol_type = other DNA
ttagtagagacggggtttcaccatattggccaggctggtctcgaactcctgacctcgtgatccgcccgcctctgcctcccaaagtgctgggattaaaggtgtgagccaccgtgcccagcc

SEQ ID NO: 28277 - DNA, 120 bp, synthetic construct
  source 1..120: mol_type = other DNA
acttctcttaccagttactttcaatattgtgctctgtaagaacccaactccaaacaccctgggggatgagtgagtctcagcaggtttgatacttggattcagttaaacatagccctcaga

SEQ ID NO: 28278 - DNA, 120 bp, synthetic construct
  source 1..120: mol_type = other DNA
ttagccaaagcccacttctgcaatttggcctcttacagcaagatagcctttctgtttcctatgcaaagtgcaaactccttttcagaaaaggttaaggtaataaaaacaaggtcaggaggc

SEQ ID NO: 28279 - DNA, 120 bp, synthetic construct; identical to SEQ ID NO: 8519
  source 1..120: mol_type = other DNA

SEQ ID NO: 28280 - DNA, 120 bp, synthetic construct
  source 1..120: mol_type = other DNA
atacataaatgagctgcctgtattgtgaactacacatcatgattttatttgctctttgacaattttcttatcaagataaaaaaagaaaaaacatcatgagtactgtctgatgaaggggcc

SEQ ID NO: 28281 - DNA, 120 bp, synthetic construct
  source 1..120: mol_type = other DNA
aggtcaagtctcccagtagtgatgtgaatacctcatgtgactgttacagtccatctgccagtcacaatgcaacctgggtaacaaaacttcaaaccctggtaatgagaacagcttccatga

SEQ ID NO: 28282 - DNA, 120 bp, synthetic construct
  source 1..120: mol_type = other DNA
gcaagtgaagcttcctctgtatttacagctgctcccatcactctcattaccacctgaactccacctcctgtcagatcagggacagcattagattctcatagaagcacaaacctgattgtg

SEQ ID NO: 28283 - DNA, 120 bp, synthetic construct
  source 1..120: mol_type = other DNA
ggctcccactgattctacattacggtgagttgtataattatctcataatatattacaatgtaataataatagaaataaagtgcacaataaatgtaatgagcttgaatcatcctgaaacca

SEQ ID NO: 28284 - DNA, 120 bp, synthetic construct; identical to SEQ ID NO: 8520
  source 1..120: mol_type = other DNA

SEQ ID NO: 28285 - DNA, 120 bp, synthetic construct
  source 1..120: mol_type = other DNA
cctcatctcccctttcctatctgcctttcttccactctgtctcttttcttctctcttcagttcctgttttcagggcatttagaattaaatgttttgttaccatctcaaactcaatttatc

SEQ ID NO: 28286 - DNA, 120 bp, synthetic construct
  source 1..120: mol_type = other DNA
taccaacccaaaggttttttttaagtttcttgtttttttgtgactatggaaataaaatatgattaagaaacaaactgaaataatttgtacctcaaacaatcatgacacgagtttacctgt

SEQ ID NO: 28287 - DNA, 120 bp, synthetic construct
  source 1..120: mol_type = other DNA
aagtctggatactctacatgcttcgacctatatgaatgccaaatcaacatgttttaaaaattaaattaacctattgagatacatttggttgtgcgctgaagggctcatgagagggactca

SEQ ID NO: 28288 - DNA, 120 bp, synthetic construct; identical to SEQ ID NO: 8521
  source 1..120: mol_type = other DNA

SEQ ID NO: 28289 - DNA, 120 bp, synthetic construct
  source 1..120: mol_type = other DNA
catcattgagggtttgggaaacaaagacaaaacaccatagttccatcagcctcacaataatcactatattaatcatatctattgagtgcttatcctatttcagtcacagcactcatttac

SEQ ID NO: 28290 - DNA, 120 bp, synthetic construct
  source 1..120: mol_type = other DNA
gggagccaaaattcaaatctagctccccatgttagcattttttgcacgagtctctgcttgttttgcatgagtgttattacaatcttcattttttgttactttttcacttatgttattgta

SEQ ID NO: 28291 - DNA, 120 bp, synthetic construct
  source 1..120: mol_type = other DNA
gctaggcactgtgttagataagaaataaaactgaccaagaagagcacacctaatgcctagatcttggttgctaatactattattcaataaaaggaatcagggctcctgggagatgattct

SEQ ID NO: 28292 - DNA, 120 bp, synthetic construct; identical to SEQ ID NO: 8522
  source 1..120: mol_type = other DNA

SEQ ID NO: 28293 - DNA, 120 bp, synthetic construct
  source 1..120: mol_type = other DNA
gctacacatactgactgtcttccaaagagtacagtataaagggagggggaggaagtggaaaatcctgacaaatcctatctcagccaggcaatgaagggttacagcaacaatggaaaatca

SEQ ID NO: 28294 - DNA, 120 bp, synthetic construct
  source 1..120: mol_type = other DNA
agggccattctacaaaatatctgaccagcccttctaaaaactgtcaaggtcattaaaacaaggaaagtctgagaactgtgacagctaagtcaagtctaagaaaacatgactactaaatgc

SEQ ID NO: 28295 - DNA, 120 bp, synthetic construct
  source 1..120: mol_type = other DNA
gcacgatggctcacgcctgtaatcccagtactttcggaggctgaggcaggcggatcacaaggtcaggagatcgagaccatcctgcctaacacagtgaaaccccgtctctactaaaaatac

SEQ ID NO: 28296 - DNA, 120 bp, synthetic construct; identical to SEQ ID NO: 8523
  source 1..120: mol_type = other DNA

SEQ ID NO: 28297 - DNA, 120 bp, synthetic construct
  source 1..120: mol_type = other DNA
aataaaacagctatatttaaaaagtgactaagacacacagtctttgctcttgaggatcttacagtctaggaacacaggcacatacacaaagattatctacacaacagacaaagcactaac

SEQ ID NO: 28298 - DNA, 120 bp, synthetic construct
  source 1..120: mol_type = other DNA
ctatctgagctatgacttgatgtttcccggttgctaaggggagtcactagttttatttcatcccactgatgaaattccccttaaattctccaactccattagcaaatcccttgtccaaat

SEQ ID NO: 28299 - DNA, 120 bp, synthetic construct; identical to SEQ ID NO: 8524
  source 1..120: mol_type = other DNA

SEQ ID NO: 28300 - DNA, 120 bp, synthetic construct
  source 1..120: mol_type = other DNA
ccatctttccatttcaatatgtagttccatctcccttagtgttccctgatgaatccatccatctttcacactacaaacacaattccagacatatcttcaaaaacctacataggctatact

SEQ ID NO: 28301 - DNA, 120 bp, synthetic construct
  source 1..120: mol_type = other DNA
ctagactatcctggagtctatttagaagcacacaagataatattgactaaaggcaatagtgagtacgaagtacaattagcaaagattaatatcatctcctcagtgccaaaagtaagccag

SEQ ID NO: 28302 - DNA, 120 bp, synthetic construct
  source 1..120: mol_type = other DNA
acacgtctttgaaaggctacataggcagttaaacagaaatgtatggtggttttgtgccttgattatttcactgacatgcctgtcattaacttattctgatcagtgaagttacccatgttt

SEQ ID NO: 28303 - DNA, 120 bp, synthetic construct
  source 1..120: mol_type = other DNA
tctatttatttctttggcaaaagaagaaaaaaaatcccacaagcaactaagtgaaggttttcagctcacaagttggcatgcattttattatggcagattgctgcaactgatcaaggccat

SEQ ID NO: 28304 - DNA, 120 bp, synthetic construct; identical to SEQ ID NO: 8525
  source 1..120: mol_type = other DNA

SEQ ID NO: 28305 - DNA, 120 bp, synthetic construct
  source 1..120: mol_type = other DNA
acacgcacagcctaagaaaattaggaaatagaaagctgaaaaggcagttcctcggatctgggacatcatttttagactgacagccaatttaaatcctattggaatcttttataggtggag

SEQ ID NO: 28306 - DNA, 120 bp, synthetic construct
  source 1..120: mol_type = other DNA
cagcaagtcagcactcttcacttcatgcttctggaactctggattaagcagcactaagaacactaagtctgcttgtctgcttagaaaattacaccaccagaatggactcctcaaagttct

SEQ ID NO: 28307 - DNA, 120 bp, synthetic construct
  source 1..120: mol_type = other DNA
catacatgggaagaggtgaatttcttcatgaagtttcaactatttgaccatctaaggatgaggaagcattgcttccaaacagaaaatccagcttatctcaaatgtttgcttctggagcat

SEQ ID NO: 28308 - DNA, 120 bp, synthetic construct; identical to SEQ ID NO: 8526
  source 1..120: mol_type = other DNA

SEQ ID NO: 28309 - DNA, 120 bp, synthetic construct
  source 1..120: mol_type = other DNA
cttgtggaattcctttaccacccacagaaggaactggggactaaaaccatgattcttgccacttcccagaaattctcaaaccaagagctctgtccagggagataatatcttctgaatgta

SEQ ID NO: 28310 - DNA, 120 bp, synthetic construct
  source 1..120: mol_type = other DNA
tgtcagcccccaattgacaaacaggtagagctccaaaatttcatttctatattagtatttagaacttggaatggcctgtccaatagaaacaatgttaataggtggtggtttggtctccag

SEQ ID NO: 28311 - DNA, 120 bp, synthetic construct
  source 1..120: mol_type = other DNA
taaaatgttgtttctatgggaaaacacattccacggcaggcaaccagaggaaaacttggccactcaaacccaccatgtctcagcttagtaagctgcccagtgatctgtgagaaatgaaca

SEQ ID NO: 28312 - DNA, 120 bp, synthetic construct; identical to SEQ ID NO: 8527
  source 1..120: mol_type = other DNA

SEQ ID NO: 28313 - DNA, 120 bp, synthetic construct
  source 1..120: mol_type = other DNA
gcacgagtggcttacacgtgaagcaaggaagcaagtccgttttgaatcctatttggtgactttagtctcataccaaaattattcaagaatttcacctctcctaaaactggaaattaccag

SEQ ID NO: 28314 - DNA, 120 bp, synthetic construct
  source 1..120: mol_type = other DNA
tttaccactaagacaacataagttaatgagaagtctatcagagtagtgagtatttaatttatttaaaaaggtggatatgtttataagaaacttttaaaaaaagatccagcctgggcaaca

SEQ ID NO: 28315 - DNA, 120 bp, synthetic construct
  source 1..120: mol_type = other DNA
gctagagtgagccgcaatcacgccactgcactccagcctgggtgacagagcaagaccctgtctcaaaaaaaaaaaaaaaatgaaaagtataattactagtaagaaatcagtatcatttca

SEQ ID NO: 28316 - DNA, 120 bp, synthetic construct; identical to SEQ ID NO: 8528
  source 1..120: mol_type = other DNA

SEQ ID NO: 28317 - DNA, 120 bp, synthetic construct
  source 1..120: mol_type = other DNA
ttaacacttcacaatattagcagtcaaaaacttaagttttttttttaattttgaaattgaaacaaagttgtaagcatttattttttaaacatttagatatgtggaaaacttttaataaaa

SEQ ID NO: 28318 - DNA, 120 bp, synthetic construct
  source 1..120: mol_type = other DNA
ctcttcccccaaaccctatcaagaaaatgtattggtgtgctcattctcagatgaggaaactgaaaatgtgagaagtgaagtaatttttcaaaggctacacaatggaaacgtcataaatcc

SEQ ID NO: 28319 - DNA, 120 bp, synthetic construct
  source 1..120: mol_type = other DNA
tataaactaatttgtacatcattttttgtgctctgatttttttactaggtttgcaaaataaataaataagacagtgttttggaagtgtattagcaaaggaaaacaatgtaaagagaacac

SEQ ID NO: 28320 - DNA, 120 bp, synthetic construct; identical to SEQ ID NO: 8529
  source 1..120: mol_type = other DNA

SEQ ID NO: 28321 - DNA, 120 bp, synthetic construct
  source 1..120: mol_type = other DNA
gacaatgagctgctcgaaggcctgggtgatccagatgatcttctaaaaaaaaccctccaatttcacgtctctgtgacttaattcagaggctgctgggatattgtccattacacagagaaa

SEQ ID NO: 28322 - DNA, 120 bp, synthetic construct
  source 1..120: mol_type = other DNA
gaagatgtcacagtatttgtgtttcaagctataattaagcagagcaggtgctaaatgccagcacaaagtttcaacatgacaacttctgaagtggtgatgatgatgtcaaaacagacagaa

SEQ ID NO: 28323 - DNA, 120 bp, synthetic construct; identical to SEQ ID NO: 8530
  source 1..120: mol_type = other DNA

SEQ ID NO: 28324 - DNA, 120 bp, synthetic construct
  source 1..120: mol_type = other DNA
cagctcttgtccctaccttcctttccccaaaggggactgggtgtaccagtaattttcagaatctttcatttgaatcactaaggttgtacttgttccaatttcttgaagaaaaaaaaaaaa

SEQ ID NO: 28325 - DNA, 120 bp, synthetic construct
  source 1..120: mol_type = other DNA
taaggttcttgcctgaaatcccttactttaaaataaaaacacattgagtgcttccaccttgacactcacaaaagatcatgggataaatggacctttgcagaattattttcttccctttca

SEQ ID NO: 28326 - DNA, 120 bp, synthetic construct
  source 1..120: mol_type = other DNA
agcatattgcaaacattactggctgtgaagcattgagcctaagttcaaaactaggagtaaaactttacagcattagtaagtcaataggaaatgacagaatttgaatatccccattctgcc

SEQ ID NO: 28327 - DNA, 120 bp, synthetic construct; identical to SEQ ID NO: 8531
  source 1..120: mol_type = other DNA

SEQ ID NO: 28328 - DNA, 120 bp, synthetic construct
  source 1..120: mol_type = other DNA
gcttccttcatcgagaaagtctccctagaaataaaatatcagctgaactaaatagtgtgcttagtgacatattttggatttacaccctggcttctcatctcatcatggaccagtaacagg

SEQ ID NO: 28329 - DNA, 120 bp, synthetic construct
  source 1..120: mol_type = other DNA
agtttgtggactggcatcttaagaagcactggtgtagaggacaggaaccaatttcttcaatacataaattacaaggaaaaactgacagggggacaatctacatattcaaaaatatttaag

SEQ ID NO: 28330 - DNA, 120 bp, synthetic construct
  source 1..120: mol_type = other DNA
atattagaaaattagtgttaatggtaaacagaataatgttattgtgtttatgtttcttaaagggcccttatcttttaggacacacattgaaatatttaaaagtaaaatgatttttcaagg

SEQ ID NO: 28331 - DNA, 120 bp, synthetic construct; identical to SEQ ID NO: 8532
  source 1..120: mol_type = other DNA

SEQ ID NO: 28332 - DNA, 120 bp, synthetic construct
  source 1..120: mol_type = other DNA
caagaactaaccaaagtgttcctactaagtatccagctactaaataaggttacagttcactagatgaagaatccaagaacaaatgacttcactacacctgtgcaaacaattaacatgtcg

SEQ ID NO: 28333 - DNA, 120 bp, synthetic construct
  source 1..120: mol_type = other DNA
tgggggaaggggtttttgtgtatcaggtccataaaaaggttaaatttgggtttttctgtgcataagtggaagaattcttatggacatgggaaatatgaaatggagggaggaaatcattta

SEQ ID NO: 28334 - DNA, 120 bp, synthetic construct
  source 1..120: mol_type = other DNA
accctgctgtcttctgtcaaagttcaataatgtctggattaagttagaactgcttacaagcaaaaggagaaaaagtggtttgcctatctttgtaaaatacctgaaaggttttcaaaactt

SEQ ID NO: 28335 - DNA, 120 bp, synthetic construct
  source 1..120: mol_type = other DNA
cagagtgagactccatctcaaaaaaaaaaaaaaaaaaagaaaagaaaagaaaagaaagtacctggtattcatttgtttgattttatattcttacttttttacaaactttctgttggtgat

SEQ ID NO: 28336 - DNA, 120 bp, synthetic construct; identical to SEQ ID NO: 8533
  source 1..120: mol_type = other DNA

SEQ ID NO: 28337 - DNA, 120 bp, synthetic construct
  source 1..120: mol_type = other DNA
gattttcaatttctcaagagaaagaggacacagaagaagaagaacaaataagaatctctttgtagtaaatgagcattatgttgctgcatggcatgaagccaaaggaagggaacgctcaac

SEQ ID NO: 28338 - DNA, 120 bp, synthetic construct
  source 1..120: mol_type = other DNA
ctgacgctatggaaaagggagctttctccctgtgagtgcagatgtgttgtgtttgcccatccagtatcccttccccttctctgctaaccaaactcttcgtttcctaagcccattccacat

SEQ ID NO: 28339 - DNA, 120 bp, synthetic construct; identical to SEQ ID NO: 8534
  source 1..120: mol_type = other DNA

SEQ ID NO: 28340 - DNA, 120 bp, synthetic construct
  source 1..120: mol_type = other DNA
gctgccaaagagaatggttttcaacccagtctttccatttactaaaatttaaattcttttcacaaagtatctttttaaaaaatgtgctaatcaggaaagaggcaaggcctatttgacaga

SEQ ID NO: 28341 - DNA, 120 bp, synthetic construct
  source 1..120: mol_type = other DNA
ttaaaaataaaaacttatccccaaactgcctttaagtataaccagatctccacagatatagtaagtccattaaaattacacttttgaacattttaaaattcaggtttgcctcctgtttct

SEQ ID NO: 28342 - DNA, 120 bp, synthetic construct
  source 1..120: mol_type = other DNA
ccttatctgtaacagcattataatcattctcatcatcatagctaaacatgtcaggcatagtactaagaacttgaaatgtaccatcccattaaatcttaggacaacacagaaagatgagta

SEQ ID NO: 28343 - DNA, 120 bp, synthetic construct; identical to SEQ ID NO: 8535
  source 1..120: mol_type = other DNA

SEQ ID NO: 28344 - DNA, 120 bp, synthetic construct
  source 1..120: mol_type = other DNA
tcaaataggaaatagtgtgaggtaattataacatataccccagccactagctctgggtttttatgaccaaactgccaaacattcctagccaactcttcaggaaatgttcaggcactttct

SEQ ID NO: 28345 - DNA, 120 bp, synthetic construct
  source 1..120: mol_type = other DNA
cagcagtccatgaaagattaaaaaactatttgtctacttaaaggctgcacatcaagtccttcactgaaaagcatttgcctacatctcctcagacattaaccccatcagaaagggagagaa

SEQ ID NO: 28346 - DNA, 120 bp, synthetic construct
  source 1..120: mol_type = other DNA
ttctgaaaatgaagcattgggtcctattcaaacgcagctaatgctcataacatagttgtcacttggagtaggcagatgttttacagtattactaggtgagatgatatggaggaaaacaca

SEQ ID NO: 28347 - DNA, 120 bp, synthetic construct
  source 1..120: mol_type = other DNA
actgccttagttgatcccaggtcatttgactctttgactgccaattagaagtgtgagtatgtgtgtggtggagggttgcggggaggagtcatgcttccgattcccggagaagactatttc

SEQ ID NO: 28348 - DNA, 120 bp, synthetic construct; identical to SEQ ID NO: 8536
  source 1..120: mol_type = other DNA

SEQ ID NO: 28349 - DNA, 120 bp, synthetic construct
  source 1..120: mol_type = other DNA
actcagcttccacacctacgaaccggagaggaaaataagcaccttgagcacttgttcctggaccttctctgggcctcagtttcagtatttatacatttctaaaatctgtcctactataac

SEQ ID NO: 28350 - DNA, 120 bp, synthetic construct
  source 1..120: mol_type = other DNA
catcaaaggcccaaacctattagggtctgattacacaatcttacaaattagcactgaatgaacaggggaaatgatacacaataaaccattagttacaagaagcaggatgcatcaaacttt

SEQ ID NO: 28351 - DNA, 120 bp, synthetic construct; identical to SEQ ID NO: 8537
  source 1..120: mol_type = other DNA

SEQ ID NO: 28352 - DNA, 120 bp, synthetic construct
  source 1..120: mol_type = other DNA
actccagaaccttctcccagctctctcctcctgcttccctcaggctttctccttccttcccctaacaaaaaccttaaccctgttttgctttttgaacaccccaatgttcccaggtaaaaa

SEQ ID NO: 28353 - DNA, 120 bp, synthetic construct
  source 1..120: mol_type = other DNA
tgcagcacagcttatgaaattacttacaaaaagaagatgaaacaatgatgatgaagaaaaagaagaaaaggaaaagatggcaacaaagaaggagaaacagaaccggaaaaggaagaagaa

SEQ ID NO: 28354 - DNA, 120 bp, synthetic construct
  source 1..120: mol_type = other DNA
accatacttcagttcaaaaccatgaaacttgacagcagacaatgtgtctttagggcagacataaatcctgtctcccaacaccaacatcataaaatggttgtactatatttggacttagat

SEQ ID NO: 28355 - DNA, 120 bp, synthetic construct; identical to SEQ ID NO: 8538
  source 1..120: mol_type = other DNA

SEQ ID NO: 28356 - DNA, 120 bp, synthetic construct
  source 1..120: mol_type = other DNA
tactccatttataagaaaaatagtacagttcagctcattacaacaccaattctattagcaactgcaacctatttttacttattagtataacccctaatttaaaaaattgaggtggattac

SEQ ID NO: 28357 - DNA, 120 bp, synthetic construct
  source 1..120: mol_type = other DNA
tgtataatcttaaaagctgattttcttaaaagcaaatggaaaatggttagatgttttgaaattctcatatttgaataaaacaaaacatactgcttcattaggaactttcattttattcct

SEQ ID NO: 28358 - DNA, 120 bp, synthetic construct
  source 1..120: mol_type = other DNA
agcaaaatacaatgaggcatcctcagtagagaactaagccaactgaacttgatcaagttagaattaaaacttaaagtatctgattagccttctcaaagatctattgcctcacagtggtag

SEQ ID NO: 28359 - DNA, 120 bp, synthetic construct; identical to SEQ ID NO: 8539
  source 1..120: mol_type = other DNA

SEQ ID NO: 28360 - DNA, 120 bp, synthetic construct
  source 1..120: mol_type = other DNA
ccttcgagttagcctacggtcaatatgtgggattaacacatgtgaccagggtcaggaggctgttgttcaagatccagccccaacagacactcactctgagcaaggcctagtcgctgcatc

SEQ ID NO: 28361 - DNA, 120 bp, synthetic construct
  source 1..120: mol_type = other DNA
gacaagtggctctttgcttcctttattcccctcctcagtgggtccatttagataaaccacacccaagtaaacagggctgcaggcgccagtgcctggtcacagaaccagatgcatatgtga

SEQ ID NO: 28362 - DNA, 120 bp, synthetic construct
  source 1..120: mol_type = other DNA
ttaagccacgaagtctggggcaatttgttacgtagcaataaaataactcaaacactcacaaatgaaaatactttgtttcatggtagtagagggcctaggcctgatctcgtttccctttat

SEQ ID NO: 28363 - DNA, 120 bp, synthetic construct
  source 1..120: mol_type = other DNA
tttgaatatatatggaggtgggagcattctaggtcctcctcgcctttgtctttcacaaccaactagtcaagtactgtctgcattaactctggaaccacctgagtctcttctttcttcacc

SEQ ID NO: 28364 - DNA, 120 bp, synthetic construct; identical to SEQ ID NO: 8540
  source 1..120: mol_type = other DNA

SEQ ID NO: 28365 - DNA, 120 bp, synthetic construct
  source 1..120: mol_type = other DNA
ccaaccctgcccaactgcagtcaatgtcctaagacctcagacacttcatatccctttcccttgatgtatttttcactcatctttcctttatttctcagctatacttactccaagctctag

SEQ ID NO: 28366 - DNA, 120 bp, synthetic construct
  source 1..120: mol_type = other DNA
atgtgccgcatacccagttcctagatgttcctagagataaataaaacaagcaagatctctgccttcaaggagttctcactcctagtagacagtcactttttatcacgtagatcagaggtt

SEQ ID NO: 28367 - DNA, 120 bp, synthetic construct
  source 1..120: mol_type = other DNA
aataaacaggcatggatttgtttcaataaaactctattttcaaaaaaagtgagcttggtcttcagtttgttgaccactgataaactttttttttttttttaagacaggatcttgttctgt

SEQ ID NO: 28368 - DNA, 120 bp, synthetic construct; identical to SEQ ID NO: 8541
  source 1..120: mol_type = other DNA

SEQ ID NO: 28369 - DNA, 120 bp, synthetic construct
  source 1..120: mol_type = other DNA
tatgaagctagattttccaactctaccacttactagtttatgtccctggagtaattactgaaactctgcatcccttgtttcttcatttgttaaatgaataaataagcttaattttcctca

SEQ ID NO: 28370 - DNA, 120 bp, synthetic construct
  source 1..120: mol_type = other DNA
attaaataactcatatgactggtcgtgatttaagacacataccaatttccactggaaagagaaatacttcttgcaaccctattcagagagatttctcacaggggacatgacagcaagagg

SEQ ID NO: 28371 - DNA, 120 bp, synthetic construct; identical to SEQ ID NO: 8542
  source 1..120: mol_type = other DNA

SEQ ID NO: 28372 - DNA, 120 bp, synthetic construct
  source 1..120: mol_type = other DNA
aagttaacgttaagttttgtctttagaacttaacctctgcatacctcggctctcacatctgtgaagggaagcttatgaaagcacccagcttgtagagtggctatgaggattcaatgaatt

SEQ ID NO: 28373 - DNA, 120 bp, synthetic construct
  source 1..120: mol_type = other DNA
ccatggctgcaattgttattatgtatttgtttagacttaataccagaccccctttccagggacgctgtccttctgtgcactcacggttcctgaagtacccccagggttatggggtatatg

SEQ ID NO: 28374 - DNA, 120 bp, synthetic construct
  source 1..120: mol_type = other DNA
ttgtcttcaatgatttaactatctaatgagaaaatcgacttgaacaatcatgaaacgctaaactatcatgtgcctgagttaggccacataactcaggcctgatatattattgatgtcggt

SEQ ID NO: 28375 - DNA, 120 bp, synthetic construct
  source 1..120: mol_type = other DNA
gtaaaatcttattttcacattgaaaataaagctaaaactcccaaagtggttaggctgattggcttactggaagaaaaagccaacaaactggtacatgaatactctaataattttttagta

SEQ ID NO: 28376 - DNA, 120 bp, synthetic construct; identical to SEQ ID NO: 8543
  source 1..120: mol_type = other DNA

SEQ ID NO: 28377 - DNA, 120 bp, synthetic construct
  source 1..120: mol_type = other DNA
taatcttttcaataaatgtaaaccatacccctgcaggagtctttccccatatttaattattagcccatctgacttcaggtgaagtcttaaagtcccctttataaagtaaaatggacttta

SEQ ID NO: 28378 - DNA, 120 bp, synthetic construct
  source 1..120: mol_type = other DNA
taaacaaataaacaaagaccaaaaggaatcacacacaaggggacaaattgtgtcaaatacaactggtctcatgtacctataaaccacacaacaagggcagaagtctcaatccatcttctc

SEQ ID NO: 28379 - DNA, 120 bp, synthetic construct; identical to SEQ ID NO: 8544
  source 1..120: mol_type = other DNA

SEQ ID NO: 28380 - DNA, 120 bp, synthetic construct
  source 1..120: mol_type = other DNA
aaatagagaaaaatgcaatttttgcagagtagatggggaccacactgattccatttttaaaaaaggatttcctgtaaaaacagaaattggcaatttactctaagaaaacacagcagaagc

SEQ ID NO: 28381 - DNA, 120 bp, synthetic construct
  source 1..120: mol_type = other DNA
gggactgcacatccagtgagcagaaaatgaggcagttttctaatctaggaagagagggagctgacaagaaaggaatatatatgcatttgaagaataccaaggcggattttgtagtcacct

SEQ ID NO: 28382 - DNA, 120 bp, synthetic construct
  source 1..120: mol_type = other DNA
taccttttaactagaggaaagattagtgaggtgctgaaagttgctgccaccaactgggcatcaggcagactcgggggttacaaatcactttcacttcataaactgtgcatctccaatcag

SEQ ID NO: 28383 - DNA, 120 bp, synthetic construct
  source 1..120: mol_type = other DNA
aagcaataactggaaaaatgtagtacataactgctttttctgatgatttatacagcagggcaccgttaaaggatttattcatatgagactgtaacggcaataagcagagggaataaattt

SEQ ID NO: 28384 - DNA, 120 bp, synthetic construct; identical to SEQ ID NO: 8545
  source 1..120: mol_type = other DNA

SEQ ID NO: 28385 - DNA, 120 bp, synthetic construct
  source 1..120: mol_type = other DNA
gccgggcttggtggcacccacctgtaatcccagctactctggaggctgaggcaggagaatcgcttgagccgggaaggtggaggcagtaagccaagattgcaccactacactccagcctgg

SEQ ID NO: 28386 - DNA, 120 bp, synthetic construct
  source 1..120: mol_type = other DNA
atgtacaatacattccatgtattaaaaaggatacacacacacatgtgtatgtatacatatatatttgtgtttatttgtacatgtatacatatgcctaaaagatttatagaaaaatacaca

SEQ ID NO: 28387 - DNA, 120 bp, synthetic construct
  source 1..120: mol_type = other DNA
ttataaaatcttataattaacatgagaattaggaacacacataattacaattctattaataccctgtttttaggaaggctttataaatagtttacaataggataaggtctgtgttaatga

SEQ ID NO: 28388 - DNA, 120 bp, synthetic construct; identical to SEQ ID NO: 8546
  source 1..120: mol_type = other DNA

SEQ ID NO: 28389 - DNA, 120 bp, synthetic construct
  source 1..120: mol_type = other DNA
aggaaaaatactggactaaatgaggtcctcttgagaacatatgaaaatcagagcctcagtctacttattgaacttgccatgtgccttgcacacagggcaataaacatctgctgtctgatc

SEQ ID NO: 28390 - DNA, 120 bp, synthetic construct
  source 1..120: mol_type = other DNA
cacagcctaagtgcttggctcatacaatcatcttgtccttactccagactaggagtcaaaaactggtctggtgagtttactttttcttctcatatctgggccatacaaacacaaatttta

SEQ ID NO: 28391 - DNA, 120 bp, synthetic construct; identical to SEQ ID NO: 8547
  source 1..120: mol_type = other DNA

SEQ ID NO: 28392 - DNA, 120 bp, synthetic construct
  source 1..120: mol_type = other DNA
aatttttccggctgaaacatctgtaacagcggcatgggaagccagtgaaatggtcagttgcatgtacacaacacaaacaccactagttaaaaatactcccttaaggccggccacagcagc

SEQ ID NO: 28393 - DNA, 120 bp, synthetic construct
  source 1..120: mol_type = other DNA
ccgtaattttaataagcataatttacggaagagtcaactactgtgtgatttctcctctgactgtcatgggaatcccttcctttccttgccccctttcaaatacagcatctaccaagatga

SEQ ID NO: 28394 - DNA, 120 bp, synthetic construct
  source 1..120: mol_type = other DNA
ctcccaaaatctgcctcaacaatggcccaagattccatttaaccacgtcctctcctttggggcagaaatctctgggagtaggggcaaggtagtttaaccacgaacggggtggggactaaa

SEQ ID NO: 28395 - DNA, 120 bp, synthetic construct; identical to SEQ ID NO: 8548
  source 1..120: mol_type = other DNA

SEQ ID NO: 28396 - DNA, 120 bp, synthetic construct
  source 1..120: mol_type = other DNA
cgctgcgccctgaagcgcaccgcgccgccggggtcccgctatcccgccgcccgtcccccgggccgggctcctcccgccttctccaggcgctgctcccacttcaggcggcccctgccagct

SEQ ID NO: 28397 - DNA, 120 bp, synthetic construct
  source 1..120: mol_type = other DNA
ggtaagggaagaccgtttggtccacagctggctggaaagcccaggcccccggcggcagcagccccggccgatccctcggcctcccgggccccgccagaagagcgcggcgcaaagtaccca

SEQ ID NO: 28398 - DNA, 120 bp, synthetic construct
  source 1..120: mol_type = other DNA
ggaagccagccgcgccgtccccgccgactccgggcgatgccaccgccccccgaacatctgacgcggagcccggcaccaagagccccgggccaggaagctgtcaggcaggggagggccagc

SEQ ID NO: 28399 - DNA, 120 bp, synthetic construct; identical to SEQ ID NO: 8549
  source 1..120: mol_type = other DNA

SEQ ID NO: 28400 - DNA, 120 bp, synthetic construct
  source 1..120: mol_type = other DNA
gcccttcccgagcaccgctccggccctggagggagagagagccagagagcggccgagcgcctaggaggcccgccgagcctcgccgagccccgccagccccggcgcgagagaagttggaga

SEQ ID NO: 28401 - DNA, 120 bp, synthetic construct
  source 1..120: mol_type = other DNA
caacagcggctactcagacgccggcctcggcctgggcgatgagacagacgagatgccgtccacggagaaggacctggcggaggacgcgccgtggaagaagatccagcagaacacattcac

SEQ ID NO: 28402 - DNA, 120 bp, synthetic construct; identical to SEQ ID NO: 8550
  source 1..120: mol_type = other DNA

SEQ ID NO: 28403 - DNA, 120 bp, synthetic construct
  source 1..120: mol_type = other DNA
ggccccggccctcccacccatcgacaagggccatgggcactgcctgcacacccctctggggacagcgagcactccctgggtgccccggggagtccaggccttagggtttgcgagccctcc

SEQ ID NO: 28404 - DNA, 120 bp, synthetic construct
  source 1..120: mol_type = other DNA
gggggcatctccccgcccccaacaaaacaagtggcttcccagcttcacagcccctccgcgggctgggagagggctgaagacaggtccccaaccactgcccgcgtctgcgggctctggggc

SEQ ID NO: 28405 - DNA, 120 bp, synthetic construct
  source 1..120: mol_type = other DNA
gggagacttaacccctgtctgtcctcctcctgcttcagcctgcggtggagggggcttccgcaagtccaggccctgccccagcccaccccctaccgcgggattggctgcagctaacggtct

SEQ ID NO: 28406 - DNA, 120 bp, synthetic construct; identical to SEQ ID NO: 8551
  source 1..120: mol_type = other DNA

SEQ ID NO: 28407 - DNA, 120 bp, synthetic construct
  source 1..120: mol_type = other DNA
cttgatgtctgtcagccccactctcccttggggccatctctaggcctcctgatatagcagctgaggtcagcccagggccctttgccccgtccagtcccctccctagcccttaccccctcc

SEQ ID NO: 28408 - DNA, 120 bp, synthetic construct
  source 1..120: mol_type = other DNA
ggagggagcctggagtgtgtagtgagactgagggctacgtgatggaggctgaggggtcagagaggagtcagtcctgggccggcatcctcagcaggctgggttttgaaaggcaggactgac

SEQ ID NO: 28409 - DNA, 120 bp, synthetic construct
  source 1..120: mol_type = other DNA
tcctgagcacacctctcccctcccccgtggcggtgcctggctccagcccccttggctcagcagaggaggggctggctcagagcagaggggaagaagcaaaagctggtttgagggtgggag

SEQ ID NO: 28410 - DNA, 120 bp, synthetic construct; identical to SEQ ID NO: 8552
  source 1..120: mol_type = other DNA

SEQ ID NO: 28411 - DNA, 120 bp, synthetic construct
  source 1..120: mol_type = other DNA
gtctggagtagcagctgggatccaagcccacctgaagaaggggcactgagcccaggttaaaggagctgtgcccttcatatcctcaccaccttgtcctggccccccgttgcccctcgttcc

SEQ ID NO: 28412 - DNA, 120 bp, synthetic construct
  source 1..120: mol_type = other DNA
tccctaggcccagccctctcctccccctccatttgaggcctggggtggcctcgggaactagctgtctggctcctcccactcctttgggggtatccctaggcagatggagaagtggcttgg

SEQ ID NO: 28413 - DNA, 120 bp, synthetic construct
  source 1..120: mol_type = other DNA
ctggaccacttgctgtctggcccagggccagttgctggggagaaacttccctctccagcaaatatgaatgaccaccctccccatatacacaccgccccccccaacccctgcagcctcaag

SEQ ID NO: 28414 - DNA, 120 bp, synthetic construct; identical to SEQ ID NO: 8553
  source 1..120: mol_type = other DNA

SEQ ID NO: 28415 - DNA, 120 bp, synthetic construct
  source 1..120: mol_type = other DNA
gatgccctggatttcccaggctctcggtctcctaacactttccccaagacctggggaagggtggaggggagaagatgtgtaaggggaaggctccactccaccctctcccatctctcgggc

SEQ ID NO: 28416 - DNA, 120 bp, synthetic construct
  source 1..120: mol_type = other DNA
atctacatgctaggccaccccaggcttctggatatttctttctgattgttaagggggatctaggcgccccccccccccaaatcttgaggaaccagttctggctcaaaggattcctcaaag

SEQ ID NO: 28417 - DNA, 120 bp, synthetic construct; identical to SEQ ID NO: 8554
  source 1..120: mol_type = other DNA

SEQ ID NO: 28418 - DNA, 120 bp, synthetic construct
  source 1..120: mol_type = other DNA
actctaggaaatacaaagtaatctatcgtgacagagagcagatcagttgttgcttgggatggagggacaaggacggcaggagggagggctcacaaaggggtgtgtgcaaggaaactttgg

SEQ ID NO: 28419 - DNA, 120 bp, synthetic construct
  source 1..120: mol_type = other DNA
acttcattctctagcatgtgcagtttgctgtatgtcaatcatagctcagtagaactgttaacaaaacaaaaaggctctgccctgggagccttacaatcccacaaggccagaaagaaacca

SEQ ID NO: 28420 - DNA, 120 bp, synthetic construct
  source 1..120: mol_type = other DNA
atctgagtggggcctcgcaggagggagagggtcaggtaggcagagactagaggcctgaccccagagctctggcccgaggagctgcgcaggtgagggagggtgctctggggcagtggaggg

SEQ ID NO: 28421 - DNA, 120 bp, synthetic construct; identical to SEQ ID NO: 8555
  source 1..120: mol_type = other DNA

SEQ ID NO: 28422 - DNA, 120 bp, synthetic construct
  source 1..120: mol_type = other DNA
aggcgtgtggttgtcagaatgcacaccctggggcctgggggccaggatcccctgcagggtttgtcctcctccagctgtggctctccgctggctggtggcaggccctacctgatgagtgtg

SEQ ID NO: 28423 - DNA, 120 bp, synthetic construct
  source 1..120: mol_type = other DNA
ctagagcccagggcctggactccctgccccatgaattttttactgtgccacgaggcactattcctgccgagctgagagagaggcagtgtggtgaccaggacttgtagcaagaccaggagt

SEQ ID NO: 28424 - DNA, 120 bp, synthetic construct
  source 1..120: mol_type = other DNA
gccccttctccgtgtaggtcctggcctggtcaagtggggacagctcaggggccatgaaaaaagctgaggcatcactggctagagcgtaccccatggacagctccctttctgcccctcatc

SEQ ID NO: 28425 - DNA, 120 bp, synthetic construct
  source 1..120: mol_type = other DNA
cagctgctgagccatggcccataactggtgtggctgccagcagtgagctcagctgttccagccagtcatggattccagccttgagccggccccctccccgaaacggtgtgccgtccccct

SEQ ID NO: 28426 - DNA, 120 bp, synthetic construct; identical to SEQ ID NO: 8556
  source 1..120: mol_type = other DNA

SEQ ID NO: 28427 - DNA, 120 bp, synthetic construct
  source 1..120: mol_type = other DNA
ctgagaaagctgaatgaggcaagagatagcgagagggggtaccctcccagggtttggggttcaaggtctgagctggggcctgggcaggcaggaggccggccagcagggctggtgccaggc

SEQ ID NO: 28428 - DNA, 120 bp, synthetic construct
  source 1..120: mol_type = other DNA
gctggtgggaaggggtgtaaagccacagcctctgagggtgttgggtgaacaaatgccctgcatcctggccggctggctgcccctcaccatcgtctccctccatcacctctccaggtctct

SEQ ID NO: 28429 - DNA, 120 bp, synthetic construct; identical to SEQ ID NO: 8557
  source 1..120: mol_type = other DNA

SEQ ID NO: 28430 - DNA, 120 bp, synthetic construct
  source 1..120: mol_type = other DNA
aacctggtgcccctgttcgatccaagcagctgaaccccaagaaagccatcgcctatgggcctggtatgtgtgagcccctggcggccctcctgggcagctgggcacatgtaggctctccct

SEQ ID NO: 28431 - DNA, 120 bp, synthetic construct
  source 1..120: mol_type = other DNA
atcgaggaccctgaaggccacaccgaggaggtatgcagaggccgctggggacagagggattcacttgggattggaaccagagagcgtggggccaacaacaggaatggcccggaggtgact

SEQ ID NO: 28432 - DNA, 120 bp, synthetic construct
  source 1..120: mol_type = other DNA
aatctttttccttcctaataggctaaggtggttcccaacaatgacaaggatcgcacctatgctgtctcctatgtgcccaaggtcgctgggttacacaaggtatctccctctaggcccccc

SEQ ID NO: 28433 - DNA, 120 bp, synthetic construct; identical to SEQ ID NO: 8558
  source 1..120: mol_type = other DNA

SEQ ID NO: 28434 - DNA, 120 bp, synthetic construct
  source 1..120: mol_type = other DNA
ggggtgcaggtggaaagcccctgaccatgtggggctgtgtgggggtggggggaggctgggacagggatgccagccagagggtgggcagcctcagggtgagggcaccggggcagctgtgtg

SEQ ID NO: 28435 - DNA, 120 bp, synthetic construct
  source 1..120: mol_type = other DNA
ggtgacagcacgttccgctgcacatacagacctgccatggaggggccacataccgtgcatgtggcctttgcgggtgcccccatcacccgcagtcccttccctgtccatgtgtcggaaggt

SEQ ID NO: 28436 - DNA, 120 bp, synthetic construct
  source 1..120: mol_type = other DNA
ccaaggtggctggagttcctaagagcacagctgggaggccacagtgaagggtcccagaacatgtgccaccctgggagggctgagcggaagtgacggggctgtatgggtgggggcatatct

SEQ ID NO: 28437 - DNA, 120 bp, synthetic construct
  source 1..120: mol_type = other DNA
aggcggggccaggcatggccgcagctgactggcctcacctgtgctgtgtggcatggcccgggccgtgtggaatcgcccccccttccttggcattctgtggcaggccccaggttccatgcc

SEQ ID NO: 28438 - DNA, 120 bp, synthetic construct; identical to SEQ ID NO: 8559
  source 1..120: mol_type = other DNA

SEQ ID NO: 28439 - DNA, 120 bp, synthetic construct
  source 1..120: mol_type = other DNA
gtaggctgatgtccacacgttgcctgtgttgtatggcaggcttcgagttctatgaagtagcccttgttctgtggcattgctggatgttttgtggcatgacttagatcctaaggttgcttt

SEQ ID NO: 28440 - DNA, 120 bp, synthetic construct
  source 1..120: mol_type = other DNA
tggctcggaaactttcttgtaacctgcctgatctggggcctgtagccagctccagcccggcagccccggttgtgctggggacacaaagggctccagagcagggccgtgggccactgcctg

SEQ ID NO: 28441 - DNA, 120 bp, synthetic construct
  source 1..120: mol_type = other DNA
gcctctgggcgaggcctgcagcccaagggtgttcgcgtgaaagaggtggctgacttcaaggtgtttaccaagggtgccggcagcggggagctcaaggtcacggtcaaggggccaagtgag

SEQ ID NO: 28442 - DNA, 120 bp, synthetic construct; identical to SEQ ID NO: 8560
  source 1..120: mol_type = other DNA

SEQ ID NO: 28443 - DNA, 120 bp, synthetic construct
  source 1..120: mol_type = other DNA
aggagctgggacttcaaggatattgatctgccttcttccccaccctgcccccatctcctcagagggcacagaggagccagtgaaggtgcgggaggctggggatggtgtgttcgagtgcga

SEQ ID NO: 28444 - DNA, 120 bp, synthetic construct
  source 1..120: mol_type = other DNA
gacgaggggcactgggctgcgagggagtttgaggggagatggagtttgggctgcgagggactttggggggcacttcctggcatggacaccagctccctctctgcccagcccctttgaggt

SEQ ID NO: 28445 - DNA, 120 bp, synthetic construct
  source 1..120: mol_type = other DNA
actgggtaagtggctggggggcaggaggagggagtgctgcgggggagggcagcaggggacactgtgggtaatgggtgcagtgcgcatgctggggagcgctggggtgagcagggagatagg

SEQ ID NO: 28446 - DNA, 120 bp, synthetic construct; identical to SEQ ID NO: 8561
  source 1..120: mol_type = other DNA

SEQ ID NO: 28447 - DNA, 120 bp, synthetic construct
  source 1..120: mol_type = other DNA
agctggttctcctcccctccccaactcagccttcttccctccgcacaggtgaaggcctttgggcctggcctggagcctaccggctgcatcgtggacaagcccgctgagttcaccattgat

SEQ ID NO: 28448 - DNA, 120 bp, synthetic construct
  source 1..120: mol_type = other DNA
ggcctcccagcaggaaatgacagcatcacagaagatcaggcaggactgatactcatgggcccatcagtaccatggaaaattttaaattttgtgttttcttaacgatgataacctaaaaac

SEQ ID NO: 28449 - DNA, 120 bp, synthetic construct; identical to SEQ ID NO: 8562
  source 1..120: mol_type = other DNA

SEQ ID NO: 28450 - DNA, 120 bp, synthetic construct
  source 1..120: mol_type = other DNA
tgaacatattcttgaggatctaagagggtgattcttctttgaaaggctcatgattcagttttaggaacataaatttagcccacactcttcctgtccaacacatttcagagttgaggaaac

SEQ ID NO: 28451 - DNA, 120 bp, synthetic construct
  source 1..120: mol_type = other DNA
tgccagtgttgggggtgggaaaggaggcgctgggttcacctgcggccagcagagggcgctctgcagaggccacagctatgaactttgcttgggtgatgcccacaggacgccgacggctgt

SEQ ID NO: 28452 - DNA, 120 bp, synthetic construct
  source 1..120: mol_type = other DNA
cccttccgggtgcgtcctcccggcctgccccgtgcccaccaccaggggtccctgagggagggcggaaccctcgctggagtccctgttgtccctgggctcaggctgggactgaggcttggg

SEQ ID NO: 28453 - DNA, 120 bp, synthetic construct
  source 1..120: mol_type = other DNA
gggtaaaggtgtacggccccggagtggagaagacaggcctcaaggccaatgagcccacctacttcacggtggactgcagcgaggcggggcaaggtgcgcccagccggaaggggtgggtct

SEQ ID NO: 28454 - DNA, 120 bp, synthetic construct; identical to SEQ ID NO: 1504
  source 1..120: mol_type = other DNA

SEQ ID NO: 28455 - DNA, 120 bp, synthetic construct
  source 1..120: mol_type = other DNA
tgcctcagaggaagcaaagggggcccttttggaggctgcccctgtccatgctgggtcccctgggtgtgtcctgagccagcatctagctgagagcaggggtgtgttcccctcgagagccct

SEQ ID NO: 28456 - DNA, 120 bp, synthetic construct
  source 1..120: mol_type = other DNA
gtctgggcaggggctgggactggctcgaggttggggttaggtggctgccaggccctcaccacatctctgggtgggtcctcaggtgtggaagtcgggaagcccacccacttcacggtgctg

SEQ ID NO: 28457 - DNA, 120 bp, synthetic construct
  source 1..120: mol_type = other DNA
gctgtccagcaggtgcgctctgcccctcccatgctaccgcccggccggcccgccagagccctgggtctccctcctccagtcccatgggaccagttctggatcctccacgcctttcctgcc

SEQ ID NO: 28458 - DNA, 120 bp, synthetic construct; identical to SEQ ID NO: 8564
  source 1..120: mol_type = other DNA

SEQ ID NO: 28459 - DNA, 120 bp, synthetic construct
  source 1..120: mol_type = other DNA
gtggctgtgggacaggaacaagcattctctgtgaacacacgaggggctggcggtcagggccaactggatgtgcggatgacttcgccctctcgccggcccatcccctgcaagctggagcca

SEQ ID NO: 28460 - DNA, 120 bp, synthetic construct
  source 1..120: mol_type = other DNA
ctgccccctgatccctccaaggtgaggagataggagctggttggggctgggagttggggacttgttgggaagatagatgagtcatagggggcagaggccagagggacttatgtgcctgga

SEQ ID NO: 28461 - DNA, 120 bp, synthetic construct
  source 1..120: mol_type = other DNA
taactggggcaaattgcttcatctcgctgcctcaatgtcatcacctgggattgttataagcactcagtccacagtagcagccacagttggaggtgatgagttgggtgggggccatgaagg

SEQ ID NO: 28462 - DNA, 120 bp, synthetic construct
  source 1..120: mol_type = other DNA
caagggggctggcacaggtggcctggggctgaccgtagagggcccctgcgaggccaagatcgagtgccaggacaatggtgatggctcatgtgctgtcagctacctgcccacggagcctgg

SEQ ID NO: 28463 - DNA, 120 bp, synthetic construct; identical to SEQ ID NO: 8565
  source 1..120: mol_type = other DNA

SEQ ID NO: 28464 - DNA, 120 bp, synthetic construct
  source 1..120: mol_type = other DNA
ggtcgataccagtggcgtcaaggtctcagggcctggtgttgagccacacggtgagtggacaggaggagccaagaaaggtcaagtggcaggtgcaggagctgggtagtccgtgggagggag

SEQ ID NO: 28465 - DNA, 120 bp, synthetic construct
  source 1..120: mol_type = other DNA
gagattggcctctgctcttgtggcaaaactgcacctgcctctgggcgtttttctggagagatctcttctttcatgtgcttaaggggtaccctgatccaaaaagctaaaactctgctctgg

SEQ ID NO: 28466 - DNA, 120 bp, synthetic construct; identical to SEQ ID NO: 8566
  source 1..120: mol_type = other DNA

SEQ ID NO: 28467 - DNA, 120 bp, synthetic construct
  source 1..120: mol_type = other DNA
gagagggagcatctgtgtgaaggctgcccccacccctgctgaacacgccacccctgggctccaggtgtcctgcgggaggtgaccactgagttcactgtggatgcaagatccctaacagcc

SEQ ID NO: 28468 - DNA, 120 bp, synthetic construct
  source 1..120: mol_type = other DNA
gagggccggtgggccaggctagtgggcagggctgggcaagtgggcagggccgggatctgatgatattgccctcggggcaggaggggtggtgggggcgcacactccctgattgatgcccct

SEQ ID NO: 28469 - DNA, 120 bp, synthetic construct
  source 1..120: mol_type = other DNA
ggccaggcctggagggtggcttggtcaacaaggccaaccgattcactgtggagaccaggtatcctccccctttgctagcctaaatctgtgaccaccctttcccagcccctggccctcctc

SEQ ID NO: 28470 - DNA, 120 bp, synthetic construct; identical to SEQ ID NO: 8567
  source 1..120: mol_type = other DNA

SEQ ID NO: 28471 - DNA, 120 bp, synthetic construct
  source 1..120: mol_type = other DNA
tccccttcactcctggagactatgacgtcaacatcaccttcggggggcggcccatcccaggtgtgcagagagagtggtcggggtctcagggaagacaagggagggtgcaggatgctcgcc

SEQ ID NO: 28472 - DNA, 120 bp, synthetic construct
  source 1..120: mol_type = other DNA
gatgtgacagcccccctagtcaatcacaggaacacactctggcctcctagccccttgtctggagctcaagaccttggctttgcaggtccaccactcactgtgtgtccagaaactcagaca

SEQ ID NO: 28473 - DNA, 120 bp, synthetic construct
  source 1..120: mol_type = other DNA
gacccagctgcccgggcaggtcatgtcttcaaatattgtatgacttgggactgctgaaattggaaattttttcccttatctaatttcccatctttttattatttcagccacagtgtcaga

SEQ ID NO: 28474 - DNA, 120 bp, synthetic construct; identical to SEQ ID NO: 8568
  source 1..120: mol_type = other DNA

SEQ ID NO: 28475 - DNA, 120 bp, synthetic construct
  source 1..120: mol_type = other DNA
gggggacccatcagggctggtgggcagggtctaatgtccttctcctcacagggagcccgttccgcgtgccagtgaaggatgtggtggaccctgggaaggtgaagtgctcagggccagggc

SEQ ID NO: 28476 - DNA, 120 bp, synthetic construct
  source 1..120: mol_type = other DNA
gaggagggaggtggggcgggacgcccggaggctctgctgaccctgtgccccttgcccaggtgtggccgagcctgtggaggtgcgggacaatggagatggcacccacactgtccactacac

SEQ ID NO: 28477 - DNA, 120 bp, synthetic construct
  source 1..120: mol_type = other DNA
ggtggcactcaggatcactgctggagtcccctgggagagcctctcccagctctcagcctcgtccagtctcgccaccccatcccgctcttccccggggctctctgctgtgaggctttcctg

SEQ ID NO: 28478 - DNA, 120 bp, synthetic construct; identical to SEQ ID NO: 8569
  source 1..120: mol_type = other DNA

SEQ ID NO: 28479 - DNA, 120 bp, synthetic construct
  source 1..120: mol_type = other DNA
gcgggccagcggcccaggcctcaacgcctctggcatccctgccagcctgcctgtggagttcaccatcgacgcacgggacgcgggcgaggggttgctcactgtccagatcttggtgagtct

SEQ ID NO: 28480 - DNA, 120 bp, synthetic construct
  source 1..120: mol_type = other DNA
gtacactgtgtcctacctgccggacatgagtggccggtacaccatcaccatcaagtatggcggtgatgagatcccctactcgcccttccgcatccatgctctgcccactggggatgccag

SEQ ID NO: 28481 - DNA, 120 bp, synthetic construct
  source 1..120: mol_type = other DNA
catgccctagccctggcccctccctccctcacccccgcccaatgccccagcccacgttgagcaccgcctggcctcacactcttctctctttccagtgtccattggaggccatggcctggg

SEQ ID NO: 28482 - DNA, 120 bp, synthetic construct
  source 1..120: mol_type = other DNA
ggcaggtgcctgcctgggccctcgaatccagattgggcaggagacggtgatcacggtggatgccaaggcagccggtgaggggaaggtgacatgcacggtgtccacgccggatggggcaga

SEQ ID NO: 28483 - DNA, 120 bp, synthetic construct; identical to SEQ ID NO: 8570
  source 1..120: mol_type = other DNA

SEQ ID NO: 28484 - DNA, 120 bp, synthetic construct
  source 1..120: mol_type = other DNA
acccgctgtgctctccaccatccccagctccatctccccagaggctgccctgcaggaggatgaacacccaaattatcacccagcatttcaggttcctgggccattctctgagtcagcccc

SEQ ID NO: 28485 - DNA, 120 bp, synthetic construct
  source 1..120: mol_type = other DNA
cccggcccggcgcccgccccacacactgggtactgcgcctcccaccaggcgatgtcctcctcctcctccccttccttcatttcttctctctactcctctgcagccagggcggggacatgg

SEQ ID NO: 28486 - DNA, 120 bp, synthetic construct
  source 1..120: mol_type = other DNA
ctaccttgttctttcctcactctccagcttcagtcatagcatgggtcaaactcctgggccttccccagtcactgactgttccctctcacctgctgcaggccacagaggagccagtggtgc

SEQ ID NO: 28487 - DNA, 120 bp, synthetic construct; identical to SEQ ID NO: 8571
  source 1..120: mol_type = other DNA

SEQ ID NO: 28488 - DNA, 120 bp, synthetic construct
  source 1..120: mol_type = other DNA
aaaccagggtctccacgtaactgtgtctgccctgcaggagaggtgcggatgccctcggggaagacggcacggcccaacatcaccgacaacaaggacggcaccatcacggtgaggtatgca

SEQ ID NO: 28489 - DNA, 120 bp, synthetic construct
  source 1..120: mol_type = other DNA
tgccttccctctttcaacaaatatttattgagcacccgctgtgtgcagacaccaggcgaggccccagggaggcttataccctggtgggaagcagacctccaccagctgggtccctacggc

SEQ ID NO: 28490 - DNA, 120 bp, synthetic construct; identical to SEQ ID NO: 8572
  source 1..120: mol_type = other DNA

SEQ ID NO: 28491 - DNA, 120 bp, synthetic construct
  source 1..120: mol_type = other DNA
caaggcagagatcacctgtaaggacaacaaggatggcacctgcaccgtgtcctatctgccgactgcgcctggagactacagcatcatcgtgcgcttcgatgacaagcacatcccggggag

SEQ ID NO: 28492 - DNA, 120 bp, synthetic construct
  source 1..120: mol_type = other DNA
ttagggcagaggcccttcaaggtgtgaggggtcatattttgataaatgtaaaaacactctgttctccacggcagctaagaagcagtcagccactccttgtgcctgaaaacacattgcctc

SEQ ID NO: 28493 - DNA, 120 bp, synthetic construct
  source 1..120: mol_type = other DNA
gataaatgtaaaaacactctgttctccacggcagctaagaagcagtcagccactccttgtgcctgaaaacacattgcctcatttagtctttgaagtcatttgttttgtttttgtttttga

SEQ ID NO: 28494 - DNA, 120 bp, synthetic construct
  source 1..120: mol_type = other DNA
caggcgcccgccaccatgcctggctattttttgtatttttagtagagacagggtttcaccgtgttagccaggatggtctcgatctcctgaccttgtgatccacctgcctcggcctcccaa

SEQ ID NO: 28495 - DNA, 120 bp, synthetic construct; identical to SEQ ID NO: 8573
  source 1..120: mol_type = other DNA

SEQ ID NO: 28496 - DNA, 120 bp, synthetic construct
  source 1..120: mol_type = other DNA
gtgtctgttgagtccagggggggctgctcaggagggttcctgagccctgtgagggcagggcctgcctggagtcatagcagcctgatgccccaactcccccaccaggtgatgactccatga

SEQ ID NO: 28497 - DNA, 120 bp, synthetic construct
  source 1..120: mol_type = other DNA
tgaagcgcctgcccaaccggcacattggtgagcgtggggcctcacggggacctcaggggtgggggcccacaggatgctctgcctaacacccactttccacagggatctccttcaccccca

SEQ ID NO: 28498 - DNA, 120 bp, synthetic construct
  source 1..120: mol_type = other DNA
gcaaggggctttccgagggacacacattccaggtggcagagttcatcgtggacactcgcaatgcaggtacctcctgccccagagagcccccattccagcgggtgcctcccacaggcactt

SEQ ID NO: 28499 - DNA, 120 bp, synthetic construct; identical to SEQ ID NO: 8574
  source 1..120: mol_type = other DNA

SEQ ID NO: 28500 - DNA, 120 bp, synthetic construct
  source 1..120: mol_type = other DNA
atgtgttccttgctttcccccaggttatgggggcttggggctgagtattgaaggcccaagcaaggtggacatcaactgtgaggacatggaggacgggacatgcaaagtcacctactgccc

SEQ ID NO: 28501 - DNA, 120 bp, synthetic construct
  source 1..120: mol_type = other DNA
tcctgacccaccctttgtccccacttcaggaagccccttcactgtgaaggtgaccggcgagggccgcatgaaggagagcatcacccggcggagacaggcaccttccatcgccaccatcgg

SEQ ID NO: 28502 - DNA, 120 bp, synthetic construct
  source 1..120: mol_type = other DNA
cctcacccctcgcttccctccctcaccctggctcccttgaccacacaggaaactggttccagatggtgtctgcccaggagcgcctgacacgcaccttcacacgcagcagccacacctaca

SEQ ID NO: 28503 - DNA, 120 bp, synthetic construct
  source 1..120: mol_type = other DNA
gtcggcggggaccccttccctgctgtgtttggggacttcctgggccgggagcgcctgggatccttcggcagcatcacccggcagcaggagggtgagcaccgcacactgggccggccgggt

SEQ ID NO: 28504 - DNA, 120 bp, synthetic construct; identical to SEQ ID NO: 8575
  source 1..120: mol_type = other DNA

SEQ ID NO: 28505 - DNA, 120 bp, synthetic construct
  source 1..120: mol_type = other DNA
gccgctgggtgaaggtggtgcccacaaggtgcgggccggaggcacagggctggagcgaggtgtggccggcgtgccaggtaaggggcaggtggccaggagtggggatgaagtcagggcagc

SEQ ID NO: 28506 - DNA, 120 bp, synthetic construct
  source 1..120: mol_type = other DNA
gcggagattgcatttgaggatcgcaaagatggctcctgcggcgtctcctatgtcgtccaggaaccaggtgggcgtccacactggcagtggggctgggcctgcctgaccttccagactggg

SEQ ID NO: 28507 - DNA, 120 bp, synthetic construct
  source 1..120: mol_type = other DNA
tccagatctgagcgctgaccacagagcctttcctgggataaggccagggtggggaggctcccgccctgccaacctccatcccggaacctgtgctgactggtctctctccccaggtgacta

SEQ ID NO: 28508 - DNA, 120 bp, synthetic construct; identical to SEQ ID NO: 8576
  source 1..120: mol_type = other DNA

SEQ ID NO: 28509 - DNA, 120 bp, synthetic construct
  source 1..120: mol_type = other DNA
ctgcctttctcagggtgtgtctgcctgtcctactgccacctgccatttcttgttacagtttgttccaccttctgttgtaagaatgctagatgacaacatttataagaatgagagcataaa

SEQ ID NO: 28510 - DNA, 120 bp, synthetic construct
  source 1..120: mol_type = other DNA
tgctttctcttgctgctgacttctagagatgtggtgtgttcctttcattctgtcacagcggacatgtgcaaggaaggctttcagcaagtcacactgaaacatgcaaaccagggggccagg

SEQ ID NO: 28511 - DNA, 120 bp, synthetic construct
  source 1..120: mol_type = other DNA
gagtccttgtgcatctcctcctcccactcctgaactgggctccccgatgcaggctccaatccctcccccagagcccttctgtgcttcttctggtcctccctgttggtccaccttctccag

SEQ ID NO: 28512 - DNA, 120 bp, synthetic construct; identical to SEQ ID NO: 8577
  source 1..120: mol_type = other DNA

SEQ ID NO: 28513 - DNA, 120 bp, synthetic construct
  source 1..120: mol_type = other DNA
aggagtctgagcatcctccgtggcctttgcaggagacggggctcaaggtgaaccagccagcgtcctttgccgtgcagctgaacggtgcccggggcgtgattgatgcccgggtgcacacac

SEQ ID NO: 28514 - DNA, 120 bp, synthetic construct
  source 1..120: mol_type = other DNA
accaaccctttatccacagacaagcacaccatccgcttcatcccccacgagaatggcgtccactccatcgatgtcaagttcaacggtgcccacatccctggaagtcccttcaagatccgc

SEQ ID NO: 28515 - DNA, 120 bp, synthetic construct; identical to SEQ ID NO: 8578
  source 1..120: mol_type = other DNA

SEQ ID NO: 28516 - DNA, 120 bp, synthetic construct
  source 1..120: mol_type = other DNA
ggactgtcgggagtgtcctgagggccatgtggtcacttatactcccatggcccctggcaactacctcattgccatcaagtacggtggcccccagcacatcgtgggcagccccttcaaggc

SEQ ID NO: 28517 - DNA, 120 bp, synthetic construct
  source 1..120: mol_type = other DNA
agtttaccagggctagaggtgggcctggctctacacagtacacgttctgtggagtcgggcatgatcacgtaaaaatgccattcttcctctccatcgtggcccctcactccttcagctctg

SEQ ID NO: 28518 - DNA, 120 bp, synthetic construct
  source 1..120: mol_type = other DNA
gatgagttgggtgggtgttcctttgtaaagtggctcttaccctgtgagttagcctgagttcccagacaaagcctgcaaggatgagggacgcagcatctgaggccccagccctagggtgga

SEQ ID NO: 28519 - DNA, 120 bp, synthetic construct
  source 1..120: mol_type = other DNA
agtgctggccgagggtcccctgcctggggaagaacaggaagcccttctgactaggtttgtgccccctccacccacccctcaggtccgaggctgtccggaggccacagccttcacgaaaca

SEQ ID NO: 28520 - DNA, 120 bp, synthetic construct; identical to SEQ ID NO: 8579
  source 1..120: mol_type = other DNA

SEQ ID NO: 28521 - DNA, 120 bp, synthetic construct
  source 1..120: mol_type = other DNA
ggggaaccgggtgtacaatgtcacctacactgtcaaggagaaaggggactacatcctcattgtcaagtggggtgacgaaagtgtccctggaagccccttcaaagtcaaggtcccttgaat

SEQ ID NO: 28522 - DNA, 120 bp, synthetic construct
  source 1..120: mol_type = other DNA
tgccttgggggtgaagtgaaggcccagcctccccaccccaccgcgccccaggggttggaggaccttgtctgtgtcaggacagtgtccctccctgggaatgtgacatgagggccgactggg

SEQ ID NO: 28523 - DNA, 120 bp, synthetic construct
  source 1..120: mol_type = other DNA
gtgaggtcaccctcaaactgcaccgccggccagataccctcctgaccccgaggacttggtctggtctctctggtggctacaaccccagagttttaaggacttggaaaggaaagcacaatc

SEQ ID NO: 28524 - DNA, 120 bp, synthetic construct; identical to SEQ ID NO: 8580
  source 1..120: mol_type = other DNA

SEQ ID NO: 28525 - DNA, 120 bp, synthetic construct; identical to SEQ ID NO: 8581
  source 1..120: mol_type = other DNA

SEQ ID NO: 28526 - DNA, 120 bp, synthetic construct
  source 1..120: mol_type = other DNA
cgcgaaggaccccggccacctctaggttctcctcgtccgcccgttgttcagcgagggaggctctgcgcgtgccgcagctgacggggaaactgaggcacggagcgggtgagacacctgacg

SEQ ID NO: 28527 - DNA, 120 bp, synthetic construct
  source 1..120: mol_type = other DNA
ccggtctttatctgagttcagcttagagatgaacggggagccgccctcctgtgctgggcttggggctggaggctgcatcttcccgtttctagggtttcctttccccttttgatcgacgca

SEQ ID NO: 28528 - DNA, 120 bp, synthetic construct; identical to SEQ ID NO: 8582
  source 1..120: mol_type = other DNA

SEQ ID NO: 28529 - DNA, 120 bp, synthetic construct
  source 1..120: mol_type = other DNA
gatggaaaaggggtgaggggctggagattgagtgaatcaccagtggcttagtcaaccatgcctgcacaatggaaccccgtaagaaaccacagggatcagagggcttcccgccgggttgtg

SEQ ID NO: 28530 - DNA, 120 bp, synthetic construct
  source 1..120: mol_type = other DNA
tttgtaataaaccagcaactgtaagaaacgcactttcctgagttctgtgaccctgaagagggagtcctgggaacctctgaatttataactagttgatcgaaagtacaagtgacaacctgg

SEQ ID NO: 28531 - DNA, 120 bp, synthetic construct
  source 1..120: mol_type = other DNA
tccagaaagttgcagaattgatgggtgtgagaaaaaccctacacatttaatgtcagaagtgtgggtaaaatgtttcaccctccagcccagagagccctaatttaccagtggcccacggtg

SEQ ID NO: 28532 - DNA, 120 bp, synthetic construct; identical to SEQ ID NO: 8583
  source 1..120: mol_type = other DNA

SEQ ID NO: 28533 - DNA, 120 bp, synthetic construct
  source 1..120: mol_type = other DNA
gttccggctgctcctgggaggagccaggctaatagaatgtttgccataaaatattaatgtacagagaagcgaaacaaaggtcgttggtacttgttaaccttaccagcagaataatgaaag

SEQ ID NO: 28534 - DNA, 120 bp, synthetic construct
  source 1..120: mol_type = other DNA
ttctgatctgcaaagtcgccagaggttaagtcctttctctcttgtggctttgccacccctggagtgtcaccctcagctgcggtgcccaggattccccactgtggtatgtccgtgcaccag

SEQ ID NO: 28535 - DNA, 120 bp, synthetic construct
  source 1..120: mol_type = other DNA
agccaggcgtggtcactcctgaaatcccagcacttcggaaggccaaggggggtggatcacttgagctcaggagttcgagaccagcctgggtaacatggcaaaatcccgtctctacaaaaa

SEQ ID NO: 28536 - DNA, 120 bp, synthetic construct; identical to SEQ ID NO: 8584
  source 1..120: mol_type = other DNA

SEQ ID NO: 28537 - DNA, 120 bp, synthetic construct
  source 1..120: mol_type = other DNA
gcctgggtgctgcagtgccagccgcggttgatgtctcagagctgctttgagagccccgtgagtgccgcccctcccgcctccctgctgagcccgctttcttctcccgcaggcctgtaggag

SEQ ID NO: 28538 - DNA, 120 bp, synthetic construct
  source 1..120: mol_type = other DNA
cctactccatgatttcctgctggttccccgagagctgagtggctcctccccagtcctggaggagactcacccagctcaccagcagggagccagcagaccagggccccgggatgcccaggc

SEQ ID NO: 28539 - DNA, 120 bp, synthetic construct; identical to SEQ ID NO: 8585
  source 1..120: mol_type = other DNA

SEQ ID NO: 28540 - DNA, 120 bp, synthetic construct
  source 1..120: mol_type = other DNA
gggcgggggcggcggccagggcagagggtgcgcgtggacatcgacacccacgcacctcacaagggtggggtgcatgttgcaccactgtgtgctgggcccttgctgggagcggaggtgtga

SEQ ID NO: 28541 - DNA, 120 bp, synthetic construct
  source 1..120: mol_type = other DNA
agtagggctgccagaggttgcgaatgaaaacaggatgcccagtaaacccgaattgcagataccccaggcatgactttgtttttttgtgtaaggatgcaaaatttgggatgtatttatact

SEQ ID NO: 28542 - DNA, 120 bp, synthetic construct
  source 1..120: mol_type = other DNA
ggctcagagaggctgaatgtgctgcccatggtcccacatccatgtgtggctgcaccaggacctgacctgtccttggcgtgcgggttgttctctggagagtaaggtggctgtggggaacat

SEQ ID NO: 28543 - DNA, 120 bp, synthetic construct
  source 1..120: mol_type = other DNA
gagttctccgaggagcccttcggggtgatcgtgcgccggcagctggacggccgcgtgctgtgagttctgggctctgtgccagcatgatggggagggcgacgcgcatttctcacacggcag

SEQ ID NO: 28544 - DNA, 120 bp, synthetic construct; identical to SEQ ID NO: 8586
  source 1..120: mol_type = other DNA

SEQ ID NO: 28545 - DNA, 120 bp, synthetic construct
  source 1..120: mol_type = other DNA
ggggaagccataagcaagtccatgcagacacagcgtcagggagtggtcatgcagagagcacgctagaagccagctgtgcagacacggggcagggaggtcccctctagaagccagctgtgc

SEQ ID NO: 28546 - DNA, 120 bp, synthetic construct; identical to SEQ ID NO: 1526
  source 1..120: mol_type = other DNA

SEQ ID NO: 28547 - DNA, 120 bp, synthetic construct
  source 1..120: mol_type = other DNA
gtggcacatgcctgtggtcccagctactcaggaggctgaggcaagaggatcccttgagcccaggggttcgaggttgcagtgaaccatgattttgccactgcacttcagccttgctgaaga

SEQ ID NO: 28548 - DNA, 120 bp, synthetic construct; identical to SEQ ID NO: 8587
  source 1..120: mol_type = other DNA

SEQ ID NO: 28549 - DNA, 120 bp, synthetic construct
  source 1..120: mol_type = other DNA
gccagttccggtaccagccagttcctggaggtcagccccttgggggcccctcaggggtggtgtgggcccagccaggcggtgcgcctcttctgatatgccctgagagttgatcacgctggt

SEQ ID NO: 28550 - DNA, 120 bp, synthetic construct
  source 1..120: mol_type = other DNA
tgctctcaggctcgtgtggccccttgggtgtgagcaagcctggctggcctctgtcccgcaggctgaacacgacggtggcgcccctgttctttgcggaccagttccttcagctgtccacct

SEQ ID NO: 28551 - DNA, 120 bp, synthetic construct
  source 1..120: mol_type = other DNA
cggcgggcgggggcactgagctggggagcgcaggtgctgaagcgccgtctcctgcatgtcccagcccggtgcgaacctctacgggtctcaccctttctacctggcgctggaggacggcgg

SEQ ID NO: 28552 - DNA, 120 bp, synthetic construct; identical to SEQ ID NO: 8588
  source 1..120: mol_type = other DNA

SEQ ID NO: 28553 - DNA, 120 bp, synthetic construct
  source 1..120: mol_type = other DNA
cgcctgtgattggcccatctgtggggtgcagagccctccaagtgaagaatctgtcccccaaccccagagctgcttcccttccagatgtggtcctgcagccgagccctgcccttagctgga

SEQ ID NO: 28554 - DNA, 120 bp, synthetic construct
  source 1..120: mol_type = other DNA
ggctccctcctccctccctcatgaagtcggcgttggcctgcaggatacccgttcatgccgccatactggggcctgggcttccacctgtgccgctggggctactcctccaccgctatcacc

SEQ ID NO: 28555 - DNA, 120 bp, synthetic construct
  source 1..120: mol_type = other DNA
tgtggctgcaggacgtccagtggaacgacctggactacatggactcccggagggacttcacgttcaacaaggatggcttccgggacttcccggccatggtgcaggagctgcaccagggcg

SEQ ID NO: 28556 - DNA, 120 bp, synthetic construct; identical to SEQ ID NO: 8589
  source 1..120: mol_type = other DNA

SEQ ID NO: 28557 - DNA, 120 bp, synthetic construct
  source 1..120: mol_type = other DNA
atgggtatcgctggaactgtggaggctccgtgtgccttctggccgtgcctctccttctggccggctctgaatccctggaaaggacggcgtgagtgagggcagcttccagccctcatgctg

SEQ ID NO: 28558 - DNA, 120 bp, synthetic construct
  source 1..120: mol_type = other DNA
agtttgggggctggtccagcccgagtctggtgtccggcacgatggccagaggaggaggtgggaggcagggcgagctgaaaagatccaacagttcctgcccggaagatccacttcagcaga

SEQ ID NO: 28559 - DNA, 120 bp, synthetic construct; identical to SEQ ID NO: 8590
  source 1..120: mol_type = other DNA

SEQ ID NO: 28560 - DNA, 120 bp, synthetic construct
  source 1..120: mol_type = other DNA
tctcactgtctcagttttccccgtggctggcgccagggctctgggccaccctcaccttgacaggtttccctcttcccaggatcctgccatcagcagctcgggccctgccgggagctacag

SEQ ID NO: 28561 - DNA, 120 bp, synthetic construct
  source 1..120: mol_type = other DNA
gcctccagccagggggagccggcagctgctcaggaagacggtgggatttgaggagccatcacgcccagtgggacagctgagaggaatgggccacagtggcccgtgacgatggtggctcct

SEQ ID NO: 28562 - DNA, 120 bp, synthetic construct
  source 1..120: mol_type = other DNA
ccttgtcctcccagccccccaggggcctccaggcagggcccccgctgagggagcagctagggagggtctggtgcggatgtgaggctgcctggcagggcttgcacggggccgtctccgctg

SEQ ID NO: 28563 - DNA, 120 bp, synthetic construct; identical to SEQ ID NO: 8591
  source 1..120: mol_type = other DNA

SEQ ID NO: 28564 - DNA, 120 bp, synthetic construct
  source 1..120: mol_type = other DNA
ggaggacatggtggctgagttccatgaccaggtgcccttcgacggcatgtggattgtaagtgtggccccctcctgagcatccccaaggcctctggggactaccccaccctcctcactctg

SEQ ID NO: 28565 - DNA, 120 bp, synthetic construct
  source 1..120: mol_type = other DNA
tacgtgcctggtcagctcgccccccacctaccctggggacttaatcaaatcagagactcccttgtctggcctgggagacttagcaccctcatctctgagaagcagatgggccagcgggga

SEQ ID NO: 28566 - DNA, 120 bp, synthetic construct
  source 1..120: mol_type = other DNA
tgccagagcacagtgaggccgactcgactcagagccgtctcgataggcgcagggaccatgcagcggagacctacccacccgtggggagaggtcaggcccaactcgaatgcagcacgggca

SEQ ID NO: 28567 - DNA, 120 bp, synthetic construct; identical to SEQ ID NO: 8592
  source 1..120: mol_type = other DNA

SEQ ID NO: 28568 - DNA, 120 bp, synthetic construct
  source 1..120: mol_type = other DNA
tgtgaagtctgggggtctgcagagcccaggctccagcacccgcccagccctgtcttagaagcagtggagatgattacccaggttcccgggtaacgccagccccacagaggcgtggggagc

SEQ ID NO: 28569 - DNA, 120 bp, synthetic construct
  source 1..120: mol_type = other DNA
ctggaaaccagcccccgcctcttccaggggtggttggggggaccctccaggcggccaccatctgtgcctccagccaccagtttctctccacacactacaacctgcacaacctctacggcc

SEQ ID NO: 28570 - DNA, 120 bp, synthetic construct; identical to SEQ ID NO: 8593
  source 1..120: mol_type = other DNA

SEQ ID NO: 28571 - DNA, 120 bp, synthetic construct
  source 1..120: mol_type = other DNA
aggcaactgtgcccgcagacatgggcagtagcctcgccgtcctcctccccagcctctgcctcatcccagaaagctccttgctcccagctctgccctgctggtgacagggttcccgagtga

SEQ ID NO: 28572 - DNA, 120 bp, synthetic construct
  source 1..120: mol_type = other DNA
gatacgccggccactggacgggggacgtgtggagctcctgggagcagctcgcctcctccgtgccaggtgagctcctaccaggaggggctgctcagcagagtagagccgggggcctctatg

SEQ ID NO: 28573 - DNA, 120 bp, synthetic construct; identical to SEQ ID NO: 8594
  source 1..120: mol_type = other DNA

SEQ ID NO: 28574 - DNA, 120 bp, synthetic construct
  source 1..120: mol_type = other DNA
gagaagcaccccatgctgggtggctgagaagtgcagctctcccgaggcggggactccaggggaccgcggccccagcacccaagtgcttcctttgcccccgcctgccctgcagccccagga

SEQ ID NO: 28575 - DNA, 120 bp, synthetic construct
  source 1..120: mol_type = other DNA
gggagaccgtggcccggcccctcttcctggagtgagtgacctaggcaggggcggtggcccatgtgtgccctgggggaggggcacgtaactcccaggcagccctgtcctgctgtgggctgt

SEQ ID NO: 28576 - DNA, 120 bp, synthetic construct; identical to SEQ ID NO: 8595
  source 1..120: mol_type = other DNA

SEQ ID NO: 28577 - DNA, 120 bp, synthetic construct
  source 1..120: mol_type = other DNA
atcacctgaggtcaagagttcgaggccagcctggccaacatggtgaaacccatctctactaaaaatacaaaaattagccgtgcatggtggtgggcgcctgtagtccctgctactcaggag

SEQ ID NO: 28578 - DNA, 120 bp, synthetic construct
  source 1..120: mol_type = other DNA
aaaaccaagctgtgaaagactccacaggaaaagataagtgaatgtgtatctctggggaaaggtttcatttagagaaaaaaaaaaaaaaaaggtgaactttatttgaccatagcagaaaaa

SEQ ID NO: 28579 - DNA, 120 bp, synthetic construct
  source 1..120: mol_type = other DNA
gcaaatagctactcttcctaataggtagagaactcatacgttggtaagaccaagactaagaaccaaattggaggaacactgtttgcaaaacaggagatacgaatggtatccacacattct

SEQ ID NO: 28580 - DNA, 120 bp, synthetic construct; identical to SEQ ID NO: 8596
  source 1..120: mol_type = other DNA

SEQ ID NO: 28581 - DNA, 120 bp, synthetic construct
  source 1..120: mol_type = other DNA
acactgtctgccttttatatttactgatgtagttacctttacccatggttttatttcttcatgtggctttgacttcttgtctaacatctttcatttacagcagaaggactccctttagta

SEQ ID NO: 28582 - DNA, 120 bp, synthetic construct
  source 1..120: mol_type = other DNA
cgtttctctgaacactttgaacttgtcagcccatggcctccgtggtttctgctgagtagcttctgtcttgcctcttcccagattctctgtctttggcctttgaagtcccgatggtgtgtc

SEQ ID NO: 28583 - DNA, 120 bp, synthetic construct
  source 1..120: mol_type = other DNA
atattttttctgcccctttctgtcttctactctgggacttccgttccacacattggtatgcttgacggtgcccaggggtctttgcagctctgttgactccttcctcgttgtgttttcttt

SEQ ID NO: 28584 - DNA, 120 bp, synthetic construct
  source 1..120: mol_type = other DNA
aatttctgtttcattcctttacgtttctctcgttaaggatattccctatctggtgagtcatgttctcacactttcctttagttcttcagacacggtttcgctgagctctttgaacacatt

SEQ ID NO: 28585 - DNA, 120 bp, synthetic construct; identical to SEQ ID NO: 8597
  source 1..120: mol_type = other DNA

SEQ ID NO: 28586 - DNA, 120 bp, synthetic construct
  source 1..120: mol_type = other DNA
cacagatggcatccgtgagtctcccagcctttgctggggcgaggtggggagcaccgtcaacacttagctaggccaaggattcttgctgttcttacaaagattcagccattttgttaaata

SEQ ID NO: 28587 - DNA, 120 bp, synthetic construct
  source 1..120: mol_type = other DNA
acagaggagaggatcttgagaggggcttactccaccatcttcactgacatcactccaagaaatgtattttgcaagaaatattttgaagcagaaagacaccatttattttgcccatgaatt

SEQ ID NO: 28588 - DNA, 120 bp, synthetic construct
  source 1..120: mol_type = other DNA
atgtttttgagattcacattgatgcgttaattttacaaatagaaatagggcctaaagaagtcacctcaaaaggcatgaacgctccatgaatgtatccatgcagggatcatagctgagcac

SEQ ID NO: 28589 - DNA, 120 bp, synthetic construct; identical to SEQ ID NO: 8598
  source 1..120: mol_type = other DNA

SEQ ID NO: 28590 - DNA, 120 bp, synthetic construct
  source 1..120: mol_type = other DNA
agaaggcttctcccagctccggcattgacttctatctgctggaatcatccctgcccgtctgacctgagtcctccaagtcctccggcaccttgagctccagagagcagaattcagcctctt

SEQ ID NO: 28591 - DNA, 120 bp, synthetic construct
  source 1..120: mol_type = other DNA
gtggaccaccagctcctgtggggggaggccctgctcatcaccccagtgctccaggccgggaaggccgaagtgactggctacttccccttgggcacatggtacgacctgcagacggtgagt

SEQ ID NO: 28592 - DNA, 120 bp, synthetic construct; identical to SEQ ID NO: 8599
  source 1..120: mol_type = other DNA

SEQ ID NO: 28593 - DNA, 120 bp, synthetic construct
  source 1..120: mol_type = other DNA
gcgcctgaagtcacagttcagcccgtctgtgccaggcctcctaggcctccacgtggagccccgggagatggagagcgtggttcctgaggacagcatgggggcctcggcacggcccagaat

SEQ ID NO: 28594 - DNA, 120 bp, synthetic construct
  source 1..120: mol_type = other DNA
gctgccggcccccctggacaccatcaacgtccacctccgggctgggtacatcatccccctgcaggtacctgggccaggcggctatggtgggggtgtggacagcacactgcagagctgggg

SEQ ID NO: 28595 - DNA, 120 bp, synthetic construct
  source 1..120: mol_type = other DNA
agccccacaaaggcgtggagcatggccggcaggagctcagtggtctgcatggtggaggttctgccgggcccggcctcgggcagccgtgggatagcacttgaggtggggaaggtcttgggt

SEQ ID NO: 28596 - DNA, 120 bp, synthetic construct; identical to SEQ ID NO: 8600
  source 1..120: mol_type = other DNA

SEQ ID NO: 28597 - DNA, 120 bp, synthetic construct
  source 1..120: mol_type = other DNA
caggctggtgggcaggggccggctcggggttgagaaggggtgaggggacctgggcttgggggtcccacgatggctacctgccactaggacactctagcaggtggcctggggtcctagagt

SEQ ID NO: 28598 - DNA, 120 bp, synthetic construct
  source 1..120: mol_type = other DNA
gacacctccacattctctgccttttcatctctctctgctcggcccagaacacgatcgtgaatgagctggtacgtgtgaccagtgagggagctggcctgcagctgcagaaggtgactgtcc

SEQ ID NO: 28599 - DNA, 120 bp, synthetic construct
  source 1..120: mol_type = other DNA
cgtcccccagccgtggtgcagggggcagaaggtgctgggcgtcctggtgaccgatgccaggaacagaggatgctgggacctcccaagggggtctttggggaggagtgggaagggtcaggc

SEQ ID NO: 28600 - DNA, 120 bp, synthetic construct
  source 1..120: mol_type = other DNA
tgacccgcactgagagccggggtccccctgcgcctgccggggaggaaccgggtgcgaagcatcccagggccagacggagctgccccctgagcgccgggcctcgctgctgctgggatctcg

SEQ ID NO: 28601 - DNA, 120 bp, synthetic construct; identical to SEQ ID NO: 8601
  source 1..120: mol_type = other DNA

SEQ ID NO: 28602 - DNA, 120 bp, synthetic construct
  source 1..120: mol_type = other DNA
agctttctccctagatcgcactgtgggccggggccctggagggctgctctgtgttaataagattgtaaggtttgccctcctcacctgttgccggcatgcgggtagtattagccacccccc

SEQ ID NO: 28603 - DNA, 120 bp, synthetic construct
  source 1..120: mol_type = other DNA
ctgcccagagggctggatgcctgccggtccccgagcaagcctgggaactcaggaaaattcacaggacttgggagattctaaatcttaagtgcaattatttttaataaaaggggcatttgg

SEQ ID NO: 28604 - DNA, 120 bp, synthetic construct
  source 1..120: mol_type = other DNA
gaccaactatttgatagcacgacagcgtgactaaagtcaataacttagttacatattttaaaataacttagagtgtaattggattgtttgtacctcaaagaaaaaatgcaataaaacttt

SEQ ID NO: 28605 - DNA, 120 bp, synthetic construct; identical to SEQ ID NO: 8602
  source 1..120: mol_type = other DNA

SEQ ID NO: 28606 - DNA, 120 bp, synthetic construct
  source 1..120: mol_type = other DNA
gacttgagttaataaggcatcagtgttggtttgttaatgagtcatactaatgtaagatgagaaactggtaaggtttataagaactctgtagcatgtttgcaattttttggtaaatagaaa

SEQ ID NO: 28607 - DNA, 120 bp, synthetic construct
  source 1..120: mol_type = other DNA
ggatcaagaccagcctgtccaacatgatgaaacccccatctctagtaaaaataagaaaaaattagctgggcgtggtggtgggcgcctgttatcccagctactcaggaggctgaagcagga

SEQ ID NO: 28608 - DNA, 120 bp, synthetic construct
  source 1..120: mol_type = other DNA
ttgaggattagtggggagtgtagtttgagttaaataattcagttgaatggacataaattctagacataattgtaggtagtcttagaatttattgatcttttatagagatggggttctcac

SEQ ID NO: 28609 - DNA, 120 bp, synthetic construct; identical to SEQ ID NO: 8603
  source 1..120: mol_type = other DNA

SEQ ID NO: 28610 - DNA, 120 bp, synthetic construct
  source 1..120: mol_type = other DNA
ggagtgcagtggtgcgatctctgctcactgcaacttccgcccacctcccgggttcaagtgattcttctgcctcagcctcctaagcagctgggattatagacacgtgccaccatgcccggc

SEQ ID NO: 28611 - DNA, 120 bp, synthetic construct
  source 1..120: mol_type = other DNA
gccactgtgcccagccttctctttattttttttagtccacaagttctacacattttctcttaaattcactgatttttagattattttctccctatggcttaagagtatactgagtactat

SEQ ID NO: 28612 - DNA, 120 bp, synthetic construct
  source 1..120: mol_type = other DNA
tttattaaggctttaatttaattttttttcaggctaaaactacaaagaagattgtgctaaggcttgagtgcgttgagcccaactgcagatctaagagaatgctggctattaaaagatgca

SEQ ID NO: 28613 - DNA, 120 bp, synthetic construct; identical to SEQ ID NO: 8604
  source 1..120: mol_type = other DNA

SEQ ID NO: 28614 - DNA, 120 bp, synthetic construct
  source 1..120: mol_type = other DNA
ataaaatcttgagtttatgttcacttcatttgtttgctgttcatcttttgggagggaataagctagagccatcaatacaattccgcttgtggggaaatttatgcctcttactggtactac

SEQ ID NO: 28615 - DNA, 120 bp, synthetic construct
  source 1..120: mol_type = other DNA
cactaggggccttatgaggcagtttgtcattatgcaatggttattggttatcatgtgagtagacacatttcaggctaatagggagaagtcagtaacacattcatagtgaatatgagatgt

SEQ ID NO: 28616 - DNA, 120 bp, synthetic construct
  source 1..120: mol_type = other DNA
gacttggtcttacactcttgaacattttgacattccccctcacattttaaagtagatatatttataccaaaataactacaaagaataggttttctagtgtatgaaaccccccagtggagt

SEQ ID NO: 28617 - DNA, 120 bp, synthetic construct
  source 1..120: mol_type = other DNA
ctgggactataggtgcctgttaccatacctggctaattttagtttttgtgttgggtgtctctctttgttactcagctagtctggaactcctggccttcagtgaaactcctatctcagcat

SEQ ID NO: 28618 - DNA, 120 bp, synthetic construct; identical to SEQ ID NO: 8605
  source 1..120: mol_type = other DNA

SEQ ID NO: 28619 - DNA, 120 bp, synthetic construct
  source 1..120: mol_type = other DNA
tccatctcctgacctcgtgatccgcccgacttggcctcccaaagtgttgggattacaggcgtgagacaccgtgcctggcctatacatccttcttaatacatttcagtcttaatgatgttt

SEQ ID NO: 28620 - DNA, 120 bp, synthetic construct
  source 1..120: mol_type = other DNA
gtttaaacttcggaaaattttattcaaggaaatagaacttttttttttgagatggagtcttgctctgttgcccaggctggaatgcagtggcgtgatcttgggtcactgcacccccccact

SEQ ID NO: 28621 - DNA, 120 bp, synthetic construct; identical to SEQ ID NO: 8606
  source 1..120: mol_type = other DNA

SEQ ID NO: 28622 - DNA, 120 bp, synthetic construct
  source 1..120: mol_type = other DNA
cacctggctaatttttatatttttattagaaatggggtttcaccatgttgtccaggcgggtctcaaagtcccgacctcaggtgatctgcccgcctcagcctcccaaagtgctgggattac

SEQ ID NO: 28623 - DNA, 120 bp, synthetic construct
  source 1..120: mol_type = other DNA
ctgcattgtattttctagctgaagcaaaacagtgcctgtgggatttatgtgacttcttaaccttgaagtccattcatagaaccctagcttccttttcacagggaggagctgtgtgatgaa

SEQ ID NO: 28624 - DNA, 120 bp, synthetic construct
  source 1..120: mol_type = other DNA
tcgttcccacacttcaaagttgtctccctgaaaaaccaagaaagtgtggttgcttagcaactagtgataagtggccctgttagtttggcattcattcttaatgtcagaactatcaagcac

SEQ ID NO: 28625 - DNA, 120 bp, synthetic construct; identical to SEQ ID NO: 8607
  source 1..120: mol_type = other DNA

SEQ ID NO: 28626 - DNA, 120 bp, synthetic construct
  source 1..120: mol_type = other DNA
tgattccagctgaggccaaagttgccaatcactaactgagaaaaagaatgaaataattcaaacaagagaggaggaaacattcttaaagttacctagatgacccatatggagaaaccactt

SEQ ID NO: 28627 - DNA, 120 bp, synthetic construct
  source 1..120: mol_type = other DNA
tcaagtttttaccatatctgggtcattccaaccccctggtccagcaacatcaacaattctctcctggttaaaagatgtccagtccaagatactctttatacttttccaggaatcatcaat

SEQ ID NO: 28628 - DNA, 120 bp, synthetic construct
  source 1..120: mol_type = other DNA
aaacagatatgactcttctgtttactttctactaacatccttgtgagatgaaaacagtttaaaggaggcacttgtagccttctcttgagtttacagattgaacgtctccataaggaggtc

SEQ ID NO: 28629 - DNA, 120 bp, synthetic construct; identical to SEQ ID NO: 8608
  source 1..120: mol_type = other DNA

SEQ ID NO: 28630 - DNA, 120 bp, synthetic construct
  source 1..120: mol_type = other DNA
catctctactaaaaatacaaaaattagccagatgtggtagcgcacgcctataatcccagctactgggaggctgaggcaagagaatcgcttaaacccgggaggcggaggttgcagtgagcc

SEQ ID NO: 28631 - DNA, 120 bp, synthetic construct
  source 1..120: mol_type = other DNA
tattttgcagagataatgagggaataatagggattcattccataaataactattcaacacttaaccatatgcgagagatacagtcaaagtcagacaaggtccctgccctcatgaaactta

SEQ ID NO: 28632 - DNA, 120 bp, synthetic construct
  source 1..120: mol_type = other DNA
ctattttaaagtagttagagaagaactgtctgcatatgtggcgtttggtctgcgacttcaatgttaaggagcccggccctttaaaaatctttggggaagaactgttctaggcagaaaaaa

SEQ ID NO: 28633 - DNA, 120 bp, synthetic construct; identical to SEQ ID NO: 8609
  source 1..120: mol_type = other DNA

SEQ ID NO: 28634 - DNA, 120 bp, synthetic construct
  source 1..120: mol_type = other DNA
tctggttgagagccgatagtagcttggaaggccagggtgcatgtagtgaagatggaaggaagtgggctgattcaggagatattttagagatactggtggaaggactgttgatagacagga

SEQ ID NO: 28635 - DNA, 120 bp, synthetic construct
  source 1..120: mol_type = other DNA
gatggtaggatgatagtaagtaacgttggactttgaaggagaccttggtttcctttgttgtcaagttctatctatcagtacagttctattggattctgggctcactatctcaccttttga

SEQ ID NO: 28636 - DNA, 120 bp, synthetic construct
  source 1..120: mol_type = other DNA
taagggaaagaaatgaatttccagctggggctatatatatagttattttattttattttattttaattttttgagatggggttcagtctgtcatccagggtggagtgcagtggtgcgatc

SEQ ID NO: 28637 - DNA, 120 bp, synthetic construct
  source 1..120: mol_type = other DNA
tttactagagatggggtttcaccatgttggccagggtggtctcgaactcctgacctcaagtaatccacccgcctcagcctcccaaagtgctaggattacaggcatgagccatcatgccca

SEQ ID NO: 28638 - DNA, 120 bp, synthetic construct; identical to SEQ ID NO: 8610
  source 1..120: mol_type = other DNA

SEQ ID NO: 28639 - DNA, 120 bp, synthetic construct
  source 1..120: mol_type = other DNA
agaagagatgggagctctggcacatggagaataattatttccagtattgtgacagggtatttaaaattctgaagattggttctttggctcagctaccatggcctcaaagttctttccttt

SEQ ID NO: 28640 - DNA, 120 bp, synthetic construct
  source 1..120: mol_type = other DNA
catcaatgtcgtagtatccaaaactcccagggaagcctgcgcaggttttatttccaacatctgcataaatccctagcttcagtcctttgctgtgaacctgaaatgagagggaggaaaaga

SEQ ID NO: 28641 - DNA, 120 bp, synthetic construct; identical to SEQ ID NO: 8611
  source 1..120: mol_type = other DNA

SEQ ID NO: 28642 - DNA, 120 bp, synthetic construct
  source 1..120: mol_type = other DNA
caaactttagttagacttctctgatgagccttcttttcgactagacctccaccttggcttcctatgtctgtcctagcaagacctcttagcaagaatcctgctaagtcaatactgccacca

SEQ ID NO: 28643 - DNA, 120 bp, synthetic construct
  source 1..120: mol_type = other DNA
cccctcaatctgctcattggctataaatctccacctgtctttgttgtatttggaattgaacttggctctttcctctactgtggtagtactgaataaaatctgtcttcatcggccgggcgt

SEQ ID NO: 28644 - DNA, 120 bp, synthetic construct
  source 1..120: mol_type = other DNA
attagccgggcgtggtggtgtgcgcctgtagtcccagctacttgggaggctgaggcaggagaatcacttgaacccaagaggtggagggttgcagtgagctgagattgtgccactgcactc

SEQ ID NO: 28645 - DNA, 120 bp, synthetic construct; identical to SEQ ID NO: 8612
  source 1..120: mol_type = other DNA

SEQ ID NO: 28646 - DNA, 120 bp, synthetic construct
  source 1..120: mol_type = other DNA
aggtcaggagatcgagaccatcttggctaacatggtgaaaccccgtctctactaaaaatacaaaaaattaactgggcatggtggcgggtgcctgtggtcccagctacttgggaggctgag

SEQ ID NO: 28647 - DNA, 120 bp, synthetic construct
  source 1..120: mol_type = other DNA
aaaaaaattgtctgctgatggaatgcaaagtccacctgataagccttacaattcaatgttcagataacagccagctattctactttctaagtgtcatgagggctgtttctttttttcctt

SEQ ID NO: 28648 - DNA, 120 bp, synthetic construct
  source 1..120: mol_type = other DNA
tctcagctcactgaaacttccacctcctgggttcaagcgattctcctgcctcagcctcccaagtagctggggttacaggcgttcaccaccatgcccagctaattttttgtacttttaata

SEQ ID NO: 28649 - DNA, 120 bp, synthetic construct; identical to SEQ ID NO: 1550
  source 1..120: mol_type = other DNA

SEQ ID NO: 28650 - DNA, 120 bp, synthetic construct
  source 1..120: mol_type = other DNA
taacctgcatccttccagccttctgagaccatgagctctgccatctccatgaagagcttctcactgaaagagaaattccaataatcattacaattcattaaatgaacacttaggtacctc

SEQ ID NO: 28651 - DNA, 120 bp, synthetic construct
  source 1..120: mol_type = other DNA
gtctctcttatcccgttaatattcccgccctaaaaaccccaaacaaaataggaatgagaaatatatgatgaaattgaaaagagtattagatctaagaagacagttcagtaaagtcagaaa

SEQ ID NO: 28652 - DNA, 120 bp, synthetic construct
  source 1..120: mol_type = other DNA
tacgtgcaaggcccatatgttaaaactatgatgctcctaaatgatttgaataaatggagaaatattattttgctcttggataagcatactcaatattaaaaataagttaattttccctgc

SEQ ID NO: 28653 - DNA, 120 bp, synthetic construct
  source 1..120: mol_type = other DNA
aggctggagtgcagtggcgccatcttggctcactgcaacctctgcctccccggttcaagcgattcttctacctcagcctcccgagtagctgagattacaggcatgtgccatcgcatccgg

SEQ ID NO: 28654 - DNA, 120 bp, synthetic construct; identical to SEQ ID NO: 8614
  source 1..120: mol_type = other DNA

SEQ ID NO: 28655 - DNA, 120 bp, synthetic construct
  source 1..120: mol_type = other DNA
gcctgaccaacatggagaaaccccatctctactaaaaatacaaaatagctaggcgtggtggcgcatgcctgtaattccagctactcgcgaggatgaggcaggagaattgcttgaacctgg

SEQ ID NO: 28656 - DNA, 120 bp, synthetic construct
  source 1..120: mol_type = other DNA
gctagtgtggaactattagcattagaataagaatacacagattaatggaattaaacaaagtttcgaaagaggtccttccagccatctgataccatgggacttattatttattaaatgtgg

SEQ ID NO: 28657 - DNA, 120 bp, synthetic construct; identical to SEQ ID NO: 8615
  source 1..120: mol_type = other DNA

SEQ ID NO: 28658 - DNA, 120 bp, synthetic construct
  source 1..120: mol_type = other DNA
aaacccgtctctactgaaaatacaaaaattagctggccgtggtggtgtgcctgtaatcccagctactcaggagactacgacaggagaactgcttaaacccgggaggtggagtttgcactg

SEQ ID NO: 28659 - DNA, 120 bp, synthetic construct
  source 1..120: mol_type = other DNA
tcacgaggtcaggagattgagaccaccctggctaacatggtgaaaccccgtctgtactaaaaaaaaaaaaaaaaaaaaaaagagccaggcgtggtggcaggcgcctgtagtcccagctac

SEQ ID NO: 28660 - DNA, 120 bp, synthetic construct
  source 1..120: mol_type = other DNA
aaaaaaaaaagtgtaatttacccaatgtcacagggctaagtaacaatgaggcagaatttgagcccagactgggtgccagggtcttgccattagccaaacatgacataaacatgatccatt

SEQ ID NO: 28661 - DNA, 120 bp, synthetic construct
  source 1..120: mol_type = other DNA
gtggggggaaatctttattttcattttgctcttctttatctacattttttgcaatgatcatgcattagttttataatcagatgcaaataccaataaaaaaaaatccgtgatgggcaaaat

SEQ ID NO: 28662 - DNA, 120 bp, synthetic construct; identical to SEQ ID NO: 8616
  source 1..120: mol_type = other DNA

SEQ ID NO: 28663 - DNA, 120 bp, synthetic construct
  source 1..120: mol_type = other DNA
cttgaaaactcacctgtgtgagataagaactatttttcagattttttttgtcagctccctgaaattaaaaggttgtaatcccaatttacagataaggattgtgagggtcagatatgttca

SEQ ID NO: 28664 - DNA, 120 bp, synthetic construct
  source 1..120: mol_type = other DNA
tatggtctctctaactccctcgagatactgccgagaaatccacgaccccaaaaggagaaaaaatggcacgaatcttagttccccattcctcctacccaccctagatgttctaacggttag

SEQ ID NO: 28665 - DNA, 120 bp, synthetic construct
  source 1..120: mol_type = other DNA
ccgggcagggagagagagaaagagagaggaaagaagagaaagagaaagagaaggagaacgagagagagagagagagagaaagaaacaggggccgctggccggactcccatcccaggaaag

SEQ ID NO: 28666 - DNA, 120 bp, synthetic construct; identical to SEQ ID NO: 8617
  source 1..120: mol_type = other DNA

SEQ ID NO: 28667 - DNA, 120 bp, synthetic construct
  source 1..120: mol_type = other DNA
ttctgggttcctcagctgcattgtcacggtgaccggacagcataaatttccgcgggtaacctgggcttttaagattaacctcaggggcggaccaatcaccgatgacttattaaataatga

SEQ ID NO: 28668 - DNA, 120 bp, synthetic construct
  source 1..120: mol_type = other DNA
ctaaagttctgaaagacctgttgcttttcaccaggaagttttactgggcatctcctgagcctaggcaatagctgtagggtgacttctggagccatccccgtttccccgccccccaaaaga

SEQ ID NO: 28669 - DNA, 120 bp, synthetic construct
  source 1..120: mol_type = other DNA
ctaggggcgcggcgggggtggaaaaatcgaaactagctttttctttgcgcttgggagtttgctaactttggaggacctgctcaaccctatccgcaagcccctctccctactttctgcgtc

SEQ ID NO: 28670 - DNA, 120 bp, synthetic construct; identical to SEQ ID NO: 1555
  source 1..120: mol_type = other DNA

SEQ ID NO: 28671 - DNA, 120 bp, synthetic construct
  source 1..120: mol_type = other DNA
cgaaagagtggcgttggggatctgaattcttcaccattccacccacttttggtgagacctggggtggaggtctctagggtgggaggctcctgagagaggcctacctcgggcctttcccca

SEQ ID NO: 28672 - DNA, 120 bp, synthetic construct
  source 1..120: mol_type = other DNA
taattaagaggcctctctacaaagtactgataatgaacatgtaagcaatgcactcacttctaagttacattcatatctgatcttatttgattttcactaggcatagggaggtaggagcta

SEQ ID NO: 28673 - DNA, 120 bp, synthetic construct
  source 1..120: mol_type = other DNA
atcttagttgacagtgattttgccctgtagtgtagcacagtgttctgtgggtcacacgccggcctcagcacagcactttgagttttggtactacgtgtatccacattttacacatgacaa

SEQ ID NO: 28674 - DNA, 120 bp, synthetic construct; identical to SEQ ID NO: 8619
  source 1..120: mol_type = other DNA

SEQ ID NO: 28675 - DNA, 120 bp, synthetic construct
  source 1..120: mol_type = other DNA
ttgagcagagacatgaaggaaataagaatgatattgactgggagcagtatttcccaggcaaactgagtgggcctggcaagttggattaaaaagcgggttttctcagcactactcatgtgt

SEQ ID NO: 28676 - DNA, 120 bp, synthetic construct
  source 1..120: mol_type = other DNA
aaatgtctctaaactttgccacatgtcacctagtagacaaactcctggttaagaagctcgggttgaaaaaaataaacaagtagtgctggggagtagaggccaagaagtaggtaatgggct

SEQ ID NO: 28677 - DNA, 120 bp, synthetic construct
  source 1..120: mol_type = other DNA
tgttacacagtccaggcaagaggtagtggagtgggctgggtgggaacagaaaagggagtgacaaaccattgtctcctgaatatattctgaaggaagttgctgaaggattctatgttgtgt

SEQ ID NO: 28678 - DNA, 120 bp, synthetic construct; identical to SEQ ID NO: 8620
  source 1..120: mol_type = other DNA

SEQ ID NO: 28679 - DNA, 120 bp, synthetic construct
  source 1..120: mol_type = other DNA
attttattggcctgagcagtggggtaattggcaatgccatttctgagatggtgaaggcagaggaaagagcagtttggggtaaatcaaggatctgcatttggacatgttaagtttgagatt

SEQ ID NO: 28680 - DNA, 120 bp, synthetic construct
  source 1..120: mol_type = other DNA
tcatttgaggtcaggagtttgagacaagcttggccaacatggtgaaaccccatgtctactaaaaatacaaaaattagcctggtgtggtggcgcacgcctatagtcccaggttttcaggag

SEQ ID NO: 28681 - DNA, 120 bp, synthetic construct
  source 1..120: mol_type = other DNA
aaaaaaaaaaactgaaggaattattcctcaggatttgggtctaatttgccctgagcaccaactcctgagttcaactaccatggctagacacaccttaacattttctagaatccaccagct

SEQ ID NO: 28682 - DNA, 120 bp, synthetic construct; identical to SEQ ID NO: 8621
  source 1..120: mol_type = other DNA

SEQ ID NO: 28683 - DNA, 120 bp, synthetic construct
  source 1..120: mol_type = other DNA
ccagtagaatttcaagccagatgtggctgcagctgagtcagagtctgaaagggtgggatcacatgttcactgttgacttctggactattatggaaaatcacaaccacagcaagggtatgt

SEQ ID NO: 28684 - DNA, 120 bp, synthetic construct
  source 1..120: mol_type = other DNA
ctgagatcatttggtccttggggatggtggaaatagggacctattcctttggttgcagttaacaaggctggggatttttccagagtcccacaccctgcaggtcatcctgggctgtgaaat

SEQ ID NO: 28685 - DNA, 120 bp, synthetic construct
  source 1..120: mol_type = other DNA
gctggagtgggaaaggcacaagattcgggccaggcagaacagggcctacctggagagggactgccctgcacagctgcagcagttgctggagctggggagaggtgttttggaccaacaagg

SEQ ID NO: 28686 - DNA, 120 bp, synthetic construct; identical to SEQ ID NO: 8622
  source 1..120: mol_type = other DNA

SEQ ID NO: 28687 - DNA, 120 bp, synthetic construct
  source 1..120: mol_type = other DNA
ggtggtcacaaggtcaggagtttgagaccagcctgaccaacatggtgaaacccgtctctaaaaaaatacaaaaattagctggtcacagtcatgcgcacctgtagtcccagctaattggaa

SEQ ID NO: 28688 - DNA, 120 bp, synthetic construct
  source 1..120: mol_type = other DNA
aaaaaagagaattcagagatctcagctatcatatgaataccaggacaaaatatcaagtgaggccacttatcagagtagaagaatcctttaggttaaaagtttctttcatagaacatagca

SEQ ID NO: 28689 - DNA, 120 bp, synthetic construct
  source 1..120: mol_type = other DNA
tgcacataaagggcaattttatctatcagaacaaagaacatgggtaacagatatgtatatttacatgtgaggagaacaagctgatctgactgctctccaagtgacactgtgttagagtcc

SEQ ID NO: 28690 - DNA, 120 bp, synthetic construct; identical to SEQ ID NO: 8623
  source 1..120: mol_type = other DNA

SEQ ID NO: 28691 - DNA, 120 bp, synthetic construct
  source 1..120: mol_type = other DNA
taaccttggctgtaccccctggggaagagcagagatatacgtgccaggtggagcacccaggcctggatcagcccctcattgtgatctggggtatgtgactgatgagagccaggagctgag

SEQ ID NO: 28692 - DNA, 120 bp, synthetic construct
  source 1..120: mol_type = other DNA
aggctttaacttgctttttctgttttagagccctcaccgtctggcaccctagtcattggagtcatcagtggaattgctgtttttgtcgtcatcttgttcattggaattttgttcataata

SEQ ID NO: 28693 - DNA, 120 bp, synthetic construct
  source 1..120: mol_type = other DNA
agcatttttctcatttatattctttggggacaccagcagctccctgggagacagaaaataatggttctccccagaatgaaagtctctaattcaacaaacatcttcagagcacctactatt

SEQ ID NO: 28694 - DNA, 120 bp, synthetic construct; identical to SEQ ID NO: 8624
  source 1..120: mol_type = other DNA

SEQ ID NO: 28695 - DNA, 120 bp, synthetic construct
  source 1..120: mol_type = other DNA
attagaaataattactgtaccttaaccctgagtttgcgtagctatcactcaccaattatgcatttctaccccctgaacatctgtggtgtagggaaaagagaatcagaaagaagccagctc

SEQ ID NO: 28696 - DNA, 120 bp, synthetic construct
  source 1..120: mol_type = other DNA
atgagaggtgaggagaccagttagaaagccaataagcatttccagatgagagataatggttcttgaaatccaatagtgcccaggtctaaattgagatgggtgaatgaggaaaataaggaa

SEQ ID NO: 28697 - DNA, 120 bp, synthetic construct
  source 1..120: mol_type = other DNA
actcactgtgggaaggagacaaaactagagactcaaagagggagtgcatttatgagctcttcatgtttcaggagagagttgaacctaaacatagaaattgcctgacgaactccttgattt

SEQ ID NO: 28698 - DNA, 120 bp, synthetic construct
  source 1..120: mol_type = other DNA
catctagaggcttccttcatttcctccgtcacctcagagacatacacctatgtcatttcatttcctatttttggaagaggactccttaaatttgggggacttacatgattcattttaaca

SEQ ID NO: 28699 - DNA, 120 bp, synthetic construct; identical to SEQ ID NO: 8625
  source 1..120: mol_type = other DNA

SEQ ID NO: 28700 - DNA, 120 bp, synthetic construct
  source 1..120: mol_type = other DNA
cacctgtcccagaaaaagcatcatggctatctgtgggtagtatgatgggtgtttttagcaggtaggaggcaaatatcttgaaaggggttgtgaagaggtgttttttctaattggcatgaa

SEQ ID NO: 28701 - DNA, 120 bp, synthetic construct
  source 1..120: mol_type = other DNA
ataatgaaaattatgataaggatgataaaagcacttacttcgtgtccgactcttctgagcacctacttacatgcattactgcatgcacttcttacaataattctatgagataggtactat

SEQ ID NO: 28702 - DNA, 120 bp, synthetic construct
  source 1..120: mol_type = other DNA
catcctggctaacatggtgaaaccccatctctaataaaaatacaaaaaattagctgggcgtggtggcagacgcctgtagtcccagctactcggaaggctgaggcaggagaatggcatgaa

SEQ ID NO: 28703 - DNA, 120 bp, synthetic construct; identical to SEQ ID NO: 8626
  source 1..120: mol_type = other DNA

SEQ ID NO: 28704 - DNA, 120 bp, synthetic construct
  source 1..120: mol_type = other DNA
cctcagctgtcatgtttcctttaaaagtccctgaaggaaggtcctggaatgtgactcccttgctcctctgttgctctctttggcattcatttctttggaccctacgcaaggactgtaatt

SEQ ID NO: 28705 - DNA, 120 bp, synthetic construct
  source 1..120: mol_type = other DNA
tctctcattttgagatggtataatggaagccaccaagtggcttagaggatgcccaggtccttccatggagccactggggttccggtgcacattaaaaaaaaaatctaaccaggacattca

SEQ ID NO: 28706 - DNA, 120 bp, synthetic construct
  source 1..120: mol_type = other DNA
gtaacctctgcctcccaggttcaagcgattctcctgtctcagcctcccaagtagctgggattacaggcgtgcaccaccatgcccggctaatttttgtatttttagtagagacagggtttc

SEQ ID NO: 28707 - DNA, 120 bp, synthetic construct; identical to SEQ ID NO: 8627
  source 1..120: mol_type = other DNA

SEQ ID NO: 28708 - DNA, 120 bp, synthetic construct
  source 1..120: mol_type = other DNA
cgctcattgtagaaaagctataaaatgaatacaattaaagctgttatttaattagccagtgaaaaactattaacaacttgtctattacctgttagtattattgttgcattaaaaatgcat

SEQ ID NO: 28709 - DNA, 120 bp, synthetic construct
  source 1..120: mol_type = other DNA
tttacattttgtcttacggaatattttcattcaactgtggtagccgaattaatcgtgtttcttcactctagggacattgtcgtctaagttgtaagacattggttattttaccagcaaacc

SEQ ID NO: 28710 - DNA, 120 bp, synthetic construct; identical to SEQ ID NO: 1565
  source 1..120: mol_type = other DNA

SEQ ID NO: 28711 - DNA, 120 bp, synthetic construct; identical to SEQ ID NO: 8628
  source 1..120: mol_type = other DNA

SEQ ID NO: 28712 - DNA, 120 bp, synthetic construct
  source 1..120: mol_type = other DNA
gagaaaacaaacaagaaactacttaccagctatttgaattgctggaatcacaggccattgctgagctgcctgaactgggaacacaacagaaggaaaacaaaccactctgataatcattga

SEQ ID NO: 28713 - DNA, 120 bp, synthetic construct
  source 1..120: mol_type = other DNA
gcaggtgattgaggactgctgagaggtacaggccaaaattcttatgttgtattataataatgtcatcttataatactgtcagtattttataaaacattcttcacaaactcacacacattt

SEQ ID NO: 28714 - DNA, 120 bp, synthetic construct
  source 1..120: mol_type = other DNA
tttcacatgcaggctgatatttgtaattgtgattctctctgtaggctttgggtataatgtgttcttttccttttttgcatcagcgattaacttctacactctaacatgtagaatgttact

SEQ ID NO: 28715 - DNA, 120 bp, synthetic construct; identical to SEQ ID NO: 8629
  source 1..120: mol_type = other DNA

SEQ ID NO: 28716 - DNA, 120 bp, synthetic construct
  source 1..120: mol_type = other DNA
agctccaatgtaaacagaacaggcaggggccctgattcacgggccgctggggccagggttgggggttgggggtgcccacagggcttggctagtggggttttgggggggcagtgggtgcaa

SEQ ID NO: 28717 - DNA, 120 bp, synthetic construct
  source 1..120: mol_type = other DNA
gagccagctgcagacggagctcctggcggccctgctcgagtcagggctgagcaaagaggcactgatccaggcactgggtgagccggggccctacctcctggctggagaaggccccctgga

SEQ ID NO: 28718 - DNA, 120 bp, synthetic construct
  source 1..120: mol_type = other DNA
cctcaaagagctggagaacctcagccctgaggaggcggcccaccagaaagccgtggtggagacccttctgcagtaaggagccctgccccgtccccgctcccaggagagcctagaggggcc

SEQ ID NO: 28719 - DNA, 120 bp, synthetic construct; identical to SEQ ID NO: 8630
  source 1..120: mol_type = other DNA

SEQ ID NO: 28720 - DNA, 120 bp, synthetic construct
  source 1..120: mol_type = other DNA
cggggcccaggaagcactgccagggaggagggcccgaagctggggtttgggggctttcctggcctcctagggactcatgcgtttagccagggaagcccaggtctttcttacctgaggcag

SEQ ID NO: 28721 - DNA, 120 bp, synthetic construct
  source 1..120: mol_type = other DNA
ctcctggagaactgggtgggtcctgagctcgatgcctcccctctcctcagcagagctgacctagttactaattacccatgtgctttattatttctcttttgttttataaatttataaatg

SEQ ID NO: 28722 - DNA, 120 bp, synthetic construct
  source 1..120: mol_type = other DNA
ggatggcctgggggctacaggggccacccctccccagcggctccctgacctccaccctacagcgcctgcttgaggaggttcactacttcctgggcgctgtgctgaggtttcacaggaata

SEQ ID NO: 28723 - DNA, 120 bp, synthetic construct; identical to SEQ ID NO: 8631
  source 1..120: mol_type = other DNA

SEQ ID NO: 28724 - DNA, 120 bp, synthetic construct
  source 1..120: mol_type = other DNA
tgacttggcaggaagaggagggcaaaggactccagagctgcaggggaggggcaaagagtcaggcatcccagacccagggcgaaggcaacctgacggggtggggctgggcctgacctgccc

SEQ ID NO: 28725 - DNA, 120 bp, synthetic construct
  source 1..120: mol_type = other DNA
ggcttgatccacagcatttgaaggggaagcagaggtcaaagtgcttcctagggaccagcagagacctggaagctgaggcagagagtgtagagagaggccattgggggagatggacagaga

SEQ ID NO: 28726 - DNA, 120 bp, synthetic construct
  source 1..120: mol_type = other DNA
gccccgattgggttttctttaatgctaacagcatgctatttactttccatttaaatttgagatgttgctataaattatcaaccagctccttgttcctgcagagtttataactaactacct

SEQ ID NO: 28727 - DNA, 120 bp, synthetic construct
  source 1..120: mol_type = other DNA
aaggcctgggccattggggaggttgaggctgggaagacggtacagaggcagaatgtctagtagaagctgtttcccgggagaagtcagtgtctgggaagaagccggggtgggtcctgggtc

SEQ ID NO: 28728 - DNA, 120 bp, synthetic construct; identical to SEQ ID NO: 8632
  source 1..120: mol_type = other DNA

SEQ ID NO: 28729 - DNA, 120 bp, synthetic construct
  source 1..120: mol_type = other DNA
ttctccttcagctccctgattgctccatccaaaagggggccccacccccgtcactctcttccactactgttgttcactttctctggttccctgtcaagacttgtgatcatctgatttgtt

SEQ ID NO: 28730 - DNA, 120 bp, synthetic construct
  source 1..120: mol_type = other DNA
tcctgcccagtggctgatgcacagcaggaatgagtgagtgactgggattgtctgaggccctgaagatatctgctgccctgttggtcagggcccagcagcctgagacgtggccaagggaga

SEQ ID NO: 28731 - DNA, 120 bp, synthetic construct
  source 1..120: mol_type = other DNA
ctctgtcggcccggctggagtgcatggcgcgatctcggctcactgcaagctctgcctcctgggttcacgccattctcctgcctcagcctcccgagtagctgggattacaggcatgcacca

SEQ ID NO: 28732 - DNA, 120 bp, synthetic construct; identical to SEQ ID NO: 8633
  source 1..120: mol_type = other DNA

SEQ ID NO: 28733 - DNA, 120 bp, synthetic construct
  source 1..120: mol_type = other DNA
gcagggtagagatgacaatagcccttgtccacagggttaaatggcatggcacttgtagagtaaacatgtagtaactgcaatatacagcagttattattagtgatcccattttacagatga

SEQ ID NO: 28734 - DNA, 120 bp, synthetic construct
  source 1..120: mol_type = other DNA
cacactttcccctccccagtcattcctgctgtttaagttgaccatcaactcacttccatacagtgctttggagttcacaaagggcttacaaaatgcgctaagctcattttttcctcctcc

SEQ ID NO: 28735 - DNA, 120 bp, synthetic construct
  source 1..120: mol_type = other DNA
cctccagatgtggagatgaataccacaaccttgcatgccctgaaaccccaggggccagagggcaagaggctcaaagccttggacatccgattgaccctggaaagggtaggagagagagga

SEQ ID NO: 28736 - DNA, 120 bp, synthetic construct; identical to SEQ ID NO: 8634
  source 1..120: mol_type = other DNA

SEQ ID NO: 28737 - DNA, 120 bp, synthetic construct
  source 1..120: mol_type = other DNA
acattggtttgactctcaaacccattagagtcaaagcaggagatgcctggagacttgtcctcttagttctttcctttttctttctttctttttttttttttgagatggagtctcactctg

SEQ ID NO: 28738 - DNA, 120 bp, synthetic construct
  source 1..120: mol_type = other DNA
acccagctaatttttgtatttttagtagagacagggtttcactgtgttggccagggtggtctctaactcctgacctcatgtgatccacccgcctcggcctcccaaagtgtggggattaca

SEQ ID NO: 28739 - DNA, 120 bp, synthetic construct
  source 1..120: mol_type = other DNA
tgtgtgtttgtgtaagagacacacagagagacagaagagagagagtgatagcaagggagtggggggtagggagagagagacatcgattcagtaggttctagaaaaaagtggcacaggtgg

SEQ ID NO: 28740 - DNA, 120 bp, synthetic construct; identical to SEQ ID NO: 8635
  source 1..120: mol_type = other DNA

SEQ ID NO: 28741 - DNA, 120 bp, synthetic construct
  source 1..120: mol_type = other DNA
tcagatggacaggggcacatagaaaatctttggtttgagcccaggagaggctctcaagaggtgagaggaagactgaccctattctctttgtgggagagagaagggaaggagggaggaagg

SEQ ID NO: 28742 - DNA, 120 bp, synthetic construct
  source 1..120: mol_type = other DNA
tcagataaacatgtttgccacagagcaccaggctggactttgtactgcccttccttctgagctctgactggcactcagcaaagcagggagatgaaggagagaggatcctaggagccccgg

SEQ ID NO: 28743 - DNA, 120 bp, synthetic construct; identical to SEQ ID NO: 8636
  source 1..120: mol_type = other DNA

SEQ ID NO: 28744 - DNA, 120 bp, synthetic construct
  source 1..120: mol_type = other DNA
agccttctaagtagctgggactacaggcttgtgccaccacacttagctaatttttctattttttgtagaaacagggtcccactatgttgtccaggctggtctcaaactcctgggcccaag

SEQ ID NO: 28745 - DNA, 120 bp, synthetic construct
  source 1..120: mol_type = other DNA
aactgcagggctcaagtgatcctcccacctcggcctttcaaagagctgggattaccaccatgagccaccatacccagtttacaattcagttttaaatattatatatgccaaggtgggagg

SEQ ID NO: 28746 - DNA, 120 bp, synthetic construct
  source 1..120: mol_type = other DNA
gtgcctgtggtcccaagtacttgggagtccgaggtgggagaaccaattgagcccaggagtttgaggctacagtgagctatgatcacgccactgtgctccagcctgggagacagagcaagt

SEQ ID NO: 28747 - DNA, 120 bp, synthetic construct
  source 1..120: mol_type = other DNA
gagaccagcctggccaacatggtgaaaccctgtctctactaaaaatataaaaattagctgggtgtggtagcgcacacctgtaatcccagctactcgggaggctgaggcaggagaatcgct

SEQ ID NO: 28748 - DNA, 120 bp, synthetic construct; identical to SEQ ID NO: 8637
  source 1..120: mol_type = other DNA

SEQ ID NO: 28749 - DNA, 120 bp, synthetic construct
  source 1..120: mol_type = other DNA
acacagagcttcctcagcggggttttttcagtggttgcattgaacagatgcacctccatttagttaatcagtatccttttgctgggctccttggtggcttccaatcttttgctatggcaa

SEQ ID NO: 28750 - DNA, 120 bp, synthetic construct
  source 1..120: mol_type = other DNA
attgctcagcgaggcaggggaaagcacaggctttggaatcacgcagacccaagttcaaatcccagtctgcctgtttcagtgctgctgtattgagctgtatttatctgtaactttttgttt

SEQ ID NO: 28751 - DNA, 120 bp, synthetic construct; identical to SEQ ID NO: 8638
  source 1..120: mol_type = other DNA

SEQ ID NO: 28752 - DNA, 120 bp, synthetic construct
  source 1..120: mol_type = other DNA
ggattgagacagagcaggagaggaggagagaaaatttatatggctcaggcagtctgatcccttctgttcccccacagggagacccacagcagagacatgactcacaggtggcatcaggtc

SEQ ID NO: 28753 - DNA, 120 bp, synthetic construct
  source 1..120: mol_type = other DNA
aaccagccgcggccgggcgcggtggctcacgccagtaatcccagcactttgggaggccgaggcaggcagatcacaagatcaggagatcgagaccatcctggctaacacggtgaaaccccg

SEQ ID NO: 28754 - DNA, 120 bp, synthetic construct
  source 1..120: mol_type = other DNA
cgagatcgcgccactgcactcgagcctgggtgacagagtgagactccatctcaaaaaaaaaaaaaaaaaagaaaaagaaaagaaaaaccagcctcctgttctggtgctgcagggaaacag

SEQ ID NO: 28755 - DNA, 120 bp, synthetic construct; identical to SEQ ID NO: 8639
  source 1..120: mol_type = other DNA

SEQ ID NO: 28756 - DNA, 120 bp, synthetic construct
  source 1..120: mol_type = other DNA
tggagtaggtgtaaaattggagaatccatatttctttccttgttttcagatttaatgctttcctttttccagcaggtctccttcgtccatccatccatcatccatctacccacccaccca

SEQ ID NO: 28757 - DNA, 120 bp, synthetic construct
  source 1..120: mol_type = other DNA
cacccaccaatccatccatccattcatccaaccatccatccatccatcatccatctacccacccacccaccaatccatccatccattcatccaaccatccatccatccatcatccatcca

SEQ ID NO: 28758 - DNA, 120 bp, synthetic construct
  source 1..120: mol_type = other DNA
tccaccaattcatccatccatccacccattcgcccatccatccatccacccacccatccatccatccgtccatccacccattcatccattcatccattcacccatccatccatccacata

SEQ ID NO: 28759 - DNA, 120 bp, synthetic construct; identical to SEQ ID NO: 8640
  source 1..120: mol_type = other DNA

SEQ ID NO: 28760 - DNA, 120 bp, synthetic construct
  source 1..120: mol_type = other DNA
caagtcctacctgcagcagcacaacatcccacagcgggaggtggtcgataccactggcctcaaccagtcccacctgtcccaacacctcaacaagggcactcccatgaagacgcagaagcg

SEQ ID NO: 28761 - DNA, 120 bp, synthetic construct
  source 1..120: mol_type = other DNA
ctggaagcttcaccatccccattacacagacaggtagatggaaaggaagtcagtgggattcaacctgcatttattacctattctgcgccaggcactctgtgggacgggagtagacttggt

SEQ ID NO: 28762 - DNA, 120 bp, synthetic construct
  source 1..120: mol_type = other DNA
ctcctcccaggttcaagcaattctcctgcctcagcctccggaatagctgggatcacaggtgcccaccaccatgcctggctaattttttgtagttttagtagagacgggggtttcaccatg

SEQ ID NO: 28763 - DNA, 120 bp, synthetic construct; identical to SEQ ID NO: 8641
  source 1..120: mol_type = other DNA

SEQ ID NO: 28764 - DNA, 120 bp, synthetic construct
  source 1..120: mol_type = other DNA
aatatgacctttagaatatgacctttagactaggtcttaaagtgggagttgaattttgacccatggagacgcagggaagggtgtttcaggcagaaggaacagcatcagtaaaggctcaga

SEQ ID NO: 28765 - DNA, 120 bp, synthetic construct
  source 1..120: mol_type = other DNA
ttcttctccaggcctcataccccaccaaatcccaagggcactgtcaccttccaacctccatctatgtgtgacattttttgacatttcttttattaattatccaggttaatttttttttat

SEQ ID NO: 28766 - DNA, 120 bp, synthetic construct
  source 1..120: mol_type = other DNA
agctaattttttgtatttttagtagagtcggggtttcaccatggtctcgatctcctgacctcgtgatccgcccgccttggcctcccaaagcgctgggattataggcgtgagccaccgcgc

SEQ ID NO: 28767 - DNA, 120 bp, synthetic construct; identical to SEQ ID NO: 8642
  source 1..120: mol_type = other DNA

SEQ ID NO: 28768 - DNA, 120 bp, synthetic construct
  source 1..120: mol_type = other DNA
ataagaaaaattagatgcctttaccctaaagcagccactggaattcccagactcttgtgtatccttccagagagattttctgcatatagtagcaatagatatgttattttcttgctcttt

SEQ ID NO: 28769 - DNA, 120 bp, synthetic construct
  source 1..120: mol_type = other DNA
tcatattggcactgagagattgatggatctcattctttataagggctgctggctgttatttgtttaactggccacctactgaaggacttttagggattttgcaatctgcgaatacaacca

SEQ ID NO: 28770 - DNA, 120 bp, synthetic construct
  source 1..120: mol_type = other DNA
actgctggaacacagagtagctgctttaaaatcttgggtacatattggcatagttccttccaaagaagttatatcaatgtacacttccaccagcagtaaaaatcactgttgaaaaaaaaa

SEQ ID NO: 28771 - DNA, 120 bp, synthetic construct
  source 1..120: mol_type = other DNA
atcttaactaaaaatacaaaaattagctggacatagtggcgcatgcctgtaatcccagctacttgggaggccaaggcaagggaatcgcttgaacccaggaggcagaggttgcagtgagcc

SEQ ID NO: 28772 - DNA, 120 bp, synthetic construct; identical to SEQ ID NO: 8643
  source 1..120: mol_type = other DNA

SEQ ID NO: 28773 - DNA, 120 bp, synthetic construct
  source 1..120: mol_type = other DNA
ttaaaaaatttctaacagttagaaatgtcatcaaggacttcagcctagagctgagaatagagatgcaaactgtggcccaaatagctttccctgggggatttttaacttttaaggagaaat

SEQ ID NO: 28774 - DNA, 120 bp, synthetic construct
  source 1..120: mol_type = other DNA
tggagaatttgagatgcagagtcaatatatgactgtagtattaggactctttcagtaacaggggacagaaccccaactcaaatggatttaaacagaaaagggaatgaattgactgaagca

SEQ ID NO: 28775 - DNA, 120 bp, synthetic construct; identical to SEQ ID NO: 8644
  source 1..120: mol_type = other DNA

SEQ ID NO: 28776 - DNA, 120 bp, synthetic construct
  source 1..120: mol_type = other DNA
ggcacacatcactgtgtctgctataacagaaacttttaaatgaagtctaacataaaaagtgcccaaatccaaagcatacagttcaatgaattttcacaaagtgaacacaccaatacagat

SEQ ID NO: 28777 - DNA, 120 bp, synthetic construct
  source 1..120: mol_type = other DNA
caacagaaggagaccccatctctccaaaaaatacgaataaatgagccaggtgtggtgcagcaggtgtgtagtcctagccacttatgcccgctgctgtttcttggcactgagatggtgagg

SEQ ID NO: 28778 - DNA, 120 bp, synthetic construct
  source 1..120: mol_type = other DNA
accagtttccagtaaagtggtaccagctgatgaaggctggctgggtctcttcctctagctaacatttgcattttaagcctgattttcaagtctggaaagctgaatataattctgaataca

SEQ ID NO: 28779 - DNA, 120 bp, synthetic construct
  source 1..120: mol_type = other DNA
ctgggtctcttcctctagctaacatttgcattttaagcctgattttcaagtctggaaagctgaatataattctgaatacactgaggacatatggctcaaatttttgctctactgcgtgac

SEQ ID NO: 28780 - DNA, 120 bp, synthetic construct; identical to SEQ ID NO: 8645
  source 1..120: mol_type = other DNA

SEQ ID NO: 28781 - DNA, 120 bp, synthetic construct
  source 1..120: mol_type = other DNA
gctttctgtgcctgcagagttcacccatgcagggcagggagggctgattgaagagcccacaggtgatgagctaccaaccaagaaggggcggaggaaccgtttcaagtggggcccagcatc

SEQ ID NO: 28782 - DNA, 120 bp, synthetic construct
  source 1..120: mol_type = other DNA
tgggctgcggcaaggccagggaaggggaaggtgactctaggtcctgtaaaaggctgtccagttgccgagaactcctgatattggcttagcctggcccagaaaattgagaatacttgaacc

SEQ ID NO: 28783 - DNA, 120 bp, synthetic construct
  source 1..120: mol_type = other DNA
agactgaggtcagacagactgtcaattgcccaaggtcacacagcagacctggcattggaacccagatctgccagcctcaaaccctccggcagagctcagcttctcagaaccctccccttc

SEQ ID NO: 28784 - DNA, 120 bp, synthetic construct
  source 1..120: mol_type = other DNA
tcgtcacggaggtgcgtgtctacaactggtttgccaaccggcgcaaagaagaagccttccggcacaagctggccatggacacgtacagcgggccccccccagggccaggcccgggacctg

SEQ ID NO: 28785 - DNA, 120 bp, synthetic construct; identical to SEQ ID NO: 8646
  source 1..120: mol_type = other DNA

SEQ ID NO: 28786 - DNA, 120 bp, synthetic construct
  source 1..120: mol_type = other DNA
ctccactccatccactccactccgtccaacttcatcccatccactacattcaactccactccatccactctactccatctactaccttcaactctaccccatccatccactccactccat

SEQ ID NO: 28787 - DNA, 120 bp, synthetic construct
  source 1..120: mol_type = other DNA
ccatccattccctccaacttcatcccatccagtacattcaactccactccatccactgtactccatctactacattcaactctactccatccactcccctccatccattccatccaactt

SEQ ID NO: 28788 - DNA, 120 bp, synthetic construct
  source 1..120: mol_type = other DNA
ccactccatctactacattcaactctactccatccactccatactctattccatccacttactccatccactccattcagctccactccatccactccactcactcaactccatctactc

SEQ ID NO: 28789 - DNA, 120 bp, synthetic construct; identical to SEQ ID NO: 8647
  source 1..120: mol_type = other DNA

SEQ ID NO: 28790 - DNA, 120 bp, synthetic construct
  source 1..120: mol_type = other DNA
ccattccactccactgtgttcacacaactccatccattccactctagccactccattcattccactccacgccacactattcctcaccattccatccactccaccctataccattccact

SEQ ID NO: 28791 - DNA, 120 bp, synthetic construct
  source 1..120: mol_type = other DNA
tccactcaattccatctactctactccacaccatccactccacttcatatcattccactcaactcaacctaagttgatttgggttaattcaattcaattcattcatttcagattgtatca

SEQ ID NO: 28792 - DNA, 120 bp, synthetic construct
  source 1..120: mol_type = other DNA
attcaattcatttcaattcaactaaattcagttaaattcagttcagttgtcttctactgagcacctactgcatgtcaggtatagcactaggcagtgggaggaatggagctaataaatgca

SEQ ID NO: 28793 - DNA, 120 bp, synthetic construct; identical to SEQ ID NO: 8648
  source 1..120: mol_type = other DNA

SEQ ID NO: 28794 - DNA, 120 bp, synthetic construct
  source 1..120: mol_type = other DNA
cttgcttgtaaggaaaacccaacctcatctttccttggcagggagattctggagcagtccctagggaggccctgtggggaccccggccccccggacacagcttggcttcccctcgtaggt

SEQ ID NO: 28795 - DNA, 120 bp, synthetic construct
  source 1..120: mol_type = other DNA
ggtcatgaccatcgggcctggtgagcctgcctccctgggtcctacgttcaccaacacaggtgcctccaccctggtcatcggtaagctggtggggatgggtgggcacctgggtgggaggct

SEQ ID NO: 28796 - DNA, 120 bp, synthetic construct
  source 1..120: mol_type = other DNA
ctgggtgaaccaaacagaccaaaatctcagcaactcaagcagggaggcaggcactaagcataatacatcaattctgtggtacctcagaaggtgaagggtctatgggcaaattacagcagg

SEQ ID NO: 28797 - DNA, 120 bp, synthetic construct; identical to SEQ ID NO: 8649
  source 1..120: mol_type = other DNA

SEQ ID NO: 28798 - DNA, 120 bp, synthetic construct
  source 1..120: mol_type = other DNA
ctgggaaggagaggtggtgcccttgggaggtcttgggcaggggtgggatataactggggggcccagctgattccctccccttccactccaggcctggcctccacgcaggcacagagtgtg

SEQ ID NO: 28799 - DNA, 120 bp, synthetic construct
  source 1..120: mol_type = other DNA
agccccttcatggccaccatggctcagctgcagagcccccacggtgagcgccctgtgccccacacagcaggagatgatgatagaggttggctgtcaatggatgcaggggaaaggggtgcc

SEQ ID NO: 28800 - DNA, 120 bp, synthetic construct
  source 1..120: mol_type = other DNA
tgtgagcagatccctagtgcgtgtctgggtgtgtatcggttgtgcatgcatttgtgtgcatgcctgtgtttctctgaaactcttagggccatatgaatttctaaaatctattcagatttt

SEQ ID NO: 28801 - DNA, 120 bp, synthetic construct
  source 1..120: mol_type = other DNA
tgaggtcaggagttcaagaccagcctggccaacacggtgaaaccccgtctctactaaaagtacaaaaattagccaggcgtggaggcacgtgcctgtagtcccagctacttgggaggctga

SEQ ID NO: 28802 - DNA, 120 bp, synthetic construct; identical to SEQ ID NO: 8650
  source 1..120: mol_type = other DNA

SEQ ID NO: 28803 - DNA, 120 bp, synthetic construct
  source 1..120: mol_type = other DNA
gatttggggcctgtgtatgtctgtgtgtacatggttgagagtgtatgcgtgtgtgtgtgttacatttttatctgagtcactgtgagaatatgtggtttatgtgcgttttcctagtgtctg

SEQ ID NO: 28804 - DNA, 120 bp, synthetic construct
  source 1..120: mol_type = other DNA
tctttgacaggggccacctgaacttactacacagcacctgagtttagtacagtagcacctgtgcttagtacatagcacctgtgtttagtatagtagcacctgtgcttagtacatagcgcc

SEQ ID NO: 28805 - DNA, 120 bp, synthetic construct; identical to SEQ ID NO: 8651
  source 1..120: mol_type = other DNA

SEQ ID NO: 28806 - DNA, 120 bp, synthetic construct
  source 1..120: mol_type = other DNA
gccagccctctacagccacaagcccgaggtggcccagtacacccacacgggcctgctcccgcagactatgctcatcaccgacaccaccaacctgagcgccctggccagcctcacgcccac

SEQ ID NO: 28807 - DNA, 120 bp, synthetic construct
  source 1..120: mol_type = other DNA
ggcctccagtgagtccgggcttcacacgccggcatctcaggccaccaccctccacgtccccagccaggaccctgccagcatccagcacctgcagccggcccaccggctcagcgccagccc

SEQ ID NO: 28808 - DNA, 120 bp, synthetic construct
  source 1..120: mol_type = other DNA
tgctgtgaggaagcactggcaggcgtggaggggtggggtgggcttccatgaagcccaagaggcacaggcgaccccaggaagatggggcccaccttacaagaacatctcagggactggact

SEQ ID NO: 28809 - DNA, 120 bp, synthetic construct; identical to SEQ ID NO: 8652
  source 1..120: mol_type = other DNA

SEQ ID NO: 28810 - DNA, 120 bp, synthetic construct
  source 1..120: mol_type = other DNA
ctttttgcaagctgccccctttctataaggttcctggacccggccctggcagctgtcatgacagccactgaggccattctgtgtcctggcattcaccccatgaggcgtgtccatgaccac

SEQ ID NO: 28811 - DNA, 120 bp, synthetic construct
  source 1..120: mol_type = other DNA
ttaaccattgccatcagtcagggttctccaggaacacagaaccaacagatttatttgaaggacttggcccgtgtctgcggggggctggcaggcctgaaatctgttgctggcagctctggg

SEQ ID NO: 28812 - DNA, 120 bp, synthetic construct
  source 1..120: mol_type = other DNA
gccaactgattgtggcattaaccacatctacaaagcacctgcattcacagcagcgcctagattagtgtttgactcagcctagccaagccaacacgtacaactacctacctcggcatctca

SEQ ID NO: 28813 - DNA, 120 bp, synthetic construct; identical to SEQ ID NO: 8653
  source 1..120: mol_type = other DNA

SEQ ID NO: 28814 - DNA, 120 bp, synthetic construct
  source 1..120: mol_type = other DNA
ctcccagtaaccacggcacctgggccctggggcctgtactgcctgcttggggggtgatgagggcagcagccagccctgcctggaggacctgagcctgccgagcaaccgtggcccttcctg

SEQ ID NO: 28815 - DNA, 120 bp, synthetic construct
  source 1..120: mol_type = other DNA
aagcctgttcatggcagatgtaggagggactgtcgctgcttcgtgggatacagtcttcttacttggaactgaagggggcggcctatgacttgggcacccccagcctgggcctatggagag

SEQ ID NO: 28816 - DNA, 120 bp, synthetic construct
  source 1..120: mol_type = other DNA
cccaccgggccactccttcctgccccaactccttccagctagtgacccacatgccatttgtactgaccccatcacctactcacacaggcatttcctgggtggctactctgtgccagagcc

SEQ ID NO: 28817 - DNA, 120 bp, synthetic construct; identical to SEQ ID NO: 8654
  source 1..120: mol_type = other DNA

SEQ ID NO: 28818 - DNA, 120 bp, synthetic construct
  source 1..120: mol_type = other DNA
ggaactggccaagctgaggtgcccaggagaagaaagaggtgaccccagggcacaggagctacctgtgtggacaggactaacactcagaagcctgggggcctggctggctgagggcagttc

SEQ ID NO: 28819 - DNA, 120 bp, synthetic construct
  source 1..120: mol_type = other DNA
gtaccgcgtctaccctgggattcaggaaaaggcctggggtgacccggcaccccctgcagcttgtagccagccggggcgagtggcacgtttatttaacttttagtaaagtcaaggagaaat

SEQ ID NO: 28820 - DNA, 120 bp, synthetic construct; identical to SEQ ID NO: 8655
  source 1..120: mol_type = other DNA

SEQ ID NO: 28821 - DNA, 120 bp, synthetic construct
  source 1..120: mol_type = other DNA
agctgtgctttcgagttcctctccccttccacggtcagggcctcctgagcagggcctccaaggggagcggcccagcagcgccttgatccctgggtgagccacgtgtccacactgggcagc

SEQ ID NO: 28822 - DNA, 120 bp, synthetic construct
  source 1..120: mol_type = other DNA
ggggcagctcctcacacgccatgaactgggaaacctgcaatacacacagagcatgggcaggcgaagaggccatggaggaggaggaaggggagggaaaggggcaggagaacccggggacag

SEQ ID NO: 28823 - DNA, 120 bp, synthetic construct
  source 1..120: mol_type = other DNA
gaagtagagaaaggcattctctgagagcaggagccaaacaagagagctgggagcagggaaaaccctaggcccctgtctcttcccgagggaatgtggccgctgagcccaacccaacctgga

SEQ ID NO: 28824 - DNA, 120 bp, synthetic construct
  source 1..120: mol_type = other DNA
aggccagggagagggccggggcaggcgggaggggtttgtgggtactgagcgtctgctggtgagagctctgcgggggcggctgcgaagggagactggcacatttgctgacgtgggccctcg

SEQ ID NO: 28825 - DNA, 120 bp, synthetic construct; identical to SEQ ID NO: 8656
  source 1..120: mol_type = other DNA

SEQ ID NO: 28826 - DNA, 120 bp, synthetic construct
  source 1..120: mol_type = other DNA
aagggacccgggaccctgtccctagatactctggtatgcagcctccaccgccacgtctcgggctcagtcagttcttggagaccacccgtggccgtgagacaggcaccaccgttggagctg

SEQ ID NO: 28827 - DNA, 120 bp, synthetic construct
  source 1..120: mol_type = other DNA
gactctcctgccctaccctgagcctgcagctcctgaagcagccttcctccaggaggacaggggtgggaggagggcaggaacaaggttcagggaggctgggccacagagcccagcagaaag

SEQ ID NO: 28828 - DNA, 120 bp, synthetic construct
  source 1..120: mol_type = other DNA
gcaacagcggggatgtggaagtggggccaggccccggggtggtcacagcactgtaggcgggcgggaccagcgtcatctgcctctgtagcagctgcaggacagtggccatgtctgcactca

SEQ ID NO: 28829 - DNA, 120 bp, synthetic construct; identical to SEQ ID NO: 8657
  source 1..120: mol_type = other DNA

SEQ ID NO: 28830 - DNA, 120 bp, synthetic construct
  source 1..120: mol_type = other DNA
gggggatgttgaggaggctgggggtgggggcggggcatcgagggagctcctggtactggcggccccgactgtccccccagaagctgaaaatgttggacactcctgagaaggcgcctgcag

SEQ ID NO: 28831 - DNA, 120 bp, synthetic construct
  source 1..120: mol_type = other DNA
cagtcctccatcaggggctccccacccggcggctctccggggggcctggggctggagaagggcaccaggcggagggggctggagctgcggcctgggccctcatcctcactgctctcaggg

SEQ ID NO: 28832 - DNA, 120 bp, synthetic construct
  source 1..120: mol_type = other DNA
gtgggaaacagagaatgggcctcagagaggggaggagaacagagaggagggggcgagggtggaggaggggacaggagcgagcccgagagaggactgggcaggaagccctggtttgtcccc

SEQ ID NO: 28833 - DNA, 120 bp, synthetic construct; identical to SEQ ID NO: 8658
  source 1..120: mol_type = other DNA

SEQ ID NO: 28834 - DNA, 120 bp, synthetic construct
  source 1..120: mol_type = other DNA
aagcagacacggcccaccccgccttccagctcccagcctcaccttgtccccgccctcccccttcctcccctcccccgcctcacccttgtccgtgcgcctgcggaaggacaacttgcgctt

SEQ ID NO: 28835 - DNA, 120 bp, synthetic construct
  source 1..120: mol_type = other DNA
ggccccaagctccctccttaacacagaaaaagtagggctgggcgccccagctctgggaaaacccttccctgcccccaatgtgattttgccccaggcaaagactgagtttgggacttttgt

SEQ ID NO: 28836 - DNA, 120 bp, synthetic construct; identical to SEQ ID NO: 8659
  source 1..120: mol_type = other DNA

SEQ ID NO: 28837 - DNA, 120 bp, synthetic construct
  source 1..120: mol_type = other DNA
cattcttccctggaggccatggagaggacagggagctcagccccggggggcggcatccaggcagcaggcaccttctcccggcatccccaccccgggcagagcatgtcccctcagctgggt

SEQ ID NO: 28838 - DNA, 120 bp, synthetic construct
  source 1..120: mol_type = other DNA
atgagacccagccagcaggactaccccaaaccccaggtcccaaacaccctcttagccaatcactgcacccttataagcaatgttcttcaaaccaaagatcagaacacagtagtgaatcaa

SEQ ID NO: 28839 - DNA, 120 bp, synthetic construct
  source 1..120: mol_type = other DNA
tagtgaaactttgattttagttttgtgggggtgtgtatttgtgtttgtacagagctgagaaacaaagtctaaaatgtcctaccatcaactatggtcgaaagagcttgctatatctgccct

SEQ ID NO: 28840 - DNA, 120 bp, synthetic construct; identical to SEQ ID NO: 8660
  source 1..120: mol_type = other DNA

SEQ ID NO: 28841 - DNA, 120 bp, synthetic construct
  source 1..120: mol_type = other DNA
ctccatggccccgcttggagggcctgagtttaggtgaattaaaggagcccagtgaccctgcaggcagtcccaggtccacagccccagtgactgcatattcagaaggctcgcacctcttga

SEQ ID NO: 28842 - DNA, 120 bp, synthetic construct
  source 1..120: mol_type = other DNA
caggtccccagcatgcaccagtgtgtcccctggcggtgcatgtgtggtcttgaacttcatggccagggcccgaaggcagcccttggtggcccctcggaagggtttgcagtgctgcagcag

SEQ ID NO: 28843 - DNA, 120 bp, synthetic construct
  source 1..120: mol_type = other DNA
tactccaccatcccacccctccatgtcagagaaatctcaacctccaggcctgggagatctcggaagcatcagggggcccagtgtcttgggaaggacctgggaccccactccagcttcacc

SEQ ID NO: 28844 - DNA, 120 bp, synthetic construct; identical to SEQ ID NO: 8661
  source 1..120: mol_type = other DNA

SEQ ID NO: 28845 - DNA, 120 bp, synthetic construct
  source 1..120: mol_type = other DNA
tggaagtactcctcgaggcgctggcgcaggggattggggatctggtggaagcggatgaactcccgcacccgcagcatctgtgtgtggtagcgggctgtgcccgagtacagccgctggatg

SEQ ID NO: 28846 - DNA, 120 bp, synthetic construct
  source 1..120: mol_type = other DNA
aggtcagtgtctcagtctcagcgtcgacatgcccacgagacgcccttgtacatctgcgctccagcacaccccacccttcagtagtccccgccctggtgacccagcccccaaaccatgtca

SEQ ID NO: 28847 - DNA, 120 bp, synthetic construct
  source 1..120: mol_type = other DNA
cactcacagccaatgagcatgacgcagatggagaagatcttctctgagttggtgttgggagagacgttgccgaagcccacactggtgaggctgctgaaggtgaagtagagcgccgtcaca

SEQ ID NO: 28848 - DNA, 120 bp, synthetic construct
  source 1..120: mol_type = other DNA
atggcgtaccagatgcaggctagccagtgcgcgatgagcgcaaaggtgcacatgagcaagaacagcacggccgcgccgtactctgagtagcgatccagcttccgcgccacgcgcaccagc

SEQ ID NO: 28849 - DNA, 120 bp, synthetic construct; identical to SEQ ID NO: 8662
  source 1..120: mol_type = other DNA

SEQ ID NO: 28850 - DNA, 120 bp, synthetic construct
  source 1..120: mol_type = other DNA
ggcactttggtgacgctacaaaataatggccccttgggatggacgaattagaaaaaaaggtgtcctgtgtggccctctgcaacctgcgaggagcttgtgtggagagaaggagcataggtt

SEQ ID NO: 28851 - DNA, 120 bp, synthetic construct
  source 1..120: mol_type = other DNA
tctctttttctctgtcctcctcgccaccccctccaccccactacctcccaccacattcctggcctctcctctccctacaccacctgcctccttgctgaccccacctcctcagagccagag

SEQ ID NO: 28852 - DNA, 120 bp, synthetic construct; identical to SEQ ID NO: 8663
  source 1..120: mol_type = other DNA

SEQ ID NO: 28853 - DNA, 120 bp, synthetic construct
  source 1..120: mol_type = other DNA
cgcggtgcctgcagcttgtactcaggcagcacgtcggcgcccagggacaggacctgcacccggggaaggcggaggtgtgggtgaggcaggccatgggacctcgggggcaggagcgatgac

SEQ ID NO: 28854 - DNA, 120 bp, synthetic construct
  source 1..120: mol_type = other DNA
caaaatgccacacagcacaggactggctccaaacagttccaacatttcccggcagacgtggattcaggccactcggcaggaacacccagtgctgctccccgccggcaatgcagatgcaga

SEQ ID NO: 28855 - DNA, 120 bp, synthetic construct
  source 1..120: mol_type = other DNA
atagccccaatccactgactggtagtcactgcagttcttaccagcccctcttcatgccacaggcccgaggacaccaggcaaccaggatggagaaagaccaagacactcccaccctccact

SEQ ID NO: 28856 - DNA, 120 bp, synthetic construct; identical to SEQ ID NO: 8664
  source 1..120: mol_type = other DNA

SEQ ID NO: 28857 - DNA, 120 bp, synthetic construct
  source 1..120: mol_type = other DNA
gcatgcagctcaacccaaaagccccctccccaagctctccctgccatccctgggcagccagctgaacccaaggccttgcccagcccccatgaattccagaggtgctggccctgctcccag

SEQ ID NO: 28858 - DNA, 120 bp, synthetic construct
  source 1..120: mol_type = other DNA
ggcgctgctgggagaacatctccttagaggaaataactagaagtcaagacgggtcatagtcaaagatttgaccaccctggggtggacacagggcctccagcggtaccagatgggctgcgg

SEQ ID NO: 28859 - DNA, 120 bp, synthetic construct
  source 1..120: mol_type = other DNA
gtggcccttcagtgatcaagtggggactgaaaaaaaaaaaagaaaacactggccaggcccctgctgataagggggcagaagaaggtagctgcccctggacagggctcttctctgtgcctg

SEQ ID NO: 28860 - DNA, 120 bp, synthetic construct; identical to SEQ ID NO: 8665
  source 1..120: mol_type = other DNA

SEQ ID NO: 28861 - DNA, 120 bp, synthetic construct
  source 1..120: mol_type = other DNA
agacttagccctgagccacctcccactcctcctccactgtcggcccaagcctgccccaggctgacagaagagcggctggatggctcccaggaggtcacagagtagtgcatggcccagcca

SEQ ID NO: 28862 - DNA, 120 bp, synthetic construct
  source 1..120: mol_type = other DNA
cctttgcccacagggtccaaccccagcacacagagcaaaggagccccggcgcctccatgccaggcccagctgtcgcctgccggcttctcctggtcctgcccatgggctcctttgtcccac

SEQ ID NO: 28863 - DNA, 120 bp, synthetic construct
  source 1..120: mol_type = other DNA
aaactctgtaagcccagcctgggagggaatgagaacaggagccaggcgcgggtgagcagggccaggccccacggctcccaaagcttcctacttcccagcagccctctccccagcctggag

SEQ ID NO: 28864 - DNA, 120 bp, synthetic construct; identical to SEQ ID NO: 8666
  source 1..120: mol_type = other DNA

SEQ ID NO: 28865 - DNA, 120 bp, synthetic construct
  source 1..120: mol_type = other DNA
tcaccctggcagtaagcgtgggcagcagcctgcctggctcgagctgcccatggccccgtggcgtgggccctgctgccagggtgccgtgctctgcccgcccgccagcccagcagcggccgc

SEQ ID NO: 28866 - DNA, 120 bp, synthetic construct
  source 1..120: mol_type = other DNA
gcccaggctcctgcagcggcgctcccgcagcctgagcccctccccctccgccagcagccgggcctgtcaccgcagattaatggtctccctgacacccccgcccagccggtccagtgctga

SEQ ID NO: 28867 - DNA, 120 bp, synthetic construct
  source 1..120: mol_type = other DNA
catgcagcgggcacaggagcagggcagatgccaggggctcaggtgggaaccaagagagaagcaagggaggaggaagagaggggtaggtggccagataagggcctggggtgagggggaatg

SEQ ID NO: 28868 - DNA, 120 bp, synthetic construct
  source 1..120: mol_type = other DNA
cagctgctgtggaaggggcaggagggaacagcttgggacaggagtcctccacattatcccaggcttctcactcactgcagagatctgcactcctgacccacccacccccagcccccaaag

SEQ ID NO: 28869 - DNA, 120 bp, synthetic construct; identical to SEQ ID NO: 8667
  source 1..120: mol_type = other DNA

SEQ ID NO: 28870 - DNA, 120 bp, synthetic construct
  source 1..120: mol_type = other DNA
cccagttggcttggcccctagtacttccttcacacaccctgcagccagacctttcatgtccctcaggccgccttccccccttgctactggccctgtcatgtccccagcctcaactgccct

SEQ ID NO: 28871 - DNA, 120 bp, synthetic construct
  source 1..120: mol_type = other DNA
cccccatcgcagctctggaatagattgccaaccccaaccctcaggtctgcctccctccaagaggccctcactggctagccccctccacccggctctggatcacagcccactcccaccccc

SEQ ID NO: 28872 - DNA, 120 bp, synthetic construct
  source 1..120: mol_type = other DNA
gtgggcgaagccaagaaggggtcgcccttgaggtccacaaagttgagggtgatttggggaatcttgctaatggtgcggtagcgcacgaggtcggagtccgaggtggagttgagcaagccg

SEQ ID NO: 28873 - DNA, 120 bp, synthetic construct; identical to SEQ ID NO: 8668
  source 1..120: mol_type = other DNA

SEQ ID NO: 28874 - DNA, 120 bp, synthetic construct
  source 1..120: mol_type = other DNA
caccagggctctgggagtggaagaatgtaatgggatgaatggacatttaatagcgcaacaagccacttaatggaattaaataagtgcttaatgggatttccatctcccaggcacccagga

SEQ ID NO: 28875 - DNA, 120 bp, synthetic construct
  source 1..120: mol_type = other DNA
ggacatttaatagcgcaacaagccacttaatggaattaaataagtgcttaatgggatttccatctcccaggcacccaggacgtagtgaaaaggtcagaagccgagggcccagaatgcagc

SEQ ID NO: 28876 - DNA, 120 bp, synthetic construct
  source 1..120: mol_type = other DNA
gccgacgaggcgcggcgcacgctggcgcagctttctcgggagcgcgtccgggccaggctgcagctggagcccgaggcgtcggggttgaggctgtgcgcccggggcgatgggagctggccg

SEQ ID NO: 28877 - DNA, 120 bp, synthetic construct; identical to SEQ ID NO: 8669
  source 1..120: mol_type = other DNA

SEQ ID NO: 28878 - DNA, 120 bp, synthetic construct
  source 1..120: mol_type = other DNA
aggggaacgggcaaccccccatccccacttccattcacaatattttgacctcgagtctcaaaaatcattctagaatccagtcatcataaaccgccatatctgaagtgacacttcagggcg

SEQ ID NO: 28879 - DNA, 120 bp, synthetic construct
  source 1..120: mol_type = other DNA
tcatcataaaccgccatatctgaagtgacacttcagggcggattccataaatcatccctgtctctcacaccggccgctgggtgccagcgtccccattttagacatgaggaagtgtggaca

SEQ ID NO: 28880 - DNA, 120 bp, synthetic construct
  source 1..120: mol_type = other DNA
cagttttactgacactgtcattttagagtgtaagaaaccaagaggtgagcacttttgtcatgatgctgagggaaagattaaaattaagccaaagagggcatcctgacagaggaaggggct

SEQ ID NO: 28881 - DNA, 120 bp, synthetic construct
  source 1..120: mol_type = other DNA
aaactacacacagctgagtccataggacacagcttcctactgaggggaggagctgctcccaggtggtcatgttccccaccctgggctgctcaagccaggctggagagaggaccgctccca

SEQ ID NO: 28882 - DNA, 120 bp, synthetic construct; identical to SEQ ID NO: 8670
  source 1..120: mol_type = other DNA

SEQ ID NO: 28883 - DNA, 120 bp, synthetic construct
  source 1..120: mol_type = other DNA
tctccatcaccacctcgaaattgaggatgaacatgatgacagccccatcctcgttcttcacgggcaccacatccaccagacataggaagcagctccctgcagagtgggaggacatagccc

SEQ ID NO: 28884 - DNA, 120 bp, synthetic construct
  source 1..120: mol_type = other DNA
atcccccacccggccatgtgcctgccgcccttatggctcccctcaatctgtctaccccagcttgttgctgccaggctcccctacccctctctctgcctatatgatttatctagctctttc

SEQ ID NO: 28885 - DNA, 120 bp, synthetic construct
  source 1..120: mol_type = other DNA
gctgtagcacagtgcttaagcccacagactttaggcctacgatctctgggttcatagcccggatctgctgcttaatcacttatgcttttttcctaaattatttaacatccttgtgcctca

SEQ ID NO: 28886 - DNA, 120 bp, synthetic construct; identical to SEQ ID NO: 8671
  source 1..120: mol_type = other DNA

SEQ ID NO: 28887 - DNA, 120 bp, synthetic construct
  source 1..120: mol_type = other DNA
tgctcttgtatttcacagatgtaccagcctataacatattagcattaaaaaacactgatccttcaccaaagagtctaagaagcactgcttctagatctttcatcttcacctcgcctcgcg

SEQ ID NO: 28888 - DNA, 120 bp, synthetic construct
  source 1..120: mol_type = other DNA
agcattaaaaaacactgatccttcaccaaagagtctaagaagcactgcttctagatctttcatcttcacctcgcctcgcgttcccctcgatccttgactttttcttttccagtctctctc

SEQ ID NO: 28889 - DNA, 120 bp, synthetic construct
  source 1..120: mol_type = other DNA
cccgtgctgatttctgaaggagccccttttaggccaagcactcagttccacctaaggcccagctcagaacctcctgcccacaggaagtccttaatgaaaccagaaggcagttaacagccc

SEQ ID NO: 28890 - DNA, 120 bp, synthetic construct; identical to SEQ ID NO: 8672
  source 1..120: mol_type = other DNA

SEQ ID NO: 28891 - DNA, 120 bp, synthetic construct
  source 1..120: mol_type = other DNA
gatcttggctcactgcaacctctgcctcccaggtccaagtgattctcctgcctcagcctcccaagtagctgggactacagctgcatgctaccacacccagctaacttttgtatattttga

SEQ ID NO: 28892 - DNA, 120 bp, synthetic construct
  source 1..120: mol_type = other DNA
ctcctcacctttctacctcctagagcctccctggctcacccctactcctgatctcaaacccacagcaggggcgacagtggtggtgctgtgagtcaaggtagaagccggcaacagacaccg

SEQ ID NO: 28893 - DNA, 120 bp, synthetic construct
  source 1..120: mol_type = other DNA
tggcagatgctggccaggctcggggattctaacccgctggggattcatctaggggaacgaggtcttctgaaaccagcttaaacaggatggcactaggtgaaggggctggccaggaactct

SEQ ID NO: 28894 - DNA, 120 bp, synthetic construct
  source 1..120: mol_type = other DNA
ctctggcctctgacacacagcagtggtgttggaagctgcagggggctgggcccagctggagaccatttggcacccagacagcctgcctggagtttatgccctaatatggtgatggccggc

SEQ ID NO: 28895 - DNA, 120 bp, synthetic construct; identical to SEQ ID NO: 8673
  source 1..120: mol_type = other DNA

SEQ ID NO: 28896 - DNA, 120 bp, synthetic construct
  source 1..120: mol_type = other DNA
gactgtccccaacacagggccccagaaattccaaccttgagacctcagcagcccgtcccctcttcagctcaagctgctcagcaagacagcccagaatggcattctgaagcccacccagtc

SEQ ID NO: 28897 - DNA, 120 bp, synthetic construct
  source 1..120: mol_type = other DNA
gagagagagagaggagtgactgctggccctcttcctttgtcgagattcaagaaatttttcctttcaaaataaccctgtcaaaggcctggttattcaaaaaatgtgaactggagccctgcc

SEQ ID NO: 28898 - DNA, 120 bp, synthetic construct; identical to SEQ ID NO: 8674
  source 1..120: mol_type = other DNA

SEQ ID NO: 28899 - DNA, 120 bp, synthetic construct
  source 1..120: mol_type = other DNA
tgcaggctgcagttccgctgagagccactccgtggcaggcacagcccacactcccgaggcagccagcactgggcgcactcagggggcagccaggacagacaaggagggcggagggggtgc

SEQ ID NO: 28900 - DNA, 120 bp, synthetic construct
  source 1..120: mol_type = other DNA
cgctcatctgcaacacagggtgatcctgcccaccccctagggccgtaggggtgaaatggcctaagatatgtgaagctcagagcctggcttgaggtcaccataagcttgagacagaagaga

SEQ ID NO: 28901 - DNA, 120 bp, synthetic construct
  source 1..120: mol_type = other DNA
actcccaccccagcctcagccccagcgctggctgaagacaccttactttgggtgagaaggttctccctgcctggcccagttctgcttcctgggccctctgaaaggggaggcacccatgga

SEQ ID NO: 28902 - DNA, 120 bp, synthetic construct; identical to SEQ ID NO: 8675
  source 1..120: mol_type = other DNA

SEQ ID NO: 28903 - DNA, 120 bp, synthetic construct
  source 1..120: mol_type = other DNA
caggccccaggcaggagccacatttggctgtggcaggggcaggccttatctcccatgtcagcaccaggtggggaggaagaggctgcagatggccctgagtgaccttaggcaccttctggg

SEQ ID NO: 28904 - DNA, 120 bp, synthetic construct
  source 1..120: mol_type = other DNA
gtgaccaacaagacacgcctggcacctgcccccagtgaaccacccatccaacaggaccccagtttgatgcatgggcaagagggaaggagagggaacaagccagacaggtggaggagcccc

SEQ ID NO: 28905 - DNA, 120 bp, synthetic construct
  source 1..120: mol_type = other DNA
agtgattcctgcactgggtgccagatgagatgacagatggctttgtggaagcatccagaattctaacaaggcggggtgctgggtccctgcagggaaggtgacctcagggaggcagccatc

SEQ ID NO: 28906 - DNA, 120 bp, synthetic construct
  source 1..120: mol_type = other DNA
gaggctgtctccggagcagcagcccagggctgtgcagtgtcaggttatatttagcctggtggcggcgacaggaagatgcagcaggagccgctcctggcagggggccaccgtgtcactaac

SEQ ID NO: 28907 - DNA, 120 bp, synthetic construct; identical to SEQ ID NO: 8676
  source 1..120: mol_type = other DNA

SEQ ID NO: 28908 - DNA, 120 bp, synthetic construct
  source 1..120: mol_type = other DNA
atctagacccacccaaatccactgcatgtggcatgcctgagccatctctgccccggaccacagcaatgcctcagaagatctctgtcctctagcttctctaaagctctggggcccggctct

SEQ ID NO: 28909 - DNA, 120 bp, synthetic construct
  source 1..120: mol_type = other DNA
gcgcgtgagtcccgggcagttgcgccccagcttcagcccttccctcctgctccccatggcccccacccctcttccctccaactcctccccagccttctaggaccccctctagaaaggttt

SEQ ID NO: 28910 - DNA, 120 bp, synthetic construct
  source 1..120: mol_type = other DNA
cctgaggccagggcaggactggcagttgcagaagaactgagggtggactcaggggtggtgatctgcagtcataacaggtggggacaggccatgtccccaccctctcagctcccttccaga

SEQ ID NO: 28911 - DNA, 120 bp, synthetic construct; identical to SEQ ID NO: 8677
  source 1..120: mol_type = other DNA

SEQ ID NO: 28912 - DNA, 120 bp, synthetic construct
  source 1..120: mol_type = other DNA
cttctaggtctgtgctctgtcttggctcctagcataccccagacagcctggtaagctttgataaagccctgtcccaattccagctctgccatgagtcacagcttaaaccaagagttataa

SEQ ID NO: 28913 - DNA, 120 bp, synthetic construct
  source 1..120: mol_type = other DNA
cgagcatcaaaacatgtgacggtgatccaaacataaacagcgaaaactggcattatttgcagatgacggggtcacttgcctagagacccccaagaaatcaacagataaacaattagaact

SEQ ID NO: 28914 - DNA, 120 bp, synthetic construct
  source 1..120: mol_type = other DNA
ttaggaaacatagtcaaaaacaatacgtcttttacaatagcaacaaaaactcttaagtgtccaggaattgaccaagaaggcacaagaaccctgttggagtcggggcaaaagggaacaaaa

SEQ ID NO: 28915 - DNA, 120 bp, synthetic construct; identical to SEQ ID NO: 8678
  source 1..120: mol_type = other DNA

SEQ ID NO: 28916 - DNA, 120 bp, synthetic construct
  source 1..120: mol_type = other DNA
atacaaaaattagccggatgtggtggtgcacacctgtaatcccagctactcgggaggctgagacaggagaatcgcttgaacccaagaggcagaggctgcagtgagccgagatcatgccac

SEQ ID NO: 28917 - DNA, 120 bp, synthetic construct
  source 1..120: mol_type = other DNA
atgaagagagaggatttgcctcagcagacgctaagacatacggaaggctataggtttttgttaagctatatcaatgcaagagccagtaaataaatatttggaacagaacagagagcacag

SEQ ID NO: 28918 - DNA, 120 bp, synthetic construct; identical to SEQ ID NO: 8679
  source 1..120: mol_type = other DNA

SEQ ID NO: 28919 - DNA, 120 bp, synthetic construct
  source 1..120: mol_type = other DNA
cagttcaacaaggaattaaaatctggaatacactgaatgtttaacagtatgcattggtatctctagagtacacaagcaactcctgcaaatcaacaaggacaaaagacggcgacgtcaaaa

SEQ ID NO: 28920 - DNA, 120 bp, synthetic construct
  source 1..120: mol_type = other DNA
agtaagcccaagaggctaccaggcctaagagatgctcagactcaacagaaatcaaaggaatgcaaattaaagcaacaagaaatcactgtcacctattagattggcaaaatttagaaaggt

SEQ ID NO: 28921 - DNA, 120 bp, synthetic construct
  source 1..120: mol_type = other DNA
tacttagttaagtgtccacatgtcccgcgatccagcaattccactcccgggcgtgtatcccacagacatcctcacccaagtccagaagggaccatgtccaaggatattcactacagcctc

SEQ ID NO: 28922 - DNA, 120 bp, synthetic construct; identical to SEQ ID NO: 8680
  source 1..120: mol_type = other DNA

SEQ ID NO: 28923 - DNA, 120 bp, synthetic construct
  source 1..120: mol_type = other DNA
ttgaacggttgcctatggggagggtaatgagactggagagtgagataaaagggaaaaggaaaaaaatgaaagagaaaggaaaaagcaataacacaaatgctgtggtttcaattatttggg

SEQ ID NO: 28924 - DNA, 120 bp, synthetic construct
  source 1..120: mol_type = other DNA
catttcccacgattgcaacagcacgggctaggagctgcagccacttaggtgacgccctgcttcatggcgaggagaatgagctctggcaccgcacgctgctttgtgggtgtctgtcatctc

SEQ ID NO: 28925 - DNA, 120 bp, synthetic construct
  source 1..120: mol_type = other DNA
gcccatcatgccccagaagggctctctgggggcaagagagctggtgcagtggcattccacgctgggcagggaggggacagctaggctcgggttcccactcaggccacccgccagctgggt

SEQ ID NO: 28926 - DNA, 120 bp, synthetic construct; identical to SEQ ID NO: 8681
  source 1..120: mol_type = other DNA

SEQ ID NO: 28927 - DNA, 120 bp, synthetic construct
  source 1..120: mol_type = other DNA
ggaaactcctgccaagtcacctgactcccagggaaggctcctgcaacgcagcacactgcccaccccattcattcattcattcagcaaacagtgccgagctctcgctgtgcactgagcacg

SEQ ID NO: 28928 - DNA, 120 bp, synthetic construct
  source 1..120: mol_type = other DNA
tgcctggctcccaaggtgtttctcatcctggataagcacccaaaaaggagaggggtttatctgaggccaaccacaggccacagcatagagatctttatgggcaagactaaggacatggag

SEQ ID NO: 28929 - DNA, 120 bp, synthetic construct
  source 1..120: mol_type = other DNA
acactaaagggctaaatactttctgtctctatactgggagggggcaatgagagagaacgtgtttttaaggaaaaaggagcactctaaacgcagaagttctctaagggaggagtttcagga

SEQ ID NO: 28930 - DNA, 120 bp, synthetic construct
  source 1..120: mol_type = other DNA
ggggcaatgagagagaacgtgtttttaaggaaaaaggagcactctaaacgcagaagttctctaagggaggagtttcaggaacgcttcagggaaataccaacatgtgaagggctttcttgg

SEQ ID NO: 28931 - DNA, 120 bp, synthetic construct; identical to SEQ ID NO: 8682
  source 1..120: mol_type = other DNA

SEQ ID NO: 28932 - DNA, 120 bp, synthetic construct
  source 1..120: mol_type = other DNA
tcaggaatgacccccgtggagcccctccaacaggcctctgatccagctagagaagggaaaggtggagggaaggtgctgcagggcaagaggcaactggctcggaagcagggcccccatgga

SEQ ID NO: 28933 - DNA, 120 bp, synthetic construct
  source 1..120: mol_type = other DNA
atagcttcagtgccacaggaaaagttctcctgtgtctaagccccatcctctgggatcgctctggtctgcctcctatctcaagacaagaaaacccacttatacaccaatccctgtcccacc

SEQ ID NO: 28934 - DNA, 120 bp, synthetic construct
  source 1..120: mol_type = other DNA
ggagaaggtgaggcgtggtggtgacaagagcagggcgtctgatttaaaggaatgggcacaggaagaaatgaagaaggcaaggaagaagacaggacagacggccttgggggacggagaagg

SEQ ID NO: 28935 - DNA, 120 bp, synthetic construct
  source 1..120: mol_type = other DNA
agcccactgggcgtggggccacctctgaggccctgggcacagtgcactggggagcaggcctggacagcaggtccccaccccctcccaacagccgcagcatcagctgttgcagtggggggc

SEQ ID NO: 28936 - DNA, 120 bp, synthetic construct; identical to SEQ ID NO: 8683
  source 1..120: mol_type = other DNA

SEQ ID NO: 28937 - DNA, 120 bp, synthetic construct
  source 1..120: mol_type = other DNA
gaaggtgggcacagtcaggctggctgagcacggtggcagggaagcagggagcagaggcaggaacaaagagcagagaggatgcagggggacagagagaagggactctgtgaggactggcag

SEQ ID NO: 28938 - DNA, 120 bp, synthetic construct
  source 1..120: mol_type = other DNA
actggactctgcccccaattccacctgaatcccgggcctgacttcaaggggcacagggccagtgagccccaggcacctcatgtctctcccttcagcccacactcccccagtctagcctcc

SEQ ID NO: 28939 - DNA, 120 bp, synthetic construct
  source 1..120: mol_type = other DNA
cagaaggctccacctcctgcccagctccccctacccgaggctggcccaggcagagaccctgagaaaggcctggacagaaacaaggggtggcgcaggcattcctcacctccgcctccctac

SEQ ID NO: 28940 - DNA, 120 bp, synthetic construct; identical to SEQ ID NO: 8684
  source 1..120: mol_type = other DNA

SEQ ID NO: 28941 - DNA, 120 bp, synthetic construct
  source 1..120: mol_type = other DNA
ccttccactgattcactggtcatcagacctctgcttctccgtccttccacctgcaagtcgaatgggttggattaggtgatcccacaataactcctctgcagaagggggcccatagccatc

SEQ ID NO: 28942 - DNA, 120 bp, synthetic construct
  source 1..120: mol_type = other DNA
agcacagctacatcgtagtgggactggcaccgtgtttacagagcacggcccgttgcaggcactctctatgaaagctcagcacccttgtgaaggtccaaagcaaggcacgttatcccagaa

SEQ ID NO: 28943 - DNA, 120 bp, synthetic construct; identical to SEQ ID NO: 8685
  source 1..120: mol_type = other DNA

SEQ ID NO: 28944 - DNA, 120 bp, synthetic construct
  source 1..120: mol_type = other DNA
gacaacagtagtgtctacctccctgggttgtgaagagtgcctgagataagagaagtaaagcatttggcccagtgtctagcccctagaaaccatccactgccttcagggtttgagtctagt

SEQ ID NO: 28945 - DNA, 120 bp, synthetic construct
  source 1..120: mol_type = other DNA
cctgcaaaagcacagcctggaggatgcaaagctttgcagggccaccccagccaaccctgagcacacagggctggcacatggggctggctggcctggtcccaaacagaaagcagagcgtgc

SEQ ID NO: 28946 - DNA, 120 bp, synthetic construct
  source 1..120: mol_type = other DNA
aggaagcagcaaggtttgcacgcgttccagagccgcctctgcagccggattctgcccacaggaccccagtcctcctgctctgcccgccctgaccagagcccaccccaacagggcattcac

SEQ ID NO: 28947 - DNA, 120 bp, synthetic construct
  source 1..120: mol_type = other DNA
gcgctcgacagctgagacaaagggaactgaggttgcggggagaggcacgcacctcccccaggtgctgctgaagcgcagggcaggaggggggcagcagagacagccagagtcctgcagccc

SEQ ID NO: 28948 - DNA, 120 bp, synthetic construct; identical to SEQ ID NO: 8686
  source 1..120: mol_type = other DNA

SEQ ID NO: 28949 - DNA, 120 bp, synthetic construct
  source 1..120: mol_type = other DNA
ttctccagccgcccccacacccccacacccccacgcaccctgcccctcgccgtggtcccgcccctcttgaccccgcccctggtcgtggccccgccccggcccgctcctaccatctttccg

SEQ ID NO: 28950 - DNA, 120 bp, synthetic construct
  source 1..120: mol_type = other DNA
cacctcggcccgcgagtagccgcacagctcgcagaagccgtcgttgcagtagatgacggcgcagttctccacccgagcgttggcgatgatgaacttacggcctaggggggcggggaggag

SEQ ID NO: 28951 - DNA, 120 bp, synthetic construct
  source 1..120: mol_type = other DNA
agggggcgaacgcagctgtgcgtgtgccccgatacaggtgcctggccggccgggccgcgcggcgcgccccctcctccgcctggcccgcgggcgggctgcgtggcttcccccgggcaggcc

SEQ ID NO: 28952 - DNA, 120 bp, synthetic construct; identical to SEQ ID NO: 8687
  source 1..120: mol_type = other DNA

SEQ ID NO: 28953 - DNA, 120 bp, synthetic construct
  source 1..120: mol_type = other DNA
ggaagttacacgttgaacacctaaggacgctgcatctcattaggtcctctgacaaccccataaggtaggtgttattatcctccttttatagatgaagaaaccaaggctccagagaagttc

SEQ ID NO: 28954 - DNA, 120 bp, synthetic construct
  source 1..120: mol_type = other DNA
agagagggacctgcagctccaaaccctggacacacctggagcctgggcggggcctgagactttggccccacttgtaggaaaacagacccaagaaaggggacctgcccagggatgtgaggc

SEQ ID NO: 28955 - DNA, 120 bp, synthetic construct
  source 1..120: mol_type = other DNA
gcagcctcacttgtgccaggcaagatgctcctgggataagagctttttataaacagaagtttccggccactttggcctgtaatgctggggctttcagtagcagttggaattctccccctc

SEQ ID NO: 28956 - DNA, 120 bp, synthetic construct
  source 1..120: mol_type = other DNA
cctcccacctttctcgattctcccttcccctggcccccagaaagttgccttttggaactggttcatcttttggccagttcccaaggccccccagacctcccaggcagccatcaattccag

SEQ ID NO: 28957 - DNA, 120 bp, synthetic construct; identical to SEQ ID NO: 8688
  source 1..120: mol_type = other DNA

SEQ ID NO: 28958 - DNA, 120 bp, synthetic construct
  source 1..120: mol_type = other DNA
taggcccgcccacagcctccccctgggcccacccccacctctcagggaggccctcaaccagtgtcattgtctccaccccctcaggatcatcttgttcctccgcttcacacaatactgacc

SEQ ID NO: 28959 - DNA, 120 bp, synthetic construct
  source 1..120: mol_type = other DNA
cactgtggctcatgcagccttagggacaggcacatgaatgctgcccacccccaggacatttgcctaatctgggacccttctagaagcctccctaccaggcaggcattaggggtgctgtac

SEQ ID NO: 28960 - DNA, 120 bp, synthetic construct; identical to SEQ ID NO: 8689
  source 1..120: mol_type = other DNA

SEQ ID NO: 28961 - DNA, 120 bp, synthetic construct
  source 1..120: mol_type = other DNA
ttatgcccttgcacacagccccatccacgtccacgcacccagagttggggacacctgcacactccatcccacatcccttccctgcacactcagcgtgtcacacacactccgatcccaaaa

SEQ ID NO: 28962 - DNA, 120 bp, synthetic construct
  source 1..120: mol_type = other DNA
ccccattgactcgcacttgccgacgcacacggcccgggcacgcccccccatccacactcggaagagctcggcccgcccccagagccccctccccgctcagccccctcccccactcactct

SEQ ID NO: 28963 - DNA, 120 bp, synthetic construct
  source 1..120: mol_type = other DNA
gcccggcccagcactaggcttcgggtggcccggccgggccgtggtccccgcaccccgcggccaagccgagcacgggcgcggccaagactggactgcgggcgccgggtcctcgctcggctc

SEQ ID NO: 28964 - DNA, 120 bp, synthetic construct
  source 1..120: mol_type = other DNA
gcgctgcgctccgcccgcccgagccccggactcctggctcccgcctgccaccgcgccgacagccgctccagcgcccgcggctcgggcagcgcctgcggctcggcccggccgcggaagggt

SEQ ID NO: 28965 - DNA, 120 bp, synthetic construct; identical to SEQ ID NO: 8690
  source 1..120: mol_type = other DNA

SEQ ID NO: 28966 - DNA, 120 bp, synthetic construct
  source 1..120: mol_type = other DNA
cccgggctgggccggcagcggccccccgcggcggggctggcagcagtggctgcccgcactgcgcccgggcgctcgccttcgctgcagctcccggtgccgccgctcgggccggccccccgg

SEQ ID NO: 28967 - DNA, 120 bp, synthetic construct
  source 1..120: mol_type = other DNA
ttctcgctggagctggcggagggcggcccggcgggcggcgcgctctacgcgcccatcgcgcccggcgccccaggtcccgcgccccctgcgtccccggccgcgcccgccgcgcccccagtt

SEQ ID NO: 28968 - DNA, 120 bp, synthetic construct; identical to SEQ ID NO: 8691
  source 1..120: mol_type = other DNA

SEQ ID NO: 28969 - DNA, 120 bp, synthetic construct
  source 1..120: mol_type = other DNA
cttctcgcaggcccggcgtggggagggagccggctggggaggggaccacctggagcccagaatttggctccacacctccgggagggtagtccaggtgtgaatccttctgggaagagaagc

SEQ ID NO: 28970 - DNA, 120 bp, synthetic construct
  source 1..120: mol_type = other DNA
tgaggcccaggtggactctggggcagggggctgtccaggataggaaggtgacggtggcggtgctccctgagggctcagcatgccacgggccgtccccacgggccccacattaactaattg

SEQ ID NO: 28971 - DNA, 120 bp, synthetic construct
  source 1..120: mol_type = other DNA
ctgttaccaggtggttccaattcccggtacagcgtgcctgagcagggctgggcactggatttctcagggacaggcctgggaagtcacctccgggaaggtccaggctgctctcctccatgc

SEQ ID NO: 28972 - DNA, 120 bp, synthetic construct
  source 1..120: mol_type = other DNA
tggctgtggggctcacctgagggctgaagggtggtctccctgagcgtcctcaggtggaagcatctcctctgcctcgggcaggctcagtagagaactggctggagggcatccagaggcctg

SEQ ID NO: 28973 - DNA, 120 bp, synthetic construct; identical to SEQ ID NO: 8692
  source 1..120: mol_type = other DNA

SEQ ID NO: 28974 - DNA, 120 bp, synthetic construct
  source 1..120: mol_type = other DNA
tgcagtgaccccaggggaacccagtccgatgccactgtgcaaatgtctagcagatgccaggttcacaggtgctgtgtgctggtggccacctgcctcccggaccccagactctctgagatg

SEQ ID NO: 28975 - DNA, 120 bp, synthetic construct
  source 1..120: mol_type = other DNA
gtggaggaagaggaggaagagggctcgccacgccccagaggaagtctctgcttgcacttgtgttttcttcctcatttggattgtttaggtctcggaagtttgctcagcaagagtctacct

SEQ ID NO: 28976 - DNA, 120 bp, synthetic construct
  source 1..120: mol_type = other DNA
ggtcctttccagttctgggtcctgtccttgtaagacgtgtgcctggccctgggaagttgtcatgaacagcctccaacccaggtacctccatgtggggtgggactggaggtggaccctgac

SEQ ID NO: 28977 - DNA, 120 bp, synthetic construct; identical to SEQ ID NO: 8693
  source 1..120: mol_type = other DNA

SEQ ID NO: 28978 - DNA, 120 bp, synthetic construct
  source 1..120: mol_type = other DNA
agggctagggcgaactctcctgtgtgcgcctggggaagccagccaggatatcctgtcccctcctcggggaaccccccctccccaggagagcagctcttcctgtgttccttctggcctccc

SEQ ID NO: 28979 - DNA, 120 bp, synthetic construct
  source 1..120: mol_type = other DNA
tagctgaggggatgggggtccatacagccctgctgcacccagcggtcctagctcccttgctgtgagccttagccaggggtgtggacatccaggtggcatctactctggttgctgagatgc

SEQ ID NO: 28980 - DNA, 120 bp, synthetic construct
  source 1..120: mol_type = other DNA
cagccttggctttccctgtttcccaagaactttccaggggtgttggcagaaccctcgcgggtgcgtgttaatcaacaatggagccagaagcaggtcccagaggtggatggggctgatctg

SEQ ID NO: 28981 - DNA, 120 bp, synthetic construct
  source 1..120: mol_type = other DNA
ggcagttgttctgcagctgggcagggaggccagaggccaaggcaggtggtggggctgggcacagaggaggacggggctctctgagccatcaggtctctttctctccatcttctttaagat

SEQ ID NO: 28982 - DNA, 120 bp, synthetic construct; identical to SEQ ID NO: 8694
  source 1..120: mol_type = other DNA

SEQ ID NO: 28983 - DNA, 120 bp, synthetic construct
  source 1..120: mol_type = other DNA
tggcctgggcagtgcctggtgggcatggatcaggtggcagggctttgtgtctgggcatggccctgtggctgggctgccttggccagggtcctgggccttctgagtctgcgtctcattctc

SEQ ID NO: 28984 - DNA, 120 bp, synthetic construct
  source 1..120: mol_type = other DNA
tacaaccctggggtactgggggcaggagggtccctttttgcttggcagttgcgaggtactggaacctttgcatataacgtgcgggctgcgttgtgtcacagggccgggtctgagggaggg

SEQ ID NO: 28985 - DNA, 120 bp, synthetic construct; identical to SEQ ID NO: 8695
  source 1..120: mol_type = other DNA

SEQ ID NO: 28986 - DNA, 120 bp, synthetic construct
  source 1..120: mol_type = other DNA
aaggcgttgggtgccgagaattcccctcctgctgctaggctggtttcaagtctgctccttctgcacttgacgtccttgccagtgtgatccagagctgctcacacgagcaagcgtcctcga

SEQ ID NO: 28987 - DNA, 120 bp, synthetic construct
  source 1..120: mol_type = other DNA
tagccaaggtgcagatgcacacgtcctggtcctgagcccctgctcggccctaggcagggcccccagttccctgcattccacccgccttgtctgggaggtggacgagccctccgtagccct

SEQ ID NO: 28988 - DNA, 120 bp, synthetic construct
  source 1..120: mol_type = other DNA
cccaagggcggtgatgccaggagaacattccaggcccaggaagagctgagagacagcagatgcccaagacgagttgctggtgtgtggccagtgctgggagagcatggtgtcggcccgggg

SEQ ID NO: 28989 - DNA, 120 bp, synthetic construct
  source 1..120: mol_type = other DNA
agggcggcagcgtctggcttcactctcgggaggtgccttggggctggccagtatgggattgctgtcactgtgggtcactccagccccggatgctcctacaccatgctctgcttgcatctg

SEQ ID NO: 28990 - DNA, 120 bp, synthetic construct; identical to SEQ ID NO: 8696
  source 1..120: mol_type = other DNA

SEQ ID NO: 28991 - DNA, 120 bp, synthetic construct
  source 1..120: mol_type = other DNA
atgatgggacccaggtgtcttcccacttctcgaccatctcctgggaagttctaatgtttggttcagggtgtggggtccatctgagcaggcatggtgcttccagaaggatccaggttaagg

SEQ ID NO: 28992 - DNA, 120 bp, synthetic construct
  source 1..120: mol_type = other DNA
ggcagtggtgatcttgggatgaaactgttccatctcagatcatcaggtattagattctcataagaagcgtgcaacctagatcccttgtgtgcgcagttcacaataggatttgtgctcctg

SEQ ID NO: 28993 - DNA, 120 bp, synthetic construct; identical to SEQ ID NO: 8697
  source 1..120: mol_type = other DNA

SEQ ID NO: 28994 - DNA, 120 bp, synthetic construct
  source 1..120: mol_type = other DNA
agagccgggctggggagctgactccaggacaggcccctgcccgctctgggacctggggcctgggctctgctccccatttcgctcctccactcacagatgaggacatttgggtcgccttac

SEQ ID NO: 28995 - DNA, 120 bp, synthetic construct
  source 1..120: mol_type = other DNA
gcactattcctggcctcaggcccagtttgtatccatgggcacccccactcccacctagcacttgccaccaggaagcaccctgaggactgtcccctttgagagttggctctcaaagccttg

SEQ ID NO: 28996 - DNA, 120 bp, synthetic construct
  source 1..120: mol_type = other DNA
ctgctgccttccaaaatcatactctggggcgcactgaaagggtgctctgagtagctctccccggctcctggctgaacttgctccaggcagagatttgaagagattcagaaagcaggaacc

SEQ ID NO: 28997 - DNA, 120 bp, synthetic construct
  source 1..120: mol_type = other DNA
ctgtgtcctcgacttccacgcagagcagcccgggcagcttagaggagggagcagaaggagctctgactgagaggggtagacccctcccagaggcatccccaccctgccccaaagagggga

SEQ ID NO: 28998 - DNA, 120 bp, synthetic construct; identical to SEQ ID NO: 8698
  source 1..120: mol_type = other DNA

SEQ ID NO: 28999 - DNA, 120 bp, synthetic construct
  source 1..120: mol_type = other DNA
taaaacagcatgacattgccttataggcaggcagatcaccaatggaacagctttttaaaaaccgcatgtaactccattgtatatgaagtttcgtaaaagaggcagcatctccaaccagtg

SEQ ID NO: 29000 - DNA, 120 bp, synthetic construct
  source 1..120: mol_type = other DNA
ccacttgggtacctaaagaaagcgcctggaattctttaccctgagagcgaagaaacttttctatgacttgaatgctagatgcgtggaggagatttatgtgtttgaccacataagaaagaa

SEQ ID NO: 29001 - DNA, 120 bp, synthetic construct
  source 1..120: mol_type = other DNA
gggagttcgagaccagcctgaccaacgtggtgaaaccctgtctctactaaaaatacagaattagccgggcgtggtggtgcatgcctgtaatcccagctacttgggaggctgaggcaggag

SEQ ID NO: 29002 - DNA, 120 bp, synthetic construct; identical to SEQ ID NO: 8699
  source 1..120: mol_type = other DNA

SEQ ID NO: 29003 - DNA, 120 bp, synthetic construct
  source 1..120: mol_type = other DNA
atgtcactgaggtcccttctggctggcagaaatcctttggcatttgctggtaggcatgcaagagggtagactctgtgaggaagggatttggcaacatctagcaaaactgtcttcactgac

SEQ ID NO: 29004 - DNA, 120 bp, synthetic construct
  source 1..120: mol_type = other DNA
ggagactggttgaatcagagatttgtggaatattatgcagctgtaaaaaaggaatgcatagatctctcttattatgaagtgattatcaggatttatttaattatttttttcaggcagggt

SEQ ID NO: 29005 - DNA, 120 bp, synthetic construct
  source 1..120: mol_type = other DNA
ttaagtgaaaaagcacagtgaataaaaatatagcagctattcttcatctgataaaggggaggatgcaagtctggatgtatattaaaaacgaaagcaatggaagcctccaaatcttaaaag

SEQ ID NO: 29006 - DNA, 120 bp, synthetic construct; identical to SEQ ID NO: 8700
  source 1..120: mol_type = other DNA

SEQ ID NO: 29007 - DNA, 120 bp, synthetic construct
  source 1..120: mol_type = other DNA
accacccagaaggactgatttcaggtgacatatttctagcgggttactgctgaagacaaatagagctgcatgcagtggccacataattgttgtgatactatttgttatattattctaaga

SEQ ID NO: 29008 - DNA, 120 bp, synthetic construct; identical to SEQ ID NO: 8701
  source 1..120: mol_type = other DNA

SEQ ID NO: 29009 - DNA, 120 bp, synthetic construct
  source 1..120: mol_type = other DNA
ccttcattaaaaaaccctcaacaaaaataggcatcaaaggaacatatctcaataagagccatctatgacaaacccatggtaaatgtggtactgaatgggtaaaagcgagacacattcccc

SEQ ID NO: 29010 - DNA, 120 bp, synthetic construct
  source 1..120: mol_type = other DNA
agaggaactcaaatcatctcccttcaccgatgatgataagattctatacctagaaaaccctaaagagtctgccaaaagccttctggaactgtaagtgaagtctcaggatacaaaatccat

SEQ ID NO: 29011 - DNA, 120 bp, synthetic construct
  source 1..120: mol_type = other DNA
tctcctgcctcagcctcccaagtagctgggacaacaggcgtctgccaccacgcccggctaattttttgtattttttagtagagacggggtttcaccgtgttagccaggatggtcttgatc

SEQ ID NO: 29012 - DNA, 120 bp, synthetic construct; identical to SEQ ID NO: 8702
  source 1..120: mol_type = other DNA

SEQ ID NO: 29013 - DNA, 120 bp, synthetic construct
  source 1..120: mol_type = other DNA
gccacttttcatagaattagaaaaaactattctaacattcatgtagaaccaaaaaagagccgaaatagcaaaaaaggaactaagccagaggcatcacattacctgacttcaaactatact

SEQ ID NO: 29014 - DNA, 120 bp, synthetic construct
  source 1..120: mol_type = other DNA
caacaaaaatatgccatggggaaaagacttcatattcaataatggcacagggataactggctccccatatgcagaggaatgaagtcagactcctatctatcaccatatacaaaaattaaa

SEQ ID NO: 29015 - DNA, 120 bp, synthetic construct
  source 1..120: mol_type = other DNA
cccatctctactaaaaatacaaaaattagctgggtgtggtggtacgcacctgtggtcccagctacccgggaagctgaggcaggagattgcaccactgcgctccagcctgggtgacaagag

SEQ ID NO: 29016 - DNA, 120 bp, synthetic construct; identical to SEQ ID NO: 8703
  source 1..120: mol_type = other DNA

SEQ ID NO: 29017 - DNA, 120 bp, synthetic construct
  source 1..120: mol_type = other DNA
gggcgcggtggctcacgcctgtaatcccagcacgttgggaggccaaggtgggcagatcaccaggtcaggagatcgagaccatcctggctaacatggtgaaaccctgtctctactaaaaat

SEQ ID NO: 29018 - DNA, 120 bp, synthetic construct
  source 1..120: mol_type = other DNA
agccgagatcacgccactgcactccagcctgggtgacagagcaagactcggtctcaaaaaaaaaaaaaaaaaaaaaaaaaaacccaaaaaaacaaaaagtgggcaaaagatatggtagac

SEQ ID NO: 29019 - DNA, 120 bp, synthetic construct
  source 1..120: mol_type = other DNA
tttgtttaaaaagtctcaaaacaacagatgctggagaggcagtagagaaaggggaacacttacaccctgttgacgggagtgtaaatgagtccagccaccatggaaggcagtttggagatt

SEQ ID NO: 29020 - DNA, 120 bp, synthetic construct; identical to SEQ ID NO: 8704
  source 1..120: mol_type = other DNA

SEQ ID NO: 29021 - DNA, 120 bp, synthetic construct
  source 1..120: mol_type = other DNA
aagagacactggggaatacaagagtggggaggggggaaggggagcaaggtttgaaaagttacctgtgggtgctgtgcgcactacgtgggagaccggatcgtttgtactccaaacctcagc

SEQ ID NO: 29022 - DNA, 120 bp, synthetic construct
  source 1..120: mol_type = other DNA
agaggttacgcaaaaatcctccatccctgcatttgaatgaggactatcagtatgcatccaggatgacgtttacttaaatatctctgtttcctggaaaggcccaggaccaaggaccactca

SEQ ID NO: 29023 - DNA, 120 bp, synthetic construct
  source 1..120: mol_type = other DNA
agtattcatcacagcagaaggcagggaagttatcagaggccccctagggccatgtcactggaacttgaaggggtccttgtcttcccccttctccccaagctgaagatgcagtgggtaagc

SEQ ID NO: 29024 - DNA, 120 bp, synthetic construct; identical to SEQ ID NO: 8705
  source 1..120: mol_type = other DNA

SEQ ID NO: 29025 - DNA, 120 bp, synthetic construct
  source 1..120: mol_type = other DNA
acctctccaaagcagtaaaggccttcggacagtgcacagaaagtgctcccatccacaatgcttccttgcctggatggatggatggatggatggatggatggatggatggatggatggatg

SEQ ID NO: 29026 - DNA, 120 bp, synthetic construct
  source 1..120: mol_type = other DNA
tggctctgtaggacacatgacctgatttcctcagtaagtcaatgaccaagaaataacggagagaaggaggaaagaatcacctatccaccaattgtgacatatggccttagttaggtcctc

SEQ ID NO: 29027 - DNA, 120 bp, synthetic construct; identical to SEQ ID NO: 8706
  source 1..120: mol_type = other DNA

SEQ ID NO: 29028 - DNA, 120 bp, synthetic construct
  source 1..120: mol_type = other DNA
agtttgcacccagctcccagctggccatgttacctcaactgcaaaacgagagacggacttccttgggacgcggtggtggggacactgtggtctgtctcctctgggcgccccgtggcgccc

SEQ ID NO: 29029 - DNA, 120 bp, synthetic construct
  source 1..120: mol_type = other DNA
gtggggggcaatcagggttcctagaggacaaccccatgtagttcctcactgcagggcttggagggagcaggtgaaggcttacctgtcttaggtaatgaggagctgtgcgggtctgagaca

SEQ ID NO: 29030 - DNA, 120 bp, synthetic construct
  source 1..120: mol_type = other DNA
acaagtcagcttgttgttccgtccacagtagagggcggccctgggggtgaacggctgaccgtgagggcgtggtccctccccccagaccaccccggaggccccctccgccctcctgcctac

SEQ ID NO: 29031 - DNA, 120 bp, synthetic construct; identical to SEQ ID NO: 1640
  source 1..120: mol_type = other DNA

SEQ ID NO: 29032 - DNA, 120 bp, synthetic construct
  source 1..120: mol_type = other DNA
aatttttttttttttaaatgtggttatctgctagccagaaaaggtgtgtggtttcgcagtctttcagacaaactgaatttaatagtagctgacgtgaacccctgtttctcctctaggctc

SEQ ID NO: 29033 - DNA, 120 bp, synthetic construct
  source 1..120: mol_type = other DNA
gggcagcagaggtgtccggagatgcaacagggcccagacccctaccagcctgtggcccagctgggggcaggactccggggcagggtgagtccctgcgtgacctgattctctgtgggcagg

SEQ ID NO: 29034 - DNA, 120 bp, synthetic construct
  source 1..120: mol_type = other DNA
caatgccccaagggaggagcaggtgcccaagcccccaggtggccctgcgggtacaggtacttgtttactctgtggcatcagtcctgcttcccagctcaaggccctggcctccacaggcct

SEQ ID NO: 29035 - DNA, 120 bp, synthetic construct
  source 1..120: mol_type = other DNA
ccagctgtaagtggaccttggaccgcaaatttgcatgggcccctttgccaaagccctgtgcccactgctggggaacgctggggactccgctcttgtggggcagtggggctgggtgggagc

SEQ ID NO: 29036 - DNA, 120 bp, synthetic construct; identical to SEQ ID NO: 8708
  source 1..120: mol_type = other DNA

SEQ ID NO: 29037 - DNA, 120 bp, synthetic construct
  source 1..120: mol_type = other DNA
gcagcctggggtgttgagaggccctgggcagccaccttgcctctctgagtttgtcctcatgtgtctctggggctggaactcggtgtccgacctggtgatgggtcaggtgtgatcaggtgt

SEQ ID NO: 29038 - DNA, 120 bp, synthetic construct
  source 1..120: mol_type = other DNA
tggttgctgtcgttcctgaaatagcctctgaagctctgtccgggaagggaaccttgagtgtggaggagataagcctgctgactgggtgagccggccggggcgggggtggcccctcttccc

SEQ ID NO: 29039 - DNA, 120 bp, synthetic construct
  source 1..120: mol_type = other DNA
tcagcccagatcacggctgcttttgtttacgtggcccctgctctcacccacaactccaggtttctggctctcgggaatttgaggcctgtggctgctgtggaccctgggaaagagcctgtg

SEQ ID NO: 29040 - DNA, 120 bp, synthetic construct
  source 1..120: mol_type = other DNA
agatgggtggacagctggatagatgaagtactgggtgggtggagagagaaaggggtgggtggacggagggatgggcagggagagaaatggatggggcatgctgcttccagcacccactgg

SEQ ID NO: 29041 - DNA, 120 bp, synthetic construct; identical to SEQ ID NO: 8709
  source 1..120: mol_type = other DNA

SEQ ID NO: 29042 - DNA, 120 bp, synthetic construct
  source 1..120: mol_type = other DNA
tggacgagggcagcgtcgccatcagaggcgatgtctagggccaccccctctgacttgcctcctcctccttctgacttgcctcctctctctgacgggcctgctcctgagcttgacacctgc

SEQ ID NO: 29043 - DNA, 120 bp, synthetic construct
  source 1..120: mol_type = other DNA
ccaccatgtgccccccgtgaggcccccacctgttactgagtggcagggacgtgctcccacacccccatgcgccatcctgcaggtgctttctgctgacttctgtgtgccctggggcctgct

SEQ ID NO: 29044 - DNA, 120 bp, synthetic construct; identical to SEQ ID NO: 8710
  source 1..120: mol_type = other DNA

SEQ ID NO: 29045 - DNA, 120 bp, synthetic construct
  source 1..120: mol_type = other DNA
cggggcagcggcggcagggggcccagggaagtggggccagtcgggggtcctcaggggtccttcagggatatacctgctgtcagggtgtggggagtgggaagtgggggacggggtggattc

SEQ ID NO: 29046 - DNA, 120 bp, synthetic construct
  source 1..120: mol_type = other DNA
cctacctgccagtgggtgacacagaaggcaggaatgcagaaggcctttcagaagttctcactggcctgcaaggtagaggctgttttctgctgaggatacatttgccccctctatccccca

SEQ ID NO: 29047 - DNA, 120 bp, synthetic construct
  source 1..120: mol_type = other DNA
agccttcctggcttcggtcccctggacaggctccacctccctcttatcgtggcccctttggcaggctgcctgccacctcaaagtcacgctgccctgggcaccctgcctcttccggggact

SEQ ID NO: 29048 - DNA, 120 bp, synthetic construct
  source 1..120: mol_type = other DNA
agtttgtgcaactcgagtttcagagtggcggcctctgctcctcacaagacattgccctgcgagggggtcagccctgaagccggatggcccggcccccgctaccacgtggaggctccctgt

SEQ ID NO: 29049 - DNA, 120 bp, synthetic construct; identical to SEQ ID NO: 8711
  source 1..120: mol_type = other DNA

SEQ ID NO: 29050 - DNA, 120 bp, synthetic construct
  source 1..120: mol_type = other DNA
catggacgtccaggtgtggaatggcccggacagcagataacaagccttcgtcgtggtcacccctgggtgtgggctgtgggttttaatcttttcatttttgctcatctgaattttctaatt

SEQ ID NO: 29051 - DNA, 120 bp, synthetic construct
  source 1..120: mol_type = other DNA
aattaaaatatataagtgaggagaggctggtaagaggattctggagtccctggagtgtcttctggcatcgcatggatgagaactctgaatgaattgagtgtgatttgacctaggagagtg

SEQ ID NO: 29052 - DNA, 120 bp, synthetic construct
  source 1..120: mol_type = other DNA
tgtccttggggaggcctgggggacaggagttgggggggtgggcagtgcctctgtgtggcagattccagcttctctcaggggccaggattacatggtccgtgttggactctgggatgctgg

SEQ ID NO: 29053 - DNA, 120 bp, synthetic construct; identical to SEQ ID NO: 8712
  source 1..120: mol_type = other DNA

SEQ ID NO: 29054 - DNA, 120 bp, synthetic construct
  source 1..120: mol_type = other DNA
taacggccgctccttcaggggctgttagccacatgcttagaccgcaccgagaaaatgcagtccctccagagctcctaaccttccatgggccacaggccccttcccagaagtttttttatt

SEQ ID NO: 29055 - DNA, 120 bp, synthetic construct
  source 1..120: mol_type = other DNA
aggcctgccaggctggcctccagtccaggtgtgaggccctgaggccctggctgcagctggaagctcttgggcagtgcactgtccccacagcggactgcctcctgcagccaggtggcctta

SEQ ID NO: 29056 - DNA, 120 bp, synthetic construct
  source 1..120: mol_type = other DNA
gacacttgcccagggtcacacagcttgtgcgtagcagagctccctgtccggcccctgccccgtgctggcccctctcacaccttgctcacgctaggtgccttgtaccagtgcctgcttggg

SEQ ID NO: 29057 - DNA, 120 bp, synthetic construct; identical to SEQ ID NO: 8713
  source 1..120: mol_type = other DNA

SEQ ID NO: 29058 - DNA, 120 bp, synthetic construct
  source 1..120: mol_type = other DNA
ccgcccttcagggcctgcatgagtgttctcgggctggctatgggggcattgcttcttcctgtcctagccgggacctgcccatccacccagggggctcagggacgtttttgagttttcctg

SEQ ID NO: 29059 - DNA, 120 bp, synthetic construct
  source 1..120: mol_type = other DNA
agagtggagaagcgatctccaaaggggaggtgacacatggctgagccccgcctgatgggtgcttgctggggggagaagtcctggctgggacttcccctccccaggctggggtttgtcccc

SEQ ID NO: 29060 - DNA, 120 bp, synthetic construct
  source 1..120: mol_type = other DNA
gctggctgtggcagccacagccttctgacccttgctggcctgtcgtggagtggggttcaagatgctatcactgacatctgcccaggctcgggggcttctgtgtggtgccagccttgcccg

SEQ ID NO: 29061 - DNA, 120 bp, synthetic construct; identical to SEQ ID NO: 8714
  source 1..120: mol_type = other DNA

SEQ ID NO: 29062 - DNA, 120 bp, synthetic construct
  source 1..120: mol_type = other DNA
taggggctttggggtgggtttgtgggcagctgggctgcagggggctgtgggagcctgagggagtgccttccaggggaagcccgacagatgggggcactccaggcaggggcaggaggtgac

SEQ ID NO: 29063 - DNA, 120 bp, synthetic construct
  source 1..120: mol_type = other DNA
tgagggggtctgggtttatctccccattgcacagggctccatggggtgggctgagccatgagcgcccttcgtggcaccttggtgtccggcagggaggcaggggcccaggaggagggcagg

SEQ ID NO: 29064 - DNA, 120 bp, synthetic construct; identical to SEQ ID NO: 8715
  source 1..120: mol_type = other DNA

SEQ ID NO: 29065 - DNA, 120 bp, synthetic construct
  source 1..120: mol_type = other DNA
cctgccccccacgtcaatgcctgggcacacgggcccagtgcacacagccagcaggcgtgcgtcttgcaatgggggctgtggggacccctttgctcccctgatcccttccctgcagaccca

SEQ ID NO: 29066 - DNA, 120 bp, synthetic construct
  source 1..120: mol_type = other DNA
gacagggcagggaggctgatgggctggcccagcgtggggacctgcccagtggccctgtgggtgcaggccatgtgcctctgcatttcctttaccccatctgtaaaatagggataacagcag

SEQ ID NO: 29067 - DNA, 120 bp, synthetic construct
  source 1..120: mol_type = other DNA
gagacagggtctccctctgtcacttaggctaagagtgcagtggtgtgatcttggttcactgcagcctcgacctccctggctcaagagatcctcccgcctcagcctcctgagtagctggga

SEQ ID NO: 29068 - DNA, 120 bp, synthetic construct; identical to SEQ ID NO: 8716
  source 1..120: mol_type = other DNA

SEQ ID NO: 29069 - DNA, 120 bp, synthetic construct
  source 1..120: mol_type = other DNA
cttgtggaattttatttggatggactctggcagccaacgctggtttcgtctggcttcttttattcagcgtcatgattttgagctgtgtgtctgttgtgtgtgtcggcctgttgtttgggt

SEQ ID NO: 29070 - DNA, 120 bp, synthetic construct
  source 1..120: mol_type = other DNA
tgcttctcttgtgcaagcaagtggttgaactgctctgcagcccgctgggaagtggaacggctgtgtcatggggtgggtgagggcttcactttctaggacactgacaaaccgttttctaaa

SEQ ID NO: 29071 - DNA, 120 bp, synthetic construct
  source 1..120: mol_type = other DNA
cggtctttaattttagccaatctaacaggtgtgtcggggccctccctggcattcctggtgactcactgtgtggggtcatcttttcagctgcttagttgttgtccacatatcttctttggt

SEQ ID NO: 29072 - DNA, 120 bp, synthetic construct
  source 1..120: mol_type = other DNA
tggtggcgtgatcttgcttggctcactgcaacctctgcctcccgggttcaagtgattctcctgcctcagcctcccaagtagttgggactacagatgcccgccaccatgactggctaatat

SEQ ID NO: 29073 - DNA, 120 bp, synthetic construct; identical to SEQ ID NO: 8717
  source 1..120: mol_type = other DNA

SEQ ID NO: 29074 - DNA, 120 bp, synthetic construct
  source 1..120: mol_type = other DNA
gctgggactacaggcgcccgccactgtatccagctgattttttgtatttttatagagacagggtttcaccgtggtctccatctcctgacctcgtgatccgcccgcctcagcctcccaaag

SEQ ID NO: 29075 - DNA, 120 bp, synthetic construct
  source 1..120: mol_type = other DNA
tccaactcctgggctcaagccatcctcccgtctcagcctcctaagtagctgggaccacaggcgcatgtcaccacgcccggctgattgttaaattttttgtagagctggggtctggctatg

SEQ ID NO: 29076 - DNA, 120 bp, synthetic construct; identical to SEQ ID NO: 8718
  source 1..120: mol_type = other DNA

SEQ ID NO: 29077 - DNA, 120 bp, synthetic construct
  source 1..120: mol_type = other DNA
gccggcgtcttatgaaaaggctggtttctgttcagccctttgggaagaaaacccaatgacagttatcaagggagggggtgtgatgatacgtatccaaccgcacatccatcatggccctga

SEQ ID NO: 29078 - DNA, 120 bp, synthetic construct
  source 1..120: mol_type = other DNA
attttatttttatttctcattgcccagactggtctcaaaaccctggtctcgatcaatcctcccacctcagcctcccattctcttaatagtgcccttttagagagcaaacgttttgacttt

SEQ ID NO: 29079 - DNA, 120 bp, synthetic construct
  source 1..120: mol_type = other DNA
cacagattttctgttttcttccagaaattttgtagtgtcaggtttcacactgaggtggatattccttttgagttaatgtctgaccagctgggaggtgtcggtggaggctccctttctgcc

SEQ ID NO: 29080 - DNA, 120 bp, synthetic construct; identical to SEQ ID NO: 8719
  source 1..120: mol_type = other DNA

SEQ ID NO: 29081 - DNA, 120 bp, synthetic construct
  source 1..120: mol_type = other DNA
cagcctctgacactccacggcactaaagtgtcaagagacccaggggacctgcgagatccatctcgccccacacaccaccaggtccccaggacttggaggatgctgatggcccagctctgg

SEQ ID NO: 29082 - DNA, 120 bp, synthetic construct
  source 1..120: mol_type = other DNA
acacatgtgtatgggtgtgtgcatgggtgtgcacatgtgtatgggtgtgcatgtgtgtataggtgtgtgtatgtgtgcatgggcgtgtgtatgtgtgcatgggcgtgtgtgtacttgtgt

SEQ ID NO: 29083 - DNA, 120 bp, synthetic construct
  source 1..120: mol_type = other DNA
atgtgtataggtgtgtgtatgcgtgcacctatgtgtgtataggcgtgtatgtgtgcgcgtgtgtaggtgtgtgttcatatatatgggtgtgtgtgcacctatgtgtataagtgtgtgtgc

SEQ ID NO: 29084 - DNA, 120 bp, synthetic construct; identical to SEQ ID NO: 8720
  source 1..120: mol_type = other DNA

SEQ ID NO: 29085 - DNA, 120 bp, synthetic construct
  source 1..120: mol_type = other DNA
acctatgtctgtataggtgtgtgtgtttgtgtctgggtgtgtgtgcacctatgggtgtgtgtgtgtatgcatgtgtgcatgtccctcacagggcagagctggaaagaactggagaggctg

SEQ ID NO: 29086 - DNA, 120 bp, synthetic construct
  source 1..120: mol_type = other DNA
tgggaggggtgtcatgcggggctttctgagtcactggctgcgtgagatgtgagtaggtctgtgggatagggagctggccagggacttgagctccctgcctgctatgacctcagtcagccc

SEQ ID NO: 29087 - DNA, 120 bp, synthetic construct
  source 1..120: mol_type = other DNA
tgtcctcagaggcatgggggtgactccatggctctgagccaagttgcagctctggggcccttcttgatactccagggccccccatcaccccagcaccgagatgggcatgagcagaggggc

SEQ ID NO: 29088 - DNA, 120 bp, synthetic construct; identical to SEQ ID NO: 8721
  source 1..120: mol_type = other DNA

SEQ ID NO: 29089 - DNA, 120 bp, synthetic construct
  source 1..120: mol_type = other DNA
gagggttggggacctccagggcttccattcgacctgaggcccatggtgcagtgagtcctgcctggagtcccgtccagcaggaggcaggagagctggtgtttggagatgtgaggggctggg

SEQ ID NO: 29090 - DNA, 120 bp, synthetic construct
  source 1..120: mol_type = other DNA
cacagacgctcagccgtgtcatgtggcttgtagagcgagggtgtgcggccggcatcatcctcagggaactctggagggactgggcctcagttggcctggcctggcgcggggctgccagcc

SEQ ID NO: 29091 - DNA, 120 bp, synthetic construct
  source 1..120: mol_type = other DNA
tggccagggtggccattgctcagtggcaccagctgggcagacagccgcatgcgctcaccactcgccctccacagatgggagcctgggagagccctgcctcccggaacggacatcctcctt

SEQ ID NO: 29092 - DNA, 120 bp, synthetic construct; identical to SEQ ID NO: 8722
  source 1..120: mol_type = other DNA

SEQ ID NO: 29093 - DNA, 120 bp, synthetic construct
  source 1..120: mol_type = other DNA
tactttgttcacctcctaggagggaagagggcgagggtgagcctagggcagatgccagggcagtgaggctcacgtgggtctctttgcctgatgtgccggtgtccaggctgcagtgggcac

SEQ ID NO: 29094 - DNA, 120 bp, synthetic construct
  source 1..120: mol_type = other DNA
aggctcagcacaggtggctttggtgcccttagggaggggcagcggtggagcccaggtctctgaaacatttatgacttcatgcgtcagctggaggctctttcaccgcccagacaaaaggcc

SEQ ID NO: 29095 - DNA, 120 bp, synthetic construct
  source 1..120: mol_type = other DNA
ttaaggcgagaaggaggtgtccatggccaggtggattagtgcagattgtgatggtgtggtggtgctcacggtgggggacttgcctatgggaacctcatcacagccccacatcgggccctt

SEQ ID NO: 29096 - DNA, 120 bp, synthetic construct; identical to SEQ ID NO: 8723
  source 1..120: mol_type = other DNA

SEQ ID NO: 29097 - DNA, 120 bp, synthetic construct
  source 1..120: mol_type = other DNA
ccctgtgtgtctggtttccttcaccgagcgtcctgtcttcactgtccgccgtgttataacacgcaagggaattcccttcctttctgagctgagtagtggtctgtggtgtggatggactac

SEQ ID NO: 29098 - DNA, 120 bp, synthetic construct
  source 1..120: mol_type = other DNA
tatgatgccatcaaaatgaaaaaatggctaaagattttcaagcacacacacctaaagatagcagacattccattcaaccttcatctcaaagaattagggcaaggagggcgattctaaatg

SEQ ID NO: 29099 - DNA, 120 bp, synthetic construct
  source 1..120: mol_type = other DNA
gaatcacggggacgagtctttcctgtgctgttctcgtaatagtgaatacgtctcataagatctgatggttttaaaaagaggcattccgctacacaagctctctcatgttttgcctgccac

SEQ ID NO: 29100 - DNA, 120 bp, synthetic construct
  source 1..120: mol_type = other DNA
ggtatgtctttatcagcagtgtgaaaacggactaatactgacaataaattaaaaactatttaaaatgcaaaggaaaatataaatttaaatcacctcttcgagtctctggtagatcaagaa

SEQ ID NO: 29101 - DNA, 120 bp, synthetic construct; identical to SEQ ID NO: 8724
  source 1..120: mol_type = other DNA

SEQ ID NO: 29102 - DNA, 120 bp, synthetic construct
  source 1..120: mol_type = other DNA
agaagaaaagtctacttagaagtaaaaacatcagcaatattactgtgtaatagatctgaacattaaaggggcatatatgcatatctgtacaccgaggcaaatttatagctacaggcattt

SEQ ID NO: 29103 - DNA, 120 bp, synthetic construct
  source 1..120: mol_type = other DNA
tgggaggtgattcttggttctttgaggaaaacaatatatatcttataatttcaatcatggaaaaaccccaagtatatatctaaatttagacatgagaaggctctttggcaatcgatttag

SEQ ID NO: 29104 - DNA, 120 bp, synthetic construct
  source 1..120: mol_type = other DNA
agcctcccaagtagctgggtttacgggcatgtgccaccacccctggctaactttttgtatttttagtagagacaaaggtttcattatgttggccaggctggtattgaactcctgagcaca

SEQ ID NO: 29105 - DNA, 120 bp, synthetic construct; identical to SEQ ID NO: 8725
  source 1..120: mol_type = other DNA

SEQ ID NO: 29106 - DNA, 120 bp, synthetic construct
  source 1..120: mol_type = other DNA
tgtttgaacaatttttaatgtgggatcaaaggtaggaaatgctctttacaaagtcatcaaaaagttttttctggaaaagcctccagcccacggtgacctaggttcttcccaccattgaat

SEQ ID NO: 29107 - DNA, 120 bp, synthetic construct
  source 1..120: mol_type = other DNA
tgatctctctgctgcctcactagcagagagaaaagaaaactacagaccagtgatatgtacacagagagcaatgaaaatcctcattatgatggcagactaaacccatagtgtgttaaaaat

SEQ ID NO: 29108 - DNA, 120 bp, synthetic construct
  source 1..120: mol_type = other DNA
ctctttttattaaaaaaaaaaaaaagaccatacatacacacatgcacacacaacagtggtaatggattataattcatgaaaaaagaatctatgcatccacagggacacacccatgtatat

SEQ ID NO: 29109 - DNA, 120 bp, synthetic construct; identical to SEQ ID NO: 8726
  source 1..120: mol_type = other DNA

SEQ ID NO: 29110 - DNA, 120 bp, synthetic construct
  source 1..120: mol_type = other DNA
gcctgaatactttgaaaatgccagggccaaaaaacgtagaaggctaaataaagtaccgttcagggtgaaggggaaggaagaaatgtgatgcctaagtgggagtctatgattccactatgt

SEQ ID NO: 29111 - DNA, 120 bp, synthetic construct
  source 1..120: mol_type = other DNA
cagaagatgaaggaagaacaaaggaacatcttacatgatgacaggcaaagagataatgaaaactgagcacaaagggtttccccttataaaaccatcagatctcgtgagacttattcatta

SEQ ID NO: 29112 - DNA, 120 bp, synthetic construct
  source 1..120: mol_type = other DNA
gccaaaccatatcattccaccccggcccctccctaatctcatgtcctcacatttcaaaaccaatcatgccttcccaacggtgccccaaagtcttaactcatttcagcattaactcaaaaa

SEQ ID NO: 29113 - DNA, 120 bp, synthetic construct; identical to SEQ ID NO: 8727
  source 1..120: mol_type = other DNA

SEQ ID NO: 29114 - DNA, 120 bp, synthetic construct
  source 1..120: mol_type = other DNA
tgcagcttttccaggcacatggtgcaagctgttgatggatctatcattctgggatctggaggacagtggccctcttctcacagctccactaggcagtgccccagtggggactttgcatgg

SEQ ID NO: 29115 - DNA, 120 bp, synthetic construct
  source 1..120: mol_type = other DNA
ggcagagctttccatacctcaattcttgacttctgtgcacccacaggctcaacaccacatggaagctaccaagagttggggcttgcaccctctgaagccacagcccaagctgtaccttga

SEQ ID NO: 29116 - DNA, 120 bp, synthetic construct; identical to SEQ ID NO: 8728
  source 1..120: mol_type = other DNA

SEQ ID NO: 29117 - DNA, 120 bp, synthetic construct
  source 1..120: mol_type = other DNA
tcaaaactgaatgcttttaacaacacccaagtcacctcttgaaagctttgcagcttagaaatttcttccaccaaataccctaaatcatctccctcaagttcaaagttccacaaatctcta

SEQ ID NO: 29118 - DNA, 120 bp, synthetic construct
  source 1..120: mol_type = other DNA
atctccatctgagaccacctcagcctggatttcattgtccatatcattatcagaattttggtcaagcccttcaacaagtttctaggaagttccagactctcccacattttcttgtcatct

SEQ ID NO: 29119 - DNA, 120 bp, synthetic construct
  source 1..120: mol_type = other DNA
tttcatgctgctgataaagacatacctgagactgggtaatttataaagggaagaggtttaattgactcacagttccacatggctggggaggtctcacaatcatggcggaagatgaagaaa

SEQ ID NO: 29120 - DNA, 120 bp, synthetic construct
  source 1..120: mol_type = other DNA
tgggagaaactgcccccatggttcaattatctcccactgggtccctcccacaacacatgggaattatgggagctacagttcaagatgagatttgggtggggacacagccaaaccatatca

SEQ ID NO: 29121 - DNA, 120 bp, synthetic construct; identical to SEQ ID NO: 8729
  source 1..120: mol_type = other DNA

SEQ ID NO: 29122 - DNA, 120 bp, synthetic construct
  source 1..120: mol_type = other DNA
acttctctataagtttgaaatgaaatcatataaatcgaaagttagaagagaattaccacatcatgttggatttcactcatagccacgagaacgggtggtggtctcttctgcagtgaactg

SEQ ID NO: 29123 - DNA, 120 bp, synthetic construct
  source 1..120: mol_type = other DNA
ttaatcagagaacgtgcagaaatttttaaagaagaaaagtaaaatgactcatcgtaccaaaagccagagatgccagcttttagtttcctgctagtctttttctcggcgtgtgtgtgtgcg

SEQ ID NO: 29124 - DNA, 120 bp, synthetic construct; identical to SEQ ID NO: 8730
  source 1..120: mol_type = other DNA

SEQ ID NO: 29125 - DNA, 120 bp, synthetic construct
  source 1..120: mol_type = other DNA
aggttgcctcctctttataagaatctaatgcctgatgatctgtcactgtctcccatcacccccagatgggactgtctagttgcaggaaaacaagctcagggctctcactgattctacatt

SEQ ID NO: 29126 - DNA, 120 bp, synthetic construct
  source 1..120: mol_type = other DNA
aaaactgttttccatgaaaccagtcactggtcccaaaaaggttggggaccacggccatcggctgtttgctttatgaatttgtgcctcagtttcttcatctctgaaacgggaacgatggga

SEQ ID NO: 29127 - DNA, 120 bp, synthetic construct
  source 1..120: mol_type = other DNA
atatgtgtgtgtgtgcatacttgcctatgtgtgtctgtgcaaatacttggtaaaattgagagggtactagacaactcatttgtatcttcttaccttttgacacatggcagacatgtctca

SEQ ID NO: 29128 - DNA, 120 bp, synthetic construct; identical to SEQ ID NO: 8731
  source 1..120: mol_type = other DNA

SEQ ID NO: 29129 - DNA, 120 bp, synthetic construct
  source 1..120: mol_type = other DNA
tatcataaaaacactgccattatgatgaagcaaaaatagaatatccttcctcctcttagtgaggggagtatgtttatgtttgttgagctctttgtattttagccacccattcactggccc

SEQ ID NO: 29130 - DNA, 120 bp, synthetic construct
  source 1..120: mol_type = other DNA
caccctccaggaagtgacctgcaagagaatggagagagtcatggaccggcatggcgtggtaatgcatggtgcgtgtctcttagcagtaagaccttgagaaggagccaggcagggaggaat

SEQ ID NO: 29131 - DNA, 120 bp, synthetic construct
  source 1..120: mol_type = other DNA
agggcatggcacatgcaaaggtcctgtgttgggaacgtgcttggtgcatgtgaagaactgtgcagggaaggtgctggagataggacgggagggccacgagggttaagatcctgagagcaa

SEQ ID NO: 29132 - DNA, 120 bp, synthetic construct
  source 1..120: mol_type = other DNA
caattttagacctacagaaaagttccacgacagtactgagagttcctgtggactcctagtattaacatcttaataacggggtgtattgaccaaaaccgacacctgatacattaccgtgaa

SEQ ID NO: 29133 - DNA, 120 bp, synthetic construct; identical to SEQ ID NO: 8732
  source 1..120: mol_type = other DNA

SEQ ID NO: 29134 - DNA, 120 bp, synthetic construct
  source 1..120: mol_type = other DNA
gtgtcagctgggcttctcagctgtaaattaaccattttccgcttcataattagtaaacaccttgaggaagctacattgagacattgcagctgccttttttctcctgagattttgccccgc

SEQ ID NO: 29135 - DNA, 120 bp, synthetic construct
  source 1..120: mol_type = other DNA
ggaagagctgtcccctttgttctggttatgtatccagtggcttatgtatatcagcatggtttcatagatacttcttttgtgttatgggctataagccaatgctattattatttattttcc

SEQ ID NO: 29136 - DNA, 120 bp, synthetic construct
  source 1..120: mol_type = other DNA
ctcctgagtagctgggattacaggcacgtaccaccacgcccaactaatattttgtatttttagtggagacggggtttcatcatgttggccaggctggtcttgaactcctaacctcaggtg

SEQ ID NO: 29137 - DNA, 120 bp, synthetic construct; identical to SEQ ID NO: 8733
  source 1..120: mol_type = other DNA

SEQ ID NO: 29138 - DNA, 120 bp, synthetic construct
  source 1..120: mol_type = other DNA
ttcatctgcagatatattcatacatgagtgggctcatactgtctccaactccagttctgccccagtggggccaattctctctctttgttgtaacacctttcttcaatagtgagaaacctg

SEQ ID NO: 29139 - DNA, 120 bp, synthetic construct
  source 1..120: mol_type = other DNA
tctgtgcacggcgcgtcttgtcttcagcctcactgcgtcccatcagtgcttttccccacggtgactttgagtatttctttacttctgtactcccttcagtgtgattatgtcattcatctg

SEQ ID NO: 29140 - DNA, 120 bp, synthetic construct; identical to SEQ ID NO: 8734
  source 1..120: mol_type = other DNA

SEQ ID NO: 29141 - DNA, 120 bp, synthetic construct
  source 1..120: mol_type = other DNA
ttcatgtctctcttgcaggcctctcgcacagatgagaaaatacacgtgtgttttcctgtatcccctctttcttacaaaaagggaagcacactatcaatactcttgtagatctttaattgc

SEQ ID NO: 29142 - DNA, 120 bp, synthetic construct
  source 1..120: mol_type = other DNA
catcctcccaaactgaaactccatccccattaaacaccaactcccccattctctcttccccagcccctggcacctaccatttacctttcgtccctatggatttgactaatccaggaactt

SEQ ID NO: 29143 - DNA, 120 bp, synthetic construct
  source 1..120: mol_type = other DNA
caaggctgaataatattccactgtatggatagaccacattttgcttatccattcatcttttgatgaacatttgggttgcctccatgttttagctattgtgaataatgctactatgaatat

SEQ ID NO: 29144 - DNA, 120 bp, synthetic construct; identical to SEQ ID NO: 8735
  source 1..120: mol_type = other DNA

SEQ ID NO: 29145 - DNA, 120 bp, synthetic construct
  source 1..120: mol_type = other DNA
gttttagaacttctctatatattctggatattaatcccttatcagatataggatttgcaaatattttctctcattctgtggggtgcctttttactccgttgatagtgtctttgtacaaaa

SEQ ID NO: 29146 - DNA, 120 bp, synthetic construct
  source 1..120: mol_type = other DNA
agaaaagaggtttaattggcttatggttctgcaggctgtacaagaaacatggtgccagcacctgcttctggcgagagcctcaggaagcttccaatcacggcagaaggtgaagcgggagta

SEQ ID NO: 29147 - DNA, 120 bp, synthetic construct
  source 1..120: mol_type = other DNA
cacccaccaggccccacctccaacgctggggatcacatttcaacatgagagttggaggggacaaatatctgaactctatcaatgttatatccaagaaatcatagccaaatccaatgtcat

SEQ ID NO: 29148 - DNA, 120 bp, synthetic construct; identical to SEQ ID NO: 8736
  source 1..120: mol_type = other DNA

SEQ ID NO: 29149 - DNA, 120 bp, synthetic construct
  source 1..120: mol_type = other DNA
ttttctttttcaatattgcttttggctattttaagttccttgagattccatatgaattttaggatgggtttttctatttttgcaaaaagtgtcattgggattttgagagggattgcactg

SEQ ID NO: 29150 - DNA, 120 bp, synthetic construct
  source 1..120: mol_type = other DNA
tttgctgcagaagtcttttacctccttggttaagttaattcctaagtattctacttgatgctattataaattaaattgttttcttaatttcatttttagattgttcattgttagcatata

SEQ ID NO: 29151 - DNA, 120 bp, synthetic construct
  source 1..120: mol_type = other DNA
gtgaatagaaatagttttacgtcttttttttccattctggatgccttttatttcttttaatttttttcttgccaaattgctctggctagaattttcagtacaatgttgaatagaagtggt

SEQ ID NO: 29152 - DNA, 120 bp, synthetic construct
  source 1..120: mol_type = other DNA
ttcctagtttgttgagagtttttaataaggatgttgaattttgtcaaatgctttttgtatcaattgagatcatgtgatcatgtgagtgttatttcttcattctgttaatatgctctttta

SEQ ID NO: 29153 - DNA, 120 bp, synthetic construct; identical to SEQ ID NO: 8737
  source 1..120: mol_type = other DNA

SEQ ID NO: 29154 - DNA, 120 bp, synthetic construct
  source 1..120: mol_type = other DNA
tcctcactagttataggtccatgaagattttgtatttctttgtgatttagttttggtaggtttcgtgtttctcagaatttgtccatttcatctaggttatccaatttgttgatacacaat

SEQ ID NO: 29155 - DNA, 120 bp, synthetic construct
  source 1..120: mol_type = other DNA
ttgtcaattcttaaaatcttttcagagaagcaactttgatttaattgatttttctctattgtttttctattctctattttgttggtctctgctgtggtatttattatcttctttcttctg

SEQ ID NO: 29156 - DNA, 120 bp, synthetic construct; identical to SEQ ID NO: 8738
  source 1..120: mol_type = other DNA

SEQ ID NO: 29157 - DNA, 120 bp, synthetic construct
  source 1..120: mol_type = other DNA
ggaaagtgcagtgctttgggactgtccatcgagctcagtgattccctgttgccacagaaagcagaaccaggctaaattcagcccacacccagcacagagggagcatttaaaccagcccta

SEQ ID NO: 29158 - DNA, 120 bp, synthetic construct
  source 1..120: mol_type = other DNA
tgcaattcctaggcaagtcctattgctgagatgggctcagagccagtggatgtggggggcacacaacctagtgagacaccagccagggtggctaaccccaggcagcacagctcacagaaa

SEQ ID NO: 29159 - DNA, 120 bp, synthetic construct
  source 1..120: mol_type = other DNA
cacacatttcaggccctggctcttggacatttccagacacaccctgggccagaagggaatccactgccttggagggaaggacctagtcttgtcagaattcatcatcagctgactaaagag

SEQ ID NO: 29160 - DNA, 120 bp, synthetic construct
  source 1..120: mol_type = other DNA
tcttggggtccctgattccaggccttggctcttggacagcatttctggacctgctctaggccagaagggagcccactgacctgaaaggtgagtccacagcctagaagccttcaccacaag

SEQ ID NO: 29161 - DNA, 120 bp, synthetic construct; identical to SEQ ID NO: 8739
  source 1..120: mol_type = other DNA

SEQ ID NO: 29162 - DNA, 120 bp, synthetic construct
  source 1..120: mol_type = other DNA
gtagagccctggggctttgagtgaacataggtggtagccaggtagtgcttacagcgggccttgggtgaaacccagtgatgtgttggcttcaggtctgaccagcacagtcccagtggtggt

SEQ ID NO: 29163 - DNA, 120 bp, synthetic construct
  source 1..120: mol_type = other DNA
agaattcttctggatcttatctaagaccaccaaggcagtattttttttaatatttattttttgaaacagagtttcactcttgttgccaaggctagagcgcaatggtgtgatctcagctca

SEQ ID NO: 29164 - DNA, 120 bp, synthetic construct
  source 1..120: mol_type = other DNA
atgcctggctaatttttgtttgtttgtttgtttgtttgttttagtagagacagggtttctccatgttggtcaggctggtcttgaactcccgacctcaggtgatctgcccgcctcggcctc

SEQ ID NO: 29165 - DNA, 120 bp, synthetic construct; identical to SEQ ID NO: 8740
  source 1..120: mol_type = other DNA

SEQ ID NO: 29166 - DNA, 120 bp, synthetic construct
  source 1..120: mol_type = other DNA
tgagaaaactcaaattcaagataacacagcgaaggaattcagaattctatcagataaatttaataaagagattaaaataagaatcaagcagaaattctggagttgaaaaatgcagctgac

SEQ ID NO: 29167 - DNA, 120 bp, synthetic construct
  source 1..120: mol_type = other DNA
agcatgatctagaaaatagcctcaaaagggcaaatctaagatttattgaccttaaagaggaggtagagaaagagataggggtagaaagcttattcaaagggatactaacatagaacttcc

SEQ ID NO: 29168 - DNA, 120 bp, synthetic construct
  source 1..120: mol_type = other DNA
aagaaaggatcctaaaagcagcaagaaaaaaaagacttataattgaactccattatatctggcagcagagttttcaatggaaactttatgggccagaagagagtggcaggacatatttaa

SEQ ID NO: 29169 - DNA, 120 bp, synthetic construct
  source 1..120: mol_type = other DNA
aaatacagaccttcccagacaaacaaaagctgaggatgtcatcaacaccagagctgtcttacaagaaatgctaaagggaattcttcaatctgaaagaaaagggtgttaataagcaacaag

SEQ ID NO: 29170 - DNA, 120 bp, synthetic construct; identical to SEQ ID NO: 8741
  source 1..120: mol_type = other DNA

SEQ ID NO: 29171 - DNA, 120 bp, synthetic construct
  source 1..120: mol_type = other DNA
tatttgtcctaatgctctccctccccttggcccccatctccccacagatcccggtgtgtgatgttcccctccctgtgtccgtgtattctcattgttcaacttccacttatgagtgagaac

SEQ ID NO: 29172 - DNA, 120 bp, synthetic construct
  source 1..120: mol_type = other DNA
gtgccacattttctttatccagcctatcattgatgggcatttgggttggttccaagtctttgctattgtaaatagtggtgcagtaaacatatgtgtgcatgtgtctttatagtagaatga

SEQ ID NO: 29173 - DNA, 120 bp, synthetic construct
  source 1..120: mol_type = other DNA
ctcccaccaacagtgtaaaagcgttcctatttctccacatcctctccagcatctgttgtttcctgattttttagtgatcgccattctaactggcatgagatggtatctccttgtggtttt

SEQ ID NO: 29174 - DNA, 120 bp, synthetic construct
  source 1..120: mol_type = other DNA
ttgtttttttcttgtaaatttaagttccttgtagattttggatattagaccttgtcagatggatagattgcaaatattttctcccattctgtaggttgcctattcactctgatgctagct

SEQ ID NO: 29175 - DNA, 120 bp, synthetic construct; identical to SEQ ID NO: 8742
  source 1..120: mol_type = other DNA

SEQ ID NO: 29176 - DNA, 120 bp, synthetic construct
  source 1..120: mol_type = other DNA
tctgttctgttccattggtttatatatctgtcttcataccagtaccatgctgttttcgttactatagccttgtagtatagtttgaagtcaggtagtgtgatgcctccagctttgttcttt

SEQ ID NO: 29177 - DNA, 120 bp, synthetic construct
  source 1..120: mol_type = other DNA
taaattactttgggcagtatggccattttcatgatactgattattcctatccatgagcatggaattttttttccatttgtttgtgtcctttcctttccttcagcagtggtttgttgttct

SEQ ID NO: 29178 - DNA, 120 bp, synthetic construct
  source 1..120: mol_type = other DNA
ataggaatgcttgtgaattttgcacattgattttgtatcccaagactttgctgaagttggctatcagcttaaggagtttttgggctgagacaatggggttttctaaatatacaatcatgt

SEQ ID NO: 29179 - DNA, 120 bp, synthetic construct
  source 1..120: mol_type = other DNA
agggcatccttgtcttgtgctggttttcaaagtgaatgcttccagcttttgcccgttcagtatgatattgcctgtgggtttgtcataaatagctcttgttattttgagatatgttccatc

SEQ ID NO: 29180 - DNA, 120 bp, synthetic construct; identical to SEQ ID NO: 8743
  source 1..120: mol_type = other DNA

SEQ ID NO: 29181 - DNA, 120 bp, synthetic construct
  source 1..120: mol_type = other DNA
ctactgtttggaatagtttcagaaggaatggtaccagctcctctttgtgcctctggtagaatttgggtgtgaatccgtctggtcctgggctttttttggttggcaggctattaattactg

SEQ ID NO: 29182 - DNA, 120 bp, synthetic construct
  source 1..120: mol_type = other DNA
atggaggtgtttttagtattctctgatggtagtttgtatttctgtgggatcagtggtgatatcccctttatcattttttattgcatctatttgattcttctctcttttcttctttgttag

SEQ ID NO: 29183 - DNA, 120 bp, synthetic construct
  source 1..120: mol_type = other DNA
cttgtcttctgctagcttttgaatttgtttgctcttgcttctctagttcttttaattgtgatgtttgggtgtcgatttcagatctctctagctttctgatatgggcatttagtgctataa

SEQ ID NO: 29184 - DNA, 120 bp, synthetic construct
  source 1..120: mol_type = other DNA
cattcagtagcaggttgttcaatttccatgtatctgtgtggtttttagtgagtttcttcatcctgagttctaatttgatcgtactgtgttctgagagactgtttgttatgatttccattc

SEQ ID NO: 29185 - DNA, 120 bp, synthetic construct; identical to SEQ ID NO: 8744
  source 1..120: mol_type = other DNA

SEQ ID NO: 29186 - DNA, 120 bp, synthetic construct
  source 1..120: mol_type = other DNA
atgtaatgctcttctttgtctttttttatctttcttagtttgaagtctgttttatcaaaggctaggatcttggccgggtgcagtggctcatgcctgtaatcccagcactttgggaggctg

SEQ ID NO: 29187 - DNA, 120 bp, synthetic construct
  source 1..120: mol_type = other DNA
ctactcggcaggctgaggcaggagaatggcgtgaacccgggaggtggagcttgcagcgagccaagatagcgccactgcagtctggcctgggcaaaagagtgagactccatctcagaaaaa

SEQ ID NO: 29188 - DNA, 120 bp, synthetic construct
  source 1..120: mol_type = other DNA
agcatatgtgtgtctttgcacatgagatggatctcctgaataaagcacactgatgggccttaactctttatccagtttgccagtctgtgtcttttaattggggcatttagcccatttaca

SEQ ID NO: 29189 - DNA, 120 bp, synthetic construct; identical to SEQ ID NO: 8745
  source 1..120: mol_type = other DNA

SEQ ID NO: 29190 - DNA, 120 bp, synthetic construct
  source 1..120: mol_type = other DNA
tgatgcacttctctttgtaggtaacctgacctttctctctggctgcccttaacgttttgtccttcatttaaaccttggagaatctgacaattatatgtcttggggttgctcttcttgagg

SEQ ID NO: 29191 - DNA, 120 bp, synthetic construct
  source 1..120: mol_type = other DNA
cgtcactttcaggtacagcaatcaattgtaggtttggtcttttcatatagtcccatatttcttggaggttttgttcgttctttttcatcattttttctctaatcttgtctgcatgcctta

SEQ ID NO: 29192 - DNA, 120 bp, synthetic construct
  source 1..120: mol_type = other DNA
ttatgttcctctctaaactggttattctagttagcagttcctgtaaccttttatcaggttcttagcttccttgcattgggttagaacatgcttctctagctcagaggaatttgttattac

SEQ ID NO: 29193 - DNA, 120 bp, synthetic construct; identical to SEQ ID NO: 8746
  source 1..120: mol_type = other DNA

SEQ ID NO: 29194 - DNA, 120 bp, synthetic construct
  source 1..120: mol_type = other DNA
gcagaacagcaaagattgctgcctactccttcctctggaagctttgtcccagaagggcaccagcctgatgccaaccagagctctcctgtttgaggtgtctgttgacccctgttgggaggt

SEQ ID NO: 29195 - DNA, 120 bp, synthetic construct
  source 1..120: mol_type = other DNA
agccagcaggcaggagagttcaagtctgctgaagctgtgcccacagccaccccttctccaggtgctctgtcccagggaaatgggagttttatctataatcccctgactggggctgctgcc

SEQ ID NO: 29196 - DNA, 120 bp, synthetic construct
  source 1..120: mol_type = other DNA
tcaggggaaaaccgcctactaaagcctcagtaataccaaatgcccctcccgccaccaagcttgagcatcccaggtcaacttcagactgctgtgctggcagtgagaatttgaagccagtgg

SEQ ID NO: 29197 - DNA, 120 bp, synthetic construct; identical to SEQ ID NO: 8747
  source 1..120: mol_type = other DNA

SEQ ID NO: 29198 - DNA, 120 bp, synthetic construct
  source 1..120: mol_type = other DNA
ggctgggggagggaggtctcccggctccttgcacttcccaggtgaggcgatgccccacctgcttctgtgtgccctccgtgggctgcacccactgcctaatcagtcccaatgagatgaact

SEQ ID NO: 29199 - DNA, 120 bp, synthetic construct
  source 1..120: mol_type = other DNA
tttttgcttgtttatgcaattagtgttaagtcatcatcagtttaaaataatgagttgtaagatattttcaagcctcatggtaacctcagatctaaaacatatggcagacacacaaataaa

SEQ ID NO: 29200 - DNA, 120 bp, synthetic construct; identical to SEQ ID NO: 8748
  source 1..120: mol_type = other DNA

SEQ ID NO: 29201 - DNA, 120 bp, synthetic construct
  source 1..120: mol_type = other DNA
gtagagttcaagataataactataagaagagacaaagaaggtcattacatcatgataaagggatcaattcagcaagacgatataacaatttcaaagaaacatctaacttaatctgcactg

SEQ ID NO: 29202 - DNA, 120 bp, synthetic construct
  source 1..120: mol_type = other DNA
aaacaagtcttgaaacattctaaaaaattgaaatactatcaagcatcttctctgaccagtacagaataaaactagaagttaataatgagacattttggaaactatacagacatacacata

SEQ ID NO: 29203 - DNA, 120 bp, synthetic construct; identical to SEQ ID NO: 8749
  source 1..120: mol_type = other DNA

SEQ ID NO: 29204 - DNA, 120 bp, synthetic construct
  source 1..120: mol_type = other DNA
ggaacgcttttacactgttggtgggagtgtaaattagttcaaccattgtggaagacagtgtggcaattcctcaaggatctagaacccaaataccatttgacccagtgatcccattactgg

SEQ ID NO: 29205 - DNA, 120 bp, synthetic construct
  source 1..120: mol_type = other DNA
gctggataaagaaaatgtggcacatatacactgtgaagtactatgcagccataaaaaaagatgagtttatgttcttttcagggacacggatgaagctggaaaccatcattctcagcaaac

SEQ ID NO: 29206 - DNA, 120 bp, synthetic construct
  source 1..120: mol_type = other DNA
gcaaggggagggagggaattaggagaaatacctaatgtagatgacgggttgatgggtgcagcaaaccaccatggcacgtgtatgcctatgtaacaaaactgcatgttctgcacatgtacc

SEQ ID NO: 29207 - DNA, 120 bp, synthetic construct; identical to SEQ ID NO: 8750
  source 1..120: mol_type = other DNA

SEQ ID NO: 29208 - DNA, 120 bp, synthetic construct
  source 1..120: mol_type = other DNA
gaaattcaaaggataattagtggctgctatgagcaactctatgccaataaattggaaaatctggaagaaatggatacattcctagacatgtgcaacctaccaagattgaaccaggaagaa

SEQ ID NO: 29209 - DNA, 120 bp, synthetic construct
  source 1..120: mol_type = other DNA
gaactaatactaatccttctgaaactattatgaaaaatagaggaggagggaatacctccaaactcatctacaaggcccgtattaccctgttaccaaaaccagacaaagatacatcaaaaa

SEQ ID NO: 29210 - DNA, 120 bp, synthetic construct
  source 1..120: mol_type = other DNA
cttcatgaccaagtgggagttatcccaggaatgcaaggatagttcaacatatgcaaatcactttatgtgatacatcgtatcaacagaatgaaggacaaaaccacatgagcatttcaattg

SEQ ID NO: 29211 - DNA, 120 bp, synthetic construct; identical to SEQ ID NO: 8751
  source 1..120: mol_type = other DNA

SEQ ID NO: 29212 - DNA, 120 bp, synthetic construct
  source 1..120: mol_type = other DNA
aactgataaattcagtaaagttgcaggatacaaagtcaacatacaaaaatcagtagcatttctatatgccaacagtgaacaatctgaaaaacaaatcaagaaagtaatcccatttaaaat

SEQ ID NO: 29213 - DNA, 120 bp, synthetic construct
  source 1..120: mol_type = other DNA
tgttcatggactggaagaatcaatattgttaaaatgtctgtattgtctaaagcaatctacagattcagtgcaccccctatcacaataccaatgacattcttcacagaaatagtaaaaaca

SEQ ID NO: 29214 - DNA, 120 bp, synthetic construct
  source 1..120: mol_type = other DNA
ccaaaacagtatgtactgacataaaaacagacacgtagaccaatggaacagaatagaaaacccagcaaacaaatccatatgtctacgacaaactcatttttgacaaaggtgccaagaaca

SEQ ID NO: 29215 - DNA, 120 bp, synthetic construct; identical to SEQ ID NO: 8752
  source 1..120: mol_type = other DNA

SEQ ID NO: 29216 - DNA, 120 bp, synthetic construct
  source 1..120: mol_type = other DNA
tgggagaaaatatttgcaaagtgcccatctgacaagggactaataaccagaatatgtaaggagctcaaacaaccgcacaaggaaaacatctaataatccaattaaaagatgggcaaaaga

SEQ ID NO: 29217 - DNA, 120 bp, synthetic construct
  source 1..120: mol_type = other DNA
aacaatgagaacacatggacacaggaaggggaacatcacacactggggactgttgtggggttggggggaggggggagggatagcattaggagatatacctaatgctaaatgacgagttaa

SEQ ID NO: 29218 - DNA, 120 bp, synthetic construct
  source 1..120: mol_type = other DNA
gaaaaggtactcaacgtcactgatcatcagagaaatgcaaatgaaaactataatgagatatgaccccaccctggtcaatatagcttttatccaaaagataggcaataatggatgctagtg

SEQ ID NO: 29219 - DNA, 120 bp, synthetic construct; identical to SEQ ID NO: 8753
  source 1..120: mol_type = other DNA

SEQ ID NO: 29220 - DNA, 120 bp, synthetic construct
  source 1..120: mol_type = other DNA
atattaagtgaaataagccaggcacagaaagacaaactttgcatgttctcacttatttgtgggagataaagattaaaacaattgaactcgagatagagtaaaaggatggttaccagaggc

SEQ ID NO: 29221 - DNA, 120 bp, synthetic construct
  source 1..120: mol_type = other DNA
taattatacatttaaaaataactaaaagagagctgggcacagtggctcacagctgtaatttcagcactttgggaggccgagtcatatgactcacttaaggccaggagttcgaggcctgcc

SEQ ID NO: 29222 - DNA, 120 bp, synthetic construct
  source 1..120: mol_type = other DNA
gaggcggaggttgcagtgagctgagatcgcgccactgcactccagcctgggtaacagagtgagactgtctctaaataaataagacgaaaagagtataatgaggttgtttgtaagacaagg

SEQ ID NO: 29223 - DNA, 120 bp, synthetic construct
  source 1..120: mol_type = other DNA
aaagcaaaaagaaaaagagcttatgggtatcaatttttctgttagtaacgcttttgttgtgtcccagcaagttttggtacattgtcttctcatctttatttgcatttaagtattttctaa

SEQ ID NO: 29224 - DNA, 120 bp, synthetic construct; identical to SEQ ID NO: 8754
  source 1..120: mol_type = other DNA

SEQ ID NO: 29225 - DNA, 120 bp, synthetic construct
  source 1..120: mol_type = other DNA
tgggaacatttccacgtgcacttgggatgcacatgcatgctgtggtcatgggtcgagtgttctctgcatgttggttagatctaggtggcttattgtgttaagtcctctattctgtaactt

SEQ ID NO: 29226 - DNA, 120 bp, synthetic construct
  source 1..120: mol_type = other DNA
agctgttagaggcataaatgtttataatggttatctgtaacatcttcttgcagcctcgaacctttaagtgtgcagcgtcctcttttgtctcttgtgacctttctaggtttattataaaac

SEQ ID NO: 29227 - DNA, 120 bp, synthetic construct
  source 1..120: mol_type = other DNA
cgagtctctagtagacagcatgtagctggatcatgtttatctattctgccactgccgatatcaccttttgatatacagactttacattttcataaaatttaatttgtccacgtgcttagc

SEQ ID NO: 29228 - DNA, 120 bp, synthetic construct; identical to SEQ ID NO: 8755
  source 1..120: mol_type = other DNA

SEQ ID NO: 29229 - DNA, 120 bp, synthetic construct
  source 1..120: mol_type = other DNA
ttgcttttctcacgtaatagtatttcctagagaccactacatatcagttcgtggggtccttccatattcttttttacagccaccccatactttatggttggatgtgccatgcttattcaa

SEQ ID NO: 29230 - DNA, 120 bp, synthetic construct
  source 1..120: mol_type = other DNA
tatgtctattgtattcttgaaacaatgttgcaaagaataacttcgtaggtatggatgttcctattgttggaggtgttatcttcagggtagattcctagaaatgggagtgttgggctgaaa

SEQ ID NO: 29231 - DNA, 120 bp, synthetic construct; identical to SEQ ID NO: 8756
  source 1..120: mol_type = other DNA

SEQ ID NO: 29232 - DNA, 120 bp, synthetic construct
  source 1..120: mol_type = other DNA
ttggtctctcaatttttaagtcatttatattgtgggaacgtttgtctggactaatgtgaattgttttcccagctggtcacttgtctttgactttgcttatggtgctttttgctatgagaa

SEQ ID NO: 29233 - DNA, 120 bp, synthetic construct
  source 1..120: mol_type = other DNA
ggaggtttggggtcttgtcttcagcatttagctccttgtccgtttggagtttgctcttgtgcatgatctaaggtaatcttttctcagagagtggcctgagacctcttccttagaagttca

SEQ ID NO: 29234 - DNA, 120 bp, synthetic construct
  source 1..120: mol_type = other DNA
acggcgtggtttgctctagagggtttgaaggaagggtgagaagtcaggaccactgctgtagaaaacagggtttgcaggtagataaggtggcgggtgcagcgggaggaagagaaaaggatg

SEQ ID NO: 29235 - DNA, 120 bp, synthetic construct
  source 1..120: mol_type = other DNA
gaggtgggttgaaggcagtaagacctgcaggtgggagctctggggagagagtgcgggctgggctcacaagttaggggaggtgtcagtgtgtaaatgacatgagcgcaggggctagacagg

SEQ ID NO: 29236 - DNA, 120 bp, synthetic construct; identical to SEQ ID NO: 8757
  source 1..120: mol_type = other DNA

SEQ ID NO: 29237 - DNA, 120 bp, synthetic construct
  source 1..120: mol_type = other DNA
tggccccacggcagtggagctggggtttcccagggatgctgctgctgaaggtgaggtttgcaaacactaggcatgcatgtttgaggtaccacaacctccaccaacccatggtggtcacca

SEQ ID NO: 29238 - DNA, 120 bp, synthetic construct
  source 1..120: mol_type = other DNA
ttaggccaggagcccatcattgtcctggaacctgggcttggcagggcaagctttggggagcactgtccagacagtgccctggacactgcacctcaggtcaggacacagctcccgaggcct

SEQ ID NO: 29239 - DNA, 120 bp, synthetic construct
  source 1..120: mol_type = other DNA
gcctccatgtacggggctgggacccaccaggacccagactcccagactagcaggtgggcttctcagagcacagagggtgtgggtgacccagatatcctgttgttgctcagagacccccag

SEQ ID NO: 29240 - DNA, 120 bp, synthetic construct; identical to SEQ ID NO: 8758
  source 1..120: mol_type = other DNA

SEQ ID NO: 29241 - DNA, 120 bp, synthetic construct
  source 1..120: mol_type = other DNA
tctgcatgggatttgactgagcaatctggaaggcttcctggaggaggagctattgctcagggtgaaatagaggtcttgaaattagtacaacacatgccccatactggggaatttgggggt

SEQ ID NO: 29242 - DNA, 120 bp, synthetic construct
  source 1..120: mol_type = other DNA
tcatgaaactgaaaatttaagtttttaatatcacatattatttcatgaagagtggcttcggactttggggtagggtctggtaggatcccagggccccttcccttggcatcatcattgttt

SEQ ID NO: 29243 - DNA, 120 bp, synthetic construct; identical to SEQ ID NO: 8759
  source 1..120: mol_type = other DNA

SEQ ID NO: 29244 - DNA, 120 bp, synthetic construct
  source 1..120: mol_type = other DNA
ctcctcagctgtgaactgtctgggactgggccaggagacagtcctgggatagggaaagaaaagaggggcttccgggggtggggagcggggctgggcggctgctggctgagccaagtggac

SEQ ID NO: 29245 - DNA, 120 bp, synthetic construct
  source 1..120: mol_type = other DNA
gcctctctctttagatatgtcctggcatctgactttggtttcctggtgtttaaaggctaattgggatcggtcgtggtgcctcaggcctgtcaatccagtacactgggaggccaaagtggg

SEQ ID NO: 29246 - DNA, 120 bp, synthetic construct
  source 1..120: mol_type = other DNA
aactactcgggaggctgaggtaggagcatcacttgagcccaggagttcaaggttgcagcaagctatgatcttgccactgcactccagcctgagtgacagaacgagaccctgtgtctaaaa

SEQ ID NO: 29247 - DNA, 120 bp, synthetic construct
  source 1..120: mol_type = other DNA
cctgacctgcctgggcaacatggtgaaaccccgtctctactaaaaatacaaaaattagctgggtgtggtggctcacatctgtagtcccagctaccctggaggctgaggtgggaggatcac

SEQ ID NO: 29248 - DNA, 120 bp, synthetic construct; identical to SEQ ID NO: 8760
  source 1..120: mol_type = other DNA

SEQ ID NO: 29249 - DNA, 120 bp, synthetic construct
  source 1..120: mol_type = other DNA
ccatgcctcagggcttctgcacgtgcagttttctctgcctgcagggtctgtccctagctctctacccgattcagatcccacaccagctcctggggcagccctcttgccctgcctctcccc

SEQ ID NO: 29250 - DNA, 120 bp, synthetic construct
  source 1..120: mol_type = other DNA
aggcacacactacgtgcctcctgggttgggggcagcagggacaaaagccaggcatgggatgtggctcttgtgggatgcaccttgggtgtgactgtcacggaaaaggaggagacgtggggt

SEQ ID NO: 29251 - DNA, 120 bp, synthetic construct
  source 1..120: mol_type = other DNA
ctctcactctcccccacccccatggaaccagaaccacctcgtcaggcccagcagcccttcagggtcagtctctgcatgggtggtaatatggcttacctgagtcctggtcagtctgtggcc

SEQ ID NO: 29252 - DNA, 120 bp, synthetic construct; identical to SEQ ID NO: 8761
  source 1..120: mol_type = other DNA

SEQ ID NO: 29253 - DNA, 120 bp, synthetic construct
  source 1..120: mol_type = other DNA
ctcaatctgccctgtggagcccggcctggcctgcagccccctgtgcagggaaaaacccgcggttttccctggtggagggcacaggtcagagcgggcatggacagggcatgaggaagcagt

SEQ ID NO: 29254 - DNA, 120 bp, synthetic construct
  source 1..120: mol_type = other DNA
tcccagggttaggtgcctcccaaatgccagggcttcccatgggccatacacactcagtcgaacaagatttgcacaaaacctgggccataagctcgctgagcacttggcctgcccagccgg

SEQ ID NO: 29255 - DNA, 120 bp, synthetic construct; identical to SEQ ID NO: 8762
  source 1..120: mol_type = other DNA

SEQ ID NO: 29256 - DNA, 120 bp, synthetic construct
  source 1..120: mol_type = other DNA
gtcccgcagtggcttccggggatgtgcagccctgccctgaggccctctggccgcctcttgctctctgagcagggatgtccgtgccttgggcctgaggctgagctgggctaggtccctggg

SEQ ID NO: 29257 - DNA, 120 bp, synthetic construct
  source 1..120: mol_type = other DNA
ccactgaggaggcacccctagccgtgggagttggcgtgtcctgctccccagggcggtctgtccccttggcgagatccttgctgtgtcagcagagggttttcctggcccagggtcttgggg

SEQ ID NO: 29258 - DNA, 120 bp, synthetic construct
  source 1..120: mol_type = other DNA
cactgggaagagcggtccttggaggagagagctcccgaggagaaagccatgatgctgtgctgcgctctgggccaccaggtcttgtctggggggaatcctgaccctgtgtgatgtgagtgc

SEQ ID NO: 29259 - DNA, 120 bp, synthetic construct; identical to SEQ ID NO: 8763
  source 1..120: mol_type = other DNA

SEQ ID NO: 29260 - DNA, 120 bp, synthetic construct
  source 1..120: mol_type = other DNA
cctcttccccagggcatggcccaggcacctgctggcctgaggtccctgctgggcccaaggcatccctgccgtgttcagagttccacaggcaccagtccaccatgctggggcctactggga

SEQ ID NO: 29261 - DNA, 120 bp, synthetic construct
  source 1..120: mol_type = other DNA
tgcaggttgggttctcctctctcctctgggatctgcacaggttgccattctctctgcctagactgggcctccacctctgagaagccctcccttattgccccttccagtgggctgggagag

SEQ ID NO: 29262 - DNA, 120 bp, synthetic construct
  source 1..120: mol_type = other DNA
gctcacccagctgctcagagaggcaagtggctcccgggccccacagtgacactgggggactctttgtctccatttggggggtgtgcaggtcactcctggtgccctggtcagcttccccaa

SEQ ID NO: 29263 - DNA, 120 bp, synthetic construct
  source 1..120: mol_type = other DNA
ctggccggggcgcatttccgtgcaggacactggctgcctcccagctcactcttagcctggtcatagagcccggcagcatcttgccaggtgcctgtggtcccagatcctggggctgcccca

SEQ ID NO: 29264 - DNA, 120 bp, synthetic construct; identical to SEQ ID NO: 8764
  source 1..120: mol_type = other DNA

SEQ ID NO: 29265 - DNA, 120 bp, synthetic construct
  source 1..120: mol_type = other DNA
ggcgtggtggcgggcgcctgtagtcccagctactcgggaggctgaggcaggagaatggcatgaacccgggaggcagagcttgcagtgagccgagattgcgccactgcactccagcctggg

SEQ ID NO: 29266 - DNA, 120 bp, synthetic construct
  source 1..120: mol_type = other DNA
gcagctccagggcacctgaggccttcgctgtccttccgcacctcgcccccttcccgagtggaggtgctctgggagctctgcctgcttcctcaagtctttcttgtttttttatgttatttt

SEQ ID NO: 29267 - DNA, 120 bp, synthetic construct; identical to SEQ ID NO: 8765
  source 1..120: mol_type = other DNA

SEQ ID NO: 29268 - DNA, 120 bp, synthetic construct
  source 1..120: mol_type = other DNA
gagcccctggcccaggggcggggaggcctgtccacccctcccacccgtccccgaggcccctgctgcccagcaagaccaccaccctctgctccaggacagcgcagccgccatcagtggggg

SEQ ID NO: 29269 - DNA, 120 bp, synthetic construct
  source 1..120: mol_type = other DNA
acagagacaagacgagtgtcctagggcagatagggccacatccatggggtcacttcagtttgtcctcccggcgccttctaaatatactctctgtgggtgtcttatcacagcccagggagc

SEQ ID NO: 29270 - DNA, 120 bp, synthetic construct
  source 1..120: mol_type = other DNA
tttcctgcttgcaccccagagcctggccacccctgtcctctgctgaggccctgaccacctctatgtgtgccatggctgcagtgacagcccagaccccaggggccgggcatcccacagctc

SEQ ID NO: 29271 - DNA, 120 bp, synthetic construct
  source 1..120: mol_type = other DNA
ttttcggggtgcttcgaggtgctgtggggacctgtgatgctgtcagggagacccggagtccagttctcgccaaccgctcgatgctgtgtgacttgaggcaggtcccttaacctctctgag

SEQ ID NO: 29272 - DNA, 120 bp, synthetic construct; identical to SEQ ID NO: 8766
  source 1..120: mol_type = other DNA

SEQ ID NO: 29273 - DNA, 120 bp, synthetic construct
  source 1..120: mol_type = other DNA
cacacaggtgcagacacccacatgccatcctgccagagccctgggttctcagcaggactctttgccgggatcctcatgctacggccaccacctgattttgtcgataaagttttattagga

SEQ ID NO: 29274 - DNA, 120 bp, synthetic construct
  source 1..120: mol_type = other DNA
attgttctggcccctcctgatctctcccccaccttgccacgaccccccagagtttgcctggtgtcaccgggaagcttcctggctgcccgagggtcccccagcacctgtccctctagggcc

SEQ ID NO: 29275 - DNA, 120 bp, synthetic construct
  source 1..120: mol_type = other DNA
tgaggtgtggtcgagggccctgggcgtccgggtgagatgggaatgagcccttggtaggtgccaggcggggccagccctcatccccactgcaaggcctgagcgtccaggagccccgtgcgc

SEQ ID NO: 29276 - DNA, 120 bp, synthetic construct; identical to SEQ ID NO: 8767
  source 1..120: mol_type = other DNA

SEQ ID NO: 29277 - DNA, 120 bp, synthetic construct
  source 1..120: mol_type = other DNA
ggacatccaggcatgtggcgtggcaaccaggtgggatggcagggtttccccctggcaggatccccacctcctgcacctgtcctgacttggtcttctggggcagcccctaagacgcttctt

SEQ ID NO: 29278 - DNA, 120 bp, synthetic construct
  source 1..120: mol_type = other DNA
agcccaccccaggaggctcccagcgatctgtcaacctgtgctgttggcatgcagcctgggggtgaggggtggcggaacgctgcctcagtaccacgtcctgctcaaaggccacttgcgagc

SEQ ID NO: 29279 - DNA, 120 bp, synthetic construct; identical to SEQ ID NO: 8768
  source 1..120: mol_type = other DNA

SEQ ID NO: 29280 - DNA, 120 bp, synthetic construct
  source 1..120: mol_type = other DNA
caggccagggcctccgcagaaggagggtttggggtccaggcttcatgtggggggtcttgtaacatgggagggtagacgctgccttgggacaggagagacagaggcggggggaccagggga

SEQ ID NO: 29281 - DNA, 120 bp, synthetic construct
  source 1..120: mol_type = other DNA
ttcttggggttcccagtccagatctgtgttggaaaaagtgtcagctgaaaccccaagaggctggggacagccttggtcctgctgtgggacacaggtttaatctccagatggctcctggat

SEQ ID NO: 29282 - DNA, 120 bp, synthetic construct
  source 1..120: mol_type = other DNA
ggccacaccaagtcacccattgttgtgtcccttgggctgggatcccatggctttcaagaactttttaaagaaatgagactcagctgccgcggaacaagccacaggtaaagagtataagac

SEQ ID NO: 29283 - DNA, 120 bp, synthetic construct; identical to SEQ ID NO: 8769
  source 1..120: mol_type = other DNA

SEQ ID NO: 29284 - DNA, 120 bp, synthetic construct
  source 1..120: mol_type = other DNA
tctggtgagaagtggcggtccctgaagggctggggtgctagggagcctcatggacctactcccgacgtggcagctgcctgctgcagatgggccagccatgtcccgcctgtgccgggaatc

SEQ ID NO: 29285 - DNA, 120 bp, synthetic construct
  source 1..120: mol_type = other DNA
gtgctgacaccagtgggcgtggacgtgaccctctttttaaaagaattttttcagatgcaattccattaaggatctggaggtgagaggatgaaaaggaaactctgagctttgagtacattt

SEQ ID NO: 29286 - DNA, 120 bp, synthetic construct
  source 1..120: mol_type = other DNA
ttgggaggatcgcttgagcccaggaaatcgaggctgcagtgagccaggatcataccactgtcctccagcctgggtgacagaacaagactctgtctcaaaaacaaaacaaaacaaaacaaa

SEQ ID NO: 29287 - DNA, 120 bp, synthetic construct; identical to SEQ ID NO: 8770
  source 1..120: mol_type = other DNA

SEQ ID NO: 29288 - DNA, 120 bp, synthetic construct
  source 1..120: mol_type = other DNA
gcacagcacgggagtgatgccgccacccacccaggacgcgggagcccgcagaggctggaaggctgaaaagggccctgtcgcccccaccccccaggatgacgtatggcctgatgtggcatt

SEQ ID NO: 29289 - DNA, 120 bp, synthetic construct
  source 1..120: mol_type = other DNA
ccccaatccagggggcttctggggggcagcctgggaccagacgtgcctcaccagggcttctgtctcctcaccaggacttccatgatgtgacaccttccacatggggttcagagcggggaa

SEQ ID NO: 29290 - DNA, 120 bp, synthetic construct
  source 1..120: mol_type = other DNA
acctgtggggaccttggcgacctccaaaccctgctgaggctgcctgctgacagccactggtgaggggggtgacagccactggtgaggggggtgaccagctggtagctttttctgaggtgc

SEQ ID NO: 29291 - DNA, 120 bp, synthetic construct
  source 1..120: mol_type = other DNA
acctgctggtgaccagtgagtgagcaggggaagcctgtcctctccagcgcccagtgtttccttcctggggcacatgggatttggaggcatttggagtctcccaggatgactttttttttt

SEQ ID NO: 29292 - DNA, 120 bp, synthetic construct; identical to SEQ ID NO: 8771
  source 1..120: mol_type = other DNA

SEQ ID NO: 29293 - DNA, 120 bp, synthetic construct
  source 1..120: mol_type = other DNA
atccaccccaaaacttctctcccaaactgaaattctgcacccatgaaatcccactccctctccccggccccgccatcctgctctccgcaaccgtggatccgtcctccccatgtccacaga

SEQ ID NO: 29294 - DNA, 120 bp, synthetic construct
  source 1..120: mol_type = other DNA
gcactgtgtgttatccggtgtcctcaaggtgcctctctgctcatgtccttccatgcatgatgctttcagactgacaaaactcttcaagtattaacgtaatttttaatgtttacagattca

SEQ ID NO: 29295 - DNA, 120 bp, synthetic construct; identical to SEQ ID NO: 8772
  source 1..120: mol_type = other DNA

SEQ ID NO: 29296 - DNA, 120 bp, synthetic construct
  source 1..120: mol_type = other DNA
ggactggatttgcttggcgggtcacctggatcaaccaggcccatttaggagcaccactcaggggccctagtgtgtgcggcagggcaggtcatggagtctccagccttcagctcgcgttag

SEQ ID NO: 29297 - DNA, 120 bp, synthetic construct
  source 1..120: mol_type = other DNA
gcacccggggctgagatgttgaaatgatgtcggataattcaccgggtgccttcggggctggtactcgccgtcactgctcctgaggcctatttgctgtcaaggggaacaagtaggaggttg

SEQ ID NO: 29298 - DNA, 120 bp, synthetic construct
  source 1..120: mol_type = other DNA
tgtcttctctcccccaccccttcgctagcctgtcctgcttcccactccgagtccaaaacacgcataggattcgtcctctcccagggccttagtttcccggctctgcagagtggggggctg

SEQ ID NO: 29299 - DNA, 120 bp, synthetic construct; identical to SEQ ID NO: 8773
  source 1..120: mol_type = other DNA

SEQ ID NO: 29300 - DNA, 120 bp, synthetic construct
  source 1..120: mol_type = other DNA
aagtaagctttgtcatataattccttctgaggctagcacggtatatcaaaatatcggaagaatcatttagccttcagaatatggcaaggctgacagccagcctggcccatgggcacctgt

SEQ ID NO: 29301 - DNA, 120 bp, synthetic construct
  source 1..120: mol_type = other DNA
cacctctgcccaggtagttggggtggacgcccacttgggtgcacactctgtgggggctggtccaggaccacccatgtgcagtcttccctggccacatcctgtattctcccgcaacgccca

SEQ ID NO: 29302 - DNA, 120 bp, synthetic construct
  source 1..120: mol_type = other DNA
ggtatttgcagccagtcaccaagttttcaagccctcacctgcggcctgtgagtgcccaccctgcacatggtgctaaccagcatccatcactgctttcttttttaatttaatttaattttt

SEQ ID NO: 29303 - DNA, 120 bp, synthetic construct
  source 1..120: mol_type = other DNA
gctgggattacaggagcacaccaccacccacgcccagttaattttttcatatttttagtagagacggggtttcaccatgttggccagactggtctcgaactcctgtcctcaggcaatcct

SEQ ID NO: 29304 - DNA, 120 bp, synthetic construct; identical to SEQ ID NO: 8774
  source 1..120: mol_type = other DNA

SEQ ID NO: 29305 - DNA, 120 bp, synthetic construct
  source 1..120: mol_type = other DNA
ttttttttgaaagtttaaagctttcaacctgggcctggaggctgcagggtcagcagacctgggtcctgcccatggcccccttccctcctcaggcctccatttgctcatctgagagtgggg

SEQ ID NO: 29306 - DNA, 120 bp, synthetic construct
  source 1..120: mol_type = other DNA
cttgtcctgtgaacaagttaggttgtgtggccaaaggggctttgcagggtgactgagggatggctcgtgagaggggaggttgtcctgggttacccgggtgagccctcactgtgattgtga

SEQ ID NO: 29307 - DNA, 120 bp, synthetic construct
  source 1..120: mol_type = other DNA
tgcaccaagaccagagcctggcaagtcgtctcataccgagggtcaaaggggcccagggcccagcctccagggaccccagccatgccgggtcagggaaccaggctgcagtcctgtgtctcc

SEQ ID NO: 29308 - DNA, 120 bp, synthetic construct; identical to SEQ ID NO: 8775
  source 1..120: mol_type = other DNA

SEQ ID NO: 29309 - DNA, 120 bp, synthetic construct
  source 1..120: mol_type = other DNA
cctgctggacgtcaggtgacacttccctccacagcctgggaagaagcacctgtgggccacttctttgtgttgataaggaaactgaggcaggggagctgcctgggtcaccagtgggcactg

SEQ ID NO: 29310 - DNA, 120 bp, synthetic construct; identical to SEQ ID NO: 1705
  source 1..120: mol_type = other DNA

SEQ ID NO: 29311 - DNA, 120 bp, synthetic construct; identical to SEQ ID NO: 8776
  source 1..120: mol_type = other DNA

SEQ ID NO: 29312 - DNA, 120 bp, synthetic construct
  source 1..120: mol_type = other DNA
gagcaggggtggtcagtgtaggagcacccagagggagcctggcagggcctggacatcctgtccaagctggccaggaggagtcctcagagccaaagcagtgtggagggtgggggtgcagag

SEQ ID NO: 29313 - DNA, 120 bp, synthetic construct
  source 1..120: mol_type = other DNA
ttccaggtgctcctgggaaccacgtggctgatcagacttgtgctttgggtcgaatgtcccagtgggggagtaacctcagggagcagaggaagggtcatggtggtggggatgaagcagcag

SEQ ID NO: 29314 - DNA, 120 bp, synthetic construct
  source 1..120: mol_type = other DNA
agggggtggacaacagactctggtcccagcgatgatgcttgagtataaaggacacagttggggtgttgtgggggccagggtcagacatcagagctggcctctgcctatgagacagggccc

SEQ ID NO: 29315 - DNA, 120 bp, synthetic construct; identical to SEQ ID NO: 8777
  source 1..120: mol_type = other DNA

SEQ ID NO: 29316 - DNA, 120 bp, synthetic construct
  source 1..120: mol_type = other DNA
ggccccagtcccagcagcgggactatggctgtggggagggaggaacccagggagggggcctgagcagggtctttggctgagtgagccctcaagggcctttgggtagggctaccagaggcc

SEQ ID NO: 29317 - DNA, 120 bp, synthetic construct
  source 1..120: mol_type = other DNA
gcctgtttgttgtgggctctgggggcctggggagggtgggctgggctgtccacatctggacaggtggaagaggatgggttctgggtggggctgacttcaggaggctggatgagaggcaat

SEQ ID NO: 29318 - DNA, 120 bp, synthetic construct
  source 1..120: mol_type = other DNA
agggtctgtgtgtggctttctctgtttgtgtctcccctggccctgggggccatgtggccatctcctggctctccggtcgctgaggatccacgggggtccctggagtctccggagcccgtg

SEQ ID NO: 29319 - DNA, 120 bp, synthetic construct
  source 1..120: mol_type = other DNA
gggcccacaggcccagaacgttggccccagggtggggctctgtgcgccttccctttcatgagttctgtggctcggcctcggggccttggaaaggaggaagtgaaactggaggagagcggc

SEQ ID NO: 29320 - DNA, 120 bp, synthetic construct; identical to SEQ ID NO: 8778
  source 1..120: mol_type = other DNA

SEQ ID NO: 29321 - DNA, 120 bp, synthetic construct
  source 1..120: mol_type = other DNA
tcccgccctggggcagccaccagcctgctttctgtttctgtggctctggctgtccagggcgtagccacactgcaggtggtcagcaggtggtcacctgtctgtgtctggccttggcgccat

SEQ ID NO: 29322 - DNA, 120 bp, synthetic construct
  source 1..120: mol_type = other DNA
ctacctctagtgtgtgcttaccagctaatggatgactgggttttcgaagcactgtctgttcctacctgggggcggggctgaggccaggggcccctccactccccaggtgcatctgtggga

SEQ ID NO: 29323 - DNA, 120 bp, synthetic construct; identical to SEQ ID NO: 8779
  source 1..120: mol_type = other DNA

SEQ ID NO: 29324 - DNA, 120 bp, synthetic construct
  source 1..120: mol_type = other DNA
agctggtggtctgaaagggcttcctggaggaggggcttccaggctgggctggaaggaaggaaggaggaggtagggtagagctggtgtggccagcaaaggcctgcccgagccttcgtgtcc

SEQ ID NO: 29325 - DNA, 120 bp, synthetic construct
  source 1..120: mol_type = other DNA
gtgccatttctgccaggcaggtgctgagagcagggcagggcaggctcatagcctggtgggaaaccccaaagttgatctggccgtgaggctgcctggaaggtggggtgcagggggccagct

SEQ ID NO: 29326 - DNA, 120 bp, synthetic construct
  source 1..120: mol_type = other DNA
gtcgtggaatagttctagtatctacaaaggaagagagtgtcacgactcagctcccggcatgcacaggcagatctgggctggtttcatgctgctttctggcactgtgtcttcctggccagg

SEQ ID NO: 29327 - DNA, 120 bp, synthetic construct
  source 1..120: mol_type = other DNA
ggaagaactcacctgtggtttcctccagccctgaccaggttaactgtgtgtgctccatggtggctgggagtttcctgggtaagtggtgtgaggcacaggcctgctgtcactcttccctcg

SEQ ID NO: 29328 - DNA, 120 bp, synthetic construct; identical to SEQ ID NO: 8780
  source 1..120: mol_type = other DNA

SEQ ID NO: 29329 - DNA, 120 bp, synthetic construct
  source 1..120: mol_type = other DNA
ctcggtggtctccaggagcatggtgtgtgtgtttatgggcagcattttatggtttcattatgtagattgcaggcagtttaagtctattcctcatcataataatattgagagaataagttg

SEQ ID NO: 29330 - DNA, 120 bp, synthetic construct
  source 1..120: mol_type = other DNA
ttattgttgccatcacatagggagtttctagtctatcatgttttccaggcactttcctggcgtctgcgaaagctgttaatttctgctacagcctgtggtcctgctacttctcgtgactgt

SEQ ID NO: 29331 - DNA, 120 bp, synthetic construct
  source 1..120: mol_type = other DNA
gcggggccctcctggcttctgtgggcgggccggctgccaggcggggggtgcgcacctcccgtgctcaggaagggtccttcaggtccgatgcctggcgtggttttacggtgaccatgtgga

SEQ ID NO: 29332 - DNA, 120 bp, synthetic construct; identical to SEQ ID NO: 8781
  source 1..120: mol_type = other DNA

SEQ ID NO: 29333 - DNA, 120 bp, synthetic construct
  source 1..120: mol_type = other DNA
tgtctagcaggaggatgttctgccccggccaactgacagggttggctcaactgcaggagtgggcacggcatgtcctttgctggttctgccatggggcgggtctgtggggggtccctgacc

SEQ ID NO: 29334 - DNA, 120 bp, synthetic construct
  source 1..120: mol_type = other DNA
tgtgtgtacatgtgtgtatgtgagtgcccacatgcacgggaatgtgtacacgcatgtgcgtgtttatgggtgagctgtgtgcttaagtgtgcatctgtatctgagtattatgtaagtgtg

SEQ ID NO: 29335 - DNA, 120 bp, synthetic construct; identical to SEQ ID NO: 8782
  source 1..120: mol_type = other DNA

SEQ ID NO: 29336 - DNA, 120 bp, synthetic construct
  source 1..120: mol_type = other DNA
caggtggcctgggacttgcctggttttaaatggagccccggtgctaacgtgagcccacccaggtgctcctgcccagccagggctgtctgtcagcaccacagcgtccaagttcaggtcctc

SEQ ID NO: 29337 - DNA, 120 bp, synthetic construct
  source 1..120: mol_type = other DNA
cgagaattagacgtgccctgggctccacatgcccgtctgcagctcgagaattagacgtgccctgggctccacatgcccgtctgcagctcgagaattagacgtgccctgggcttcatgtgc

SEQ ID NO: 29338 - DNA, 120 bp, synthetic construct
  source 1..120: mol_type = other DNA
ccaggcaggagggcagaccctacacagtgctgagctgtgcccccagggaagcctccaagatggtcctcatcccagcagccctgcccactgtctgcgcatccctggggtctgtgcgccacc

SEQ ID NO: 29339 - DNA, 120 bp, synthetic construct
  source 1..120: mol_type = other DNA
gcatagagccccctttctgctgtagtcccccttgcagtcccctctgccttttccactgcttggaaggcagagagaccctggccgcctcccttgtccctttatctgtcatgccagctgcct

SEQ ID NO: 29340 - DNA, 120 bp, synthetic construct; identical to SEQ ID NO: 8783
  source 1..120: mol_type = other DNA

SEQ ID NO: 29341 - DNA, 120 bp, synthetic construct
  source 1..120: mol_type = other DNA
ctgcacaccatccccgccgacctgccctgttctgggttcatggggctctgggaggctcacaagcatctgtctgcctcaggccattccacactccctgagggtgggaccccgtggctgcgc

SEQ ID NO: 29342 - DNA, 120 bp, synthetic construct
  source 1..120: mol_type = other DNA
gcccctgcgtgatggagacaccctcccactcgccttgccacacttcccagcagtctctcgaagcactggccgcgtggaaacaaatccttcaaggggatttgagggtccagctgtcactca

SEQ ID NO: 29343 - DNA, 120 bp, synthetic construct
  source 1..120: mol_type = other DNA
ggggagacagtgaccacttgcttggaggagggggcgctcaggtgggaggggcacagtgagaaggaggtaagctggtgctggcggggcaggcagggacccctcccagggctcacagcttcc

SEQ ID NO: 29344 - DNA, 120 bp, synthetic construct; identical to SEQ ID NO: 8784
  source 1..120: mol_type = other DNA

SEQ ID NO: 29345 - DNA, 120 bp, synthetic construct
  source 1..120: mol_type = other DNA
agggattccgagagcacgatgtttaaatgttgggggaaaaaatggatcaaagcgatgtgttcccagggagcccctgttttctcgtttcttttcgtacgcccagctttgcagtgccagaaa

SEQ ID NO: 29346 - DNA, 120 bp, synthetic construct
  source 1..120: mol_type = other DNA
ctggggtccggccggcaccgtgaacaccacgtgaacaccacgtcggaaatctgctgggcagggagatttcctcaaggcctcccagggaggagagccacttcctgggctgcaaagagggcc

SEQ ID NO: 29347 - DNA, 120 bp, synthetic construct
  source 1..120: mol_type = other DNA
acgtgtgcgtgcctgtgggtagctccgtgcgcacatgcgtacacatatgcctggtgtgtgtgtgcacacgtgtgtctgacgtgtgtgtgctttgcgtgttcttgcctgggaaggagttcc

SEQ ID NO: 29348 - DNA, 120 bp, synthetic construct; identical to SEQ ID NO: 8785
  source 1..120: mol_type = other DNA

SEQ ID NO: 29349 - DNA, 120 bp, synthetic construct
  source 1..120: mol_type = other DNA
agcctccactgcctgggtttctgctgcgccttcagcacacagcgaggcctcagtttccctcccagctcagagcaaggcctcagtttccctcccagcagcaaagtgagaccctgtagggag

SEQ ID NO: 29350 - DNA, 120 bp, synthetic construct
  source 1..120: mol_type = other DNA
tgtttttcacctgggacccgcagctgctctgatgaggagcctgctctgcgcacggcctggggcggtttcccgcagcaccatttctgccgctgccgggaaaagacgcagagcaaaggcacc

SEQ ID NO: 29351 - DNA, 120 bp, synthetic construct
  source 1..120: mol_type = other DNA
gcccgctgagggttgtcttcctccctgcctgcctcgccctgcctggtgagctcctatgggtctgacgaagccccgtcctgcacacttgcttcgggggcaactccccactagactggttgc

SEQ ID NO: 29352 - DNA, 120 bp, synthetic construct; identical to SEQ ID NO: 1715
  source 1..120: mol_type = other DNA

SEQ ID NO: 29353 - DNA, 120 bp, synthetic construct
  source 1..120: mol_type = other DNA
gttcctgtctgcactgagcccctggagctaggcccagaggacttgacagatgtgggccctctgtctgcacagcccccagggcacggggtggcctgcagctctgcccagccagacttcagg

SEQ ID NO: 29354 - DNA, 120 bp, synthetic construct
  source 1..120: mol_type = other DNA
ctggcctgcaggctttgggcgggtaagggtagcgaaggtgaaagtggaccaggggcaggtggagcagggtaggcccaagtgtctgtctggggcagctggggacacccaggtgggctgaac

SEQ ID NO: 29355 - DNA, 120 bp, synthetic construct; identical to SEQ ID NO: 8787
  source 1..120: mol_type = other DNA

SEQ ID NO: 29356 - DNA, 120 bp, synthetic construct
  source 1..120: mol_type = other DNA
tcacccactctgcacctgagagagggcggtcaggtgactggtaccccctgaagacctgggaccaggccccctgcctctgggaatccatcaaaatgctcccttctgaggccgctttgctgg

SEQ ID NO: 29357 - DNA, 120 bp, synthetic construct
  source 1..120: mol_type = other DNA
ggatgcacagctgggggcaggggcgctgctgaagccacagtctcagagcctgaggcccacggggcatggcatgaagacccggtggttctgttcccccgggacagccttggtccagcctca

SEQ ID NO: 29358 - DNA, 120 bp, synthetic construct
  source 1..120: mol_type = other DNA
agctcaggctcagggcagcaggggcgctcagctgggccgcggctccacggtgttaagggattctagaaatttcctgctgtgccaggctgcagcagagactccggccccaccaggcttcct

SEQ ID NO: 29359 - DNA, 120 bp, synthetic construct
  source 1..120: mol_type = other DNA
gccttgttggagtggaggctggcgctgccctgccccacagggtggctggcagggctcagcagttgcctggcctgtgggggcagaggacctggggagacatgctgagccctcccagcgaga

SEQ ID NO: 29360 - DNA, 120 bp, synthetic construct; identical to SEQ ID NO: 8788
  source 1..120: mol_type = other DNA

SEQ ID NO: 29361 - DNA, 120 bp, synthetic construct
  source 1..120: mol_type = other DNA
gggtggctagcaactgtcttctagatgtagtaccccaatcccccccagtccctccctttacctcacagggcatcctccctgcgtgtgagtctggagccaaatttctcctctatgtaagga

SEQ ID NO: 29362 - DNA, 120 bp, synthetic construct
  source 1..120: mol_type = other DNA
tcatcatatgaatttgagggcaacccaggggtctccaaaccatggcccacagggtggctccctgtgtgtgtaaataaagctttattagcacacagcaccacatacttgagggcctaatgc

SEQ ID NO: 29363 - DNA, 120 bp, synthetic construct; identical to SEQ ID NO: 8789
  source 1..120: mol_type = other DNA

SEQ ID NO: 29364 - DNA, 120 bp, synthetic construct
  source 1..120: mol_type = other DNA
tttgatttaatctcaggcttgtcagaacgagcagctcccaggcaccctctgccaggtcagcagtggctttcatcttctgccatttgctctgcacgtttctctctatatgcaaaaacctat

SEQ ID NO: 29365 - DNA, 120 bp, synthetic construct
  source 1..120: mol_type = other DNA
ggcctcctggcctcaagtgttcccacttcagcctcctgagcagctgggactgtgggtgcgtgccaccatgccccgctaatttttgtattttttgtagagatagggttttgccatgttacc

SEQ ID NO: 29366 - DNA, 120 bp, synthetic construct
  source 1..120: mol_type = other DNA
actgcactcagcctgctttgtttttatcctgagtcatttgagagtaagttggaggcagtatgaccgtttctccgtataaagcccgtgtatatcctctggaatgaggaccttcaacttagc

SEQ ID NO: 29367 - DNA, 120 bp, synthetic construct
  source 1..120: mol_type = other DNA
gcttctttgacctggagcagccctgcccggccttcccttcttggtctctctcttgggcagggaagggcggtggacatggaggcttggggacagtcccctggccccacggatgttgtgtgg

SEQ ID NO: 29368 - DNA, 120 bp, synthetic construct; identical to SEQ ID NO: 8790
  source 1..120: mol_type = other DNA

SEQ ID NO: 29369 - DNA, 120 bp, synthetic construct
  source 1..120: mol_type = other DNA
tggaggggccctacggtgaatcgttttctgtaacaaaggcttcctctgtgcagcccacacacgggcctcacgttatcttctgcaggccagaattgtcatatatatcaagtttgttcagaa

SEQ ID NO: 29370 - DNA, 120 bp, synthetic construct
  source 1..120: mol_type = other DNA
aggaggtagaggaaactgcaagattttttaaaccttctccaaaaacacgtaacccgattctgtccaagcgatttgtgagaatggggttgacacccctgggctggaacctgggaaccacca

SEQ ID NO: 29371 - DNA, 120 bp, synthetic construct
  source 1..120: mol_type = other DNA
ggcagccgaggcatgagtggatgatgtcccgtcggcagcccgtggtccctctggggggcaaggtgcctgttccccattgctcctccaccagaacacctcctccagatctccgccaggtgc

SEQ ID NO: 29372 - DNA, 120 bp, synthetic construct; identical to SEQ ID NO: 8791
  source 1..120: mol_type = other DNA

SEQ ID NO: 29373 - DNA, 120 bp, synthetic construct
  source 1..120: mol_type = other DNA
ccgccatggtgctctgctctctgcagccctgggtctggttggaagttgcatccctggtgaagggcggccgcggctttccagctctcccaggccagttcccgtgttttctctcccgccttc

SEQ ID NO: 29374 - DNA, 120 bp, synthetic construct
  source 1..120: mol_type = other DNA
tttatgttctgcctgagggctggaaagagcctcatcagtgagtgccacgttcggtgggggtctctggtgcaggggagccggcgggccgggttgggttatgtccttgttttcacatctgac

SEQ ID NO: 29375 - DNA, 120 bp, synthetic construct
  source 1..120: mol_type = other DNA
gggctcctagggggctgctagggaagtcattgggggataataggatccaccctgtggggcccactggccatggagtactgcacagtggggtccacccgctgtgtccctgaacaaggaggt

SEQ ID NO: 29376 - DNA, 120 bp, synthetic construct; identical to SEQ ID NO: 8792
  source 1..120: mol_type = other DNA

SEQ ID NO: 29377 - DNA, 120 bp, synthetic construct
  source 1..120: mol_type = other DNA
aaactggccaacgggatgcctggtgggatgactggggtacctggggccaggggcggccagcagcctcctcagtagcttgtgggagatgctctcaaccccaaggtcagctccagctggcct

SEQ ID NO: 29378 - DNA, 120 bp, synthetic construct
  source 1..120: mol_type = other DNA
tgggcctcacagctttgtgccctctagggtggcaatgggaggcagagagcacagcctggggacttgctgtgaggggactgcatttagatttttaggtgaagccaatccctgttgggctga

SEQ ID NO: 29379 - DNA, 120 bp, synthetic construct
  source 1..120: mol_type = other DNA
aaaacacactcgtgtccagcccagatgccttatggagaagaggatgcacaggcacacacgcacagacatatgtgcacggatgggcgtgtggacgtatgcacacataggtacccatgtgga

SEQ ID NO: 29380 - DNA, 120 bp, synthetic construct; identical to SEQ ID NO: 8793
  source 1..120: mol_type = other DNA

SEQ ID NO: 29381 - DNA, 120 bp, synthetic construct
  source 1..120: mol_type = other DNA
tcttctcactgaccgttttctgaaactggctggggagggtcagggatggctgctgtcctcgggggagggactgagctgggcccttttcgttggttagttctcagtgtggcctacccagcc

SEQ ID NO: 29382 - DNA, 120 bp, synthetic construct
  source 1..120: mol_type = other DNA
tcccagaaagcccccttctgctcaagttctcttgcttcatctcaggctcaggtgttttgagtttttttttttttttaaatgaggacatctgttagaccacttaggagttctagaaccttt

SEQ ID NO: 29383 - DNA, 120 bp, synthetic construct
  source 1..120: mol_type = other DNA
ctcaggctcaggtgttttgagtttttttttttttttaaatgaggacatctgttagaccacttaggagttctagaacctttggaaaaccccctctcatcccgggagtttgtaagaatttgt

SEQ ID NO: 29384 - DNA, 120 bp, synthetic construct; identical to SEQ ID NO: 8794
  source 1..120: mol_type = other DNA

SEQ ID NO: 29385 - DNA, 120 bp, synthetic construct
  source 1..120: mol_type = other DNA
atgtgtgaaattcaggtcatatcaggacctcagttcctggggctgtgccgagggtgtggggacattgggcatgaaggttctcagtccagagccaatggccaagagggcaaaagggtgttg

SEQ ID NO: 29386 - DNA, 120 bp, synthetic construct
  source 1..120: mol_type = other DNA
cgccatagcctcagttttatttattctgctcactcaaacaaaaaatcagctttgttgaggtataattggcatagagtggaaggccttgtttaaaatgtaggatttgacaaatctggacat

SEQ ID NO: 29387 - DNA, 120 bp, synthetic construct
  source 1..120: mol_type = other DNA
ctggtctgtcttgtcagtgtagacggttggcgttttctggggcttgttgtcagtgcaatcatacagtgtgtggtttttattgtctggttccatatttgagagtcatccaggctgtggcat

SEQ ID NO: 29388 - DNA, 120 bp, synthetic construct; identical to SEQ ID NO: 8795
  source 1..120: mol_type = other DNA

SEQ ID NO: 29389 - DNA, 120 bp, synthetic construct
  source 1..120: mol_type = other DNA
gtgacatatctttttaaatgtttcacccattgtaaaattgggctgtttgtcatctgagttgtaaaagttctttgtatattctggttacatagatatttgttttacacatgtattctctag

SEQ ID NO: 29390 - DNA, 120 bp, synthetic construct
  source 1..120: mol_type = other DNA
cctgggctccgaggatcctcccacctcagcctcccaagtagctgggactataggcatgtgccaccacaggtgctaactttttaaagttcttgtacagacagggtctcactttgttgccca

SEQ ID NO: 29391 - DNA, 120 bp, synthetic construct
  source 1..120: mol_type = other DNA
caattttatgaagtcaaatatagctttttccttttaaatatgtttcatgcttttcacattctatttaggaaatgcttaccaaacacactcttactaagattttctgctagtagttttata

SEQ ID NO: 29392 - DNA, 120 bp, synthetic construct; identical to SEQ ID NO: 8796
  source 1..120: mol_type = other DNA

SEQ ID NO: 29393 - DNA, 120 bp, synthetic construct
  source 1..120: mol_type = other DNA
agtcacacactgggattgttacagccctataatacggttaaaataagttagggtaatttagccaactttgttttgctatttcaagttgtgttggttgttcggggtcctttgcatttacat

SEQ ID NO: 29394 - DNA, 120 bp, synthetic construct
  source 1..120: mol_type = other DNA
gatcaatgagattatctatctcatatatatatatgtgtgtgtgtgtatatatatatgtgtgtgtgtgtatatatatgtgtatatatatatgtatatatgtgtatatatgtatatatctat

SEQ ID NO: 29395 - DNA, 120 bp, synthetic construct
  source 1..120: mol_type = other DNA
tggttatatatctcttataagggttatatatctcatatacatatgaggttatataccacttatttagatttttaacttctgtcagagatgtttcatagtttttagtgtataggtcttgta

SEQ ID NO: 29396 - DNA, 120 bp, synthetic construct
  source 1..120: mol_type = other DNA
tcatttgttccagtggcttttgaaaaaatgaattccattgatttccttatatgaatgatgttttctgaacatagagacagttttacctctttttttcaaatgtggacgcctatttgtttc

SEQ ID NO: 29397 - DNA, 120 bp, synthetic construct; identical to SEQ ID NO: 8797
  source 1..120: mol_type = other DNA

SEQ ID NO: 29398 - DNA, 120 bp, synthetic construct
  source 1..120: mol_type = other DNA
gataattacactgattcattttcacaggttctgtattcctggataaaccacacttggtcatgctctagtattctttttgtatatcactggacttgacttgttaaaattttgctaacaacc

SEQ ID NO: 29399 - DNA, 120 bp, synthetic construct
  source 1..120: mol_type = other DNA
tgtttggtggactccatcaggaaagttgtttaggtaggcctggactttgcttgatgagaagattgttaactagattttaaattgacttaatagttttattcaggtgattgataatagtta

SEQ ID NO: 29400 - DNA, 120 bp, synthetic construct
  source 1..120: mol_type = other DNA
ggtgattgataggtgataattatattcaggtgattggtaattatattcaggtgattgataattctatttaggtgattgataattctattcaggtgattgataatagtggtattcaggtga

SEQ ID NO: 29401 - DNA, 120 bp, synthetic construct; identical to SEQ ID NO: 8798
  source 1..120: mol_type = other DNA

SEQ ID NO: 29402 - DNA, 120 bp, synthetic construct
  source 1..120: mol_type = other DNA
gttcttttttttctcgtttcttaaggtggaagctgaggtcattgaatagaaatttttttttcctttctaatacaggcacttggtggtataaacatccacaaattttgtgtttttttatcc

SEQ ID NO: 29403 - DNA, 120 bp, synthetic construct
  source 1..120: mol_type = other DNA
tttatggctatagaaacacttaatataatttggtctcttaaaatatattaagacttgatttagggcccagaatatgatttatcttggtaaatactccattgtgtgcttggaaagagtgtg

SEQ ID NO: 29404 - DNA, 120 bp, synthetic construct
  source 1..120: mol_type = other DNA
ctattaattcattcttgggagaaggatgttagaatctccaactgtatttgtggatttctctctttattcttcagttctttattctttattagttttttgtttaatgtattttattttttg

SEQ ID NO: 29405 - DNA, 120 bp, synthetic construct; identical to SEQ ID NO: 8799
  source 1..120: mol_type = other DNA

SEQ ID NO: 29406 - DNA, 120 bp, synthetic construct
  source 1..120: mol_type = other DNA
caaactatttttctcctgaaaagtacagctaatttgcatttattcataggactgacattcttggtctcaactctgtcattgtcttttataattacgtgtattttgtcacggttgctgttg

SEQ ID NO: 29407 - DNA, 120 bp, synthetic construct
  source 1..120: mol_type = other DNA
cagtggcatgatctcagctcactgaaacccccatctcccagggtttaagtgattttcgtgcctcagcctcccaagtagctgggattataggtgggcgccaccacacctggctaatttttt

SEQ ID NO: 29408 - DNA, 120 bp, synthetic construct
  source 1..120: mol_type = other DNA
gtgcccagcctgtatttttgtcctaatagttacctttatacatatgcctttcaaagtttccttggtccctggtttctcatttaaccctttactgtctggcttaccgtttttattaatctg

SEQ ID NO: 29409 - DNA, 120 bp, synthetic construct; identical to SEQ ID NO: 8800
  source 1..120: mol_type = other DNA

SEQ ID NO: 29410 - DNA, 120 bp, synthetic construct
  source 1..120: mol_type = other DNA
atggcacgtgccaagacccggatggggcgtgtgcctggcgcgggtggagggagctgtgaggagcctgtagcattcagagacaggggagcagggagcggtgggggatgaggtcagggaggt

SEQ ID NO: 29411 - DNA, 120 bp, synthetic construct
  source 1..120: mol_type = other DNA
tagaggccaggcccaggataaggtggcggcaggcaggtctctaagcagtggcagctcagacccgaggtcccagggtcatgcgtgtttgtcctgattgcacgagtcgtgtgagcacagaaa

SEQ ID NO: 29412 - DNA, 120 bp, synthetic construct
  source 1..120: mol_type = other DNA
catgggatgggaatatccatgcgtataatcggtcaggttagttgctgtattctgacttatttgaaagatttcatagcgaacaaagaaaaattccggtataactataatttttccatagca

SEQ ID NO: 29413 - DNA, 120 bp, synthetic construct; identical to SEQ ID NO: 8801
  source 1..120: mol_type = other DNA

SEQ ID NO: 29414 - DNA, 120 bp, synthetic construct
  source 1..120: mol_type = other DNA
cgtacacacacagacacacagcctgacttggcccaggtgggtgggtgtctgaggagaagttcgccattgtcgactttggggtaaagtgaggacctgtctggcgggaataaaggggcccta

SEQ ID NO: 29415 - DNA, 120 bp, synthetic construct
  source 1..120: mol_type = other DNA
ggggctgtctccagggtgggttctagagtacatccagcttccacccaagggagagtggctgggtggagagggggcaggctgagatctgagaagccaggctagggggttgtggagcaaatg

SEQ ID NO: 29416 - DNA, 120 bp, synthetic construct; identical to SEQ ID NO: 8802
  source 1..120: mol_type = other DNA

SEQ ID NO: 29417 - DNA, 120 bp, synthetic construct
  source 1..120: mol_type = other DNA
gtgtcaccgggtgtcccggcgtgggcaggtcctgttgtggagcctcgtgacctgctcatagcacagctgggacacttccagtgactgctctgcgaggcccggggtaggggcgtggggggg

SEQ ID NO: 29418 - DNA, 120 bp, synthetic construct
  source 1..120: mol_type = other DNA
acgtggcccccagtcatgagtaccccaggcccctatgcgcctccttccccatgactggccctgggtggcggagagacccctgggcaggacacccctccctggcttttccttctgcaccac

SEQ ID NO: 29419 - DNA, 120 bp, synthetic construct
  source 1..120: mol_type = other DNA
caggggactgtttgggcctcgagagggacggaccccagaactggaccccaatgtgcaggtctgggtgtggatgtatctgtatgtctttgcggagctcagatgagagatgctcagagttgt

SEQ ID NO: 29420 - DNA, 120 bp, synthetic construct; identical to SEQ ID NO: 8803
  source 1..120: mol_type = other DNA

SEQ ID NO: 29421 - DNA, 120 bp, synthetic construct
  source 1..120: mol_type = other DNA
gctggaaagcagccaagggcactgcccgccctgggagctgatgcctgacatgcatcctcgcctaggccagagtgccaggcagggtaggggaacaaatgccaacacgtgagctgagtgacc

SEQ ID NO: 29422 - DNA, 120 bp, synthetic construct
  source 1..120: mol_type = other DNA
gaagggcagggcagcaccaggctcagcccaggaccagagcgcaaatagggctggagtcccgagtacaaggcatggacaggagccaggcttcacctagcacctggctccccgggggcccag

SEQ ID NO: 29423 - DNA, 120 bp, synthetic construct
  source 1..120: mol_type = other DNA
ggaggcaggggaggctgtgctgagctcagtgggcttggtggggtcatagctgcctctccctctaaatagattaactaaaaagtattgttgactgactcatgcatttcttaggttttctta

SEQ ID NO: 29424 - DNA, 120 bp, synthetic construct
  source 1..120: mol_type = other DNA
cagttcgatgagtcctggcaaacatttatggtcctgtaaccacccccaaagtcaagatccaaggtgttcccatcacccgaaagctccctggtacccactggcggctagcccctccccgca

SEQ ID NO: 29425 - DNA, 120 bp, synthetic construct; identical to SEQ ID NO: 8804
  source 1..120: mol_type = other DNA

SEQ ID NO: 29426 - DNA, 120 bp, synthetic construct
  source 1..120: mol_type = other DNA
agatgcatattttcctttcgaagaaactgccaaagcattttgcaaaatggtaggcccgttttccactcttaccatcaatgtacgagcattctggctcctatggattctcaccagcactta

SEQ ID NO: 29427 - DNA, 120 bp, synthetic construct
  source 1..120: mol_type = other DNA
ctttgatggaggatctgtccagtttgttgctggttttaacaattaggttgtcttcttagaataatcatgtgagttgtaagagttgtgtctatgttctggatatgagtccttcaccagatc

SEQ ID NO: 29428 - DNA, 120 bp, synthetic construct
  source 1..120: mol_type = other DNA
ttttttctttagggttcatgttctttgtgttctgtctaagaaatattcgcctaatccaagattacaaagttttttctcctgttttctgtagaaattttatagtttcacatttcttgttta

SEQ ID NO: 29429 - DNA, 120 bp, synthetic construct; identical to SEQ ID NO: 8805
  source 1..120: mol_type = other DNA

SEQ ID NO: 29430 - DNA, 120 bp, synthetic construct
  source 1..120: mol_type = other DNA
gaattttgattggcattgcattggatatgtagataaatttggatctcatacacgtcttagtaataccgagttttctgatccacgaacacggtctctctccccagtgcctcatgcacgtct

SEQ ID NO: 29431 - DNA, 120 bp, synthetic construct
  source 1..120: mol_type = other DNA
acgtcttagtaataccgagttttctgatccacgaacacggtcttgctccccggtgtcttagatatttttcaacaccactcatcaggattgtgtaatttttagtggtgtgaaacttgctag

SEQ ID NO: 29432 - DNA, 120 bp, synthetic construct
  source 1..120: mol_type = other DNA
cttgcgtcctgtgactttgctcatgttacttattagtttgagaaggtttcttgttcatctgtttttggggttttttttgttttttttttttttgtttttttgtagattctttaggatttt

SEQ ID NO: 29433 - DNA, 120 bp, synthetic construct; identical to SEQ ID NO: 8806
  source 1..120: mol_type = other DNA

SEQ ID NO: 29434 - DNA, 120 bp, synthetic construct
  source 1..120: mol_type = other DNA
aatcatatcatttgcaacaatctcaatcaaattctttcttaatttgctagtgtggggaatcgcactgattgactttcaaatagcaaagcaaacttgcttcccttacacaaagcccacttg

SEQ ID NO: 29435 - DNA, 120 bp, synthetic construct
  source 1..120: mol_type = other DNA
ggagcgcaatggcgtgatctcggctcactgcagcctctgcctcccaggctcaagtgattctcctgcctcagcctcccgagtagctgggattacaggcgcccgccaccacacccagctaat

SEQ ID NO: 29436 - DNA, 120 bp, synthetic construct
  source 1..120: mol_type = other DNA
accatgcccagctgtcatgatgcgttttaaaacacctttttggatgtgactgacttcggttgtgtgtagaacttccacgcccacgctcacgagggcgtcacctgccatgtgttggctgtt

SEQ ID NO: 29437 - DNA, 120 bp, synthetic construct; identical to SEQ ID NO: 8807
  source 1..120: mol_type = other DNA

SEQ ID NO: 29438 - DNA, 120 bp, synthetic construct
  source 1..120: mol_type = other DNA
cagacctctgaatgcagccatctgcagggggaccctcctcagtgccctgagagggggcctgggctgggtggtctctgctgctggccatcccactgggcactgcctccccagggattctgc

SEQ ID NO: 29439 - DNA, 120 bp, synthetic construct
  source 1..120: mol_type = other DNA
tcccttctcagaggaatgaaatttaagaagacaggccctacaatttcacgacaagtctgcttttgactctcccgtttactgtgtaaacttcagccctaaaacaacatacatccttctgaa

SEQ ID NO: 29440 - DNA, 120 bp, synthetic construct
  source 1..120: mol_type = other DNA
gggaaaacaactgtttaaattcaccgcctgttattaaaatctctagatttgcagaatcagagtgaggtactcagcagtcagaaaacagactagacaggcccgtgtgcacacacgcgctga

SEQ ID NO: 29441 - DNA, 120 bp, synthetic construct; identical to SEQ ID NO: 8808
  source 1..120: mol_type = other DNA

SEQ ID NO: 29442 - DNA, 120 bp, synthetic construct
  source 1..120: mol_type = other DNA
ctcgtttaactggcctggagacggaaacagccctgcctggggaagatgggggatttgctttaaatacgtgtaaagctgcctgccaggcggctaatggtgtctgcagccaggcgtgggcgt

SEQ ID NO: 29443 - DNA, 120 bp, synthetic construct
  source 1..120: mol_type = other DNA
aggattcagggcctgatttgcgggcagccccacctgcctttttgactgttcagagccctgagtgcctcccatatgcccacattttcctgcccctgggccttttcttctggtcatcggcct

SEQ ID NO: 29444 - DNA, 120 bp, synthetic construct; identical to SEQ ID NO: 8809
  source 1..120: mol_type = other DNA

SEQ ID NO: 29445 - DNA, 120 bp, synthetic construct
  source 1..120: mol_type = other DNA
cgacgcatcgcaccagaccctgcctccgcctccatacagcgccccccggccggcaagtccatgtccaggtttcccgtttgataagaacaccagttgtatgggaataggggcccaccctaa

SEQ ID NO: 29446 - DNA, 120 bp, synthetic construct
  source 1..120: mol_type = other DNA
tagccggtaggaatacctacctgtcagaggattctttaatccaagggtccgtaaaccatagcctacaaacctggctgctgatctgtataaataagatttgattagcacacggccacgtgt

SEQ ID NO: 29447 - DNA, 120 bp, synthetic construct
  source 1..120: mol_type = other DNA
agagaaaaagcttgtcaagccctgttctaaactatgaagacaatgttggaggttgctttctatacccacagagccgttgatggggtgaagggagaggggtgaaatgcagtcacacgcaaa

SEQ ID NO: 29448 - DNA, 120 bp, synthetic construct
  source 1..120: mol_type = other DNA
caacttcatgaggatcagaacatggataacatgtggctcaactaaacaaccaaaagcaaaagggagaagtcaacagagtcaaatagcaaatataaggacagaaagagtcaaatcaaatgc

SEQ ID NO: 29449 - DNA, 120 bp, synthetic construct; identical to SEQ ID NO: 8810
  source 1..120: mol_type = other DNA

SEQ ID NO: 29450 - DNA, 120 bp, synthetic construct
  source 1..120: mol_type = other DNA
gaaggttaaatatgataacgggaggagattttaatgtacctcttttggaataggacagttctagtgggcacaaaataagtgaggacatggacaggtaaatgttgtaatcatgagcaattt

SEQ ID NO: 29451 - DNA, 120 bp, synthetic construct
  source 1..120: mol_type = other DNA
ctggcagggctcagtgggacggctcatctcccctctgcatagtatcagctggggctggagcctccacagcattgcatctacatggctggtaaggctcctgttcatgagggcttctccaag

SEQ ID NO: 29452 - DNA, 120 bp, synthetic construct; identical to SEQ ID NO: 8811
  source 1..120: mol_type = other DNA

SEQ ID NO: 29453 - DNA, 120 bp, synthetic construct
  source 1..120: mol_type = other DNA
atgagaaataaatgattaaaagattggggaagaaaaatcccttacctatttgggaattaaacaacactctcctaaatagccagaaagaagagattgatgtgggaagtgcgggccctgtag

SEQ ID NO: 29454 - DNA, 120 bp, synthetic construct
  source 1..120: mol_type = other DNA
ctggtggcttcactgtgtttgcaaatgttgtcccccacgtggattgaaattcatctattgcctgaaagtaatgaagtatgtgccttgcacactgtgtaagcatacgtgtttattcagtgc

SEQ ID NO: 29455 - DNA, 120 bp, synthetic construct
  source 1..120: mol_type = other DNA
agagactagatgggccagcctgtgggcactctgcctagcgccatctgcctctcccaccccaggcaggtgtcaggtggctgctgcgccctgtgtccgcctcctgaccttgagaacacccag

SEQ ID NO: 29456 - DNA, 120 bp, synthetic construct
  source 1..120: mol_type = other DNA
cccccgtaaggcaccggcagtacatgtgaaattaaaattactgagaggccccactctcctcccctccatgggtgggcagccttcatggggaggccaaggcccggaagccggcagtcctgg

SEQ ID NO: 29457 - DNA, 120 bp, synthetic construct; identical to SEQ ID NO: 8812
  source 1..120: mol_type = other DNA

SEQ ID NO: 29458 - DNA, 120 bp, synthetic construct
  source 1..120: mol_type = other DNA
agaggtgcttcccgggaagcccgtggagaggatgcattcgacacccaaggccttatggaatcagtcctggggcctggagggtcgtagagaaatgtgtgaacatggctccccttaggccag

SEQ ID NO: 29459 - DNA, 120 bp, synthetic construct
  source 1..120: mol_type = other DNA
tttagcctcctgagagtctccccagacagcccacaggggacactgggcctcatgccgcctgtcaggatggtgtccgggatgtggggaccagacgacagctgtcacccacttgcagggccc

SEQ ID NO: 29460 - DNA, 120 bp, synthetic construct; identical to SEQ ID NO: 8813
  source 1..120: mol_type = other DNA

SEQ ID NO: 29461 - DNA, 120 bp, synthetic construct
  source 1..120: mol_type = other DNA
gtcttcctgcagggccaggacccccagagtgttccagtgacttcagagaggggcagccagaccaggaggagctccagaggtgccctgtggggagaggcagcgtcccaaacacgggggagg

SEQ ID NO: 29462 - DNA, 120 bp, synthetic construct
  source 1..120: mol_type = other DNA
ggggtgatgtccatcctggggaggggtgacatccatcctggggggacggaggcgtgacgtccatccttgggggatgggggggtgacgtccatcctgggggagtgggggcggtgacgtcca

SEQ ID NO: 29463 - DNA, 120 bp, synthetic construct
  source 1..120: mol_type = other DNA
gactggggggtgacgtccatcctggggggacggtgggggatgtccatcctggggggacggggggtgacgtccatcctgggggcgggtgatgttcatccttgggggacgggggaaggtgat

SEQ ID NO: 29464 - DNA, 120 bp, synthetic construct; identical to SEQ ID NO: 8814
  source 1..120: mol_type = other DNA

SEQ ID NO: 29465 - DNA, 120 bp, synthetic construct
  source 1..120: mol_type = other DNA
tcactgcagggagagtgaggctgcgcggtgccctgcaggacagataggaactcccaggcctgtaatcccagcactttgggaggccgaggcgggcggatcacgaggtcaggagatcgagac

SEQ ID NO: 29466 - DNA, 120 bp, synthetic construct
  source 1..120: mol_type = other DNA
ccccagggggtggagcctgcagtgagccgagattgcgccactgcactccagcctgggcgacagcgagactccgtctcaaaaaaaaaaaaaaagaaaaaaagaaaaaaaaggaactcccag

SEQ ID NO: 29467 - DNA, 120 bp, synthetic construct
  source 1..120: mol_type = other DNA
gtgcagcatgagagtctgtaccccacctgtactcaggaccctgccccccgaggacaaggtcgcttccctcttgagcacatgggacaccaccttcctgctacactattcccatgccctttc

SEQ ID NO: 29468 - DNA, 120 bp, synthetic construct; identical to SEQ ID NO: 8815
  source 1..120: mol_type = other DNA

SEQ ID NO: 29469 - DNA, 120 bp, synthetic construct
  source 1..120: mol_type = other DNA
ccttgggcgggcagggccttgggtggccagggcctcaggagggacacagagggccccactcaaggtcacgggctgcacgttccatggggcctggggaagcagccgagcagaaggatgcag

SEQ ID NO: 29470 - DNA, 120 bp, synthetic construct
  source 1..120: mol_type = other DNA
gccggaccccgactgtgccaccctcagcccagtggatggtgcatctcacctgggcctggccggctgcactgtggcgcctgccccaggccaggctaccttgggcggggtggggactggtac

SEQ ID NO: 29471 - DNA, 120 bp, synthetic construct
  source 1..120: mol_type = other DNA
caggcaggccctgggacaaagggcgctttgagctgcctgagtgcctgcattgccctccggccagctgaccctccccggagccgaggctggctctctctgtggcttatcagggccgggccg

SEQ ID NO: 29472 - DNA, 120 bp, synthetic construct
  source 1..120: mol_type = other DNA
tgggagggggtgagaccctaatcccgggtccccacagcaccctcagcctaacccctgtgtccacccctcttcagagtctccaggccccatcttggcctgatgaggcctcattgtctccta

SEQ ID NO: 29473 - DNA, 120 bp, synthetic construct; identical to SEQ ID NO: 8816
  source 1..120: mol_type = other DNA

SEQ ID NO: 29474 - DNA, 120 bp, synthetic construct
  source 1..120: mol_type = other DNA
cctttaaagatactgtagagcagtaacatcagagacaccaaaatagacaaaagagataatagaagagtaatatcagagacactaaagtcctcgcgataagggtctgcgaggcttccttta

SEQ ID NO: 29475 - DNA, 120 bp, synthetic construct
  source 1..120: mol_type = other DNA
cttctctagggtcctaaattatgtggttccagcagcatggaacttcaaaacacattgaaccccagaaaatcttcgctatgttggagattcgccggctgataaaagcaaaacaatagataa

SEQ ID NO: 29476 - DNA, 120 bp, synthetic construct
  source 1..120: mol_type = other DNA
ctttccccgctctgttcactcggagactaaaaatcccagataagcacctgctttgctagacccttgctggccctccggcttcgggcaggtctcctctttatgccactgtaaccccacaac

SEQ ID NO: 29477 - DNA, 120 bp, synthetic construct; identical to SEQ ID NO: 8817
  source 1..120: mol_type = other DNA

SEQ ID NO: 29478 - DNA, 120 bp, synthetic construct
  source 1..120: mol_type = other DNA
tgtcttcatcctgagagggctcaaggtctgcatgccattttgcaattgacaaatggcttgtgcttagctatttcgttgaatgctgaactaacaatagtcagtgaagattaagaactaaag

SEQ ID NO: 29479 - DNA, 120 bp, synthetic construct
  source 1..120: mol_type = other DNA
accgccacgggccagggcccctcgaggcactcatttcagtatcagagaacacacataacgtaaaattcaccatttcagccatttcagccatttcagccatttcacagcgtgcaatttggt

SEQ ID NO: 29480 - DNA, 120 bp, synthetic construct
  source 1..120: mol_type = other DNA
tctttttaaacattatggtgaaatataaggccaggcgcggtgactcatgcctgcaatcccagcactttggaaggctgaggcgggcggatcacctgaggtcaggagtttgagaccagcctg

SEQ ID NO: 29481 - DNA, 120 bp, synthetic construct; identical to SEQ ID NO: 8818
  source 1..120: mol_type = other DNA

SEQ ID NO: 29482 - DNA, 120 bp, synthetic construct; identical to SEQ ID NO: 1745
  source 1..120: mol_type = other DNA

SEQ ID NO: 29483 - DNA, 120 bp, synthetic construct
  source 1..120: mol_type = other DNA
ggttcccctttttggctgttgtgaatgttgctgctgtggacatgggtgtgtatggatctcctttaaagagaccggggacagactccaaagtggaattgctgggtcatacagtaattctgt

SEQ ID NO: 29484 - DNA, 120 bp, synthetic construct
  source 1..120: mol_type = other DNA
agcacacaaggtcccaacttctccggatccttgggagcacttgtcactctgtttggggtggcagccaccctaatggatgagaggtggcatctcgttgtggtcttgatttgcatttccctg

SEQ ID NO: 29485 - DNA, 120 bp, synthetic construct; identical to SEQ ID NO: 8819
  source 1..120: mol_type = other DNA

SEQ ID NO: 29486 - DNA, 120 bp, synthetic construct
  source 1..120: mol_type = other DNA
tgtggagtgcagtggcatcagccaaggctccgaggcgtttcttcccacttcacatgtcttttctgttgtttctgcgaaggtgtctcagggaggggcagaacccatggggtttggcttcct

SEQ ID NO: 29487 - DNA, 120 bp, synthetic construct
  source 1..120: mol_type = other DNA
caggccagacccagctctccagcttcccggctgcccactagatgaccaccaaggcagggcggctggtggtgctgacggctctgtgaggcccaggcctgtcttccccacctcaccccacag

SEQ ID NO: 29488 - DNA, 120 bp, synthetic construct
  source 1..120: mol_type = other DNA
ttgccaagggtcctccagcctttggcctgcacccactcatctggcagtaacagggccacttccagaaccaccaccatgcccaggtcatgtctgtgcatgagagtggtcagccctccatgg

SEQ ID NO: 29489 - DNA, 120 bp, synthetic construct; identical to SEQ ID NO: 8820
  source 1..120: mol_type = other DNA

SEQ ID NO: 29490 - DNA, 120 bp, synthetic construct
  source 1..120: mol_type = other DNA
ctcttcttctcgtatctacggggcagagctcagggccgcactccatcagcatcccgggccattgcatccttgaccccggggggcttgcaggcaccacatagatcttgtgagaggcgcttt

SEQ ID NO: 29491 - DNA, 120 bp, synthetic construct
  source 1..120: mol_type = other DNA
ttgggggtgatgggggtgctgagctggcctgagaagggtggggtaacctagggggtggagtgggggagggagagagcactcctgacacagggtcctgaggaggcaggggtgccccaggga

SEQ ID NO: 29492 - DNA, 120 bp, synthetic construct
  source 1..120: mol_type = other DNA
cagctgcttgagcaaggtgggcaagggagaagtaccaaatgtgtgcaggttctggggaggagcttgaggcccctttagttcacctttggaacttaggaccaagtctgcaaatacagatga

SEQ ID NO: 29493 - DNA, 120 bp, synthetic construct
  source 1..120: mol_type = other DNA
tcaggggtgggccatggcatggcgtgggggaccagccctcctccctgtccccagctgagtgtgagctccctggggtcttgctgtggccttggccctgggtgttgtcccacacagcccagg

SEQ ID NO: 29494 - DNA, 120 bp, synthetic construct; identical to SEQ ID NO: 8821
  source 1..120: mol_type = other DNA

SEQ ID NO: 29495 - DNA, 120 bp, synthetic construct
  source 1..120: mol_type = other DNA
aaagacacgcagctatccacagcaatccttaatagttacttatctatttcagggtataacataagacacacctatcatttcagacctgcctaggacatgcctggagaaggtatttaagta

SEQ ID NO: 29496 - DNA, 120 bp, synthetic construct
  source 1..120: mol_type = other DNA
catggcaaaaccccatctctactaaaaaaatacaaaaaaattagccaggcgtggtggcatgcgcctgtagtcccagctactcaggaggctgaggcaggagaattgcttgaacctgggagg

SEQ ID NO: 29497 - DNA, 120 bp, synthetic construct
  source 1..120: mol_type = other DNA
aaccctgctaagggccagtctgctgggtggtggatgggtcagcagagctgggctgggagccgctatgcctccccatcaaggccaccaatagtcgggtgagccggcctctgtgccgtcatg

SEQ ID NO: 29498 - DNA, 120 bp, synthetic construct; identical to SEQ ID NO: 8822
  source 1..120: mol_type = other DNA

SEQ ID NO: 29499 - DNA, 120 bp, synthetic construct
  source 1..120: mol_type = other DNA
aggtgggacccacaccccccccatgaggccacagagcctgcaggtgtccacaccttttgtttttgttttttgatttttgtttttcgttttttgttttttgagatggagtctcactctgtc

SEQ ID NO: 29500 - DNA, 120 bp, synthetic construct
  source 1..120: mol_type = other DNA
ccaggctaatttttgtatttttagtggagacagggtttcaccatgttgatcaggctggtcttgaactcctgaactcgtgatctgcctgcctcggcctcccagagtgctgggattacaggc

SEQ ID NO: 29501 - DNA, 120 bp, synthetic construct; identical to SEQ ID NO: 8823
  source 1..120: mol_type = other DNA

SEQ ID NO: 29502 - DNA, 120 bp, synthetic construct
  source 1..120: mol_type = other DNA
tgagggaggacaggcaggagtccgccggaagtgggcctgagacgccgtatgcctgtggctttgtggctttgtgtggctagcgcctctcacacgtgggggctggtttcatcttccagcccc

SEQ ID NO: 29503 - DNA, 120 bp, synthetic construct
  source 1..120: mol_type = other DNA
ttggcaataagtccccaccaagcccactgagcctggccctgctgcatccacactatacagctgaggaaactgaggcccagctttccacttctgtgcctagggggtgggatccagctccga

SEQ ID NO: 29504 - DNA, 120 bp, synthetic construct
  source 1..120: mol_type = other DNA
cctaccgcaggtacaccaggctcaaaggccagctgtgaggctttccggggctggatctggtgggaaagtgcttatcacggagggcacccggggttcctggcgtgggaccccctctgaccc

SEQ ID NO: 29505 - DNA, 120 bp, synthetic construct
  source 1..120: mol_type = other DNA
ctggtgtggggccccctctgacccaagctggggttcctggcgtcggacgccctctggcccaagctggggttcctggtgtggggccccctctggccaaggctggggttcctggtgtggggc

SEQ ID NO: 29506 - DNA, 120 bp, synthetic construct; identical to SEQ ID NO: 8824
  source 1..120: mol_type = other DNA

SEQ ID NO: 29507 - DNA, 120 bp, synthetic construct
  source 1..120: mol_type = other DNA
cgctttgcccggaagcccatttccatcatcggtgagtcatgcctgccctgtggaggtcacgcccaggtttccagaccaggaaggacccccacctcatgacccctaccagatggagtcccc

SEQ ID NO: 29508 - DNA, 120 bp, synthetic construct
  source 1..120: mol_type = other DNA
ttggtccctcacagattcccatgagcctcacagcccagcatagcttcatggtgggccagtcaccctcggcagcctgagaaccatggtccaggcctgaggccctgccctttctggccactt

SEQ ID NO: 29509 - DNA, 120 bp, synthetic construct; identical to SEQ ID NO: 8825
  source 1..120: mol_type = other DNA

SEQ ID NO: 29510 - DNA, 120 bp, synthetic construct
  source 1..120: mol_type = other DNA
ccccgagcacccctcctgagccgcgggtggtctcacgccccatccaccttgctcagatgcaaggtgccttggtgcccactgcccccgggggcactgagccatgtgctgggatgggtggag

SEQ ID NO: 29511 - DNA, 120 bp, synthetic construct
  source 1..120: mol_type = other DNA
tctgggcacacagcctgcccatctgcaaactggggtgacccaaggagccccccagaaggcagtctggggactgagggaatctggaggtacctggccgacccccagctcagccctgtgtgg

SEQ ID NO: 29512 - DNA, 120 bp, synthetic construct
  source 1..120: mol_type = other DNA
ggacacccatgccatcggccagccctaggcccggcgtgaacagctgagcccagcctggctccctcagccccacaccatctccttcgcaggggcatccgcttcctgcagatcctgaggatg

SEQ ID NO: 29513 - DNA, 120 bp, synthetic construct
  source 1..120: mol_type = other DNA
gcagagcagcccacactaggacagcttgagatgcgctgaggccccgggggccggtgggtgcctgggcgcaggggtacctgaacggggcccaggatctcagagcaagcccaagcttgagcc

SEQ ID NO: 29514 - DNA, 120 bp, synthetic construct; identical to SEQ ID NO: 8826
  source 1..120: mol_type = other DNA

SEQ ID NO: 29515 - DNA, 120 bp, synthetic construct
  source 1..120: mol_type = other DNA
ctcattctgggggtaacccccacccgccacttaccggagttgtgaggagtgggctatattgaagccggccctgtgcatgtgaaccgcgctggagcggcgtaggacgcccagtgatcgctg

SEQ ID NO: 29516 - DNA, 120 bp, synthetic construct
  source 1..120: mol_type = other DNA
catcttctcctcgtactttgtgtacctggctgagaaggacgcggtgaacgagtcaggccgcgtggagttcggcagctacgcagatgcgctgtggtggggggtggtaagtcggaaacttcc

SEQ ID NO: 29517 - DNA, 120 bp, synthetic construct; identical to SEQ ID NO: 8827
  source 1..120: mol_type = other DNA

SEQ ID NO: 29518 - DNA, 120 bp, synthetic construct
  source 1..120: mol_type = other DNA
cccaaggagagcggcgtcagatgcatacctcgcgtgtctctgagggtccacacaggccctgtaagtgcccctgtccccaaggagccagacatgagacagcaaacaggaaagaccatgatg

SEQ ID NO: 29519 - DNA, 120 bp, synthetic construct
  source 1..120: mol_type = other DNA
gggacccggcctgtgggcccagaggctgcccctggctgtgaaggtgggttccggccacctagagcagcccgggagccttggggaagccggtgtgcagcaggcagatcccgcactggaaca

SEQ ID NO: 29520 - DNA, 120 bp, synthetic construct
  source 1..120: mol_type = other DNA
atgaggatgcagctgcaggaatcagggtgcgccctccgagctgcaggctccccaagtcccaagtcactggcctgtgggcccagcagcagtttctcatggctcagaggacgctggctgagg

SEQ ID NO: 29521 - DNA, 120 bp, synthetic construct; identical to SEQ ID NO: 8828
  source 1..120: mol_type = other DNA

SEQ ID NO: 29522 - DNA, 120 bp, synthetic construct
  source 1..120: mol_type = other DNA
cccctactctgccgccacaagcctgcccccgcgtctgcccttgtctaccgacctccgggctcactcagtccgataacaggttagatggaatcgtggtagcaacaggggctgggggctggg

SEQ ID NO: 29523 - DNA, 120 bp, synthetic construct
  source 1..120: mol_type = other DNA
tctgccccgagtcctccttccagaaaggaccggacttgctggctctcgggaccccccaccaccatcagagcatatctgggtggggtgagaagcctcccggtggctccccaggcaggcacg

SEQ ID NO: 29524 - DNA, 120 bp, synthetic construct
  source 1..120: mol_type = other DNA
agtgctgcaatgctcagggatggcaggggcatgctgacacagctcctgggttggggcaggccccactttcggcctcttcccgccttcctgggggcctgtgtccccgaaggccccagtgtg

SEQ ID NO: 29525 - DNA, 120 bp, synthetic construct; identical to SEQ ID NO: 8829
  source 1..120: mol_type = other DNA

SEQ ID NO: 29526 - DNA, 120 bp, synthetic construct
  source 1..120: mol_type = other DNA
ctttgtgcccggcttggcatcagtgccccggcccacaccgtcagctgcagcccgagcctcggccatcgcgcgccctggcctggccattgttcccgccaggccccgcgcccctggtcgccc

SEQ ID NO: 29527 - DNA, 120 bp, synthetic construct
  source 1..120: mol_type = other DNA
caaacagaacttgagaaacgcaagaaggggcagcagcccagatgggggcttttaagccagttttgccaatttgcaactgcgccctgagcagttgttttctttcagctcctttgtcctgct

SEQ ID NO: 29528 - DNA, 120 bp, synthetic construct
  source 1..120: mol_type = other DNA
aggccaggccattctgatcatcatgctgcatctgccccagaccttgcctggactctgtggactcctcacccctcagacacaccctgagagggtgctggagctgccacaacaaagtccgcg

SEQ ID NO: 29529 - DNA, 120 bp, synthetic construct
  source 1..120: mol_type = other DNA
tccgaaagctcagggagaaatttcctctcctctccccgtggctggagactccaggcgtgcccggtgtgcggccgcctctttcctctgtgtcaggccctgtctctcatgaggacacttgct

SEQ ID NO: 29530 - DNA, 120 bp, synthetic construct; identical to SEQ ID NO: 8830
  source 1..120: mol_type = other DNA

SEQ ID NO: 29531 - DNA, 120 bp, synthetic construct
  source 1..120: mol_type = other DNA
ctgccaaggcgtttggggagaatttaagacttttctttgcccttggaacaaaatgcgtttgtttgtgttaaagtttgagtggagggagaagcagtttttgcaaacacgggcttctctgtt

SEQ ID NO: 29532 - DNA, 120 bp, synthetic construct
  source 1..120: mol_type = other DNA
aagtcgagtctgactgcctgctgttcactctctcctcacctggagcctccagaaattcccgcctccctggcaacgctgcaccctggcggggcaaggccagaaggggctgggggctggtgc

SEQ ID NO: 29533 - DNA, 120 bp, synthetic construct
  source 1..120: mol_type = other DNA
cggcaggacctggccacccaccgagcccctgggtcagcgttcttcctcctcctggagttccgtgcaaaggggaacgagttcagctgccctactgagtgggcctggggacagaggcagagt

SEQ ID NO: 29534 - DNA, 120 bp, synthetic construct; identical to SEQ ID NO: 8831
  source 1..120: mol_type = other DNA

SEQ ID NO: 29535 - DNA, 120 bp, synthetic construct
  source 1..120: mol_type = other DNA
tgtccctgcaggactgtttcggcccaggagcagggaggcctccttgaggaagtgacagctgagctgagacctcaagacacagtcacctgggccaccttccggcagggcgctgagcctggc

SEQ ID NO: 29536 - DNA, 120 bp, synthetic construct
  source 1..120: mol_type = other DNA
gaggcctggccctcgtgaattggtgttcgtttatttactttctcctgctgaaaggaagcaggtttattttggggtgtgtgtctgcttttgcttttaccctgagagtttgccagcctgctg

SEQ ID NO: 29537 - DNA, 120 bp, synthetic construct
  source 1..120: mol_type = other DNA
ggcctgttagagccccaggaccgctggccccacccttctctgtcccagagacagtcctgccccccacccaggggcctccctctgtccacggctccccctttcccaggccacccccctagg

SEQ ID NO: 29538 - DNA, 120 bp, synthetic construct; identical to SEQ ID NO: 8832
  source 1..120: mol_type = other DNA

SEQ ID NO: 29539 - DNA, 120 bp, synthetic construct
  source 1..120: mol_type = other DNA
ccccccacactcagagccacggtgccagcccagccttgccagcagggcagccacaggacttccaggcaaggtgacggtgccaggtggggcccgaggccctcactcatagggcattgtccc

SEQ ID NO: 29540 - DNA, 120 bp, synthetic construct
  source 1..120: mol_type = other DNA
atgggcttccttccaagccctggagaggggagcaggcctgggagggcgcccttggcccagagcctccatgaagagccaggggcctcctcatggctggggccccagcacagtgacctggga

SEQ ID NO: 29541 - DNA, 120 bp, synthetic construct
  source 1..120: mol_type = other DNA
ggctctcgaggctgggcaaggtcggggcctgcaatggctgaagcagcctcttagcccatctctgccttcggggtggccacagcggggaacgtgggtcctgcaggccttggtccagctgtc

SEQ ID NO: 29542 - DNA, 120 bp, synthetic construct; identical to SEQ ID NO: 8833
  source 1..120: mol_type = other DNA

SEQ ID NO: 29543 - DNA, 120 bp, synthetic construct
  source 1..120: mol_type = other DNA
cagggaggaacatggggggactagaaggctccccatgcctcccgccccttcacatgggagtgaaggcacaggccagcaggagggcgggggaaacacactgaccagtggggtgtgcgttcc

SEQ ID NO: 29544 - DNA, 120 bp, synthetic construct
  source 1..120: mol_type = other DNA
catcagggactaatccccagcatggtgaccataaaacagcccattcctgagctgcctgtgtctgaatgcaggaaaaacaaacaggtctgcagggaggggccgtttccttgttaacttgag

SEQ ID NO: 29545 - DNA, 120 bp, synthetic construct
  source 1..120: mol_type = other DNA
gtgctctccacggtgggcagacacccaggggcacttctggggctggcctttctctccctctcggggcacccctgccttctactgaccacccagccagccagcaggagcccacgtgcaccc

SEQ ID NO: 29546 - DNA, 120 bp, synthetic construct; identical to SEQ ID NO: 8834
  source 1..120: mol_type = other DNA

SEQ ID NO: 29547 - DNA, 120 bp, synthetic construct
  source 1..120: mol_type = other DNA
taaaatatattaaaataatttaatgttgttattagaacaatgtttaatatgccagcccgtgccatttgtcttgatgcctgggtttgctggcgccccttacgcttggcacgcaaggcagga

SEQ ID NO: 29548 - DNA, 120 bp, synthetic construct
  source 1..120: mol_type = other DNA
tggtctcagggccccttggtgcccctgacggagaagcctggctcgtgggcattgtgccatcactatttaatacagtggaggcatgtaaaaacaattccatattaatttattaaaataata

SEQ ID NO: 29549 - DNA, 120 bp, synthetic construct; identical to SEQ ID NO: 8835
  source 1..120: mol_type = other DNA

SEQ ID NO: 29550 - DNA, 120 bp, synthetic construct
  source 1..120: mol_type = other DNA
ccccaccacccctgctttcttcagcctgaccttgtcctcccggacccagtgctaggaggatgtccaggcggggtgggacttgggcctgcgctgggctgctcctcaagtctcgggctgcac

SEQ ID NO: 29551 - DNA, 120 bp, synthetic construct
  source 1..120: mol_type = other DNA
tctgagggatgaataggaggttgctggatgaacaagtaggaatcagcatgttcatactgaaggggtgagtgtccccccaaaaaatctggattagacagactctggagccctcttgctcca

SEQ ID NO: 29552 - DNA, 120 bp, synthetic construct
  source 1..120: mol_type = other DNA
gtaaacagtggatgtgctgggaccctgggctgagcccctttgggctgagagctcaccaggtggaagtcactccccagggcaggactggcacagggtctccgatgccccgcccactttgca

SEQ ID NO: 29553 - DNA, 120 bp, synthetic construct
  source 1..120: mol_type = other DNA
ggggctccggttcccccagggcccccctctctgccagccactgtcagcctcacccatggcctggcttcaccctgcagggacctggctgcgctccgtgtgcctgcgctgtgcgttcaaggt

SEQ ID NO: 29554 - DNA, 120 bp, synthetic construct; identical to SEQ ID NO: 8836
  source 1..120: mol_type = other DNA

SEQ ID NO: 29555 - DNA, 120 bp, synthetic construct
  source 1..120: mol_type = other DNA
cctctgcagaagcatcctggccataagcgaacgtgcggtcagggcactagtggggcaggggcctgggtggcggccagggctcagcagaggcctgtcccgccctgtggcctggcggcggtg

SEQ ID NO: 29556 - DNA, 120 bp, synthetic construct
  source 1..120: mol_type = other DNA
gagccgtgtgcacctgcctctctgtccgcgtgtgcgcctgtgcacccctgcccgggggtggccatggggcttctccccaccctccctcctcctcagtggctggtggaaaccacagggtgg

SEQ ID NO: 29557 - DNA, 120 bp, synthetic construct; identical to SEQ ID NO: 8837
  source 1..120: mol_type = other DNA

SEQ ID NO: 29558 - DNA, 120 bp, synthetic construct
  source 1..120: mol_type = other DNA
agggccactctgggtctccttgttgggctcagcgccagctcctgaagaacccagcaggcagcctgcacggaccaggcccagccagggtaggctcctacgtcctgcagaatgacatttcca

SEQ ID NO: 29559 - DNA, 120 bp, synthetic construct
  source 1..120: mol_type = other DNA
gcttgagctgcatcttgtactctcagaaaagaggaaaataaaacatctggtgccctggagtggcgtcaggaagcagcgcgtcatcccagcccctgctctttgttgacgaccagcctcagt

SEQ ID NO: 29560 - DNA, 120 bp, synthetic construct
  source 1..120: mol_type = other DNA
tcccagccagcaggcctggcccttcgtgggtgctgggctccttacatgtgctggtgggacataccttgtgtgtgacgccgagagcctgggagacatgtgccatcccgcggctctgttcct

SEQ ID NO: 29561 - DNA, 120 bp, synthetic construct; identical to SEQ ID NO: 8838
  source 1..120: mol_type = other DNA

SEQ ID NO: 29562 - DNA, 120 bp, synthetic construct
  source 1..120: mol_type = other DNA
gaaccaagagggtgcttcccttctagaaggtgctatactccagagccccacctgccctccctggggccctggatgcagacttcccgtttgcagtccccactggggtccttgcaggcagtg

SEQ ID NO: 29563 - DNA, 120 bp, synthetic construct
  source 1..120: mol_type = other DNA
ctgctaccacgccccatggaggcagaatcttgtgcctggagagggcacttccacgctgtggctgggggggttttgttccatgtcctttccagaaaccacagattgtaaggtgatgtgtct

SEQ ID NO: 29564 - DNA, 120 bp, synthetic construct
  source 1..120: mol_type = other DNA
tatcacatgggtgtgtatgtactgtatgtgtgcgtgcatactgtgtatacatattgtatgtgcatatgttgtatttagtatgtgtgctgtgttgtgtgcacatgtatgcattatacatgt

SEQ ID NO: 29565 - DNA, 120 bp, synthetic construct; identical to SEQ ID NO: 8839
  source 1..120: mol_type = other DNA

SEQ ID NO: 29566 - DNA, 120 bp, synthetic construct
  source 1..120: mol_type = other DNA
tgtgtgttagtatgtgggttagtgtgtgtgtttgtgtgttagtgtgtgtgttagtatgtgtttgtgttagtgtgtatttgtgtgtgttagtgtttgtgtgtgtttgtgggttagtgtgtg

SEQ ID NO: 29567 - DNA, 120 bp, synthetic construct
  source 1..120: mol_type = other DNA
tgtgtcagtgtgtgtgtgttagtgtgcatatctattgtgtgtgtgtgtgcatcacacatgcacgtgcaccacgtgatctcctctgtagacacggagttccctagcttcagggtgggtcct

SEQ ID NO: 29568 - DNA, 120 bp, synthetic construct
  source 1..120: mol_type = other DNA
gatggaccagcccacctggcccccagaatggtccctgggaatgggttagagcggctgcagccctgccccatgggactgggccccttgctggataagacctggggtataagttctgccccc

SEQ ID NO: 29569 - DNA, 120 bp, synthetic construct
  source 1..120: mol_type = other DNA
ctggcagtggcctgtgtggacgggagcctcctgtccattccttcccaggggattcttggctcggggtttgccctgaaggtgcagcagaagcagaggcagaagcacttcaaccggcagatc

SEQ ID NO: 29570 - DNA, 120 bp, synthetic construct; identical to SEQ ID NO: 8840
  source 1..120: mol_type = other DNA

SEQ ID NO: 29571 - DNA, 120 bp, synthetic construct
  source 1..120: mol_type = other DNA
agtctgggagtggggtggccaggtgattgtccccaagggaggtaggacccagctgtgcagttggtgccttctggagggcctggcatccctcagggctcgggaggccctggtgcctggagg

SEQ ID NO: 29572 - DNA, 120 bp, synthetic construct
  source 1..120: mol_type = other DNA
cagtaccaagctctgggatgctgggctctggctctgtcactccaggctctccaggacccaccagagaatgggactgctctgttaacgtaagcaaggacttggcacaggagtcacttgaga

SEQ ID NO: 29573 - DNA, 120 bp, synthetic construct
  source 1..120: mol_type = other DNA
atagggcctccgcccagtgcagtggctgggagcacagtgtcagttcctctgggcacactgggcctgatgtcccccaggaaggcccaggacctgggcagcccccgctggctggcgtccccc

SEQ ID NO: 29574 - DNA, 120 bp, synthetic construct; identical to SEQ ID NO: 8841
  source 1..120: mol_type = other DNA

SEQ ID NO: 29575 - DNA, 120 bp, synthetic construct
  source 1..120: mol_type = other DNA
gggccccaggtggcaggtgtgcacaggagcagggcaggggtcatggggtttgccagggttgggggaccacgtggagtgctcagcctgtgtgtgtaacactcgggccttggaaggctgggc

SEQ ID NO: 29576 - DNA, 120 bp, synthetic construct
  source 1..120: mol_type = other DNA
tggggctgtcacccaggagcccatcagtgtgggggaacattctccactcggccctctctcaggctcatgtggccagtgatgacaaggccaccaggacatgtcctcatacaaggccctggg

SEQ ID NO: 29577 - DNA, 120 bp, synthetic construct
  source 1..120: mol_type = other DNA
cttcagagctgcacccatgtgccatcagaggctcccccaactgcaaggtggtataggcctctgggagagacctcacctcctgccagccctagggatcctgcctctccctgccccctgctc

SEQ ID NO: 29578 - DNA, 120 bp, synthetic construct; identical to SEQ ID NO: 8842
  source 1..120: mol_type = other DNA

SEQ ID NO: 29579 - DNA, 120 bp, synthetic construct
  source 1..120: mol_type = other DNA
gaacagggagggggagctgtagcttccataagggcccccgccgggtggctcagcaggtgacagcctgtccccctgcccgacctcagaccgcatggaggtgctatgctgccgagaaccccg

SEQ ID NO: 29580 - DNA, 120 bp, synthetic construct
  source 1..120: mol_type = other DNA
cttcttgctagcaggtggggaggccgtgggggccgcagcacgaggctgggatctcaccatgcatttggcttggtacagcctgtgtcagggagtcagcatcgttcgggacactgggccata

SEQ ID NO: 29581 - DNA, 120 bp, synthetic construct
  source 1..120: mol_type = other DNA
gaaagaaggctcttcagagggcctcagggttgggctttccacaccgggcgcagtgggtggtgagcagtgggcagggggccgcgcgcagtgggtggtgggaggggagcagcaggggaggga

SEQ ID NO: 29582 - DNA, 120 bp, synthetic construct; identical to SEQ ID NO: 8843
  source 1..120: mol_type = other DNA

SEQ ID NO: 29583 - DNA, 120 bp, synthetic construct
  source 1..120: mol_type = other DNA
atcttgtacgtttatctgcttcctgctgtcctgttagcgaggccgtgagctcacagggcagcacctgggccaagccccccacgtgacccccagcagccctgccctgtctctgtgtgaaga

SEQ ID NO: 29584 - DNA, 120 bp, synthetic construct
  source 1..120: mol_type = other DNA
ccgctaatctgttgtcttgttttttttaggtaaagaaaaaaaagttcaagctggacaaagacaatggggtgactcctggagagaagatgctcacagtcccccatatcacgtgcgaccccc

SEQ ID NO: 29585 - DNA, 120 bp, synthetic construct; identical to SEQ ID NO: 8844
  source 1..120: mol_type = other DNA

SEQ ID NO: 29586 - DNA, 120 bp, synthetic construct
  source 1..120: mol_type = other DNA
tcccagccgagcccacgggctctggttggaaagtggctagggtgacctctgggcctactggcagggacgccagagggaaggggtttggggatggggccctggaggagcagcaccaggccc

SEQ ID NO: 29587 - DNA, 120 bp, synthetic construct
  source 1..120: mol_type = other DNA
gggatgaagctaccttctgcgggacctgacgattggatggcagacctgtctagggtttagatgtcctccatccctggtgaggggttttacccacgctaactcgtaagcgtggctctttga

SEQ ID NO: 29588 - DNA, 120 bp, synthetic construct
  source 1..120: mol_type = other DNA
gctcccacgagtgaggccctggaggctgggcccatgtgcttcagccacacggcaggaacacagcagtgtctggttgtggcccccccatgcctcccgccaacttctgctgttcccagaagt

SEQ ID NO: 29589 - DNA, 120 bp, synthetic construct
  source 1..120: mol_type = other DNA
gggcagacctggcctcctggctgcatcaggaggcacacgtgatgcatccgtcatctcgggaccagttttgagacaaacatcctatagggcaggaccgtgaactgggtagctctacagagt

SEQ ID NO: 29590 - DNA, 120 bp, synthetic construct; identical to SEQ ID NO: 8845
  source 1..120: mol_type = other DNA

SEQ ID NO: 29591 - DNA, 120 bp, synthetic construct
  source 1..120: mol_type = other DNA
cttcctctgaggcagacatagtagtgactgtgttctgatacaaagatggcacttgcccgatgctgcactgcagcaccaatgcagaggccctggcaaatgttcgcagaagcccccgtccca

SEQ ID NO: 29592 - DNA, 120 bp, synthetic construct
  source 1..120: mol_type = other DNA
gagccctcatcttccaggtggtggggggagcacagcatttgaagcccactcccctttgaccacttgctgttgtccagacagacatcacgcacgtgggccttgcattggttcctgcttact

SEQ ID NO: 29593 - DNA, 120 bp, synthetic construct
  source 1..120: mol_type = other DNA
ccttccatgccccatgggagggctccatgtggcccagtcccttggaggctggaccccactgttccggactctgggctgttggaagccaggccctgcctcagttgtgccaagtggccaggg

SEQ ID NO: 29594 - DNA, 120 bp, synthetic construct; identical to SEQ ID NO: 8846
  source 1..120: mol_type = other DNA

SEQ ID NO: 29595 - DNA, 120 bp, synthetic construct
  source 1..120: mol_type = other DNA
cagttcattcaggatggctcacctgcatccccacctccttggcaggaggctgggtggtgttccctgccccttggggctttcctgggcatcccatgtggaagtcagcaggcaagaccaagt

SEQ ID NO: 29596 - DNA, 120 bp, synthetic construct
  source 1..120: mol_type = other DNA
cggcacaaagggcgattgtgccaaccaatgcccagtgcccccacagctccggattcagggctgagaccattgtctccatgcaaatgggggctttctgcgcatgctaacgggcaggtgggc

SEQ ID NO: 29597 - DNA, 120 bp, synthetic construct; identical to SEQ ID NO: 8847
  source 1..120: mol_type = other DNA

SEQ ID NO: 29598 - DNA, 120 bp, synthetic construct
  source 1..120: mol_type = other DNA
gagccctggcttggggagaaggagatgctgatcccagggcagatgccactcctggggaagccccacagccccactcccgcaaggcgggtacgaacagccacactgagtcccccgcaaagt

SEQ ID NO: 29599 - DNA, 120 bp, synthetic construct
  source 1..120: mol_type = other DNA
aagccccttcagctcgtgctctagctggtgctgtgcggtgttggccccatttatagatggagaaacggaaggccagggccatgtggggaactcctgaggacacctgtgtgtcctgacacc

SEQ ID NO: 29600 - DNA, 120 bp, synthetic construct
  source 1..120: mol_type = other DNA
cccatggtagcatcagaacacagactaacctgcagcaaaaatgggctgtgtggtccctgtagagcagcctcactgaggggaggcaccagccctcatcccacgcagcagggcccgctgctg

SEQ ID NO: 29601 - DNA, 120 bp, synthetic construct
  source 1..120: mol_type = other DNA
acagactcctcatgaaggatgcatggggacccaaccgcatgccacttggcttggcagtgtcaaagggactggggacctgcgaggatgcggtggccattgtctgtgcccagcctggggagc

SEQ ID NO: 29602 - DNA, 120 bp, synthetic construct; identical to SEQ ID NO: 8848
  source 1..120: mol_type = other DNA

SEQ ID NO: 29603 - DNA, 120 bp, synthetic construct
  source 1..120: mol_type = other DNA
ggccctttgtctttcaccactgacccttcccaagctggtaccatgcctaacccatggtgggtacacgataaaaatgcagggctgtgccaccagggttttgtcttgacaaagggactggag

SEQ ID NO: 29604 - DNA, 120 bp, synthetic construct
  source 1..120: mol_type = other DNA
gaacactgggctggaaggtcgtggtctgtgacgtaggatcggggaggccacctcagaggccttttgctgctcagagaacactgggctgtaaggtcgtggtctgtgacgtaggatcgggca

SEQ ID NO: 29605 - DNA, 120 bp, synthetic construct
  source 1..120: mol_type = other DNA
ttcccgtttgtgaagtggggcagcgtgctggaggagcatgcatcacatacccagaggtccccagtgtggtctggggactcatcgttcacactcgtgtgtgtgctttctggaggcatgcgt

SEQ ID NO: 29606 - DNA, 120 bp, synthetic construct; identical to SEQ ID NO: 8849
  source 1..120: mol_type = other DNA

SEQ ID NO: 29607 - DNA, 120 bp, synthetic construct
  source 1..120: mol_type = other DNA
gccgtttcctgggcctttgttgcccagtattttggttttgtcttttaaacaatcctctttttgttgatgctgcatacattgagatatttactcacagacttgcagttttctgtctcacca

SEQ ID NO: 29608 - DNA, 120 bp, synthetic construct
  source 1..120: mol_type = other DNA
tttttactttgcctttattcttggatgatggtttcgttgggagaaagtaacaggttaatatgtacattttgtctgaagactctggagctgtaacactgcagtctcctggcttctgtgggt

SEQ ID NO: 29609 - DNA, 120 bp, synthetic construct
  source 1..120: mol_type = other DNA
ttcagaggtttcaatgtactgtaccaaggtggtgcattatttttatttatcatgcctacactttgttgtgattcctgaatctgagggtttatgtctttcatcaaccgtggaaagtcagta

SEQ ID NO: 29610 - DNA, 120 bp, synthetic construct; identical to SEQ ID NO: 8850
  source 1..120: mol_type = other DNA

SEQ ID NO: 29611 - DNA, 120 bp, synthetic construct; identical to SEQ ID NO: 1775
  source 1..120: mol_type = other DNA

SEQ ID NO: 29612 - DNA, 120 bp, synthetic construct
  source 1..120: mol_type = other DNA
gaaccaatccaggaccttcatgatccatgttttagatatgggatcttctagacaacctatgcagtgtaaacagaaaccccaatctcctgtgagagcaagtctaagtaacatatattgaga

SEQ ID NO: 29613 - DNA, 120 bp, synthetic construct
  source 1..120: mol_type = other DNA
ggcagatacaagattaatatgcaaaaatcaattccattcatatattcttgcagcaaataaccagaaattgagatttttaaaatacaggcgtgtctcattcttattgactgcactttgctg

SEQ ID NO: 29614 - DNA, 120 bp, synthetic construct; identical to SEQ ID NO: 8851
  source 1..120: mol_type = other DNA

SEQ ID NO: 29615 - DNA, 120 bp, synthetic construct
  source 1..120: mol_type = other DNA
taacacaacatccattctgcagcccataatcaaggagtaatgccaactttgaagtcttattatttaagaaatacattttataaggctatagcggccatagatagcgattgctttgatgaa

SEQ ID NO: 29616 - DNA, 120 bp, synthetic construct
  source 1..120: mol_type = other DNA
ttgattccaaccctcatggatgactgaggggttgaagatttcagtggaggaagtaactactgatgttgtgaaaactgcaagagaactagaattagaagtggagcctgaagatgtggctga

SEQ ID NO: 29617 - DNA, 120 bp, synthetic construct; identical to SEQ ID NO: 8852
  source 1..120: mol_type = other DNA

SEQ ID NO: 29618 - DNA, 120 bp, synthetic construct
  source 1..120: mol_type = other DNA
ccatcaacatttgaatagatttttttcaaagttgtagtatattcctaaaatggaatactacttagaaatacaaaggaatgaaccactgatatgcctacaatatggatacattgcaacata

SEQ ID NO: 29619 - DNA, 120 bp, synthetic construct
  source 1..120: mol_type = other DNA
ttacctggggatcaggggtagtagtaggagggaaaaggacaaaagggcacaaaaaaacttttggggcagtggatatgttcattatcataatcatggcgatggtttcatcatgtgtcaaaa

SEQ ID NO: 29620 - DNA, 120 bp, synthetic construct
  source 1..120: mol_type = other DNA
aaataattttttattgataacctaaagaaaccagttgccactcacctataggcatggggctaatttaattgctatataaaaacgctcttgtaaatcaagatagaagttaaaggatattaa

SEQ ID NO: 29621 - DNA, 120 bp, synthetic construct
  source 1..120: mol_type = other DNA
gcaaactaaagcaatggggtttttgaaacttatctgattattaaatatcaaagagtttgataacactctatgggtatgtgtacatggaaactctcagtctcagtcattgatgttagaaaa

SEQ ID NO: 29622 - DNA, 120 bp, synthetic construct; identical to SEQ ID NO: 8853
  source 1..120: mol_type = other DNA

SEQ ID NO: 29623 - DNA, 120 bp, synthetic construct
  source 1..120: mol_type = other DNA
ttacaaaacaaagttttatctaccttccttgttctgtgtcttggaactgtttgaagaacattgggattatcttttctgtagaggttaaatagaattgagttgtaaaaccatctgggcctg

SEQ ID NO: 29624 - DNA, 120 bp, synthetic construct
  source 1..120: mol_type = other DNA
gcatttcaattgtgttgccacttggtagcaactgattttttcctttagtgattttatggtcttctctatcatctcttcgtttttcttttcctttatgcctgaacttttgtggtttttctc

SEQ ID NO: 29625 - DNA, 120 bp, synthetic construct; identical to SEQ ID NO: 8854
  source 1..120: mol_type = other DNA

SEQ ID NO: 29626 - DNA, 120 bp, synthetic construct
  source 1..120: mol_type = other DNA
ttctctttagagttcttttaatgtcttcttaatttttaagcagtaaatttttatcactgttatttatttctaatttagtaggcttacagtgaaaggatgtagcctatgaagtctccactt

SEQ ID NO: 29627 - DNA, 120 bp, synthetic construct
  source 1..120: mol_type = other DNA
tacatggacagacaaaatgtacattgagatggattgtgtatacatacttattcattgcctcatttaggtctgctctgcccttagttaaaaaaaaaaaaccctaatacatctgccaaattc

SEQ ID NO: 29628 - DNA, 120 bp, synthetic construct
  source 1..120: mol_type = other DNA
taaaaattgagtggcaggtttcatggagtggtttggagcacagcctatatggccaaccttctttagggtcatagcccagctctgccattttcttatgtggccctaagcaagctactgcat

SEQ ID NO: 29629 - DNA, 120 bp, synthetic construct; identical to SEQ ID NO: 8855
  source 1..120: mol_type = other DNA

SEQ ID NO: 29630 - DNA, 120 bp, synthetic construct
  source 1..120: mol_type = other DNA
ttacatttttcctgatgttcatataatattcaatgaaataaaatacatgtgacataatgaaggcattatcattgttttccaaactcacgggatcatatcatacctgctttctgcatcttg

SEQ ID NO: 29631 - DNA, 120 bp, synthetic construct
  source 1..120: mol_type = other DNA
atctctgcttaatttcctttggtgtacatactctgtgatgttctctatcgcttaaaattcattttgttcaagaacataggttcttgaacctgtttctatgtacagaacttttatttctat

SEQ ID NO: 29632 - DNA, 120 bp, synthetic construct
  source 1..120: mol_type = other DNA
aaggtgtcagcaaggctgctttccctgaggcctctttccttgccttgcagatggccgccttcttcctgtgtcatcacatgaccattgctctgggcacttgcaccctggtgtttctctgtg

SEQ ID NO: 29633 - DNA, 120 bp, synthetic construct; identical to SEQ ID NO: 8856
  source 1..120: mol_type = other DNA

SEQ ID NO: 29634 - DNA, 120 bp, synthetic construct
  source 1..120: mol_type = other DNA
ggcattcctgcccaccagtcctggcagagtgacttattgtcagccaagtggggcagagtttctccactgtacctctattgaaatctagtgccggataattctttgttgagggaggaagtc

SEQ ID NO: 29635 - DNA, 120 bp, synthetic construct
  source 1..120: mol_type = other DNA
ccctggagggcaaaattgcccccagttgtgacctgctgagctaaagcagtccctcaggattgtttcttaaaacaaaacaaactgtttatttggccataattttgaactacagaaaaatta

SEQ ID NO: 29636 - DNA, 120 bp, synthetic construct
  source 1..120: mol_type = other DNA
ctttatcatttgaacccctttctctacattatattcacataacatgtttttctgaaacatctgtgagttgcatactccacagctctttgcccctaaacattttgctgtgtatttctgaaa

SEQ ID NO: 29637 - DNA, 120 bp, synthetic construct; identical to SEQ ID NO: 8857
  source 1..120: mol_type = other DNA

SEQ ID NO: 29638 - DNA, 120 bp, synthetic construct
  source 1..120: mol_type = other DNA
tgaggcacacagtgtatctgccccttattaacgatgttattttgatcaccaaattgaggccgttatccacttttctaccttacagttactatattttgccttgcaaccaataaacaatcg

SEQ ID NO: 29639 - DNA, 120 bp, synthetic construct
  source 1..120: mol_type = other DNA
tggaaaccaggctttactgtggtagttgcaaaaatgatcattttccaactctagcaccccttccacgaaagtacagaaagaaaaaaaaatactgtccagttggaatggttacctcattgt

SEQ ID NO: 29640 - DNA, 120 bp, synthetic construct
  source 1..120: mol_type = other DNA
agaaataatagggatcccatgcaccctttagttagtttccgtcagtggtagcatcttctaaaaccatagcacaatatgataaccaggatgtcaacagcaagagtccagatgcagagtgct

SEQ ID NO: 29641 - DNA, 120 bp, synthetic construct; identical to SEQ ID NO: 8858
  source 1..120: mol_type = other DNA

SEQ ID NO: 29642 - DNA, 120 bp, synthetic construct
  source 1..120: mol_type = other DNA
tttaaccattccctcatccaaggacatgtgggtcattcccagtttgggctattacaaatcagagtaggctgaacaatggcccccaaagtagccaggtcctaacgcctagaacctgtgact

SEQ ID NO: 29643 - DNA, 120 bp, synthetic construct
  source 1..120: mol_type = other DNA
aggcagaagaatgactacagaagagaaaaagggttacgtggccacggaagcaggggcaggaaatggcaatgtgatttgaggaaggggtcacaaaccaaagaacgcttccagaagaaaagg

SEQ ID NO: 29644 - DNA, 120 bp, synthetic construct
  source 1..120: mol_type = other DNA
actcttttcagacttctggcctctagaactgtgagaaaaaaaaaaaaagcgtgtcttgttttaagccactaagtttgtggaaatgtattacagcagccatgggaaccttatacattgata

SEQ ID NO: 29645 - DNA, 120 bp, synthetic construct; identical to SEQ ID NO: 8859
  source 1..120: mol_type = other DNA

SEQ ID NO: 29646 - DNA, 120 bp, synthetic construct
  source 1..120: mol_type = other DNA
tgcagtgaaattcttgttgatatcatttttccatttcccaattagactttttgttaactgtcgagttttgggagatgtttatatattctagatacttatcttaagtcagaaacagggtgc

SEQ ID NO: 29647 - DNA, 120 bp, synthetic construct
  source 1..120: mol_type = other DNA
attcaatgtttcctttttatggattacacttctgatgtcaggtctaagaagtctttggccctggaccccaaatatcttctgctatagcttttttctaacagccttgtggagatatagttt

SEQ ID NO: 29648 - DNA, 120 bp, synthetic construct
  source 1..120: mol_type = other DNA
ggttccagtacactgcaatgaagcaaatattgcaataaagcaagtcacacaaattttttggtttgccactgcatataaaagttatgtttatattgtagtctattaagtgtgcaatagccc

SEQ ID NO: 29649 - DNA, 120 bp, synthetic construct; identical to SEQ ID NO: 8860
  source 1..120: mol_type = other DNA

SEQ ID NO: 29650 - DNA, 120 bp, synthetic construct
  source 1..120: mol_type = other DNA
tttatataagtggaatcatacaatgtatggtcctttgtgactggttactttcacttagcatcatgttttcaaggtttgtgcttcagtgcttctttttttttccccgagacagagtctccc

SEQ ID NO: 29651 - DNA, 120 bp, synthetic construct
  source 1..120: mol_type = other DNA
ccaagcccggctaatttttgtatttttagtagtgacggggtttcgccatgttagccaggctggtctcgaactcctgacctcaggtgatccgcccacctcggcctcctaacctgctgggac

SEQ ID NO: 29652 - DNA, 120 bp, synthetic construct; identical to SEQ ID NO: 8861
  source 1..120: mol_type = other DNA

SEQ ID NO: 29653 - DNA, 120 bp, synthetic construct
  source 1..120: mol_type = other DNA
aaaaattagctgggcatggtggcaggtgcctgtaattccagctactcgggaggctgaggcaagagaattgcttgaacccgggaggaagaggttgcagtgagccgagactgtgccactgca

SEQ ID NO: 29654 - DNA, 120 bp, synthetic construct
  source 1..120: mol_type = other DNA
gagatgaagtcttgctctgtcgccaggctggagtgcagtggcgcgatctgagctcactgcaacctctacctcccaggttcaagcgattcctctgcctcagcctcccaagtagctgggatt

SEQ ID NO: 29655 - DNA, 120 bp, synthetic construct; identical to SEQ ID NO: 1785
  source 1..120: mol_type = other DNA

SEQ ID NO: 29656 - DNA, 120 bp, synthetic construct
  source 1..120: mol_type = other DNA
ctcacgttgagcatcttttcatgtgtttattaactatatgtcaaccctgaagaaatttctattccgatttttcatccattctttaagttgggatatttgtctttttgtttttgagttgaa

SEQ ID NO: 29657 - DNA, 120 bp, synthetic construct
  source 1..120: mol_type = other DNA
ttaatttttatgaagtccaatatatctactttttttcttttgttccttgttctttggtgttatatctaagaaacctctgccaaatccaaggtcataaagatttacccttatgtttaccct

SEQ ID NO: 29658 - DNA, 120 bp, synthetic construct; identical to SEQ ID NO: 8863
  source 1..120: mol_type = other DNA

SEQ ID NO: 29659 - DNA, 120 bp, synthetic construct
  source 1..120: mol_type = other DNA
tttgcattttcatatgaagttgaacatcagcttattattctacaaagaaaccagctgagattctggtaaggattgtgttgagtttgtagatcagcacgattccgggagtgttgccatctt

SEQ ID NO: 29660 - DNA, 120 bp, synthetic construct
  source 1..120: mol_type = other DNA
tcccaaggtattttattttttctttattatggtaaaaatatacataaaatctactattttactcattttaagtatatagttatgtggcattaggtaaattcgcactgttgtgctttattc

SEQ ID NO: 29661 - DNA, 120 bp, synthetic construct; identical to SEQ ID NO: 8864
  source 1..120: mol_type = other DNA

SEQ ID NO: 29662 - DNA, 120 bp, synthetic construct
  source 1..120: mol_type = other DNA
tactctggtagtttatgctaagagctggttgtttaaagaatctgctacctccctccaccttgctcctgctcttgccatgtgatatgcctgcccctctgcctttcgccatgattgtaagct

SEQ ID NO: 29663 - DNA, 120 bp, synthetic construct
  source 1..120: mol_type = other DNA
cacaaaactggaccagcacaaatttatgtcatctccaaatagttctacttctttctttcagtctggattctttttcttcccaaattatcctggatggaacactcaataaatgttgaatag

SEQ ID NO: 29664 - DNA, 120 bp, synthetic construct
  source 1..120: mol_type = other DNA
acagagtctcgctctgtcacccaggctggaatgcagtggtgtgatcacggctcactgcaagctccacctcccaggttcacgccattcttctgcctcagcctcccgagtagctgggactac

SEQ ID NO: 29665 - DNA, 120 bp, synthetic construct; identical to SEQ ID NO: 8865
  source 1..120: mol_type = other DNA

SEQ ID NO: 29666 - DNA, 120 bp, synthetic construct
  source 1..120: mol_type = other DNA
acccccaatgttggtattaggaggtgaggcctttgggaagtggttaggtcatgagggtggagacctcatggaatggattagtgcccttgtaaaagagacctcagtgagctcctttttttc

SEQ ID NO: 29667 - DNA, 120 bp, synthetic construct
  source 1..120: mol_type = other DNA
taaatttctgtgtttataagccaccagttcgtgatactttgttataacagtctgaacagactgacagaaatcgtggtgttttgtcttttattctgttgataatggtgtattacattaatt

SEQ ID NO: 29668 - DNA, 120 bp, synthetic construct
  source 1..120: mol_type = other DNA
gttttacatcattttcatcacagttattgtaatgaaatacaaaaatcaatagtattcctatacactgtcaaaaacaatctgaaaataagaaaacaattctatttacaacatcaagaaagc

SEQ ID NO: 29669 - DNA, 120 bp, synthetic construct; identical to SEQ ID NO: 8866
  source 1..120: mol_type = other DNA

SEQ ID NO: 29670 - DNA, 120 bp, synthetic construct
  source 1..120: mol_type = other DNA
tgtcaatttcatctaagttttataatttattggcacaaaattgttcatagtgttccttcataatcctttttatttctgtcaggttggtagtatacttccctcattcattcctttttcctt

SEQ ID NO: 29671 - DNA, 120 bp, synthetic construct
  source 1..120: mol_type = other DNA
ctcctagtctcaagtgatccttgccccttagcctatgacaggtgtgcaccacaacaccagctgttattcaaaaaatattttgtagagatagggtcttgctttgttgtgcatgctattctt

SEQ ID NO: 29672 - DNA, 120 bp, synthetic construct
  source 1..120: mol_type = other DNA
aatttgtaaaactgtcattcatttctgattttagtaatttgagttttctctctccccctttgcctcatgcacttccctctctgtctttcctcctccccctctttcttcctccccttcttt

SEQ ID NO: 29673 - DNA, 120 bp, synthetic construct
  source 1..120: mol_type = other DNA
ttattattttgttttttctacttgctttaggtttagtttgctcttctttttctagtttcttgaggtggagagttggcttactgatttgaagccttattttttgatataggcattcatagc

SEQ ID NO: 29674 - DNA, 120 bp, synthetic construct; identical to SEQ ID NO: 8867
  source 1..120: mol_type = other DNA

SEQ ID NO: 29675 - DNA, 120 bp, synthetic construct
  source 1..120: mol_type = other DNA
tgtatattcaatgttggttgttgggcgaagtgctctataattaccttttgagtctagttggtttatggtgttgctcatatcttctgtttccttattgatcttctttcttgtactacacat

SEQ ID NO: 29676 - DNA, 120 bp, synthetic construct
  source 1..120: mol_type = other DNA
tcttatgttttagttctctattgttaggtgaatatatgtttataatcattgtatcttctcatgaattgacattttatcattatgagatattcatatttaacttcagtaacattcttaatt

SEQ ID NO: 29677 - DNA, 120 bp, synthetic construct; identical to SEQ ID NO: 8868
  source 1..120: mol_type = other DNA

SEQ ID NO: 29678 - DNA, 120 bp, synthetic construct
  source 1..120: mol_type = other DNA
ctctatttctcctttgctgctttcttttccatctagtgactactttctaatataaattttcatttcttttatgattcttcaatattctatttgttattagtgtttgctctagggcttacc

SEQ ID NO: 29679 - DNA, 120 bp, synthetic construct
  source 1..120: mol_type = other DNA
agttttaccactttttgtggtattgttacatatattacatctttattatgcgctattataatgatcatactatataatgatatatctttaaagaagctgaaaggagagcaagtatatatt

SEQ ID NO: 29680 - DNA, 120 bp, synthetic construct
  source 1..120: mol_type = other DNA
acctccttgctctttgcttttggatatatgtgaacttcctgggagcacttcctttttgcctgaagaacttcctctagtagttcttacaaaactggtctgctaacaaggaattctgttttt

SEQ ID NO: 29681 - DNA, 120 bp, synthetic construct; identical to SEQ ID NO: 8869
  source 1..120: mol_type = other DNA

SEQ ID NO: 29682 - DNA, 120 bp, synthetic construct
  source 1..120: mol_type = other DNA
ttgttcagttgtctgtttctctcttcatttctgacagttttatttcatatacttcagggctgtgtttttagctgttataaatttttatttctttatgacttctgtttatgatttctattt

SEQ ID NO: 29683 - DNA, 120 bp, synthetic construct
  source 1..120: mol_type = other DNA
gagtctcactctgttgcccaggctggagtgcagtggcgtgaccttggctcactgcaacctctgcctcccggattcaagccgttctcttgcctcagcatcccaagtagctgggactacagg

SEQ ID NO: 29684 - DNA, 120 bp, synthetic construct
  source 1..120: mol_type = other DNA
ttacaggtgtgagccactgcacccagccaattttgtctgattttagtacagtcactctagctttcttattactgtttgcatgtcatctttttccatcattttactttcaactatgtcttt

SEQ ID NO: 29685 - DNA, 120 bp, synthetic construct; identical to SEQ ID NO: 8870
  source 1..120: mol_type = other DNA

SEQ ID NO: 29686 - DNA, 120 bp, synthetic construct
  source 1..120: mol_type = other DNA
ctgcttcaggttaataatctactcaaatatttttgtctgccctattctctccttctcagtactcttattaacacatatgttgttactccttaattccacatatgttttctactcttaatt

SEQ ID NO: 29687 - DNA, 120 bp, synthetic construct
  source 1..120: mol_type = other DNA
gcaggaggtgagcagcaggcaagcaagcattactgcctgagctctgcctcctgtctgatcagtgatggcattagattctcacagagagcaaatcctattgtgaactgagcatgtgaggga

SEQ ID NO: 29688 - DNA, 120 bp, synthetic construct
  source 1..120: mol_type = other DNA
tatccaatgggtatctcttcatttttcttcattatttttctttctattcttcagtctgaatcatctttatggatctgcgttgaagttcattgattctttcttctgccaggtcaaatttgc

SEQ ID NO: 29689 - DNA, 120 bp, synthetic construct
  source 1..120: mol_type = other DNA
cacttgcattctttaatgtggtttcttttggttctttgaacatagttataatacttactttgaaatcgcgccctaacatttggggcccttcagagataattcctatttattgctcattat

SEQ ID NO: 29690 - DNA, 120 bp, synthetic construct; identical to SEQ ID NO: 8871
  source 1..120: mol_type = other DNA

SEQ ID NO: 29691 - DNA, 120 bp, synthetic construct
  source 1..120: mol_type = other DNA
attagtcagacatttgtttaaacatcttgagccagtgaatcttccaccctctgctgaggggatctatgtgtgggttgggacattcaaagttcaggcactttataactctgtcctgtattt

SEQ ID NO: 29692 - DNA, 120 bp, synthetic construct
  source 1..120: mol_type = other DNA
atgtacaacttccatatctccagaattccttttaaaatttttcttaatctgtcgcttgcccaaccagtattgaaacattaggttgctgtgatgtgggttgcctccaattatttgccactg

SEQ ID NO: 29693 - DNA, 120 bp, synthetic construct; identical to SEQ ID NO: 8872
  source 1..120: mol_type = other DNA

SEQ ID NO: 29694 - DNA, 120 bp, synthetic construct
  source 1..120: mol_type = other DNA
tacttccaaaagtcaatactaaacaaaaggagctactgagagaaatcttcctctcacccatatctcttccatcctaattccccctacccattataggtaaccagtttcagtgttttctag

SEQ ID NO: 29695 - DNA, 120 bp, synthetic construct
  source 1..120: mol_type = other DNA
aaatcactcaacatccattcacagagatctttctcattgcattgctaaagttgcatagtattccttagtgtgactgtgctataacctttcaaccaatctcttatgcttgcatgtgtaggt

SEQ ID NO: 29696 - DNA, 120 bp, synthetic construct
  source 1..120: mol_type = other DNA
atcttagtcatttgcaagagcctccactatagctgctgctctggactacctatttctgacatgtgttctccatgttgacatttaatatagagtcttctttttctggtgataattctgtct

SEQ ID NO: 29697 - DNA, 120 bp, synthetic construct
  source 1..120: mol_type = other DNA
cttagtacatttacaatattgtgttttttgtgtcttttctaagaatttatttccaatctcaagtcataaagatttactcctgttttctactaagaaatttatgcctttaactcttatttt

SEQ ID NO: 29698 - DNA, 120 bp, synthetic construct; identical to SEQ ID NO: 8873
  source 1..120: mol_type = other DNA

SEQ ID NO: 29699 - DNA, 120 bp, synthetic construct; identical to SEQ ID NO: 1795
  source 1..120: mol_type = other DNA

SEQ ID NO: 29700 - DNA, 120 bp, synthetic construct
  source 1..120: mol_type = other DNA
tttatttaagtcttctttaatttttgtcaacagtgttttgtagtctttagtgcagaagtctttcaccttcttgttttaatttattcctagctattttactctttttgatgctattgtaag

SEQ ID NO: 29701 - DNA, 120 bp, synthetic construct; identical to SEQ ID NO: 8874
  source 1..120: mol_type = other DNA

SEQ ID NO: 29702 - DNA, 120 bp, synthetic construct
  source 1..120: mol_type = other DNA
ttatgggagaaatttttcagttttttttctcattaagtatattagttgtggatttttcacaaatcctctttaacacattttgaaagttccatgtttttatcctgaaaggttgtagaattt

SEQ ID NO: 29703 - DNA, 120 bp, synthetic construct
  source 1..120: mol_type = other DNA
gataaattccatgtggtcatgatatataatcctttttaatatgctgctgaatttggcttactagtactttgttaaataaaagattttagtatctagtttgtcttttcttgtggtatattt

SEQ ID NO: 29704 - DNA, 120 bp, synthetic construct
  source 1..120: mol_type = other DNA
ttcaacagtgacgccatctgtgtagcattttcttcattggaaggtttttggttactgattcaaactttctacttgttatgggtctgctcataatttcaatttctgttttggtctgtatta

SEQ ID NO: 29705 - DNA, 120 bp, synthetic construct
  source 1..120: mol_type = other DNA
gtttttttttcttatttttgtttttttttgttgtgttcctacttttgtttatgattttagatatgtgcaacttctctaattttttattagtcattctagttaaaggttttcaactttgat

SEQ ID NO: 29706 - DNA, 120 bp, synthetic construct; identical to SEQ ID NO: 8875
  source 1..120: mol_type = other DNA

SEQ ID NO: 29707 - DNA, 120 bp, synthetic construct
  source 1..120: mol_type = other DNA
aggttatggatccttcttctttttcagtgtgggcattcacagctataatttttcctctgagcacttctttcactacatcccataagtctgagtatgttgtgtcgtcattttcactttttg

SEQ ID NO: 29708 - DNA, 120 bp, synthetic construct
  source 1..120: mol_type = other DNA
cctcactatattgtagttagagaagatattttgtatgatttctatattttaaaatttattgagactcttttgtggcctaacatatcatccctcctagggaatgttccatgtgcacttgag

SEQ ID NO: 29709 - DNA, 120 bp, synthetic construct
  source 1..120: mol_type = other DNA
ttttttttttttaattttaaaaatatgcatatttagtgtataaaacatacagttaaatcgttaacatagtgatgcaaattaatatgtccatcatctcacagttattcttttgtgtgtatg

SEQ ID NO: 29710 - DNA, 120 bp, synthetic construct
  source 1..120: mol_type = other DNA
ctttgacctacatctttccattttcttcccccacaccttgcccatggtaaccactagtttattctatctctgtatatttgacttttttctttttaagattctacatataggtgagattat

SEQ ID NO: 29711 - DNA, 120 bp, synthetic construct; identical to SEQ ID NO: 8876
  source 1..120: mol_type = other DNA

SEQ ID NO: 29712 - DNA, 120 bp, synthetic construct
  source 1..120: mol_type = other DNA
gtacaagagttccctaaccctagccaacacttaatagctattctcatgagtgtgaggtgatatcgcatagtaattttgatttgcatttccctgacgattagtgatgttaaatgtcttttc

SEQ ID NO: 29713 - DNA, 120 bp, synthetic construct
  source 1..120: mol_type = other DNA
ttggatattatcctcttataagatatatggttggcaaatattttcttctagtccataggttgccttttccttttgttgactgtttccgttcctgtgcagaagttttttagtttgatggta

SEQ ID NO: 29714 - DNA, 120 bp, synthetic construct
  source 1..120: mol_type = other DNA
aggtcttttatccattttgagtttatttctatgtatggtgtaaggcagcgatatcaaatcttttggcttcccggggccacactgtaagaacaattgtcttaggccacacataaaatacac

SEQ ID NO: 29715 - DNA, 120 bp, synthetic construct; identical to SEQ ID NO: 8877
  source 1..120: mol_type = other DNA

SEQ ID NO: 29716 - DNA, 120 bp, synthetic construct
  source 1..120: mol_type = other DNA
tgttttttatgccaggaccatactgtttgatcaatagttttgtaaaataaaccagaaagtatgaagtctccctttgtttttcagaacagaattttcagaatttcgttggctacttaaggt

SEQ ID NO: 29717 - DNA, 120 bp, synthetic construct
  source 1..120: mol_type = other DNA
ttcatgagcatgggatatctttccatttatttgtatcttgtttaatttctttcatcaatgattcatagttttcagtgtacaggtctttcatctttttggctaaatttattcctaagcaat

SEQ ID NO: 29718 - DNA, 120 bp, synthetic construct
  source 1..120: mol_type = other DNA
actcatttattagttctaacaggttgctttgtcagagtcttcggggttttctatatgtaggatcatgtcatcttcatataaagataatattacttcttacttcctgatttgaatgtcttt

SEQ ID NO: 29719 - DNA, 120 bp, synthetic construct; identical to SEQ ID NO: 8878
  source 1..120: mol_type = other DNA

SEQ ID NO: 29720 - DNA, 120 bp, synthetic construct
  source 1..120: mol_type = other DNA
catgatatataatctttttgatgtattgttaaatttagtctgccaatattttattaaggatttttgcatcggtattcttgggttatgttggcctgtagtttccttttcttgtgatgcctt

SEQ ID NO: 29721 - DNA, 120 bp, synthetic construct
  source 1..120: mol_type = other DNA
taagaagtattggtattctttgaatattgggtagtattcagtcatgaagctatctggtcctgggcttttctttgtttgaggttttggggtttttttaacttttatttttgatttagaggg

SEQ ID NO: 29722 - DNA, 120 bp, synthetic construct
  source 1..120: mol_type = other DNA
gcccacctctccattcctcccccaagtagtccccagtgtctactgatcatctttatgtccatgtttactcagtgtttaggtcccacttgcaagtggtaacatgcagtatttggttttctg

SEQ ID NO: 29723 - DNA, 120 bp, synthetic construct
  source 1..120: mol_type = other DNA
ttcgctcttgttgcccaggctggagggcaatggcatgatctcggctcactgcagcctccgcctaccgggttcaagtgattctcctgcctcagcctcctgagtagctgggattagaggcat

SEQ ID NO: 29724 - DNA, 120 bp, synthetic construct; identical to SEQ ID NO: 8879
  source 1..120: mol_type = other DNA

SEQ ID NO: 29725 - DNA, 120 bp, synthetic construct
  source 1..120: mol_type = other DNA
tcagatggtagttctgttttcagttatttgagaaaactccaaactgcttagcacagtggctgaactaatttgtattcctgccaacagtgtataagcgttcccttttctctgcagccttcc

SEQ ID NO: 29726 - DNA, 120 bp, synthetic construct
  source 1..120: mol_type = other DNA
tttttgcttttttgtttgtttgtttgttttttgagaaagagtcttgctctgtctcccaggctggagtgcagtggcgcaatctcggctcactgcaacctccacctcctgggttcaagcaat

SEQ ID NO: 29727 - DNA, 120 bp, synthetic construct; identical to SEQ ID NO: 8880
  source 1..120: mol_type = other DNA

SEQ ID NO: 29728 - DNA, 120 bp, synthetic construct
  source 1..120: mol_type = other DNA
ggacctttgccagatgaatagtttgcaaatattttttctcccattctatatgttgtctgtttactctgttgataatttcttttgctatgcagaagctctttagtttaccactgtgatctc

SEQ ID NO: 29729 - DNA, 120 bp, synthetic construct
  source 1..120: mol_type = other DNA
aagtcccttatgatcctttttatttctgaagtacctgttgtaatatattctccattttcatttctgattttgtcctctttcttagtccaagagtttgttgattttatttttcaaaaatca

SEQ ID NO: 29730 - DNA, 120 bp, synthetic construct
  source 1..120: mol_type = other DNA
tgttcttctttttctaattccttgaggtacaattttgggctatttgaaatatctcttcttttttaatgtaggcaaggcatttattgctgtaaacttccctcttagaactgcttttgctgc

SEQ ID NO: 29731 - DNA, 120 bp, synthetic construct; identical to SEQ ID NO: 8881
  source 1..120: mol_type = other DNA

SEQ ID NO: 29732 - DNA, 120 bp, synthetic construct
  source 1..120: mol_type = other DNA
ctccagctttctttaggttactatttgtatgaaatatcatttttcattctttcactttcaatctacttgtgtctttagaccaaaagtgagtttgttatatacagcataggttgatggttt

SEQ ID NO: 29733 - DNA, 120 bp, synthetic construct
  source 1..120: mol_type = other DNA
tttaaatacaacatttcctcccttactgcctttttttgtgtttgatgattttctgatagtgtaccattatgattctctattcgattgtctgtatgtgtgtatgtgtattttaaagacttt

SEQ ID NO: 29734 - DNA, 120 bp, synthetic construct
  source 1..120: mol_type = other DNA
ggcacgtttgttacaacttatgaatctgcatttacacattattatcaaagtccctagttaacattagggctcactgttggggtgtacattctgtgggtttctacaaatgtgtaacatgtt

SEQ ID NO: 29735 - DNA, 120 bp, synthetic construct; identical to SEQ ID NO: 8882
  source 1..120: mol_type = other DNA

SEQ ID NO: 29736 - DNA, 120 bp, synthetic construct
  source 1..120: mol_type = other DNA
atatgcatgtatctaccattatagtatcatacagatacgtatatttacatatatttgtacattttcactgccctaaaagtactctgtgcactgcctattcaacccttcttccccaacaac

SEQ ID NO: 29737 - DNA, 120 bp, synthetic construct
  source 1..120: mol_type = other DNA
tttttaattacctccatatcttttcatggcttgatagctcatttctatttagtgatgaataatatttcattgcctggatgtactacagtttatctgtctactcacctatggaaggacatc

SEQ ID NO: 29738 - DNA, 120 bp, synthetic construct
  source 1..120: mol_type = other DNA
ctgcatggtaagaatatgtttaattttataagaaaccactgatttcgatatactctggattcttcgggggatatgtatacacattcagaagtggaattgatggatcctatgataattcca

SEQ ID NO: 29739 - DNA, 120 bp, synthetic construct
  source 1..120: mol_type = other DNA
agtgttcctgttgccccacatattggcaagtatttggtattgtcagtgttttgaattttggccattctaataagcgtgtagatatatcacatttcttgttttaatttccatttccctaat

SEQ ID NO: 29740 - DNA, 120 bp, synthetic construct; identical to SEQ ID NO: 8883
  source 1..120: mol_type = other DNA

SEQ ID NO: 29741 - DNA, 120 bp, synthetic construct
  source 1..120: mol_type = other DNA
atcttctgggatttctatttgttgttgatttccaaatcttttattgtggcaaaatacacttaacataaaaattaccatcctaaccaattttagtgtacaattcagtgaatgtattagata

SEQ ID NO: 29742 - DNA, 120 bp, synthetic construct
  source 1..120: mol_type = other DNA
tggaaaccaccttgtactttctatgtctctgatttgactattctacatacctcatataagtggaaacatacagtacttctcttcttgtgactgctgtatttcatttaacataatggcctc

SEQ ID NO: 29743 - DNA, 120 bp, synthetic construct
  source 1..120: mol_type = other DNA
attgatgttttaactgttgtaaataatgccactacaatcgtgggtatacaaatatatctttgagactgcttttaatccttctgggtgtatacacagaggtggagttgatggatcagataa

SEQ ID NO: 29744 - DNA, 120 bp, synthetic construct; identical to SEQ ID NO: 8884
  source 1..120: mol_type = other DNA

SEQ ID NO: 29745 - DNA, 120 bp, synthetic construct
  source 1..120: mol_type = other DNA
atttcctaatgactagagatgttaaacaacttttcacgtactattatccatttgtatatcttctttggagatacgtctgtccaagtcctttgcccttttttttttttttttgagatggag

SEQ ID NO: 29746 - DNA, 120 bp, synthetic construct
  source 1..120: mol_type = other DNA
cacgcctggctaattttttgtatttttagtagagacggggtttcaccctgttagccaggatggtctcaatctcctgacttcatgatcctcccgcctcagcctcccaaagtactgggatta

SEQ ID NO: 29747 - DNA, 120 bp, synthetic construct
  source 1..120: mol_type = other DNA
tgcaaatttttctcccattctgtaggttgtcttattgcttagttgatattattttaatgcacacaatgtaaatttttaaaatttatctagttttacttttattgcctgtgcaagtacaat

SEQ ID NO: 29748 - DNA, 120 bp, synthetic construct; identical to SEQ ID NO: 8885
  source 1..120: mol_type = other DNA

SEQ ID NO: 29749 - DNA, 120 bp, synthetic construct
  source 1..120: mol_type = other DNA
tttgggctctctattcaattccattggtctctacatctttatgtcaataccacatagttttgattactgtagcttcgtaataagttggggtttttgtttgtttttcagacattcttactc

SEQ ID NO: 29750 - DNA, 120 bp, synthetic construct
  source 1..120: mol_type = other DNA
acacctggccaattattttattttttgtagagatgaggtctccctgtgttccccaggctggtctcaaactcctggactcagaagtcctcccacctcagccttcaaaagtgctgagattac

SEQ ID NO: 29751 - DNA, 120 bp, synthetic construct; identical to SEQ ID NO: 8886
  source 1..120: mol_type = other DNA

SEQ ID NO: 29752 - DNA, 120 bp, synthetic construct
  source 1..120: mol_type = other DNA
agactttcacctccttggtaaagttggttcctaagtttgttattcttgatgcttttttcagcttttattgaggtataattgacaaattaaaagtgcatatatttaagaacatatttgacc

SEQ ID NO: 29753 - DNA, 120 bp, synthetic construct
  source 1..120: mol_type = other DNA
aatatattaactatagtcaccaatctggacgttatgtcaagaacttattcatctgataactctatgtttgtacccttcaacatttcctatttcccctactccctgacccctagtaaccac

SEQ ID NO: 29754 - DNA, 120 bp, synthetic construct
  source 1..120: mol_type = other DNA
tctatgttgtcataaattgcatgatttcctgctttttaaaggatgaatatttcattgtgtgtgtgtatatatgtgtgtgtgtgtgtctgtatgtatatgtatgtgatgtgtttatttggg

SEQ ID NO: 29755 - DNA, 120 bp, synthetic construct
  source 1..120: mol_type = other DNA
gggctcaagtgatcctcctgcctcagcctcctgagtagctgggaccacagtcatgcacccccatgcccagctaatttttaaaattttatgtagagatagggtatcactatgtttcctagg

SEQ ID NO: 29756 - DNA, 120 bp, synthetic construct; identical to SEQ ID NO: 8887
  source 1..120: mol_type = other DNA

SEQ ID NO: 29757 - DNA, 120 bp, synthetic construct
  source 1..120: mol_type = other DNA
cgattctaacagttatgaggtgatatctcagtgtggttttcatttgcatttccctgatgataagtgatgttaagcacctttttatatacctgttgaccatctgtatgtcttctttgaata

SEQ ID NO: 29758 - DNA, 120 bp, synthetic construct
  source 1..120: mol_type = other DNA
ggaaatattttctcccgctacatgtgctgccttttcattttgttgtttcctttgttgtgcagacacttttttgtttgatgtagttctaatttatttttgcgttttattccttgtgctttt

SEQ ID NO: 29759 - DNA, 120 bp, synthetic construct; identical to SEQ ID NO: 8888
  source 1..120: mol_type = other DNA

SEQ ID NO: 29760 - DNA, 120 bp, synthetic construct
  source 1..120: mol_type = other DNA
gtttctttcaaattttaggattttttttgtctatatctgtgaaaaaaagtcactggaaatttgataggcattgccttgaatctgtagatcactttgagtagtatagctatttcggcaata

SEQ ID NO: 29761 - DNA, 120 bp, synthetic construct
  source 1..120: mol_type = other DNA
cctaaatgttatgcagtccaatttctctattttttattttatctgtgcctttcatattatatccaaatgaagtcaataccaaatccaatgtcatgcagtttttgccccatgttttcttct

SEQ ID NO: 29762 - DNA, 120 bp, synthetic construct; identical to SEQ ID NO: 1810
  source 1..120: mol_type = other DNA

SEQ ID NO: 29763 - DNA, 120 bp, synthetic construct
  source 1..120: mol_type = other DNA
tgctgattttgtatcctgccactttactgagttagattattacttctaacaggttttttttgtggagtctgtagcattttctacatatatgatgtcatctgcaaacagagacaattttac

SEQ ID NO: 29764 - DNA, 120 bp, synthetic construct; identical to SEQ ID NO: 8889
  source 1..120: mol_type = other DNA

SEQ ID NO: 29765 - DNA, 120 bp, synthetic construct
  source 1..120: mol_type = other DNA
atgtactaaggataaatcccatgtttgtgatatatgatttttttaatgtgctgttaaattcagtttgatcatattttgttgaaaatttttaaatgtatagtcataaaaaaatatcagcca

SEQ ID NO: 29766 - DNA, 120 bp, synthetic construct
  source 1..120: mol_type = other DNA
ccccgctacattttatttttgatgccccaaggtacaccttttaatattgcatatccattgagaaattatgaaaacaatagtaatttttaattatttttcttttaacctttatactagagt

SEQ ID NO: 29767 - DNA, 120 bp, synthetic construct; identical to SEQ ID NO: 8890
  source 1..120: mol_type = other DNA

SEQ ID NO: 29768 - DNA, 120 bp, synthetic construct
  source 1..120: mol_type = other DNA
aagtttttgctcagaaatccactgatagccttatggaggttcctgcagatgtaagaactttatttatcttgccgctttcaaaattatcttgtcttccattttttacattttgatggcaat

SEQ ID NO: 29769 - DNA, 120 bp, synthetic construct
  source 1..120: mol_type = other DNA
ctgaattaactttctaccctttacctctctactttccttctataaatcctgtgtgaacattaactctcctgatggtgtcccataaatcctgtaaacttcccttgttaccttttcattctt

SEQ ID NO: 29770 - DNA, 120 bp, synthetic construct
  source 1..120: mol_type = other DNA
tccagttgatgaattcctccttctatttgatcaagtctgctgctgatgctttctatttcacttttcatttcatgcactatattcttcacctccaaaatgtttgttttttttttaggattt

SEQ ID NO: 29771 - DNA, 120 bp, synthetic construct
  source 1..120: mol_type = other DNA
taatgtatcccaatttcttgggagtcagtccctgaaaattattgtatttctcaggtgggtgctatgtttccttggtttttctgtttcttgttacaatgaattgaaatctgctcacttgat

SEQ ID NO: 29772 - DNA, 120 bp, synthetic construct; identical to SEQ ID NO: 8891
  source 1..120: mol_type = other DNA

SEQ ID NO: 29773 - DNA, 120 bp, synthetic construct
  source 1..120: mol_type = other DNA
aaccccatctctactaaaaatacaaaaacattagccaggcatagcagcgtgtgcctgtagtcccagctacttgggaggctgaagcaggagaatggcgtgaactcgggaggcagagcttgc

SEQ ID NO: 29774 - DNA, 120 bp, synthetic construct
  source 1..120: mol_type = other DNA
tactttgctgaattaatttattcagtttttgtggtgagttttcagggatttctacaaatatgatcatatctatgaacaaacataattttaattcttcctttctaaatgatgcctttattt

SEQ ID NO: 29775 - DNA, 120 bp, synthetic construct
  source 1..120: mol_type = other DNA
tccttgtgggtttttcttctaggagtctttttctttgtccttttatttttagtcaacatgtaataattgtagatatttatgggatatacacagtgatattgtgatacatgtatataatgt

SEQ ID NO: 29776 - DNA, 120 bp, synthetic construct; identical to SEQ ID NO: 8892
  source 1..120: mol_type = other DNA

SEQ ID NO: 29777 - DNA, 120 bp, synthetic construct
  source 1..120: mol_type = other DNA
agtcaatacccggtagtggattgtcaaactgtatgatagtctacttttagtttttttgacaaaacaccacagtattttccataatgactcactaatttatagtcccacaaatagtgtatt

SEQ ID NO: 29778 - DNA, 120 bp, synthetic construct
  source 1..120: mol_type = other DNA
aatgtctcactgtggctttgacttgcatttctgtgatgagagatgttgagcattttttcacatacctgttggccagttgttctattttgcacatttctaaatcagataatctggtgtttt

SEQ ID NO: 29779 - DNA, 120 bp, synthetic construct
  source 1..120: mol_type = other DNA
gatatctcttaatagtttattatttccttttatgtgtaggtttttagtttgatacagtcccatttgtctatttttgtttttgttgcctgtgcttataaagtcttacccataaaatcttcg

SEQ ID NO: 29780 - DNA, 120 bp, synthetic construct; identical to SEQ ID NO: 8893
  source 1..120: mol_type = other DNA

SEQ ID NO: 29781 - DNA, 120 bp, synthetic construct
  source 1..120: mol_type = other DNA
atgtctgttttatgcccattgcatgctaatttggttaccattgttttgtatacaagggggattgcttccgagaccccctgtatataccaaaagccatgtatattcaagtcccagagtcag

SEQ ID NO: 29782 - DNA, 120 bp, synthetic construct
  source 1..120: mol_type = other DNA
cagttcaaatctatgttgttgaagagtcgactgtattttgatgtcaggcagtgtagtgcctccagcttcattctgcctgctcagtattgtttgtcctatttgtggtcttttgtggttcca

SEQ ID NO: 29783 - DNA, 120 bp, synthetic construct
  source 1..120: mol_type = other DNA
tacatgtgcacaacgtgcaggtttgttacatatgtatacatgtgccatgttggtgtgctgcactgattaccttgtcatttaccttaggtatatctcctaatgctttccctcccccctccc

SEQ ID NO: 29784 - DNA, 120 bp, synthetic construct; identical to SEQ ID NO: 8894
  source 1..120: mol_type = other DNA

SEQ ID NO: 29785 - DNA, 120 bp, synthetic construct
  source 1..120: mol_type = other DNA
ggtatatacccagtaaggggatggctggatcaaatggtatttctagttctagatccttgaggaatcaccacactgtcttctacaatggttgaactagtttacagtcccaccaacagtgta

SEQ ID NO: 29786 - DNA, 120 bp, synthetic construct
  source 1..120: mol_type = other DNA
gatggccagtgatgatgagcattttttcatgtgtcttttggctgcataaatgtcttcttttgagaagtgtctgttcataacctttgcccactttttgatagggttgtttgttttttcttg

SEQ ID NO: 29787 - DNA, 120 bp, synthetic construct
  source 1..120: mol_type = other DNA
gtgcagaagctctttagtttaattagatcccatttgtcaattttggcttttgttgccattgcttttggtgttttagacatgaagtccttgcccatgcctatgtcctgaatggtattgcct

SEQ ID NO: 29788 - DNA, 120 bp, synthetic construct; identical to SEQ ID NO: 8895
  source 1..120: mol_type = other DNA

SEQ ID NO: 29789 - DNA, 120 bp, synthetic construct
  source 1..120: mol_type = other DNA
aggattgtcttggcaatgcgggctcttttttggttccatatgaactttaaagtagtttttttccaattctgtgaagaaagtcattggtagcttgatggggatggcattgaatttataaat

SEQ ID NO: 29790 - DNA, 120 bp, synthetic construct
  source 1..120: mol_type = other DNA
gaagaggtccttcacatcccttgtaagttggattcctaggtattttattctctttgaagcaattgtgaatgggagttcactcatgatttggctctctgtttgtctgttattggtgtataa

SEQ ID NO: 29791 - DNA, 120 bp, synthetic construct
  source 1..120: mol_type = other DNA
ctgcaaacagggacaatttgacttcctcttttcctaattgaatatcctttctttctttctcccgcctgattgccttggccagaacttccaacactatgttgaataggagtggtgagagag

SEQ ID NO: 29792 - DNA, 120 bp, synthetic construct; identical to SEQ ID NO: 8896
  source 1..120: mol_type = other DNA

SEQ ID NO: 29793 - DNA, 120 bp, synthetic construct
  source 1..120: mol_type = other DNA
tttttgcatcaatgttcatcagggatattggtctaaaattctctttttttgttgtgtctctgccaggctttggtatcaggatgatgctggcctcataaaatgagttagggaggattccct

SEQ ID NO: 29794 - DNA, 120 bp, synthetic construct
  source 1..120: mol_type = other DNA
ttattgcctaaatttcagagcctgttattggtcttttcagggattcaacttcttcctggtttagtcttggaagggtgtatgtctccaggaatttatccatttcttctagattttctagtt

SEQ ID NO: 29795 - DNA, 120 bp, synthetic construct
  source 1..120: mol_type = other DNA
agtcttgctagaggcctatcaattttgttgatcttttcaaaaaaaccacctcctggattcattgattttttgaagggttttttgtgtctctatctccttcaattcttctctgatcttagt

SEQ ID NO: 29796 - DNA, 120 bp, synthetic construct; identical to SEQ ID NO: 8897
  source 1..120: mol_type = other DNA

SEQ ID NO: 29797 - DNA, 120 bp, synthetic construct
  source 1..120: mol_type = other DNA
tctgttcttttacatttgctgaggagtgctttacttccaattatgtggtcaattttggaataagtgcgatgtgatgctgagaagaatgtatattctgttgatttgggttggaatgttctg

SEQ ID NO: 29798 - DNA, 120 bp, synthetic construct
  source 1..120: mol_type = other DNA
attgtgtgggagtctgtctctttgtagatctctaaggacttgctttatgaatctgggtgctcctgtattgggtgcatatatatttaagatagttagctcttcttgttgaattgatccctt

SEQ ID NO: 29799 - DNA, 120 bp, synthetic construct
  source 1..120: mol_type = other DNA
catccctttattttgagcctatgtgtgtctctgcacgtgagatgggtctcctgaatacagcacactgatgggtcttgactctttatccaatttgccagtctgtgtcttttaattggagcc

SEQ ID NO: 29800 - DNA, 120 bp, synthetic construct; identical to SEQ ID NO: 8898
  source 1..120: mol_type = other DNA

SEQ ID NO: 29801 - DNA, 120 bp, synthetic construct
  source 1..120: mol_type = other DNA
gagtttctgctgagagatccgccgttagtctgatgggtttccctttgtgggtaacccaacctttctctctggctgcccttaacattttttccttcatttcaactttggtgaatctgacaa

SEQ ID NO: 29802 - DNA, 120 bp, synthetic construct
  source 1..120: mol_type = other DNA
ttgctaggttggggaagttctcctggataatatcctgaagagtgttttccaacttggttccattctccctgtcattttcatgtacaccagtcagatgtagatttggtcttttcacatagt

SEQ ID NO: 29803 - DNA, 120 bp, synthetic construct
  source 1..120: mol_type = other DNA
atcggctactgaagcttgtgcatttgtcacgtagttcttgtgccatggttttctgctccatcatgtcatttaaggacttctctacactggttattctagttagccattcgtctaatcttt

SEQ ID NO: 29804 - DNA, 120 bp, synthetic construct
  source 1..120: mol_type = other DNA
ccattgctggcgagtggctgcgttcctttggatggggagaggtgctctgagttttagaattttctgcttttctgctgttttttccccatctttgtggttttatctacctttggtctttga

SEQ ID NO: 29805 - DNA, 120 bp, synthetic construct; identical to SEQ ID NO: 8899
  source 1..120: mol_type = other DNA

SEQ ID NO: 29806 - DNA, 120 bp, synthetic construct
  source 1..120: mol_type = other DNA
tactcttttcaaagctgtgagacagggacatttaagtctgcagaggtttctgctgccttttgttcggctatgctctgtccccagaggtggagtctacagaggcaggcaggcctccttgag

SEQ ID NO: 29807 - DNA, 120 bp, synthetic construct
  source 1..120: mol_type = other DNA
ctagcaatgagcgaggctccatgggcgtgggaccctccgagccaggcgcgggatataatctcctggtgtgccgtttgctaagaccattggaaaagcacagtattagggtgggagtgatcc

SEQ ID NO: 29808 - DNA, 120 bp, synthetic construct
  source 1..120: mol_type = other DNA
acccactgtcctgtacccactgtcttgacgagccccagtgagatgaacccactacctcagttggaaatgcagaaatcacccatcttctgcgtcactcacgctgggagctatagactggag

SEQ ID NO: 29809 - DNA, 120 bp, synthetic construct
  source 1..120: mol_type = other DNA
cctggataacttcttaattttttgtagagacagggtcgtgcattgttgcccaggctggtcttgaattcctgggctcaagcgatccttctgccttggccccccaaagcactgggatttcct

SEQ ID NO: 29810 - DNA, 120 bp, synthetic construct; identical to SEQ ID NO: 8900
  source 1..120: mol_type = other DNA

SEQ ID NO: 29811 - DNA, 120 bp, synthetic construct
  source 1..120: mol_type = other DNA
ataattatctttctgtgcctggcttaaaataatgacctccagctccattcatgttgctgcaaaggacatgatttcattcttctttggtcaattagtattccattgtatatatttacctca

SEQ ID NO: 29812 - DNA, 120 bp, synthetic construct
  source 1..120: mol_type = other DNA
tttcctttagataaatatccagtagtgagattgctggattatgtcatatttctctttttaggtttttcagaaatcaaactgttttctatagtattaatttacattcccaccaacagtgta

SEQ ID NO: 29813 - DNA, 120 bp, synthetic construct
  source 1..120: mol_type = other DNA
taaatatacctgttggctacttgtatgttttcttttgagaaatatctatccatgtcttttgctcactttttattggaattaatttgttgtttactattgagttattggagttcctagtat

SEQ ID NO: 29814 - DNA, 120 bp, synthetic construct
  source 1..120: mol_type = other DNA
agtcccatttgtctatttttgtttttgtctgtgtttttgaggtcttatccataaaatctttccctagaccaatgtcctaaagtgtttccccaatgtctccttcattaatagtgatgttat

SEQ ID NO: 29815 - DNA, 120 bp, synthetic construct; identical to SEQ ID NO: 8901
  source 1..120: mol_type = other DNA

SEQ ID NO: 29816 - DNA, 120 bp, synthetic construct
  source 1..120: mol_type = other DNA
gaattttaggattttttctatttccatgaaaaatggcattggtattttgagagagactgcattgaatctgtagattgctttgggtagtatggtcattttaattttgttaattctcccaat

SEQ ID NO: 29817 - DNA, 120 bp, synthetic construct
  source 1..120: mol_type = other DNA
ggttgtaaaagataatgccttcttgatttctttctcagctggttctttattggtatatagaaataagcctgatttttaaatcctgtaactgtaatcaatttattgatcagactgaagagt

SEQ ID NO: 29818 - DNA, 120 bp, synthetic construct
  source 1..120: mol_type = other DNA
ttcaaaaaccgattttgcatttcattgatcctttatatttatttagtttcttgtttagttctgctctgatcttcgttatttctttccttctactaattttatgtttagtatggtttgttc

SEQ ID NO: 29819 - DNA, 120 bp, synthetic construct
  source 1..120: mol_type = other DNA
agtttcagaatgttgtgcttctattttcacttgtttcagtaaattttttatttctgccttaatttcttctttgacccattggtcattcaggaacatgttaatttccatttatttatacag

SEQ ID NO: 29820 - DNA, 120 bp, synthetic construct; identical to SEQ ID NO: 8902
  source 1..120: mol_type = other DNA

SEQ ID NO: 29821 - DNA, 120 bp, synthetic construct
  source 1..120: mol_type = other DNA
atatctgggtgctttggtgttgggtgcatatatgtttagaattgttatatcctcttggtcaattgatccctctgtcactatataatgacttcgtctctttttagtgtttttagcttaacc

SEQ ID NO: 29822 - DNA, 120 bp, synthetic construct
  source 1..120: mol_type = other DNA
gtagatagcatttagatgggtcatgtttttaagtccattcagccagtctgtcttttaagtagaaagtttaatctatttatatgcaaggttattgttgatatgtgagggcttattcctgtc

SEQ ID NO: 29823 - DNA, 120 bp, synthetic construct
  source 1..120: mol_type = other DNA
ttacttttaagggaaatactttatttctccttcatttctgacgaatataactttgctaagtacagtattcctggctggcaggtttttggttttgttttttctttcagcactctgcgtata

SEQ ID NO: 29824 - DNA, 120 bp, synthetic construct; identical to SEQ ID NO: 8903
  source 1..120: mol_type = other DNA

SEQ ID NO: 29825 - DNA, 120 bp, synthetic construct
  source 1..120: mol_type = other DNA
ctatatttttgtctgagtcatttcaaaagacttatcttcaaggtgtgaaattctttcttctgcttgttgtggtctgttattgaagctttcaaatatgttttttatttcattcaatctatt

SEQ ID NO: 29826 - DNA, 120 bp, synthetic construct
  source 1..120: mol_type = other DNA
ttatattgaatttttcaaggtttcatcaatttctttttcactggaatctgttggagaattattgcattccttaggagttgtcatgttttgccttttcatgtttcttgtgtgcttacactg

SEQ ID NO: 29827 - DNA, 120 bp, synthetic construct; identical to SEQ ID NO: 1825
  source 1..120: mol_type = other DNA

SEQ ID NO: 29828 - DNA, 120 bp, synthetic construct
  source 1..120: mol_type = other DNA
ttgggcccaatggtagtgtatgctggtaccagtgttagcaagtccagggaaaccaattttgggcctccaggcaacttgctcaggtgccaatgatgacagagctgggccacagggtgggta

SEQ ID NO: 29829 - DNA, 120 bp, synthetic construct
  source 1..120: mol_type = other DNA
tccatgctggtattgggatggctgggataagctggatgagcttgtcccaaggcccacaggtggcaaattcaagtgaatgccagttgtggtggtaatggtcagttgggtagggcagtcctc

SEQ ID NO: 29830 - DNA, 120 bp, synthetic construct
  source 1..120: mol_type = other DNA
tcctgaggccctccagtaatgcaagaatgtactgactgtggtaggcaggcacaggaagatccctgtataccctgctgaatgctcatgttggggcagcagcaactctattgcagccctact

SEQ ID NO: 29831 - DNA, 120 bp, synthetic construct
  source 1..120: mol_type = other DNA
tgcttcggaggtagcagagtattgccaatggctcatgctttggcctggagggagcagtcaggagtggcaaccagctttgtgtaagggatgtccatggggctccagggatgagatagaggg

SEQ ID NO: 29832 - DNA, 120 bp, synthetic construct; identical to SEQ ID NO: 8905
  source 1..120: mol_type = other DNA

SEQ ID NO: 29833 - DNA, 120 bp, synthetic construct
  source 1..120: mol_type = other DNA
tgcctgactcccctcttatcccttgcattgggtttttcttattacttctcagttgaattccagcattctctcagaggcgatctatataaactgtggttacctacttgctatattttgtgg

SEQ ID NO: 29834 - DNA, 120 bp, synthetic construct
  source 1..120: mol_type = other DNA
ttcaatccatgagcatgggatgtctcaaaaaattttgtagcctcttcaattactgttatcagtattttatagttttcattgtggaaatctttcacctccttggttaagctttgctttttt

SEQ ID NO: 29835 - DNA, 120 bp, synthetic construct
  source 1..120: mol_type = other DNA
ttgggggaggcaggggagtgcagacagggtctcactctgttgcccaggctggggtgcaatggtgcaatttctgctcactgcaaccttcacctccgaggttcaagtgatcctcccatctca

SEQ ID NO: 29836 - DNA, 120 bp, synthetic construct; identical to SEQ ID NO: 8906
  source 1..120: mol_type = other DNA

SEQ ID NO: 29837 - DNA, 120 bp, synthetic construct
  source 1..120: mol_type = other DNA
gaggacttttcttactctgctgaataagaatagtgaaagtgggcatccttgtcttgttctagttctaagagagaaggtgtttagcttttccccaggtggctgtgggtttgtcatatatga

SEQ ID NO: 29838 - DNA, 120 bp, synthetic construct
  source 1..120: mol_type = other DNA
tgtccttccttctgttaatgtgatgtatcacatttattgatttgtatatgttgaaccatccttgaatccctgggataaatcccacttgattatggtgtattatctttttgatgtgcgatt

SEQ ID NO: 29839 - DNA, 120 bp, synthetic construct; identical to SEQ ID NO: 8907
  source 1..120: mol_type = other DNA

SEQ ID NO: 29840 - DNA, 120 bp, synthetic construct
  source 1..120: mol_type = other DNA
ggttatatatgtccaggaatttatctctttcctctaggttttctaattgttgacatatagttgttcataatggtctctaataatcttttgtatttctgtggtgtccattgtaagtctcct

SEQ ID NO: 29841 - DNA, 120 bp, synthetic construct
  source 1..120: mol_type = other DNA
agtactttggaaggccaaggcaggccgatcgcttgagtccaggagtttgagaccagcctgagcaacatggcaaacccccatctctaccaaaaaaaaaaaaaaaaattagcgaggtgtggt

SEQ ID NO: 29842 - DNA, 120 bp, synthetic construct
  source 1..120: mol_type = other DNA
cggggggtgggggggaggcctcatttcattgatcttttgtcttttttaccttttatctctatttcatttagatctgctctgatctttactatttatttccttctaattttaggtttgatt

SEQ ID NO: 29843 - DNA, 120 bp, synthetic construct
  source 1..120: mol_type = other DNA
accctatacatttttgtatgctgtgtttctattttcatttgtttcaaagaatttttaaatttttaaaatcaatttcttcatagacacagtggtcattcaggaacatgtagtttgatttcc

SEQ ID NO: 29844 - DNA, 120 bp, synthetic construct; identical to SEQ ID NO: 8908
  source 1..120: mol_type = other DNA

SEQ ID NO: 29845 - DNA, 120 bp, synthetic construct
  source 1..120: mol_type = other DNA
gctgaattgatccatttataattatataatgacctcctttgtctcttttttctttttctttttttttttttttttttttttgactcagtattttttgtctgtctactcctgcatgctttt

SEQ ID NO: 29846 - DNA, 120 bp, synthetic construct
  source 1..120: mol_type = other DNA
tataggcagcatgtaattgggttttatttttttaattcatttagccagtatctatctttcatttgggaaatttaaattacctacattcaagattgttatcaataggtgaggacttactcc

SEQ ID NO: 29847 - DNA, 120 bp, synthetic construct; identical to SEQ ID NO: 8909
  source 1..120: mol_type = other DNA

SEQ ID NO: 29848 - DNA, 120 bp, synthetic construct
  source 1..120: mol_type = other DNA
cttgcagcacttttaatatggcattcaattctttcctggcctagaaggtttctgctgaaaaatctgttaatctgctgttgattcccttatatgtgacttcatgcttctctcttgtttttt

SEQ ID NO: 29849 - DNA, 120 bp, synthetic construct
  source 1..120: mol_type = other DNA
actttggcagttttcaggtattatcttcttaaatagattttctggtccttatcccaacacttcttctggaactcccaaaatgtgaaatattgttagcttaatagtgtctcatatgtcacg

SEQ ID NO: 29850 - DNA, 120 bp, synthetic construct
  source 1..120: mol_type = other DNA
caattgtattttttatttcattcatttaatttatcacctccaggatttttgtttggttctttttcatatctaactctgctggatttcccatttagataatgaattgttttcctgatatgt

SEQ ID NO: 29851 - DNA, 120 bp, synthetic construct; identical to SEQ ID NO: 8910
  source 1..120: mol_type = other DNA

SEQ ID NO: 29852 - DNA, 120 bp, synthetic construct
  source 1..120: mol_type = other DNA
ggtgcttaggatgtctgtgaaggcaagaaggctccttagaggtacttactcctctatttttgctgatgttgctaactaccttcaaactttttgacaaagcattttaagcctcttctctga

SEQ ID NO: 29853 - DNA, 120 bp, synthetic construct
  source 1..120: mol_type = other DNA
tcatgtggttttatttgcacttactgattttatgcttttaggggaggatgagtgagatgatttatagtcagaggggatgaggagcagcatgctatttttctccaagcctggctgaaagtc

SEQ ID NO: 29854 - DNA, 120 bp, synthetic construct
  source 1..120: mol_type = other DNA
tttctctgcctacattgttgtccatacctcattactggtctcttgatttccactcttgcttcctgtactccattcttcacataacagctcaagggagttctttaaatgtacagtggatct

SEQ ID NO: 29855 - DNA, 120 bp, synthetic construct
  source 1..120: mol_type = other DNA
caggaattaagctgtgctggtcacttattgagaaagagcttcatggtgggcagctgggaagctgcacagaacactcctcagagttctacaagcggctgagagagctggggtatttatctt

SEQ ID NO: 29856 - DNA, 120 bp, synthetic construct; identical to SEQ ID NO: 8911
  source 1..120: mol_type = other DNA

SEQ ID NO: 29857 - DNA, 120 bp, synthetic construct
  source 1..120: mol_type = other DNA
gtttcctgtaataggccatttcctaagtaagcatcatcctcatttctatacgttttctctgattactggaaattcctcaagtgttgaccattttgattcctgggccccttaagagtccat

SEQ ID NO: 29858 - DNA, 120 bp, synthetic construct
  source 1..120: mol_type = other DNA
catttctatacgttttctctgattactggaaattcctcaagtgttgaccattttgattcctgggccccttaagagtccattagcattggaatggagcccacaggaccataccagacagat

SEQ ID NO: 29859 - DNA, 120 bp, synthetic construct
  source 1..120: mol_type = other DNA
ccaagctgagttgattacttttgacatcagttgttaacataattttgatgttgagcctccccccagttctggggtggctctgactgtgtccaggctccaatttgagaagctatggggagc

SEQ ID NO: 29860 - DNA, 120 bp, synthetic construct
  source 1..120: mol_type = other DNA
ggcctggagccggatgctgagaatgaggcctgcaactcatttccccattaaacattctgagaacatctgcaccggtttccaaggcttctccctcactaattgctttgattattgtgtgaa

SEQ ID NO: 29861 - DNA, 120 bp, synthetic construct; identical to SEQ ID NO: 8912
  source 1..120: mol_type = other DNA

SEQ ID NO: 29862 - DNA, 120 bp, synthetic construct
  source 1..120: mol_type = other DNA
ccctgaaaatgtgtcttgggagacctagacagtgacttcctgcagcatggagacccgggtgggtcgattttagttgtgtgggtggctgtgttgctctctttccgtttcctgggctcactc

SEQ ID NO: 29863 - DNA, 120 bp, synthetic construct
  source 1..120: mol_type = other DNA
cctgcagagacatttccgttcactctgagatttgtgtatgctgaggcttgctatacttattctaaggagaagtgtttggggtgtggggtgtggtcctcagtatcctaaacttaggttttg

SEQ ID NO: 29864 - DNA, 120 bp, synthetic construct; identical to SEQ ID NO: 8913
  source 1..120: mol_type = other DNA

SEQ ID NO: 29865 - DNA, 120 bp, synthetic construct
  source 1..120: mol_type = other DNA
cagtgcagaccagtttagctattttgtaaccttgactgcccccaggcccatgtccgtaggctcacacctcacccccaactttgtcatgcacattcctgaagactctcttggtaacaaatg

SEQ ID NO: 29866 - DNA, 120 bp, synthetic construct
  source 1..120: mol_type = other DNA
ctcactctcccctcttgcactccccttctcccttcccgttccctcttttgttctccctttcccttgctctctatccattggccccatgggatggctgtatccttaggcagctactttcta

SEQ ID NO: 29867 - DNA, 120 bp, synthetic construct
  source 1..120: mol_type = other DNA
gtacaagccatccttggacctgcagctgtacctccgatggctgaggcaaggtccacagggacccctttggggatggccagagggtacctaaacactgcacactaggagtgggaaaggaag

SEQ ID NO: 29868 - DNA, 120 bp, synthetic construct; identical to SEQ ID NO: 8914
  source 1..120: mol_type = other DNA

SEQ ID NO: 29869 - DNA, 120 bp, synthetic construct
  source 1..120: mol_type = other DNA
gcagggcctggctgcagctgtccggatgcccctggggagggcttctccttcacagtgcaggatccgcagggctttggtgaatccactgagagggggagatttcttgagggggccagggag

SEQ ID NO: 29870 - DNA, 120 bp, synthetic construct
  source 1..120: mol_type = other DNA
ccgtgctgagcgccaggcacacataagccctgcagccgtacaggggagggggcaatctccggagccctggaaagcttgtggaagagggcttgggttacacctgggagattaggccggatt

SEQ ID NO: 29871 - DNA, 120 bp, synthetic construct
  source 1..120: mol_type = other DNA
agctttgtcataggctggacttggggcttgaatgctgacctaatctgggcagggaggggtctggggctcgatgagaaggcagaggaagtgagaccagaatttcttgggaacagaaagcct

SEQ ID NO: 29872 - DNA, 120 bp, synthetic construct; identical to SEQ ID NO: 1835
  source 1..120: mol_type = other DNA

SEQ ID NO: 29873 - DNA, 120 bp, synthetic construct
  source 1..120: mol_type = other DNA
ttttaaaaaaataaaattcaaatccccctatcgagcaggaccactgactagaaaggaggatgctgtgctgagtttgattcctgttctcttgagagggtgagacttggcagccagcgtccc

SEQ ID NO: 29874 - DNA, 120 bp, synthetic construct
  source 1..120: mol_type = other DNA
agcaaaggcagccaaagaattaaagcatcaaaaaccaggactgtcttaggaaagtgtgacttcattgtcaccaggatgctgtgctctttgtccccagggccagccactctaggcagttca

SEQ ID NO: 29875 - DNA, 120 bp, synthetic construct
  source 1..120: mol_type = other DNA
tacccacttcagaggtgggggtgacaagcaagacctgttagggcacagcacttgccctcaagccctggcctgaaagaggcagcaccagtgtgtctggaaagagctgaatccccacccacc

SEQ ID NO: 29876 - DNA, 120 bp, synthetic construct; identical to SEQ ID NO: 8916
  source 1..120: mol_type = other DNA

SEQ ID NO: 29877 - DNA, 120 bp, synthetic construct
  source 1..120: mol_type = other DNA
ctcacccttggccctcaggctttggagatgggcacttgtcatcatgggtgtttggaaagcaactctacgttctagcctgtgctccatcgttccttctacatacaagtgatgcaaacatca

SEQ ID NO: 29878 - DNA, 120 bp, synthetic construct
  source 1..120: mol_type = other DNA
attatataacctagggtacttgaatctcagccccaaatctctaaaatgggggcagtaacatgcttctgccaggtcccagacctgtgggtctccaaatctgcacattcttcaagccttaca

SEQ ID NO: 29879 - DNA, 120 bp, synthetic construct
  source 1..120: mol_type = other DNA
cccacgggccatgagctcctgagtttatttacatttccctgattgctagtcaggcgcaacacctttccacatgctcatcagccttttggattcctcttttgtgatgtgctactttgtcta

SEQ ID NO: 29880 - DNA, 120 bp, synthetic construct
  source 1..120: mol_type = other DNA
atttgtaggagtcctttgcattttgtgggcactgtcttttcactctttaaggtgtattttgatgattgggtcttaactctaatgtcaaattactcagtcttctctctcatggttattgct

SEQ ID NO: 29881 - DNA, 120 bp, synthetic construct; identical to SEQ ID NO: 8917
  source 1..120: mol_type = other DNA

SEQ ID NO: 29882 - DNA, 120 bp, synthetic construct
  source 1..120: mol_type = other DNA
gccttggaagaagtactgatgtttggtacagcaagttctcccaccttgttcttcttcaagaatattgccaattcttggctttttgcacttccaagtcgcagttagaatcagcttgccaaa

SEQ ID NO: 29883 - DNA, 120 bp, synthetic construct
  source 1..120: mol_type = other DNA
ttttgcacttccaagtcgcagttagaatcagcttgccaaagttctcacacagaagccttgagatttttattaagatttggagagatttattcagattttgagataatcttttcagtattg

SEQ ID NO: 29884 - DNA, 120 bp, synthetic construct
  source 1..120: mol_type = other DNA
tcttttgtgctattgtatacaggttctgttttctcttgttacctcacattttttatttacagaagagaaacaaaaatagtaccgagtacccacatccctttcaccagcttcccctaatgt

SEQ ID NO: 29885 - DNA, 120 bp, synthetic construct; identical to SEQ ID NO: 8918
  source 1..120: mol_type = other DNA

SEQ ID NO: 29886 - DNA, 120 bp, synthetic construct
  source 1..120: mol_type = other DNA
tagaccagggttataggtttaggggaaggaggccagtgaggtgagatgctttcctcattgtggaacatgacatcaacatggtttatcactggtaatattaaccttgagccactcgtttaa

SEQ ID NO: 29887 - DNA, 120 bp, synthetic construct
  source 1..120: mol_type = other DNA
ctaagtatagcccacactcaaggtggggaagggaggggttcaactctacctcctgcaggagagtatcaaaaaaaatctgcaaatatgttaaaactaccacagcaattaaaatacatttca

SEQ ID NO: 29888 - DNA, 120 bp, synthetic construct
  source 1..120: mol_type = other DNA
tttatttggaattcctttataaggaagatttgtccctctcctccaattgtttatttaattttatcagtgtggatttgggagtatttattttttgagttatagtccaatattatttatttt

SEQ ID NO: 29889 - DNA, 120 bp, synthetic construct; identical to SEQ ID NO: 8919
  source 1..120: mol_type = other DNA

SEQ ID NO: 29890 - DNA, 120 bp, synthetic construct
  source 1..120: mol_type = other DNA
tttacatatctgtatctatataaagctaaccatgagttcatactgacatttctgaccagagttcatccttgccccctcccccacaacttatttatagctttttctctgacagctagaaac

SEQ ID NO: 29891 - DNA, 120 bp, synthetic construct
  source 1..120: mol_type = other DNA
ccatagagtgtccagtcaaaacagtgtttttgaaagcaacatatgccagctcctcctcctcctttcctttcactgctatgtcatttgtttgtaacacgctcatcatagtctgcttttcat

SEQ ID NO: 29892 - DNA, 120 bp, synthetic construct
  source 1..120: mol_type = other DNA
tcattcacagaagttccatacccctaaaaataccctggggtgagtcttttgaagtcaagtacttctcccctaaccactggcagctattgatctgttttatgtccctgtagttttgttttt

SEQ ID NO: 29893 - DNA, 120 bp, synthetic construct
  source 1..120: mol_type = other DNA
ctttttattgctgggtggtattccattgcatgaatatatacattttgtttatgcattcacctgttgaaggacatcttcattgtttccagtatttggtaattatgagcagagttactatac

SEQ ID NO: 29894 - DNA, 120 bp, synthetic construct; identical to SEQ ID NO: 8920
  source 1..120: mol_type = other DNA

SEQ ID NO: 29895 - DNA, 120 bp, synthetic construct
  source 1..120: mol_type = other DNA
tatattctgagtgcaagtccttgacctgataggtgatatgcaaatattctttccaagtctgtgctttgtcttttcattccattagcagtgtctgttgcacagcaaaagcttttaattttg

SEQ ID NO: 29896 - DNA, 120 bp, synthetic construct
  source 1..120: mol_type = other DNA
ttatggttttatgttttattttagattttttttcagtaagtttgtatgtagtaccctttaaattttcattttctaattgttgatcatctgtcctatcaggcatagatactaaatgcatta

SEQ ID NO: 29897 - DNA, 120 bp, synthetic construct
  source 1..120: mol_type = other DNA
ttacgctgatgtgggaaaaccttccttttttataaagcaaaagatgtatcactttaaaaacataaaacattttctaggataaaagcaacataattcaggtgaaaaaacagactggggaag

SEQ ID NO: 29898 - DNA, 120 bp, synthetic construct; identical to SEQ ID NO: 8921
  source 1..120: mol_type = other DNA

SEQ ID NO: 29899 - DNA, 120 bp, synthetic construct
  source 1..120: mol_type = other DNA
ctgaattgctacaacttcttgggaaagcaatctagcaacatttattaaaattactaaggacacaccctctcaccctgctccagtatgtcagcttttaagaataaagatgaatatggcatc

SEQ ID NO: 29900 - DNA, 120 bp, synthetic construct
  source 1..120: mol_type = other DNA
ccatgcctatatacctagagaaaaatgaaatgagcttatgttacagagtgacaggaacagagtcacagtgacatcccatgtgcataaaagcaactcccacctggcatctgctgctcggat

SEQ ID NO: 29901 - DNA, 120 bp, synthetic construct; identical to SEQ ID NO: 8922
  source 1..120: mol_type = other DNA

SEQ ID NO: 29902 - DNA, 120 bp, synthetic construct
  source 1..120: mol_type = other DNA
aggcttgccattcctcatgggtcagaggtcctatcaccccatctttcctgacccactactctgtcaatgtatgagtgtgacaatgtatggtggtgggagctgttgtcccttaccaggcct

SEQ ID NO: 29903 - DNA, 120 bp, synthetic construct
  source 1..120: mol_type = other DNA
ctccgaagatgattcactggcctttattctcctcagacactgaggtgtcaggcactttggggccatcttaaacacccacccaccccaacacccaactataaaactgattgtcagggctgg

SEQ ID NO: 29904 - DNA, 120 bp, synthetic construct
  source 1..120: mol_type = other DNA
ggaagagcccaacactgctggaagtgagcatgccccatttcatgagaaccaacagcttcgccgaggacctggacctggaaggggagactctgctgacacccatcacccacatctcacagt

SEQ ID NO: 29905 - DNA, 120 bp, synthetic construct; identical to SEQ ID NO: 8923
  source 1..120: mol_type = other DNA

SEQ ID NO: 29906 - DNA, 120 bp, synthetic construct
  source 1..120: mol_type = other DNA
atgatcctcttgttttgacttatggaaaaccagactgatcattttccacttgttttcatgctttgagagtctgagattgtttttctctcccccagccccctcccctgccccccaaaaaag

SEQ ID NO: 29907 - DNA, 120 bp, synthetic construct
  source 1..120: mol_type = other DNA
ggctgattttccacgccttccagttggccttcccctgaggcacagctggcctgggatgcatgcccgtcctcccccgccgtcacggcatggccaggccaatccccggtgcccggccacggt

SEQ ID NO: 29908 - DNA, 120 bp, synthetic construct
  source 1..120: mol_type = other DNA
tggggattccccttgataaatgtctttgtgtcaagatctgtgagtgacactcgcggcccttctgagggtcacttgtggaaactctccttctctctaccaacatttttctaaagggtgttt

SEQ ID NO: 29909 - DNA, 120 bp, synthetic construct
  source 1..120: mol_type = other DNA
cactgaggaaatcgggacccatggtgctgggggctgcaggtgtaaccagagaactggcagggttgggtagccagaatgaggccacctccagggaaggagtggctatcttaaggggtaatt

SEQ ID NO: 29910 - DNA, 120 bp, synthetic construct
  source 1..120: mol_type = other DNA
ggtgtgaagaggctccaagggagccagcagatcactggaaagcaggggtgactagtcatggacaccctgagaatagggctctgagcttctgggcccctcctggctgggtaaaaaggcagg

SEQ ID NO: 29911 - DNA, 120 bp, synthetic construct; identical to SEQ ID NO: 8924
  source 1..120: mol_type = other DNA

SEQ ID NO: 29912 - DNA, 120 bp, synthetic construct
  source 1..120: mol_type = other DNA
gcagccaggccttaccaactcttgggtcttgcaaggcccctgcaggtgaaggtggtgagagaccaggcacttatgtggatcacagccaaacttgcagctgcccagtaaatcaccactatg

SEQ ID NO: 29913 - DNA, 120 bp, synthetic construct
  source 1..120: mol_type = other DNA
tttcttgttccactccaggatgacagggcctgagagacctgaacatccatccccaagctctctgcccactttgggtctggcacattaccattctgcaagatcctgcagccttttcaggtt

SEQ ID NO: 29914 - DNA, 120 bp, synthetic construct; identical to SEQ ID NO: 8925
  source 1..120: mol_type = other DNA

SEQ ID NO: 29915 - DNA, 120 bp, synthetic construct
  source 1..120: mol_type = other DNA
ggctgaggcttcaggggagctgggttcctgcatcctcagaagtcagggtacggtccctccagagaggcctgaaggggagagtgggcacgtacagtgtcagggcctaggaacccaggctcc

SEQ ID NO: 29916 - DNA, 120 bp, synthetic construct
  source 1..120: mol_type = other DNA
tcttctgcccgcattggggctgcattcctccacctcctgcacagcccgcccagtgatgcccataattaaattcggctccagctgctcagggatgcagcgaagctcctgtgggcagcctgg

SEQ ID NO: 29917 - DNA, 120 bp, synthetic construct
  source 1..120: mol_type = other DNA
catttttcttcagcattctactgatgttaaatgtattaccatgctgggccagttccagaattcaaattaaaaacataaataaagacacattttgtttccatctcgagctctccccgcccg

SEQ ID NO: 29918 - DNA, 120 bp, synthetic construct
  source 1..120: mol_type = other DNA
atgcaagctagggagtcatgacaagctgaggcacggggtacccaggagataaagagtggcgtcgctgcaccccagcctataggtgggccctactgctcagcctcaggaccctcaaccagc

SEQ ID NO: 29919 - DNA, 120 bp, synthetic construct; identical to SEQ ID NO: 8926
  source 1..120: mol_type = other DNA

SEQ ID NO: 29920 - DNA, 120 bp, synthetic construct
  source 1..120: mol_type = other DNA
ctagaatgcccttgtcacccatctgcagccaccagatttccattcatctttccaacgtctgctcagtaaaccccccaggacacacttaggctgtacggctgtgtcctcctttggctctca

SEQ ID NO: 29921 - DNA, 120 bp, synthetic construct
  source 1..120: mol_type = other DNA
ctccccagaacccccaaagccccaggcatggagaagccctaggattgctgctcactcaaccctgcctaagatgaagcaaggactgcagacacattgtgccagtgctgaggcacagggcta

SEQ ID NO: 29922 - DNA, 120 bp, synthetic construct; identical to SEQ ID NO: 8927
  source 1..120: mol_type = other DNA

SEQ ID NO: 29923 - DNA, 120 bp, synthetic construct
  source 1..120: mol_type = other DNA
ctgtctcttctgttttggcatcttagatgggcaagccccagctcgaggttaacagataccgccctcagtcccactctccagagggacactcagggagcacccggcccattgagatgggca

SEQ ID NO: 29924 - DNA, 120 bp, synthetic construct
  source 1..120: mol_type = other DNA
gcctcttgtgacatgacagcttcgcaaatccttgagcaaaaacagccccgtgtgcgttaattagaatttccatgtcttcaactttctcctggaccctgcagaatctcacgccaagacatt

SEQ ID NO: 29925 - DNA, 120 bp, synthetic construct
  source 1..120: mol_type = other DNA
gtcagcaaggacagggccagtctgtgctgtctggaaataagggcaaacgtcacaagggtggccccaaatttggcttcatggaccaaggggctagctcttttgatgggaccagcttggcct

SEQ ID NO: 29926 - DNA, 120 bp, synthetic construct
  source 1..120: mol_type = other DNA
gtgggaaaggacagaaaggacattctgggaaccagtgtccagaaggatgagtgaggggcttgtcaagaacagatgagaccattttgtctttctagaccagtgtcctgtcttctgcaaagc

SEQ ID NO: 29927 - DNA, 120 bp, synthetic construct; identical to SEQ ID NO: 8928
  source 1..120: mol_type = other DNA

SEQ ID NO: 29928 - DNA, 120 bp, synthetic construct
  source 1..120: mol_type = other DNA
ggggagagggccgcactgtctaggtggatggcccagaagaaagcagtgaggcttctcatttcctctgcaagggaaaggccatccaaatcaccctgccccagtgcactctggccaggctca

SEQ ID NO: 29929 - DNA, 120 bp, synthetic construct
  source 1..120: mol_type = other DNA
cttcacaactgcactgatattgtcatggagacacttctggcagttggggcagggggtcggggcggggttgggcggggggcacatcccatatagatctcttgtgtgctctgctgatacctg

SEQ ID NO: 29930 - DNA, 120 bp, synthetic construct; identical to SEQ ID NO: 8929
  source 1..120: mol_type = other DNA

SEQ ID NO: 29931 - DNA, 120 bp, synthetic construct
  source 1..120: mol_type = other DNA
tctcaggctcccatttcctgtcactgaccttgagattaaccacaggcctaactgctagcagcaaggaccagctttgcccacatttgaactttatgcggtgggaatgatgcaactcataca

SEQ ID NO: 29932 - DNA, 120 bp, synthetic construct
  source 1..120: mol_type = other DNA
cattcatccattctaccacctgtggccagcaggcagtttctggtgtaggttgctgtttaagaatattctgtacatgcttttggtgagcatcaggttgcgtttctggggaatatatgccta

SEQ ID NO: 29933 - DNA, 120 bp, synthetic construct
  source 1..120: mol_type = other DNA
atcctaacacttggcattttccgtcgtttccttttcagccatgatggtgaatgtctagcagcatcaaatggtgattttaatttgcagtaacctgttgactaatgaagttgagtccctttc

SEQ ID NO: 29934 - DNA, 120 bp, synthetic construct
  source 1..120: mol_type = other DNA
atatatctttagatattctggagtcatttgtcagagagagagatacacacactcacactctctcacagacacacacattgcaaatatcgcctccccctctgcaggctgccttcttcctct

SEQ ID NO: 29935 - DNA, 120 bp, synthetic construct; identical to SEQ ID NO: 8930
  source 1..120: mol_type = other DNA

SEQ ID NO: 29936 - DNA, 120 bp, synthetic construct
  source 1..120: mol_type = other DNA
tggaccctattgggtgccactggtcagattcaagttgttctttgtggccaggaccttgcttccttctcactgtagtttgctaacaggttttgacagctggtcctgctggctctggctgct

SEQ ID NO: 29937 - DNA, 120 bp, synthetic construct
  source 1..120: mol_type = other DNA
gtatccttatagttttggggctcctgaaacatggcatcatgtgtcccttgtttatttaggttgactttcatatcttttaccttgccctgtagttttcagtgtggtggtcatgaacagctt

SEQ ID NO: 29938 - DNA, 120 bp, synthetic construct; identical to SEQ ID NO: 8931
  source 1..120: mol_type = other DNA

SEQ ID NO: 29939 - DNA, 120 bp, synthetic construct
  source 1..120: mol_type = other DNA
agagcttttgagactgccaggtcatgagttaccatgggatacaaatggggtcacaacatatggctgtcagctgctgtccttaataagatgtgcctagaggcctgagagtcccaagctcca

SEQ ID NO: 29940 - DNA, 120 bp, synthetic construct
  source 1..120: mol_type = other DNA
cactcactattctgctctggggagggggttggaggcagaatcagtggactgtgtctcatggcagtcacaggtgccccagtatgcatctgtcatttgttcttatcactgtcgggcccatct

SEQ ID NO: 29941 - DNA, 120 bp, synthetic construct
  source 1..120: mol_type = other DNA
aacccataggtgcccaatggagagataatctcaaatatggtagcagagttcagactcagtggctttcagatggttagtataggctgaaattccaagagcattaaccagacacctactatg

SEQ ID NO: 29942 - DNA, 120 bp, synthetic construct
  source 1..120: mol_type = other DNA
gcatctagtgggcctgtcctcccagctcacagaaggggaaattgaagcctcaagaaggatagggacttgccagtatcactgggagataggagcagaagccagggctcattcccagacaca

SEQ ID NO: 29943 - DNA, 120 bp, synthetic construct; identical to SEQ ID NO: 8932
  source 1..120: mol_type = other DNA

SEQ ID NO: 29944 - DNA, 120 bp, synthetic construct
  source 1..120: mol_type = other DNA
cagagcccctggctaggcattcatgctttagatatgtgggccctgttagggacaacgtaggtgtcctgggcaggggctgtatctgaggcacacatccttggtagtgactggctagcagga

SEQ ID NO: 29945 - DNA, 120 bp, synthetic construct
  source 1..120: mol_type = other DNA
tagagagacagaggtagacaggagtccaggtctgacctcaaaatccgatgtccccaccatccccagccccttagcctctgatcttctccataagtaatcttttcccatgtgtggctgcag

SEQ ID NO: 29946 - DNA, 120 bp, synthetic construct; identical to SEQ ID NO: 8933
  source 1..120: mol_type = other DNA

SEQ ID NO: 29947 - DNA, 120 bp, synthetic construct
  source 1..120: mol_type = other DNA
aaggcaatagagggtacttgggaagtagggtggtaggcaaggcttttcagagaacaaggagctacatacacatacatgcatgcacataatcattctgacccagtcagggttcttccccca

SEQ ID NO: 29948 - DNA, 120 bp, synthetic construct
  source 1..120: mol_type = other DNA
caggcagctagtctctgtatctggggtagaaagagtgggctaaaaagtcagctagcacccctgacttcaagtcctcgagtgtatgttgggcttgtctccctaccctggcccggtctgcac

SEQ ID NO: 29949 - DNA, 120 bp, synthetic construct
  source 1..120: mol_type = other DNA
ctaatcctccctctttgggcctttcaaagttgggcttgtttttcagtgttttctttaggttcatgtcctgatttgttaagttaaattgaattccttccagtccaaaatactcaaatgctt

SEQ ID NO: 29950 - DNA, 120 bp, synthetic construct
  source 1..120: mol_type = other DNA
cacaggctgatatgattgagctcaggctggtatgggttaggggatgagagtacagaacagtccaccccaggggctctgaagagcttcaattgagatatccttccctaaggtccccacatt

SEQ ID NO: 29951 - DNA, 120 bp, synthetic construct; identical to SEQ ID NO: 8934
  source 1..120: mol_type = other DNA

SEQ ID NO: 29952 - DNA, 120 bp, synthetic construct
  source 1..120: mol_type = other DNA
agggctggaccaagtgaccccaactctgggttctgcctgggcattttcttgagtgtcataccctagccacctgactgtcaggggagcagtatgtggcacttgaggccttgggctggccat

SEQ ID NO: 29953 - DNA, 120 bp, synthetic construct
  source 1..120: mol_type = other DNA
ccaaaagggacagtgaagttggcttctcaggccacagtaggccttcacggtactcagcaggagaccccagcaggcagcatcagggcaggggtgctgaccatccctgacccaagcacgagg

SEQ ID NO: 29954 - DNA, 120 bp, synthetic construct; identical to SEQ ID NO: 8935
  source 1..120: mol_type = other DNA

SEQ ID NO: 29955 - DNA, 120 bp, synthetic construct
  source 1..120: mol_type = other DNA
agaaagattgctctcagcctatcccctccctggccatgcaggtggaagaccctattacttgggctaaagagaagctaaacgtgaccagcctacccaccttgctactgctgatgaccaccc

SEQ ID NO: 29956 - DNA, 120 bp, synthetic construct
  source 1..120: mol_type = other DNA
tggtatgttgggaagctctggtgcaaagggcagtgatggcccttcaatcccaggcccacaagcaccacagccaggagagtcaaggttggatatgaagagggacttcctgaaagcaggcac

SEQ ID NO: 29957 - DNA, 120 bp, synthetic construct
  source 1..120: mol_type = other DNA
ccgtgctttctggctctttgggcctggggtgcagcccctcatttgtacttgctggctgccccatgggggcttgggctaggtctccctgccggtggggagggaggtgtggaagctggtttg

SEQ ID NO: 29958 - DNA, 120 bp, synthetic construct
  source 1..120: mol_type = other DNA
gaggcccctctctcccagcccccggcacacacactaggacctttcttcatcatgcagccgtagagctggaggccaaggacaccctctggaaatctgaattccattcgctcttggcaaaga

SEQ ID NO: 29959 - DNA, 120 bp, synthetic construct; identical to SEQ ID NO: 8936
  source 1..120: mol_type = other DNA

SEQ ID NO: 29960 - DNA, 120 bp, synthetic construct
  source 1..120: mol_type = other DNA
aaagccagaactttttgcaaaataatttgaaaagtttgttgaaccttaaacctttcctgatgactccttccttctgaacttaactcgttaaagttgctccaatcccagcccagtgccaga

SEQ ID NO: 29961 - DNA, 120 bp, synthetic construct
  source 1..120: mol_type = other DNA
aaaaaaaaaaaaaaaaagctcactgggcaccttggctgcagggtctgaaaagtcctttgtgttagctccagctgcagagtttttccaggcctcgcttctggggctgactggagctgtttc

SEQ ID NO: 29962 - DNA, 120 bp, synthetic construct
  source 1..120: mol_type = other DNA
gcatgtcctgagtggacagacctgaaggtgggttcactagcctctttctcccatccttcaccctattagaggtagtgctctagcggggaaagattagggcccctctaggtcaatattgtg

SEQ ID NO: 29963 - DNA, 120 bp, synthetic construct; identical to SEQ ID NO: 8937
  source 1..120: mol_type = other DNA

SEQ ID NO: 29964 - DNA, 120 bp, synthetic construct
  source 1..120: mol_type = other DNA
tttcatgagacatagcagtcacaacatgccatacacatttcttccagaatcactccactggaaattctgtaataagacatacgtaacagtttcacttcctaggagatcccaattgctcct

SEQ ID NO: 29965 - DNA, 120 bp, synthetic construct
  source 1..120: mol_type = other DNA
cccctgctccacagagtgacatgaaccagagactcacagcactgtgtgcggggagctgctgcccgcagggcataccagccacgtgcatgcagggctgcacactgccctaccgtgcatcca

SEQ ID NO: 29966 - DNA, 120 bp, synthetic construct; identical to SEQ ID NO: 8938
  source 1..120: mol_type = other DNA

SEQ ID NO: 29967 - DNA, 120 bp, synthetic construct
  source 1..120: mol_type = other DNA
ttgagctgtacatacaatgctgatttattatggtgcagtacatctgagaagcatttttattgcaaaatgtgtgtttacatgtatacagacacacgtgtgaacaggtgatggctctgaaca

SEQ ID NO: 29968 - DNA, 120 bp, synthetic construct
  source 1..120: mol_type = other DNA
tcactgttctgctcagattgttagctgtagtctttctggcatcagttccatttctggtgaacacttggacttggcaaaaggcatagaggtagtggtacaggaaaggtctaagaaggctaa

SEQ ID NO: 29969 - DNA, 120 bp, synthetic construct
  source 1..120: mol_type = other DNA
gatagttcattaaggtcttgagtatttccaagggagcactaactggactacagcctggcaggagataaccaagtcatatgcatagtggctttgggtacgatggtctgctgtatgaagcaa

SEQ ID NO: 29970 - DNA, 120 bp, synthetic construct; identical to SEQ ID NO: 8939
  source 1..120: mol_type = other DNA

SEQ ID NO: 29971 - DNA, 120 bp, synthetic construct
  source 1..120: mol_type = other DNA
tcactactgaaatgaccacttatgaaattagtttccctgaaacatccctccctattgaacactgttgtttctccctatccatcttatccctacttgtatctctgctgactgacctctttg

SEQ ID NO: 29972 - DNA, 120 bp, synthetic construct
  source 1..120: mol_type = other DNA
aatgatttctcaaatagagactgggcagagtagaccagttagttaatcagttgaagaggaaaccaagatcgatgcctagataagcatttcagaggacagcaggggagatgataattgatg

SEQ ID NO: 29973 - DNA, 120 bp, synthetic construct
  source 1..120: mol_type = other DNA
tctacaaaaaatgatcctctctgtggaagtgctgccaacatcctctgccaagtataaaagatgccctcagatgttaccatataatgctttacaaaagacaaaccaaaatcccctctggat

SEQ ID NO: 29974 - DNA, 120 bp, synthetic construct; identical to SEQ ID NO: 8940
  source 1..120: mol_type = other DNA

SEQ ID NO: 29975 - DNA, 120 bp, synthetic construct
  source 1..120: mol_type = other DNA
cccccacccttaccaagtgtatactcaggtttttatcttcattcatttcatagatgagaaatggtacactggagctttaatttacatttcttttgttggaaatgaggtttttatctttcc

SEQ ID NO: 29976 - DNA, 120 bp, synthetic construct
  source 1..120: mol_type = other DNA
attttatcctcattttccttaggtgttttggctttttctataatatttttctggtggcagaatttttttaatttcacatagtcagctgtgtcagtcttttatggtttgaggtccttatct

SEQ ID NO: 29977 - DNA, 120 bp, synthetic construct
  source 1..120: mol_type = other DNA
gtaattaaatccaatttggtttcccatatatttgtccagttgtccaacactatttatttgagtacatcatcatctctctactaatttcaactgctacctttatcatatttcaaactctca

SEQ ID NO: 29978 - DNA, 120 bp, synthetic construct; identical to SEQ ID NO: 8941
  source 1..120: mol_type = other DNA

SEQ ID NO: 29979 - DNA, 120 bp, synthetic construct
  source 1..120: mol_type = other DNA
ccaggtcgggggtgcacaggagttgccagctggacccaaggaccatttcgtatacatgtatgatcatactttcagggcatcttggaaaaactgaatttgctaactcaatagagaacaaaa

SEQ ID NO: 29980 - DNA, 120 bp, synthetic construct
  source 1..120: mol_type = other DNA
ataagaaacataatctaaaacttgtagcccagcccctcctccataccaaccaccaaaaaaacccactaacaccataaagtgtcatagctagagctagagtgctgttataagctgtgcagg

SEQ ID NO: 29981 - DNA, 120 bp, synthetic construct
  source 1..120: mol_type = other DNA
gtcccacccttggctgtgctctcctttactaatccatagccaaagacaggggctaataacagggtctggagtctgaactcatatcctaattccactactttctacctgctacaccttgag

SEQ ID NO: 29982 - DNA, 120 bp, synthetic construct; identical to SEQ ID NO: 8942
  source 1..120: mol_type = other DNA

SEQ ID NO: 29983 - DNA, 120 bp, synthetic construct
  source 1..120: mol_type = other DNA
gcatcctcataagattatttaggatgcataggatcccagattagattttttttaaatcagccgttctctgtattcttgtccagatgctgtggacagtgatgatgggaaaatagtccctgc

SEQ ID NO: 29984 - DNA, 120 bp, synthetic construct
  source 1..120: mol_type = other DNA
taattttttttttatttttattttttttgaggcagagtctcactttgtcacctaggcgggaatgcagtggcacagtctcggcttactgcaacctctacctcctgggttcaagcaattctc

SEQ ID NO: 29985 - DNA, 120 bp, synthetic construct
  source 1..120: mol_type = other DNA
tcaagtgatctgcccgcctcagcctcctaaagtgctgggattacgggcgtgagccaatgcacctggcctcagcttgcctaattaaaaaaaaaaaaaaaaaaaaagttgtctatctgtgtg

SEQ ID NO: 29986 - DNA, 120 bp, synthetic construct
  source 1..120: mol_type = other DNA
cccacatgttcaaatccattgcaacatccttccatatttttttagatctttgtatggattttggacattctaaaattcatttctgggtatttttaggaggactactgatttttttttaat

SEQ ID NO: 29987 - DNA, 120 bp, synthetic construct; identical to SEQ ID NO: 8943
  source 1..120: mol_type = other DNA

SEQ ID NO: 29988 - DNA, 120 bp, synthetic construct
  source 1..120: mol_type = other DNA
tcccaccctaccctgtccttagcccctgacaactactaacctattcttcatttctttatcattccaagaaaattatataaatggaaccacatagcaaatcacctttttgggatcggctct

SEQ ID NO: 29989 - DNA, 120 bp, synthetic construct
  source 1..120: mol_type = other DNA
caagattgcactgaccatcataggtgaaataggtatgtgttcttttattatgaaagcctcctcagatgtggacattagtgaaatgtgggctccaaaaagagactttggaagatttcacta

SEQ ID NO: 29990 - DNA, 120 bp, synthetic construct; identical to SEQ ID NO: 8944
  source 1..120: mol_type = other DNA

SEQ ID NO: 29991 - DNA, 120 bp, synthetic construct
  source 1..120: mol_type = other DNA
aaagaatggggatccctgtgacagctctaggggattttgggaccagataaccttaatggcctcaggctccctagatgagaaatgggacttagtaaagtcaaactggtccaggttaagcca

SEQ ID NO: 29992 - DNA, 120 bp, synthetic construct
  source 1..120: mol_type = other DNA
ccctctctcaggagaaggtgctccctcacccttaaagaccaggctgccgttgcttcccatgtgtctgttcctctattcagtattgtgggcactgatcacacaccagggcactgtgggggc

SEQ ID NO: 29993 - DNA, 120 bp, synthetic construct
  source 1..120: mol_type = other DNA
gggagaaaacacaccggccataatgaacacacgtttaggctgaagaataatcttcaaatgatactactacttacacttcctgtttgccaggcaaatatagacatcatttcactaatcctc

SEQ ID NO: 29994 - DNA, 120 bp, synthetic construct
  source 1..120: mol_type = other DNA
tgtcccagctcatcaaatattctttcagtattaaacatatcaagctctctcctgaccttctctccccttccccaggccaggactgtcttatcctgtggttcttagctgaaatgtcccttc

SEQ ID NO: 29995 - DNA, 120 bp, synthetic construct; identical to SEQ ID NO: 8945
  source 1..120: mol_type = other DNA

SEQ ID NO: 29996 - DNA, 120 bp, synthetic construct
  source 1..120: mol_type = other DNA
aaggcttgagagctcttcttcaggctcagtcatccctgcttccccagggctcatgtccacatgctattgtccatagaagctggggtccaaagttgaccagaatatctctagtcataaaga

SEQ ID NO: 29997 - DNA, 120 bp, synthetic construct
  source 1..120: mol_type = other DNA
tggggtccaaagttgaccagaatatctctagtcataaagaatctcttccccttgagcccactcatctctgttgacattctagaaatgcagggaaatctgggcaccatgaaatgcagtgac

SEQ ID NO: 29998 - DNA, 120 bp, synthetic construct
  source 1..120: mol_type = other DNA
agatgttcccagacagaaaatggtggcacctggagaggtgctcaggtctgtgtggaagaaaggacaggagtccttctgccacccagactgtgcattcagacatctcccttgtgctgtgca

SEQ ID NO: 29999 - DNA, 120 bp, synthetic construct; identical to SEQ ID NO: 8946
  source 1..120: mol_type = other DNA

SEQ ID NO: 30000 - DNA, 120 bp, synthetic construct
  source 1..120: mol_type = other DNA
ctgcaaatgcaggttcctggggctctgggtggtttgtccaatggctaagctttccccaggaatgggtaactggaaaaatgtaggaattacatatgattccatcaatgacagttttcctat

SEQ ID NO: 30001 - DNA, 120 bp, synthetic construct
  source 1..120: mol_type = other DNA
aaatactgctctagacaactgggccctgcatctgctgcaaggaacatcccttactttcccatctcaatacaactgtgaaaagcctagcctgggactcaggcctttccttactccctctgg

SEQ ID NO: 30002 - DNA, 120 bp, synthetic construct
  source 1..120: mol_type = other DNA
cctggccccacactcactgctacatctctcttccaaatcataaatgcaaaagatggccaaaggtgcatgctctgtgacacgtttcatagtcagacaaaaccagctgactgcttttacttt

SEQ ID NO: 30003 - DNA, 120 bp, synthetic construct; identical to SEQ ID NO: 8947
  source 1..120: mol_type = other DNA

SEQ ID NO: 30004 - DNA, 120 bp, synthetic construct
  source 1..120: mol_type = other DNA
cttctgggattggattaacaaaaggggagttggttaggctggagcattgcaactcatttcttccctgcagtctctctcctgaggtggcccaggtatgtgtttgaggcctgggacttgctg

SEQ ID NO: 30005 - DNA, 120 bp, synthetic construct
  source 1..120: mol_type = other DNA
tgagttctccttctattcctcctattccactgttaggtgttggaaaagcaatatatttgatgctttctccatgtcccataaatgactttctggcagaggagagtgactgtcctttgtctg

SEQ ID NO: 30006 - DNA, 120 bp, synthetic construct
  source 1..120: mol_type = other DNA
cccagggtaggtctgcctgggagaaaaggggtaagggaggactgcctcccagccttccctccccactggtctgggcacattccaaggcttgaggtctcctagtcaaggcctcctgttatt

SEQ ID NO: 30007 - DNA, 120 bp, synthetic construct; identical to SEQ ID NO: 8948
  source 1..120: mol_type = other DNA

SEQ ID NO: 30008 - DNA, 120 bp, synthetic construct
  source 1..120: mol_type = other DNA
gcacagctcacacacggaggcactacttcagtcctcccattaccaaactccagggcacacgtgccactgtgtcttgcccacaaacatgcacacagagtatcgatctgtctgatgtttcag

SEQ ID NO: 30009 - DNA, 120 bp, synthetic construct
  source 1..120: mol_type = other DNA
ccttatccagaagcccagtgcaactcccatctcacaggccaccagcaagttgctcacatccagacaggagacgctagtcctacaggtgcagtgggaggatctgcagatgactacagctct

SEQ ID NO: 30010 - DNA, 120 bp, synthetic construct
  source 1..120: mol_type = other DNA
acttcaggccttcggtctgggaccccagggagggtgctctgacagtccgccgaaatggccagcaggcaggcatcctcccaggtggcagtgagaaagggccctgcacagtcagcgttcctg

SEQ ID NO: 30011 - DNA, 120 bp, synthetic construct
  source 1..120: mol_type = other DNA
tgggcccactctcccatcctcctgctgggtcacacggatgaggcctgtacactctgggcctcagactccacaccaagaagagtcaggggggctcactctaagccccgccagctcgcacca

SEQ ID NO: 30012 - DNA, 120 bp, synthetic construct; identical to SEQ ID NO: 8949
  source 1..120: mol_type = other DNA

SEQ ID NO: 30013 - DNA, 120 bp, synthetic construct
  source 1..120: mol_type = other DNA
gatattgtggatacctatgcccagagcccctccactgccaagtttccacaattgttttgaaataattcccaacagatacccccaccctcacccagtgttgagtctcactcccgtcacgga

SEQ ID NO: 30014 - DNA, 120 bp, synthetic construct
  source 1..120: mol_type = other DNA
agagcatggccgctggatcaagtgtgggtcccagttggatgacaaacccatgttcaaggctgggaagtcctactcggccccacttctacccaggaccagtagctttcaattgtaaatgtg

SEQ ID NO: 30015 - DNA, 120 bp, synthetic construct
  source 1..120: mol_type = other DNA
ccagcctgaagatagaggcaacccaatccaggtccatgcaggtctccgtgatgcggagcatgcccagcttaccatcctgatgcagaggcaaggacaacactgggccctgacttgctaaga

SEQ ID NO: 30016 - DNA, 120 bp, synthetic construct; identical to SEQ ID NO: 8950
  source 1..120: mol_type = other DNA

SEQ ID NO: 30017 - DNA, 120 bp, synthetic construct
  source 1..120: mol_type = other DNA
gctgtcactcagggctgagctctgctgaaggatctgggaggtcagtaggcacctgtgtccacccagctgtccatacagatccctgcctgcacaagagctgctgcagcatttcaatagggc

SEQ ID NO: 30018 - DNA, 120 bp, synthetic construct
  source 1..120: mol_type = other DNA
cagagatcccttctccattcctctcaggcccctgtaaaaattgggacctgtccttgccagccaggtctcagggagctcagggttcagtgttggaatgggtctgggcccagatttcaagcc

SEQ ID NO: 30019 - DNA, 120 bp, synthetic construct; identical to SEQ ID NO: 8951
  source 1..120: mol_type = other DNA

SEQ ID NO: 30020 - DNA, 120 bp, synthetic construct
  source 1..120: mol_type = other DNA
ctcagctgcagccatggagttggtgcttctagggcctgggtatgctggagtcaggcaggggacctggtgggggtggggatacaggctgaggtggagagaccccacgcagctccctaggcc

SEQ ID NO: 30021 - DNA, 120 bp, synthetic construct
  source 1..120: mol_type = other DNA
aggaaaatgaagactctggaaaatctaagcacgtcacacacacagcttccatgggggtcttcctctcgtgtctggggaacttccccgtagaggtttcaataactgccatcctttgctgat

SEQ ID NO: 30022 - DNA, 120 bp, synthetic construct
  source 1..120: mol_type = other DNA
gccaggccagtggccctagtgtcaaggttccacaccacagcctcatagcagccagtgctcgctcactgaggccaggcactcatcttgtgctgtgcctgggtgagctctggacctgcctcc

SEQ ID NO: 30023 - DNA, 120 bp, synthetic construct; identical to SEQ ID NO: 8952
  source 1..120: mol_type = other DNA

SEQ ID NO: 30024 - DNA, 120 bp, synthetic construct
  source 1..120: mol_type = other DNA
cctgggttggaatcctggagccctgggctgcagggttttgaggggcagttacctcctcctccccggtggcacatccggcctggaagttgggtagtctggcccaaggcctgccctggtgtg

SEQ ID NO: 30025 - DNA, 120 bp, synthetic construct
  source 1..120: mol_type = other DNA
gcccttggaggacgttcctatcagcctttgcacagatatctcccactccaaccctaagactcaatgccacctcaggactgcccctatccgcagagcttgaggcctttaggtcagccttgg

SEQ ID NO: 30026 - DNA, 120 bp, synthetic construct
  source 1..120: mol_type = other DNA
ctgctgaaggttttgggtcaccttgttttatggtccctgtcccagcatgaagcttgcacaggaagaacagaatgaatgatgtggaaatctgttagcagtggtgtcttctagattctcaag

SEQ ID NO: 30027 - DNA, 120 bp, synthetic construct; identical to SEQ ID NO: 8953
  source 1..120: mol_type = other DNA

SEQ ID NO: 30028 - DNA, 120 bp, synthetic construct
  source 1..120: mol_type = other DNA
gcctggctgcttggaagacctttgcccaagcagagaactgttgaggaaggtgagccttccgagggccagccctgcctctcctcccctctcctagcctgcttctgtctgggctgaaggcac

SEQ ID NO: 30029 - DNA, 120 bp, synthetic construct
  source 1..120: mol_type = other DNA
ctgtgtcaagtgcctggtgacctcaagcaagtcattccatgtggctgagctgctccttgctgcatctgcacatatgtgtagtgtcttcctccctgtaggattgtcacaaggattaaatga

SEQ ID NO: 30030 - DNA, 120 bp, synthetic construct
  source 1..120: mol_type = other DNA
ctccctgcgaaaggctggggtcctgggagctagagctgggttaagataagagcagagactgggtcctgggaacagccactgggcccagtcgggggggtctcagcacctatcacaaagaaa

SEQ ID NO: 30031 - DNA, 120 bp, synthetic construct; identical to SEQ ID NO: 8954
  source 1..120: mol_type = other DNA

SEQ ID NO: 30032 - DNA, 120 bp, synthetic construct
  source 1..120: mol_type = other DNA
aggaacaggtacctttagggacacaggagtgtaagccactgtttccgtctgggttttgtcatgtgtaggtcccagcggctttaagccaacctgaaaggttcatttgggagtcacgggtat

SEQ ID NO: 30033 - DNA, 120 bp, synthetic construct
  source 1..120: mol_type = other DNA
gtgtcaacaaaagcccaccagaccatcaatgaagtgggcaaaagctctgggtgaactcttggctcaggtatcaggatatgctgggtgagggaaataatggaggcacctttgttctagatg

SEQ ID NO: 30034 - DNA, 120 bp, synthetic construct
  source 1..120: mol_type = other DNA
ttagcaagtggaggagttagaggatctgcagttaaccccttgagtctcggaaggctgtttgagccactaatcaggaaggagagctgacaagaaaaaggcgatgtctcacccctgagctac

SEQ ID NO: 30035 - DNA, 120 bp, synthetic construct; identical to SEQ ID NO: 8955
  source 1..120: mol_type = other DNA

SEQ ID NO: 30036 - DNA, 120 bp, synthetic construct
  source 1..120: mol_type = other DNA
gccacagttccaagggtgaaacagagaaccaggtggggaaggggtctctccccatctgtccaggggagaggcagcccacagggagccacacaggcaggggacattccactagggccattt

SEQ ID NO: 30037 - DNA, 120 bp, synthetic construct
  source 1..120: mol_type = other DNA
tcttgccatctttctggctctatcctcagtctccttggcaggttttcccttctggcatggccactaaatgccagtgcctttctctatgcaaaccatttccctaagctgttccctcagcac

SEQ ID NO: 30038 - DNA, 120 bp, synthetic construct
  source 1..120: mol_type = other DNA
gcccccacctcctctccacagcctccatcattttatagcccactctactgaaggcccctgtcctttcagtgtcacccatcctttcagtggcacaagtcagaagttctggggtcatttccg

SEQ ID NO: 30039 - DNA, 120 bp, synthetic construct; identical to SEQ ID NO: 8956
  source 1..120: mol_type = other DNA

SEQ ID NO: 30040 - DNA, 120 bp, synthetic construct
  source 1..120: mol_type = other DNA
cccaagggagtttttcagaccccaggctagttccagtgggttcctgctatacacctgctgtgctcccaggcctcagcactcccctcagggtgcaaacggtccttcaacattagttagtct

SEQ ID NO: 30041 - DNA, 120 bp, synthetic construct
  source 1..120: mol_type = other DNA
gtacctgctgagtgtttgacaaatatttcttgaatgactgcatccctaacatgaggcaatgatcattcccctgcctgttagacataattcactgcctgggaaggcactgtgctgtgtaga

SEQ ID NO: 30042 - DNA, 120 bp, synthetic construct
  source 1..120: mol_type = other DNA
gcacgctcagtgaaggaacaggaagtcctttctggagcagggggagagaaaggcatccagttagccatagaggggaatggctccttactctttaagagtcatttgccccaagactacttt

SEQ ID NO: 30043 - DNA, 120 bp, synthetic construct
  source 1..120: mol_type = other DNA
acccttttctgagaggaccacaagtcatagcccagggctacctgtacagctaccaggcttaacaactcagatgcacaccctccacaactgctcttagcacccacaggcctgggccctctc

SEQ ID NO: 30044 - DNA, 120 bp, synthetic construct; identical to SEQ ID NO: 8957
  source 1..120: mol_type = other DNA

SEQ ID NO: 30045 - DNA, 120 bp, synthetic construct
  source 1..120: mol_type = other DNA
gagaaaggcttttagttccgcagacagagcagccagagactgggtgcgctccagcctcatgggccttcctggctggtgtgactggaaccctgggttatacaggctcctgccagtaacctg

SEQ ID NO: 30046 - DNA, 120 bp, synthetic construct
  source 1..120: mol_type = other DNA
ctactcgtcctcctcctggagtgtactgcaaacctggatccggtatccgctgagaaccactcattcatcagtctgcactaactggagaaggtgagcaggcccagcccggcctctctaggc

SEQ ID NO: 30047 - DNA, 120 bp, synthetic construct
  source 1..120: mol_type = other DNA
ttgccaaacaaattatactgctgaccagggaagagggtactctgattggccaggcctgggccagggtctttctcaccgaggtggtgaggctataggtgttagatgtggcaggatgcaagc

SEQ ID NO: 30048 - DNA, 120 bp, synthetic construct; identical to SEQ ID NO: 1875
  source 1..120: mol_type = other DNA

SEQ ID NO: 30049 - DNA, 120 bp, synthetic construct
  source 1..120: mol_type = other DNA
aggggtcagattttgacatgctatttgctttctcactgagttgtgaaaatggaggcacactttcctggcctggcctcttccttcgttcaataaatgaatgaaaccattcaacagaaatct

SEQ ID NO: 30050 - DNA, 120 bp, synthetic construct
  source 1..120: mol_type = other DNA
cgtagcctgtgctttgcagagactcgaaaggtagtcgtcagctagtgagtgactgaaggggatgacagatatggcaggtcagagcaaaatttcctgtgagatttaaataagaagaaggaa

SEQ ID NO: 30051 - DNA, 120 bp, synthetic construct; identical to SEQ ID NO: 8959
  source 1..120: mol_type = other DNA

SEQ ID NO: 30052 - DNA, 120 bp, synthetic construct
  source 1..120: mol_type = other DNA
cctgtaagggtctgcataaagtcaccgctctcttcctctccatgcttttccacttcatctctagcctctatccttgctctcctccctacacaaacagcttctccagggtaatttatttat

SEQ ID NO: 30053 - DNA, 120 bp, synthetic construct
  source 1..120: mol_type = other DNA
gtactgcgtgtctgggtggtgtgtaattttaatttaaatacacagtcatgtactgaggccctctttctgtttggcatttgtgtcactcagcactgtgtttccacgcgtctctatcttgtg

SEQ ID NO: 30054 - DNA, 120 bp, synthetic construct
  source 1..120: mol_type = other DNA
ctccagcatgtttacttaggagggaaactgctgggccacaggtataaaatattttatttgaggaagaagtgttggccagctcttcagaacgtctgtgcctgtctccgtccccacctgcag

SEQ ID NO: 30055 - DNA, 120 bp, synthetic construct
  source 1..120: mol_type = other DNA
tgggcaaattttcatctgtttgttaaccctcctgcaaactggcaatcttcctacctttttcttaatgatttgtggtgctttctggtatattttagctgttgttccctcctcagctttaat

SEQ ID NO: 30056 - DNA, 120 bp, synthetic construct; identical to SEQ ID NO: 8960
  source 1..120: mol_type = other DNA

SEQ ID NO: 30057 - DNA, 120 bp, synthetic construct
  source 1..120: mol_type = other DNA
ttttgctttcaaatatttagtccatttggagtctacttttcctaggggctcagttaggaatccatattcctattcctccattttagggctggctttccaacatcatcttctgaacagtcc

SEQ ID NO: 30058 - DNA, 120 bp, synthetic construct
  source 1..120: mol_type = other DNA
cctggtatctgccagcagaagtcctctgctctccttttcaaaagttcagttggcatttacaaatatttttcttccacatacattttagaatatgtttgttaaattactcaagccctccaa

SEQ ID NO: 30059 - DNA, 120 bp, synthetic construct
  source 1..120: mol_type = other DNA
cattttagaatatgtttgttaaattactcaagccctccaactggaagtttgagtggagtcctgttgaacttaacagatttggaaaatcctgacgtcattctaatgccaagttgccctgtt

SEQ ID NO: 30060 - DNA, 120 bp, synthetic construct
  source 1..120: mol_type = other DNA
gtcgtcgtctttgttaattcctagactggtataaattttgctgctattctgattgctgtcctaatctctattatgcttttttttagtcagttgctattggcataaagaaatgtggtttgt

SEQ ID NO: 30061 - DNA, 120 bp, synthetic construct; identical to SEQ ID NO: 8961
  source 1..120: mol_type = other DNA

SEQ ID NO: 30062 - DNA, 120 bp, synthetic construct
  source 1..120: mol_type = other DNA
gccctttgggggtttcaataacttttaagaatacaacaagtcgtaacaccaaaatgtttgagaatctttatggagaccatcaaccctatgagctacactaagttttatcacttcctacct

SEQ ID NO: 30063 - DNA, 120 bp, synthetic construct
  source 1..120: mol_type = other DNA
agttaagttttggtttataacttgtatcaagttgaagaagttcctctctagtcctggcttgctaagtggtgtactccactaccccaaaatcacacataggcgttaaactttatcacatca

SEQ ID NO: 30064 - DNA, 120 bp, synthetic construct
  source 1..120: mol_type = other DNA
gatattggatcatctttgcattcctaagagcaatcccacttgtttaagaattgttgtttaatacatattattggattcagttagctagcattgtacaaggaacttctgcatctacattca

SEQ ID NO: 30065 - DNA, 120 bp, synthetic construct; identical to SEQ ID NO: 8962
  source 1..120: mol_type = other DNA

SEQ ID NO: 30066 - DNA, 120 bp, synthetic construct
  source 1..120: mol_type = other DNA
agagcaggcagcagaaaacaaaacagagttcctcgttgggagcttttggtctagcaaaaggggcaccacagtaaagaaagaactggtaaatgcacatcaaatgtggatattatcaggaaa

SEQ ID NO: 30067 - DNA, 120 bp, synthetic construct
  source 1..120: mol_type = other DNA
tgggaaggcactcttactctcaattttatataaaaggctatttgacctgctcagggaccacagtggggtactgggatctgaacatagtggtggcccttcaagcctactacccagactgag

SEQ ID NO: 30068 - DNA, 120 bp, synthetic construct; identical to SEQ ID NO: 8963
  source 1..120: mol_type = other DNA

SEQ ID NO: 30069 - DNA, 120 bp, synthetic construct
  source 1..120: mol_type = other DNA
atcctctgtccctaatgaggccctacctaaaaccaccatgcggactccagacccggactgactgggaccccaactactcagatcccaactcaggcaaactcccagccaggatgtggaccc

SEQ ID NO: 30070 - DNA, 120 bp, synthetic construct
  source 1..120: mol_type = other DNA
caattcgggctttgactcaaaaccacaacatggattcccaacttccatcccaatagcgcggactcagaaccacgatgcggattccagactccaatcccaattcagcccactctgaaccac

SEQ ID NO: 30071 - DNA, 120 bp, synthetic construct
  source 1..120: mol_type = other DNA
gctgacgcctgtgatctgggacggccgcggggcacacagctcacctcagcaacgccagtgatcacccgtcccgcgccgtccgcccaggtccgtgctgaccgtgttcaaaccctcccagag

SEQ ID NO: 30072 - DNA, 120 bp, synthetic construct
  source 1..120: mol_type = other DNA
cgcgctgaggaggcccagggaggaccgcgcggaggagaaccatgctgaggagcccccggggagaacagaaccgcggcgagaggcccccggagagaaccgcgccgaagaacccccggggac

SEQ ID NO: 30073 - DNA, 120 bp, synthetic construct; identical to SEQ ID NO: 8964
  source 1..120: mol_type = other DNA

SEQ ID NO: 30074 - DNA, 120 bp, synthetic construct
  source 1..120: mol_type = other DNA
ctgcggcagcgctccgactgcccccgccgctgccgacgtggcgaccgccccccacctgctgattgggcggcagcaggggaaggcttgcggcgggctgctgcacggattggctgggtgcgg

SEQ ID NO: 30075 - DNA, 120 bp, synthetic construct
  source 1..120: mol_type = other DNA
agccgccgccctccctgcccccacccgtcgtccctgagcaccaccgggggccggggccagcgccagcctcagcgttggcatcgccggggtgagctggagacacgggccagttctctgcgt

SEQ ID NO: 30076 - DNA, 120 bp, synthetic construct; identical to SEQ ID NO: 8965
  source 1..120: mol_type = other DNA

SEQ ID NO: 30077 - DNA, 120 bp, synthetic construct
  source 1..120: mol_type = other DNA
ccgagggcgccccgcgcctgccagcgcccggccgggcccgccctgcccacctcccatcccccatccgggcgtgacacttgaccgcgtctgccggcccctccccttgtccgtcccctccgc

SEQ ID NO: 30078 - DNA, 120 bp, synthetic construct
  source 1..120: mol_type = other DNA
ccgtttggcccttccatgtggactgcaaaaacagtgttggaatgcaggactctgggtatgttctcgaaagttgttacaaccccaacccagggttgacctcaaacacaggaggaaggggga

SEQ ID NO: 30079 - DNA, 120 bp, synthetic construct
  source 1..120: mol_type = other DNA
ggtgaccgggttgggggttttgttgttcttcagcccagaagagaaagagaaaatggtgtcattttttcaggcagcaagtgattcctttcaggccttcagcaacgacgcccagatgagtcc

SEQ ID NO: 30080 - DNA, 120 bp, synthetic construct
  source 1..120: mol_type = other DNA
ctcactatctagctgggaagtttttgtcatctgcctgtccgagaggcagctgtgcaaccagtgccatcactcagagccagtgctcaggtgcaccccagactcagggtttcacgctataat

SEQ ID NO: 30081 - DNA, 120 bp, synthetic construct; identical to SEQ ID NO: 8966
  source 1..120: mol_type = other DNA

SEQ ID NO: 30082 - DNA, 120 bp, synthetic construct
  source 1..120: mol_type = other DNA
tgagataggaaacgagagagattatgtgagaagacagggtcaggaatgttgagttgagggtggcctcaggcccctgtcctgctcctttttgctgcttggggtgcagctcaattccagcct

SEQ ID NO: 30083 - DNA, 120 bp, synthetic construct
  source 1..120: mol_type = other DNA
tcccaggtcttcagagtcatttcacagatttcaccagaataaaagtcccactcatgtggggtttacattctggtgggaaagacagattttcgaaacgtggccatttttctttgggccttt

SEQ ID NO: 30084 - DNA, 120 bp, synthetic construct; identical to SEQ ID NO: 8967
  source 1..120: mol_type = other DNA

SEQ ID NO: 30085 - DNA, 120 bp, synthetic construct
  source 1..120: mol_type = other DNA
ttatatagattttcatgttctgggcttgcctccaccctctacctaaccctggaacctcagaccccaagctcctgggcacttggatttttccctgacaaattccccgcctgtgatattcca

SEQ ID NO: 30086 - DNA, 120 bp, synthetic construct
  source 1..120: mol_type = other DNA
gacagttctgtgtcctatgtcctctgctcctcaccccctcgccacacacggggtgccgtcaatcagccagcgccgcctgccagcccagcgcacctgttgtgtgcccccactcccgcctcc

SEQ ID NO: 30087 - DNA, 120 bp, synthetic construct
  source 1..120: mol_type = other DNA
actccaggccagccccagaggcagatgggggctgccaggcaggctgggaggtgagcccagggctggccttgggcaccatggcagaattctgggagggggctgcagtcacggccagctccc

SEQ ID NO: 30088 - DNA, 120 bp, synthetic construct
  source 1..120: mol_type = other DNA
ccactccctgagctccccacgtgacagagggcaggtcccattctccttttgtgtctggtttgcctcatctgtacatggtaggggctgagctagcgttccttgcactccctccagctttac

SEQ ID NO: 30089 - DNA, 120 bp, synthetic construct; identical to SEQ ID NO: 8968
  source 1..120: mol_type = other DNA

SEQ ID NO: 30090 - DNA, 120 bp, synthetic construct
  source 1..120: mol_type = other DNA
ccctgcccccaccctcggagtctaagggtggaaccatcttcagacccagccaggttcccaagttgctgcttccctcggaagctgagaggcccagggccacgtggcagcctccgcagtcca

SEQ ID NO: 30091 - DNA, 120 bp, synthetic construct
  source 1..120: mol_type = other DNA
ttaaggtcagcccttgcagttggcagtctgtggcccctcctcggtccccttcagtgaggctttttgcatgcattggtccacacacccaccactgcagctgtcctgggtaagggctctgtg

SEQ ID NO: 30092 - DNA, 120 bp, synthetic construct; identical to SEQ ID NO: 8969
  source 1..120: mol_type = other DNA

SEQ ID NO: 30093 - DNA, 120 bp, synthetic construct
  source 1..120: mol_type = other DNA
cagtggggagtctctaggaggttttgggcaaggcagtgccaaggatcagatctcccttctagaaaggtcactctggctgctgaacagagagagaactgaagagaggcagcagggtgaggg

SEQ ID NO: 30094 - DNA, 120 bp, synthetic construct
  source 1..120: mol_type = other DNA
gacttctggctgaggacagggaggagcttaaggtagccctcagcatccaacaggggtagcagcctagtgcatgtatgaccacgagcgagcccaagggaaggacgggtttggagggtttct

SEQ ID NO: 30095 - DNA, 120 bp, synthetic construct
  source 1..120: mol_type = other DNA
gtcttagctacccaaggcccagggagaggcacacggctcaggctgacagagtgtgacagatgcaggtcctgctccctcagggaatcccccattccaggacagtctcagcccccatgcaag

SEQ ID NO: 30096 - DNA, 120 bp, synthetic construct
  source 1..120: mol_type = other DNA
gaggccagacgggtggggggtctggagttcaggcggtctccatgagtggcagcacggggtgtgggccagttcccattgggagggcagctgtgctgtgtgtgtatatgtttgggcattgct

SEQ ID NO: 30097 - DNA, 120 bp, synthetic construct; identical to SEQ ID NO: 8970
  source 1..120: mol_type = other DNA

SEQ ID NO: 30098 - DNA, 120 bp, synthetic construct
  source 1..120: mol_type = other DNA
aagttgtttctgattatctcttgagtcctgggagaggtgttaacaaaaagccccatccctgtcgctctggtggttatagtttgttttacgcattaaaaggccctggatcggtatttgtag

SEQ ID NO: 30099 - DNA, 120 bp, synthetic construct
  source 1..120: mol_type = other DNA
taaaggtccttagagaacctgaagagaatattctaatcaagctaggcaggctcagaagatggatgtaatttggaggaaaaagacaagaatgggaaagaaagggaaacctacctggggtac

SEQ ID NO: 30100 - DNA, 120 bp, synthetic construct; identical to SEQ ID NO: 8971
  source 1..120: mol_type = other DNA

SEQ ID NO: 30101 - DNA, 120 bp, synthetic construct
  source 1..120: mol_type = other DNA
ccagccccagtcaaacctctgatgagacagcagccctggtctacaccttgactgcagcctcacaggagatcagaaccacccagccaagccacccccagatccctcgcccacagaaaccat

SEQ ID NO: 30102 - DNA, 120 bp, synthetic construct
  source 1..120: mol_type = other DNA
agcaaagtgggctcagcctacctgttggcttttactgatggttggtggctcccaggagaaagagtactgtgcccaggtagcatgcccaccccaggcatacatagcatgtctttgctcttg

SEQ ID NO: 30103 - DNA, 120 bp, synthetic construct
  source 1..120: mol_type = other DNA
aggcagcagagagctgtggcattttgggtggagtgggtggagagggtgcgtgatgggtgggagaaactgacagttggaatgtgatttaggaaatgtaacgggtgaccttttctccccaag

SEQ ID NO: 30104 - DNA, 120 bp, synthetic construct; identical to SEQ ID NO: 8972
  source 1..120: mol_type = other DNA

SEQ ID NO: 30105 - DNA, 120 bp, synthetic construct
  source 1..120: mol_type = other DNA
cagaacaggacagaactgccctagtcaggccctgcctgggcacagagctgccaccactcttccaagagccctcccttttggggactgtgcccccaccccacccccaggcagcccctgcct

SEQ ID NO: 30106 - DNA, 120 bp, synthetic construct
  source 1..120: mol_type = other DNA
tccaagcagggaggctttgtttatctcccaattagtcctgtagcacttagtatgtcaggcatggttctgagggcttcatccacactaccacccactgtagagatgggaaaactgaggcat

SEQ ID NO: 30107 - DNA, 120 bp, synthetic construct
  source 1..120: mol_type = other DNA
gacacagcccctgtttgcagaggcagctcctttcatggagcatgggggacagggcaggtgtgccttggcccacatttggcttcttgagcgccgaacctgcatgtgccaccccccagagtt

SEQ ID NO: 30108 - DNA, 120 bp, synthetic construct; identical to SEQ ID NO: 8973
  source 1..120: mol_type = other DNA

SEQ ID NO: 30109 - DNA, 120 bp, synthetic construct
  source 1..120: mol_type = other DNA
ggaacttggcaaagcagtgaattgggagctcacttaggcacgtggtcctgaggctccttgctggcgtttctgttttgctccctgctcctttcttttctttgtaacttctcttcagggcac

SEQ ID NO: 30110 - DNA, 120 bp, synthetic construct
  source 1..120: mol_type = other DNA
ggggtgcacagggtgggcagtgaccagaagactcaccccagggcctctaattttgacccttgatctgggtctaagcacctctgagcaagaggtgagggtttcaggcagcctcagctctta

SEQ ID NO: 30111 - DNA, 120 bp, synthetic construct
  source 1..120: mol_type = other DNA
ccagggctaaagccctccttgggacatgtcaatagcagcaaacattttaaagatgtgacatgttcgaagcctggcaacaggggcagctccagctgtgcgagaacatggctggatttacgt

SEQ ID NO: 30112 - DNA, 120 bp, synthetic construct; identical to SEQ ID NO: 8974
  source 1..120: mol_type = other DNA

SEQ ID NO: 30113 - DNA, 120 bp, synthetic construct
  source 1..120: mol_type = other DNA
ccccagctgcagaggacttctggctccctgttcctgggctttcagcatgagaaatatcaaacctgggaaccgtgcagcaagaagcgggcagaggctcagacgccaggacctgcgggggct

SEQ ID NO: 30114 - DNA, 120 bp, synthetic construct
  source 1..120: mol_type = other DNA
aaaattcacataccatacaattcacccatttaaagtgtacgattcaacggtttttagtacgttcagagttgcgcaaccatcacactatctagttccagaacattttcagtgcccctaaaa

SEQ ID NO: 30115 - DNA, 120 bp, synthetic construct
  source 1..120: mol_type = other DNA
tggaatcacacactaagcagacttttgtggctgacttctttcacttagcctaaggttttcgaggttcattcatgctgtagcatgtatcagtgtttcattcctttttagggccaaataata

SEQ ID NO: 30116 - DNA, 120 bp, synthetic construct; identical to SEQ ID NO: 8975
  source 1..120: mol_type = other DNA

SEQ ID NO: 30117 - DNA, 120 bp, synthetic construct
  source 1..120: mol_type = other DNA
cctagtggttttgatttgcatttccccgatgactaatgatgttgagcatcttattagccatttgtatctcttctttgaagaagtatgtattcaaattctttgcccaaattttaattgggt

SEQ ID NO: 30118 - DNA, 120 bp, synthetic construct
  source 1..120: mol_type = other DNA
gatcatgtcctttgactcacaaaggtttttaattttgatgaagttcaatttatctgtttctttctttggatgcttatgtttttggtgtcataactaaataacaacatgtaatctgaggtc

SEQ ID NO: 30119 - DNA, 120 bp, synthetic construct
  source 1..120: mol_type = other DNA
ctttgtcatgtggatagacagttatcccaacaccatttgttgaaaagactcttctttcctcagtgaaggatgttgatacccttgtcaaaaatcagttgacagtaaatatgaaggtttatt

SEQ ID NO: 30120 - DNA, 120 bp, synthetic construct
  source 1..120: mol_type = other DNA
gtttttctttttcaagattattttggctattctgggtcccttgaatttccatatgaattttacaatcagcttgtcaatttctgcaaagaaaccatctgggataccaatagggattgcatt

SEQ ID NO: 30121 - DNA, 120 bp, synthetic construct; identical to SEQ ID NO: 8976
  source 1..120: mol_type = other DNA

SEQ ID NO: 30122 - DNA, 120 bp, synthetic construct
  source 1..120: mol_type = other DNA
tcctgcctggagtgttctctctcctcccttttctgtgagccgtcatgaaacacctcctgtgggcttactgagccaccatcttatccaagtgctctgtggcagcttgtggaatcttctcaa

SEQ ID NO: 30123 - DNA, 120 bp, synthetic construct
  source 1..120: mol_type = other DNA
acaatggagctatttcccagtcagacctcacaatcggtaaactgtgcttaaactaagtgaggtatcttaaggctttaccaccagggaaatagaactttggcagcttacaaaggagtttta

SEQ ID NO: 30124 - DNA, 120 bp, synthetic construct; identical to SEQ ID NO: 8977
  source 1..120: mol_type = other DNA

SEQ ID NO: 30125 - DNA, 120 bp, synthetic construct
  source 1..120: mol_type = other DNA
acacagccaagtccttttggaccaaattggatcactgccaaatggtatgcccagccttgctgaatctctacccatctgtaaaaaggagaaatcgtttctgtgctccctgcctcccagaga

SEQ ID NO: 30126 - DNA, 120 bp, synthetic construct
  source 1..120: mol_type = other DNA
catttaagccatgaacacttgccggctctctattcatccacaccccctgcatttattgagtgccttctgggtgcccggccctctactagatgtgggagttaccgtgtgggatggactgac

SEQ ID NO: 30127 - DNA, 120 bp, synthetic construct
  source 1..120: mol_type = other DNA
gatgttagactcaccagccatcccctggaaagctgtggggagactcagagcagagcccccagtaatcatagtgaggtatttagggatagagtggagatctcgcccacatattcccgaagc

SEQ ID NO: 30128 - DNA, 120 bp, synthetic construct; identical to SEQ ID NO: 8978
  source 1..120: mol_type = other DNA

SEQ ID NO: 30129 - DNA, 120 bp, synthetic construct
  source 1..120: mol_type = other DNA
tgggttgggagcacacatggcatctcctagagagtttgggggctggacacagggaggaggcagcatgggaaatggaaggactgcagcccccgcctccctccaaggcagttgtcagagcaa

SEQ ID NO: 30130 - DNA, 120 bp, synthetic construct
  source 1..120: mol_type = other DNA
ggcagcaggctaacgactccccatgaaattaacaactttgtgaagcatttggtatttgggggattttacattagggttaatgagcctctgaaatgagatcccggagaggggccaggacca

SEQ ID NO: 30131 - DNA, 120 bp, synthetic construct
  source 1..120: mol_type = other DNA
attgttcactgcgcttctcaggccttctgggctcttcctctgctgctcgccataaaaactctccagtcatcttttccgctgtggtttttattgttttattttattattccagctatatta

SEQ ID NO: 30132 - DNA, 120 bp, synthetic construct
  source 1..120: mol_type = other DNA
tcccactgtgggaagggggtctggaggacaggcacccttgttggccgtggataggtttctgttctccctcgacccacccagcaagagaaaaaagtgagctgacattatgggtcggcccct

SEQ ID NO: 30133 - DNA, 120 bp, synthetic construct; identical to SEQ ID NO: 8979
  source 1..120: mol_type = other DNA

SEQ ID NO: 30134 - DNA, 120 bp, synthetic construct
  source 1..120: mol_type = other DNA
gcgccttggggcacccaggcctgcagccctcccccacacaggcagtctccacagagatagagcgccaaggatgcgggccaggactctttccgagcctctcctgttgctggggcctgctcc

SEQ ID NO: 30135 - DNA, 120 bp, synthetic construct
  source 1..120: mol_type = other DNA
gggcctcacctccctggcagcccactcacctcacatggcctgagccgcaaggtcagccccctcccaggcccgtgagaggcagcaggcactatgggcgagctgcctgctgggccacaggct

SEQ ID NO: 30136 - DNA, 120 bp, synthetic construct
  source 1..120: mol_type = other DNA
cacttctgaatccccagggctgggcacagggctgtgacgccataggtgctctagatagatggaggagctcacagctgcagggagtgttgggtggacatatggggtgtggggggcgaggcc

SEQ ID NO: 30137 - DNA, 120 bp, synthetic construct; identical to SEQ ID NO: 8980
  source 1..120: mol_type = other DNA

SEQ ID NO: 30138 - DNA, 120 bp, synthetic construct
  source 1..120: mol_type = other DNA
tgcaggaggggcctagccagggccaggtgtcacacaagcagagctccagggtgcagctgggcagattgccggtggttggtgctggtgaggagtagcagggtggggtccggcggtaatgcc

SEQ ID NO: 30139 - DNA, 120 bp, synthetic construct
  source 1..120: mol_type = other DNA
aggagcctcagtagagacacagctagaaagtggccagctggggtttggtgctgagcctctgtctgactctctgctctctggagagctcaagggaacctgtaaagacctgcgggctgtgtc

SEQ ID NO: 30140 - DNA, 120 bp, synthetic construct
  source 1..120: mol_type = other DNA
cagggaggaccccctgcagcctggctcaggcaggggcatgtgtgaaggcccagggggaagagagcagccaggtagacttcgtttccagccggagtgtacctggggatgcctgtgcccaag

SEQ ID NO: 30141 - DNA, 120 bp, synthetic construct; identical to SEQ ID NO: 8981
  source 1..120: mol_type = other DNA

SEQ ID NO: 30142 - DNA, 120 bp, synthetic construct
  source 1..120: mol_type = other DNA
atggtgatgcaaaccataaacctgtcccccacgtcacctccaaaccctttgggctggcctcttggtgaggaatggccctgggagaggctgccctgcctttgacctctcatgcactgagag

SEQ ID NO: 30143 - DNA, 120 bp, synthetic construct
  source 1..120: mol_type = other DNA
acaatttttcacttttggaggggtcgtgaataaccccaaagcaacatgtaccctctccgggccaggctcaagcggtcctctcactagggaaagaagtcagaaaaaagctccaagctgaag

SEQ ID NO: 30144 - DNA, 120 bp, synthetic construct; identical to SEQ ID NO: 8982
  source 1..120: mol_type = other DNA

SEQ ID NO: 30145 - DNA, 120 bp, synthetic construct
  source 1..120: mol_type = other DNA
ggccgctcagctacagtaggccccaagccccagagactccagattccccactacggaaggcagccgtgaaaggcacgggcagcgcggtgcttctccttcaggaggtggaactgggtggcc

SEQ ID NO: 30146 - DNA, 120 bp, synthetic construct
  source 1..120: mol_type = other DNA
ctggcagacatcactctggcccaaggccaggcctgcagtaggagctctgtgcatatcccctatgtgagtacaggaacctcagtggtgcctgtggagctgttcagtgggccctgtattcgc

SEQ ID NO: 30147 - DNA, 120 bp, synthetic construct
  source 1..120: mol_type = other DNA
aacccaagtcttccttcctactcctggcagggcaggcaattccactgatggctgcagtgcgacacagactgggcctggcatggtgtccctcagaccccacggcttggtcgggtcacctgg

SEQ ID NO: 30148 - DNA, 120 bp, synthetic construct
  source 1..120: mol_type = other DNA
tctgcgcacagtatgccaatgttccccaaaatctacatactgagaaggtagacagcaaagccacagggagacttctgggtagcccaggtggaattcttcccttcctgtttcccagttttc

SEQ ID NO: 30149 - DNA, 120 bp, synthetic construct; identical to SEQ ID NO: 8983
  source 1..120: mol_type = other DNA

SEQ ID NO: 30150 - DNA, 120 bp, synthetic construct
  source 1..120: mol_type = other DNA
agcagggagcacacgcctgtccaagaccttgggccagaggaaccccctctcccccgatggcccactcgccccagggcctccaggtttgagccccccggggtattagcccagcattttagg

SEQ ID NO: 30151 - DNA, 120 bp, synthetic construct
  source 1..120: mol_type = other DNA
cttccttggtttctgaaggctgcgaaagctgcgtctgtcgcagaagtgaaccttgttttgttttgttgatgggtgtagtctcagggcatgttcaatgtctgtggagctgcctcttctgga

SEQ ID NO: 30152 - DNA, 120 bp, synthetic construct
  source 1..120: mol_type = other DNA
tctgctccgtccttccccacatccccctcacacaccttgtgcttgctctgggcttcaggggcctgagccccaggtagacccccacacttagggtgcctcaccacactccatccctagccc

SEQ ID NO: 30153 - DNA, 120 bp, synthetic construct; identical to SEQ ID NO: 8984
  source 1..120: mol_type = other DNA

SEQ ID NO: 30154 - DNA, 120 bp, synthetic construct
  source 1..120: mol_type = other DNA
acttatatctgtcaggggaagggcagttgcagttaggaccacactaaaaggttaatgtccacgctggtgttgaccaagccctggaccctgctgtgccaggcactcccatcagcatccagg

SEQ ID NO: 30155 - DNA, 120 bp, synthetic construct
  source 1..120: mol_type = other DNA
attcaaatgcagattcctgggctattccaagagttactgaatccccaccctggggtgaaggcttggcgtctgccagggaccatagaccacagatactcatctacgcttgtgacccccctc

SEQ ID NO: 30156 - DNA, 120 bp, synthetic construct; identical to SEQ ID NO: 8985
  source 1..120: mol_type = other DNA

SEQ ID NO: 30157 - DNA, 120 bp, synthetic construct
  source 1..120: mol_type = other DNA
tctctaccaaaaaaaaaaaaaaaagagccatacaaggtggtgcgtgcctgtggtcccagctgtttgggggctgagatgggaggatcgcctgagcctgggaggtcaagagtgcagtgagcc

SEQ ID NO: 30158 - DNA, 120 bp, synthetic construct
  source 1..120: mol_type = other DNA
ataagaagtcagagaatcctctccagctgaaaaccctcatttgttatcacccaaatgctgcctgctggctggcgagccttgctggtggtggaaggcccagcagtagcaaaggaaaccagg

SEQ ID NO: 30159 - DNA, 120 bp, synthetic construct
  source 1..120: mol_type = other DNA
gtgctggtttcagagaaacaaacagccctgatgtagctgtggcccttggaggtgtccgaatagtccatcattttcagtgacagaaagacggaaatggacacagatcaaacctgcatcaca

SEQ ID NO: 30160 - DNA, 120 bp, synthetic construct; identical to SEQ ID NO: 8986
  source 1..120: mol_type = other DNA

SEQ ID NO: 30161 - DNA, 120 bp, synthetic construct
  source 1..120: mol_type = other DNA
gttatctttaaaaagtatcggtgggctcatgggggcttgagtgtcctggcagctctcctcatccatcctatgtgtacactcaggcacgtactccctggctcagccgccttccggggcccg

SEQ ID NO: 30162 - DNA, 120 bp, synthetic construct
  source 1..120: mol_type = other DNA
ctcacctggcctctctctgtaaggggagagggacccagggctgaccagagcaagcagtgtgccattaacccctacctgtccagaactctgagctcctgtgggtccttctctgagtgtcct

SEQ ID NO: 30163 - DNA, 120 bp, synthetic construct
  source 1..120: mol_type = other DNA
ctaggagtccatgctacctgtggggttcatagtgtgtccctctcagccaatgggaagtcgtgcccttggatcatttggggcaaatggtcctcgttttcttcattatatggtgttgagttg

SEQ ID NO: 30164 - DNA, 120 bp, synthetic construct; identical to SEQ ID NO: 8987
  source 1..120: mol_type = other DNA

SEQ ID NO: 30165 - DNA, 120 bp, synthetic construct
  source 1..120: mol_type = other DNA
tccagcagcatccacgactaatttcttccccctgtttgtcctaccgtggaggtcgagttaaaaggcagcacttcgggggttgaaaagctacccgcaggggtctgctcgtgagggaccccc

SEQ ID NO: 30166 - DNA, 120 bp, synthetic construct
  source 1..120: mol_type = other DNA
gcaaattgctgtctccagctcgcaagaggggcaggtccagggatgtgtttcacccccaaggtgtgagtggaatcagcaaattgtatcaagaaatatttctagggatttacattccggcgg

SEQ ID NO: 30167 - DNA, 120 bp, synthetic construct
  source 1..120: mol_type = other DNA
gctgcagatcacgccaggcaggcctccggccgtttgtctcttccgacagcagcggtggtgatggtcccctcggcctgcctggcctgcagcagccctggctggaggctgaccgagcctccg

SEQ ID NO: 30168 - DNA, 120 bp, synthetic construct
  source 1..120: mol_type = other DNA
gtgagacccaactccactgcctggggataccctcaccccaagcccaaggagcctgtccctacgcacaccccctgcccctgggaggcacatgccgagctttcctgtcctccatttggtggc

SEQ ID NO: 30169 - DNA, 120 bp, synthetic construct; identical to SEQ ID NO: 8988
  source 1..120: mol_type = other DNA

SEQ ID NO: 30170 - DNA, 120 bp, synthetic construct
  source 1..120: mol_type = other DNA
agcctggaactgagcccagagactgcagcattcagaggtcagggatcaaggaggacctcacaaaggagatcgggaaggtggaggcttggtcacccccaggaggagctttttctaaggaag

SEQ ID NO: 30171 - DNA, 120 bp, synthetic construct
  source 1..120: mol_type = other DNA
gtcggcagtggcggaccgagagtgcttcccttctcacgtggttgggagtcatgacctgtttagtaaataggctatggcagcctcttggaacttagtgaggtggctaagctgcccctagat

SEQ ID NO: 30172 - DNA, 120 bp, synthetic construct; identical to SEQ ID NO: 8989
  source 1..120: mol_type = other DNA

SEQ ID NO: 30173 - DNA, 120 bp, synthetic construct
  source 1..120: mol_type = other DNA
ctctgtggctctgccttcctcttggctccgccttcctccgtggtggcctgagaggggtgtggtgctgcttgtccgtggtgctccacacacctgccacagctgcttaccccactccctgcc

SEQ ID NO: 30174 - DNA, 120 bp, synthetic construct
  source 1..120: mol_type = other DNA
tctcagagccttggtgtccccatctgtaaagtgggatgtgacaatacccttcttgctgaatgggcagggagagaggagctgttaggtgagaccaggtggtacttggcagctgtggcacgt

SEQ ID NO: 30175 - DNA, 120 bp, synthetic construct
  source 1..120: mol_type = other DNA
aaactcagcagctcgaagtagcaacagcctcgaatccctcacacctagcggttggctgggcaggtggactggtccgagctgagtggtctaggatggccttgctcccggagaagacccttg

SEQ ID NO: 30176 - DNA, 120 bp, synthetic construct
  source 1..120: mol_type = other DNA
gtggtcaaagcaagtcacggattccagggggacctcgggacgaggaagtcacacgttgggggatgtgccgcagggatggggcatctcagcctttgtatctgccgtgggcgtggaggcatt

SEQ ID NO: 30177 - DNA, 120 bp, synthetic construct; identical to SEQ ID NO: 8990
  source 1..120: mol_type = other DNA

SEQ ID NO: 30178 - DNA, 120 bp, synthetic construct
  source 1..120: mol_type = other DNA
aatcctcaggagtgacagcgtcctcccgcccggattgggtttctgcacagtggaatggagctggcagccagggtccctgtcccgccagccctaggcctcgaaccctccctggcaagctaa

SEQ ID NO: 30179 - DNA, 120 bp, synthetic construct
  source 1..120: mol_type = other DNA
aaggaccccactaggaaccccttcccgcggaaacacagcttctccccttgggtgccattgcagctgcacccaagccttgcccttccctctcacttcgctccccaggaggcgacactgtga

SEQ ID NO: 30180 - DNA, 120 bp, synthetic construct; identical to SEQ ID NO: 1905
  source 1..120: mol_type = other DNA

SEQ ID NO: 30181 - DNA, 120 bp, synthetic construct; identical to SEQ ID NO: 8991
  source 1..120: mol_type = other DNA

SEQ ID NO: 30182 - DNA, 120 bp, synthetic construct
  source 1..120: mol_type = other DNA
tccgggacagacggctggacttgtgaaacactccagggtcgggggctcagccacgggaccagcgcttgccagaaatgttcccagcttttttgagttcgtgagtggctggtggatacttag

SEQ ID NO: 30183 - DNA, 120 bp, synthetic construct
  source 1..120: mol_type = other DNA
aatcgtcttcgagctactgatatagaacctctgcgtttagctgtggtttaggaagtgcattcacgtgaagtcgccaagttcaaagggctgcccctggaacccaagtcagacttgccctcg

SEQ ID NO: 30184 - DNA, 120 bp, synthetic construct
  source 1..120: mol_type = other DNA
atcactgggctttgtgaaacctgtcagcttgtgtgaaagctatctcccccaggccccacccccgcccccacccaaagcacaggtcacctgcctggttaatcatcctgggctctgagagct

SEQ ID NO: 30185 - DNA, 120 bp, synthetic construct; identical to SEQ ID NO: 8992
  source 1..120: mol_type = other DNA

SEQ ID NO: 30186 - DNA, 120 bp, synthetic construct
  source 1..120: mol_type = other DNA
ccagctggccagggcagaggagcaggccaagggtgggtcccgggcagtggcccagagaagctgagctcgctcacgagatgtgtgctgacgtggcaagatgggcgggagtcttcatgaagg

SEQ ID NO: 30187 - DNA, 120 bp, synthetic construct
  source 1..120: mol_type = other DNA
cagtaggtttccaaaagggcacagacacagctcaggagatggatgctgccctgtcagagtggggaaactgaggccccaggcggagacaccacccactgcaggttccagccgtcccccacc

SEQ ID NO: 30188 - DNA, 120 bp, synthetic construct; identical to SEQ ID NO: 8993
  source 1..120: mol_type = other DNA

SEQ ID NO: 30189 - DNA, 120 bp, synthetic construct
  source 1..120: mol_type = other DNA
tttatttttctgcattggcctgaataggagctgactttaatacgggggaaatagtgattttaaagccggctttcccatggaatgtgcttctcctgtgactgtgcccatctcctcactgct

SEQ ID NO: 30190 - DNA, 120 bp, synthetic construct
  source 1..120: mol_type = other DNA
catttgcctccaatcctgactctccaagccctgtccctgcccccaggtgaagggttggccctgggcatggaggtcggcagcagggaggggacacttaagccacttggttgggggtttgtg

SEQ ID NO: 30191 - DNA, 120 bp, synthetic construct
  source 1..120: mol_type = other DNA
gtggggctctggagcaacagaggcctcaaaagctcagcgtctacagatgttagggacaaggaggcagcttgggggatgtgctcaggccctggaggcagacacatcagggtctgaatccca

SEQ ID NO: 30192 - DNA, 120 bp, synthetic construct
  source 1..120: mol_type = other DNA
tgagtcaggtgtcagggaccaccaggccttgtgcaggaacatggggtagtgtccctgggggaaatcctaccccagactcgaggaataaagaggaggaggaggttgcctgagcttaacaga

SEQ ID NO: 30193 - DNA, 120 bp, synthetic construct; identical to SEQ ID NO: 8994
  source 1..120: mol_type = other DNA

SEQ ID NO: 30194 - DNA, 120 bp, synthetic construct
  source 1..120: mol_type = other DNA
gctttgctgtggaggcagagggagcatctgatggcccccggggccgcgctagtcaaagcgcttcatttccatcatatgtggtgcaaaatctaaccctcttaccctgcgtgaggttcatgt

SEQ ID NO: 30195 - DNA, 120 bp, synthetic construct
  source 1..120: mol_type = other DNA
cacaaatcccttccaggacttccgatggttctgtcctcccctcacacaggcctcacctcttttgccccctccacctctggagcggccactcgcccacccttctgccctgacttctctgtg

SEQ ID NO: 30196 - DNA, 120 bp, synthetic construct
  source 1..120: mol_type = other DNA
gggaccacagccggctgaacgccaactggttagctgctttttctataggacctaccgagcgtttgactctagaaccgggggttggtgcttggtgacaagagctaggctggcttcctacta

SEQ ID NO: 30197 - DNA, 120 bp, synthetic construct
  source 1..120: mol_type = other DNA
cacggggcctgagcctactgcatcctcccagaagctggcctacaggacggaggctcagggtggccagttgggcatggggttctgctggcccagagtgccagggggacaggaagtccctga

SEQ ID NO: 30198 - DNA, 120 bp, synthetic construct; identical to SEQ ID NO: 8995
  source 1..120: mol_type = other DNA

SEQ ID NO: 30199 - DNA, 120 bp, synthetic construct
  source 1..120: mol_type = other DNA
caggcgggcacaaagggcgctcgggccaggaacccatgagctgggctctcccggggccgagggtccagacctgttgccgagaagctgcttagcaaggcctaggggcaagggctggtctgg

SEQ ID NO: 30200 - DNA, 120 bp, synthetic construct
  source 1..120: mol_type = other DNA
aataaagtccccacattgtagcactgccaggtggattaaatgaaagaagatagtgaagtccttaaagtgagatgtgttggcatttactccacaaatactgaatgcctgctccaggtgcca

SEQ ID NO: 30201 - DNA, 120 bp, synthetic construct; identical to SEQ ID NO: 8996
  source 1..120: mol_type = other DNA

SEQ ID NO: 30202 - DNA, 120 bp, synthetic construct
  source 1..120: mol_type = other DNA
ttagtatttatctacagagtgcttggaagggaaaacaaagacaggcagggctggtttggggaaggggcctgttgtggatggggtcgtggaggaccttacagtgtccccaaagcgaggtga

SEQ ID NO: 30203 - DNA, 120 bp, synthetic construct
  source 1..120: mol_type = other DNA
cgagagctaggacacgtgaagccctggctggccccgagtgcggtgtggttggcgcagatggcaacagggtcactctggctgcagagccaagaatggaccactgaggggctgggacagacc

SEQ ID NO: 30204 - DNA, 120 bp, synthetic construct
  source 1..120: mol_type = other DNA
cggctgctgtaatgaattcccacaaacttagtggctttaagtgacacgtttattatctaacagctctggaggtcagatgtccgacatgggctacattcaaggagccagcagagctggttc

SEQ ID NO: 30205 - DNA, 120 bp, synthetic construct
  source 1..120: mol_type = other DNA
ggggagtgcaggggtgatctggaggagccggtcaatagcagcgtggtggggtctggcagagacagactgcagggggcctgggaggccccaggaggcaggtggactttgtccctaggcatc

SEQ ID NO: 30206 - DNA, 120 bp, synthetic construct; identical to SEQ ID NO: 8997
  source 1..120: mol_type = other DNA

SEQ ID NO: 30207 - DNA, 120 bp, synthetic construct
  source 1..120: mol_type = other DNA
aaggaaggcccttgttgccctgcattgggagcaaacacttcctttggcctcacagctcaaccttggacccaaaggtcctcagggacctgggggaaagagagggcagccaggcacctctgt

SEQ ID NO: 30208 - DNA, 120 bp, synthetic construct
  source 1..120: mol_type = other DNA
cataaagccaagggtggcaggcggaatccaaggggcctcaccgcccatgcaccccactgttgcatggagagaacaatgcccaaatgccctcgtcccacagtcggcatgccagacccctcg

SEQ ID NO: 30209 - DNA, 120 bp, synthetic construct
  source 1..120: mol_type = other DNA
aaggcggacacccagggcggccatctctcgggacaggaggtgcggctccaggttctcacccaggagagggctttcctcccatgtcagagtccccttcgctgcttgaggcaagccctccgg

SEQ ID NO: 30210 - DNA, 120 bp, synthetic construct; identical to SEQ ID NO: 8998
  source 1..120: mol_type = other DNA

SEQ ID NO: 30211 - DNA, 120 bp, synthetic construct
  source 1..120: mol_type = other DNA
ttgccagcaggggaccagcgaggtgtggcctgcaagccgtgggctcctgtgttccttcctcccccttcagaggaatgggaggaaaccaggcttgagttcctgatttttgccctttagggt

SEQ ID NO: 30212 - DNA, 120 bp, synthetic construct
  source 1..120: mol_type = other DNA
tgcttggtcttgcctcaggagcattgctggcacctctcatgtgctcctgggcctctccccaaccctcaccttggcatcccccaatatccaaacaatagtccacaaaacaagctgccccgt

SEQ ID NO: 30213 - DNA, 120 bp, synthetic construct; identical to SEQ ID NO: 8999
  source 1..120: mol_type = other DNA

SEQ ID NO: 30214 - DNA, 120 bp, synthetic construct
  source 1..120: mol_type = other DNA
aaggcacaagcggccttttcttcctcaccgggccggcgcacacagctcccagcctggcttcccttgaacaaacatatttattgtggccgccaccgaggcctcgccttgcagccggagcct

SEQ ID NO: 30215 - DNA, 120 bp, synthetic construct
  source 1..120: mol_type = other DNA
cctctggaggcccagaaactcgaggctcctgctgggggctggtgaccacccacaggcagcaagccagccagggtcctgggaagagggggtctgggacacagccacacctgagcccatcct

SEQ ID NO: 30216 - DNA, 120 bp, synthetic construct
  source 1..120: mol_type = other DNA
ggtctgaagagcagagccctgagctctgagatccactcccacccccacccccacccccaggcctctctctgccttccctagtgctcctttgtgtgtccagagggaaggggcatcctccat

SEQ ID NO: 30217 - DNA, 120 bp, synthetic construct; identical to SEQ ID NO: 9000
  source 1..120: mol_type = other DNA

SEQ ID NO: 30218 - DNA, 120 bp, synthetic construct
  source 1..120: mol_type = other DNA
gggcagccctgggggaggagccaggccaagtgtgctgccctcttggcctcagatctgaagctatagagcctcctggagggcagaggcagtggagaggggtctagcgggcaggagggggac

SEQ ID NO: 30219 - DNA, 120 bp, synthetic construct
  source 1..120: mol_type = other DNA
cgctgttcccctgccctgccaggcgcaccacccccgaaacatgcacacgctctcctcttccctgcttaatcctcttgagtcttcaggcctcaacccacgcttcccctgaacatcctcctc

SEQ ID NO: 30220 - DNA, 120 bp, synthetic construct
  source 1..120: mol_type = other DNA
gggtggtcctgctccggccccagggcccgcaggtgtgtgtgagaggtgcatggtggacgtccaaagaataaacgaatgaaccatccaaagcacaggccagaggcagattgggagggtcag

SEQ ID NO: 30221 - DNA, 120 bp, synthetic construct
  source 1..120: mol_type = other DNA
caatggatgggttgaatgaggaagcttcacagccccccggccaccgcaggtcgggggagcactgtccccggggccccgcagccagctgtgctgggcaaggcaggacgggatccttggtga

SEQ ID NO: 30222 - DNA, 120 bp, synthetic construct; identical to SEQ ID NO: 9001
  source 1..120: mol_type = other DNA

SEQ ID NO: 30223 - DNA, 120 bp, synthetic construct
  source 1..120: mol_type = other DNA
tcctgtgctggggcctggctgtggcttcccaggccccggctgggaccaccgcagaggtgatgtctccaggaggcttctgggccagcagcatgttccagtgcgacacatgtgccccggagt

SEQ ID NO: 30224 - DNA, 120 bp, synthetic construct
  source 1..120: mol_type = other DNA
ggctgtcagcgcgcatctggcttacattgaactcccccataaaacgtgtgaaacctgacagcagcgccgcagcaggacagggagggactgtgtgtgagagccagggaagggctgctcagg

SEQ ID NO: 30225 - DNA, 120 bp, synthetic construct
  source 1..120: mol_type = other DNA
aatggcaattgaggccctgcccggtggagggtgggccatggccgcccccacctcccctcccgcaagcttctccccttccttcagagcccaaccactgcttgctccttcccacccctccta

SEQ ID NO: 30226 - DNA, 120 bp, synthetic construct; identical to SEQ ID NO: 9002
  source 1..120: mol_type = other DNA

SEQ ID NO: 30227 - DNA, 120 bp, synthetic construct
  source 1..120: mol_type = other DNA
tgtgtgcccgagtcaccttctcctctcataaggaccccagtcaggtgggattagggctcacccttatacccccattctgctttaattacttcttataagaccccatctccagacacacag

SEQ ID NO: 30228 - DNA, 120 bp, synthetic construct
  source 1..120: mol_type = other DNA
tatgtgtgtgcagaaggcccatgagctgcctggggttggggggtggtccttatacatactttagatgccagagggggctcattgggcagaacctacctgggaaggggcccaggcttcctg

SEQ ID NO: 30229 - DNA, 120 bp, synthetic construct; identical to SEQ ID NO: 9003
  source 1..120: mol_type = other DNA

SEQ ID NO: 30230 - DNA, 120 bp, synthetic construct
  source 1..120: mol_type = other DNA
cctggagagaaggtgcactttggggatgggaggcgctaggtgccaatggccctaggagggggctttggagctggacccttgagggagtcaatgccagctcatcgccatagcggcttgctt

SEQ ID NO: 30231 - DNA, 120 bp, synthetic construct
  source 1..120: mol_type = other DNA
ccatttcacctgcgcatctgcagctggtatgcggctgccctggtgggttcctggctggctggcatgcgccctgcgcctctgctgggcctggtggggcctaagggtgaaaactcggtcaag

SEQ ID NO: 30232 - DNA, 120 bp, synthetic construct
  source 1..120: mol_type = other DNA
ccccaccgcctgccttcccaagacatcctgagtgcccctcgccagcactccctgctcggggatcccattattccaggaggaggagccaggggtaccactttccattagtgggtccagaag

SEQ ID NO: 30233 - DNA, 120 bp, synthetic construct
  source 1..120: mol_type = other DNA
ggctggatcccgagagcatctggacttgttcccagggcacccagcacagaagtgaaggggtgccggtggagagggagagccccgggcagctgctgccgtgtgggtggatgtccggccact

SEQ ID NO: 30234 - DNA, 120 bp, synthetic construct; identical to SEQ ID NO: 9004
  source 1..120: mol_type = other DNA

SEQ ID NO: 30235 - DNA, 120 bp, synthetic construct
  source 1..120: mol_type = other DNA
taaaagtctcctaattatatttatgatcccaacgtgagtgaatttgactccgttcacggcgaagaagctttgtgtaaaatgccgggaagccttcgtgctgactcggccctcgcagaccat

SEQ ID NO: 30236 - DNA, 120 bp, synthetic construct
  source 1..120: mol_type = other DNA
gccctaactctgtgatggatgcctgctgttgtgatcatggacatgaggatgtgaggcggtcataatacaggagtgggctggaggcagggaaaggggttggtgccccctgcccaggggagg

SEQ ID NO: 30237 - DNA, 120 bp, synthetic construct
  source 1..120: mol_type = other DNA
gggaggggccgagcctggcctggactgctggccccaggagcctgggcctgtggtcagggcaggaaatggagaagatgaacgaggaaaggagaaactgctccaaatggtggggagggagga

SEQ ID NO: 30238 - DNA, 120 bp, synthetic construct; identical to SEQ ID NO: 9005
  source 1..120: mol_type = other DNA

SEQ ID NO: 30239 - DNA, 120 bp, synthetic construct
  source 1..120: mol_type = other DNA
acctccccccactcccagccaggcctagagcagagtgcccttggaggctggaggaggccaagtcagcctgtcccatccctcctgggcccccgagtcaccaggagatgcagggcttagcct

SEQ ID NO: 30240 - DNA, 120 bp, synthetic construct
  source 1..120: mol_type = other DNA
cacagacagaccctggggggattgtccttctgccacctgggcattggcacactggccttccgcagacactcagcaggccaaagagtgggctatcatcagacgctggccccaggcctgccc

SEQ ID NO: 30241 - DNA, 120 bp, synthetic construct
  source 1..120: mol_type = other DNA
agaggatggctcgagccctgctaccaccatgctgctttgaaaaaggactgacttctctgctgcctccgcctccctgtgaagtgggactgacatcccctgtcctggggtggccttgagtgt

SEQ ID NO: 30242 - DNA, 120 bp, synthetic construct; identical to SEQ ID NO: 9006
  source 1..120: mol_type = other DNA

SEQ ID NO: 30243 - DNA, 120 bp, synthetic construct; identical to SEQ ID NO: 1920
  source 1..120: mol_type = other DNA

SEQ ID NO: 30244 - DNA, 120 bp, synthetic construct
  source 1..120: mol_type = other DNA
actctaatgaaataccaccatttcattctagaaaggctgaggactccatctcagaccaggggctggtggtgtcctggttttttaacaagaacttgttctcactctgccccagcgtttgtc

SEQ ID NO: 30245 - DNA, 120 bp, synthetic construct
  source 1..120: mol_type = other DNA
gcccagctggtattggccaagttgaccgtgtccaggggacagagagaggggaggggcaggttgttggaagcctttctgcagatgtagcttggagcagtgtcctaagggaggccagcccct

SEQ ID NO: 30246 - DNA, 120 bp, synthetic construct; identical to SEQ ID NO: 9007
  source 1..120: mol_type = other DNA

SEQ ID NO: 30247 - DNA, 120 bp, synthetic construct
  source 1..120: mol_type = other DNA
gctgcccatcgacgctgctgggcaactaacaaattcagcaaattcttctttttattgtgtatgttcgacaactgccttcacttaaagtcacttttttctggctctccaaatatacttaga

SEQ ID NO: 30248 - DNA, 120 bp, synthetic construct
  source 1..120: mol_type = other DNA
taaggaaacagagtctatttaaggaacaatgttaagcaaacaatagtacaggtgttcaaagatatggaatgagtgacagatggggcgagggaccccgatgcagccccacccagaggacag

SEQ ID NO: 30249 - DNA, 120 bp, synthetic construct
  source 1..120: mol_type = other DNA
tgtggctgctggaacaagtcgccaaaattttggtggcctaaaatcaaggtgtcctcagggctggtcccttctggaggctctagggagagtccctgtcctgcagtttcctgctcctagggg

SEQ ID NO: 30250 - DNA, 120 bp, synthetic construct; identical to SEQ ID NO: 9008
  source 1..120: mol_type = other DNA

SEQ ID NO: 30251 - DNA, 120 bp, synthetic construct
  source 1..120: mol_type = other DNA
ctgcagcccctgcttggacacatgaccagctcaggcagtgctgcctccgggggaagtcaagagtctctggtgagtctcagacaggcctcagagtgtctcagggtggcctcagagacaggg

SEQ ID NO: 30252 - DNA, 120 bp, synthetic construct
  source 1..120: mol_type = other DNA
tggcgcttgccggggtggctgtgtgcagcaggcattggggccctggagatatttgctctttctttttgttttattatccagacttgcaaggccctgtgtgccccctcggggctgcacacg

SEQ ID NO: 30253 - DNA, 120 bp, synthetic construct
  source 1..120: mol_type = other DNA
accctcttccaacccaggcctgagctctgttcgggtctctatcctcctgccctttagcctcctctcttactgatagaacattccagagcattccaccaccactggcctgcaattatcacc

SEQ ID NO: 30254 - DNA, 120 bp, synthetic construct
  source 1..120: mol_type = other DNA
ggcgcgcagacagctggggctgggagcctcttccagggatcctccgcctgtggttttcctccttgaccttcttaggagggtccagttccttctcctggccaaggccccactctctgccac

SEQ ID NO: 30255 - DNA, 120 bp, synthetic construct; identical to SEQ ID NO: 9009
  source 1..120: mol_type = other DNA

SEQ ID NO: 30256 - DNA, 120 bp, synthetic construct
  source 1..120: mol_type = other DNA
ctggccagaatcagcctctatgagatgggcagggcagtccagggcaggggaagccctgtgccccaagatcagatacatcagctacaatgagaggcatcaggcggcctcaggccctcaagc

SEQ ID NO: 30257 - DNA, 120 bp, synthetic construct
  source 1..120: mol_type = other DNA
catgtggtggattcatcccaatgctggtcctgggggccctgggctccccccggccctttctcggggcagtttacactttgcagctgaatcaatcaggggcagaaatgcctggcaggggaa

SEQ ID NO: 30258 - DNA, 120 bp, synthetic construct
  source 1..120: mol_type = other DNA
catgtgctgaattcggggcggtcctgacagccatgcgcgggggcccgctgtggcctcctctgcacggctgctgagggaatgcaggtcaaacaaagtaggccagcggcttagggacccccg

SEQ ID NO: 30259 - DNA, 120 bp, synthetic construct; identical to SEQ ID NO: 9010
  source 1..120: mol_type = other DNA

SEQ ID NO: 30260 - DNA, 120 bp, synthetic construct
  source 1..120: mol_type = other DNA
aggggcattcccagaaatcacagggatgactggtgtgagcccaccgcccacctagactcccgtaccatgcggggcccctcattgactccgagggtcttcaaggccctgtgctcctccaga

SEQ ID NO: 30261 - DNA, 120 bp, synthetic construct
  source 1..120: mol_type = other DNA
ctggttcacttaggggtagaaattatcccagcttttacccagagctcagggcccaagatgtcagtttgcctgccggctgttgctctgactgtggcctccctcccagctccccggcatgca

SEQ ID NO: 30262 - DNA, 120 bp, synthetic construct; identical to SEQ ID NO: 9011
  source 1..120: mol_type = other DNA

SEQ ID NO: 30263 - DNA, 120 bp, synthetic construct
  source 1..120: mol_type = other DNA
taaacaggtgttgtcacagaacggcagactggggcctcccctggtgggccttgagggtgctggcctgcagacctgctcctgcccgttctggcctgatccggggcctcttgactgcaggtc

SEQ ID NO: 30264 - DNA, 120 bp, synthetic construct
  source 1..120: mol_type = other DNA
tttagtccctccttgaacttaaaaagtcaaacttaaaaagagattattacagggagctggggactcaggcttgcaccctgcctgtttaggataaaaggccaccgtgtgtccactctagtg

SEQ ID NO: 30265 - DNA, 120 bp, synthetic construct
  source 1..120: mol_type = other DNA
ctcctgcagagccttctgggagggaagaatgtgtttcttgctccagtactgcagagcatgtgatacctgcaggggtgcaagaggtgcctgagagcaggcatagccaagacttgtttgcgg

SEQ ID NO: 30266 - DNA, 120 bp, synthetic construct; identical to SEQ ID NO: 9012
  source 1..120: mol_type = other DNA

SEQ ID NO: 30267 - DNA, 120 bp, synthetic construct
  source 1..120: mol_type = other DNA
gtgaaatttataattcagcctttgtcattcaggcctgtcgtcgtgtccaggtgcacctttgcattcggaagaatccagattccttttcctccgtggagtgactccccttccccacctgcc

SEQ ID NO: 30268 - DNA, 120 bp, synthetic construct
  source 1..120: mol_type = other DNA
ggaaggacaatggcggcaccccaagacctgatgctctggtttagaaacgggttctaatgcccagaagagctcctaaacccctatttataataatctctttttaagtttgacttatctgtt

SEQ ID NO: 30269 - DNA, 120 bp, synthetic construct
  source 1..120: mol_type = other DNA
tattgcatttcttaaaaatttcaactggaagtttgcttgggattgcctcgaatttgcaggttaaatttgggaaaaactggagtctctctcatgttgcgttttctcctccaagaacaagga

SEQ ID NO: 30270 - DNA, 120 bp, synthetic construct; identical to SEQ ID NO: 9013
  source 1..120: mol_type = other DNA

SEQ ID NO: 30271 - DNA, 120 bp, synthetic construct
  source 1..120: mol_type = other DNA
tcatactttctatcagctctattgattgatcttttgatcctgctgattgtctaagtggatcggtcctatcaggaggagtcagcgtgaccacaggcccccattccccagcccctaatgttc

SEQ ID NO: 30272 - DNA, 120 bp, synthetic construct
  source 1..120: mol_type = other DNA
ttgctgacggttccttgtctgctcactaagcgtgccttggagaaggccgctcagcgagggccgccttcaggcctgagcccggggccaggaccaggagcaggcggcagcagcaaggcagct

SEQ ID NO: 30273 - DNA, 120 bp, synthetic construct
  source 1..120: mol_type = other DNA
actgcaaactccacctcccgggttcaagcgattgtctcacctcagcctcctgagtagctgggactacaggtgtgcgccaccacacctagctaatttttgtatttttggtagaggtggggt

SEQ ID NO: 30274 - DNA, 120 bp, synthetic construct; identical to SEQ ID NO: 9014
  source 1..120: mol_type = other DNA

SEQ ID NO: 30275 - DNA, 120 bp, synthetic construct
  source 1..120: mol_type = other DNA
gtcccatgtgacattcctcatccgtctccctgggctcctctgggcggtgactgtttcccaggctctccttgttggtggtgacctggacggttcagaggaggacaggtcaggtgtttgtag

SEQ ID NO: 30276 - DNA, 120 bp, synthetic construct
  source 1..120: mol_type = other DNA
gtcggtgtggctcgtcatgggcgatgctgtctctgtctcctggctctgaggccgtggctgtcaatctcttcaactgtgatttgttcttttccccctttgcagactgtccttggacccgcc

SEQ ID NO: 30277 - DNA, 120 bp, synthetic construct
  source 1..120: mol_type = other DNA
ctggatcaaagccatggcccccattccccggggatagggaagctgtgcaggcagcctgggtaatgggccaccgccccaggcaggcgtgggaatccacacatggcccttctcaaagacggg

SEQ ID NO: 30278 - DNA, 120 bp, synthetic construct; identical to SEQ ID NO: 9015
  source 1..120: mol_type = other DNA

SEQ ID NO: 30279 - DNA, 120 bp, synthetic construct
  source 1..120: mol_type = other DNA
cccaatttattagtcttctccaatggggactgtgcaaaggacattaattactttaatgggacttattttgcttcgttgcccaaagtaattggtttattaacctctccttccctttaggga

SEQ ID NO: 30280 - DNA, 120 bp, synthetic construct
  source 1..120: mol_type = other DNA
gcctgggctggggctgccccagtgcccactgatctattcttgttcactaggcatccaccgtgtgccagtcactggaatacggccatgagaaagacaggaccctcaagaaacaacctgttc

SEQ ID NO: 30281 - DNA, 120 bp, synthetic construct
  source 1..120: mol_type = other DNA
caagagaatgccgggaaagggaggactggttgcccacagggagtgggggtcatgggggcaggttccagagatcagaaggaggtggtgggaagaggcacgcagggtgaggctggctggagg

SEQ ID NO: 30282 - DNA, 120 bp, synthetic construct; identical to SEQ ID NO: 9016
  source 1..120: mol_type = other DNA

SEQ ID NO: 30283 - DNA, 120 bp, synthetic construct
  source 1..120: mol_type = other DNA
cctgtctccttgtgtccccagacctcgggcgagggagaagcaagttcccctcaggaatgctggtgaagctggcatgcccccaccccctagctcaccctgggtccacgcagggcctgctcc

SEQ ID NO: 30284 - DNA, 120 bp, synthetic construct
  source 1..120: mol_type = other DNA
tccccaggcagggccctcagcacctgatgccaaaccaggctccactcttcctccaggtgagcccgagggcccagctgggcgtccacgtggaggtgtggggcccgggtgggacaagcctgg

SEQ ID NO: 30285 - DNA, 120 bp, synthetic construct
  source 1..120: mol_type = other DNA
agagcttcgggtccagccagctgctgctgcccctccctctgggcctcaagaccatctgtcacgtgacaggggcaggctaggcctttcttgaactcactgtgagctacagagactgtgttc

SEQ ID NO: 30286 - DNA, 120 bp, synthetic construct; identical to SEQ ID NO: 9017
  source 1..120: mol_type = other DNA

SEQ ID NO: 30287 - DNA, 120 bp, synthetic construct
  source 1..120: mol_type = other DNA
taccaaatggggggctgttccgccagcaccccagtagggaggatgagaggatgccatgatttccagggtggtgtcagaacctgtctgccagggctctgcagggaggggtttggggttgag

SEQ ID NO: 30288 - DNA, 120 bp, synthetic construct; identical to SEQ ID NO: 1930
  source 1..120: mol_type = other DNA

SEQ ID NO: 30289 - DNA, 120 bp, synthetic construct
  source 1..120: mol_type = other DNA
aaaaaaaaaaaaaaaaaaaattgtccgggcgcggtggcgggcgcctgtggtcccagctactcaggaggctgaggcaggagaatggcgtgaacccaggaggcagagcttgcagtgagccaa

SEQ ID NO: 30290 - DNA, 120 bp, synthetic construct
  source 1..120: mol_type = other DNA
ggggaaacacttgaacccgtgagttgagatcatgccactgcactccagcctgggcaacagagtgagactctgtctccaaaaaaaaaaaaataaaaagtacaggggctctacacggcgccc

SEQ ID NO: 30291 - DNA, 120 bp, synthetic construct; identical to SEQ ID NO: 9018
  source 1..120: mol_type = other DNA

SEQ ID NO: 30292 - DNA, 120 bp, synthetic construct
  source 1..120: mol_type = other DNA
ctggcctggcctaaccagttgggggaatccatgggaggctttagccctgctctgtgaactgctgggccttccttaggggccctggggagccttcccagcagaatgtccaggctcctgctg

SEQ ID NO: 30293 - DNA, 120 bp, synthetic construct
  source 1..120: mol_type = other DNA
ttgcaattcacaaggctttggaaggcagtgctcacaaatcacttttctagacgaagaccagtaagaagcccatgtcattcttctgagacattaggggttttctctcccttgttttaatca

SEQ ID NO: 30294 - DNA, 120 bp, synthetic construct; identical to SEQ ID NO: 9019
  source 1..120: mol_type = other DNA

SEQ ID NO: 30295 - DNA, 120 bp, synthetic construct
  source 1..120: mol_type = other DNA
acccacccagcccctcctgggaaaaagccaggacaaagatgtatttcttcgctagctccttcctggtggctctgtgcaggcagcctcagacctgtaggccctctgcccaatttgggtcac

SEQ ID NO: 30296 - DNA, 120 bp, synthetic construct
  source 1..120: mol_type = other DNA
ggtcaccatgaaaactttatcctcatccacacctttctttctccaactagcatgggaatcagtttagggtcctcccacaccctcatccaaaccctcatctcccaccccccacttgcagag

SEQ ID NO: 30297 - DNA, 120 bp, synthetic construct
  source 1..120: mol_type = other DNA
ccacgttccacccccaggaaaccctctctcctgacgcggggacttgcgtctcagtgcagagggcagtggagggacagtgcagctccgaaatgagcatctgagttcactgctggtgggcac

SEQ ID NO: 30298 - DNA, 120 bp, synthetic construct; identical to SEQ ID NO: 9020
  source 1..120: mol_type = other DNA

SEQ ID NO: 30299 - DNA, 120 bp, synthetic construct
  source 1..120: mol_type = other DNA
ttccccccatagcatggctgaccttcctctgagcccctcgtggatgcccacacacggcaagacgtttcctcaaagatgctcttctgcaaagctgcactttctcggttgccgctgccacct

SEQ ID NO: 30300 - DNA, 120 bp, synthetic construct
  source 1..120: mol_type = other DNA
gggagttgtgttgtgtagtgttgacttgagttgcatcgtgttgtgttgacttgagctgaactgtgctgagtgttactgagttgaggtgactgggttgattttagcttcacaggtgatctg

SEQ ID NO: 30301 - DNA, 120 bp, synthetic construct
  source 1..120: mol_type = other DNA
tggcttccatgaagctgatccggactaagctaaactgagtttcattgagcagcttgtttagctggtgtgtgccaggtggtctctcggggggtccgatgggatacctagtgtcttaatctg

SEQ ID NO: 30302 - DNA, 120 bp, synthetic construct
  source 1..120: mol_type = other DNA
gtctgattcatggaagtcagcgggctgtgtcctcacgtggcagaagaggcaaaaataaggtgcaaacaagctccctcaggcctcctttccaagggcacgcatcctcttcctgaaggctct

SEQ ID NO: 30303 - DNA, 120 bp, synthetic construct; identical to SEQ ID NO: 9021
  source 1..120: mol_type = other DNA

SEQ ID NO: 30304 - DNA, 120 bp, synthetic construct
  source 1..120: mol_type = other DNA
acaatctcacaaagacgtaagaaccacacatgcttagtgtcatgtgtgatgcatcaacccagggggaggagagaacgtgcattcacgcagaactctctcagccacaagctctgtttctgt

SEQ ID NO: 30305 - DNA, 120 bp, synthetic construct
  source 1..120: mol_type = other DNA
tccctcggaaagcccctcctgccgccactcagggggatgggttggaaggggtgaggctggagcccaaatagggagttcagaggcctccgtgtctgcccagggaaggagggaggccagctt

SEQ ID NO: 30306 - DNA, 120 bp, synthetic construct
  source 1..120: mol_type = other DNA
tacctgctctgtgtcccctccctctggagcctgcctctctcccgagcaaagtacctgccacctgggagtgatctgggacagtcagatgcaccttttgaagtatacacctcagtggctttt

SEQ ID NO: 30307 - DNA, 120 bp, synthetic construct; identical to SEQ ID NO: 9022
  source 1..120: mol_type = other DNA

SEQ ID NO: 30308 - DNA, 120 bp, synthetic construct
  source 1..120: mol_type = other DNA
tcaataatgcattgacccaattaaaaaatgggcaaaggacttgagcagacatttctccaaagagcagatacaaatggcaaatgatcacaggaacacatgcacatgaacacacgctcagcc

SEQ ID NO: 30309 - DNA, 120 bp, synthetic construct
  source 1..120: mol_type = other DNA
aacaagtgttggcaaggatgtggactgccagagcgaggctagccatgccatgtatctggaggagggccctggaggggtgtgcccattgcatgtctgtgtgttcccatgcagtgggcacag

SEQ ID NO: 30310 - DNA, 120 bp, synthetic construct; identical to SEQ ID NO: 9023
  source 1..120: mol_type = other DNA

SEQ ID NO: 30311 - DNA, 120 bp, synthetic construct
  source 1..120: mol_type = other DNA
agaaggaaaaagctagagttgggcccccacctcatgcaatctataaaaactgactccaggtggatctaggaattaaatgttaaaagcaaaccttaaaactcttactggataatatacgtt

SEQ ID NO: 30312 - DNA, 120 bp, synthetic construct
  source 1..120: mol_type = other DNA
caaagataccttaaagaacgtgacaagttgcagactggcgattgcactagttttctggcactggtttaacaggtgacccccaacacacatcagaataacagacgtttactctctttcact

SEQ ID NO: 30313 - DNA, 120 bp, synthetic construct
  source 1..120: mol_type = other DNA
cttggcctttagccccttcctctatcttcagagccatcatgttcctcctctctgacattttttttcgtaatcacagctctctctgaccacagccaggaaagagcctccactgtttgttgt

SEQ ID NO: 30314 - DNA, 120 bp, synthetic construct
  source 1..120: mol_type = other DNA
tactgtaaccttgaactccctggctcaaacgattcttccacctcaacttcctgagtagctgggactacacgcacgtgccaccgcgcctggctaattttgtttaattttgtgtagaggtgg

SEQ ID NO: 30315 - DNA, 120 bp, synthetic construct; identical to SEQ ID NO: 9024
  source 1..120: mol_type = other DNA

SEQ ID NO: 30316 - DNA, 120 bp, synthetic construct
  source 1..120: mol_type = other DNA
actaatagaaactaaaataacgaatcaataaatatacaaattatcagacagaaaaatggccaaagacaaagacttgttctgcccttcatggtcgaggaacacatgtggccagtgagtacg

SEQ ID NO: 30317 - DNA, 120 bp, synthetic construct
  source 1..120: mol_type = other DNA
gtacagtgggactaccactttaaaagggtggcatcacctccaaggtggtgaattcacatacctgttgacccagcagtcccatatctgggcatacaccaaaagggaactctggtgtgtgga

SEQ ID NO: 30318 - DNA, 120 bp, synthetic construct
  source 1..120: mol_type = other DNA
agggagagtgagtaaacatggaatgcccatacaaaagagaattttaaactaattaaagcaaacaagccagagtgacagacaaccatgtgggaaggcttggcaatataataccaaggaaaa

SEQ ID NO: 30319 - DNA, 120 bp, synthetic construct; identical to SEQ ID NO: 9025
  source 1..120: mol_type = other DNA

SEQ ID NO: 30320 - DNA, 120 bp, synthetic construct
  source 1..120: mol_type = other DNA
ttacaggtgtgagccaccacacctggccgtctagcgtttattttgaataacgagtccttgggagctttctacattgtttttaaaaactaattatatgacattttataagaaaattatatt

SEQ ID NO: 30321 - DNA, 120 bp, synthetic construct
  source 1..120: mol_type = other DNA
aaaaaaaaaaaaaaaaaacccacagctaacatcacatcacacttaatagtgaagaacagaatactttccccctaaaataaaaaagaaggcaagggtatctgttctcaccacttctattca

SEQ ID NO: 30322 - DNA, 120 bp, synthetic construct; identical to SEQ ID NO: 9026
  source 1..120: mol_type = other DNA

SEQ ID NO: 30323 - DNA, 120 bp, synthetic construct
  source 1..120: mol_type = other DNA
tattccatgttcatgaactggaaaactcaaaatagtaaacatttcagttctccttagaattacctataaatatagcataattcctaacaagaatcctagcaagatttcttatggacatgg

SEQ ID NO: 30324 - DNA, 120 bp, synthetic construct
  source 1..120: mol_type = other DNA
tcactctaccaattttaaggcctactatacagtaaggaatcaatatgatttgatattggaggaataagcatgtagctcaacagaacagaacgaggaatccagaaatagacacacgcaaac

SEQ ID NO: 30325 - DNA, 120 bp, synthetic construct
  source 1..120: mol_type = other DNA
atgcctgactaattttaagacaaagatgcaaaattcagcggaggaagactcctctttcaacacacggtacaggagcagttggtcattcataggccaaataaataaattaaaaccctgacc

SEQ ID NO: 30326 - DNA, 120 bp, synthetic construct
  source 1..120: mol_type = other DNA
gcaaacagttctcacattggatgctaaaagcatgatctgtttaaggaaaattgatgaaatggaccccattaaaacttaaaacacttgttttgtgaaagccccagtgaaggggataaaaat

SEQ ID NO: 30327 - DNA, 120 bp, synthetic construct; identical to SEQ ID NO: 9027
  source 1..120: mol_type = other DNA

SEQ ID NO: 30328 - DNA, 120 bp, synthetic construct
  source 1..120: mol_type = other DNA
tgttgctgctgggaatgtaaactgatgcagcactcggggaaaataatgtggtcgtttcttataaaagtcagcatgcgactaccacacatcccggcaactgaactcctcctgggcatttat

SEQ ID NO: 30329 - DNA, 120 bp, synthetic construct
  source 1..120: mol_type = other DNA
tgaaaatttatagaagctttattcctaactagctgaaagctgagaacaatctatgtatcattcaacaggggaacaggcaaacagtggtgcatccctaccctgaaacactacccagcagta

SEQ ID NO: 30330 - DNA, 120 bp, synthetic construct
  source 1..120: mol_type = other DNA
caggctgtagggatggagatcagatggtggttcctggggttgggaatggtgagggtgggagtgacttgcacaggagacgcagagggggtctttctggtggggaggacttccattcctcgt

SEQ ID NO: 30331 - DNA, 120 bp, synthetic construct; identical to SEQ ID NO: 9028
  source 1..120: mol_type = other DNA

SEQ ID NO: 30332 - DNA, 120 bp, synthetic construct
  source 1..120: mol_type = other DNA
cttcatgtctcctgggtcctccagcactctgggtttcctctgccaagacccccacccatctgcctctcttcatctcacaagcctgcatgtgtgcagagggcaggggtccccaggggatgt

SEQ ID NO: 30333 - DNA, 120 bp, synthetic construct
  source 1..120: mol_type = other DNA
gagcgacaccccagcatgtgggaaggaagggagcgagctcttatttccttattttctttccatctccactcccaggcaaagctgataaattcttccttattccagagttagaggatcctc

SEQ ID NO: 30334 - DNA, 120 bp, synthetic construct
  source 1..120: mol_type = other DNA
ggtgaggccagcccctcctccaccctgggcatctccaggcccagccccaccctgagctgtactggacccaagccccaggaccccctggagtcacctccagccctcccacatgccagcccc

SEQ ID NO: 30335 - DNA, 120 bp, synthetic construct; identical to SEQ ID NO: 9029
  source 1..120: mol_type = other DNA

SEQ ID NO: 30336 - DNA, 120 bp, synthetic construct
  source 1..120: mol_type = other DNA
caggcgggcgtggaggagctaatgggtaagttaggcagcacattaacaaatgaaccagcggatgggggtggggagctcatctcattcatctacaaattattaacaataacttgttcatta

SEQ ID NO: 30337 - DNA, 120 bp, synthetic construct
  source 1..120: mol_type = other DNA
ctcctctcccaagctgggtggtgcgggcagggagagggtccatccgcccttcagtaggtgaggaagccacgggcctggagggtggcccagcccaggcaggagggcaccagccccgggccc

SEQ ID NO: 30338 - DNA, 120 bp, synthetic construct; identical to SEQ ID NO: 9030
  source 1..120: mol_type = other DNA

SEQ ID NO: 30339 - DNA, 120 bp, synthetic construct
  source 1..120: mol_type = other DNA
gccttacggcaagggcagaggtctttctgtatcccgaggttcttgccttggcgtactggaagaatcagatcacacgtgggcttggagaatgagtgcaaggttttattgagtggaggtagc

SEQ ID NO: 30340 - DNA, 120 bp, synthetic construct
  source 1..120: mol_type = other DNA
tccggtcaatggtctgccggcctgtcggtgcctgttggtgcctgtcggtgtgctcctacgctggtgtgttcctctcgacctaccctcaacgtccagccgcttgtgtcttcttctgccgat

SEQ ID NO: 30341 - DNA, 120 bp, synthetic construct
  source 1..120: mol_type = other DNA
aaacaccgaaatgtctgtcctcacctgggtccgtgcacataggccgtagggtggaaccctagccagggacccgcccttctcctcccagcacttccctgcccctcttccgtatcactacca

SEQ ID NO: 30342 - DNA, 120 bp, synthetic construct
  source 1..120: mol_type = other DNA
aaaagccaggtagccagcgctgtcaccagagcagtggctgacccacagcatggcctggacagagctgggggcctgggctggcaccctcagccctggctgcttgcagtcccggccggctgt

SEQ ID NO: 30343 - DNA, 120 bp, synthetic construct; identical to SEQ ID NO: 9031
  source 1..120: mol_type = other DNA

SEQ ID NO: 30344 - DNA, 120 bp, synthetic construct
  source 1..120: mol_type = other DNA
cacggagatcttggggcctccaatttgtcaaatagttttctgttacagttcatactgtttgcgttcctttaaagacgtctttgcccatcccaggtcgtgaaaatattatccaactttctt

SEQ ID NO: 30345 - DNA, 120 bp, synthetic construct
  source 1..120: mol_type = other DNA
ccctttattgaaaagcgtatccttccgccagctcgacggcaaaggcgtcttttctatgaaccagtggccacaggagggtttgtgtgtctaatgtcctattccacgggtccccaggccaca

SEQ ID NO: 30346 - DNA, 120 bp, synthetic construct
  source 1..120: mol_type = other DNA
tcgcaggagcgcgaaccctgttgtgaatgcacatgtgaggggtctaggctgtgtactccttatgagaatctaatgcctgctggtctgaactggaacagtttcatcctgaaaccatctccc

SEQ ID NO: 30347 - DNA, 120 bp, synthetic construct; identical to SEQ ID NO: 9032
  source 1..120: mol_type = other DNA

SEQ ID NO: 30348 - DNA, 120 bp, synthetic construct
  source 1..120: mol_type = other DNA
tcttatacatgaacatactatatccccaagtcaagttagggcttctttatctgtctctccaatgctcagtgcttttctgtgtagcagtcttacacatctttaaacagatttattttagag

SEQ ID NO: 30349 - DNA, 120 bp, synthetic construct
  source 1..120: mol_type = other DNA
aaaaaaaaaaaataagaaagaaagaaagaaagaaagattgtgaaagcaagacagtaaagaagaaacaaaaaacttttttgaaagatttattcttaagtttctggtcaagtttatggttat

SEQ ID NO: 30350 - DNA, 120 bp, synthetic construct; identical to SEQ ID NO: 9033
  source 1..120: mol_type = other DNA

SEQ ID NO: 30351 - DNA, 120 bp, synthetic construct
  source 1..120: mol_type = other DNA
gagccactctgtcaggcctagaaatataattattatatatcatccttaaaaccggcgttcttgttaaattcatgtattccaacagtttatctgaggattcttagggattttttttacatg

SEQ ID NO: 30352 - DNA, 120 bp, synthetic construct
  source 1..120: mol_type = other DNA
ctttttaacataccagctgggactttctggacaatgtgaaatagaaacgataacatccttgccttgcttcctgtctcaggaggaaagcgtatcacatttcactattaagtatgatgtctg

SEQ ID NO: 30353 - DNA, 120 bp, synthetic construct
  source 1..120: mol_type = other DNA
tgctttcttacaatctgttgtgttgattgtattttttctgacttattctgttgatgtgaagagtgacgctgcttggtccttagagggtaaactcagcatgcacaagtggattaaaccaca

SEQ ID NO: 30354 - DNA, 120 bp, synthetic construct
  source 1..120: mol_type = other DNA
ttcgagcatgtgtttgggcacagtgctacatgcagcttgctggtggtggttaggatatttgcacgtatgttcacgagagagattaacctgtgattttttttttctttcttgaaatatcct

SEQ ID NO: 30355 - DNA, 120 bp, synthetic construct
  source 1..120: mol_type = other DNA
ggaagaatttactggtgatgtcgtctagatacagagttttctttgccagaagatcattaaaattccaaatttaacttatttaattaatattgggcaatttggattatttttgtttttgtg

SEQ ID NO: 30356 - DNA, 120 bp, synthetic construct; identical to SEQ ID NO: 9034
  source 1..120: mol_type = other DNA

SEQ ID NO: 30357 - DNA, 120 bp, synthetic construct
  source 1..120: mol_type = other DNA
caaatggtaatttgccatttttttaaccgcttgagatggatttcagcctttcctctgctctgagatatgcatttaaagccacgaggttcactgtctgtgcttatttcactgtactttcag

SEQ ID NO: 30358 - DNA, 120 bp, synthetic construct
  source 1..120: mol_type = other DNA
caaaatacatggagattccctagttatctctttttatggatttctaatttaattgtactgtagtcagagagcataataaatatgatttgcctgctttgaaatttgttggaacttgcttct

SEQ ID NO: 30359 - DNA, 120 bp, synthetic construct; identical to SEQ ID NO: 9035
  source 1..120: mol_type = other DNA

SEQ ID NO: 30360 - DNA, 120 bp, synthetic construct
  source 1..120: mol_type = other DNA
cttctttagtaatacttaaagtctgctattggttttcctttactagttttcatttggctacaccatgacctatctttttctatcctttcccaacatgtttttgtatcgttatattttaaa

SEQ ID NO: 30361 - DNA, 120 bp, synthetic construct
  source 1..120: mol_type = other DNA
ctttaagtctattttcttttcatgctccaagctggctattttctttgggttcacagctattcttttctactctgtcgtccctgctatccaactcacctattgcattcttcatttccatta

SEQ ID NO: 30362 - DNA, 120 bp, synthetic construct
  source 1..120: mol_type = other DNA
catctaaatattctgaagcaaagcacaatcatctgttagctcacaaatctatgggtcagcaatctgggctgcccagttgggtggtctcacttggattcgatgacatggcagtacttgcat

SEQ ID NO: 30363 - DNA, 120 bp, synthetic construct
  source 1..120: mol_type = other DNA
gtccatgagccaacagaattctaagagggtaagagtagatgccacaaggtccttgaggctgagcttcagaagacatgatcatttccaccatggtggagatagactctagcctgcaatggg

SEQ ID NO: 30364 - DNA, 120 bp, synthetic construct; identical to SEQ ID NO: 9036
  source 1..120: mol_type = other DNA

SEQ ID NO: 30365 - DNA, 120 bp, synthetic construct
  source 1..120: mol_type = other DNA
atcccagcacttttggaggccaaggcggacagatcatgaggtcaagagatcaacaccatcctagccaacatgatcaaaccctgtctctactaaaaatacaaaaattagctgggcatggtg

SEQ ID NO: 30366 - DNA, 120 bp, synthetic construct
  source 1..120: mol_type = other DNA
tgccactgcactccagcctggcaatagagcgagactccatctatatgtgtgtgtgtgtgtgtatttttttttttctttgcttagctaggaggttggacttggttcagctaggaggttgtt

SEQ ID NO: 30367 - DNA, 120 bp, synthetic construct
  source 1..120: mol_type = other DNA
attccaaaaggacatgaattatataccgtgtacattccccagtactctttcatcagtgaagtcacaaggtgaccccaaattcaagtaataggaaaacagactccatctcttaatggaagg

SEQ ID NO: 30368 - DNA, 120 bp, synthetic construct; identical to SEQ ID NO: 9037
  source 1..120: mol_type = other DNA

SEQ ID NO: 30369 - DNA, 120 bp, synthetic construct
  source 1..120: mol_type = other DNA
aactgctttttgctcagtttctgtgattctcacccacccgtgtggcttaggaattcacaagtgtttccagaggaagttgtgtgaaaggtggctagaggaccagaatctttttccctcgtg

SEQ ID NO: 30370 - DNA, 120 bp, synthetic construct
  source 1..120: mol_type = other DNA
caggcgcagctcagttcatttcctttctatgtgggatcctcaccttctatgtctttcttggtctccaaagcctcacacagctgttccttgctgttggcatcacttagtctcgcagtccct

SEQ ID NO: 30371 - DNA, 120 bp, synthetic construct; identical to SEQ ID NO: 9038
  source 1..120: mol_type = other DNA

SEQ ID NO: 30372 - DNA, 120 bp, synthetic construct
  source 1..120: mol_type = other DNA
catcgccagcatgtaccctcttatcccatttgctgacaaggatcctgaaggcccaagcatagaaagaagttgctatggctgccatgtgtcagcagcatagccatggccaactcagggccc

SEQ ID NO: 30373 - DNA, 120 bp, synthetic construct
  source 1..120: mol_type = other DNA
cactgggacatggcctaagtatctccatcccatggagttgaacactctccttgtttctggaaggatccagtctgcgtgctcctcaggcagtgcaggggcagtgaggggatgaccagcaca

SEQ ID NO: 30374 - DNA, 120 bp, synthetic construct
  source 1..120: mol_type = other DNA
gccctgtgctgagccttcctgccctcagcctgcccctcgcagcctgatgcagctgcccacacctctcctgggttctctcctgcccatagtggagggtgtcaaggcctccgcccccaagcc

SEQ ID NO: 30375 - DNA, 120 bp, synthetic construct; identical to SEQ ID NO: 9039
  source 1..120: mol_type = other DNA

SEQ ID NO: 30376 - DNA, 120 bp, synthetic construct
  source 1..120: mol_type = other DNA
gggaggctgggccctgctctgtaagaggtggggtccccttggccaggtgaggctggagctccagggcttccataagctgccctaacttctccaggggcatgtcccccctacagaagcccc

SEQ ID NO: 30377 - DNA, 120 bp, synthetic construct
  source 1..120: mol_type = other DNA
ggaaatacatgtgtaggtgtgggaaccccgtatcctctgtggtgggtgatccagaaggcaaaaatcacaaagcagggaaggctggggggtgacttgcctgagtcccttggagcggggggc

SEQ ID NO: 30378 - DNA, 120 bp, synthetic construct
  source 1..120: mol_type = other DNA
tcagcaatgtccgccgaccaccaggacccacagtcggtggcatcccagcccaccaagacttatcctggagccactgagctccctgctagggtctggtcagggcttatgggggcctttgtc

SEQ ID NO: 30379 - DNA, 120 bp, synthetic construct; identical to SEQ ID NO: 9040
  source 1..120: mol_type = other DNA

SEQ ID NO: 30380 - DNA, 120 bp, synthetic construct
  source 1..120: mol_type = other DNA
acccgggccttgcccccagcaaccccaggccagcacccgctaggctcgtcgtcactctgagccccaagagcagccctcggccaggcccttgccaagagcagtatgcgggccctcgttctg

SEQ ID NO: 30381 - DNA, 120 bp, synthetic construct
  source 1..120: mol_type = other DNA
accaagttgtgtcaaagctcccagcagtgcctgggacctcttgcagtcaaaataaaagccatggcaaatgccactgctggccagtgcccggagatctgcctggcatgttctaggggagat

SEQ ID NO: 30382 - DNA, 120 bp, synthetic construct
  source 1..120: mol_type = other DNA
gcctcctggcagcaccagtgctctcccagacagggaaggggctgcgtgaacccctttgggactcagatctgggcagggcagtcccccgagggcagaggagaccatgggaagggccagggt

SEQ ID NO: 30383 - DNA, 120 bp, synthetic construct
  source 1..120: mol_type = other DNA
gcagagcaggtcccagcagggcagagccagagcccaccaaggcttgcagaactgcgccacttgggcatcctgggggctgcttccaaggtctgggggaacccagcagagcatgcagaccct

SEQ ID NO: 30384 - DNA, 120 bp, synthetic construct; identical to SEQ ID NO: 9041
  source 1..120: mol_type = other DNA

SEQ ID NO: 30385 - DNA, 120 bp, synthetic construct
  source 1..120: mol_type = other DNA
aagcgtctgcaatttcatgttgttggagcattcgttgaatacctgggagttgcagctctctgtaagtttgatgtggctgaaccaagaaaaaaagcacacgatttctacagatattatgat

SEQ ID NO: 30386 - DNA, 120 bp, synthetic construct
  source 1..120: mol_type = other DNA
tgggttgaattacctagaagcttgtcagtgacctgtgttcctgaactgtgaaacatgaatatatgggccaagaaatggtttctcttggtaaataagcaattaacaaatacaaaaagagag

SEQ ID NO: 30387 - DNA, 120 bp, synthetic construct
  source 1..120: mol_type = other DNA
cttccagacaggagggagtgggtcccctttcctgtcttaggacacaggccgggaccctgagaatggcccaggaggcttcctgaagcagactgggaaacccccaccccactgtctgcttct

SEQ ID NO: 30388 - DNA, 120 bp, synthetic construct; identical to SEQ ID NO: 9042
  source 1..120: mol_type = other DNA

SEQ ID NO: 30389 - DNA, 120 bp, synthetic construct
  source 1..120: mol_type = other DNA
ccctgtgtctggcccaaggagccggagcctctccacccttcaagtgtgccttgaactccctgtccaccatcagtcagtctggacaggcctgcattatctcggctcatctcaggctcctga

SEQ ID NO: 30390 - DNA, 120 bp, synthetic construct
  source 1..120: mol_type = other DNA
gccaccgggccgtgggtcctcatggtctgcgggcattgctgagccttcttgggctatgccctacaccaggtaaggctgtggctgaaggtgcagggagctctctgctgataggcccaccca

SEQ ID NO: 30391 - DNA, 120 bp, synthetic construct
  source 1..120: mol_type = other DNA
tcacagtggcccagagactcctagggcttggttttcccctgccctgcctcccttcacctgcccacaccgcacccagatggctggaggtgccccatgcttcagcttcacagagctctgtgg

SEQ ID NO: 30392 - DNA, 120 bp, synthetic construct
  source 1..120: mol_type = other DNA
ttctcaactcccatcctatgtcatcctcactccctcccttaaggcagagcaaggcagtgctcagcatcccatcttagagaagagagcgtagaatctccatcatacagaagggacatacgg

SEQ ID NO: 30393 - DNA, 120 bp, synthetic construct; identical to SEQ ID NO: 9043
  source 1..120: mol_type = other DNA

SEQ ID NO: 30394 - DNA, 120 bp, synthetic construct
  source 1..120: mol_type = other DNA
cagcatcccatcttacagaagggagctcagcattttcatcctataggaaggagaaacatcccatcttccaaaaggggggatcagggctcagcatcccatcttacagaaaggaagatcaag

SEQ ID NO: 30395 - DNA, 120 bp, synthetic construct
  source 1..120: mol_type = other DNA
ccaaaagggaggatcagggctcaatatcccatcttacagaaaggagaatcaaggctcagcattccatcttacagaagggagcttagcatctccatcttacaggagatgctaccaggtaca

SEQ ID NO: 30396 - DNA, 120 bp, synthetic construct; identical to SEQ ID NO: 9044
  source 1..120: mol_type = other DNA

SEQ ID NO: 30397 - DNA, 120 bp, synthetic construct
  source 1..120: mol_type = other DNA
aactgagacctgaggatgttattactagcctgtacataagtacggtttttacgggccagagggtctgcctagagtccaaccccatgcctgcctctatcacagttcttggtgtgtcatttc

SEQ ID NO: 30398 - DNA, 120 bp, synthetic construct
  source 1..120: mol_type = other DNA
tctcccgttcagggcccagagagtggctagtgttgccagtgagggccctacctgcttgtgtcaggtggaagaggaaccccctgaacttctgaggcccagcctttggtagggaggaggtct

SEQ ID NO: 30399 - DNA, 120 bp, synthetic construct
  source 1..120: mol_type = other DNA
aagtgggtacatggagacctgacctcagggtctccccatctgggaacttgctgcttcccagggtagaagtggctgcatcctcagattaaggtcaccctggtctcaggagtaggaccccaa

SEQ ID NO: 30400 - DNA, 120 bp, synthetic construct; identical to SEQ ID NO: 9045
  source 1..120: mol_type = other DNA

SEQ ID NO: 30401 - DNA, 120 bp, synthetic construct
  source 1..120: mol_type = other DNA
cacaaatgtggcttggggtttcctgatatcatgagatgctttgttttctctgttgtggtttcaagatgtcacctgagtcccacttataggcttagagctggcaacaagcctgggagccct

SEQ ID NO: 30402 - DNA, 120 bp, synthetic construct
  source 1..120: mol_type = other DNA
gcacaaactgccaggaacgatgcagaggagacccgctccctaccctgaggacagtggcggctgcagccagtgagcatgtcaagggtcagtctggggcccaggtaggtagtgggcatgcag

SEQ ID NO: 30403 - DNA, 120 bp, synthetic construct
  source 1..120: mol_type = other DNA
gaggagacagcaggcccctgccggtgagtagacaggaagctgggacccagagaggccgagctgatggcccaggactacccagagacccatggccaagctgatggggacaagcttcgctac

SEQ ID NO: 30404 - DNA, 120 bp, synthetic construct; identical to SEQ ID NO: 9046
  source 1..120: mol_type = other DNA

SEQ ID NO: 30405 - DNA, 120 bp, synthetic construct
  source 1..120: mol_type = other DNA
tgcctctcaaccacccccttctcctcaccacccccagccctgcagagggagggcagctggccacggccacggttcacagccagcccaccaggcagctctaccttgttccccgcccggatc

SEQ ID NO: 30406 - DNA, 120 bp, synthetic construct
  source 1..120: mol_type = other DNA
cagcccacccgccttccctgtcacctctgagcaaggggccaggcccagccctgggaagacactgcctggtgccaggccccaccgcacgggtctcccccagactggcctggagctggagac

SEQ ID NO: 30407 - DNA, 120 bp, synthetic construct
  source 1..120: mol_type = other DNA
agggcatggctgggagcccgtgtccatcctggccacaggcgaggggtcaggctgccttgcccatggctgatccactgcctcccactcctacccccagggaggaagtctgagaggcagccc

SEQ ID NO: 30408 - DNA, 120 bp, synthetic construct
  source 1..120: mol_type = other DNA
actgtcttgccgggcacgtcaagctgtctgtcccacagacgacagtgcatctgcgcagtgccagggccaggtgtgaactggtgtctgtgtccttctctccaggctggaccagtccattgg

SEQ ID NO: 30409 - DNA, 120 bp, synthetic construct; identical to SEQ ID NO: 9047
  source 1..120: mol_type = other DNA

SEQ ID NO: 30410 - DNA, 120 bp, synthetic construct
  source 1..120: mol_type = other DNA
gtgagctgccagcccagaattcaagagactatgggtgggggccttgcagggctcaagttgagagggacagaagcacctggctgcagcctgggggctggttttctggctccttgaccaaat

SEQ ID NO: 30411 - DNA, 120 bp, synthetic construct
  source 1..120: mol_type = other DNA
gcccagatgcaaacagcagccacggctcatagtgtgggctggtgtaacggagcagcggaatggctgtgcccccagcctggagtcaggcctgtgtcgccctgggagtggaatggcatgggc

SEQ ID NO: 30412 - DNA, 120 bp, synthetic construct; identical to SEQ ID NO: 9048
  source 1..120: mol_type = other DNA

SEQ ID NO: 30413 - DNA, 120 bp, synthetic construct
  source 1..120: mol_type = other DNA
gatcggcgcccgcctgaaccgagtagaagacaaggtaggctcacgcgccggcctgcggtggttctggttagcgtcctggggccagcaggcacctccctgtggtctgcgtgtgaacgtgaa

SEQ ID NO: 30414 - DNA, 120 bp, synthetic construct
  source 1..120: mol_type = other DNA
ggccaggctggtttctcatcctctgacaagtggcgtctttactggcaggtggcaccaagtgccccctccccccagctctttcccgctgcctctcgtagtctgctttgtgctctgcgagcc

SEQ ID NO: 30415 - DNA, 120 bp, synthetic construct
  source 1..120: mol_type = other DNA
ccagctgggatgggttcatgggaagagaggcatcttctgttcaccccgaacccaccaggcccccactccccaccaggctctgtgcccatcactcggtccctcaggccggagcctctcccc

SEQ ID NO: 30416 - DNA, 120 bp, synthetic construct; identical to SEQ ID NO: 9049
  source 1..120: mol_type = other DNA

SEQ ID NO: 30417 - DNA, 120 bp, synthetic construct
  source 1..120: mol_type = other DNA
ctggcccccaggacctgcagcgtcaccctctccccacctggcaccatctgcccatggcctggggcggccgtggggccctgagaccagcaaattgggtcatgcagaaagagcgaaggctgg

SEQ ID NO: 30418 - DNA, 120 bp, synthetic construct
  source 1..120: mol_type = other DNA
gcccagtgggagatagcgcccatctggcaggacaggaagcaagacccgggagaggtcagctcacaggattggcaagctcagaggcccagaagccttggcctctctgctgcccggggaaca

SEQ ID NO: 30419 - DNA, 120 bp, synthetic construct
  source 1..120: mol_type = other DNA
aaagccgtggtagagacagggagtggcacccagttccccagcctccactcctgcttccatctcggctgcagccaggcaggcggggcgtgaacatccctgacgtgcaggagtgtcggtggc

SEQ ID NO: 30420 - DNA, 120 bp, synthetic construct
  source 1..120: mol_type = other DNA
atgggacaggccaccctctaagcccagacctggagtctggcatcctgcgggggtgatggtgggtggcagacagggcctcctgaagtgcaatggccccttcctgacgtgcacagcagccgt

SEQ ID NO: 30421 - DNA, 120 bp, synthetic construct; identical to SEQ ID NO: 9050
  source 1..120: mol_type = other DNA

SEQ ID NO: 30422 - DNA, 120 bp, synthetic construct
  source 1..120: mol_type = other DNA
gccccgctgaggggtctacctggaacctggctgcccatcaaggagttgacagagctgtgctgacctaggtgggtaggtggtagcctacccggtccttgccctgccactgactggtgcacc

SEQ ID NO: 30423 - DNA, 120 bp, synthetic construct
  source 1..120: mol_type = other DNA
tcctgctgacttcgggaagtaggggcaggaaatccagcagccgcccggccctcggaggcccagcaggcgtgcagcggtgccaatgcccgccggccctgccaaccccagccagagcccctg

SEQ ID NO: 30424 - DNA, 120 bp, synthetic construct
  source 1..120: mol_type = other DNA
tgcagtgagtcccaccccaggccagcttgcctagccataggatgagaggtctccgggatgcacagctggctggcacccctccagggaggcctagagtgtccccctgcagggagttcacca

SEQ ID NO: 30425 - DNA, 120 bp, synthetic construct; identical to SEQ ID NO: 9051
  source 1..120: mol_type = other DNA

SEQ ID NO: 30426 - DNA, 120 bp, synthetic construct
  source 1..120: mol_type = other DNA
tcaaatgagagggtttgactcctgcttgtgtccttagggtcaaaagtcacaaaagctgcctcatgccctttctgttttcatcttagattattgtcttctttatcctggagaggactctta

SEQ ID NO: 30427 - DNA, 120 bp, synthetic construct
  source 1..120: mol_type = other DNA
acacagctagttaggtgaagagctggtcccaaggaggacacagacaggggtgggagatgaggtagagagagcaaggaggggtttcatatcacccaaagtccgtatggagaggctgaggag

SEQ ID NO: 30428 - DNA, 120 bp, synthetic construct
  source 1..120: mol_type = other DNA
ctctggccccactgggcttcctgaagtcccacacagggctggcagtctgtgtgggggctgcataccccagacattctgaggaatcgatggcagaggccgctccagccctcctcccccagc

SEQ ID NO: 30429 - DNA, 120 bp, synthetic construct; identical to SEQ ID NO: 9052
  source 1..120: mol_type = other DNA

SEQ ID NO: 30430 - DNA, 120 bp, synthetic construct
  source 1..120: mol_type = other DNA
cctgcccatgcctttaccaagcttcgtgcatgaccccaacctccaggatgcaggcaggcccagcctcccagaattgggtgtttgcccccagacactgctaccctttccctcattccagtg

SEQ ID NO: 30431 - DNA, 120 bp, synthetic construct
  source 1..120: mol_type = other DNA
cctgctgagttcaggcctttatcatctcttacttggattatttttccagccatatatgcggtctccggcctctcctcacacccaccaatccttcacattgtatattatttcttaaacact

SEQ ID NO: 30432 - DNA, 120 bp, synthetic construct; identical to SEQ ID NO: 9053
  source 1..120: mol_type = other DNA

SEQ ID NO: 30433 - DNA, 120 bp, synthetic construct
  source 1..120: mol_type = other DNA
acatctaggcctggtgttttctttgtgggaagattcatcattcctgattcaatcgctctaataattatggactgttcaggttttctatttcttcttgtatcagttttgataagttatata

SEQ ID NO: 30434 - DNA, 120 bp, synthetic construct
  source 1..120: mol_type = other DNA
tagtcccattttttattctcaatattatttatttgtgccttcactgttttcccccttagtggtcaaacttgacactattcccctgtcttattaaatgtttcgtggacttctggctttgct

SEQ ID NO: 30435 - DNA, 120 bp, synthetic construct
  source 1..120: mol_type = other DNA
tgttctttctctaacctctctaaattaagaagaggataattcttaattttcaggcttcctaaatttccttttcgttttaatttttctaaccactgtcaatctcatggctttctaaatttt

SEQ ID NO: 30436 - DNA, 120 bp, synthetic construct; identical to SEQ ID NO: 9054
  source 1..120: mol_type = other DNA

SEQ ID NO: 30437 - DNA, 120 bp, synthetic construct
  source 1..120: mol_type = other DNA
ttcatatccactggaacaagcttgttagttggtctgttcaaatcttctatattctcattggaatgtttttatctgcttgatctattattactgagaaggcatagggcaaatttctgttta

SEQ ID NO: 30438 - DNA, 120 bp, synthetic construct
  source 1..120: mol_type = other DNA
agcccttttagtgagtatgtaatggtatctcattgtggttttgatttgcatttccctaatgactaatgatgttgagccacttttcatgtgcttattagccattcatagtcttctttggtg

SEQ ID NO: 30439 - DNA, 120 bp, synthetic construct
  source 1..120: mol_type = other DNA
attttctcccattctgtggctgtcttttcatttccttaatcacatcttttaaatcacaaaagtttttaattttaatgaagtccaatttgtcttttcttatatggctcaggcttttgatgt

SEQ ID NO: 30440 - DNA, 120 bp, synthetic construct; identical to SEQ ID NO: 9055
  source 1..120: mol_type = other DNA

SEQ ID NO: 30441 - DNA, 120 bp, synthetic construct
  source 1..120: mol_type = other DNA
tatatgcctttctgtaagtctatatgcctttctgtaaacccatactatactgtcttgattattgtaggtttacagtaagttttaaaattaaattatgtaagttttctaattttgttcatc

SEQ ID NO: 30442 - DNA, 120 bp, synthetic construct
  source 1..120: mol_type = other DNA
aagggcctgctgggattttgataggcattgtgttgaatctatagatccatttggggaaaattgacaacttaacaaaattgagtattgtaatcaatgaacatggtatatccctccatttat

SEQ ID NO: 30443 - DNA, 120 bp, synthetic construct
  source 1..120: mol_type = other DNA
tttcttaatttcattttgaattaattgttcattactagtatatagaagtaacattaaatttttatatcaatcttgtaaactgacttttctattcttggctttagccatttttgttgttgc

SEQ ID NO: 30444 - DNA, 120 bp, synthetic construct; identical to SEQ ID NO: 9056
  source 1..120: mol_type = other DNA

SEQ ID NO: 30445 - DNA, 120 bp, synthetic construct
  source 1..120: mol_type = other DNA
tggtcctgtggtttttattccttattctactgatttggtataatacattaattttcaggtgttaaaccaatctcacatttctggaatatatcctacctgggcatgatatataatcctttt

SEQ ID NO: 30446 - DNA, 120 bp, synthetic construct
  source 1..120: mol_type = other DNA
tggttttcttttctgactttgatgtcagatttttaaatccttttctttttaatcctacaaccgtaggatttcaggtttgtcttttgtaaacactgtattactgagtttttaaaaaatcat

SEQ ID NO: 30447 - DNA, 120 bp, synthetic construct
  source 1..120: mol_type = other DNA
ctctttcttgcctctcattagattattacttctcattctacttttctctctactggttttgaagttatgtattctactaccatccttggaaaggttaacctagaacattttaaatgaata

SEQ ID NO: 30448 - DNA, 120 bp, synthetic construct
  source 1..120: mol_type = other DNA
ctgtgtttaatttttaactcactaattggtagtgttttatacaatcaatatttgtttaaatttactcacccatttgcctctttgtcatttgttatttcttttttatctcagatcttacat

SEQ ID NO: 30449 - DNA, 120 bp, synthetic construct; identical to SEQ ID NO: 9057
  source 1..120: mol_type = other DNA

SEQ ID NO: 30450 - DNA, 120 bp, synthetic construct
  source 1..120: mol_type = other DNA
gtggtttggtgtctttcatcagttctagattattctcagttaatacttcgtaagatttcacttcagtctcattatctccttctgaaatttttattggccagtagtagaccacctcactcc

SEQ ID NO: 30451 - DNA, 120 bp, synthetic construct
  source 1..120: mol_type = other DNA
tctgaaatttttattggccagtagtagaccacctcactccccttcatatctcttaaccttttttttttttaaatcactttgtctctctgtactgtattctggaatccatcttccagttca

SEQ ID NO: 30452 - DNA, 120 bp, synthetic construct
  source 1..120: mol_type = other DNA
cattttaatcgtatcttcctctttacttgcctgttcaaactttaaaattttcttgaagtgtattaaatatggctattctatattgagcttctcttaattccagtatctaaagtatttctg

SEQ ID NO: 30453 - DNA, 120 bp, synthetic construct
  source 1..120: mol_type = other DNA
ttcattgtaaacttatatatcttaaaatttatctgtgggaatttttgaagtctggtgtgaagttggggtcctcagggaggaatcatgtttaccccttccattgccacatatgtgggtgta

SEQ ID NO: 30454 - DNA, 120 bp, synthetic construct; identical to SEQ ID NO: 9058
  source 1..120: mol_type = other DNA

SEQ ID NO: 30455 - DNA, 120 bp, synthetic construct
  source 1..120: mol_type = other DNA
atctcactcatcaaataccttcagggcccctattacctctggggttccactttcactgagttttcagcctctaacctcccttacttcctggtcagctcatccatgctagccacagatatc

SEQ ID NO: 30456 - DNA, 120 bp, synthetic construct
  source 1..120: mol_type = other DNA
tttaaaactcttaaaattgttgacattcttctttttcatactgggtcttcaaaagccactgcatattttacacatttcaatttagacaccgagttttcatgagaacgacttggtctgtat

SEQ ID NO: 30457 - DNA, 120 bp, synthetic construct; identical to SEQ ID NO: 9059
  source 1..120: mol_type = other DNA

SEQ ID NO: 30458 - DNA, 120 bp, synthetic construct
  source 1..120: mol_type = other DNA
ttgccatctcatggccccagcgcccctctccaccccatgcccccaacagagatgcatccctgcagacccctcctgggctccttctccacagcatcctccccaagttcccctgcctcgagt

SEQ ID NO: 30459 - DNA, 120 bp, synthetic construct
  source 1..120: mol_type = other DNA
gtgctgctcagcagactgtgagaagtgtgtgtcggtgcaggcaggacacacttccaggctgtcccagaggccagggagcaccttgccactgaagggctggttgcatcagaaagttaggca

SEQ ID NO: 30460 - DNA, 120 bp, synthetic construct
  source 1..120: mol_type = other DNA
tgagtgacagggccgtaaataggcaaaggcgggggctctgactgatcaaagggctccctttagaagccgtcattagtttgctattctgggaactggttattttaaggttagtgtattttt

SEQ ID NO: 30461 - DNA, 120 bp, synthetic construct; identical to SEQ ID NO: 9060
  source 1..120: mol_type = other DNA

SEQ ID NO: 30462 - DNA, 120 bp, synthetic construct
  source 1..120: mol_type = other DNA
cccgtaccctcccccaacttcaggctacccccaaaggccacccctggaaccaggctcagcaggcacctctgaaccgcagcccagctctgcccagcaccttctttggaaagacagtggacc

SEQ ID NO: 30463 - DNA, 120 bp, synthetic construct; identical to SEQ ID NO: 1970
  source 1..120: mol_type = other DNA

SEQ ID NO: 30464 - DNA, 120 bp, synthetic construct
  source 1..120: mol_type = other DNA
cacagacgagcttttgccggcagtcattgctcgggagggatattattgatgtgttgctcagtaagaaaccaaagttgccaaggaacgtgatcgcatctctgtgcagccacagcacccagg

SEQ ID NO: 30465 - DNA, 120 bp, synthetic construct; identical to SEQ ID NO: 9061
  source 1..120: mol_type = other DNA

SEQ ID NO: 30466 - DNA, 120 bp, synthetic construct
  source 1..120: mol_type = other DNA
ctcggataggttgccatgaggttgccagaggctggcaaagggcacttgtcagctgcagattccagccctgccctgggacttggaggggatcatatccctttgaccaccaggtcatgaccc

SEQ ID NO: 30467 - DNA, 120 bp, synthetic construct
  source 1..120: mol_type = other DNA
gaggagaagcctgtctgatgtggctcccgtcctcctctgctggggttgtctacactgtccccactcggtgacaccaggagctggcattgcctctggttctactgctctggacagccctgg

SEQ ID NO: 30468 - DNA, 120 bp, synthetic construct
  source 1..120: mol_type = other DNA
actcttggttacccatgggaccctgaaccccataggaggggctcatcactcagggtcctcatccaggtgtggcccatccacacccagcatccagctgtgcacacagggccacacacagac

SEQ ID NO: 30469 - DNA, 120 bp, synthetic construct
  source 1..120: mol_type = other DNA
gcgagtcacgtgggctctcagcgcctcagcctcctggcccccagtggaggggacaggcaccattatgccgatcgctcgcgtgcaaaggccctgtggcgtgggcagtgtcacaagctcctg

SEQ ID NO: 30470 - DNA, 120 bp, synthetic construct; identical to SEQ ID NO: 9062
  source 1..120: mol_type = other DNA

SEQ ID NO: 30471 - DNA, 120 bp, synthetic construct
  source 1..120: mol_type = other DNA
agcctctcctgaatgactctatttataggcctccaatattggccagagaggaaatttaagtctttttaaaaattcagctcaagtgtgtgtcaacttctgtgagtgcaactgcttcagaga

SEQ ID NO: 30472 - DNA, 120 bp, synthetic construct
  source 1..120: mol_type = other DNA
tcaattgcgggagtccggctgggctggccgcctgcaggggccagggcgtgagggcggtgcggagccttgtctgtgcggcaaaccctgcctggctgccctggccaacctcagaaaaacatg

SEQ ID NO: 30473 - DNA, 120 bp, synthetic construct
  source 1..120: mol_type = other DNA
gacccgagcctcccctccctcccggggaggggacctggccgtgccggctgggctgggaaaccgcgggcggggaaggaaggacggggcgaaccggcggcacaggcccagcacgtcccgggc

SEQ ID NO: 30474 - DNA, 120 bp, synthetic construct; identical to SEQ ID NO: 9063
  source 1..120: mol_type = other DNA

SEQ ID NO: 30475 - DNA, 120 bp, synthetic construct
  source 1..120: mol_type = other DNA
acacggggccgaggcgcgctgggctgtttgggttggcaacctgagccctccccaccccgttccgcgtccgctgcttcccgccctggtccggcgcttccattcatgccttcccgggtccct

SEQ ID NO: 30476 - DNA, 120 bp, synthetic construct
  source 1..120: mol_type = other DNA
ataggaaggggctgctcctttgagggcccttctcaaacctggagcccctctggccgccagatctttgtctgtgaaacagcagccagtgtgtggaccaggcaggagtggatggggtgtgtg

SEQ ID NO: 30477 - DNA, 120 bp, synthetic construct
  source 1..120: mol_type = other DNA
gcccaagagaaactctctccctcaggtcagacccaggcctttcaagaagaggttgcagggtgtgcgggctgccaggaaaaggtctgtgcgggtgagggagcgcatcctatggatatctag

SEQ ID NO: 30478 - DNA, 120 bp, synthetic construct; identical to SEQ ID NO: 9064
  source 1..120: mol_type = other DNA

SEQ ID NO: 30479 - DNA, 120 bp, synthetic construct
  source 1..120: mol_type = other DNA
ccgcaggtcaggcacacaagagccatctgtgtgggcggcaaggtggctgcctgtctgctgcccgcaaagggatgcttgtccagcagggtgaacaccccgtcagggcaggagctgctgagg

SEQ ID NO: 30480 - DNA, 120 bp, synthetic construct
  source 1..120: mol_type = other DNA
ctcttgttctaaggctctgtgatagcccctcttactgagagggaccatatccaataacgggtggaaattgcactagcagggtcatgtgagggctccgagctttctccagaacccaggaat

SEQ ID NO: 30481 - DNA, 120 bp, synthetic construct
  source 1..120: mol_type = other DNA
accctgtctctatgaaaataaaaataaaaaattagccaagcgtgatggtgtgtgcctgtggtcccggctgctcagcaggctgagttagaagaatcgcttgagcccaggagttcaaggctg

SEQ ID NO: 30482 - DNA, 120 bp, synthetic construct; identical to SEQ ID NO: 9065
  source 1..120: mol_type = other DNA

SEQ ID NO: 30483 - DNA, 120 bp, synthetic construct
  source 1..120: mol_type = other DNA
tgaaggagaaagtactcggttttcccagtcagtggagtcaggagcccagagccaaccaggagtgagtgaggaggaggagggtgacacagggtggaagagtgtccagtgtgtgcagccttg

SEQ ID NO: 30484 - DNA, 120 bp, synthetic construct
  source 1..120: mol_type = other DNA
gaggagggttacaggcaggtgaggatgcagttccaggagtggtgaggggctgctgtgggatgagggagagcatcagcactttggactagggtggaggccttggggccagcccccagtctg

SEQ ID NO: 30485 - DNA, 120 bp, synthetic construct
  source 1..120: mol_type = other DNA
tcaggagggtctggagctgtatttggacttggcaggcaaccaaaaccccagtgcttagagatcaagtggaaaagaaaagaggaagaagatgggggagtgagagagatgggaaggcagtga

SEQ ID NO: 30486 - DNA, 120 bp, synthetic construct
  source 1..120: mol_type = other DNA
tgcatgtgtgttcacagattagcggggagcagatgccgcatggaggggcgtcagggagtacaccgccttcccaggtgagggtgtcctggaggaggcacaagttctgctgggctggactgg

SEQ ID NO: 30487 - DNA, 120 bp, synthetic construct; identical to SEQ ID NO: 9066
  source 1..120: mol_type = other DNA

SEQ ID NO: 30488 - DNA, 120 bp, synthetic construct
  source 1..120: mol_type = other DNA
caagaagccagggcatcacttgaccttccgctgcgtcagtctccgcatctcgcctcccctacccccgacctctcgggtgctgtagggatgaggtaggagtggtggctatgaactggaggc

SEQ ID NO: 30489 - DNA, 120 bp, synthetic construct
  source 1..120: mol_type = other DNA
tgtatcccacttcgtttctctctttccctaaaggtgaagttctggagcaaaaagagcctgagctgtgagccgaggggctcctcctcctccaaactgacacccagtcacagagcaattgct

SEQ ID NO: 30490 - DNA, 120 bp, synthetic construct; identical to SEQ ID NO: 9067
  source 1..120: mol_type = other DNA

SEQ ID NO: 30491 - DNA, 120 bp, synthetic construct
  source 1..120: mol_type = other DNA
cctccacaagcaggggtcccatggggcgggggccgggggaacagggggtaagtgtggccaaccccttgcacagggcttggagatggaggcccctccccaggtgagaccggcctttggccc

SEQ ID NO: 30492 - DNA, 120 bp, synthetic construct
  source 1..120: mol_type = other DNA
agcagcctagaaccgacacgtgtgaaaccattggcttatggcgcaatgcacttcctcccggcatgcatgaaaacataaatgtaaataccaaaatacacagggactattcggacaccacct

SEQ ID NO: 30493 - DNA, 120 bp, synthetic construct
  source 1..120: mol_type = other DNA
caaggcggccacgtcagttctcacggctcctcccaaactgaggagcatggaggaccctgggcattgatggcagggtggcaggaagcacccatcgctttcctctcccggatcttcccagca

SEQ ID NO: 30494 - DNA, 120 bp, synthetic construct
  source 1..120: mol_type = other DNA
tctccatggggaaggaaaacgtgccccgaaggggcctgtgtccaggttcctgcccactcagcccctcggggccgtgtctccctgcgtcagagctgggcctgaagataatgggcccactga

SEQ ID NO: 30495 - DNA, 120 bp, synthetic construct; identical to SEQ ID NO: 9068
  source 1..120: mol_type = other DNA

SEQ ID NO: 30496 - DNA, 120 bp, synthetic construct
  source 1..120: mol_type = other DNA
gtccccacggggccacaacggggcattgttcacggcctcacctgggctgtctccagcaccccaggatttacgaggactcggcccagagcctcgatgccggccgctccgggcagacctggg

SEQ ID NO: 30497 - DNA, 120 bp, synthetic construct
  source 1..120: mol_type = other DNA
aacgggccccaacctgcctgcagaccaagcggtcacatcgcgaatgagtcctcatgctgtgcgtcccccactgggcagccagaggtgtgcctgacggggccaggaggctgaagacaacct

SEQ ID NO: 30498 - DNA, 120 bp, synthetic construct; identical to SEQ ID NO: 9069
  source 1..120: mol_type = other DNA

SEQ ID NO: 30499 - DNA, 120 bp, synthetic construct
  source 1..120: mol_type = other DNA
ccctcccctgggagcctgcctcaccctgaccacatggccttcggcacccagcttgagtgtcccatcctgtgaagccagccggttcccccaggcacaggggatacctcttccctttgggca

SEQ ID NO: 30500 - DNA, 120 bp, synthetic construct
  source 1..120: mol_type = other DNA
cctctcaccctcacaggggacccaattgcacagccatccacagcggccttgggacaatactgagtcttgagttaggggtgtctctcctcaaccctgagagcagccccttttcccaccctc

SEQ ID NO: 30501 - DNA, 120 bp, synthetic construct
  source 1..120: mol_type = other DNA
ccaaccacccttcccctcctggtcacctttcggcttggcatcaggagggcttgaagaagactcctcagccccacctgcagacctagctagttgccaaccacctggggttgtgcccagtcc

SEQ ID NO: 30502 - DNA, 120 bp, synthetic construct
  source 1..120: mol_type = other DNA
cggcagcagcagcagacgtttttaaactaattcattggtgatggcaaaattatgccgagttccctgaaaaaaaaaaaaaatacccactctatttcctcattaacataattgcaaacagaa

SEQ ID NO: 30503 - DNA, 120 bp, synthetic construct; identical to SEQ ID NO: 9070
  source 1..120: mol_type = other DNA

SEQ ID NO: 30504 - DNA, 120 bp, synthetic construct
  source 1..120: mol_type = other DNA
tgaagggtacccacgaggaaggggacattagacaagaatgcaggtggtcaggcggcacttacctggcaggtgaaatctaaacaggcaccttcaaaggaggacaaagcagctcccttgggt

SEQ ID NO: 30505 - DNA, 120 bp, synthetic construct
  source 1..120: mol_type = other DNA
gagaaactctcagaggcaggcaggggccggaccacgggggcggtggtgctcagattccatgtggctgtccatccatggtgggccaggaggtcactgttgtggtgacaaccagcgctcttt

SEQ ID NO: 30506 - DNA, 120 bp, synthetic construct
  source 1..120: mol_type = other DNA
gttggcatgtgtggtgtggtgtgtttgtatgtgagggcagtgtgtgtgttttgttgtatgtggtgtgtcttctacgtgtgagtgtggtgtgtgttgtgtctgcatgtatcgtgtgtgtgg

SEQ ID NO: 30507 - DNA, 120 bp, synthetic construct; identical to SEQ ID NO: 9071
  source 1..120: mol_type = other DNA

SEQ ID NO: 30508 - DNA, 120 bp, synthetic construct
  source 1..120: mol_type = other DNA
ctcctgagctccaagtgtcccacgcctgcccgtcagtcctcatgtctacctgggcgaccccattttgaagatgcagaactgaggtccggagaggcctgggtagctgcctaagggtggggt

SEQ ID NO: 30509 - DNA, 120 bp, synthetic construct
  source 1..120: mol_type = other DNA
tgaccctgccctgtctccagagcccacagccccacccaaaaggccaggaggtcacagatctgggatcctttcccgccaccttcaagaagggaataaagccacttcctgctccatcccagt

SEQ ID NO: 30510 - DNA, 120 bp, synthetic construct
  source 1..120: mol_type = other DNA
agtgcaggcagctgagcccagacccctgggctgtccttggaaccactcccagcccctgccagctttgtagcctctttcttccccaccccacttgcctcacctcggcccaaacctgggtac

SEQ ID NO: 30511 - DNA, 120 bp, synthetic construct; identical to SEQ ID NO: 9072
  source 1..120: mol_type = other DNA

SEQ ID NO: 30512 - DNA, 120 bp, synthetic construct
  source 1..120: mol_type = other DNA
gaattcagctatggtaagagcagagaacaggatggcgctggggcaggaggagaaggtgtggctggcaggcactcatgaggacagggtctcagagcccattctagagaatgttccagaagg

SEQ ID NO: 30513 - DNA, 120 bp, synthetic construct
  source 1..120: mol_type = other DNA
cctggggtgctggtggcccagacagactagagatggtggaagggtagagtgcagtcaggtttggagtgggtccactctttgcacagaccagccccctagaggctccccagttccaacagg

SEQ ID NO: 30514 - DNA, 120 bp, synthetic construct
  source 1..120: mol_type = other DNA
ctgtgcctgtaggggcgggcactcacctgcccttgcagtcccctctagctctccagcttcctgctggccagtcgtatcagctggctcagcagcaaaggcttcagaccaggggacttaggt

SEQ ID NO: 30515 - DNA, 120 bp, synthetic construct; identical to SEQ ID NO: 9073
  source 1..120: mol_type = other DNA

SEQ ID NO: 30516 - DNA, 120 bp, synthetic construct
  source 1..120: mol_type = other DNA
ctggagcctggggagatgcccccactgcatgctgaagggcaggaagtgagggaggggagagcttgttgcgggggtgtccttgcctctcagggccacgcccactgcctgcgccagggaaga

SEQ ID NO: 30517 - DNA, 120 bp, synthetic construct
  source 1..120: mol_type = other DNA
agccagagcagggtctggggtctttgcctccagtagggtgttgggggagctttgtattctctgtggctggaggcgatttcgccagctgcggagcggggcgcggtgggcacattcacccag

SEQ ID NO: 30518 - DNA, 120 bp, synthetic construct
  source 1..120: mol_type = other DNA
gacaatgcgaagcccacctggtctgtgagctgtcgcctctgtcctcacagtgacagagctggctttgagggcagcaggacaggggtttagccctggctccggccctgtcgccagccggca

SEQ ID NO: 30519 - DNA, 120 bp, synthetic construct; identical to SEQ ID NO: 9074
  source 1..120: mol_type = other DNA

SEQ ID NO: 30520 - DNA, 120 bp, synthetic construct
  source 1..120: mol_type = other DNA
actcactggggaacagaggggctgggtccaggaaggaggcgtttgcagggcggggttgtctcctgaagactgcgagctagaggggagaagccactgcatgctcccagcccttcacctcac

SEQ ID NO: 30521 - DNA, 120 bp, synthetic construct
  source 1..120: mol_type = other DNA
gaccggccagccagggaggtgggctagacagtgccctggccaccacagggcaacccctcagctccacttcgccacccagaggagctggccctggccactctctcagagcaggaggtgaca

SEQ ID NO: 30522 - DNA, 120 bp, synthetic construct
  source 1..120: mol_type = other DNA
ccacgggcacccaggaaccgccctggctttgctggaggacctgccatggctttgccagaagaccctgggactgtctggagcatcctcccaaggactcgcccctagtcaggaaaaaatagg

SEQ ID NO: 30523 - DNA, 120 bp, synthetic construct; identical to SEQ ID NO: 9075
  source 1..120: mol_type = other DNA

SEQ ID NO: 30524 - DNA, 120 bp, synthetic construct
  source 1..120: mol_type = other DNA
gcctgtaccgtctgcagccccatctccaggtcccggcctgccccagcctgcccacccccagcctgtcccccaaatgcccagggctgtggcctgcccagacttgccagggagctcctgtgc

SEQ ID NO: 30525 - DNA, 120 bp, synthetic construct
  source 1..120: mol_type = other DNA
cagcttttatgcacactcaggtactcaggacaccccacaccagccattggatggggccgcctctgccacctgctccagccacctggcagatcccactcggctcacacagagccttggcca

SEQ ID NO: 30526 - DNA, 120 bp, synthetic construct
  source 1..120: mol_type = other DNA
ccacacggggaggagcctggagctccttctgcattttcttaggaagtgctgcagggacccactggattctctacagcgcccagtagcccattagaagatacagaggcagcaatattcaca

SEQ ID NO: 30527 - DNA, 120 bp, synthetic construct; identical to SEQ ID NO: 9076
  source 1..120: mol_type = other DNA

SEQ ID NO: 30528 - DNA, 120 bp, synthetic construct
  source 1..120: mol_type = other DNA
accccagttttgtctgtgggtttgtggagagcatcactgaaatttctaacttgacagagtggttccagggctcatatagaagcataaagaggtgaaaatagctgatatttctaaaggcaa

SEQ ID NO: 30529 - DNA, 120 bp, synthetic construct
  source 1..120: mol_type = other DNA
tgagccttgcagacggaggcgacaccaaggccttcccctgcgcccacacccagcgtctggagctgctggaaatatgtgtccccaccatgaaactgatgctgctgttcatcccattttgtg

SEQ ID NO: 30530 - DNA, 120 bp, synthetic construct; identical to SEQ ID NO: 9077
  source 1..120: mol_type = other DNA

SEQ ID NO: 30531 - DNA, 120 bp, synthetic construct
  source 1..120: mol_type = other DNA
ggtcaggctgagccagacgtggagatgaggctgagagccggaagcaagggctttgtctctagaagacgcaggggtggttcacaggccgctggggacccaggtcacagagcctttccccca

SEQ ID NO: 30532 - DNA, 120 bp, synthetic construct
  source 1..120: mol_type = other DNA
acattttgcaagtgaaaactcaaatctatgagaaaagcactcgccccgcagtaggaaagcaggcaaagaactagaaagacaatttacaaaaggatctgaaggtcctcactgcactcatcc

SEQ ID NO: 30533 - DNA, 120 bp, synthetic construct
  source 1..120: mol_type = other DNA
ggcagagttgagtcgttgtaacagagatcgtgtgaccaacgaagccagaacgatttactctctggccctttagagaaaagcgtgctagcccttgctctaagagtttcagtgaagagacgc

SEQ ID NO: 30534 - DNA, 120 bp, synthetic construct
  source 1..120: mol_type = other DNA
aaaaacattcctccccccttgacctcataatcctccttccaggattctctccctaaagaacaaatcagagttatgcacaaacaagctaatcacagccttatttataatagtgagaaattg

SEQ ID NO: 30535 - DNA, 120 bp, synthetic construct; identical to SEQ ID NO: 9078
  source 1..120: mol_type = other DNA

SEQ ID NO: 30536 - DNA, 120 bp, synthetic construct
  source 1..120: mol_type = other DNA
gtgcccaaaacatcaccttacagaaaatgcccggaaacgtgtctctggagggtggacttagagatatgtttttgaaacagattttttcatatttttcaaaatttctcccgtaagtggttc

SEQ ID NO: 30537 - DNA, 120 bp, synthetic construct
  source 1..120: mol_type = other DNA
cgctagcccctccgtaatttgtctgtccttcccagcctgcctggggccacatgggccactgtgcccagtgaagcctggcttccttgtctgtggtgccagccatgtgggagggtaggcgac

SEQ ID NO: 30538 - DNA, 120 bp, synthetic construct
  source 1..120: mol_type = other DNA
gaggctgcaggtaacccttctctaacctgctcagcccccagctccatcttccacctgtcctgggggatccccattcattctctccgtgggcatcatcagaggctcagctgtaccagacca

SEQ ID NO: 30539 - DNA, 120 bp, synthetic construct
  source 1..120: mol_type = other DNA
ttgcgtgctggctccggtgacacacaaaggcctctgcttctccactctcaggccagcccgagagggacggcaccaccgggacagcaccagcgggggcatggggaggggtgacaggttggg

SEQ ID NO: 30540 - DNA, 120 bp, synthetic construct; identical to SEQ ID NO: 9079
  source 1..120: mol_type = other DNA

SEQ ID NO: 30541 - DNA, 120 bp, synthetic construct
  source 1..120: mol_type = other DNA
gctaattggcccggggtcttcccagccctgtgctgtttgtgtgctattttaattcgcttatgaaaagcccccgctttgatgtccgggaccagataaggccgggaggggaccctccatgga

SEQ ID NO: 30542 - DNA, 120 bp, synthetic construct
  source 1..120: mol_type = other DNA
ttgtttcactaataaatccctcctcggaacactcccgggccgggccctcctcgggcccagcctaccaggccttcccgcccagtgcctccgcaacccgcgccaggacagccggcggtgggc

SEQ ID NO: 30543 - DNA, 120 bp, synthetic construct; identical to SEQ ID NO: 9080
  source 1..120: mol_type = other DNA

SEQ ID NO: 30544 - DNA, 120 bp, synthetic construct
  source 1..120: mol_type = other DNA
gcagggccggtggtacctggagccctccccactgagcacctggcccagtgcccggcacgtggcaagtgaaggcggctgcttcccgcccctctcatggacaccactgtgggcaccacttgg

SEQ ID NO: 30545 - DNA, 120 bp, synthetic construct
  source 1..120: mol_type = other DNA
gcacccaccaagcccctgcgatatcccagtggaagataatggaggtgttacggggatgggctagaactcggtcctggcatcacagagctaccccggtcaaaaatataccatgtaattaca

SEQ ID NO: 30546 - DNA, 120 bp, synthetic construct
  source 1..120: mol_type = other DNA
aggctctgatgcagaactgagcagagaagaaaacaaaagaggaccataatatctccacagagaactatcattaattttttaaatgggagtcctcaggtaggttggttgattgagtgattg

SEQ ID NO: 30547 - DNA, 120 bp, synthetic construct; identical to SEQ ID NO: 9081
  source 1..120: mol_type = other DNA

SEQ ID NO: 30548 - DNA, 120 bp, synthetic construct
  source 1..120: mol_type = other DNA
gacagatggaaggatggatggatatatggatgcatggagagacagagaaatagatgcagagatggagggagggagggaaggagggatggataaatggaggaatggaggaatggatggatg

SEQ ID NO: 30549 - DNA, 120 bp, synthetic construct
  source 1..120: mol_type = other DNA
atggatgtgtgagtgagtagatgaatgagtgggcagacagacagacacaccatcagaagcaaatataaatatggaatcaagggatgcctgcagcttttgaattgttgatttttttctttt

SEQ ID NO: 30550 - DNA, 120 bp, synthetic construct
  source 1..120: mol_type = other DNA
ttcagataaatgtttcttcaccaaaagagaaattcatttctaaatgtcactttcaggttaaggaaaataaaatgtgggacgctggactcatcgtgggtttttgcggtcttctctcagctt

SEQ ID NO: 30551 - DNA, 120 bp, synthetic construct
  source 1..120: mol_type = other DNA
gggggctctgcttccctctgtttgttcgtcttggtgctgtgtatgaaggtggcaacagactccccatagtcctctcaccacagacacctcttctcagttcttcgtttccagttggactca

SEQ ID NO: 30552 - DNA, 120 bp, synthetic construct
  source 1..120: mol_type = other DNA
acactccaggccagagcccttctctcaaatcccctttggttctagccatgtttccctgagctcttccctctctgtctctaattgatgtgttttcctcccaaaccctccttccttgcataa

SEQ ID NO: 30553 - DNA, 120 bp, synthetic construct; identical to SEQ ID NO: 9082
  source 1..120: mol_type = other DNA

SEQ ID NO: 30554 - DNA, 120 bp, synthetic construct
  source 1..120: mol_type = other DNA
agacttactattcagaagtcttatacttgctttagtctcatacttttgtaagtggcctttcttttcttcctggaaatgtttagtatctaccatctggactcaggggtttcaatttcccag

SEQ ID NO: 30555 - DNA, 120 bp, synthetic construct
  source 1..120: mol_type = other DNA
ctggaaaggtctctgtatgatttctcatcatggaggccaccatctctgttctctctttctgaaattccttttaagtcagactgaagacatttttaatgacactttgatgtctcaactttc

SEQ ID NO: 30556 - DNA, 120 bp, synthetic construct; identical to SEQ ID NO: 9083
  source 1..120: mol_type = other DNA

SEQ ID NO: 30557 - DNA, 120 bp, synthetic construct
  source 1..120: mol_type = other DNA
gtgttgacaatgactgggggaggtgcctgtcattacactgaggaaccccatatgttagagctctgaggctgctgcatctgagagcttgggctcgaggtacagggctggcagccgggagtc

SEQ ID NO: 30558 - DNA, 120 bp, synthetic construct
  source 1..120: mol_type = other DNA
agcatggcattcagagcagcagatggcttagactcacccccgcccagtcttggcacccttacagccccggcgagacccgggtgggcgtggaccctagcgtcccttcaccctcaggctgtg

SEQ ID NO: 30559 - DNA, 120 bp, synthetic construct
  source 1..120: mol_type = other DNA
gcttccctggctcattgtccctgttacaacccagatttcccttatcgcaactggtcctagcctgtgacctcctggggtggggaatcatctctgcaaacacagctcctccacccttatcag

SEQ ID NO: 30560 - DNA, 120 bp, synthetic construct; identical to SEQ ID NO: 9084
  source 1..120: mol_type = other DNA

SEQ ID NO: 30561 - DNA, 120 bp, synthetic construct
  source 1..120: mol_type = other DNA
agggtcagcagacccctggctggaggaggtcagtgtggggggctgcgtgggagacggtgcagcagtgggcctgggagctgagcaacggtggctgggatgggtggagaccaccaaagagga

SEQ ID NO: 30562 - DNA, 120 bp, synthetic construct
  source 1..120: mol_type = other DNA
gacagtcctcacaggggcatgctcaggccctgccccaggcagaccccacgccctggcacgcagccccaccggctgtgccgcctctcgttcctgtcctcctggcaccgccggccacccctc

SEQ ID NO: 30563 - DNA, 120 bp, synthetic construct
  source 1..120: mol_type = other DNA
cacacaaactttctgtttcaaggaacagaaacacccctgaaacttgtctaagaaggaaatgtgtcaactcacatacatgaaaagcctgagtccctcctcaaagtcctcccctccctcctt

SEQ ID NO: 30564 - DNA, 120 bp, synthetic construct
  source 1..120: mol_type = other DNA
tcgggggctccagttgaaaatgatgggggacacatttgcatcacagcctgcccggccggctctgtggcccctgatcttcctactgcagcctctgccggggccggaagggcatttccggga

SEQ ID NO: 30565 - DNA, 120 bp, synthetic construct; identical to SEQ ID NO: 9085
  source 1..120: mol_type = other DNA

SEQ ID NO: 30566 - DNA, 120 bp, synthetic construct
  source 1..120: mol_type = other DNA
atggccagccctcaaaccatctgaagtctgctgttggcacctgccctctcctggctgcaaagctgccccctcatggcctcaggtctctgccccagcctccaatccctcattactgcccca

SEQ ID NO: 30567 - DNA, 120 bp, synthetic construct
  source 1..120: mol_type = other DNA
tacagaggaagaacccgacagactgtgagccctgtcttcctcttggcaccatgagtcacctgtcaaactgaggggctggcagagctggagggagttccatcccagccccaaggtgcctgg

SEQ ID NO: 30568 - DNA, 120 bp, synthetic construct
  source 1..120: mol_type = other DNA
ccactctcacaggggtggagacctgcacctctttttcacccccaaacccgcctgcccgtcagtgcttagagcaaatgcccctcccccgccatcttttcatgactctcccccttcctcaac

SEQ ID NO: 30569 - DNA, 120 bp, synthetic construct; identical to SEQ ID NO: 9086
  source 1..120: mol_type = other DNA

SEQ ID NO: 30570 - DNA, 120 bp, synthetic construct
  source 1..120: mol_type = other DNA
gatggacggggagctgcagggagggagggttgcagaaagggatgcgtggaaggatggttgatggatggatggttagatggatgaagagatagatgaatggataaagaggtgaaaggatga

SEQ ID NO: 30571 - DNA, 120 bp, synthetic construct
  source 1..120: mol_type = other DNA
tgaatggagagatggagggaaggagggatgaataaagggatgggtggataatggatggatgaatgggtaggtgggtgaatggatggatagatggttgagtgggggggtagatggagagat

SEQ ID NO: 30572 - DNA, 120 bp, synthetic construct; identical to SEQ ID NO: 9087
  source 1..120: mol_type = other DNA

SEQ ID NO: 30573 - DNA, 120 bp, synthetic construct
  source 1..120: mol_type = other DNA
ggtggatgggtagattgagaaatgatggataggtggatgggtagatggatggaaggagacaaggaaggaaggaaggaaggaaggaaggaaggaagggtggaggtaagggagggagggaga

SEQ ID NO: 30574 - DNA, 120 bp, synthetic construct
  source 1..120: mol_type = other DNA
tgctgggcagaccagtctgctgtcctaccaaggcctaggtcttgactctggactcttccatgctcatcagagggtactgttggagcttcctggtcaggctgacccagctgcctctggagc

SEQ ID NO: 30575 - DNA, 120 bp, synthetic construct
  source 1..120: mol_type = other DNA
gtcctagcaaccatcatccaggcacctgctgcgtgctgagcaccatgctgggtgcttcctgtgctctcaacagccttatgtggtcagtaccaatccctccccaaattacccccatgctca

SEQ ID NO: 30576 - DNA, 120 bp, synthetic construct
  source 1..120: mol_type = other DNA
tagagcccacataggtcttatgggtgccacagcagggaccccactggacctctgtgctttctggtggggggcttgtcagggagctcatgggcacctctgggttctaagaagctatgctga

SEQ ID NO: 30577 - DNA, 120 bp, synthetic construct; identical to SEQ ID NO: 9088
  source 1..120: mol_type = other DNA

SEQ ID NO: 30578 - DNA, 120 bp, synthetic construct
  source 1..120: mol_type = other DNA
agagggtgggagcagacacgggagtaggatgggggccctggaggtactgggtggagctgcccccagcccttcctgctggcctccccagagctccaggctctgaggccacaccctcaccca

SEQ ID NO: 30579 - DNA, 120 bp, synthetic construct
  source 1..120: mol_type = other DNA
ggatatgttcccttgcaggcgggcagggctctggggagtccaagtgtgcacacagtcctgggtgagggctccgttagatgaatgtggacggctggcggccggggcttgggagatcaagaa

SEQ ID NO: 30580 - DNA, 120 bp, synthetic construct; identical to SEQ ID NO: 9089
  source 1..120: mol_type = other DNA

SEQ ID NO: 30581 - DNA, 120 bp, synthetic construct
  source 1..120: mol_type = other DNA
gccctggagcagtaacacccttgggactgagaatggcttctgggttgtgcgtcatcgctgtccaggagtggtgaaaagctggactctgactgcctgtcatccagagggagcaaacagcca

SEQ ID NO: 30582 - DNA, 120 bp, synthetic construct
  source 1..120: mol_type = other DNA
ctcctggaacattctggctcactcccgcctcaggcccactgccctggctggactccctgcactgaacgctcctcccagctcatgctttccaaagtcccctgctcaggaggccttccctga

SEQ ID NO: 30583 - DNA, 120 bp, synthetic construct
  source 1..120: mol_type = other DNA
gggcagtggctgcccctctgcctctggaggtcccctccaaaaccttggtccctgtccgcagagggtgtcagggcttgaggtcaacagggaggtctcagggcaacagagcccagtggcact

SEQ ID NO: 30584 - DNA, 120 bp, synthetic construct; identical to SEQ ID NO: 9090
  source 1..120: mol_type = other DNA

SEQ ID NO: 30585 - DNA, 120 bp, synthetic construct
  source 1..120: mol_type = other DNA
ccttgtgcagacactgatacccttaggatgaagctgaccccagtcgtggcagccaccccagcagtcagggaaggacctgctggggcatttcagatcctgagcagcatgtaccctgtgaaa

SEQ ID NO: 30586 - DNA, 120 bp, synthetic construct
  source 1..120: mol_type = other DNA
ggtggtgagagctaccccgggtctggggactgttagcacagacctgagccgaggcccccttctcacaggggcctacccacttacgacccacctcctctcctccatggcaaaggtgataca

SEQ ID NO: 30587 - DNA, 120 bp, synthetic construct
  source 1..120: mol_type = other DNA
ctaccagctttgcgcaaatgctccacatttgcattttaaaagccctgagaaggcctgcagtgaaaaaaactaacttcgtataacccaactattcccaaactctatctacaaaatattttt

SEQ ID NO: 30588 - DNA, 120 bp, synthetic construct; identical to SEQ ID NO: 9091
  source 1..120: mol_type = other DNA

SEQ ID NO: 30589 - DNA, 120 bp, synthetic construct
  source 1..120: mol_type = other DNA
atggcgtccttgtgcccttgtcacccactcctgtgggtacacagcttccctttctgcaaagtcacaccccaagccctggcttgagcatgtacacaggctgcagcccgtgttcctggagcc

SEQ ID NO: 30590 - DNA, 120 bp, synthetic construct
  source 1..120: mol_type = other DNA
agccagatgatgggagctgtcacaggactttgccacccggggtgaggggcctagaaacccctctccaccagatgccttacaccccccatccccacacgcacacagcttggaggctggaag

SEQ ID NO: 30591 - DNA, 120 bp, synthetic construct
  source 1..120: mol_type = other DNA
tagtctgatgacccaggcctttccccctgcccaggctagccttgtgctcagctgccagcacagcccccaccacacactccccaacaggtgtctccacaactgccaggagacagctcagct

SEQ ID NO: 30592 - DNA, 120 bp, synthetic construct
  source 1..120: mol_type = other DNA
cacaggacccacatcctgctcccagctccagcctgaaaggagctagtcctctccagcccctttgaaaagaccagctggacattctccagggagattctgccctacaggattagggagtac

SEQ ID NO: 30593 - DNA, 120 bp, synthetic construct; identical to SEQ ID NO: 9092
  source 1..120: mol_type = other DNA

SEQ ID NO: 30594 - DNA, 120 bp, synthetic construct
  source 1..120: mol_type = other DNA
acagcagggtccaaacaccaggtgccgagagccttcctgacattgaaccttccttgaattcctgaggtaaaccttatgtgatcttgactcaagtccagctgctgatgcatttttaggttt

SEQ ID NO: 30595 - DNA, 120 bp, synthetic construct
  source 1..120: mol_type = other DNA
tctgggatggatgggatggatgtcgtctgcttttttaggtaattatagaaatcacccccaaaaactagactggaaaccttttagaggagggtaggtaactggcatttgtgtctccccaat

SEQ ID NO: 30596 - DNA, 120 bp, synthetic construct
  source 1..120: mol_type = other DNA
ttacaattattcaattccctcggtagcagtagtattcattcctaattcttatttgttactttacttgcttaaggtttatctactttactggctcttcaaacaacctgcatttggttttat

SEQ ID NO: 30597 - DNA, 120 bp, synthetic construct; identical to SEQ ID NO: 9093
  source 1..120: mol_type = other DNA

SEQ ID NO: 30598 - DNA, 120 bp, synthetic construct
  source 1..120: mol_type = other DNA
gtacagatttttagaaatttatggagttttcctttggtgcctaataggatcatttctgtgacctttttgtatatgtgtggaggcggtggagtcttttctgttaattgtgttaaacttgtt

SEQ ID NO: 30599 - DNA, 120 bp, synthetic construct
  source 1..120: mol_type = other DNA
ctgtggtttgtcagtttctgagagacaggcactaggatggccaataatattgtggatttcttgatgtgttggttttgttcatttgtttttcctgccccatcctctgggcccttaaagcct

SEQ ID NO: 30600 - DNA, 120 bp, synthetic construct; identical to SEQ ID NO: 9094
  source 1..120: mol_type = other DNA

SEQ ID NO: 30601 - DNA, 120 bp, synthetic construct
  source 1..120: mol_type = other DNA
cggcctgctctgctgccttggtgggaagctttcgtccctgcagggtggggtgggtctgtcaagtgttcggtggcccctggctggtgctgtagcaacacgggtgtcagagggcggacaccg

SEQ ID NO: 30602 - DNA, 120 bp, synthetic construct
  source 1..120: mol_type = other DNA
tggcaagggttggggaatatggtgagaatggtgcccatggggtcacgccagccacacacactttctcgagaagtttcaagtggagccacagggccattgtgtgtcctgaatcattgctct

SEQ ID NO: 30603 - DNA, 120 bp, synthetic construct
  source 1..120: mol_type = other DNA
ttacccatggtgtccccttccccacgtggtaattctggactgttcacagtggcttccaaggcctttgggatgggccttgcgtgctgcccttctgctggaaaccctcccagccatttgagg

SEQ ID NO: 30604 - DNA, 120 bp, synthetic construct; identical to SEQ ID NO: 9095
  source 1..120: mol_type = other DNA

SEQ ID NO: 30605 - DNA, 120 bp, synthetic construct
  source 1..120: mol_type = other DNA
agcggagaagacagggggatggaagcagagctcagagaggctgaaggtgctgtgctgctggctttgaagacggaggaggggccacagcccaggaacgcaggcagcttctagaaaaccgga

SEQ ID NO: 30606 - DNA, 120 bp, synthetic construct
  source 1..120: mol_type = other DNA
tgcttgtggtaacatggcaccacagtgcaggatgctgacacaagcaccagcacagcgccaggccctggggtatagtgtggataagatggactggaccctaccctcctagggatgtccctc

SEQ ID NO: 30607 - DNA, 120 bp, synthetic construct
  source 1..120: mol_type = other DNA
cctacctagggtattagcagaggtgtcccaaggaagctccctgtgagccgaaccccaaaggatgggtggaaattagcttaactaagtggagaggtgggatagtcatgggccaaggcccca

SEQ ID NO: 30608 - DNA, 120 bp, synthetic construct
  source 1..120: mol_type = other DNA
ggggagccccaaaggatgtgaggcaagggagcaatgaacaaatctcaccattgtaagatctgaaattcagaacggtggcataggccagagtaggacattgtgaaaaagaaacaattagag

SEQ ID NO: 30609 - DNA, 120 bp, synthetic construct; identical to SEQ ID NO: 9096
  source 1..120: mol_type = other DNA

SEQ ID NO: 30610 - DNA, 120 bp, synthetic construct
  source 1..120: mol_type = other DNA
gcagagataaagacaacattctagaatcttctcaaagaagtaacaggtgattttccaaacatgggcctctgaacagatcagtctttggtagagaaaatttatgaagagagatgccttcaa

SEQ ID NO: 30611 - DNA, 120 bp, synthetic construct
  source 1..120: mol_type = other DNA
aaagtatagaatttgctttctatcccttttcttagaaggttctggagaatgcactccagcaaaacgtgggaggaaaccagggaaaaggaaggcaccaacaacaaggaggcagaagaccct

SEQ ID NO: 30612 - DNA, 120 bp, synthetic construct
  source 1..120: mol_type = other DNA
aaaataggtgggactgggaagaaaatctgcaacggagcttccaaaacagcggaggatctccctgagggaggtgttgttagagaagagagcagagaagcaggagaacccagaaaggaaatg

SEQ ID NO: 30613 - DNA, 120 bp, synthetic construct; identical to SEQ ID NO: 9097
  source 1..120: mol_type = other DNA

SEQ ID NO: 30614 - DNA, 120 bp, synthetic construct
  source 1..120: mol_type = other DNA
cacacattcacacaaacacacccagacacatgcatgcacatggataactaactcttccagcaagagccaccccctggctgaagtgtgaggctgtccatggaggggccagagtagagggga

SEQ ID NO: 30615 - DNA, 120 bp, synthetic construct
  source 1..120: mol_type = other DNA
gatttggagacacaatccccagacttggggacgagctggatatggtggtgaaggaggggagtcttcaggaaagacccccaggttctggcttggccatatgttggaggctgaaacgattca

SEQ ID NO: 30616 - DNA, 120 bp, synthetic construct; identical to SEQ ID NO: 9098
  source 1..120: mol_type = other DNA

SEQ ID NO: 30617 - DNA, 120 bp, synthetic construct
  source 1..120: mol_type = other DNA
attctgtacttggcctgtctcagtgccgtgccgcatccatcctgcccctggcaccggagggtacactgatcagggacacgagttcccctgccgggcacagagcaggttcccagtgagttc

SEQ ID NO: 30618 - DNA, 120 bp, synthetic construct
  source 1..120: mol_type = other DNA
gtctgcacatgtggctggtgcaggaggcgcagtgtgctgggcctcagcctggacacggctgtcccatgcgcagagacagggtcacggtggaaagagagtccagagaacatgggaggtgcc

SEQ ID NO: 30619 - DNA, 120 bp, synthetic construct
  source 1..120: mol_type = other DNA
ggtgcagacccagaccaatgggaggccaagggaggcccgcagcccagaccttccgagccctcagcctgctcagctcagtgtccttccagggaaatgggcgtttcctgtgggaaggtgcca

SEQ ID NO: 30620 - DNA, 120 bp, synthetic construct; identical to SEQ ID NO: 9099
  source 1..120: mol_type = other DNA

SEQ ID NO: 30621 - DNA, 120 bp, synthetic construct
  source 1..120: mol_type = other DNA
agtctccgggtactttgctcagtaacggactggaccagcgcggcctccacgccagggactggggcaagggtggagtttggagtaaagagagaggcagggcaacccctttccacagacact

SEQ ID NO: 30622 - DNA, 120 bp, synthetic construct
  source 1..120: mol_type = other DNA
tcgtcctccccgccatcctggaaacgattttgttgtctgcagagattatgtgtaactgcctgtgagttataagcctccacagcaagcagcctgttacctaaccaggcctggctcatgcca

SEQ ID NO: 30623 - DNA, 120 bp, synthetic construct
  source 1..120: mol_type = other DNA
cgcagcagaacctctccgagggagtgctattgtttttcatgtcagctgcattttaaggctacatttcacgtcagctgtgacttggaaggaaagagggcccggcctttgaaaaatgaagaa

SEQ ID NO: 30624 - DNA, 120 bp, synthetic construct
  source 1..120: mol_type = other DNA
ccagcagccgcctcttggcagcgctgatggaaaccgccgtgcggttccgcgcagacagtcacggaaactcaggcagacccggcgttgggtgcgccaggccggtgtgggagcactttcccc

SEQ ID NO: 30625 - DNA, 120 bp, synthetic construct; identical to SEQ ID NO: 9100
  source 1..120: mol_type = other DNA

SEQ ID NO: 30626 - DNA, 120 bp, synthetic construct
  source 1..120: mol_type = other DNA
ggagtgacaaggacagggaggaagaaagccaggcaggtggcccatgagccgtggagtaggtggggaaggggacatctccaaggaggtgacatcggagcagtcctctaaggagtttggagt

SEQ ID NO: 30627 - DNA, 120 bp, synthetic construct
  source 1..120: mol_type = other DNA
tcacctcgtgttgctgtcccccaggtaggagataagggaccagagtcagggcaggtgggagaaggggaggttcttggttcagctgctgctgagacagtgaccctggggacagcccaaata

SEQ ID NO: 30628 - DNA, 120 bp, synthetic construct
  source 1..120: mol_type = other DNA
agtgcttctgtcctatggtccccagcggctgctcctgcattcaccatcacatctgcattccagcagcaggagggaggtaaaagacatgaaggacaggccccactcctgtaaaaccctaca

SEQ ID NO: 30629 - DNA, 120 bp, synthetic construct; identical to SEQ ID NO: 9101
  source 1..120: mol_type = other DNA

SEQ ID NO: 30630 - DNA, 120 bp, synthetic construct
  source 1..120: mol_type = other DNA
gcaggtatgtggtggtactgttttccggaatgaagaggaaggggcgggcagaaggcagcgagagctttgtttggggtgtgtcgaattcaagatgcctctgagacatggaagtggtgaggt

SEQ ID NO: 30631 - DNA, 120 bp, synthetic construct
  source 1..120: mol_type = other DNA
aaggggcgagggcaggacaaaggctggcagcaccacacaggagccagcagggaaggggccacagccgggactcagaggaggcagccacgtgcagaaaggcacccatgggaacatggctcc

SEQ ID NO: 30632 - DNA, 120 bp, synthetic construct
  source 1..120: mol_type = other DNA
tgccagagctgaaagcactggttaaacgtgatgggtaaacacatgtctatttcagcttctttgaatcccactaaggtgacagtaaaggcatgaaaaacatggaaacatgtaaatcaacta

SEQ ID NO: 30633 - DNA, 120 bp, synthetic construct; identical to SEQ ID NO: 9102
  source 1..120: mol_type = other DNA

SEQ ID NO: 30634 - DNA, 120 bp, synthetic construct
  source 1..120: mol_type = other DNA
cccaggaccctgacaggcaggtctcaccccagcccatgaagccagatgctactgattctcaagctcagctagagacaggttgagtctccagaaaagctgagcctgagaggttctgaactt

SEQ ID NO: 30635 - DNA, 120 bp, synthetic construct
  source 1..120: mol_type = other DNA
cagaatgcccggtggggcacaccattgttttcagaacaccagcaataaagcagacactccacatttccagagagaaaaagtaagtcacacacaagagaatagaaaatcaaaacggtatcc

SEQ ID NO: 30636 - DNA, 120 bp, synthetic construct
  source 1..120: mol_type = other DNA
tccagaattctatacctagtcaaactctcaggtatgagaatagaataaagacatttccaaacatgcacagtcaaaaattgtatctaccacatgccttttctcagaaagttacttgaggac

SEQ ID NO: 30637 - DNA, 120 bp, synthetic construct; identical to SEQ ID NO: 9103
  source 1..120: mol_type = other DNA

SEQ ID NO: 30638 - DNA, 120 bp, synthetic construct
  source 1..120: mol_type = other DNA
gtgacagatgcagtaaaaaacaagcaaaacctaaggccatttgtaacccaagggaaaacaagaagatgtaatcataacagaccacaggacacagctaaaaacagtgattacatagtgaca

SEQ ID NO: 30639 - DNA, 120 bp, synthetic construct
  source 1..120: mol_type = other DNA
aagataagggagtggggagggcaggggcatgagaacaaaatcttgatcacttctcttccatgttaggcagtcactagataatgtctaaagtgacaaaatttcaaggaacagcaatgtaaa

SEQ ID NO: 30640 - DNA, 120 bp, synthetic construct
  source 1..120: mol_type = other DNA
gatagaagatctagcgcccagggaaggctgtttaaagatgggagagcttcacgggttttctcactaagggtaagaaaatttaagaaggaagtgatggtgccagagaatagggaattctgc

SEQ ID NO: 30641 - DNA, 120 bp, synthetic construct
  source 1..120: mol_type = other DNA
aaggaggagggaggagggaggaagagagagaaggaagagattggccaaggagctctgagaggggaaggtgggtgcatgccaccctggctgggaacagcaggtgtgtggtgaaggggaaag

SEQ ID NO: 30642 - DNA, 120 bp, synthetic construct; identical to SEQ ID NO: 9104
  source 1..120: mol_type = other DNA

SEQ ID NO: 30643 - DNA, 120 bp, synthetic construct
  source 1..120: mol_type = other DNA
ttcctccagccccgggagcaggaagggcgggctgggagctgcaggatggggcctgaatctctcatcaactcacagggtcagcctgggccaggcaggctgggggccagcccaggacctcct

SEQ ID NO: 30644 - DNA, 120 bp, synthetic construct
  source 1..120: mol_type = other DNA
gccctccagcaccctggccacagagccacacacctgggccttcccctctccccatcatcaggtaacccagcacaggctggcccaacccctctctaggcctcagctttcctgtcaggaaaa

SEQ ID NO: 30645 - DNA, 120 bp, synthetic construct
  source 1..120: mol_type = other DNA
gtgctcagccccaccccagcacccgcccaatgggccccctgagggaagctgcccatgctctctgcgccccattttctggcctctggcatgcagagggcagccctgcctgcttcccagtat

SEQ ID NO: 30646 - DNA, 120 bp, synthetic construct; identical to SEQ ID NO: 9105
  source 1..120: mol_type = other DNA

SEQ ID NO: 30647 - DNA, 120 bp, synthetic construct
  source 1..120: mol_type = other DNA
ctgggtccctctggtactctgtgccctgaaccaccacccttaggcccagatctattcctgatccttctctagacttcagtcagtttcctcttgatgtcctggatggccacaaccatagtg

SEQ ID NO: 30648 - DNA, 120 bp, synthetic construct
  source 1..120: mol_type = other DNA
ccccgctgccctcctctgcctctctccgttgccccctcctccctcccccaccagagccctggaaggctaggtacagcgaggaagtggccactccatgacccccagtgatttcacttctct

SEQ ID NO: 30649 - DNA, 120 bp, synthetic construct
  source 1..120: mol_type = other DNA
tgcccgtgtaccaggagcctctgctccaggggggtggcctgaggcccaggcagacctccacctccaggcagccctgcaggtggacagctgggcctcaggcttaggacctgggacaactgc

SEQ ID NO: 30650 - DNA, 120 bp, synthetic construct; identical to SEQ ID NO: 9106
  source 1..120: mol_type = other DNA

SEQ ID NO: 30651 - DNA, 120 bp, synthetic construct
  source 1..120: mol_type = other DNA
gtcagagctccgaccgcacagggtcatggggagcaagaggaaccaggatacccacaagctgctcgctcagacgggctctgcgactccacaactcaccttcccctactgcaagatcaggga

SEQ ID NO: 30652 - DNA, 120 bp, synthetic construct
  source 1..120: mol_type = other DNA
ggtctgcccgcctccccggagcatgttccctctgtagctcccggtagggcctgtgtggagaaggttgctgatggcatcactgagcggcccagctgtggggtgaaaggcaaggctggggct

SEQ ID NO: 30653 - DNA, 120 bp, synthetic construct; identical to SEQ ID NO: 9107
  source 1..120: mol_type = other DNA

SEQ ID NO: 30654 - DNA, 120 bp, synthetic construct
  source 1..120: mol_type = other DNA
tgtgggagaacatgctgggtaggggtgcctgtgtgcctctggagtcgaggcaattagaggccctgtggaagcccctgcacgcaaggggcccacgcgccagggcagaggacatagcccctt

SEQ ID NO: 30655 - DNA, 120 bp, synthetic construct
  source 1..120: mol_type = other DNA
ccctctccaagcttctcccctcataggatcccagagccccttgggacctctgtgaagactgcatagatgtgagggagtctcagccttagggtgggcacctgggcgcagctgtcaggcccc

SEQ ID NO: 30656 - DNA, 120 bp, synthetic construct
  source 1..120: mol_type = other DNA
tgggcaggcttccccgcttcactccatttgcagcccctgtcttgcagaggcaaaatggaggttcagagaggtgagcaaacaccaggtcccatgtttgcacctggctgtgaccgtgcagtc

SEQ ID NO: 30657 - DNA, 120 bp, synthetic construct
  source 1..120: mol_type = other DNA
gttccgacaggctgaggagcggcggggagcggggcttgccaaatatgtccagatggggctggagccccagcaacttcctgccctcccagcctgctcccccacctcctcacccccttccca

SEQ ID NO: 30658 - DNA, 120 bp, synthetic construct; identical to SEQ ID NO: 9108
  source 1..120: mol_type = other DNA

SEQ ID NO: 30659 - DNA, 120 bp, synthetic construct
  source 1..120: mol_type = other DNA
tgaggctgagcatgcactggctggggagggtgggcagagcaggaggaaatcccttgttctccggagctggagagccagaaagagccctgcagcctgggcctcatcatcacacctcgccct

SEQ ID NO: 30660 - DNA, 120 bp, synthetic construct
  source 1..120: mol_type = other DNA
acctgtgaggtgctgagttccccatctcagagactgtgcgagcagaggcagggaggcgcttgatgtcggatggagaaaggacaggggaggggtgtggggctcagggccccgccaggtgaa

SEQ ID NO: 30661 - DNA, 120 bp, synthetic construct; identical to SEQ ID NO: 9109
  source 1..120: mol_type = other DNA

SEQ ID NO: 30662 - DNA, 120 bp, synthetic construct
  source 1..120: mol_type = other DNA
cgggggagggagggagggcggccctgtcctgggtgcaggcccgggggctgggggctgcccgcccgtctgggtcagccgcagctgcaaaccggccctggctgagtcatggggcctccatct

SEQ ID NO: 30663 - DNA, 120 bp, synthetic construct
  source 1..120: mol_type = other DNA
agccctttggcccccaagtctctgccacctccctggggttctgctcccatattcctcacacccagcacagaacccagcatgtctcctgtagacacctgcatataaaccctgactcacaca

SEQ ID NO: 30664 - DNA, 120 bp, synthetic construct
  source 1..120: mol_type = other DNA
atttctggcctctggtgactattcttcaggcagctcaccctgcaagtctttattgagcacctactgtgtgccaggcagtggtacagcaagggcagaagccccacctccaaggagctgacc

SEQ ID NO: 30665 - DNA, 120 bp, synthetic construct; identical to SEQ ID NO: 9110
  source 1..120: mol_type = other DNA

SEQ ID NO: 30666 - DNA, 120 bp, synthetic construct
  source 1..120: mol_type = other DNA
cagggcagtgacagggtgatcgggcccggtcagtggtcccaggggtcggggacaggtgggaatcgaagtcataggaggcggggcaaaggccacggggaaagggacagagctgctcccaag

SEQ ID NO: 30667 - DNA, 120 bp, synthetic construct
  source 1..120: mol_type = other DNA
caaggcatttctgagggagagggacacgactagtggctcaaatctttagaaatgaggggatgggtctggtagagcaccccagattcaaggcgggtggcttggggaaagcagggagaaggg

SEQ ID NO: 30668 - DNA, 120 bp, synthetic construct
  source 1..120: mol_type = other DNA
ttcacccaggaggtagagggtgaggccggactgcactccaaggggaggaggtgggagagcacagcctggctgctgccaccaagctccccagaagaggggacccctccccccgaacaccag

SEQ ID NO: 30669 - DNA, 120 bp, synthetic construct
  source 1..120: mol_type = other DNA
cagcactgtccccgtgattctacgtgcagcctccacaagtgtgtcgcatggaaacaagcagtggagagccacatgtgtgtcacatcacgcctcgcctcactcgtgctaaacctcgctgac

SEQ ID NO: 30670 - DNA, 120 bp, synthetic construct; identical to SEQ ID NO: 9111
  source 1..120: mol_type = other DNA

SEQ ID NO: 30671 - DNA, 120 bp, synthetic construct
  source 1..120: mol_type = other DNA
gcgtgtttgggagcaccctgggcagcctctcgagtgtccagagagaggacaccgtcttgagccagcagggacagccaagagcgcccggggagaggcctgggtggagacagaacacagcag

SEQ ID NO: 30672 - DNA, 120 bp, synthetic construct
  source 1..120: mol_type = other DNA
tggcctggggcccaggagagcccgctccgcgctcacagcctccgttcccagacacgcccgggcctgagcccccaggctgcactgtgccacagaacagactccccggcccctccctgctcg

SEQ ID NO: 30673 - DNA, 120 bp, synthetic construct
  source 1..120: mol_type = other DNA
gggcagacagaggtgggggatggaaagcaggggaagtggccacagccaaaccaggagggggaagggagggggcctcaccaaggagaccctcacctggggcctggagaatgagaagggtct

SEQ ID NO: 30674 - DNA, 120 bp, synthetic construct; identical to SEQ ID NO: 9112
  source 1..120: mol_type = other DNA

SEQ ID NO: 30675 - DNA, 120 bp, synthetic construct
  source 1..120: mol_type = other DNA
actgaggaagccagcccagaaacgtcccgtcccaaattcaggaatatttagggtatacctgctgcacgccaagggcagtttcaggaaggggacctacttctgagaagcaaacaccaccag

SEQ ID NO: 30676 - DNA, 120 bp, synthetic construct
  source 1..120: mol_type = other DNA
gaggagtgtgaaacggcatgcagaaagaaggaagcaggcttggggctgggggccagggaccggcgcgccgggaagcaggctgcagagtgaggccagggatgggggctgggccagaccaca

SEQ ID NO: 30677 - DNA, 120 bp, synthetic construct; identical to SEQ ID NO: 9113
  source 1..120: mol_type = other DNA

SEQ ID NO: 30678 - DNA, 120 bp, synthetic construct
  source 1..120: mol_type = other DNA
gaggcagcagagcgctcgctggctgcccgaacaaagtgttctgcctggtgtcccctggcctccgggcctctgcgggctcgccagagggggcagctcaggaggcagcggcagagaatcaaa

SEQ ID NO: 30679 - DNA, 120 bp, synthetic construct
  source 1..120: mol_type = other DNA
tgcactaggtgggcaggtgggcaggtgggcaggtgggcagctgcctcgggctcttggacagagccgcccctgcctggcgtctgccggcaggaagctcctgaggccgggctagggataggc

SEQ ID NO: 30680 - DNA, 120 bp, synthetic construct
  source 1..120: mol_type = other DNA
ccttccaagggaagagggcaaaggggctccagtgccacccagggagtgttgtgccacgtgggcccccctggctctgccactgactccctccatgacctctgtccccaccctgaagttgac

SEQ ID NO: 30681 - DNA, 120 bp, synthetic construct
  source 1..120: mol_type = other DNA
cccaacccagatgcagggagggaggtggctgcgtgtccaggagcacggggccatgtggcaccggctcatgtcagcagacacggcacacatagaccccctgggggctatgacgaggtgagg

SEQ ID NO: 30682 - DNA, 120 bp, synthetic construct; identical to SEQ ID NO: 9114
  source 1..120: mol_type = other DNA

SEQ ID NO: 30683 - DNA, 120 bp, synthetic construct
  source 1..120: mol_type = other DNA
caagagcggtctctagggcagttctgcgtagacgccaaagtacaggaagacgtgcaggaactttgtgccgtcgacccttgaacaatgcagggttggggcaccgacccccgaactgcccag

SEQ ID NO: 30684 - DNA, 120 bp, synthetic construct
  source 1..120: mol_type = other DNA
caataaagtaaagtaaggaagagaaaagatattcattcagcataagcagatcattgtaaaggtcttcatcctcgtcatcttcacgttgagtcagctggggaggaggaggggtggctctta

SEQ ID NO: 30685 - DNA, 120 bp, synthetic construct; identical to SEQ ID NO: 9115
  source 1..120: mol_type = other DNA

SEQ ID NO: 30686 - DNA, 120 bp, synthetic construct
  source 1..120: mol_type = other DNA
gacctctgtgtggcaaaacaaaaaaataataaatgccataaacccatacacgagacaaatagcacactagggaaaaacatgtgtgatgtgtacttgacatctttcttaacatagagtcct

SEQ ID NO: 30687 - DNA, 120 bp, synthetic construct
  source 1..120: mol_type = other DNA
gaaattggccggggcctcacttactaattcaacaaacatttgtgcagcgccaactctaccctccatgtatttactgggcaccttctaggctccaggctccaggctctgggagactgtcta

SEQ ID NO: 30688 - DNA, 120 bp, synthetic construct
  source 1..120: mol_type = other DNA
ggacatttcagggagtggtgaaggcttacaggaacatggggagagatgagacgaggaggccgcccaggattttgagctaaggttacaaagcagcagaggacagcgggtgcaaaggcccca

SEQ ID NO: 30689 - DNA, 120 bp, synthetic construct; identical to SEQ ID NO: 9116
  source 1..120: mol_type = other DNA

SEQ ID NO: 30690 - DNA, 120 bp, synthetic construct
  source 1..120: mol_type = other DNA
ggatacaggattcgggccggcttgggaggaatctgagctcccgctgggacacgctgagctgtggggctgttggcctgcaggccttggagcccctggagagagcaagtagctgacggggac

SEQ ID NO: 30691 - DNA, 120 bp, synthetic construct
  source 1..120: mol_type = other DNA
tccgtcagtgggcagaggctggtaaaagtggatgtcagcagcagggggaagggtctttctttcaccatcttgggcctctctcagagggaggcaaccccgctcctggggggtggtcagtga

SEQ ID NO: 30692 - DNA, 120 bp, synthetic construct
  source 1..120: mol_type = other DNA
ggtccccagccgcggcagagcttcctctggctgctcggcagacaacagacaccagggacagagacaaggttgaggatttggtctgcagcctctgagcggacacactcaccctcagtgcct

SEQ ID NO: 30693 - DNA, 120 bp, synthetic construct
  source 1..120: mol_type = other DNA
ggggacagggggagcagctggtatgtgtgtgaccatgggtcccagactcagtgccatctgtctccccattaggagaggacgcctggtacctgcccaagcacccaagccatgggagttgct

SEQ ID NO: 30694 - DNA, 120 bp, synthetic construct; identical to SEQ ID NO: 9117
  source 1..120: mol_type = other DNA

SEQ ID NO: 30695 - DNA, 120 bp, synthetic construct
  source 1..120: mol_type = other DNA
caggccacaggcatacatgtgcaactgtacgtgcactctaggaatccctaatgatcatggccatcgggtggctcgcagtgcactgagcaccatgctctgtccctggtgtcttcatgcctc

SEQ ID NO: 30696 - DNA, 120 bp, synthetic construct
  source 1..120: mol_type = other DNA
gcggcagaggcaggatctgaccccagacccgctgcggcacacacacgcctgcctgcacgctcccgtgaggaggtgctttgtgcccaaggccctgcagcagtgtggggggttctgaggcca

SEQ ID NO: 30697 - DNA, 120 bp, synthetic construct; identical to SEQ ID NO: 9118
  source 1..120: mol_type = other DNA

SEQ ID NO: 30698 - DNA, 120 bp, synthetic construct
  source 1..120: mol_type = other DNA
aggtgacctttgccctgcgaccctacagagggccctggggaggccctgcctggtctttagacactgcccaacaaggatgctagaaggggcagtgagttttctgcctcctggggaactgca

SEQ ID NO: 30699 - DNA, 120 bp, synthetic construct
  source 1..120: mol_type = other DNA
caaggccgggcaggttctgcaaaaatttcccttgaaagactctttttcaagattttcttttgaaaacaaattcataaccacatcaaacaggaatccccgttgccttgggtttgatcgccg

SEQ ID NO: 30700 - DNA, 120 bp, synthetic construct
  source 1..120: mol_type = other DNA
taatttggtgagtgcaggccgggcacaaagcagcttttgtctgccttgccttttaatcactatcaaattgcaaataatggtggaggctgagatccccaaaattgatctgtcccagcagtt

SEQ ID NO: 30701 - DNA, 120 bp, synthetic construct; identical to SEQ ID NO: 9119
  source 1..120: mol_type = other DNA

SEQ ID NO: 30702 - DNA, 120 bp, synthetic construct
  source 1..120: mol_type = other DNA
acatcctggcccacccccggggcctctgtcaccagcagctgggatgatgagagcatgtctctggggccagagaccctagccagtccctcaaagccccagttggcacaggcagcagttgag

SEQ ID NO: 30703 - DNA, 120 bp, synthetic construct
  source 1..120: mol_type = other DNA
tggctgagtgcctctctacacggtgccgggactccctgccgggaggagctgtcaccaaagtggctcaggactgagcgctgattccagccacaccctcagcctgcactgcctgcctgcggc

SEQ ID NO: 30704 - DNA, 120 bp, synthetic construct
  source 1..120: mol_type = other DNA
agatgttcgagtgccataatgtgaaaatttatgaaaccacaaatgttcatctgtgatgtatttggtgctttaattaatgccaaaccaattgatacccaagctggggcctgcacagttagt

SEQ ID NO: 30705 - DNA, 120 bp, synthetic construct; identical to SEQ ID NO: 9120
  source 1..120: mol_type = other DNA

SEQ ID NO: 30706 - DNA, 120 bp, synthetic construct
  source 1..120: mol_type = other DNA
tacctgacacactgtgtccccccatatggcagctccgtggtctcgagatggagccttggggtgggagctgtggggacaggatgggagacatggcactttcagccagtgactctgaccctc

SEQ ID NO: 30707 - DNA, 120 bp, synthetic construct
  source 1..120: mol_type = other DNA
ggatggccctgggcccctgcccctgccaaaccacagaagtcctgcacccctttcctccatagtctgggcctcacatcaggtttatctgggaaaaataaaacatggggctccctctggcct

SEQ ID NO: 30708 - DNA, 120 bp, synthetic construct
  source 1..120: mol_type = other DNA
caccacccagggctggaagtgggtcccctgggctcctgctctgggcagggcacagtcccaccctcccaggtggaggctgcccacctagccctctagacagacgctcggccccactcaggc

SEQ ID NO: 30709 - DNA, 120 bp, synthetic construct
  source 1..120: mol_type = other DNA
gcccgggtccacccagaccctagcaaactggttgctccctctctggccatcccggggcttgtgcccacgtcacccagcagcatcttccctggggttgtctcacccgcacagaacccagcc

SEQ ID NO: 30710 - DNA, 120 bp, synthetic construct; identical to SEQ ID NO: 9121
  source 1..120: mol_type = other DNA

SEQ ID NO: 30711 - DNA, 120 bp, synthetic construct
  source 1..120: mol_type = other DNA
ctcctgcaagaacaccgcaggctgaaggaccagccctgtctcctgtggccaccaacagagctgtgcgccctccccgaaccctcactcatgctagggcccccaggtccaacctcctaggga

SEQ ID NO: 30712 - DNA, 120 bp, synthetic construct
  source 1..120: mol_type = other DNA
tctccccatcaaggctggatggccacttcccacccggggcgggctccagcctcattccccagcggtgctgtccttccaaggagctctcagatcacctggctgtccactcgtttggggctt

SEQ ID NO: 30713 - DNA, 120 bp, synthetic construct; identical to SEQ ID NO: 9122
  source 1..120: mol_type = other DNA

SEQ ID NO: 30714 - DNA, 120 bp, synthetic construct
  source 1..120: mol_type = other DNA
ctggaagtggcccagcaggggcatcccctgcacacccaggcaaagcccaagccctctgcctcctcaaccaccccaggccctgcccatgagccagccttgctgaactctgccctctgtcca

SEQ ID NO: 30715 - DNA, 120 bp, synthetic construct
  source 1..120: mol_type = other DNA
tccctggtgcagaccctgccatgcggggatgtggcacagaaggccggccagcctggggagcagagaaggaggagaggagagctcctggccctgagcctgaatgcctgtggacacatatag

SEQ ID NO: 30716 - DNA, 120 bp, synthetic construct
  source 1..120: mol_type = other DNA
agcatgcacttgcagagacggttggcaccttcccttctctggccccaaacctgggccctgaggctgtctgcacacctgggtgcttcccaccactgactctctcgtctgcctttgtccccg

SEQ ID NO: 30717 - DNA, 120 bp, synthetic construct
  source 1..120: mol_type = other DNA
atcacccagccctgcggcagtggcggctccgtcgaccctgagctcttcctgcccagcaacaccctgcccacctacgagcagctgaccgtgcccaggaggggccccgatgaggggtcctga

SEQ ID NO: 30718 - DNA, 120 bp, synthetic construct; identical to SEQ ID NO: 9123
  source 1..120: mol_type = other DNA

SEQ ID NO: 30719 - DNA, 120 bp, synthetic construct
  source 1..120: mol_type = other DNA
ctgcttggcccagggggcttcctgaggggagacagagcaacccctggaccccagcctcaaatccaggaccctgccaggcacaggcagggcaggaccagcccacgctgactacagggccgc

SEQ ID NO: 30720 - DNA, 120 bp, synthetic construct
  source 1..120: mol_type = other DNA
ggagggacagtctcaccatttccccagggcacgtggttgagtggggggaacgcccacttccctgggttagactgccagctcttcctagctggagaggagccctgcctctccgcccctgag

SEQ ID NO: 30721 - DNA, 120 bp, synthetic construct; identical to SEQ ID NO: 9124
  source 1..120: mol_type = other DNA

SEQ ID NO: 30722 - DNA, 120 bp, synthetic construct
  source 1..120: mol_type = other DNA
atgagtttcacagtgtgattttgattattaattgtgcaagcttttcctaataaacgtggagaatcacaggctgggctgggcactgctctcaccttggttcctggggcatccatggggtct

SEQ ID NO: 30723 - DNA, 120 bp, synthetic construct
  source 1..120: mol_type = other DNA
agtgcaatcgcgggaagccagggtttccagctaggacacagcaggtcgtgatccgggtcgggacactgcctggcagaggctgcgagcatggggccctggggctggaaattgcgctggacc

SEQ ID NO: 30724 - DNA, 120 bp, synthetic construct; identical to SEQ ID NO: 9125
  source 1..120: mol_type = other DNA

SEQ ID NO: 30725 - DNA, 120 bp, synthetic construct
  source 1..120: mol_type = other DNA
gcccaggatggagtgcagtggcacgatctcagctcactgcaacctccgcctcccgggtttaagcgagtctcctctctcagcctcccgaatagctgggattacaggcgcccaaccaccacg

SEQ ID NO: 30726 - DNA, 120 bp, synthetic construct
  source 1..120: mol_type = other DNA
cgcccggccgggaccctctcttctaactcggagctgggtgtggggacctccagtcctaaaacaagggatcactcccacccccgccttaagtccttctgggggcgagggcgactggagacc

SEQ ID NO: 30727 - DNA, 120 bp, synthetic construct
  source 1..120: mol_type = other DNA
acgggggccaccccctcccgcccctgcccccgcccctttggcccgccccccgaattccattgggtgtagtccaacaggccaccctcgagccactccccttgtccaatgtgaggcggtgga

SEQ ID NO: 30728 - DNA, 120 bp, synthetic construct; identical to SEQ ID NO: 9126
  source 1..120: mol_type = other DNA

SEQ ID NO: 30729 - DNA, 120 bp, synthetic construct
  source 1..120: mol_type = other DNA
cccggccaccctcaaggcctcggttccttacgaggttgaaacgttgcctcagaatctccccgcccctccttggtctgcagccgagatcttcagccacggtggggcagctatcccccggga

SEQ ID NO: 30730 - DNA, 120 bp, synthetic construct
  source 1..120: mol_type = other DNA
gggtgaaatggattagattttagatttccacaagaggctggttagtgcatgatcctgagttagagctttttaggtggctttaaattagttgcagagagacagcctcgccctagacaacag

SEQ ID NO: 30731 - DNA, 120 bp, synthetic construct
  source 1..120: mol_type = other DNA
gatggagagctttgaactgccttgaaattcacgctgtaactaacacaccagtttcctctgggaggccagagagggagggagggtgtaatgaaatacggatgattgttcttttatttttat

SEQ ID NO: 30732 - DNA, 120 bp, synthetic construct
  source 1..120: mol_type = other DNA
aggagtgagccaccgcgccccaccggggatgatgatgattgcaaacattctgccactcagttttacaaaagaaagagaggcactggattaatgtgtatctcactcaccaatcaacctctt

SEQ ID NO: 30733 - DNA, 120 bp, synthetic construct; identical to SEQ ID NO: 9127
  source 1..120: mol_type = other DNA

SEQ ID NO: 30734 - DNA, 120 bp, synthetic construct
  source 1..120: mol_type = other DNA
tttacaaagggaagttgttggaatctgaaccgcaagccttcacttagaccaaaatcaggcaacagcggtgagcgcagctccaaacgtgtcaatgactcacccaaatttgagtaagggagt

SEQ ID NO: 30735 - DNA, 120 bp, synthetic construct
  source 1..120: mol_type = other DNA
ctgttcctcattcctgctcttatctgtagacttcctccctgataagatccaattctagatgggtcggttgctccttgctttgatgggtgctttgatgggctttattattattattattat

SEQ ID NO: 30736 - DNA, 120 bp, synthetic construct; identical to SEQ ID NO: 9128
  source 1..120: mol_type = other DNA

SEQ ID NO: 30737 - DNA, 120 bp, synthetic construct
  source 1..120: mol_type = other DNA
gcaattctcctgcctcagcctcctgagtagctggaattataggcgcctgccacaacacccggctaatttttgtatttgtagtagagatggggtttcaccacgttggccaggctggtctcg

SEQ ID NO: 30738 - DNA, 120 bp, synthetic construct
  source 1..120: mol_type = other DNA
aagccaggggattttcgtttgtttgtttccccttcaaggaaatgattctagctacagttttgatttccttgtacaactgttttcagtagcacagggaaagaaaacatcgaaagcattcac

SEQ ID NO: 30739 - DNA, 120 bp, synthetic construct
  source 1..120: mol_type = other DNA
actcgtgacttgagagatcagagggctagaggactagaatttatagaggtgttttttttgtttgtttatttttgttcgagttgcccaggctggagtgcagtggcgcaatctcggctcact

SEQ ID NO: 30740 - DNA, 120 bp, synthetic construct
  source 1..120: mol_type = other DNA
caccatattggtcaagctggcctcgaactcctgacctcgtgatccacccgcctcagtttcccaaagtgctgggagtacaggcgtgagccgccgtgcccggcctttttgtgtttttgtgtt

SEQ ID NO: 30741 - DNA, 120 bp, synthetic construct; identical to SEQ ID NO: 9129
  source 1..120: mol_type = other DNA

SEQ ID NO: 30742 - DNA, 120 bp, synthetic construct
  source 1..120: mol_type = other DNA
cttttcctgaaattcaaatggtctaatatgaaaaacgccaaccttgcttgaaagaataagaaagaggtgcggtttcgttgggccgttgatgtttggaacaggactggttttgtccccttg

SEQ ID NO: 30743 - DNA, 120 bp, synthetic construct
  source 1..120: mol_type = other DNA
gtctggctgcgcctgtggcagtaaaatctgcctttattttttggaggcagggtcttgccctgtcgctcaggctgaagtgtgcagttatagctcactgcagcctccagcttctgtactcaa

SEQ ID NO: 30744 - DNA, 120 bp, synthetic construct
  source 1..120: mol_type = other DNA
gctgcccaggctggagtgcaatggcgcgatctcggctcaccgcaacctccacctcctggttcaagcgattctcctgcctcagcctcctgagtagctgggattacaggcatgcaccaccac

SEQ ID NO: 30745 - DNA, 120 bp, synthetic construct; identical to SEQ ID NO: 9130
  source 1..120: mol_type = other DNA

SEQ ID NO: 30746 - DNA, 120 bp, synthetic construct
  source 1..120: mol_type = other DNA
attctcgctttgttgcctcggttggtctcaaactcctgggctcaagcagtcctccctcctcagcctcccaaggtgctggggaaatccacttttgaaacattgtctggagagttgcccagg

SEQ ID NO: 30747 - DNA, 120 bp, synthetic construct
  source 1..120: mol_type = other DNA
gttttgtttttcttcagggaaaggtttttattgttctttatccctccttaaaggaccttcaggtgttactgacattcccggtctacccagtggcacatttagtttgtaagctgggccctc

SEQ ID NO: 30748 - DNA, 120 bp, synthetic construct
  source 1..120: mol_type = other DNA
cctttttatttatcgcaagcctcctggaatctcaattgctttttgcccacccggtgtgtcagcacaagaaatgagtcatttcctcctttaagcacagttgaaattgagctgtgagtcagt

SEQ ID NO: 30749 - DNA, 120 bp, synthetic construct; identical to SEQ ID NO: 9131
  source 1..120: mol_type = other DNA

SEQ ID NO: 30750 - DNA, 120 bp, synthetic construct
  source 1..120: mol_type = other DNA
ctgagcagctgggattacaggcgcccgccaccacgcccggctaatttttgtatttttagtagagacggggtttcaccatgttggccaggctggtctcgaactcctgaactcaggtgatcc

SEQ ID NO: 30751 - DNA, 120 bp, synthetic construct
  source 1..120: mol_type = other DNA
tacagatcaggaaactgagtcccagaaggatttagtcagttacccaagttgttctagttaaatggcctggaaagccagtgaagcccaggattgtctatctaacccccttactactctaac

SEQ ID NO: 30752 - DNA, 120 bp, synthetic construct; identical to SEQ ID NO: 9132
  source 1..120: mol_type = other DNA

SEQ ID NO: 30753 - DNA, 120 bp, synthetic construct
  source 1..120: mol_type = other DNA
agaaaaaaagacatagatacatcttttaaagttaggttgtatgttaattacctacaactcagtttcaactgtgcttaaaggaggaaatgactcatttcttgctacatatcaaattagccc

SEQ ID NO: 30754 - DNA, 120 bp, synthetic construct
  source 1..120: mol_type = other DNA
attggcaggagagaaaaacatattttcagaagctgcaggcataggaagacttggctggggttgaaggatccacttccaagatggcgcactcagtggctcttggctggaggcctcagttcc

SEQ ID NO: 30755 - DNA, 120 bp, synthetic construct
  source 1..120: mol_type = other DNA
tgtcgtctctacattttcctatcagaagcaagtcattaaaagtccagtgccactccaggggagacgaattaggctctgccttctgaaaggattatcacagaagatgcggtcctatattct

SEQ ID NO: 30756 - DNA, 120 bp, synthetic construct; identical to SEQ ID NO: 9133
  source 1..120: mol_type = other DNA

SEQ ID NO: 30757 - DNA, 120 bp, synthetic construct
  source 1..120: mol_type = other DNA
agccaggatggtctcgatctcctgatttggtgatccgcccaccttggcctcccaaagtttcaaccatcgatcagaacttattgatgtacttatgtagctaggcacggtggcgcgtgcctg

SEQ ID NO: 30758 - DNA, 120 bp, synthetic construct
  source 1..120: mol_type = other DNA
ctcaaaaacaaaaaacaaacccttgtatgtgattttcctggatagcatctgttacatcttcacaaagataaaaagtcagacttggctgggcatggtggctcacacctgtaatcccagcac

SEQ ID NO: 30759 - DNA, 120 bp, synthetic construct
  source 1..120: mol_type = other DNA
gtattcccaagctactcaggaagctaaggcaggagaatcacttgaacccagaggtggaggtttgcagtgagttgagattgtgccattgcactccagcctgggcgacagagtgagactctg

SEQ ID NO: 30760 - DNA, 120 bp, synthetic construct; identical to SEQ ID NO: 9134
  source 1..120: mol_type = other DNA

SEQ ID NO: 30761 - DNA, 120 bp, synthetic construct
  source 1..120: mol_type = other DNA
ggtgacagagtgagactctgtctgaaaataataataataataatttgttattgcttttattgccttagtttacatagggaatcaaagtttatactttgatttataaaagttgctttgatt

SEQ ID NO: 30762 - DNA, 120 bp, synthetic construct
  source 1..120: mol_type = other DNA
gccagcctaggcaacatagtgagaccttgtctctacaaaaaattccaacattagctgggcatggtggcatgtgcctgtagtcccatttatttggggggctgaggcaggaggatcacttga

SEQ ID NO: 30763 - DNA, 120 bp, synthetic construct
  source 1..120: mol_type = other DNA
aatatataaaactaaatgcaggccaagtgtggtggcatatacctataatcacaacactttgggaggctgaggtgggaggattgcttgagcccaagagttcaagaccagcctaggtaacac

SEQ ID NO: 30764 - DNA, 120 bp, synthetic construct; identical to SEQ ID NO: 9135
  source 1..120: mol_type = other DNA

SEQ ID NO: 30765 - DNA, 120 bp, synthetic construct
  source 1..120: mol_type = other DNA
cttttgatctgatcttcagatacatgattatcttcactgctaaatttgtgttctctggcctctacatttataatttctcataattctttatctaagtatttcttccctacctactgaaga

SEQ ID NO: 30766 - DNA, 120 bp, synthetic construct
  source 1..120: mol_type = other DNA
ggttttgtttgttttgttttaacttttaaaaaaattataatagataaagggtctcactacgttgtccaggctgatctcatactcctgggctcaagcaatccacccacctctgcctcccaa

SEQ ID NO: 30767 - DNA, 120 bp, synthetic construct
  source 1..120: mol_type = other DNA
tctgcctcccaggttcaagtgattctcctgcctcagcctcctgagtagctgggattacaggcatgtgccaccacgcccagctaattttgtatttttagtagagacggggtttcaccatgt

SEQ ID NO: 30768 - DNA, 120 bp, synthetic construct
  source 1..120: mol_type = other DNA
gccaccatgcccagctgtagtacaggttttaatatgctaaatactcttcctttctttattaatgtgcatggaagttctaatatttttttcccataccccagagagtccatattttggaat

SEQ ID NO: 30769 - DNA, 120 bp, synthetic construct; identical to SEQ ID NO: 9136
  source 1..120: mol_type = other DNA

SEQ ID NO: 30770 - DNA, 120 bp, synthetic construct
  source 1..120: mol_type = other DNA
acgggaaatgcatctcctacaagtgggtctgcgatggcagcgctgagtgccaggatggctctgatgagtcccaggagacgtgctgtgagtcccctttgggcatgatatgcatttattttt

SEQ ID NO: 30771 - DNA, 120 bp, synthetic construct
  source 1..120: mol_type = other DNA
cacgattcttaacccctttttgatgatggcggctggaaaagtggccagtggattttgatgtattcaatcatgaattaggaggtggggagagaatgaattattggagctttccttaaagcc

SEQ ID NO: 30772 - DNA, 120 bp, synthetic construct; identical to SEQ ID NO: 9137
  source 1..120: mol_type = other DNA

SEQ ID NO: 30773 - DNA, 120 bp, synthetic construct
  source 1..120: mol_type = other DNA
acgccatcctcctgcctcagcctcccgagtagctgggactacaggcaccctccaccacatccggctaattttttgtatctttagtagagatggggtttcaccatgttagccgggatggtc

SEQ ID NO: 30774 - DNA, 120 bp, synthetic construct
  source 1..120: mol_type = other DNA
aggctggagtccagtggtaccatcatacttcactgcagccttgacctcttgggctcaagtgattctcttgcctcgaactcccaaagtattgggattacaggtgtgagccaccgcactcag

SEQ ID NO: 30775 - DNA, 120 bp, synthetic construct
  source 1..120: mol_type = other DNA
cagaaaggcagaaagattgctttataaagcccaggagtttgagggccacctgggtggcatagctagacctcatctctaaaaaataagtaataaataaatatttgtttttgtttttttctt

SEQ ID NO: 30776 - DNA, 120 bp, synthetic construct
  source 1..120: mol_type = other DNA
cctcagcctcccgagtagctgggactacaggcgcccactaccacgcccagctaattttttgtatttttagtagagatggggtttcaccacgttagccaggatggtctcaatctcctgacc

SEQ ID NO: 30777 - DNA, 120 bp, synthetic construct; identical to SEQ ID NO: 9138
  source 1..120: mol_type = other DNA

SEQ ID NO: 30778 - DNA, 120 bp, synthetic construct
  source 1..120: mol_type = other DNA
gagaccatcctggctaacacggtgaaaccccgtctctactaaaaaaatacaaaaaattagccaggcgtggtggcgggtgcctgtagtcccagctactcaggaggctgaggcaggagaatg

SEQ ID NO: 30779 - DNA, 120 bp, synthetic construct
  source 1..120: mol_type = other DNA
caaagttctggggttttcctttgcaaagacaggattggcaaggccagtgggtcttttttgtgtgtgtgtgtgtgacggagtctcactctgccacccaggctggagtgcaatggcaggatc

SEQ ID NO: 30780 - DNA, 120 bp, synthetic construct
  source 1..120: mol_type = other DNA
acagggtttcactatattggccaggctggtcttgaacccctgacctcacgtgatccacccgccttggcctcccaaagtgctgggattacaggcgtgagccactgtgctcggcctcagtgg

SEQ ID NO: 30781 - DNA, 120 bp, synthetic construct; identical to SEQ ID NO: 9139
  source 1..120: mol_type = other DNA

SEQ ID NO: 30782 - DNA, 120 bp, synthetic construct
  source 1..120: mol_type = other DNA
ctacctcttcgggtttgtcacgcacagtcagggaggctgtccctgccgagggctagccacctggcacacacactggcaagccgctgtgattcccgctggtcgtgatccccgtgatcctgt

SEQ ID NO: 30783 - DNA, 120 bp, synthetic construct
  source 1..120: mol_type = other DNA
aagggaaatggactttgaagctgggcgtcttcttggctgtcttaatacaagtggcacatccaaatccaaaaccccgaaattcaaagtcttgagcacccgaaattctgaaacgtcttgagc

SEQ ID NO: 30784 - DNA, 120 bp, synthetic construct
  source 1..120: mol_type = other DNA
aaggcagatagggtcaggcacggtggctcacccctgtaatcccagccttttgagaggctgaggcgggtggatcacttgaggtcaggagttcgagagcagcctggccaacacggtgaaacc

SEQ ID NO: 30785 - DNA, 120 bp, synthetic construct; identical to SEQ ID NO: 9140
  source 1..120: mol_type = other DNA

SEQ ID NO: 30786 - DNA, 120 bp, synthetic construct
  source 1..120: mol_type = other DNA
cctcttcagcgcacagcacaagcaccattctataaaatctccagcaagcggccaggtgcagtggctcatacctgtaatcccagcattttgggagactgaggcgggcggatcacctgaggt

SEQ ID NO: 30787 - DNA, 120 bp, synthetic construct
  source 1..120: mol_type = other DNA
ggagaatcgcttgaacccgggaggtggaagttgcagtgagccgagatcttgccatcgcactccagcctgggggacaagagtgagacttcgtctcaaaaaaaaaaaaaaaaattcccagca

SEQ ID NO: 30788 - DNA, 120 bp, synthetic construct
  source 1..120: mol_type = other DNA
ttaaaatttctttcttttttgagatggagtctcactctgtttgcccaggctggagttcagtggtgcaatctcagctcactgcaacctctacctactgggttcaagcgattctcctgcctc

SEQ ID NO: 30789 - DNA, 120 bp, synthetic construct
  source 1..120: mol_type = other DNA
gatcctcccacctcagcctcccaaagcgctaggattacggccatgagccactgaggccggctgcacctacaactgtcttgataaattcttacccccacaccactggtccagatagtcagt

SEQ ID NO: 30790 - DNA, 120 bp, synthetic construct; identical to SEQ ID NO: 9141
  source 1..120: mol_type = other DNA

SEQ ID NO: 30791 - DNA, 120 bp, synthetic construct
  source 1..120: mol_type = other DNA
gcgtccccggctatagaatgggctggtgttgggagacttcacacggtgatggtggtctcggcccatccatccctgcagcccccaagacgtgctcccaggacgagtttcgctgccacgatg

SEQ ID NO: 30792 - DNA, 120 bp, synthetic construct
  source 1..120: mol_type = other DNA
cctgcatcccccagctgtgggcctgcgacaacgaccccgactgcgaagatggctcggatgagtggccgcagcgctgtaggggtctttacgtgttccaaggggacagtagcccctgctcgg

SEQ ID NO: 30793 - DNA, 120 bp, synthetic construct
  source 1..120: mol_type = other DNA
gggcggggcgtcctatcacctgtccctgggctcccccaggtgtgggacatgcagtgatttaggtgccgaagtggatttccaacaacatgccaagaaagtattcccatttcatgtttgttt

SEQ ID NO: 30794 - DNA, 120 bp, synthetic construct; identical to SEQ ID NO: 9142
  source 1..120: mol_type = other DNA

SEQ ID NO: 30795 - DNA, 120 bp, synthetic construct
  source 1..120: mol_type = other DNA
tcaagccattctcctgcctcagcctcccaagtagcgcggattacaggcatgtgccaccacctccggctatttttttttctatttagtagagatggggtttcaccatgttagtcaggctgg

SEQ ID NO: 30796 - DNA, 120 bp, synthetic construct
  source 1..120: mol_type = other DNA
ccaggttgaagtaaggtggcacgattatggctcactgcggccttgatctccttggctcaagcgatcctctcacttcagcctctcaagcagttggaaccacaggctgtaccaccaagcctg

SEQ ID NO: 30797 - DNA, 120 bp, synthetic construct; identical to SEQ ID NO: 9143
  source 1..120: mol_type = other DNA

SEQ ID NO: 30798 - DNA, 120 bp, synthetic construct
  source 1..120: mol_type = other DNA
caaatgatttgtgaagccagagggcgcttccctggtcagctctgcaccagctgtgcgtctgtgggcaagtgacttgacttctcagagcctcacttccttttgttttgagacggagtctcg

SEQ ID NO: 30799 - DNA, 120 bp, synthetic construct
  source 1..120: mol_type = other DNA
ccacgcccggctaattttttgtatttttattagagacagggtttctccatgttggccaggctggtcttgaactcctggtctcaggtgatccacccgcctcggcctcccaaagtgctagga

SEQ ID NO: 30800 - DNA, 120 bp, synthetic construct
  source 1..120: mol_type = other DNA
ccgacgcgttttcttaatgaatccatttgcatgcgttcttatgtgaataaactattatatgaatgagtgccaagcaaactgaggctcagacacacctgaccttcctccttcctctctctg

SEQ ID NO: 30801 - DNA, 120 bp, synthetic construct; identical to SEQ ID NO: 9144
  source 1..120: mol_type = other DNA

SEQ ID NO: 30802 - DNA, 120 bp, synthetic construct
  source 1..120: mol_type = other DNA
ctcctgagtagctgggattacaggcgcccaccaccaagcccgggtaattttttgtatgtttagtagagatggggtttcactatgttggccaggctggtgttgaactcctgacctcatgat

SEQ ID NO: 30803 - DNA, 120 bp, synthetic construct
  source 1..120: mol_type = other DNA
gaagctgaggcaggcagatcacgagggcaggagattgagaccatcctggctaatacggtgaaaccccatctctactaaaactacaaaaaattagccgggtgtggtggcaggcacctgtga

SEQ ID NO: 30804 - DNA, 120 bp, synthetic construct
  source 1..120: mol_type = other DNA
aaaaaaaaaaaaaaaaaaaaagcgaattctgaaatacatgaattcttttccttagatgcctgcttctgtcttgaggtttgttgttgttatttcgaaacagagtcttgctctgtcgctcag

SEQ ID NO: 30805 - DNA, 120 bp, synthetic construct
  source 1..120: mol_type = other DNA
aatttttgtatttttagtagagatggggtttcaccatgttggccaggctggcctcgaactcctgacctcgagtgatctgcccgcctcctgaagtgctgggattacaggcgtgagccacct

SEQ ID NO: 30806 - DNA, 120 bp, synthetic construct; identical to SEQ ID NO: 9145
  source 1..120: mol_type = other DNA

SEQ ID NO: 30807 - DNA, 120 bp, synthetic construct
  source 1..120: mol_type = other DNA
acagaacgcaaaccaatacacgtggctgtgggcccagaaaatgttatttatggacacaaaaattggaatttcatataactgttttgtgtcatgaaaatgatttccctttttatttttatt

SEQ ID NO: 30808 - DNA, 120 bp, synthetic construct
  source 1..120: mol_type = other DNA
accatcctggccaacacagtgaaaccccgtctctactaaaaatacaaaaaattaaccaggcttggtggcgcgcgtctgtagtcccagctgctcaggaggctgaggcaggagaatcgcttg

SEQ ID NO: 30809 - DNA, 120 bp, synthetic construct; identical to SEQ ID NO: 9146
  source 1..120: mol_type = other DNA

SEQ ID NO: 30810 - DNA, 120 bp, synthetic construct
  source 1..120: mol_type = other DNA
caacatcacaaccaccatctccagaacttttttttttttttttattctttttgagacagagtctcactcgtcgcacgggctggagtgcagtggtgcgatctcggttcactgcaacctcca

SEQ ID NO: 30811 - DNA, 120 bp, synthetic construct
  source 1..120: mol_type = other DNA
tgttggccaggctggtctcgaactcctgacctcaagtgatcctcccacctcagcctcccaaagtgctgggaatacaggcatgagccactgcgcccggccccagaactcttttatcttccc

SEQ ID NO: 30812 - DNA, 120 bp, synthetic construct
  source 1..120: mol_type = other DNA
atcagacagcattttccttttttgactggcttatttcactgagccaagtgcggtggcacacgcctgtaatcccaaaactttgggagaccgaggcgggcgcatcacctgaggtcaggagtt

SEQ ID NO: 30813 - DNA, 120 bp, synthetic construct
  source 1..120: mol_type = other DNA
cttgtacccaggaggcggaggtcgcagtgagccgagatcgtgccattacactccagcctgggcaacaagagtgaaactccgtctctcctaaaaatacaaaaaaattagctgggcatggtg

SEQ ID NO: 30814 - DNA, 120 bp, synthetic construct; identical to SEQ ID NO: 9147
  source 1..120: mol_type = other DNA

SEQ ID NO: 30815 - DNA, 120 bp, synthetic construct
  source 1..120: mol_type = other DNA
aagtgtgcttgaaagcagttaggagggtttcatgagattccacctgcatggaaaactatcattggctggccagagtttcttgcctctggggattagtaattaagaaatttcaggccgggt

SEQ ID NO: 30816 - DNA, 120 bp, synthetic construct
  source 1..120: mol_type = other DNA
tagccgggcttggtggtgcatgcctataatcccagctactcaggaggctgaggcaggagaatcacttgaacctgggaggtggaggttgtggtgagccaagatcgtgccattgcactccag

SEQ ID NO: 30817 - DNA, 120 bp, synthetic construct; identical to SEQ ID NO: 9148
  source 1..120: mol_type = other DNA

SEQ ID NO: 30818 - DNA, 120 bp, synthetic construct
  source 1..120: mol_type = other DNA
tgccagtgtgaggaaggcttccagctggacccccacacgaaggcctgcaaggctgtgggtgagcacgggaaggcggcgggtgggggcggcctcaccccttgcaggcagcagtggtggggg

SEQ ID NO: 30819 - DNA, 120 bp, synthetic construct
  source 1..120: mol_type = other DNA
ctgcatatgtcctagtttttgggaatatccagttaacggaaccctcagccctactggtggaacaggaaccggctttcctttcagggacaacctggggagtgacttcaaggggttaaagaa

SEQ ID NO: 30820 - DNA, 120 bp, synthetic construct
  source 1..120: mol_type = other DNA
gctgggacctcaggtgcatgccactatgcctggctaattttcttttttctttttttttttttttcgagacggagtctcgctctgttgcccaggctggagtgcagtggcaggatctcggct

SEQ ID NO: 30821 - DNA, 120 bp, synthetic construct
  source 1..120: mol_type = other DNA
ggtttcactgtgttagccaggatggtctcgatctcctgacttcgtgatccgcccacctcggccttccaaagtgctcggattacaggcgtgagccactgcgcccagccgctaattttcata

SEQ ID NO: 30822 - DNA, 120 bp, synthetic construct; identical to SEQ ID NO: 9149
  source 1..120: mol_type = other DNA

SEQ ID NO: 30823 - DNA, 120 bp, synthetic construct
  source 1..120: mol_type = other DNA
ctgaaacctccacctcccaggttccagcaattctcctgcctcacccttctgagtagctgggattacaggttccggctaccaaacctggctagtttttgtatgtttagtagagacagggtt

SEQ ID NO: 30824 - DNA, 120 bp, synthetic construct
  source 1..120: mol_type = other DNA
tctcattgtcttgcccaggctagccttatgctcctagcctcaagtgatcctcctccctcagcctcccaaagtgctgggattacaggtgggcgccactgtgcctgttcccgttgggaggtc

SEQ ID NO: 30825 - DNA, 120 bp, synthetic construct; identical to SEQ ID NO: 9150
  source 1..120: mol_type = other DNA

SEQ ID NO: 30826 - DNA, 120 bp, synthetic construct
  source 1..120: mol_type = other DNA
tggcgctgatgcccttctctcctcctgcctcagcacccagcttgacagagcccacggcgtctcttcctatgacaccgtcatcagcagagacatccaggcccccgacgggctggctgtgga

SEQ ID NO: 30827 - DNA, 120 bp, synthetic construct
  source 1..120: mol_type = other DNA
cgtggtggatcctgttcatgggtgcgtatccacgacgctgagggctgcagagggaatggagggagcaggaaggagcttcaggaactggttagtgggctgggcatggtggctcaaagcacc

SEQ ID NO: 30828 - DNA, 120 bp, synthetic construct
  source 1..120: mol_type = other DNA
tgtaatcccagctgctcgggaggctgaggcaggagaatcacttgaacctgggagatggaggttgcagtgagccaagacagccccactgcactccagcctgggtgacagagtgagactccg

SEQ ID NO: 30829 - DNA, 120 bp, synthetic construct
  source 1..120: mol_type = other DNA
ccctggcaggaagcatcgcccctgccacctgcccggtgtactctgtacctgtcaggtgacatctgctacctaagcacgtgagaggtggcatttcacagtttcagtgtggtgctgacaacc

SEQ ID NO: 30830 - DNA, 120 bp, synthetic construct; identical to SEQ ID NO: 9151
  source 1..120: mol_type = other DNA

SEQ ID NO: 30831 - DNA, 120 bp, synthetic construct
  source 1..120: mol_type = other DNA
cggggtttcaccgcgttagccaggatggtctaaatctcctgaccctgtgatccacccgcctcggcctccctaagtgcttggattacaagcgtgagccaccacgcccggccccctttttat

SEQ ID NO: 30832 - DNA, 120 bp, synthetic construct
  source 1..120: mol_type = other DNA
actaattaggattacaagcatgtaccaccatgcctgactaattttttgtatttttagtagagactgggtttcaccatgttggctaggctggtctcgaacccttagcctcaagtaatctgc

SEQ ID NO: 30833 - DNA, 120 bp, synthetic construct; identical to SEQ ID NO: 9152
  source 1..120: mol_type = other DNA

SEQ ID NO: 30834 - DNA, 120 bp, synthetic construct
  source 1..120: mol_type = other DNA
ggaactacaggtgaacaccactgtgcccagctaatttattttatttttagtagagatgaggtctcactatgttgcccaggctggtcttgacctcctagcctcaagcaatcctcctgcctt

SEQ ID NO: 30835 - DNA, 120 bp, synthetic construct
  source 1..120: mol_type = other DNA
tgtgatcatagctcactgtagcctcaacttcctgggctcaagcaatcctcttgatttcagcctcccgggcctggccagcatggtgaaaccccgtctctactaaaaatacaaaaatgtagc

SEQ ID NO: 30836 - DNA, 120 bp, synthetic construct
  source 1..120: mol_type = other DNA
ggcaacagagacagactctgtctcaaaaaaaaaaaaaaaaaacccaaacaagccacatttggagtttggggttcccagcaggactatttcccaagcctgagcctggctgtttcttccaga

SEQ ID NO: 30837 - DNA, 120 bp, synthetic construct; identical to SEQ ID NO: 9153
  source 1..120: mol_type = other DNA

SEQ ID NO: 30838 - DNA, 120 bp, synthetic construct
  source 1..120: mol_type = other DNA
ttctttttttgagatgaggtcttggtctgtcacccaggctggagtgcactggcgcaatcgtagctcactgcagcctccacctcccaggctcaagtgatcctcctgcctcaccctcctgag

SEQ ID NO: 30839 - DNA, 120 bp, synthetic construct
  source 1..120: mol_type = other DNA
cgcctcagccttccaaactgctgggattacaggcgtgggccaccgtacccagcctccttgaagtttttctgacctgcaactcccctacctgcccattggagagggcgtcacaggggaggg

SEQ ID NO: 30840 - DNA, 120 bp, synthetic construct
  source 1..120: mol_type = other DNA
cagcacgtgacctctccttatccacttgtgtgtctagatctcctcagtggccgcctctactgggttgactccaaacttcactccatctcaagcatcgatgtcaacgggggcaaccggaag

SEQ ID NO: 30841 - DNA, 120 bp, synthetic construct; identical to SEQ ID NO: 9154
  source 1..120: mol_type = other DNA

SEQ ID NO: 30842 - DNA, 120 bp, synthetic construct
  source 1..120: mol_type = other DNA
tccacctcccaggttcaagtgattctcctgtctcaggctccccagtagctgggattacaggcatgcaccaccaccatgcccggctaattttgtatttttagtagagacggagtttctcca

SEQ ID NO: 30843 - DNA, 120 bp, synthetic construct
  source 1..120: mol_type = other DNA
tcttcttctttttttttttctaagagacaggatctcactctgtccccaggcaggagtgcagtgctgtgatcatagctcactgcagccttaacctcctgggctcaagtgatcttcccacct

SEQ ID NO: 30844 - DNA, 120 bp, synthetic construct
  source 1..120: mol_type = other DNA
ttggctcactgcaacctctgcctcccaggttcaagcgattctcctgcctcagcctcctgagtagttgagattacaggcatgtgtgccatcatacctggctgatttttgtattttttttta

SEQ ID NO: 30845 - DNA, 120 bp, synthetic construct; identical to SEQ ID NO: 9155
  source 1..120: mol_type = other DNA

SEQ ID NO: 30846 - DNA, 120 bp, synthetic construct
  source 1..120: mol_type = other DNA
gtcattcgcccacctctgcctcccaaagtgctgggattacaggcgtgagccaccgtgcccggtggtttgtattctttttactgagagtcgtgaaaggcagtgatcctctgtcacatgtga

SEQ ID NO: 30847 - DNA, 120 bp, synthetic construct
  source 1..120: mol_type = other DNA
gggaagtagcaggccctagatagagccatcgtggggaaaccctgctctaaggaaatggcgctattttataaccccacgttcctggcatgattaccaacagccaaaagtggagtcccccca

SEQ ID NO: 30848 - DNA, 120 bp, synthetic construct
  source 1..120: mol_type = other DNA
gaggcaggaggatcgcttgagtccaggagtgtgagaccgagaccagcctggccaacatgacgaaactctgtctctacaaaaaatacaaaaagtaggccaggcacggtggttcacgcctgt

SEQ ID NO: 30849 - DNA, 120 bp, synthetic construct
  source 1..120: mol_type = other DNA
gtggtggcaggcgcctgtagtcccagctactcgggaggctgaggcgggagaatggcgtgaacccgggaggcggagcttgcagtgagccaagatcgcgccactgcactccagcctgggtga

SEQ ID NO: 30850 - DNA, 120 bp, synthetic construct; identical to SEQ ID NO: 9156
  source 1..120: mol_type = other DNA

SEQ ID NO: 30851 - DNA, 120 bp, synthetic construct
  source 1..120: mol_type = other DNA
gccaggtgtggtggttcatgcctgtaatcccagcactttgggaggtcagagggaggtggatcatgaggtcagcagttcgagaccagccaggccaacatggtgaaaccccatctctactaa

SEQ ID NO: 30852 - DNA, 120 bp, synthetic construct
  source 1..120: mol_type = other DNA
actgcactccagcctggacgacagagtgagacttcgtctcaaaaaaaaaaccaaaaaaaaaattagctgtgggtcaggcactgtggctcacgcctgtaatcccagcactttgggagaccg

SEQ ID NO: 30853 - DNA, 120 bp, synthetic construct
  source 1..120: mol_type = other DNA
tactcgggaggctgaagcaagagaatcgtttgaacccaggaggtggacgttgcagtgagccgagattgggccactgtactccagcctgggcaacaaaagtgaaactctgtctgaaacaaa

SEQ ID NO: 30854 - DNA, 120 bp, synthetic construct; identical to SEQ ID NO: 9157
  source 1..120: mol_type = other DNA

SEQ ID NO: 30855 - DNA, 120 bp, synthetic construct
  source 1..120: mol_type = other DNA
tgccctgactccgcttcttctgccccaggagtgaactggtgtgagaggaccaccctgagcaatggcggctgccagtatctgtgcctccctgccccgcagatcaacccccactcgcccaag

SEQ ID NO: 30856 - DNA, 120 bp, synthetic construct
  source 1..120: mol_type = other DNA
tctctgctcatctgtcaaatgggtacctcaaggtcgttgtaaggactcatgagtcgggataaccatacttttcttggatggacacatcagcaccgggcttgacatttacccagttcccct

SEQ ID NO: 30857 - DNA, 120 bp, synthetic construct
  source 1..120: mol_type = other DNA
ttggctcactgctacctctcccactgggttcaagcaattctcctgcctcagcctcccaagtagctgggattacaagcatgcgccaccatgcctggctaagttttgtatttttagtacaga

SEQ ID NO: 30858 - DNA, 120 bp, synthetic construct; identical to SEQ ID NO: 9158
  source 1..120: mol_type = other DNA

SEQ ID NO: 30859 - DNA, 120 bp, synthetic construct
  source 1..120: mol_type = other DNA
ctgaaaaaaacaaaaaaagaaaaaggaaaaagaaacaatacgatcacaaagtagatattcatagtgtttattttcagtactcttttttttttttttttttttttttgagacggagtcttg

SEQ ID NO: 30860 - DNA, 120 bp, synthetic construct
  source 1..120: mol_type = other DNA
ctcagcctccccagtagctgggactataggcacgtcccactacgcccagctaattttttgtattttttagtagagatggggtttcactatgttagccaggatggtctcgatctcctgacc

SEQ ID NO: 30861 - DNA, 120 bp, synthetic construct
  source 1..120: mol_type = other DNA
gcaatggtgtgatctcggctcactgcaacctctgcctcctgggttcaagcaattctcctgcctcagcctcccgagtagctgggattacaggcacctgccaccacgcctggctaatttttg

SEQ ID NO: 30862 - DNA, 120 bp, synthetic construct; identical to SEQ ID NO: 9159
  source 1..120: mol_type = other DNA

SEQ ID NO: 30863 - DNA, 120 bp, synthetic construct
  source 1..120: mol_type = other DNA
ttagccaggatggtctcgatctcctgactttgtgatccgcccgcctcggcctcccaaagtgctgggattacaggcgtgagccaccatgccaggcttttttttttttttttttttttgaga

SEQ ID NO: 30864 - DNA, 120 bp, synthetic construct
  source 1..120: mol_type = other DNA
ggggcccgccaccacactcggctaatttttttgtatttttagtagagacggggtttcaccatgttagccaggctggtcttgaactcctaacctcaggcgattcacctgcctcggcctccc

SEQ ID NO: 30865 - DNA, 120 bp, synthetic construct; identical to SEQ ID NO: 9160
  source 1..120: mol_type = other DNA

SEQ ID NO: 30866 - DNA, 120 bp, synthetic construct
  source 1..120: mol_type = other DNA
tgaccaggctagtcttaaactcctggactcactcaagagatcctcctgccttggcctcccaaggtcatttgagactttcgtcattaggcgcacacctatgagaagggcctgcaggcacgt

SEQ ID NO: 30867 - DNA, 120 bp, synthetic construct
  source 1..120: mol_type = other DNA
ccgacctgttcccgacacctcccggctgcctggggccacccctgggctcaccacggtggagatagtgacaatgtctcaccaaggtaaagactgggccctccctaggcccctcttcaccca

SEQ ID NO: 30868 - DNA, 120 bp, synthetic construct
  source 1..120: mol_type = other DNA
ctatctgtaaagtgggtctaataacagttcttgccctctttgcaaggattaaatgggccaaatcatatgaggggccaggtccttcaggctcctggttcccaaagtcagccacgcaccgtg

SEQ ID NO: 30869 - DNA, 120 bp, synthetic construct; identical to SEQ ID NO: 9161
  source 1..120: mol_type = other DNA

SEQ ID NO: 30870 - DNA, 120 bp, synthetic construct
  source 1..120: mol_type = other DNA
ctcccgagtagctgggattacaggcatgcgccaccacgctcggctaattttgtatttttagtacagaaggggcttctctgttggtcaggctggtcgtgaactctcaacctcaggtgagcc

SEQ ID NO: 30871 - DNA, 120 bp, synthetic construct
  source 1..120: mol_type = other DNA
ctgtaacctccgcttcccaggttcaagtgattcttctgccgcagcctcccatgtagagtagctgggattacaggcacccgccaccatgcctggctaattcttgcatttttagtagagatg

SEQ ID NO: 30872 - DNA, 120 bp, synthetic construct
  source 1..120: mol_type = other DNA
ttctttggtggctcacacctgtaatctcagcactttgggaggccaaggtgggagaatggcttgagcccaggagttcaagtccagcctgggcaacatagcaagaccctatctctactacaa

SEQ ID NO: 30873 - DNA, 120 bp, synthetic construct
  source 1..120: mol_type = other DNA
tggagtgcagtgtcgccatcttggctcactgcaacctccgcctcccaggtccaagtgattctcctgcttcagcctcccgagtagctgggattacaggcacccaccaccatacccagctaa

SEQ ID NO: 30874 - DNA, 120 bp, synthetic construct; identical to SEQ ID NO: 9162
  source 1..120: mol_type = other DNA

SEQ ID NO: 30875 - DNA, 120 bp, synthetic construct
  source 1..120: mol_type = other DNA
aatttttttgtagagacagggtttcaccttgtggcccagacttgtctctaactccagggctcaagcgatctgcccaccttggcctcccaaagtgctgagattaatgcaatttaaaaaatt

SEQ ID NO: 30876 - DNA, 120 bp, synthetic construct
  source 1..120: mol_type = other DNA
tactaaaaaaatacaaaaattacctgggcacagtggtgggtgcctgtaatcccagctacttgggatgctgagggtggagaattgcttgaacctgggaggcagaagttgcagtaagccaag

SEQ ID NO: 30877 - DNA, 120 bp, synthetic construct; identical to SEQ ID NO: 2066
  source 1..120: mol_type = other DNA

SEQ ID NO: 30878 - DNA, 120 bp, synthetic construct
  source 1..120: mol_type = other DNA
tagcgagacccccatctctaaaaataaaaataatgcattagaatattattggattcctgggcagggcacagtggctcacacctgtaatcccagcactttgggaggctgaggtgggtggat

SEQ ID NO: 30879 - DNA, 120 bp, synthetic construct
  source 1..120: mol_type = other DNA
ctgaagcacgagaatcgcttgaatccaggaggcggaggttgcagtgagctgagattgcgccattgcactccagcctggaggacaagagtgaaactccattcccctctgcaaagaaaagga

SEQ ID NO: 30880 - DNA, 120 bp, synthetic construct
  source 1..120: mol_type = other DNA
gtcattcgtttgtccaccagagggcgcccaaactgctttgagctgctgggaaatggtgctcctagacttttagcaaacaaacaaaaaaaaatggcacatcggcaaatttcagaccattct

SEQ ID NO: 30881 - DNA, 120 bp, synthetic construct; identical to SEQ ID NO: 9164
  source 1..120: mol_type = other DNA

SEQ ID NO: 30882 - DNA, 120 bp, synthetic construct
  source 1..120: mol_type = other DNA
tatgtagagacgagggggatctggctatattgcctagattggtctcaaattcctggcctcaagtgatcctcctgccttggtctactaatgtgctgcgattacaggcatgagccaccgtgc

SEQ ID NO: 30883 - DNA, 120 bp, synthetic construct
  source 1..120: mol_type = other DNA
gcaggacaatcagcttctgtgccattcaacctcaggactgagcatgctgggcattgtggggtccgaaggtggctcccctgtccccttcaaaataccctctttttcttttcttcttttttt

SEQ ID NO: 30884 - DNA, 120 bp, synthetic construct
  source 1..120: mol_type = other DNA
ctgagtagctgggattacaggtgcccaccgccacagctggctaatttttgtatttttagtagagacagggtttcaccgtgttggccaggctggtcttgaactcctgacctcaggcaacct

SEQ ID NO: 30885 - DNA, 120 bp, synthetic construct
  source 1..120: mol_type = other DNA
tcttgactcactgcaactccatttcccgggttcaagtgattctcctccctcagcctcccaagtagctgggattacaggtgcatgccaccacggccagctaattttgtatttttagtagag

SEQ ID NO: 30886 - DNA, 120 bp, synthetic construct; identical to SEQ ID NO: 9165
  source 1..120: mol_type = other DNA

SEQ ID NO: 30887 - DNA, 120 bp, synthetic construct
  source 1..120: mol_type = other DNA
ctgtttctatcccccacaaaaagaaccttcttaaaccggaattgagtcctacaacctcgataactcacaaataagcccgtgtggcctctcacagacttgggaagttctccaagtgtccag

SEQ ID NO: 30888 - DNA, 120 bp, synthetic construct
  source 1..120: mol_type = other DNA
gtggcctctcacagacttgggaagttctccaagtgtccagggagatgtgccaggcgctttcctgccgtgaccaccgtcctctgcctgctccatttcttggtggccttcctttagacctgg

SEQ ID NO: 30889 - DNA, 120 bp, synthetic construct
  source 1..120: mol_type = other DNA
cccccagcgtcccccaggtcacagcctcccgctatgtgacctcgtgcctggctggttgggcctgttcactttttctcctggacagggaacagccccactggtgtcctttatcacccccac

SEQ ID NO: 30890 - DNA, 120 bp, synthetic construct; identical to SEQ ID NO: 9166
  source 1..120: mol_type = other DNA

SEQ ID NO: 30891 - DNA, 120 bp, synthetic construct
  source 1..120: mol_type = other DNA
cctcctgagtagctggtgcaagccactataccccacttcctatttcttaaaaagtcacagccctgtgtgtggctaatcctggacagaaatctagaagaagtcagctacttctggggcgtg

SEQ ID NO: 30892 - DNA, 120 bp, synthetic construct
  source 1..120: mol_type = other DNA
gttcgagaccaacctgggcaacatggcgaaaccctgtttctagaaaaggtacaaaaattagctgggcaggtggcacgtgcctgtggtaccagctacttgagggcctgaggcaggaggatc

SEQ ID NO: 30893 - DNA, 120 bp, synthetic construct; identical to SEQ ID NO: 9167
  source 1..120: mol_type = other DNA

SEQ ID NO: 30894 - DNA, 120 bp, synthetic construct
  source 1..120: mol_type = other DNA
tcttgacctcatgatccgcccgcctcagcctcccaaaatgctgggattacaggcgtgagccaccaggcccaggccgcaaggcgatctctaaacaaacataaaagaccaggagtcaaggtt

SEQ ID NO: 30895 - DNA, 120 bp, synthetic construct
  source 1..120: mol_type = other DNA
ttccttctatggaagaactggcggcttaagaacatcaacagcatcaactttgacaaccccgtctatcagaagaccacagaggatgaggtccacatttgccacaaccaggacggctacagc

SEQ ID NO: 30896 - DNA, 120 bp, synthetic construct
  source 1..120: mol_type = other DNA
agcattaggtgaatgcttctgtgcgctcattcagaatgtcagcggacaatggccttggtggtgtagaggaatgttggataagcaaatagagagctccatcagatggtgacagggcaaaga

SEQ ID NO: 30897 - DNA, 120 bp, synthetic construct
  source 1..120: mol_type = other DNA
acaaaaccccgtctctattaaaaatacaaaaaattagccaggcgtgggagtgggcgcctgtaatcccagctactcgggaggccgaggtagaaaaatcgcttgaacctaggaggcagaggt

SEQ ID NO: 30898 - DNA, 120 bp, synthetic construct; identical to SEQ ID NO: 9168
  source 1..120: mol_type = other DNA

SEQ ID NO: 30899 - DNA, 120 bp, synthetic construct
  source 1..120: mol_type = other DNA
agcccttgtctcttaaaaaaaaaaaaaaattcaaagaagggtttccagagggccaggagggaggaagggagaggaggtgttttatttttttgcttttattttttattttgagacagagtc

SEQ ID NO: 30900 - DNA, 120 bp, synthetic construct
  source 1..120: mol_type = other DNA
cactatgcccgggtaatttttgtatttttagtagagacgaggtttcgccatgttgcccagactggtctcgaactcctgacctcaagtgatccacccgccttggcctccccacgtgctggg

SEQ ID NO: 30901 - DNA, 120 bp, synthetic construct
  source 1..120: mol_type = other DNA
gggtttgaggccgttgtagctggagcaaacagagagaggggtaaaaaggcaggaggctaccaggcaggttgtgcagagccttgtgggccactggggaggactttggcttttgccctgaga

SEQ ID NO: 30902 - DNA, 120 bp, synthetic construct; identical to SEQ ID NO: 9169
  source 1..120: mol_type = other DNA

SEQ ID NO: 30903 - DNA, 120 bp, synthetic construct
  source 1..120: mol_type = other DNA
gttttatatatttattcatctgggaggcagaacaggcttcggacagtgcccatgcaatggcttgggttgggattttggtttcttcctttcctcgtgaaggataagagaaacaggcccggg

SEQ ID NO: 30904 - DNA, 120 bp, synthetic construct
  source 1..120: mol_type = other DNA
ctttcaacacacaacagcagatggcaccaacgggaccccctggccctgcctcatccaccaatctctaagccaaacccctaaactcaggagtcaacgtgtttacctcttctatgcaagcct

SEQ ID NO: 30905 - DNA, 120 bp, synthetic construct
  source 1..120: mol_type = other DNA
tctggctgaatccgtggtggcaccgagaccaaactcattcaccaaatgatgccacttcccagaggcagagcctgagtcactggtcacccttaatatttattaagtgcctgagacacccgg

SEQ ID NO: 30906 - DNA, 120 bp, synthetic construct; identical to SEQ ID NO: 9170
  source 1..120: mol_type = other DNA

SEQ ID NO: 30907 - DNA, 120 bp, synthetic construct
  source 1..120: mol_type = other DNA
gtgaatatcgagaactgccattgtcgtctttatgtccgcccacctagtgcttccacttctatgcaaatgcctccaagccattcacttccccaatcttgtcgttgatgggtatgtgtttaa

SEQ ID NO: 30908 - DNA, 120 bp, synthetic construct
  source 1..120: mol_type = other DNA
ggtcaggagatcgagaccatcctggctaacacgtgaaaccccgtctctactaaaaatacaaaaaattagccgggcgtggtggcgggcacctgtagtcccagctactcgggaggctgaggc

SEQ ID NO: 30909 - DNA, 120 bp, synthetic construct
  source 1..120: mol_type = other DNA
gacagagcgagactccgtctcaaaaaaaaaaaacaaaaaaaaaccatgcatggtgcatcagcagcccatggcctctggccaggcatggcgaggctgaggtgggaggatggtttgagctca

SEQ ID NO: 30910 - DNA, 120 bp, synthetic construct; identical to SEQ ID NO: 9171
  source 1..120: mol_type = other DNA

SEQ ID NO: 30911 - DNA, 120 bp, synthetic construct
  source 1..120: mol_type = other DNA
tgaagaccctatttcagaaatacaactataaaaaaataaataaatcctccagtctggatcgtttgacgggacttcaggttctttctgaaatcgccgtgttactgttgcactgatgtccgg

SEQ ID NO: 30912 - DNA, 120 bp, synthetic construct
  source 1..120: mol_type = other DNA
gtgtcccccccagtgcagggaaccgtgataagcctttctggtttcggagcacgtaaatgcgtccctgtacagatagtggggattttttgttatgtttgcactttgtatattggttgaaac

SEQ ID NO: 30913 - DNA, 120 bp, synthetic construct; identical to SEQ ID NO: 9172
  source 1..120: mol_type = other DNA

SEQ ID NO: 30914 - DNA, 120 bp, synthetic construct
  source 1..120: mol_type = other DNA
cgaactggactgtgtgcaacgctttttgggagaatgatgtccccgttgtatgtatgagtggcttctgggagatgggtgtcactttttaaaccactgtatagaaggtttttgtagcctgaa

SEQ ID NO: 30915 - DNA, 120 bp, synthetic construct; identical to SEQ ID NO: 9173
  source 1..120: mol_type = other DNA

SEQ ID NO: 30916 - DNA, 120 bp, synthetic construct
  source 1..120: mol_type = other DNA
gccgtccccgctcgctcactgcggctttctctctcgctcccctctccccgctccctgccgcgctcactctccgcttccccctcccgctctcccagagtcgatcccggagcccggccgcgg

SEQ ID NO: 30917 - DNA, 120 bp, synthetic construct
  source 1..120: mol_type = other DNA
tggggtcccctcatccctaaacagcaagccatctcccctcgcccgccccccgcccccccagtctcggagatctcagaggcaccgactgggaggtgagttagttcacgtccttctgctcgg

SEQ ID NO: 30918 - DNA, 120 bp, synthetic construct; identical to SEQ ID NO: 9174
  source 1..120: mol_type = other DNA

SEQ ID NO: 30919 - DNA, 120 bp, synthetic construct
  source 1..120: mol_type = other DNA
cgggtggatcacctgaggtcaggagttcgagaccagcctgaccaacaaggtgaaacctcgtctctactaaaaatacaaaaattagccgagcatggtggcagacgcctgtagtcccagcta

SEQ ID NO: 30920 - DNA, 120 bp, synthetic construct; identical to SEQ ID NO: 9175
  source 1..120: mol_type = other DNA

SEQ ID NO: 30921 - DNA, 120 bp, synthetic construct
  source 1..120: mol_type = other DNA
agaacttccataaagagttttataatagtgggtgggtgagccacagtggtaaggtgtccttttctggagtgacttgaaaaacaaaaatctgaactagtttgtaagataaagtcctgctga

SEQ ID NO: 30922 - DNA, 120 bp, synthetic construct
  source 1..120: mol_type = other DNA
gaggcaaggaaacagatgaattgacttcacagacttagcaatgtggggccttgagggctgagctgtttagtccagttccctaaactgtttcttggaaagagtgaatttgcacactaatgg

SEQ ID NO: 30923 - DNA, 120 bp, synthetic construct
  source 1..120: mol_type = other DNA
aggaacccgggagggtcctggagttggggaagtttgccccctggactggggatttaacataagatcaacagtaaaccttattgtgggatttgatgctactgccaccaagcaagagtgaaa

SEQ ID NO: 30924 - DNA, 120 bp, synthetic construct; identical to SEQ ID NO: 9176
  source 1..120: mol_type = other DNA

SEQ ID NO: 30925 - DNA, 120 bp, synthetic construct
  source 1..120: mol_type = other DNA
ctaattaaggcaggaggttaatgaccaaagaagccttggggatttggccagggaggaaaacaaagggcagaaacaagtatgtgtcagtggggagggtccagctgctgaatggggaagggg

SEQ ID NO: 30926 - DNA, 120 bp, synthetic construct
  source 1..120: mol_type = other DNA
ggactccagacaaatttccttcacagcagatgtgagcctggcacctggagggcaaaggatatgtgtgcgaatgcagttaggtgtgtggcatggtgtacatgtgagagtgtgtgctgcaga

SEQ ID NO: 30927 - DNA, 120 bp, synthetic construct; identical to SEQ ID NO: 9177
  source 1..120: mol_type = other DNA

SEQ ID NO: 30928 - DNA, 120 bp, synthetic construct
  source 1..120: mol_type = other DNA
acctagcatgcagccctgcccagagcagaggctcaataggggtatgttgagtgtaactgcatttttaaaacttcatggtgtcaggaggaaagagcaggtctccaaagataaacatgctgc

SEQ ID NO: 30929 - DNA, 120 bp, synthetic construct
  source 1..120: mol_type = other DNA
tgggaggccaaggtgggtgaatcacttgaggccacgagttccagaccagcctgggcaacatggcaaaaccctgtctctactaaaaatacaaaaattagctgggcatggtggtgcacacct

SEQ ID NO: 30930 - DNA, 120 bp, synthetic construct
  source 1..120: mol_type = other DNA
aaaataaaataaaataagccaaggtcctaacacagtgcctggctatcttaggtgttcaatcagttttagtttcctggccctggttgttctccccttgtggttgactttagccagattgtg

SEQ ID NO: 30931 - DNA, 120 bp, synthetic construct; identical to SEQ ID NO: 9178
  source 1..120: mol_type = other DNA

SEQ ID NO: 30932 - DNA, 120 bp, synthetic construct
  source 1..120: mol_type = other DNA
tttagtacatacacacacacaagccaggctgcagggcaggaaaggtgacacagtggagagtccaggattcttgtggaggttgggggaggagtggggtggatgatccagactgtgtgcttg

SEQ ID NO: 30933 - DNA, 120 bp, synthetic construct
  source 1..120: mol_type = other DNA
gggttcaagctattctcctgcctcagcctcctgagtagctggcattacagcatgcaccaccactcctggctaattcttgtacttttagtagagacggggtttcaccatcttgaccaggct

SEQ ID NO: 30934 - DNA, 120 bp, synthetic construct
  source 1..120: mol_type = other DNA
tctgggcacctgttatcactgtctgaacactcagtaccaagggatgggggtgcacacctaacacttgcccctccttagccctattctcagaaccctgagggagggagacacaggaggctg

SEQ ID NO: 30935 - DNA, 120 bp, synthetic construct
  source 1..120: mol_type = other DNA
taatgagattttcccattttcttttctttcctttttttttttttgtggggggacagagtcttgctctgtcacccaggctggagtgcagtggcgccatctcggctcactgcaacctccgcc

SEQ ID NO: 30936 - DNA, 120 bp, synthetic construct; identical to SEQ ID NO: 9179
  source 1..120: mol_type = other DNA

SEQ ID NO: 30937 - DNA, 120 bp, synthetic construct
  source 1..120: mol_type = other DNA
caggcacatgctgccatacccagccaatttttaaattttttgtagagatgagatctcgctatgttgcccagtctggtcttgaactcctggcctcaggtgatcctcccacttcagcctccc

SEQ ID NO: 30938 - DNA, 120 bp, synthetic construct
  source 1..120: mol_type = other DNA
accatctcagctcactgcaacctccgcctcctgggttcaagtgattctcctgcctcagcctcctgagtagctgggactacaggcgcgcaccaccacacccagctaatttttgtattttta

SEQ ID NO: 30939 - DNA, 120 bp, synthetic construct; identical to SEQ ID NO: 9180
  source 1..120: mol_type = other DNA

SEQ ID NO: 30940 - DNA, 120 bp, synthetic construct
  source 1..120: mol_type = other DNA
aaagaaatgtgagacttgatccccaccctcggtaagacacagaaactggcctgcatgacccagagaacatgggtaagcaggattaaatgtaaggacaaaatggtctttggggtagagcac

SEQ ID NO: 30941 - DNA, 120 bp, synthetic construct
  source 1..120: mol_type = other DNA
ttttatatattttttgagacggagtctcgctctgttgcccaggctggagtgcagtagcacaatctcagctcactggagcctctgcctcctggattcaagcaattctcctgcctcagcctc

SEQ ID NO: 30942 - DNA, 120 bp, synthetic construct; identical to SEQ ID NO: 9181
  source 1..120: mol_type = other DNA

SEQ ID NO: 30943 - DNA, 120 bp, synthetic construct
  source 1..120: mol_type = other DNA
tgcctggctaatttttgtattttttgtagagatggggttttgccatgttggccaggctggtgtcaaactcctgagctcaagtgatccgcctacctcagcctctcaaagtgctgggattgc

SEQ ID NO: 30944 - DNA, 120 bp, synthetic construct
  source 1..120: mol_type = other DNA
gcaacctctgactcctgggttcaagcgattctcctgcctcagcctcctgagtacctgggattacaggcgcgcacccccacgcccagctaatttttgtatttttagtagagacggggtttt

SEQ ID NO: 30945 - DNA, 120 bp, synthetic construct; identical to SEQ ID NO: 9182
  source 1..120: mol_type = other DNA

SEQ ID NO: 30946 - DNA, 120 bp, synthetic construct
  source 1..120: mol_type = other DNA
gggccccttaggacagctggttgatgaggcccctctgggacttagggctggacccaggcgtccaggaggcgggtgatactggagctgtgacagttggtccccagattccacacccagtgg

SEQ ID NO: 30947 - DNA, 120 bp, synthetic construct; identical to SEQ ID NO: 9183
  source 1..120: mol_type = other DNA

SEQ ID NO: 30948 - DNA, 120 bp, synthetic construct
  source 1..120: mol_type = other DNA
gcacagatgaattgacagcatacagtatagaattagaatgtcagagctggactagaagttgaatgaatgaatgagtaggggaatgagtgaatgaatagttcatcagttacctaatgcact

SEQ ID NO: 30949 - DNA, 120 bp, synthetic construct
  source 1..120: mol_type = other DNA
gggacttgacgtttcctgagtgcatgtttggtgccaggctctgttctggtcttttcagacttgatgtaattgtcttcacaattctgtgaagatggacttggtgtctctgcttcacatgaa

SEQ ID NO: 30950 - DNA, 120 bp, synthetic construct
  source 1..120: mol_type = other DNA
gtgatactcagtgagtgcttggagcccacagagggtggagggagtggttcctggatgaagtagatctgaagggtgggtgaggttcatttgaaaggcgagaattggaggcatgtctggaag

SEQ ID NO: 30951 - DNA, 120 bp, synthetic construct
  source 1..120: mol_type = other DNA
gccgcaggccaattcctagaagcggctccagcctcagcgccctcactagggcccaggtatgacttcgctgctcagccagggctccatgctcggcttgcttcctcaggtgtcatctccagc

SEQ ID NO: 30952 - DNA, 120 bp, synthetic construct; identical to SEQ ID NO: 9184
  source 1..120: mol_type = other DNA

SEQ ID NO: 30953 - DNA, 120 bp, synthetic construct
  source 1..120: mol_type = other DNA
cgggcagatcacctgaggtggggagttcgagaccagcctgaccaacatggagaaacccggtctctactaaaaatacaaaattagccgggcatggtggcgcatacctgtaatcccagctac

SEQ ID NO: 30954 - DNA, 120 bp, synthetic construct
  source 1..120: mol_type = other DNA
aaacaaacaaacaaacctttcatccaataaatatctatcaaatacatgctgtgtcaggaactattctaggccctgaatacatcagagaacaagatagacaaggtccctacttgcacggag

SEQ ID NO: 30955 - DNA, 120 bp, synthetic construct
  source 1..120: mol_type = other DNA
agataatgtactttctggtagtgatcatcactgcaaagaaagataagccaggatatgggggcagaaaggtttgaggtggctaatttagaaaggatggtcatgctatctggccaggacaac

SEQ ID NO: 30956 - DNA, 120 bp, synthetic construct
  source 1..120: mol_type = other DNA
gttcaagccattctcctgcctcggcctccctagtagctgggattacaggtatgcatcaccacaccgggcaaatttttgtatttttagtagagatggggtttcgccatcttggtcagactg

SEQ ID NO: 30957 - DNA, 120 bp, synthetic construct; identical to SEQ ID NO: 9185
  source 1..120: mol_type = other DNA

SEQ ID NO: 30958 - DNA, 120 bp, synthetic construct
  source 1..120: mol_type = other DNA
tggatcacttgaggtcgggagtttgagaccagcctgggcaatatggcaaaaccccgtctctacaaaaaatacaaaaattagctgggcgtggtggtgggtacctgtaatcccagctacttg

SEQ ID NO: 30959 - DNA, 120 bp, synthetic construct
  source 1..120: mol_type = other DNA
aaatgtgatcatgaaatgcccctgataaaagcaccatcttagttccccgttgccatcagattcacactccttagtgtggtgatgatgtccctcttgtcctggccagctcctgcccacctc

SEQ ID NO: 30960 - DNA, 120 bp, synthetic construct
  source 1..120: mol_type = other DNA
tgctggagtgcagtggtgcgatctcggctcactgcaacttccgcctcctgggttcaagcaattctcctgcctcagcctcccaagtagctaggattacagatgcctgccaccacgctcagc

SEQ ID NO: 30961 - DNA, 120 bp, synthetic construct; identical to SEQ ID NO: 9186
  source 1..120: mol_type = other DNA

SEQ ID NO: 30962 - DNA, 120 bp, synthetic construct
  source 1..120: mol_type = other DNA
ctctcacctcagcctcccaagtagctgggattacaggcgtgcgccaccatgctcagctaatttttgtaatttttttagagacagggtttcaccatattgcccaggctgatctcaaactcc

SEQ ID NO: 30963 - DNA, 120 bp, synthetic construct
  source 1..120: mol_type = other DNA
ccttacaattcatcatgctctattgtaactgtatgtttacacttctgtttccccagtacacgggaagctctttgagaacagggattggatctagtctactcctgtattctcagcacccag

SEQ ID NO: 30964 - DNA, 120 bp, synthetic construct
  source 1..120: mol_type = other DNA
tctggcatacctttcactcccacatccagctccatctctcctctccccttccatccccactcctacacctgggccctcgcagcctgccctcatctgatctccaaggggctactgtctgca

SEQ ID NO: 30965 - DNA, 120 bp, synthetic construct; identical to SEQ ID NO: 9187
  source 1..120: mol_type = other DNA

SEQ ID NO: 30966 - DNA, 120 bp, synthetic construct
  source 1..120: mol_type = other DNA
gtgtcacccaggctggagtgcagtggtgcagtcttggctcactgcaacctctgcctcccgggttcaagtgattcttctgcctcagcctcccgagtagctgggactacagaggcgtgccac

SEQ ID NO: 30967 - DNA, 120 bp, synthetic construct
  source 1..120: mol_type = other DNA
tgctgggattacaggcgtgagccaccgcacctggccaaggaggagttgtgtcttctgagaggccttcctgaccatgctgatggtcttacatatacccccaagtctgctgtggcactcagt

SEQ ID NO: 30968 - DNA, 120 bp, synthetic construct; identical to SEQ ID NO: 9188
  source 1..120: mol_type = other DNA

SEQ ID NO: 30969 - DNA, 120 bp, synthetic construct
  source 1..120: mol_type = other DNA
taatttttgtatttttattagagatgtggttgcaccatgttggccaggctggtcttgaactcctgacctcaggtgatctgtcctcctcagcctcccaaagtgatgggattacaggcgtta

SEQ ID NO: 30970 - DNA, 120 bp, synthetic construct
  source 1..120: mol_type = other DNA
attcaataaaaatttattgagtaaatgattgattgaatgaatgaaaggaataaaatgaccatgtgatactgaatgagtcactccccatctcagtttcctcttctcaagtgattctcctgc

SEQ ID NO: 30971 - DNA, 120 bp, synthetic construct
  source 1..120: mol_type = other DNA
tctcgaactcctgacctcaggtgatccacccgcctcggcctctcaaagtgctgggattacaggcgtgagccactgcgcccggtgtccaagacacttctaacgccaacatccttgtactag

SEQ ID NO: 30972 - DNA, 120 bp, synthetic construct
  source 1..120: mol_type = other DNA
caggctgcctggtcctgcttattgcccatatcctagaggcacttgcatgcccttccaggcgggtaactgtacatgtctctcccaggcagccttcacagactactcaggggtatggattgg

SEQ ID NO: 30973 - DNA, 120 bp, synthetic construct; identical to SEQ ID NO: 9189
  source 1..120: mol_type = other DNA

SEQ ID NO: 30974 - DNA, 120 bp, synthetic construct
  source 1..120: mol_type = other DNA
gtgcactgtgtattacctgtgagccctatgcaaattaccgcacatctctgaacctgttttcccatctataaagtgaagctaatagtagcaattacctcatgggattgttgtgcaattagt

SEQ ID NO: 30975 - DNA, 120 bp, synthetic construct
  source 1..120: mol_type = other DNA
cacatctctgaacctgttttcccatctataaagtgaagctaatagtagcaattacctcatgggattgttgtgcaattagtgggaagaggcatgtaaagtactgacatactgtctagtaca

SEQ ID NO: 30976 - DNA, 120 bp, synthetic construct
  source 1..120: mol_type = other DNA
gcgtttggaggcactcatcacacattaattactttatccatgaagatgaaagctgtctttggcacccagatggtactgagtaaatatctgtgaatgaatgaatgatgtggaatgtctcct

SEQ ID NO: 30977 - DNA, 120 bp, synthetic construct; identical to SEQ ID NO: 9190
  source 1..120: mol_type = other DNA

SEQ ID NO: 30978 - DNA, 120 bp, synthetic construct
  source 1..120: mol_type = other DNA
ctgatgaggctgctattctcttgaggacatgaaatgagaggcggtgaagtcagtcagtgagtcaaaagctgagatctaggaaccagacacaatgtgggagaagctgcggtgaaatcaatc

SEQ ID NO: 30979 - DNA, 120 bp, synthetic construct
  source 1..120: mol_type = other DNA
gagtgacctggtgctggggaccggatgccttgtggctccttctcactgctgagcatgcattcccccagcccaggccttggatctctgctctgccagctactggcagggaaactgagggat

SEQ ID NO: 30980 - DNA, 120 bp, synthetic construct
  source 1..120: mol_type = other DNA
aagaggaaactctcagcctggcccacggtgccatgggcaggacatgagtggcagagccaggattggaacccaggctagcctgactctttaccatgcttgggaaggcccagaaagcagaaa

SEQ ID NO: 30981 - DNA, 120 bp, synthetic construct
  source 1..120: mol_type = other DNA
gctggccaactgcatggcctaatgtgggccagaacctgggcagccagcctacctctcactctcctccaagcccaagagagtaggccccagttccagtccatccaactggatggtagctcc

SEQ ID NO: 30982 - DNA, 120 bp, synthetic construct; identical to SEQ ID NO: 9191
  source 1..120: mol_type = other DNA

SEQ ID NO: 30983 - DNA, 120 bp, synthetic construct
  source 1..120: mol_type = other DNA
ccttagaaatcttccagtctggttctcttgttttgaaggtgtgaaagctgaggctcatagaaggggagcaatttttctgaggtcacagagcaagttaatggaagagtgaactagattccc

SEQ ID NO: 30984 - DNA, 120 bp, synthetic construct
  source 1..120: mol_type = other DNA
agcataaaatgccatgtgaaaagaaggtacgcaactcatggcccgactgtctaccatgttacatcaggaataactgaggtgagatcatgggaaagacttctcacatatgtatgttagggg

SEQ ID NO: 30985 - DNA, 120 bp, synthetic construct; identical to SEQ ID NO: 9192
  source 1..120: mol_type = other DNA

SEQ ID NO: 30986 - DNA, 120 bp, synthetic construct
  source 1..120: mol_type = other DNA
ggggtgcccagaggctgtgggaagctgagcactaattagctctggctttctaatcgggcttaattgcctcctcatgatgggcaattaggaagctgcatcaattagcacagggaggtgaca

SEQ ID NO: 30987 - DNA, 120 bp, synthetic construct
  source 1..120: mol_type = other DNA
gcaattaggccttagttccttagctcctaggagctactagccttctaggcctggattgtggcttttctggccttggtttattcaccttcactggctctctgacttttctgcccagaggag

SEQ ID NO: 30988 - DNA, 120 bp, synthetic construct
  source 1..120: mol_type = other DNA
ccaccgtttattaattgtgcaacattggaccctttgtgctttgttttctcacctgtaaaatggaactgataataaaagttctgtcctagctacacatgaggctggggcaggaggattgct

SEQ ID NO: 30989 - DNA, 120 bp, synthetic construct
  source 1..120: mol_type = other DNA
tggtggatcatctgagcttgggagttcaagaccagcctggccaacatggcgaaaaccctacagagtctactaaaaatacaaaaattagctgggcgtgctggtgtgcacctgtaatctcag

SEQ ID NO: 30990 - DNA, 120 bp, synthetic construct; identical to SEQ ID NO: 9193
  source 1..120: mol_type = other DNA

SEQ ID NO: 30991 - DNA, 120 bp, synthetic construct
  source 1..120: mol_type = other DNA
gagttctcctctataaaatgagaataatgaccttgccatgctcacctcccagggctgcccagacataatgttttactagtgataggacctgctttataggtaggcaattatattgttcct

SEQ ID NO: 30992 - DNA, 120 bp, synthetic construct
  source 1..120: mol_type = other DNA
ggccaacccccttttttagctcctgctggttatgaaatgagccaaggaatggaaagagcctagaacaggtcctgacacatggtgagtgctctctaaacagtagctctccttactattgtt

SEQ ID NO: 30993 - DNA, 120 bp, synthetic construct; identical to SEQ ID NO: 9194
  source 1..120: mol_type = other DNA

SEQ ID NO: 30994 - DNA, 120 bp, synthetic construct
  source 1..120: mol_type = other DNA
gggatactggtggcgagtggggacatttaatccagacttagtggcacttttagctgagcctggatgatgagtaggagttgatcagagggtaaagtaaatgccatgtctggaaaaattagt

SEQ ID NO: 30995 - DNA, 120 bp, synthetic construct
  source 1..120: mol_type = other DNA
attacaagtcaggtcaaggaatttggacttatcctaaatacaatgtggagccactgttagtttaaagtcttctggaaacaaaatgaggctttcattttgaaaagatcgctgtgggctggg

SEQ ID NO: 30996 - DNA, 120 bp, synthetic construct
  source 1..120: mol_type = other DNA
aaataaaaataattagttggttgtggttgcatgaacctggtcccagctactcaggaggctgaggcaggaggatcacttgagcccatgaattttggattgcagtgagctatgattgcacca

SEQ ID NO: 30997 - DNA, 120 bp, synthetic construct
  source 1..120: mol_type = other DNA
cactgtgggaaggagaaacaatgggagcagaggcaagggtggaggcagagagactggttgggaggctgctgcagttacccaggaaggaaggacggaaggaaggaagggagggagggaggg

SEQ ID NO: 30998 - DNA, 120 bp, synthetic construct; identical to SEQ ID NO: 9195
  source 1..120: mol_type = other DNA

SEQ ID NO: 30999 - DNA, 120 bp, synthetic construct
  source 1..120: mol_type = other DNA
ggatgcttaggaatcactcctggtctgggaatacttggggtcgtcttctaagaattctcaagagtggaaggccactcacccttggcccagtgccaggccctcgccttccctagtctctct

SEQ ID NO: 31000 - DNA, 120 bp, synthetic construct
  source 1..120: mol_type = other DNA
cagtggagtggaggtgagtgaattcaggggtgttcctcacttcccccatcctggacttctaggctcagttgtggccccaggaatggattctgagtaagaggccagaaagcaagttctctg

SEQ ID NO: 31001 - DNA, 120 bp, synthetic construct
  source 1..120: mol_type = other DNA
agggctcattcttgtcctaaaactgggtcttcaagatggtttggtttaggtggtgtgaatgaacccttccatctccaccctcgagagagctgaattttcccccacccgaggcgttccaca

SEQ ID NO: 31002 - DNA, 120 bp, synthetic construct; identical to SEQ ID NO: 9196
  source 1..120: mol_type = other DNA

SEQ ID NO: 31003 - DNA, 120 bp, synthetic construct
  source 1..120: mol_type = other DNA
gtctgccttatttcctgggatcccttcccacttctccctggggacttgtgctgttgcagaggcactgagaagtccatcccgtggtgcagcttccgtctctcccctggtttcatttcacag

SEQ ID NO: 31004 - DNA, 120 bp, synthetic construct
  source 1..120: mol_type = other DNA
aggaagtcctgggctctaggaacctccttcctgcccccacagcttcctctttgtgtcctgcctaccagtccttcccgcccatctctgcatcccagtttccagagggcctgtggctgaggg

SEQ ID NO: 31005 - DNA, 120 bp, synthetic construct; identical to SEQ ID NO: 9197
  source 1..120: mol_type = other DNA

SEQ ID NO: 31006 - DNA, 120 bp, synthetic construct
  source 1..120: mol_type = other DNA
cgggggctgccccctcccagtttctgactaatcctttccatcggcagtggcatgtcctgcccctgctgtgcctgtgccaacaacagcccacatcacagggccacatctggctccatttga

SEQ ID NO: 31007 - DNA, 120 bp, synthetic construct
  source 1..120: mol_type = other DNA
cgaagcctctagtggagtcactcctttccttccccgaacccggcctcagttcctgggacatcctggctccattcttcagcacaccctccctcatcatatccacactccttggctcccccc

SEQ ID NO: 31008 - DNA, 120 bp, synthetic construct
  source 1..120: mol_type = other DNA
ggaaggcctggcagcccagggattttcccttagcccagctctctggcatattgccagcttgggcgtgttgggcggcaggggtcggggtgatcccaagaggtgcgtgtatggaggggtata

SEQ ID NO: 31009 - DNA, 120 bp, synthetic construct; identical to SEQ ID NO: 9198
  source 1..120: mol_type = other DNA

SEQ ID NO: 31010 - DNA, 120 bp, synthetic construct
  source 1..120: mol_type = other DNA
gtctcccttttactctccttcatccccactcatcctctgtgcccaggtctctctcgtccatcctccactcctggatccattcaccaaggggcctgagtgaggtcccaccccctaagccac

SEQ ID NO: 31011 - DNA, 120 bp, synthetic construct
  source 1..120: mol_type = other DNA
ccttccacctctaaaccttagctccaccaagctccaaggggagagaagagagggcatatgggaatgttttgctggaccccatactgcactcccaggccaggaagctctgcatcaggaagc

SEQ ID NO: 31012 - DNA, 120 bp, synthetic construct
  source 1..120: mol_type = other DNA
tttagcctgtcttcctgtccttcccagccagacccctctcatcctcctcccccagtggttttctcattacctgtcactgacggagagcccctcagaggtcaaggccaaagtgaggtgggc

SEQ ID NO: 31013 - DNA, 120 bp, synthetic construct; identical to SEQ ID NO: 9199
  source 1..120: mol_type = other DNA

SEQ ID NO: 31014 - DNA, 120 bp, synthetic construct
  source 1..120: mol_type = other DNA
ccaccctcctggctgggagttcactttcctagttgacctcctggcctgagggccagaggagagctttcaacggggaccttgaggagtgtgagggctgcaggggctgtggactggagtgga

SEQ ID NO: 31015 - DNA, 120 bp, synthetic construct
  source 1..120: mol_type = other DNA
aaagatcattttgtatttcttaaagagggcctccccacaaaattgtgtgcactttaggtaggatgaacaactgtccctattttagcattaaaagtcccttatctggccaggcacggtggc

SEQ ID NO: 31016 - DNA, 120 bp, synthetic construct
  source 1..120: mol_type = other DNA
aaaaaacaaaaaaatagcggggcgtggtggctggctcctgtagtcccaggtactagggaggctgaggccggagaatggcgtgaacccgggaggcggggcttgcagtgagccgagatcgcg

SEQ ID NO: 31017 - DNA, 120 bp, synthetic construct; identical to SEQ ID NO: 9200
  source 1..120: mol_type = other DNA

SEQ ID NO: 31018 - DNA, 120 bp, synthetic construct
  source 1..120: mol_type = other DNA
ctcacacgcggccgcccacacgcagtcgcctgcgtcagcaccagccgtcaggccctcgctgcccgcctgcggggtgtggagtggggagaacagccccgcctgaatccagtccgactaccc

SEQ ID NO: 31019 - DNA, 120 bp, synthetic construct
  source 1..120: mol_type = other DNA
caccttcccccaggtggtgaggggccaaagctcggggatggacaagagaaaggaaggagatgtcactgctgaatttctgctgaatttccttctgcctgctgcccgatttctatttgactg

SEQ ID NO: 31020 - DNA, 120 bp, synthetic construct
  source 1..120: mol_type = other DNA
agactgtaggattttgctgttggattgggttccttgggatctgggtcgaagagggaaagagtatatttaacctggaggcagaaacctggggtttgggcctgcttctgtcacttgtcagct

SEQ ID NO: 31021 - DNA, 120 bp, synthetic construct
  source 1..120: mol_type = other DNA
tgcacctcaaagaaatttgagaaggctaaggtagtaaccttgattgtgaaaagcttgtcaccggggggactggggcaggtgggagggcttggttactacttatccagtcgcccctccagc

SEQ ID NO: 31022 - DNA, 120 bp, synthetic construct; identical to SEQ ID NO: 9201
  source 1..120: mol_type = other DNA

SEQ ID NO: 31023 - DNA, 120 bp, synthetic construct
  source 1..120: mol_type = other DNA
ctctgtcatttagtagattgtgctttttgggtgagatttcatttgagtgagggggatctctgactttacaaatagctgtcattcacttgctccatctaagggcccgcttctcacccggca

SEQ ID NO: 31024 - DNA, 120 bp, synthetic construct
  source 1..120: mol_type = other DNA
acctcgtggagtttgggttgttgttttttttttcttttttttctttttttttgagatggagtctcactctgtcacccaggctggagtgcagtgacatgatctcctgcctcagctccctga

SEQ ID NO: 31025 - DNA, 120 bp, synthetic construct
  source 1..120: mol_type = other DNA
cacctcagcctcccaaaatgctgagattacaggtgtgagccactgctcccagccggaatttgggttcttgacacataaaatgcagataataatacctacctcataagattgaggtgaaga

SEQ ID NO: 31026 - DNA, 120 bp, synthetic construct; identical to SEQ ID NO: 9202
  source 1..120: mol_type = other DNA

SEQ ID NO: 31027 - DNA, 120 bp, synthetic construct
  source 1..120: mol_type = other DNA
tcagaccctcctccaaagagtcgcctgtctctgactcctacctgtccagggttctagccacctgatggtaagatcttggctttccaattcaggcaaactcgtattaaaatttcagttctg

SEQ ID NO: 31028 - DNA, 120 bp, synthetic construct
  source 1..120: mol_type = other DNA
gctgggctaattttttagtggcgcatggttgtagtcccagctactcgggaggctgaggcaggagaatcgcttgaattcaggaggtgcaggttgcagtgagctgagatcgtgccattgcac

SEQ ID NO: 31029 - DNA, 120 bp, synthetic construct; identical to SEQ ID NO: 9203
  source 1..120: mol_type = other DNA

SEQ ID NO: 31030 - DNA, 120 bp, synthetic construct
  source 1..120: mol_type = other DNA
agtatctaccttgtagagctattgtattggtccaacaaaataatgcaagtacctagtgcctaataataaaggtagtccataaatattccctacacgaatggttcttagcatgcctctgga

SEQ ID NO: 31031 - DNA, 120 bp, synthetic construct
  source 1..120: mol_type = other DNA
cctcaaggcctatcaagcagctggaagcctctccctcaggccccatcccagcaccaggcccctgcctccacctcccacttctcccttcccgtctctcttccccctctttccagccttacc

SEQ ID NO: 31032 - DNA, 120 bp, synthetic construct
  source 1..120: mol_type = other DNA
ttggaccagactgcctggtcccagttctgcactgggcctgttacttacggcctagttttaggaaagtcagcctcatctgcaaagcagggaaataatttccaacccatgaggttgttgtat

SEQ ID NO: 31033 - DNA, 120 bp, synthetic construct; identical to SEQ ID NO: 9204
  source 1..120: mol_type = other DNA

SEQ ID NO: 31034 - DNA, 120 bp, synthetic construct
  source 1..120: mol_type = other DNA
gctggagtgcagtagtgcaatcacagctcactgcagccttgacctcccaagctcaggtgatcctcccatcttagcctcctgggtagctgggactagaggcatgtgccaccacccccagct

SEQ ID NO: 31035 - DNA, 120 bp, synthetic construct
  source 1..120: mol_type = other DNA
agccaccatgctcagcctctgctttatatttttatttccatagctcctaccgtgttctaacaaactataactttgtctttggtttattgactgtctccctccactagaatgtcagctcca

SEQ ID NO: 31036 - DNA, 120 bp, synthetic construct
  source 1..120: mol_type = other DNA
ggcagttctgtaaagcccctaaatcttccttctccaagaagccctccttcaaatgtatgtaaccttatttagttattgcacatccccattttacagatgatgaaactaacgctggaaaaa

SEQ ID NO: 31037 - DNA, 120 bp, synthetic construct; identical to SEQ ID NO: 9205
  source 1..120: mol_type = other DNA

SEQ ID NO: 31038 - DNA, 120 bp, synthetic construct
  source 1..120: mol_type = other DNA
cgagaccagcctggccaacatggggaaaccctgtgtctactaaaaatataaaaattagccgggtgtggtggtgggtgcctataatcccagcaacccttgaggctgaggcaggcaaatcgc

SEQ ID NO: 31039 - DNA, 120 bp, synthetic construct
  source 1..120: mol_type = other DNA
ctcaaaaaaaattagaaacaccgagtgcctgctgtgtgccaggtgttagggagacagatgaccaagacttggtcctttctgtccctcacagcactttcaggaatgggggtcacagaggaa

SEQ ID NO: 31040 - DNA, 120 bp, synthetic construct
  source 1..120: mol_type = other DNA
gctaaggtgagggggcacttgaggtcaggagttcgagaccagcctggccaacatggtgaaacctcatctctactcaaaatacaaaaattagccgggcgtggtggcacacgcctgtaatcc

SEQ ID NO: 31041 - DNA, 120 bp, synthetic construct; identical to SEQ ID NO: 9206
  source 1..120: mol_type = other DNA

SEQ ID NO: 31042 - DNA, 120 bp, synthetic construct
  source 1..120: mol_type = other DNA
cagaactcttgcacacccaggagctcagtccccgtctttgatagccactctacccatactacaggtaagaaaactgaggtccagagaattcagtagcagatctagcatcactcagcagtt

SEQ ID NO: 31043 - DNA, 120 bp, synthetic construct
  source 1..120: mol_type = other DNA
aaagggagagcagacttatgacatctggagtccagagttaggattgaatattcaggataaagtttcactttgaagttcagatttaggattgaggccattttgatggtggtcgcagggaac

SEQ ID NO: 31044 - DNA, 120 bp, synthetic construct
  source 1..120: mol_type = other DNA
ttggaaggctgaagtgaggatcatttggggccaggagttttagaccaaattgggcaacatagcaaggctccgtctctatcatgatagcctatagtctcagctactcaggaggctgagata

SEQ ID NO: 31045 - DNA, 120 bp, synthetic construct; identical to SEQ ID NO: 9207
  source 1..120: mol_type = other DNA

SEQ ID NO: 31046 - DNA, 120 bp, synthetic construct
  source 1..120: mol_type = other DNA
tctggtgtggagaagaacaagactttttattgtctgggaagctgagggtgggtgccacgccctgggggagagaagccatattctgggccccctcatccgggtgcatccctagtgctcacc

SEQ ID NO: 31047 - DNA, 120 bp, synthetic construct
  source 1..120: mol_type = other DNA
ccagaactgagggcctgtccagccctgctttccttgtgtttgagggaagccctgatatcttggagctgtacaaggtagcaacataatttgatttccctggttgctcatcggaggataagc

SEQ ID NO: 31048 - DNA, 120 bp, synthetic construct
  source 1..120: mol_type = other DNA
gggaagctgaggcaggcagattacctgaggtcgggagtttgagaccagtttggccaacatggtgaaaccccatctctactaaaaataaaaataaaaaaaaaattagctgggcttggtggc

SEQ ID NO: 31049 - DNA, 120 bp, synthetic construct; identical to SEQ ID NO: 9208
  source 1..120: mol_type = other DNA

SEQ ID NO: 31050 - DNA, 120 bp, synthetic construct
  source 1..120: mol_type = other DNA
acctggccagagaggaaagtagagatgagtatggtgctggcctttgcagccagcaaggctgtggggtctttgctgttcctgtcccccactaccttcttgccccccactaccttctttctg

SEQ ID NO: 31051 - DNA, 120 bp, synthetic construct
  source 1..120: mol_type = other DNA
atgcacagctctggtatctgttttaaattatccattaaaataagtacagttctgggggaaaaaaataagttgactgggtgcggtaagcagtagaaagggactgaagggggaaggaaccca

SEQ ID NO: 31052 - DNA, 120 bp, synthetic construct
  source 1..120: mol_type = other DNA
acgaatgcttggctttgaagagagatagattggggcaaaagaaagaaaaaaagggaccccccaaactccttgatccctggccccaaactgggggcataaaggaactcaggttccagaact

SEQ ID NO: 31053 - DNA, 120 bp, synthetic construct; identical to SEQ ID NO: 9209
  source 1..120: mol_type = other DNA

SEQ ID NO: 31054 - DNA, 120 bp, synthetic construct
  source 1..120: mol_type = other DNA
caggcaggagccaagagaggggaagcttgagcctcacgcagttaggggtgcgctggagagggtggggcccgactccgccacaccccaacggtccttccccctcctcaccactcccgcccc

SEQ ID NO: 31055 - DNA, 120 bp, synthetic construct
  source 1..120: mol_type = other DNA
ctacaccagccaacccagatcccgaggtccgacagcgcccggcccagatccccacgcctgccaggagcaagccgagagccagccggccggcgcactccgactccgagcagtctctgtcct

SEQ ID NO: 31056 - DNA, 120 bp, synthetic construct
  source 1..120: mol_type = other DNA
actccgctgtcgcccacccgcatcacccggctgcaggagaaggaggacctgcaggagctcaatgatcgcttggcggtctacatcgaccgtgtgcgctcgctggaaacggagaacgcaggg

SEQ ID NO: 31057 - DNA, 120 bp, synthetic construct
  source 1..120: mol_type = other DNA
cgcgcccgcctgcagctggagctgagcaaagtgcgtgaggagtttaaggagctgaaagcgcggtgagttcgcccaggtggctgcgtgcctggcggggagtggagagggcggcgggccggc

SEQ ID NO: 31058 - DNA, 120 bp, synthetic construct; identical to SEQ ID NO: 9210
  source 1..120: mol_type = other DNA

SEQ ID NO: 31059 - DNA, 120 bp, synthetic construct
  source 1..120: mol_type = other DNA
tgttagcgggcttggcactgtgctagctttgcccaagctggctctgaacacatgatgcccactaagacataactctcaagttggcatctgtccagcgtgttggagcgaggtcaggaaggc

SEQ ID NO: 31060 - DNA, 120 bp, synthetic construct
  source 1..120: mol_type = other DNA
cttccttgggctctgacaggcccaccaaaagagctccgggagatgagagatcggctcccccgcagctcccacagcccttggcctgcttggcccaggaatgcaagggagggagggaggcag

SEQ ID NO: 31061 - DNA, 120 bp, synthetic construct
  source 1..120: mol_type = other DNA
gccactttcattttcccagcggggccaggcagtctttgctcgggcccatcctcttagctgctgacgttttgatctttgtcttattgaagtgctggaatacagtgacatttttgaaatcca

SEQ ID NO: 31062 - DNA, 120 bp, synthetic construct; identical to SEQ ID NO: 9211
  source 1..120: mol_type = other DNA

SEQ ID NO: 31063 - DNA, 120 bp, synthetic construct
  source 1..120: mol_type = other DNA
ccttccctttctctatgcagacccaggccaagagcactaagggtgcttggagatccgtaaagggctgttggctttgacttcttctctctcttttatcatctactccaaacttctgctctt

SEQ ID NO: 31064 - DNA, 120 bp, synthetic construct
  source 1..120: mol_type = other DNA
tagctgagattacaggcatgtgccaccatgccgggctaattttgtatttctagtagagatggggtttctccatgttcgtcaggctagtcttgaactcccaacctcaggtgatccacccgc

SEQ ID NO: 31065 - DNA, 120 bp, synthetic construct
  source 1..120: mol_type = other DNA
agacagggtcttactctgtcacccagactggagtgaagtggtgcgatcttggctcaccacaacctctgcctcccaggctcaaaagattctcctgcctcagcctcctgagtagctgggatt

SEQ ID NO: 31066 - DNA, 120 bp, synthetic construct; identical to SEQ ID NO: 9212
  source 1..120: mol_type = other DNA

SEQ ID NO: 31067 - DNA, 120 bp, synthetic construct
  source 1..120: mol_type = other DNA
ttagtagagacggggtttcaccatgttggccagggtgatctcgaactcctgacctcaagtgatctgcctgcctcagcctcccaaagtgttgggattagagacgggagccactgcgcctgg

SEQ ID NO: 31068 - DNA, 120 bp, synthetic construct
  source 1..120: mol_type = other DNA
tgagtagctgggaccacaggcaggcaccaccacccacagctaatgtttttgtattattttgtagagatggggttttgccatgttgcccacagtcttgaactcctgggttcattctgctga

SEQ ID NO: 31069 - DNA, 120 bp, synthetic construct
  source 1..120: mol_type = other DNA
cctgggctcaagcgatcctaccgtctcaccttccggaatagctgagactaagggcaggcaccaccacgcttggctaatttttttttttttttttttttttttgctttttgtttgtaaaga

SEQ ID NO: 31070 - DNA, 120 bp, synthetic construct; identical to SEQ ID NO: 9213
  source 1..120: mol_type = other DNA

SEQ ID NO: 31071 - DNA, 120 bp, synthetic construct
  source 1..120: mol_type = other DNA
aaggacatttttagcagttttagcagttttctggtcaaaactttgatcgagaaacagattgagtggattcgatattctcttgctcacccagccacgccagtttgtctcctctgcctccta

SEQ ID NO: 31072 - DNA, 120 bp, synthetic construct
  source 1..120: mol_type = other DNA
tggaaaggctgggcttccggaaaagagaggtggatttgcacacctggatcccaagctgatagaaagtggggtgaagacaaaggggactcagactggggtgtctgtcctcttctatgccca

SEQ ID NO: 31073 - DNA, 120 bp, synthetic construct
  source 1..120: mol_type = other DNA
accaaagcctagagagaaggtgttgtctggtttaatgtttaattagagctcagagttcagggccagatttggagttgggatggaaagttgtttttaagaccctgtagcaatttttgaccc

SEQ ID NO: 31074 - DNA, 120 bp, synthetic construct; identical to SEQ ID NO: 9214
  source 1..120: mol_type = other DNA

SEQ ID NO: 31075 - DNA, 120 bp, synthetic construct
  source 1..120: mol_type = other DNA
gttcaagcgattctcctgcctcagcctcccgagtagctgggactacaggcacatgccatcacgcccagttaatttttgtatttttagtagagttggggtttcaccatgttggccaggatg

SEQ ID NO: 31076 - DNA, 120 bp, synthetic construct
  source 1..120: mol_type = other DNA
cgtgttgcccaagctggtctcgaactcctaggctcaagtaatccacctgccttggccttggcctcccaaagtgctgggatgtataggcatgagctaccgcacctggtaccccctgcccct

SEQ ID NO: 31077 - DNA, 120 bp, synthetic construct
  source 1..120: mol_type = other DNA
ccaggcaaggcagctgggtggatgactcagatgctgcccccctccctcccaccctggtggctttacagaagacagcaggagacagggtggagacagcagttgtcttaaagggaggagtgg

SEQ ID NO: 31078 - DNA, 120 bp, synthetic construct; identical to SEQ ID NO: 9215
  source 1..120: mol_type = other DNA

SEQ ID NO: 31079 - DNA, 120 bp, synthetic construct
  source 1..120: mol_type = other DNA
cagttcatgtaggctctgatcaagacaagaacagcaaaggccacagaggcacagatgcttgtcccatgtcacacaataaaggggtcagcacttgatcacaggccttatgacttccagctg

SEQ ID NO: 31080 - DNA, 120 bp, synthetic construct
  source 1..120: mol_type = other DNA
ctgctctggggccagtgacaccttagtgctctatggccatacttcgtggctcatgcctgtaatcccagtgctttgggaggctaaggcaggaggatcacttgaggccaggagtttgagacc

SEQ ID NO: 31081 - DNA, 120 bp, synthetic construct
  source 1..120: mol_type = other DNA
ttgtgagctatgactgcactactgcactctagcctgggagagagaaagaccctgtctctgaaaaagaaaaaaacaaaacaaaactctgctgtcctgcagggcctgttagcatatgatcga

SEQ ID NO: 31082 - DNA, 120 bp, synthetic construct; identical to SEQ ID NO: 9216
  source 1..120: mol_type = other DNA

SEQ ID NO: 31083 - DNA, 120 bp, synthetic construct
  source 1..120: mol_type = other DNA
aggctggagtgcagtggcatgatcttggcttactgcaatctccacctcccaggctcaagtgatcctcccacctcagcctcccaagaagctgggactataggcacgtgccacatgctcggc

SEQ ID NO: 31084 - DNA, 120 bp, synthetic construct
  source 1..120: mol_type = other DNA
agcccaaatccacgttctgattcaaagggaaagaagaagggtgcagctaaacctggggggtgagaagtacttaaaaagcccaagagaaacaaaagagagaataattcctcactaggaccc

SEQ ID NO: 31085 - DNA, 120 bp, synthetic construct
  source 1..120: mol_type = other DNA
tgtgcccattgcccccacttccaggtccaccccccagtgattcggtagcttagtgtctgcgctgaagcccaggacagctggatggacaactggtagatcccttcacctaccaactgtgct

SEQ ID NO: 31086 - DNA, 120 bp, synthetic construct; identical to SEQ ID NO: 9217
  source 1..120: mol_type = other DNA

SEQ ID NO: 31087 - DNA, 120 bp, synthetic construct
  source 1..120: mol_type = other DNA
agaaatcgcttgaacccaggaggcagatgttgcagtgagccgagatcacgccactgcactccagccagggcgacagagcaagattccgtctcaaaaaaataatactaataataaataaat

SEQ ID NO: 31088 - DNA, 120 bp, synthetic construct
  source 1..120: mol_type = other DNA
agcaaatcgcctcccctttctggctttccttagctgtaaaagaaagggattggagcggaaagtctccagagaccttttaggttccaaagtagtacagtgacccacaaagtgagaaaacag

SEQ ID NO: 31089 - DNA, 120 bp, synthetic construct
  source 1..120: mol_type = other DNA
cacatttctctatttccccgtgaaagtttgttagaaatggttaaattgtgacattaccctcttggcaaatgttttgttttcattgctactaggaaagggcaactcgttttcgatgcctct

SEQ ID NO: 31090 - DNA, 120 bp, synthetic construct
  source 1..120: mol_type = other DNA
ttgggggctagggcgaaggcctaggagaggcagaactgttaccttagagctggccaggattagagaacagtgcctggaaccggggggaggggcacggtgaccttgggctgcccaccttct

SEQ ID NO: 31091 - DNA, 120 bp, synthetic construct; identical to SEQ ID NO: 9218
  source 1..120: mol_type = other DNA

SEQ ID NO: 31092 - DNA, 120 bp, synthetic construct
  source 1..120: mol_type = other DNA
ttgcagcaagaaggacagtggtctgaatttgacggggacaaatggaagggagataggacacatgagttcctttaggtctggctcaggggagctagacttcatttcaaggggtctaggttc

SEQ ID NO: 31093 - DNA, 120 bp, synthetic construct
  source 1..120: mol_type = other DNA
tgcagtgagaccagactgcctaggtcctccctcacttcttctcctgaccttggggtgtggctcccactctctcccagtgtcctcagggttaataactatgtgccaccagatagagagtta

SEQ ID NO: 31094 - DNA, 120 bp, synthetic construct; identical to SEQ ID NO: 9219
  source 1..120: mol_type = other DNA

SEQ ID NO: 31095 - DNA, 120 bp, synthetic construct
  source 1..120: mol_type = other DNA
cctgcctctgtacaatgccacgttgatacgcccagcagctgtgactcaggcctggccccctgccaggcccagcacttctactggagttgcgtctgaacatgtcaacaggcttcctatccc

SEQ ID NO: 31096 - DNA, 120 bp, synthetic construct
  source 1..120: mol_type = other DNA
cagaccctaggcatatttggctgtttggcaggtgtcacgcccaagggaagcgtgtggaagcagagccatgcctgctgtgggtgcacatgcccgcgtgagggagtcggggtgtttcatcct

SEQ ID NO: 31097 - DNA, 120 bp, synthetic construct
  source 1..120: mol_type = other DNA
ctctctttttttttgagatggagtctcgctctgttgcccaggctagaatgcagtggcgcgatcttggctcactgcaaactccgcctcctgggttcaagtgattctcctgcctcagcctcc

SEQ ID NO: 31098 - DNA, 120 bp, synthetic construct
  source 1..120: mol_type = other DNA
caccttggcctcccaaagtgctgggattacaggcgtgagccactgcgcccagcctcagttcctctctttaaggtctcctttccagagagggatagcacctcaaatgccagggaggggaat

SEQ ID NO: 31099 - DNA, 120 bp, synthetic construct; identical to SEQ ID NO: 9220
  source 1..120: mol_type = other DNA

SEQ ID NO: 31100 - DNA, 120 bp, synthetic construct
  source 1..120: mol_type = other DNA
ttttagtgcctgagcctacccgtctccaggctttagtttccccctgtaaaagtataggagttggttcaagagaaggttcctctagaagccttgagcctgtgaaccgtctagtctccgggt

SEQ ID NO: 31101 - DNA, 120 bp, synthetic construct
  source 1..120: mol_type = other DNA
gctcaagtaggctgaggggtagggaggttttgggtgaatgggagggagggacagagagaaggaggatatattgcagtaggaggagttgctggaacaaaaggaggggtggtaggagtggct

SEQ ID NO: 31102 - DNA, 120 bp, synthetic construct
  source 1..120: mol_type = other DNA
tgatgcaggaggatcacgtgaggtcaggagttcaagaccagcctggccaacatggcgaaaccctatctctactaaaaatgccaaaaattagctgggtgtggtggcaggcgcctgtaatcc

SEQ ID NO: 31103 - DNA, 120 bp, synthetic construct
  source 1..120: mol_type = other DNA
ataataataataggggctgggcgcggtggctcatgactgtaatcccagcattttgggaggtggaggcgggtggatcacctgaggtcaggagtccgagaccagcctggccaacatggcaaa

SEQ ID NO: 31104 - DNA, 120 bp, synthetic construct; identical to SEQ ID NO: 9221
  source 1..120: mol_type = other DNA

SEQ ID NO: 31105 - DNA, 120 bp, synthetic construct
  source 1..120: mol_type = other DNA
cttctgctcccttcctgtgtgctgcctggcaatggggaactctgagggctggtgagcagggctgctgaggagtgggtctaaggagtccctgcagggctgggccagctcctccacctcccc

SEQ ID NO: 31106 - DNA, 120 bp, synthetic construct
  source 1..120: mol_type = other DNA
ccgggcccaaacaggcctgtggccggccctggcttccatatctggcatcagagttgggctgagcagggtgactcagagggtgggtcagcgcctggcccggtgcccacctagcccctttgc

SEQ ID NO: 31107 - DNA, 120 bp, synthetic construct; identical to SEQ ID NO: 9222
  source 1..120: mol_type = other DNA

SEQ ID NO: 31108 - DNA, 120 bp, synthetic construct
  source 1..120: mol_type = other DNA
cgggcgaagccagggtctcccctgtgagcactagaggatttcccgacccctgcccgggtattgtgtgcctgagcatgagtcacctgaggggcccaggttcccacccttcccagctcctct

SEQ ID NO: 31109 - DNA, 120 bp, synthetic construct
  source 1..120: mol_type = other DNA
cctggctagggtctactttggtccctgctaggtctgaggacccctcctaggaaggaaatggcacttgggggcgggggcagggaggagggaggagagacactgggctctactgtaccccta

SEQ ID NO: 31110 - DNA, 120 bp, synthetic construct
  source 1..120: mol_type = other DNA
ccacaaaggttcttcctcacttccctctctgctcgtggtttttctcatctgcagggtgtgtcttagtcctttaatctcctctctttgcagtgctagtcaaaacctccaccagggaaagac

SEQ ID NO: 31111 - DNA, 120 bp, synthetic construct; identical to SEQ ID NO: 9223
  source 1..120: mol_type = other DNA

SEQ ID NO: 31112 - DNA, 120 bp, synthetic construct
  source 1..120: mol_type = other DNA
atttttgtatttttgatagagtcagagtttcaccatgttggcaggctggtctcgaactcctggcctcaagtgatccacctgccttggcctcccaaagtgctgggattacaggtgtgagcc

SEQ ID NO: 31113 - DNA, 120 bp, synthetic construct
  source 1..120: mol_type = other DNA
ttctgtgcctatttcctcaattgcataggaatagcacctatcgcatagggtagctgtgaagatgacgtgagttaacataatatttagagcagtgcttggtacctaataagctctatataa

SEQ ID NO: 31114 - DNA, 120 bp, synthetic construct; identical to SEQ ID NO: 9224
  source 1..120: mol_type = other DNA

SEQ ID NO: 31115 - DNA, 120 bp, synthetic construct
  source 1..120: mol_type = other DNA
ccattgccttccagcttctttcagctcaggctggctggtcagggaaacgctttgtgccatagtgtctgccctcttcctcctcctggcttctccattctctctggaacttgtggcttagga

SEQ ID NO: 31116 - DNA, 120 bp, synthetic construct
  source 1..120: mol_type = other DNA
ctcatctataaaagggagagggttgagctgaatcaactctaagctccttctagttctctaaattctgagagcctcctagtacagccagcagcagccattagccttcagggtagagaggcc

SEQ ID NO: 31117 - DNA, 120 bp, synthetic construct
  source 1..120: mol_type = other DNA
gagctcggaatctaagttgccccagttgcttcactttaccagcggtttttcttcattttccctcctccccctgcagctgcttcagcttcggaaaagttctgaagtcatggaaagttgggg

SEQ ID NO: 31118 - DNA, 120 bp, synthetic construct
  source 1..120: mol_type = other DNA
gctcttttttgcaggagacagacacttacattaaacaacttgttctgaggtgtggccagaggcctggactgagcaagtgtgcaggctgggggagcttcctctggcttctcatgtccttcc

SEQ ID NO: 31119 - DNA, 120 bp, synthetic construct; identical to SEQ ID NO: 9225
  source 1..120: mol_type = other DNA

SEQ ID NO: 31120 - DNA, 120 bp, synthetic construct
  source 1..120: mol_type = other DNA
tgggtctgctgctttctctcaccctatatttgtgaagcaattgtaacatctagaaagttcttgggttctctggaggtttttaagaaaataggacctttctatttctccagtccactagca

SEQ ID NO: 31121 - DNA, 120 bp, synthetic construct
  source 1..120: mol_type = other DNA
gacctggaggcctgggatccacatctggaaccagatgctgaggctatggtagatgggtagggctcagccttctcccagggcacggatgaggcaggagggagggaggcagggacccctctg

SEQ ID NO: 31122 - DNA, 120 bp, synthetic construct; identical to SEQ ID NO: 9226
  source 1..120: mol_type = other DNA

SEQ ID NO: 31123 - DNA, 120 bp, synthetic construct
  source 1..120: mol_type = other DNA
attcatatcacggggtagagctctgcccttggccccaggcacgttcctgagccctgagtcatgggaagggtggagaagcaggaagggggttttcaaggaccttggggaggtgggagccca

SEQ ID NO: 31124 - DNA, 120 bp, synthetic construct
  source 1..120: mol_type = other DNA
cacagactccttctcttaaatctactctcccctctcttctttagcaataccaagaaggagggtgacctgatagctgctcaggctcggctgaaggacctggaggctctgctgaactccaag

SEQ ID NO: 31125 - DNA, 120 bp, synthetic construct
  source 1..120: mol_type = other DNA
acacatgtacactcactcttctacctaggccctcccccatgtggtgcctggtctgacctgtcacctgatttcagagccattcacctgtcctagagtcattttacccactgaggtcacatc

SEQ ID NO: 31126 - DNA, 120 bp, synthetic construct
  source 1..120: mol_type = other DNA
cgaggtcaggagatcgagatcatcctgactaacatggtgaaaccccgtctctactaaaaatacaaaaaattagcctggcatggtggcgggcgcctgtagtcccaactactcgggaggctg

SEQ ID NO: 31127 - DNA, 120 bp, synthetic construct; identical to SEQ ID NO: 9227
  source 1..120: mol_type = other DNA

SEQ ID NO: 31128 - DNA, 120 bp, synthetic construct
  source 1..120: mol_type = other DNA
tgagctgtgattgcaccactgcacttcagcctgggtgacagagggaaaccctgtctctacataaataaatacataaaataaaataatccacaagccatttctacttaactttgcaatgaa

SEQ ID NO: 31129 - DNA, 120 bp, synthetic construct
  source 1..120: mol_type = other DNA
gaagcggatggctaattacatatgggacatgtgttaataatgctttgtgtatatagagtggcctttactttcaaaacactcttctccaatttatcatgttaaaagctaggaattgggctg

SEQ ID NO: 31130 - DNA, 120 bp, synthetic construct; identical to SEQ ID NO: 9228
  source 1..120: mol_type = other DNA

SEQ ID NO: 31131 - DNA, 120 bp, synthetic construct
  source 1..120: mol_type = other DNA
tgaggttaggagttcgagactagcctggccaacatggtgaaaccccatctctactacaaatacaaaaattagctaggcatggtggcagccacctgtaatcccagctacttgggaggctga

SEQ ID NO: 31132 - DNA, 120 bp, synthetic construct
  source 1..120: mol_type = other DNA
taaaaataaataataaataaaagctaagaatcaaagaagcagtttattcctaatttcacagtctcatctgttcatagtggggccaggattagagtcagtggccaagcttccatcctgggt

SEQ ID NO: 31133 - DNA, 120 bp, synthetic construct
  source 1..120: mol_type = other DNA
agttgtacccttcccccagcccttcctggatgcactgatcagcctgtgcttccttgccctgtttttctttataaatagagccatgttctcctctctctctctctcttttttttttttttt

SEQ ID NO: 31134 - DNA, 120 bp, synthetic construct
  source 1..120: mol_type = other DNA
gggattacaggtgcccaccaccatgcccagctactttttggatttttagtagagacagggtttcaccatgttggtcaggctggtcttgaactcctgaccttaggtgttctgcccgcctca

SEQ ID NO: 31135 - DNA, 120 bp, synthetic construct; identical to SEQ ID NO: 9229
  source 1..120: mol_type = other DNA

SEQ ID NO: 31136 - DNA, 120 bp, synthetic construct
  source 1..120: mol_type = other DNA
cccagctactcgggagactgaggcaggagaatggcatgaacctgggaggcagagcttgcagtgagctgagatcgcgccactgctctccagcctaggtgacagagcgagactccatctcaa

SEQ ID NO: 31137 - DNA, 120 bp, synthetic construct
  source 1..120: mol_type = other DNA
ccagccacctctcccatcccttcccaccccgtacttcaggcttcagcagtactgatctttccaaagaccccagaacacacatgccttcatacctctgtgcctgtacatgcttgtttctgc

SEQ ID NO: 31138 - DNA, 120 bp, synthetic construct
  source 1..120: mol_type = other DNA
tcatgtcccctcagtactttgcacatacctcctttatagcagttgctatgttgtgccagagaagggagtcctgtggctggggggcatatatcttttctttttgagacagagtctagctgt

SEQ ID NO: 31139 - DNA, 120 bp, synthetic construct; identical to SEQ ID NO: 9230
  source 1..120: mol_type = other DNA

SEQ ID NO: 31140 - DNA, 120 bp, synthetic construct
  source 1..120: mol_type = other DNA
ccctaggtgaggccaagaagcaacttcaggatgagatgctgcggcgggtggatgctgagaacaggctgcagaccatgaaggaggaactggacttccagaagaacatctacagtgaggtgg

SEQ ID NO: 31141 - DNA, 120 bp, synthetic construct
  source 1..120: mol_type = other DNA
gttgggggtggccagcactcagctcccaggttaaagtggggctggtagtggctcatggagtagggctgggcagggagccccgcccctgggtcttggcctcccaggaactaattctgattt

SEQ ID NO: 31142 - DNA, 120 bp, synthetic construct; identical to SEQ ID NO: 9231
  source 1..120: mol_type = other DNA

SEQ ID NO: 31143 - DNA, 120 bp, synthetic construct
  source 1..120: mol_type = other DNA
caggacctggggctgtagcagtgatgcccaactcaggcctgtgcctccacccctcccagtcaccacagtcctaaccctttgtcctcccctccagctggacaatgccaggcagtctgctga

SEQ ID NO: 31144 - DNA, 120 bp, synthetic construct
  source 1..120: mol_type = other DNA
tctctccaggggcctagagtctgggccggatgcaggctggaagcccagggttgggggtgggggtgggggtgggaggttcctgaggaggagagggatgaaaagtgtccccacaaccacaga

SEQ ID NO: 31145 - DNA, 120 bp, synthetic construct
  source 1..120: mol_type = other DNA
tggttttcccattcgaaaatggaggctgttcttaatctccctaactcagagttgccacaggactctgcaatgtgaggtgttaaaagcatcagtatttttctagttggctgtgctatttgt

SEQ ID NO: 31146 - DNA, 120 bp, synthetic construct; identical to SEQ ID NO: 9232
  source 1..120: mol_type = other DNA

SEQ ID NO: 31147 - DNA, 120 bp, synthetic construct
  source 1..120: mol_type = other DNA
ctgctggcggaaaaggagcgggagatggccgagatgcgggcaaggatgcagcagcagctggacgagtaccaggagcttctggacatcaagctggccctggacatggagatccacgcctac

SEQ ID NO: 31148 - DNA, 120 bp, synthetic construct
  source 1..120: mol_type = other DNA
ggctacgcctgtcccccagccctacctcgcagcgcagccgtggccgtgcttcctctcactcatcccagacacagggtgggggcagcgtcaccaaaaagcgcaaactggagtccactgaga

SEQ ID NO: 31149 - DNA, 120 bp, synthetic construct
  source 1..120: mol_type = other DNA
ggtctaaggggatacagctgcatcagggagagagtggcaagacagaaggatggcatgtggagagaggaacatccttgccctcagagggtggaccagggtgagcctgtatatctcctccac

SEQ ID NO: 31150 - DNA, 120 bp, synthetic construct; identical to SEQ ID NO: 9233
  source 1..120: mol_type = other DNA

SEQ ID NO: 31151 - DNA, 120 bp, synthetic construct
  source 1..120: mol_type = other DNA
accttcctcttccctatcttcccggcaggaccagtccatgggcaattggcagatcaagcgccagaatggagatgatcccttgctgacttaccggttcccaccaaagttcaccctgaaggc

SEQ ID NO: 31152 - DNA, 120 bp, synthetic construct
  source 1..120: mol_type = other DNA
ggccacccacagcccccctaccgacctggtgtggaaggcacagaacacctggggctgcgggaacagcctgcgtacggctctcatcaactccactggggaagtaagtaggcctgggcctgg

SEQ ID NO: 31153 - DNA, 120 bp, synthetic construct
  source 1..120: mol_type = other DNA
ccagtaggcaaaccaaaagatgcttcctcaacagcacaaggggtggaagttagacagtgaggattgttaaaggcagagccatactcctacccggagagcttgacagtgtccctctggggt

SEQ ID NO: 31154 - DNA, 120 bp, synthetic construct
  source 1..120: mol_type = other DNA
cctggccctgacccttggacctggttccatgtccccaccaggaagtggccatgcgcaagctggtgcgctcagtgactgtggttgaggacgacgaggatgaggatggagatgacctgctcc

SEQ ID NO: 31155 - DNA, 120 bp, synthetic construct; identical to SEQ ID NO: 9234
  source 1..120: mol_type = other DNA

SEQ ID NO: 31156 - DNA, 120 bp, synthetic construct
  source 1..120: mol_type = other DNA
atatcctctcatttccctcatttttcctgcaagaatgttctctctcattcctgaccgcccctccactccaattaatagtgcatgcctgctgccctacaagcttgctcccgttctctcttc

SEQ ID NO: 31157 - DNA, 120 bp, synthetic construct
  source 1..120: mol_type = other DNA
agcctcccaaacccccattgcccgctggctccttgggcacagaaccacaccttcctgcctggcggctgggagcctgcaggagcctggagcctggttgggcctgagtggtcagtcccagac

SEQ ID NO: 31158 - DNA, 120 bp, synthetic construct; identical to SEQ ID NO: 9235
  source 1..120: mol_type = other DNA

SEQ ID NO: 31159 - DNA, 120 bp, synthetic construct
  source 1..120: mol_type = other DNA
gggtaggacgaggtggccttgcaggggggagagcctgccttctcttccgcagcccgggggagtgggagcctcctccccacagcctgagtcctagacagcccacctctgcatcctgcccct

SEQ ID NO: 31160 - DNA, 120 bp, synthetic construct
  source 1..120: mol_type = other DNA
acctctctcctctgttttctctcttagagcccccagaactgcagcatcatgtaatctgggacctgccaggcaggggtgggggtggaggcttcctgcgtcctcctcacctcatgcccaccc

SEQ ID NO: 31161 - DNA, 120 bp, synthetic construct
  source 1..120: mol_type = other DNA
aaaacacaagcaaaaaaaaaaaaaagcatctatctcatctatctcaatcctaatttctcctcccttccttttccctgcttccaggaaactccacatctgccttaaaaccaaagagggctt

SEQ ID NO: 31162 - DNA, 120 bp, synthetic construct; identical to SEQ ID NO: 9236
  source 1..120: mol_type = other DNA

SEQ ID NO: 31163 - DNA, 120 bp, synthetic construct
  source 1..120: mol_type = other DNA
ggtaccagctgcgcttgcttttctgtattttatttagacaagagatgggaatgaggtgggaggtggaagaagggagaagaaaggtgagtttgagctgccttccctagctttagaccctgg

SEQ ID NO: 31164 - DNA, 120 bp, synthetic construct
  source 1..120: mol_type = other DNA
agcctgctggcacccaccgtggaggaggaaggcaagagggggtggaggggtgtggcagtggttttggcaaacgctaaagagcccttgcctccccatttcccatctgcaccccttctctcc

SEQ ID NO: 31165 - DNA, 120 bp, synthetic construct
  source 1..120: mol_type = other DNA
gccaccatttccttaagaaactttttctgattagccatggcagaaaacagttggaaaaggcaagtgttcataaggaaagacaggtgggagggttaacttcatctttgttccctggggaag

SEQ ID NO: 31166 - DNA, 120 bp, synthetic construct; identical to SEQ ID NO: 9237
  source 1..120: mol_type = other DNA

SEQ ID NO: 31167 - DNA, 120 bp, synthetic construct
  source 1..120: mol_type = other DNA
gcctgggctctggggacacacagcctctgtttctcacatgaacctttgattatttgacattcccttttcacttaccatcaggatagagcccttggtctctttcattccttttttaaaatt

SEQ ID NO: 31168 - DNA, 120 bp, synthetic construct
  source 1..120: mol_type = other DNA
gaggaagcagttgttttttgagagtggtggtagatgatattaaaggagtgaaatcccctgattcatagctggtaggtcaagtatgggtgggaaaaaaaaagtgttcctcctgggctcgga

SEQ ID NO: 31169 - DNA, 120 bp, synthetic construct
  source 1..120: mol_type = other DNA
atgaaattgagtgttttaaaggatgctaattaatattggagatactatacattttggctgaatggctgagtatataattcaacatatcaatataaggctgaaggcaaacatcaccatcat

SEQ ID NO: 31170 - DNA, 120 bp, synthetic construct; identical to SEQ ID NO: 9238
  source 1..120: mol_type = other DNA

SEQ ID NO: 31171 - DNA, 120 bp, synthetic construct
  source 1..120: mol_type = other DNA
tggagctgaatgtcagtacattctatacttaatccccttcccagaaatgattttcttctctaaggttgggactgtctacctggagtgaggtagtcagtcccaaggagctttttgaccatg

SEQ ID NO: 31172 - DNA, 120 bp, synthetic construct
  source 1..120: mol_type = other DNA
ctttaataagaaacctgaaatgcataaactacacagatacctcgctcacatgtagtttttaaatttgttttctcctgggcaaggagacgggtgctcctcagaagtgagaaatattgataa

SEQ ID NO: 31173 - DNA, 120 bp, synthetic construct
  source 1..120: mol_type = other DNA
tctactattcctgtatgtgatacaattttagaatttcccagatcctgagcaggtagaggatgtattcccttcttactgttgttctttccaaggtctcacaaataagttcacctttcctcg

SEQ ID NO: 31174 - DNA, 120 bp, synthetic construct
  source 1..120: mol_type = other DNA
cacaatcaaatgcatgttttccaggatggcccaggtttggggggaggaagtggctttgctctcattccattctgctgcctttgtgtgatcctctctttcagcagcagtatctagagagtc

SEQ ID NO: 31175 - DNA, 120 bp, synthetic construct; identical to SEQ ID NO: 9239
  source 1..120: mol_type = other DNA

SEQ ID NO: 31176 - DNA, 120 bp, synthetic construct
  source 1..120: mol_type = other DNA
aagaaattctatttaaatcattacccagtacacatagatgtgtaagttccttctcagacagtggaaacctgacttcccatagccttaatagatttacccacttgctctcctgtcaccctc

SEQ ID NO: 31177 - DNA, 120 bp, synthetic construct
  source 1..120: mol_type = other DNA
ggggctgaattgttcaggtaaaaataggaagagctctaccttttctttcttaacttcctacacagaaaagatttttggatagaggtgagttgagaatgaaggaccggtgagggtattagt

SEQ ID NO: 31178 - DNA, 120 bp, synthetic construct; identical to SEQ ID NO: 9240
  source 1..120: mol_type = other DNA

SEQ ID NO: 31179 - DNA, 120 bp, synthetic construct
  source 1..120: mol_type = other DNA
ctgagaaaatcgaggctgacccacctgactttcctgtttccttcttcccacatcagagacctatatttcgctagcttcgtacccatcatttctcgctcaaagaatgcagcatccttcctt

SEQ ID NO: 31180 - DNA, 120 bp, synthetic construct
  source 1..120: mol_type = other DNA
tgccttgtacttttgatccagctgaactaaactaactcaaatgtgtcatggtgttttcttcattttgcctgcttaactcatgtctttccagccttaaactcaatgctcttccctttggga

SEQ ID NO: 31181 - DNA, 120 bp, synthetic construct
  source 1..120: mol_type = other DNA
cctctaccccagtgctggacaacactctgcccacacagatgggtgctccctgcgtcctgagtggactttcctgaaagagaaactgagtctggccttctcttgtttacaatttgccttcac

SEQ ID NO: 31182 - DNA, 120 bp, synthetic construct; identical to SEQ ID NO: 9241
  source 1..120: mol_type = other DNA

SEQ ID NO: 31183 - DNA, 120 bp, synthetic construct
  source 1..120: mol_type = other DNA
acttgtgtgcagacaaatgcttcgtagtctgtgtgtgtaacctgaatccctctcctgagcctcacgtgtgtgtccagcagcctgattgacatcatcacctgaatgcagtcccagcatcct

SEQ ID NO: 31184 - DNA, 120 bp, synthetic construct
  source 1..120: mol_type = other DNA
cccactgcgatattttcagatacttcagtttgtaaacacatactgactacctactgtttctccaaagcacagttctgatcatttctttcctcatctcaaaaaccttcaggacttcccttt

SEQ ID NO: 31185 - DNA, 120 bp, synthetic construct; identical to SEQ ID NO: 9242
  source 1..120: mol_type = other DNA

SEQ ID NO: 31186 - DNA, 120 bp, synthetic construct
  source 1..120: mol_type = other DNA
gatatcccctcccttttgagcctcagtagtatgtttttcccttgcaaaacctacccattctttccttgtagccattgatatacttacctcatttctgaattggaagagtttttgaggtaa

SEQ ID NO: 31187 - DNA, 120 bp, synthetic construct
  source 1..120: mol_type = other DNA
ccccgtctccactaaaaatacaaaaattagctgggtgtggtggcacgtgcctgtaatcccagctactcaggtggctgaggcaggagaatagcttgaacccaagaggtggaggttgcagta

SEQ ID NO: 31188 - DNA, 120 bp, synthetic construct
  source 1..120: mol_type = other DNA
atttgataaacaattgtggaattgactacctagcaaagggaatggttctctttcctttgtttctgtaatctgcaagcacggggaacatcttgacaatctgtgctttttgtttccttccct

SEQ ID NO: 31189 - DNA, 120 bp, synthetic construct
  source 1..120: mol_type = other DNA
ccaaggacagcgactggctgcagaacacggtcctctggccagggctgtgggtcacacgtgggaggtggaatttcagggagagaataatagttggataaccgagaggcaggcagggagtaa

SEQ ID NO: 31190 - DNA, 120 bp, synthetic construct; identical to SEQ ID NO: 9243
  source 1..120: mol_type = other DNA

SEQ ID NO: 31191 - DNA, 120 bp, synthetic construct
  source 1..120: mol_type = other DNA
tcctgaagctgagtgtttacccgtgtgtgtgtacgtgcacatacgtgtgtatggtggaagcataagctattagaatgggcttataaactgtttgtctttccaggcttgttttgcagaggg

SEQ ID NO: 31192 - DNA, 120 bp, synthetic construct
  source 1..120: mol_type = other DNA
tgctgtcaaattatccaccaaatcctcctcctttttctatttaaacgtaaaagactgttggggctgacctgttgcagagtcactctttgttctctgtggctctggcaggaggtagggtgc

SEQ ID NO: 31193 - DNA, 120 bp, synthetic construct; identical to SEQ ID NO: 9244
  source 1..120: mol_type = other DNA

SEQ ID NO: 31194 - DNA, 120 bp, synthetic construct
  source 1..120: mol_type = other DNA
ttctatactgactagaggaccagtatagagagtggtccttgcaatttaacattactgtttaagagtagatctttaatatttcccagagcaacgtcaggactgggtgacggtggaggggac

SEQ ID NO: 31195 - DNA, 120 bp, synthetic construct; identical to SEQ ID NO: 9245
  source 1..120: mol_type = other DNA

SEQ ID NO: 31196 - DNA, 120 bp, synthetic construct
  source 1..120: mol_type = other DNA
ttttcttcctccaaatgaagccggaaatcacgttttcatgtgactctcctgacaaatgttgcagctactaccagttaaacaatacacatccatgggctagatttggcctgtgggctatga

SEQ ID NO: 31197 - DNA, 120 bp, synthetic construct
  source 1..120: mol_type = other DNA
aatacacatccatgggctagatttggcctgtgggctatgaattttcaatccttgactcaagtcctcaatagttatgttacagttggtaccatatcagctaacaatttattgaacagtgtg

SEQ ID NO: 31198 - DNA, 120 bp, synthetic construct
  source 1..120: mol_type = other DNA
tctcttgcctcagccttctgagtggccaggattacaggtgtgcaccatcacgcctggctaatttttgtatttttagtagagacagggtttcaccatattggccaggctggtctcgagctc

SEQ ID NO: 31199 - DNA, 120 bp, synthetic construct; identical to SEQ ID NO: 9246
  source 1..120: mol_type = other DNA

SEQ ID NO: 31200 - DNA, 120 bp, synthetic construct
  source 1..120: mol_type = other DNA
gttcttgtctcacctctgacatttgctatttttataatctgaaaaaggttaatctttggacctcatttatatattttaatttataaaactggggcagtactcctacctaccctgcctagc

SEQ ID NO: 31201 - DNA, 120 bp, synthetic construct
  source 1..120: mol_type = other DNA
aaaactctgttttcgtccattacagcatttctccaggtatatgtacacgtgttggttccagaaagacatgaggtaacttatatgtctgtccagtgctctcttcccctacaggtaaccaca

SEQ ID NO: 31202 - DNA, 120 bp, synthetic construct
  source 1..120: mol_type = other DNA
gaccagcctgggcaacatagtgggatgctgtctctataaaaacttaaaaaattagccaggcatagtggtgtgtgcccgtagtcccagctacttaggaggctgaggtgggaggattgcttg

SEQ ID NO: 31203 - DNA, 120 bp, synthetic construct; identical to SEQ ID NO: 9247
  source 1..120: mol_type = other DNA

SEQ ID NO: 31204 - DNA, 120 bp, synthetic construct
  source 1..120: mol_type = other DNA
tttttcttttctttcttttttttttttgagacggagtcttgctctgtcgcctaggctggagtgcagtggtgccatctcggctcactgcaacctctgcctcccgggttcaagtgattctcc

SEQ ID NO: 31205 - DNA, 120 bp, synthetic construct
  source 1..120: mol_type = other DNA
cttaaatgatccacccaccttggcctcccaaagtgctgggattacaggcatgaaccaccgcgcccagccttgttatcttttttttttttttttttttttttaacagatggtcatttcagc

SEQ ID NO: 31206 - DNA, 120 bp, synthetic construct
  source 1..120: mol_type = other DNA
tcttggagtgattgtgaataagggatgttttctctcctgtctctctcccagtgtctggatgccagccgcccatggctctgctattggatcctgcacagcttggaactgctagatgaaccc

SEQ ID NO: 31207 - DNA, 120 bp, synthetic construct; identical to SEQ ID NO: 9248
  source 1..120: mol_type = other DNA

SEQ ID NO: 31208 - DNA, 120 bp, synthetic construct
  source 1..120: mol_type = other DNA
agagacaagattttgccagaaagtacagtatgcatttgaacagcttctgtggggaagcacgtgccagtccagtgaacaaaaatgcctttgcctttcctacgcacctctatagaagtacct

SEQ ID NO: 31209 - DNA, 120 bp, synthetic construct
  source 1..120: mol_type = other DNA
aagcaactgagcttcttcccaagatccttgtacagatggcattcgtgatctggcatctcattcccagacactcatcaccatttatatattaaagaagaaaagactgatcatgactccagt

SEQ ID NO: 31210 - DNA, 120 bp, synthetic construct
  source 1..120: mol_type = other DNA
agcatctcgaatttctcagcttcctctggtgctcttgaggtcgaagcatctgggatgagagacttctgagccaggtttgtttctccacagcacaaggaggcagctgtgctgggacacaca

SEQ ID NO: 31211 - DNA, 120 bp, synthetic construct; identical to SEQ ID NO: 9249
  source 1..120: mol_type = other DNA

SEQ ID NO: 31212 - DNA, 120 bp, synthetic construct
  source 1..120: mol_type = other DNA
atcatcgggatgccactgcaagcctggctgcttccagcactggaaggagagttggacacagtttctgcagtaacaggaatttaattgtcaaagaaaggcccacgtggttttttttttttt

SEQ ID NO: 31213 - DNA, 120 bp, synthetic construct
  source 1..120: mol_type = other DNA
ctgggattacaggcacccaccaccgtgcctggctaatttttgtatttttagtagaggtaggctttcaccatattgaccaggctggtcttgaactcctgacctcagctgatctacctgcct

SEQ ID NO: 31214 - DNA, 120 bp, synthetic construct
  source 1..120: mol_type = other DNA
atcaggatatttggaaagttttcccttcactcttgcacaatgggaaagttgggtgtgagagaagaaagaaaaaatggggatttctgtgagcctggatctgaacgctggatggaggaggcc

SEQ ID NO: 31215 - DNA, 120 bp, synthetic construct; identical to SEQ ID NO: 9250
  source 1..120: mol_type = other DNA

SEQ ID NO: 31216 - DNA, 120 bp, synthetic construct
  source 1..120: mol_type = other DNA
ggtgaaaccccatctctactaaaatacaaaaattagctgggcatggtggtgcatgcctgtcatcccagctactcgggaggctgaggcaggagaatcgcttgaacctaggaggcggaggtt

SEQ ID NO: 31217 - DNA, 120 bp, synthetic construct
  source 1..120: mol_type = other DNA
gcagtacattctgtgaaatactatataaccattaaaaaatgtataaatgtggccacgcatgatcacacctgtaaccccagcactttgggaggccacggtcagaggaccactggggcccag

SEQ ID NO: 31218 - DNA, 120 bp, synthetic construct; identical to SEQ ID NO: 9251
  source 1..120: mol_type = other DNA

SEQ ID NO: 31219 - DNA, 120 bp, synthetic construct
  source 1..120: mol_type = other DNA
cgatggggttaaaagtgattttataaactttctgggctgggcacggtgtctcacacctgtaatcccagggcttggggaggccaaggtcggcagatcacctgagatcaagagttcgagacc

SEQ ID NO: 31220 - DNA, 120 bp, synthetic construct
  source 1..120: mol_type = other DNA
tgggaggtggacgttgcgacgagccaagatcatgccactctactccagcctggaggacagagtgagactctgtcttaaaaaaaaaaaaaaaaaaaggccaggcgcggtggctcacacctg

SEQ ID NO: 31221 - DNA, 120 bp, synthetic construct
  source 1..120: mol_type = other DNA
gtggcgcatgcctgtaatcctactcaggaggctgtttgtttgttttttgagacaagagtctccttctgttactgcactcccggctcctactcaggaggctgaggcaggagactcgcttga

SEQ ID NO: 31222 - DNA, 120 bp, synthetic construct
  source 1..120: mol_type = other DNA
tagtggctcatggctgtaatcccaggactttgagaggctgagacaggcggattacttgaggtcaggagttcgagaccagtctggccaacatggtgaaaccctgtctctactaaaaataca

SEQ ID NO: 31223 - DNA, 120 bp, synthetic construct; identical to SEQ ID NO: 9252
  source 1..120: mol_type = other DNA

SEQ ID NO: 31224 - DNA, 120 bp, synthetic construct
  source 1..120: mol_type = other DNA
atttagtgaacttttaaacatttcttagacttcccaataatgtattttgctttgtgcctaggaggtggttacttctaggtgcagaaaacacttgttatgaacaaagcctactggctctga

SEQ ID NO: 31225 - DNA, 120 bp, synthetic construct
  source 1..120: mol_type = other DNA
agggaaatgaaatgctttgaaatgcgttcagttttctttcttcatacaaatatattaaggtgacctagagtcaaaaagtctagctctgcagttttattattttcctgccttcttttcccc

SEQ ID NO: 31226 - DNA, 120 bp, synthetic construct; identical to SEQ ID NO: 9253
  source 1..120: mol_type = other DNA

SEQ ID NO: 31227 - DNA, 120 bp, synthetic construct
  source 1..120: mol_type = other DNA
ataggtaggacttcagcttgcctcttttttttttgagagtctcgctctgttgcccagactggagtgcagtggcacgatcttggctcactgcaacctccacctcctgggttcaagcaattc

SEQ ID NO: 31228 - DNA, 120 bp, synthetic construct
  source 1..120: mol_type = other DNA
gaactcctgacctcaggtgatccacctgcctcagcctcccaaagtgctgggattacaggcatgagccaccgcgcccggccttttttttttttttttgagacggagttttgctcttgttgc

SEQ ID NO: 31229 - DNA, 120 bp, synthetic construct
  source 1..120: mol_type = other DNA
gctaatttttgtattttgtaaagacaggctttcaacatgttggccaggctggtcttgaactcctgacctcaggtgatacacctgtcttggcttcccaaagtgttgggattacagatgtga

SEQ ID NO: 31230 - DNA, 120 bp, synthetic construct; identical to SEQ ID NO: 9254
  source 1..120: mol_type = other DNA

SEQ ID NO: 31231 - DNA, 120 bp, synthetic construct
  source 1..120: mol_type = other DNA
ccctttcaaaaggttgttagtagcttatccccggaatagccccttaaatatttttccttttaatttttaagtctagtttgtatgtttccttacctttcagtgaggacaccatatctaggc

SEQ ID NO: 31232 - DNA, 120 bp, synthetic construct
  source 1..120: mol_type = other DNA
gtgtcaacagttgagaaactctgctctaaagtagccaacttttttttcctttgaggcagtcttgctgtgtcccccaggctggagggcactggtgcaatctcagctcactgcaacttccac

SEQ ID NO: 31233 - DNA, 120 bp, synthetic construct
  source 1..120: mol_type = other DNA
caggctggtctcaaactcctggccttaagtgatccgcccacgtcggcctcccaaagtgctaggattataggcgtgagccactgcgcccggcctatagtagccaactttcgacctgaccat

SEQ ID NO: 31234 - DNA, 120 bp, synthetic construct; identical to SEQ ID NO: 9255
  source 1..120: mol_type = other DNA

SEQ ID NO: 31235 - DNA, 120 bp, synthetic construct
  source 1..120: mol_type = other DNA
gaacaagcttgatgtgatgccagctcatgcatcttgcatttacatcccctcctaagccgttctgcccatggatgactgttcctatttccaaagctgtaatctttttttctgttttttttt

SEQ ID NO: 31236 - DNA, 120 bp, synthetic construct
  source 1..120: mol_type = other DNA
ttgctacaaattagtctcagtttttacctactagaatgtttatgtaattatcctttgtatatttgaggtattttgctgggtagctttctcactgtgattgtctgtaatattaagcttttt

SEQ ID NO: 31237 - DNA, 120 bp, synthetic construct
  source 1..120: mol_type = other DNA
accacacccagccaaatacttaaaaaaaaaaaaagtagtcatttttacaactctcatgtgaattccctttgaggtggaaaatggaggctagagccagatacagttctgactaatactgca

SEQ ID NO: 31238 - DNA, 120 bp, synthetic construct; identical to SEQ ID NO: 9256
  source 1..120: mol_type = other DNA

SEQ ID NO: 31239 - DNA, 120 bp, synthetic construct
  source 1..120: mol_type = other DNA
tgcaacctggacttccccaagctcaagtgatcctcccacctcagcctcctgagtagctggggctagaggtgggtgccaacgtgcctggttaatttttataattcttgtagagatggggtt

SEQ ID NO: 31240 - DNA, 120 bp, synthetic construct
  source 1..120: mol_type = other DNA
tcagtcctcagccatcacctaagagtcccaagtaaactccttataaggctgagaggcaatcgctgatatccctgctttgaacttgaccctcttacaagatttacatactctttaatgatg

SEQ ID NO: 31241 - DNA, 120 bp, synthetic construct
  source 1..120: mol_type = other DNA
ctataaacatctatacgtgttctatattggccactagccacagttagttgtggagtacttgaaatgtgtcttgtgtgactgaagagctgaattttctattttaattaattgagaatttaa

SEQ ID NO: 31242 - DNA, 120 bp, synthetic construct
  source 1..120: mol_type = other DNA
ctctcagccgggcatggtggctcacgcctgtaatcctagcactttgggaggccaaggcgggcggattgtctgagctcgggagttcgagaccagcctgggcaacacagtgaaaccctgact

SEQ ID NO: 31243 - DNA, 120 bp, synthetic construct; identical to SEQ ID NO: 9257
  source 1..120: mol_type = other DNA

SEQ ID NO: 31244 - DNA, 120 bp, synthetic construct
  source 1..120: mol_type = other DNA
tttaattggaattaggtgtggcttgggtgttgggatttttttaaaacaccccccaagtaattttagttgtgcagcaaggactagtgatggctcaagctttgcatgtatctgaatcacctg

SEQ ID NO: 31245 - DNA, 120 bp, synthetic construct
  source 1..120: mol_type = other DNA
tacagattctgatgcacacattttgggtttgaagatccatgatatagaagatagtttcccactttgctggtaattggcacgtaagctagaatgaaatgccttgctgacgttaaagaaaat

SEQ ID NO: 31246 - DNA, 120 bp, synthetic construct
  source 1..120: mol_type = other DNA
tgaacttcttgtctctatgataagtttttctccccctacatttgtgggaaaaaaaaatatttttttgtagagctggggtctcactgtgttgcccaggctggtcttgaactactggcttca

SEQ ID NO: 31247 - DNA, 120 bp, synthetic construct; identical to SEQ ID NO: 9258
  source 1..120: mol_type = other DNA

SEQ ID NO: 31248 - DNA, 120 bp, synthetic construct
  source 1..120: mol_type = other DNA
cagatcctaactaattcgaggctttagggtcagtagtgttgcgttcggcacgattctatcttaggagctgggaaagggagtggataaccaggtgactctttttctttcttttaaaaaatg

SEQ ID NO: 31249 - DNA, 120 bp, synthetic construct
  source 1..120: mol_type = other DNA
agaaaccttttggtatgctagtgcagccagcctttgttagggcatgagcttattaactatttgtttctgggaaatgtcataagaattgatgacgatttggaaagaaggaacaaattcaag

SEQ ID NO: 31250 - DNA, 120 bp, synthetic construct
  source 1..120: mol_type = other DNA
agactagcctgggcaacatggcgaaaccccatctttataaaaaatacaaaaactagccaggcgtggtggctcatgcctgtaattctagctacttgggaggctgaggtgggaggatagctt

SEQ ID NO: 31251 - DNA, 120 bp, synthetic construct; identical to SEQ ID NO: 9259
  source 1..120: mol_type = other DNA

SEQ ID NO: 31252 - DNA, 120 bp, synthetic construct
  source 1..120: mol_type = other DNA
agcaattaaatgtgatgttggcaaacagttataaacttgtgtcttcttggagagtaggctatgtagtctttctggcagcagtagcaaggaaataatgaggtgaaagcgcccaggaaagaa

SEQ ID NO: 31253 - DNA, 120 bp, synthetic construct
  source 1..120: mol_type = other DNA
ctgtggagaaacagcttgataaccagggctttcctggggcaccctttctggtgcacttcggaagaccccggactgatgatagggctctcttgatttcacctaaagcaagactgtaacctc

SEQ ID NO: 31254 - DNA, 120 bp, synthetic construct; identical to SEQ ID NO: 2153
  source 1..120: mol_type = other DNA

SEQ ID NO: 31255 - DNA, 120 bp, synthetic construct
  source 1..120: mol_type = other DNA
gtactgaaaatacaaaaaattggctgggcgtgatggtgcacgcctgtaatcccagctacttggaagggtgaggcaaaagaatctcttgaacctgggagacggatgctgcaatgagctgag

SEQ ID NO: 31256 - DNA, 120 bp, synthetic construct
  source 1..120: mol_type = other DNA
gtggcaatgggagtgagaagacctctatttacatgttcatgataggcctaggtgatggatcctgactaggatggttagtgtggaaagaagcagttgagcaccatgttttggcaaaattca

SEQ ID NO: 31257 - DNA, 120 bp, synthetic construct
  source 1..120: mol_type = other DNA
agctacgaaagtcggtttcttcccagccttgtgttccctgcttcatgaccaacaagcgcttaagtacgaaactcagaggagggcagacagaaatgatgatagctggagagagaattaagc

SEQ ID NO: 31258 - DNA, 120 bp, synthetic construct; identical to SEQ ID NO: 9261
  source 1..120: mol_type = other DNA

SEQ ID NO: 31259 - DNA, 120 bp, synthetic construct
  source 1..120: mol_type = other DNA
agcagtgacagaaacctagaggagttccccgcctgctgacacgcactgactgttgcctctcctacctctttccctgtttctcagagagaagcttcttcagtatttgtactccctgaagca

SEQ ID NO: 31260 - DNA, 120 bp, synthetic construct
  source 1..120: mol_type = other DNA
taaggaacatcatggggaagctgctgctttgtcccagaatgacacatgggatgacatgtcagtgacacgtcagaatcattcagatgtgatgcagatgtcctcaggtgtcatgatcacttg

SEQ ID NO: 31261 - DNA, 120 bp, synthetic construct
  source 1..120: mol_type = other DNA
atgatataccacaatataaataactgtatggtgtaatgtattccttcacctctctgagataggaagggaggggaaagtccagcagggcctcagtaaataccttctgagtgaatttgatga

SEQ ID NO: 31262 - DNA, 120 bp, synthetic construct
  source 1..120: mol_type = other DNA
tgccagttagctcgaaattattattttcttccataagtgtctgatgtaccaagcaagttgcttcctcacctggcagattacttatgaggcatacagggaattcattgaataagccatttc

SEQ ID NO: 31263 - DNA, 120 bp, synthetic construct; identical to SEQ ID NO: 2155
  source 1..120: mol_type = other DNA

SEQ ID NO: 31264 - DNA, 120 bp, synthetic construct
  source 1..120: mol_type = other DNA
tgtgtataccagtgaaaccagtagaacgactgaggtaaatcagtatgtgttgattcttcttaaggaaaatgttaaaagagtttttttccctcgtgttcactacattttcgttcctgttct

SEQ ID NO: 31265 - DNA, 120 bp, synthetic construct
  source 1..120: mol_type = other DNA
ttgcagctgtgattatttgctatcttattcattccagcactttttttttccctatgctctttatttatatgttctagataaatgctaggaaacttctccagtaaggcagcttggttcccc

SEQ ID NO: 31266 - DNA, 120 bp, synthetic construct
  source 1..120: mol_type = other DNA
tacataaaggattaaagatatgaatgatagagaaaagctagcagattgcatccattttccttgctttgcctggtttctagtaccccgattccatcatttttcacttggcatttctttcat

SEQ ID NO: 31267 - DNA, 120 bp, synthetic construct; identical to SEQ ID NO: 9263
  source 1..120: mol_type = other DNA

SEQ ID NO: 31268 - DNA, 120 bp, synthetic construct
  source 1..120: mol_type = other DNA
agacctcctttctaggttatataatctagatcattctgtgaggataaggtggaggcagggatctagcatttgcagaagtttggtgagaaagcatgtgttgctcaagaaaggacaagttca

SEQ ID NO: 31269 - DNA, 120 bp, synthetic construct
  source 1..120: mol_type = other DNA
gaaatctcctatggagtctggagtttagtgatgtgatctgatttgtattttcttagaagtttcccaattgcagtgatggactgtagtgttccaataaaagccctctggtttcagggctgg

SEQ ID NO: 31270 - DNA, 120 bp, synthetic construct
  source 1..120: mol_type = other DNA
cttggatttgggtgatggcagcaaggatggaaagttagtggacaaattcaaatttgagagctgcgatgactgggtggagggaaagggggagaaatacatgaaaaggttgtattacgtttc

SEQ ID NO: 31271 - DNA, 120 bp, synthetic construct
  source 1..120: mol_type = other DNA
tattataggtcgcctcctacctcacaagtcacaataggattcaagagcaaatgcatctgagcctctttaagaggcctacaattgcaaggaaattagacagatcttcaaaattagctgctg

SEQ ID NO: 31272 - DNA, 120 bp, synthetic construct; identical to SEQ ID NO: 2157
  source 1..120: mol_type = other DNA

SEQ ID NO: 31273 - DNA, 120 bp, synthetic construct
  source 1..120: mol_type = other DNA
acaaaaaatttttaaaaaattagccaggtgtggtggcatgcatctgtagcctcagctgcttaggaggctgaggcaagatcagtttgagcccaggagtttgaggttgcagtgagccatgat

SEQ ID NO: 31274 - DNA, 120 bp, synthetic construct
  source 1..120: mol_type = other DNA
ttgttttgttttgagatggagtttctttctgttgcccaggcaggagcgcagtggtgggatcttggctcactgcaacctctgtctctggggttcaaacgattctcctgcctcggtctccca

SEQ ID NO: 31275 - DNA, 120 bp, synthetic construct; identical to SEQ ID NO: 9265
  source 1..120: mol_type = other DNA

SEQ ID NO: 31276 - DNA, 120 bp, synthetic construct
  source 1..120: mol_type = other DNA
ttgagacagagtctcactctgttgcccaagctggaatgcagtggcatgatcttggctcactgcaacccccgcctcccgggttcaagtggttctcctgcctcagcctcccaagtagttggg

SEQ ID NO: 31277 - DNA, 120 bp, synthetic construct
  source 1..120: mol_type = other DNA
ccaaagtgctgggattacaggcatgagcaactgtgcccagcctaataatgcttttttaaaaaatagcccgggcgcggtggcttatgcctgtaatcccagcactttgggaggccaaggcag

SEQ ID NO: 31278 - DNA, 120 bp, synthetic construct
  source 1..120: mol_type = other DNA
gggaggctgatacaggagaattgcttgaacccaggaggcggaggttgcagtgagctgagatcataccactgcactctagcctgggcgacagagtgagaccctgtctcaataaaaaccaaa

SEQ ID NO: 31279 - DNA, 120 bp, synthetic construct; identical to SEQ ID NO: 9266
  source 1..120: mol_type = other DNA

SEQ ID NO: 31280 - DNA, 120 bp, synthetic construct
  source 1..120: mol_type = other DNA
tttgaaagaagagctgaatccacttttgacatgaattgatatggctgttatttcctctgatgtagattggaccatgtggaggtagggagaatagaatgtcatgttctttcactgaagcca

SEQ ID NO: 31281 - DNA, 120 bp, synthetic construct
  source 1..120: mol_type = other DNA
aggacaggaggtgattacagcttactaggcaaggcgagcagtccgcccgcggagttcactgagcctcattagctcttccgtagagcttaatgtgtttcccgtttctgtctttccagaagc

SEQ ID NO: 31282 - DNA, 120 bp, synthetic construct
  source 1..120: mol_type = other DNA
aaggtgagagaagccagggtttctcctggcctcttggagagcaggcggtcacgacactacttcagaaaaataaagaaaatgcagagggacttggaaggaaatacaaaaatcacaggagat

SEQ ID NO: 31283 - DNA, 120 bp, synthetic construct; identical to SEQ ID NO: 9267
  source 1..120: mol_type = other DNA

SEQ ID NO: 31284 - DNA, 120 bp, synthetic construct
  source 1..120: mol_type = other DNA
tgaactagagttacatgtatcaatatggaaaaatctctatgttgagttgaaagaatgaaaagaaaaaaatacaaaaaaaccatacagattagcacatttacttaaaatttgaaacatgca

SEQ ID NO: 31285 - DNA, 120 bp, synthetic construct
  source 1..120: mol_type = other DNA
agcatagtgattcccgctgaggggagagcaaaggaaatgagataagtctgcataggagacttcagctgtaatagttaacaacaacaaagacctgaagtgtatatggctaattctaagcta

SEQ ID NO: 31286 - DNA, 120 bp, synthetic construct
  source 1..120: mol_type = other DNA
ttgggaggccagggcaagcggatcatgaggtcaggaaatcgagaccatcctggctaacatggtgacaccccgtctctactaaaaatacaaaaaattagctgggcatggtggcgggcgcct

SEQ ID NO: 31287 - DNA, 120 bp, synthetic construct
  source 1..120: mol_type = other DNA
ctcaaaaaaagaagcaaaaggtatagtagacacatatatactatgatggaatgatagccaagctgagatactgttttagttaaaaaaattttatttttatcaaagtagtatgtattacca

SEQ ID NO: 31288 - DNA, 120 bp, synthetic construct; identical to SEQ ID NO: 9268
  source 1..120: mol_type = other DNA

SEQ ID NO: 31289 - DNA, 120 bp, synthetic construct
  source 1..120: mol_type = other DNA
tcttattttcatgaagtattgtactccaacagatcccaaaaaagggtacctgggagatacatttttaatatcttgcatgtatctgtgttctaatctcacacttaattatttggttagaga

SEQ ID NO: 31290 - DNA, 120 bp, synthetic construct
  source 1..120: mol_type = other DNA
aggactgtcatgctcaatggtaaggcagctatagttgagagctggagagtaggcactgcctgtgtttggttctcttttatattttgtgtttctcagctgagattttccatctttttattc

SEQ ID NO: 31291 - DNA, 120 bp, synthetic construct
  source 1..120: mol_type = other DNA
gagtcttcctgtgctgagtgatgttgtgttgtgtcctagacattgtgatatgatggtggaggtgtcatacaacagaacggtatggattctgttggtttgccccaaaaggggttgatgttt

SEQ ID NO: 31292 - DNA, 120 bp, synthetic construct; identical to SEQ ID NO: 9269
  source 1..120: mol_type = other DNA

SEQ ID NO: 31293 - DNA, 120 bp, synthetic construct
  source 1..120: mol_type = other DNA
gcatgctgttctctgttccaagtttcaaactccaccaaaatctgcctgccctttttcagtcagctgaaccctcaggaagctgtttttttgtattttgttcagtgtacagctgtcatttgc

SEQ ID NO: 31294 - DNA, 120 bp, synthetic construct
  source 1..120: mol_type = other DNA
tgtttttttgtattttgttcagtgtacagctgtcatttgcaggggggttgactggttaggcacagactagatacggaactcagacagcctgggtttgaatcccagttttgccctttcttt

SEQ ID NO: 31295 - DNA, 120 bp, synthetic construct; identical to SEQ ID NO: 9270
  source 1..120: mol_type = other DNA

SEQ ID NO: 31296 - DNA, 120 bp, synthetic construct
  source 1..120: mol_type = other DNA
acacggtcttgcttgttgccctggctggattgcagtgatatgatcacggctcactgcagccttgacctcctgggctcaagcagtcttcccacctcagcctcctgagtagcagagaccaca

SEQ ID NO: 31297 - DNA, 120 bp, synthetic construct
  source 1..120: mol_type = other DNA
aagtgttggaattacaggtgtgagccacgatggccagcctgccatttctaattagctttgtgcttggacaagttattccactgctctgtgtcatagtttccttatatgtcaagtggtggg

SEQ ID NO: 31298 - DNA, 120 bp, synthetic construct
  source 1..120: mol_type = other DNA
tcaagtgatcctcctgcttcagctttccaagtagccaggactgcaggtgtatgccaccacacctggctaatttttgtgtttttagtagagacggggttttcccatgttgcccaggctggt

SEQ ID NO: 31299 - DNA, 120 bp, synthetic construct; identical to SEQ ID NO: 9271
  source 1..120: mol_type = other DNA

SEQ ID NO: 31300 - DNA, 120 bp, synthetic construct
  source 1..120: mol_type = other DNA
ttttagtagagacagggtctcgtcatactggccaggctggtctcaaactcctgacctcaagtgatctgccctcctgagcctcccaaagtactgggattacagacatgagccacctcgcct

SEQ ID NO: 31301 - DNA, 120 bp, synthetic construct
  source 1..120: mol_type = other DNA
ttacagtatttctttgataatttcttctcttgtgttttctgtgtttgctcttttttttttttcctttgagacggagtcttgctgttgttacccgggctggagtgcaatggcgtgatctcg

SEQ ID NO: 31302 - DNA, 120 bp, synthetic construct
  source 1..120: mol_type = other DNA
gggttttaccatgttggccaggctggtctcgaactcctgacctcaagtgatcgcctgcctcggcctcccaaagtgctgagattataggcgtgagccaccacgccgggccctttttttttt

SEQ ID NO: 31303 - DNA, 120 bp, synthetic construct; identical to SEQ ID NO: 9272
  source 1..120: mol_type = other DNA

SEQ ID NO: 31304 - DNA, 120 bp, synthetic construct
  source 1..120: mol_type = other DNA
ttatttatttatttatttatttattgagatggtgccttgctctgttgcccaggctggagtgcggtggtgcagaccagctcactgcaacctctttctcccaggttcaagcgattctcctgc

SEQ ID NO: 31305 - DNA, 120 bp, synthetic construct
  source 1..120: mol_type = other DNA
cttggtctcccaaagtgctgggattacaggcatgagcccccgcacctggccagccttttaaaaatatgacatcccattagtacatttgattgtctgacttttaagaatactttgaggctg

SEQ ID NO: 31306 - DNA, 120 bp, synthetic construct
  source 1..120: mol_type = other DNA
caaaacattagccgggtgtggtggtgggtacctgtaatcccagctactcgggaggctgaggcaggagaattgcttgaacccaggaggcagaggttgcagtgagccgagatcgcaccattg

SEQ ID NO: 31307 - DNA, 120 bp, synthetic construct
  source 1..120: mol_type = other DNA
cagatcacgaggtcaggagttcgaaaccagcctgaccaacatggtgaaaccctgtctttactaaaaatacaaaaattagccgggcgtggtggcatgcacctgtaatcccacgtactcagg

SEQ ID NO: 31308 - DNA, 120 bp, synthetic construct; identical to SEQ ID NO: 9273
  source 1..120: mol_type = other DNA

SEQ ID NO: 31309 - DNA, 120 bp, synthetic construct
  source 1..120: mol_type = other DNA
tacaactttaaaaagttttcttttgctccctgtcttatttcctccaatttatttttgtttgttttggtctcctctttcatagtagagactgtggtcaaatgtctggtactctacagctgt

SEQ ID NO: 31310 - DNA, 120 bp, synthetic construct
  source 1..120: mol_type = other DNA
gaattctcaaagcagtgtctgtagggtttttcccttgggcttatcagttccctcagagaggaatcttctaaattcctgcttggggtatgaaactggcagccttgtgtgaaatacacagag

SEQ ID NO: 31311 - DNA, 120 bp, synthetic construct; identical to SEQ ID NO: 9274
  source 1..120: mol_type = other DNA

SEQ ID NO: 31312 - DNA, 120 bp, synthetic construct
  source 1..120: mol_type = other DNA
ttcttgtgttagtccattttgtgtcagtataaaggaatacctgaggctgggtaacttagaaagaaaagaggtttatttggctcatggttctgcaggctgtttaagaagccatcaccacct

SEQ ID NO: 31313 - DNA, 120 bp, synthetic construct
  source 1..120: mol_type = other DNA
aaagatcaccagaggccaagtgcggtggcccatgcctgtcatcccaacgctttgggatgctggggtgggaggattccttgaggccagaaatttaagaccagcctgggtaacatggcaatg

SEQ ID NO: 31314 - DNA, 120 bp, synthetic construct
  source 1..120: mol_type = other DNA
gagccatgatctgcagtcaacctaggtaacagagttaagaccctgtttcaaaaataaaagatcactagaatcaacaatcactctttaattttattttaacttgatggttatcactatata

SEQ ID NO: 31315 - DNA, 120 bp, synthetic construct; identical to SEQ ID NO: 9275
  source 1..120: mol_type = other DNA

SEQ ID NO: 31316 - DNA, 120 bp, synthetic construct
  source 1..120: mol_type = other DNA
tttttttttttgaaaagacatttccaaaagttaattagttggcatcttttcattcatagttgtgatggttcacaccttaatctgagtgaactttttctctgccacctaggatggtcctgg

SEQ ID NO: 31317 - DNA, 120 bp, synthetic construct
  source 1..120: mol_type = other DNA
ttctgtggcctggccgcgctggtaatcctcaagagggaacgttccttgaacttgaagagcttattagtaagtatcttttgagccatccccctctcaggccccaggtcatggtgatgtgat

SEQ ID NO: 31318 - DNA, 120 bp, synthetic construct
  source 1..120: mol_type = other DNA
ttctgtcttcctgcttagagctttttacatagtgtgtagactacatagactgtgtgctgcagacatctggtgtgagcagagtaccttccttatacttcagtttcgtagaattagaggtta

SEQ ID NO: 31319 - DNA, 120 bp, synthetic construct; identical to SEQ ID NO: 9276
  source 1..120: mol_type = other DNA

SEQ ID NO: 31320 - DNA, 120 bp, synthetic construct
  source 1..120: mol_type = other DNA
actagattgtagttaaatgatcagtgggtgcacaaacacacacacctccacggccaccagggagaaggcattccccgtcatgtcatttggggagcatgtaccccctgaccatgacgtcaa

SEQ ID NO: 31321 - DNA, 120 bp, synthetic construct
  source 1..120: mol_type = other DNA
agcagtgtcttgcctccaccttcagaaagcctcccccggtgtagtctttttaaagattcatgaaggcttgaaggctcatgctgaaacagccaactttgtatgctgaacttaagagtttct

SEQ ID NO: 31322 - DNA, 120 bp, synthetic construct
  source 1..120: mol_type = other DNA
accctgtccctactacatttgagacatgagtccttgggcaaattgtctaatctcttttagcttgatatttttttcttttataaggtagggataacaatccttatttttttaaggttaaag

SEQ ID NO: 31323 - DNA, 120 bp, synthetic construct; identical to SEQ ID NO: 9277
  source 1..120: mol_type = other DNA

SEQ ID NO: 31324 - DNA, 120 bp, synthetic construct
  source 1..120: mol_type = other DNA
gcgtgcaacctagaagcctggcatacacggttcacagtagggtttgcgctcctatgagaatctaatgctgctgctgatctgtcaggaagtggagctcaggcagtaatgggagcagtgagg

SEQ ID NO: 31325 - DNA, 120 bp, synthetic construct
  source 1..120: mol_type = other DNA
tgctttgggagaagtaggacccatatctgaagtatgaattcctatagcccaaggaaacagaacaaatccatgggcttaggcactggaaaaagtaaattagtctgcttaaaaacacttaag

SEQ ID NO: 31326 - DNA, 120 bp, synthetic construct
  source 1..120: mol_type = other DNA
cgaggatatattagtacctgaacctgcagtacagtgttttctgtctcttttaagcatttgtgactgtgactctctatgggcaggtgttgccttgaagagggaataatctaaacaacagct

SEQ ID NO: 31327 - DNA, 120 bp, synthetic construct; identical to SEQ ID NO: 9278
  source 1..120: mol_type = other DNA

SEQ ID NO: 31328 - DNA, 120 bp, synthetic construct
  source 1..120: mol_type = other DNA
taattagaatgaatggcttctgctttcaggcctgctagtgacttgctaagagaccttgggtaaatttccccaggtgccaagtaaaagtcaggagcagtttgagatcatctgatgaaatgt

SEQ ID NO: 31329 - DNA, 120 bp, synthetic construct
  source 1..120: mol_type = other DNA
ctactaaaaatacaaaaaattagccgggcgcggtggcgggcgcctgtggtcccagctactcgggaggctgaggcaggagaatggcgtgaacccgggaagcggagcttgcagtgagccgag

SEQ ID NO: 31330 - DNA, 120 bp, synthetic construct
  source 1..120: mol_type = other DNA
taataaactccccggagcagggaagtaatgagaaatgagctactggtagtcttgccttcaatttccaacttaagccatgtttattaagagactttgaaggtctccttacaaaccagcttg

SEQ ID NO: 31331 - DNA, 120 bp, synthetic construct; identical to SEQ ID NO: 9279
  source 1..120: mol_type = other DNA

SEQ ID NO: 31332 - DNA, 120 bp, synthetic construct
  source 1..120: mol_type = other DNA
catctgtgtctcctcagcaatgggtgacaagccggcagatgcgatttgaaggaggatttcagggccgctgcaacaagctggtggatggctgctactccttctggcaggcggggctcctgc

SEQ ID NO: 31333 - DNA, 120 bp, synthetic construct; identical to SEQ ID NO: 2171
  source 1..120: mol_type = other DNA

SEQ ID NO: 31334 - DNA, 120 bp, synthetic construct
  source 1..120: mol_type = other DNA
gccacctcctctgggtgcagggcagagctgaaaaccctcagtgttgcaacagtcactgttgcaacagcaacaggaaaggcaactgcgtaaaggggtagagaaccagaacccatgtgtagg

SEQ ID NO: 31335 - DNA, 120 bp, synthetic construct
  source 1..120: mol_type = other DNA
gggagtttgttccacctgcaccattggagtagagaaatccacgttcgtttctgtggggtctcaaatgggaacgcaaaaccgaagtagttagtgagcaaaaagtctgggaacattctctct

SEQ ID NO: 31336 - DNA, 120 bp, synthetic construct; identical to SEQ ID NO: 9280
  source 1..120: mol_type = other DNA

SEQ ID NO: 31337 - DNA, 120 bp, synthetic construct
  source 1..120: mol_type = other DNA
cagcctccacctcccaggttcaagcaattctcctgcctcagcctcctgagtagctgggactacaggcgcgtgccaccacacctggctaatttttgtatttttagtagagacagggtttca

SEQ ID NO: 31338 - DNA, 120 bp, synthetic construct
  source 1..120: mol_type = other DNA
tttcttaatttcctttgagttgttgagttgtgaccatttctgacactgaattaaagtaagcagagcctctgtcccattttcccggcctgggcccactgggctttaggtgtcagtattaag

SEQ ID NO: 31339 - DNA, 120 bp, synthetic construct; identical to SEQ ID NO: 9281
  source 1..120: mol_type = other DNA

SEQ ID NO: 31340 - DNA, 120 bp, synthetic construct
  source 1..120: mol_type = other DNA
aaaaaacttggggtcatggtgatctctttatttggaactggtgaggtcaagcccctggtaaaatggtcagtcttttacaaacctgtccctggcatggataagactcagtaattctgcaat

SEQ ID NO: 31341 - DNA, 120 bp, synthetic construct
  source 1..120: mol_type = other DNA
ttgtctatggaaaagggtgcctatgaatcttggtgcttccagcttttttcattggctgggagaaggcctgtgttgtcttctcagacacagggcatctcttgaacttggaacagacaggag

SEQ ID NO: 31342 - DNA, 120 bp, synthetic construct
  source 1..120: mol_type = other DNA
gaatcccatttttagtgaagagttgactacaaaaaattcatagaaagtatctaggatgtgaagttacaggtgatgtttgcttctgtttgtattttctaatctttctatagttaataggta

SEQ ID NO: 31343 - DNA, 120 bp, synthetic construct; identical to SEQ ID NO: 9282
  source 1..120: mol_type = other DNA

SEQ ID NO: 31344 - DNA, 120 bp, synthetic construct
  source 1..120: mol_type = other DNA
accattgtttacagatgaggaaacaaactacagtgaggttaagtgattgctttataatacctgattggcactcacaagggttagtatgtggttgtgtgaatccagactagctggcatctg

SEQ ID NO: 31345 - DNA, 120 bp, synthetic construct
  source 1..120: mol_type = other DNA
ttggcagagattaaaaaacttgataccctatgttggggagagtgtgagaaaacaggtaatttgatagtggggatgtaaataggttaagtcattttttggagggcagtttggagacatcca

SEQ ID NO: 31346 - DNA, 120 bp, synthetic construct; identical to SEQ ID NO: 9283
  source 1..120: mol_type = other DNA

SEQ ID NO: 31347 - DNA, 120 bp, synthetic construct
  source 1..120: mol_type = other DNA
ttagatttttttttttttttttttttttttttgagacagagtctcactctgttgctgaggctggagtgcagtggtgcaatctcggctcactgtagcctcctcggttcaattgattttctt

SEQ ID NO: 31348 - DNA, 120 bp, synthetic construct
  source 1..120: mol_type = other DNA
ctcaagtgatccaccttccttggccacacaaagtgctgagattacaggcgtgagccaccatacctggccaactttttagattttctatccttctgtattatactgtgcctttaaaaaaaa

SEQ ID NO: 31349 - DNA, 120 bp, synthetic construct
  source 1..120: mol_type = other DNA
tctaggccatgccctgacccagcaagtgaccatcagtggctccatgccattgactaccttctatgtgtaaatgacagtatttgagtagaagaaggaattactattagtaccttaaaatgc

SEQ ID NO: 31350 - DNA, 120 bp, synthetic construct; identical to SEQ ID NO: 9284
  source 1..120: mol_type = other DNA

SEQ ID NO: 31351 - DNA, 120 bp, synthetic construct
  source 1..120: mol_type = other DNA
ggccaacatggtgaaaccccatctctactaaagatacaaaaaattagccaggcatggtgccacgttgcctgtaatcccagctactcaggaggctgaggcaggagaatcccttgaaccccg

SEQ ID NO: 31352 - DNA, 120 bp, synthetic construct
  source 1..120: mol_type = other DNA
gtgagttactttgtttttttgttttgtggagcaataagaaagcagcaggcctgtgagtttccacttggcttggtagttactggtttcttatatgttcttttggacataccctggaatttt

SEQ ID NO: 31353 - DNA, 120 bp, synthetic construct
  source 1..120: mol_type = other DNA
aaaggaacctttgaaatgcaaaatgagattagaatggcgacctataatttcaggaagaggtagaaaggatttaaaaggtggattccagtgtgcagttatcaccctataatcgtatctgct

SEQ ID NO: 31354 - DNA, 120 bp, synthetic construct
  source 1..120: mol_type = other DNA
cttctatgctttaataatataggaagtcactgaaacagtctatagttttttatataataaacatagcgttttcttttcagactctaattttagccacaggttatcatttaccttataata

SEQ ID NO: 31355 - DNA, 120 bp, synthetic construct; identical to SEQ ID NO: 9285
  source 1..120: mol_type = other DNA

SEQ ID NO: 31356 - DNA, 120 bp, synthetic construct
  source 1..120: mol_type = other DNA
aaaaggagaaaatagatgcagcatatgatgtagacaaggggcaagtataagaaaaagctagattaataaaattggctattggatctcagaagattaggccaaacagacaccatcataagg

SEQ ID NO: 31357 - DNA, 120 bp, synthetic construct
  source 1..120: mol_type = other DNA
tttaaaaagtaactaaagctggccgggcgtggtggctcacgcctgtaatcctagcactttgggaagccgagttgggcagatcattttaggagttcgagactggcttgatcaacatagtga

SEQ ID NO: 31358 - DNA, 120 bp, synthetic construct; identical to SEQ ID NO: 9286
  source 1..120: mol_type = other DNA

SEQ ID NO: 31359 - DNA, 120 bp, synthetic construct
  source 1..120: mol_type = other DNA
cacagggattgtgctgagagtagtctataaattcttaaagcagtttatcagtatctattaaaagccttaacaatgtttattccctttaaccgaataattccaccgtggtcagtctatttg

SEQ ID NO: 31360 - DNA, 120 bp, synthetic construct
  source 1..120: mol_type = other DNA
atatatgtatgtatcttctacaacaaagttcactgtgcttacaggtgaggaaaagaaaggaagggaattaaaatagtgcaagtgtatcaaagcatgtggcctgcagccagcctgagatgg

SEQ ID NO: 31361 - DNA, 120 bp, synthetic construct
  source 1..120: mol_type = other DNA
acctggccactgtccctcacctagtgctcaaccttggaaacccttttcctctgtgtctctttttaaagaaatttaataaattcttattgtctgtttgaaatattcaacaatttaggctgg

SEQ ID NO: 31362 - DNA, 120 bp, synthetic construct
  source 1..120: mol_type = other DNA
cagcctgaccaacatagtgaaaccatgtctctactaaaaatacaagaattagccaggcatggtggtgcatgcctgtaatcccagctactcgggaggctgaggcaggacaatcgcttgaac

SEQ ID NO: 31363 - DNA, 120 bp, synthetic construct; identical to SEQ ID NO: 9287
  source 1..120: mol_type = other DNA

SEQ ID NO: 31364 - DNA, 120 bp, synthetic construct
  source 1..120: mol_type = other DNA
acgccattctcctgcctcagcctcctgagtagctgggactacaggcgcccaccaccatgtccggctaatttttttgtatttttagtagagacagggtttcaccgtgttagccgggatggt

SEQ ID NO: 31365 - DNA, 120 bp, synthetic construct
  source 1..120: mol_type = other DNA
ccaccataggaatttatatactgacatatatataagatttttagctcagttctttttatgatacagttaccttatatgtccacttaatgaaatactatatggctattcacagtgatggct

SEQ ID NO: 31366 - DNA, 120 bp, synthetic construct
  source 1..120: mol_type = other DNA
gaacaattagctttcaggtgccatttaccaattgttgggcatcttttttttaaaaatgatttattgtcaggcatcttttagcccaggtatcaaaatataaaattgaccaaggacttagtg

SEQ ID NO: 31367 - DNA, 120 bp, synthetic construct; identical to SEQ ID NO: 9288
  source 1..120: mol_type = other DNA

SEQ ID NO: 31368 - DNA, 120 bp, synthetic construct
  source 1..120: mol_type = other DNA
agaagaaacagactttattacccattaagagttctctgagctaatcagtctggttaacaagttatagagatatgctagagggaatgtctcttgaagtccagggtagagttatggaccaag

SEQ ID NO: 31369 - DNA, 120 bp, synthetic construct
  source 1..120: mol_type = other DNA
tgaaagtgccactttgaattgctgctctttgacacatgtcaaagttcaggagaagggacatgctgtgcgtaggacatggggaagatagcagttgtaccaagaatgaatggaagaggaagg

SEQ ID NO: 31370 - DNA, 120 bp, synthetic construct; identical to SEQ ID NO: 9289
  source 1..120: mol_type = other DNA

SEQ ID NO: 31371 - DNA, 120 bp, synthetic construct
  source 1..120: mol_type = other DNA
acccagttgggagcaccccttgaggccattgatcttggcacctccagctgcccgtcttgtcccccagcctgcatgcaaccccctcccccagacagggaaacagattgctgggtagataac

SEQ ID NO: 31372 - DNA, 120 bp, synthetic construct
  source 1..120: mol_type = other DNA
taaatgattaagctcaaatctgagatggcttatgtgttagaaaaagggaaataaaataagtcctctcacctttgttacccaccctctgtcttcccccatcccagcacacgtcctgctgct

SEQ ID NO: 31373 - DNA, 120 bp, synthetic construct
  source 1..120: mol_type = other DNA
agagaagtgtatcaatttatcattagtactgcccctggagagccctttccagaagacagctggagagactgactttaaaattacagtttcctttaatagtttaaggtaaaaaaagaaaga

SEQ ID NO: 31374 - DNA, 120 bp, synthetic construct; identical to SEQ ID NO: 9290
  source 1..120: mol_type = other DNA

SEQ ID NO: 31375 - DNA, 120 bp, synthetic construct; identical to SEQ ID NO: 2181
  source 1..120: mol_type = other DNA

SEQ ID NO: 31376 - DNA, 120 bp, synthetic construct
  source 1..120: mol_type = other DNA
catgatgtggtcctgggtgtgcccgaaaacgctctggtaagacgggtgcagggcttcacaccccttctccacagggacctcgcggacagaaggctttccaagtaagcagaactggctctg

SEQ ID NO: 31377 - DNA, 120 bp, synthetic construct
  source 1..120: mol_type = other DNA
gcggtctgatctgtcaaagagctgttgtgcctttatcccagggctgaggacctagcccactgctggtattagcttcccctagaggaggccacagttacgtgtcactctgaggctgtgagt

SEQ ID NO: 31378 - DNA, 120 bp, synthetic construct; identical to SEQ ID NO: 9291
  source 1..120: mol_type = other DNA

SEQ ID NO: 31379 - DNA, 120 bp, synthetic construct
  source 1..120: mol_type = other DNA
tttgtgtgcagttccctactcttactaagccctacttccaccagtgtaaacatggcctgctgctaccatctaggtcactgccttattttctcatctgtgtcattgtaaccttcctttttt

SEQ ID NO: 31380 - DNA, 120 bp, synthetic construct
  source 1..120: mol_type = other DNA
tcaagcaattctcgtgcctcagcctcctgagtagctgggattacaggcatgcaccaccacacccagctaatttttgtatttttagtagagacagggtttccccatgttggccaggctggt

SEQ ID NO: 31381 - DNA, 120 bp, synthetic construct
  source 1..120: mol_type = other DNA
ggaagaaacacaaatggccaatagatagttgaaaagatgctcaacctcattcttaatcagaaaaaccaccacccagcttttccaggccctaattatttccccctatttgcctcttatgta

SEQ ID NO: 31382 - DNA, 120 bp, synthetic construct; identical to SEQ ID NO: 9292
  source 1..120: mol_type = other DNA

SEQ ID NO: 31383 - DNA, 120 bp, synthetic construct
  source 1..120: mol_type = other DNA
tttatctgtgttcacatgtgttgctccagtttattcattttaactattatatgatactcccttatataaatgtaccccagtgtgtttctctgttctcctgctagttatcaattttttgct

SEQ ID NO: 31384 - DNA, 120 bp, synthetic construct
  source 1..120: mol_type = other DNA
ctgtaactgctccccagtgtggttgtgtaagatgaatcgatccatagtcagaccttttcctttttgccaatttgatgggtgtgaagtggtatttgtttgattttgtgttttcctgattac

SEQ ID NO: 31385 - DNA, 120 bp, synthetic construct
  source 1..120: mol_type = other DNA
cttaagtatttgtagttctctgtatatttttaatactaatcttctatcagttacatgtgtgtagtgaatatcttccagcttgtgacttgtcttttcattttgtgactctgatttgcattg

SEQ ID NO: 31386 - DNA, 120 bp, synthetic construct; identical to SEQ ID NO: 9293
  source 1..120: mol_type = other DNA

SEQ ID NO: 31387 - DNA, 120 bp, synthetic construct
  source 1..120: mol_type = other DNA
gccatcttggggatcagatttcaacattaatttttgtggggacaaataaaccacatccaaaccatagcattttgtttttggtgtttttttgttaaatagaagattttaggccagatatgg

SEQ ID NO: 31388 - DNA, 120 bp, synthetic construct
  source 1..120: mol_type = other DNA
gcccccagcaccccttccccacaaaaatattttaatattttaattttgaagtggtcaaatctatttgtcttttctgtcattcaggggtttgtttttgggggagggtaggtgaggattaac

SEQ ID NO: 31389 - DNA, 120 bp, synthetic construct
  source 1..120: mol_type = other DNA
ttaaggaatctctaccattttttgagggaagcagacaaaaggaggcacacattaaacaaatacatcacaaattgtgatgcgtgctatgaagggaatgaacaaggcaatgcagcaagtcat

SEQ ID NO: 31390 - DNA, 120 bp, synthetic construct; identical to SEQ ID NO: 9294
  source 1..120: mol_type = other DNA

SEQ ID NO: 31391 - DNA, 120 bp, synthetic construct
  source 1..120: mol_type = other DNA
ttgctttttcctgtgaattgtaggatcagcctgtcaagttctaatgggatttttattggaattgcactacattttagattaataggagagaaccaacttttttttttttcttcctgtctt

SEQ ID NO: 31392 - DNA, 120 bp, synthetic construct
  source 1..120: mol_type = other DNA
gcattttttttttttcggttagagttatgtctaatttacagttttcatgtctcttgtgactggaatcttttcttattttcagttttgtaactgtttgttactagtgtatagaaatgctaa

SEQ ID NO: 31393 - DNA, 120 bp, synthetic construct
  source 1..120: mol_type = other DNA
atttttcttgccttgtattgttgggtaagatccccacatagtgctgactaaaggtagtagagggcattcgtctcttgctcctgattataatgggaaggctttttataacctgatcattaa

SEQ ID NO: 31394 - DNA, 120 bp, synthetic construct; identical to SEQ ID NO: 9295
  source 1..120: mol_type = other DNA

SEQ ID NO: 31395 - DNA, 120 bp, synthetic construct
  source 1..120: mol_type = other DNA
ttttgcatgtacattcataagaaagattgatctaaaattttattgtattgtccttttccagtgtttcaggataatatcatagcctcataaaattaaatgggtagcttcctgcacctctta

SEQ ID NO: 31396 - DNA, 120 bp, synthetic construct
  source 1..120: mol_type = other DNA
tgccttagcctcccaagtagcagggactacaggtgcacaccaccagaacctgctaatttttaaattttttgtagagacagggttttgctatgttgcctagtctggtcttgaactcttggc

SEQ ID NO: 31397 - DNA, 120 bp, synthetic construct
  source 1..120: mol_type = other DNA
gattatctgtttctttgtaggtttgatactacttgcctgagaaaccatctaggtctagtatcttttaaggtatgtgggggtggcagaataagcaattgttgttactaatttcttcatgta

SEQ ID NO: 31398 - DNA, 120 bp, synthetic construct; identical to SEQ ID NO: 9296
  source 1..120: mol_type = other DNA

SEQ ID NO: 31399 - DNA, 120 bp, synthetic construct
  source 1..120: mol_type = other DNA
gagacagagtctcgctgttgcccaggttagagtgcagtggcacaatcttggctcactgcaacctccgcctcccgggttcaagcaattctcctgcttcagcctcccaactagctgggatta

SEQ ID NO: 31400 - DNA, 120 bp, synthetic construct
  source 1..120: mol_type = other DNA
aaatgctgggattacaggcatgagccaccgcgtccggccccctttttcttgattataaatgtaaatacatgtttattgttttaataattgggatacataaaatataaaaaagaaaatgaa

SEQ ID NO: 31401 - DNA, 120 bp, synthetic construct
  source 1..120: mol_type = other DNA
accccagcactttgggaggccgaggcgggtggatcacctgaggtcaggagttcgagaccagccggaccaacatggtgaaaccctgtctctactaaaaatacaaaaataatcccagcactt

SEQ ID NO: 31402 - DNA, 120 bp, synthetic construct
  source 1..120: mol_type = other DNA
tagtcccagctacttgggaggctgaggcaggagaatggcgtgaacccgggaggcggagcttgcagtgagccgagatcccgccactgcactccagcctgggcgacagagcgagagactccg

SEQ ID NO: 31403 - DNA, 120 bp, synthetic construct; identical to SEQ ID NO: 9297
  source 1..120: mol_type = other DNA

SEQ ID NO: 31404 - DNA, 120 bp, synthetic construct
  source 1..120: mol_type = other DNA
tgggctttgtgtgtatctctgattccttatactaaattcttagaagtgcctttcatggagcaaaggatgtgttatgttttcaaggaccaccggggtgattaactggcaccttttcttctc

SEQ ID NO: 31405 - DNA, 120 bp, synthetic construct
  source 1..120: mol_type = other DNA
agagcctgcaaccgactagaggacctgggtcccggcagctctttgctcacccatctccccagtcagacaaggtttatacgtttcaatacatactgcattctgtgctacacaagccttagc

SEQ ID NO: 31406 - DNA, 120 bp, synthetic construct
  source 1..120: mol_type = other DNA
ttttaaaaattctttccacacctgtcaaaccaaaaatctatcagcccacgtggtgtggttggtgaacagtgcatgccaggaggaagcagtccctcctcaccagctctccagccaggacga

SEQ ID NO: 31407 - DNA, 120 bp, synthetic construct; identical to SEQ ID NO: 9298
  source 1..120: mol_type = other DNA

SEQ ID NO: 31408 - DNA, 120 bp, synthetic construct
  source 1..120: mol_type = other DNA
gcttcagccccaggtgtggtgacttagacctaggaaaccaattatgagtggaaagtgaccctctagttcaactgtgccagaggaaacagccctccagtgcccacctgcctcactcctccc

SEQ ID NO: 31409 - DNA, 120 bp, synthetic construct; identical to SEQ ID NO: 2189
  source 1..120: mol_type = other DNA

SEQ ID NO: 31410 - DNA, 120 bp, synthetic construct
  source 1..120: mol_type = other DNA
tggagtatcaagttgggccatctgtctactgacctggccttcatgtaagcagctgtgggctgcgggcagacaggagctcagagatgcagcatgaggcgcttagaaaaacctggccatttg

SEQ ID NO: 31411 - DNA, 120 bp, synthetic construct; identical to SEQ ID NO: 9299
  source 1..120: mol_type = other DNA

SEQ ID NO: 31412 - DNA, 120 bp, synthetic construct
  source 1..120: mol_type = other DNA
cccagccctccacacactgcacttcatggtctgtctccgacagacagcaaggactgggcctagtagccccagagcaggctgacttagcaagggtgggtggatgtctggccagaggcaggg

SEQ ID NO: 31413 - DNA, 120 bp, synthetic construct
  source 1..120: mol_type = other DNA
gagagaagatggtgtccttagagggcacccaaatccatgtaaataagccaaatgcacatccaggaatgtaattcctgccccctgtgctatttttgccctgttaacaaaggtttgcactgc

SEQ ID NO: 31414 - DNA, 120 bp, synthetic construct
  source 1..120: mol_type = other DNA
agggattgcttcagtctgaactggctttttaccaagaaggagggatctgagttgggccccaaagggtaggtaaagttagtctgggtagagaagagaaagggttatttcaggagagtttac

SEQ ID NO: 31415 - DNA, 120 bp, synthetic construct
  source 1..120: mol_type = other DNA
gagtgcagtggcacaatcatggctcactgcagcctcgacctcctgggctcagaagatcttcctgccttagcctcccaagtagctaggaccacaggtgcacaccaccacagctagctaatt

SEQ ID NO: 31416 - DNA, 120 bp, synthetic construct; identical to SEQ ID NO: 9300
  source 1..120: mol_type = other DNA

SEQ ID NO: 31417 - DNA, 120 bp, synthetic construct
  source 1..120: mol_type = other DNA
gagcggagcataaagagaacctcatggataatcaggggaaacacccctgagataataataccagtaaacaatagttccacactgctctcccttcttggtattattgagcattcttccata

SEQ ID NO: 31418 - DNA, 120 bp, synthetic construct
  source 1..120: mol_type = other DNA
ggaaggaaagtataatatgatttaagacaccattgcaactggtagaaaacttgacccaaactggcttttgaagcaaaagaggcaatctgttgactcaaactgcagagtccaggaattagg

SEQ ID NO: 31419 - DNA, 120 bp, synthetic construct
  source 1..120: mol_type = other DNA
caggttcagcagacaggcacacttggttccaccccagccttccttccagcgagtatcattgtgtttcactggctttaatcaaaccaagtgcctttccaagaagcagtccaatggcttgga

SEQ ID NO: 31420 - DNA, 120 bp, synthetic construct; identical to SEQ ID NO: 9301
  source 1..120: mol_type = other DNA

SEQ ID NO: 31421 - DNA, 120 bp, synthetic construct
  source 1..120: mol_type = other DNA
taattttcatttatctctctttgccccagtaatttgttcaggttgggagtaactcaggcttaagtcagtcagcatgatttgtccttgccccagtgatcaattcagagcacaagcatgtga

SEQ ID NO: 31422 - DNA, 120 bp, synthetic construct
  source 1..120: mol_type = other DNA
cctaaaatagtctaaagagagagacgtcgtggacactgtatgacggggaaaagcagctctttcctattaggggatggtagaatgtgtggcctgggcctcctataaccatttttctaccta

SEQ ID NO: 31423 - DNA, 120 bp, synthetic construct; identical to SEQ ID NO: 9302
  source 1..120: mol_type = other DNA

SEQ ID NO: 31424 - DNA, 120 bp, synthetic construct
  source 1..120: mol_type = other DNA
ctggaacacagtggtaagtatttgtgaatctaaacatggaaaaggtacagtaaaaatacagtattatgatctcacgggaccactgtcgtacatgcattctgttgttaaccaaaacatgat

SEQ ID NO: 31425 - DNA, 120 bp, synthetic construct
  source 1..120: mol_type = other DNA
tccctcctgttctaccgcctctcatttgatccttgactcaccttgtaaggtgggtgaagcaggcgtattacctgccttttacaactggagaaacaggttggagagcttacgtaaatcacc

SEQ ID NO: 31426 - DNA, 120 bp, synthetic construct
  source 1..120: mol_type = other DNA
gggggcactggtgaaacatgcttggtttacctctaggctggatggctgaggccctgaataccagctgccatctgtcactaggtcagggatggtgacagcaaatagggcaggcccctcacc

SEQ ID NO: 31427 - DNA, 120 bp, synthetic construct
  source 1..120: mol_type = other DNA
gctttctccaacctggcccaggcacatctaacaggttcctgcacatcctcacactttcctgcagtaaccctccttgcctctgttttccaccagctggggaactggggccaggtggcctca

SEQ ID NO: 31428 - DNA, 120 bp, synthetic construct; identical to SEQ ID NO: 9303
  source 1..120: mol_type = other DNA

SEQ ID NO: 31429 - DNA, 120 bp, synthetic construct
  source 1..120: mol_type = other DNA
atcgcttgaacccaggaggcagaggttgtggtgagctgagattgcacccttgcactccagccttggcaacaagagtgaaattccatctcaaaaaaaaaaaaaaaaacaatgtatttttta

SEQ ID NO: 31430 - DNA, 120 bp, synthetic construct
  source 1..120: mol_type = other DNA
aaaattaaaaaaaaaaaaaaaaattagtcggatgcggtggcacacacctgtgctcacagctacttgggaggctaagatggggggtcacttgagcctgagaagtaaaggctgcagtaagcc

SEQ ID NO: 31431 - DNA, 120 bp, synthetic construct; identical to SEQ ID NO: 9304
  source 1..120: mol_type = other DNA

SEQ ID NO: 31432 - DNA, 120 bp, synthetic construct
  source 1..120: mol_type = other DNA
ttttgacggtttctcattctttccttgtttttgatgactttgacagttttgaaaagtatggccaggtattttgtagaacatccctcaggtgggatttgtttgatgttatccttatgacta

SEQ ID NO: 31433 - DNA, 120 bp, synthetic construct
  source 1..120: mol_type = other DNA
tggtcagcttcctgagtaggtgggaccacaggcacacaccaccatgtgcagctaattacatttttttttttttttttttggtagaggcaggctcttgctatgttgcccaggctggtcttg

SEQ ID NO: 31434 - DNA, 120 bp, synthetic construct
  source 1..120: mol_type = other DNA
taccattctcatcacacatcaaggatacatactatcaacctgcttcatcatgtttatgctgatgttacccttcatcgcctggctgaggtagtttgtcaggttcctccataaggttacttt

SEQ ID NO: 31435 - DNA, 120 bp, synthetic construct
  source 1..120: mol_type = other DNA
cacttgaggtcaggagttcgagaccagcctggccaacatgatgaaaccccatagcaactaaaaacacaaaaattagcctggtgtggtggcatacacctgtaatctcagctactcgagaag

SEQ ID NO: 31436 - DNA, 120 bp, synthetic construct; identical to SEQ ID NO: 9305
  source 1..120: mol_type = other DNA

SEQ ID NO: 31437 - DNA, 120 bp, synthetic construct
  source 1..120: mol_type = other DNA
cttactttcaataatagtgcatttttatcatcccttttctttcaacgagtactgcatgttgataattgttcacactatgtaatgggtacatttgggttcagtatactattctctcaaccc

SEQ ID NO: 31438 - DNA, 120 bp, synthetic construct
  source 1..120: mol_type = other DNA
gggccctcagctaccagaccagggcagggttcaatgtcacagctctgtcaagggagaagggctgcaagggtgctgctcccaggtgtgctgaacagagaggtagccaggtaaggcagatgc

SEQ ID NO: 31439 - DNA, 120 bp, synthetic construct
  source 1..120: mol_type = other DNA
aagtggtggaatagaatcgtgacccaacctgtgcagagcagatggctctggcccaccctcccttcaccaacagccccccacccccagcctgtctggacagctagatggggagcccaaggc

SEQ ID NO: 31440 - DNA, 120 bp, synthetic construct; identical to SEQ ID NO: 9306
  source 1..120: mol_type = other DNA

SEQ ID NO: 31441 - DNA, 120 bp, synthetic construct
  source 1..120: mol_type = other DNA
gcacagagatgaaggtacatcacaaggctggagtccactggcacacgcacatatgcatgcagcatttgtagagtacccaccacaagccaagcacagtgctaggagtccagtaacaagtgc

SEQ ID NO: 31442 - DNA, 120 bp, synthetic construct
  source 1..120: mol_type = other DNA
ctccaaagtctcctacagccttgctgcagtaggtattcgctgtggacatgacattcctcctcttagctggctggtcttgttgtggccttttggcccaaagctgttggccactgtccttta

SEQ ID NO: 31443 - DNA, 120 bp, synthetic construct
  source 1..120: mol_type = other DNA
gattccggatgagtgactgggggtgcatgcccattgggttattttttgaatcagactttgcatggctcattccatactcctgggttcctgcagaagtaggctttctggagagaaggcaca

SEQ ID NO: 31444 - DNA, 120 bp, synthetic construct; identical to SEQ ID NO: 9307
  source 1..120: mol_type = other DNA

SEQ ID NO: 31445 - DNA, 120 bp, synthetic construct
  source 1..120: mol_type = other DNA
gccacctgctcggcattcttctagacacgcccatcctgctgggtgtgttgtgtgtgcgagcgtgcacatgggatccagagtgagctagagcatgcgggcccctcggcccagtcatgaggc

SEQ ID NO: 31446 - DNA, 120 bp, synthetic construct
  source 1..120: mol_type = other DNA
accagatgcacttgcagtatctgcacctggcacagtgcctgccacccggcactgcagaaatgcaaactgaaactggaatgaagaacagggcaaagtcgccagtatgttaatggttaatgg

SEQ ID NO: 31447 - DNA, 120 bp, synthetic construct; identical to SEQ ID NO: 9308
  source 1..120: mol_type = other DNA

SEQ ID NO: 31448 - DNA, 120 bp, synthetic construct
  source 1..120: mol_type = other DNA
gcctcagtctcccgagtagctgggaccacaggcatgcaacactatgctcggctaatttttttgtatttttagtagagacggggtttcaccacattgaccaggctggtctcaaactcctga

SEQ ID NO: 31449 - DNA, 120 bp, synthetic construct
  source 1..120: mol_type = other DNA
ctgatggcagacacatctaagatttgacagtatttattgagtattaaatgccaggaacaattcatgggcttctcacactcctttaagcctcacaatggcacttggtgctattattgtcct

SEQ ID NO: 31450 - DNA, 120 bp, synthetic construct
  source 1..120: mol_type = other DNA
aagctccctgggctccttcccaacaccgaccccaatgaaacaccaagcaaggacaacacttaccagcagggtgataagggtttgccaggagagcctccaaaacccatgcacaggcctgcc

SEQ ID NO: 31451 - DNA, 120 bp, synthetic construct; identical to SEQ ID NO: 9309
  source 1..120: mol_type = other DNA

SEQ ID NO: 31452 - DNA, 120 bp, synthetic construct
  source 1..120: mol_type = other DNA
accagaggccagcctaggcatgctacagaaatgagtgctgccccatgtcattacccctgcttggggcttctaaaggggctagtgtaggcagccctcagctttcttccttctcaagtttaa

SEQ ID NO: 31453 - DNA, 120 bp, synthetic construct
  source 1..120: mol_type = other DNA
gacctcagaaccacttcgctaattcagctcagctgtgcctaacttccccaacagcgtccttttggttccccgggttatattactgttgggagtcaaacctgagtgacttgaggaccacct

SEQ ID NO: 31454 - DNA, 120 bp, synthetic construct
  source 1..120: mol_type = other DNA
accacatggggcttctgagcagttctgcctgggcctccaaaagtgtccaaacctgagagatgccactgaatcgtggtgggagggaatgggcagagcctcactcgagttgacaccagatct

SEQ ID NO: 31455 - DNA, 120 bp, synthetic construct; identical to SEQ ID NO: 9310
  source 1..120: mol_type = other DNA

SEQ ID NO: 31456 - DNA, 120 bp, synthetic construct
  source 1..120: mol_type = other DNA
agatgctgaggctgggagaagtaacacagccaccgagtggcagagacaggactgtgaacccagccagtctgctttcagaggccaagcataaaacacacatgatactatcagaaacagaat

SEQ ID NO: 31457 - DNA, 120 bp, synthetic construct
  source 1..120: mol_type = other DNA
atgacagctctgtgagcttagattctttacctaagaagttgttgatgttttacaatggggttagcgtatcaagaactttaaaaactgggccattttaaatacccttgcacttggggcaac

SEQ ID NO: 31458 - DNA, 120 bp, synthetic construct
  source 1..120: mol_type = other DNA
aataaaccagagattaccattactgtgagagagtaagctatggtccgactttggtatcctgagggaatactcacactcgcttcctagacacacataccagaaggggcttgcttggctgtg

SEQ ID NO: 31459 - DNA, 120 bp, synthetic construct
  source 1..120: mol_type = other DNA
caatcaggtggtttggattttcctaggtgaaccagccacctagccactgtgccccttgtctgaactggtttactgaaatctagagaagcctaaactcaatcctttgtccagccaatacac

SEQ ID NO: 31460 - DNA, 120 bp, synthetic construct; identical to SEQ ID NO: 9311
  source 1..120: mol_type = other DNA

SEQ ID NO: 31461 - DNA, 120 bp, synthetic construct
  source 1..120: mol_type = other DNA
ttccttaatgtaatcatggcctttggaggcttgatcatgtttcaaattgacaagacccatctgccccagctcccattaaacaaaaaaagatattacggatttgacatacaattgatagga

SEQ ID NO: 31462 - DNA, 120 bp, synthetic construct
  source 1..120: mol_type = other DNA
tgagctgcgttctggccataattcctttttcttccaaggtcaaacaagttcaggctggtgttgggtcccagtctgagtagagctaactcggtgcagttggagccttcttgacttccagtc

SEQ ID NO: 31463 - DNA, 120 bp, synthetic construct
  source 1..120: mol_type = other DNA
ggctaccaattcccccaaaggtcacttgcttagcagaaactagatctagaaatgttgccacagctaaggctacatccctgttgaacctcaaaagcctcatccaatgaacaaagccatcac

SEQ ID NO: 31464 - DNA, 120 bp, synthetic construct; identical to SEQ ID NO: 9312
  source 1..120: mol_type = other DNA

SEQ ID NO: 31465 - DNA, 120 bp, synthetic construct
  source 1..120: mol_type = other DNA
tactttttatttccatggaatggaatcaaacacgaactgagactacagagtatacactagaaatcagcaaatgccaggaacggagtaggaaaaagacaaagaaatgaggcctaaacacac

SEQ ID NO: 31466 - DNA, 120 bp, synthetic construct
  source 1..120: mol_type = other DNA
gaaaggaagtgggatgagggctgggaagggtccgcactggggtgcgggtttagtaccaggtaaattgctcttggtatttacatacaaaatcagttggctctatttcttagaaatacacac

SEQ ID NO: 31467 - DNA, 120 bp, synthetic construct; identical to SEQ ID NO: 9313
  source 1..120: mol_type = other DNA

SEQ ID NO: 31468 - DNA, 120 bp, synthetic construct
  source 1..120: mol_type = other DNA
gccagcgactctgtgctgcgaatctgtccccacttcctttttataccacaaacttctctaaggatctggtctttcaataggagcgatacatagctttttagaaaaaggaaaaaaaaaaaa

SEQ ID NO: 31469 - DNA, 120 bp, synthetic construct
  source 1..120: mol_type = other DNA
gagcgatacatagctttttagaaaaaggaaaaaaaaaaaacccttaaaaaggaggagggttcattctgattactccaaaccggtcatcttctcaaagtagagcagttcagattcacaaag

SEQ ID NO: 31470 - DNA, 120 bp, synthetic construct
  source 1..120: mol_type = other DNA
cggccggccgtctgtcctccacagaaaaagctgccaagttggggtgttttggtttaaaaattcctgttggggacagggaatccctgaagggaatacattaaaaaatatacagtggaaatg

SEQ ID NO: 31471 - DNA, 120 bp, synthetic construct
  source 1..120: mol_type = other DNA
taaagagtctcttaaatggttctgagggctctaccaacgaactgaaaggaggatgagacgatggagacagacagtttttattgctggcctgccccgagtggcttagctggcctccatccg

SEQ ID NO: 31472 - DNA, 120 bp, synthetic construct; identical to SEQ ID NO: 9314
  source 1..120: mol_type = other DNA

SEQ ID NO: 31473 - DNA, 120 bp, synthetic construct
  source 1..120: mol_type = other DNA
tgttcactcacacacttcatttccctcccgcctttcccagctggacctgggagccagcagacactctgcaatcccacccaactctgaagagaaggcttgtgatgtcaccgtcctgccgtg

SEQ ID NO: 31474 - DNA, 120 bp, synthetic construct
  source 1..120: mol_type = other DNA
aaggatgacataagacgtatcagccaaagaacagttttggcttagctctcgtgtacaagatccacttggaatgacaagctggacacttggaagcaagtcaccaatacacataaaatacct

SEQ ID NO: 31475 - DNA, 120 bp, synthetic construct
  source 1..120: mol_type = other DNA
gttcagctcagcttgagcctggaaggtcaacccatttaatttattttattttattttatttgaggttttctaacccaggtggttacttgcatttccttttacttgcatcttccatgaggg

SEQ ID NO: 31476 - DNA, 120 bp, synthetic construct; identical to SEQ ID NO: 9315
  source 1..120: mol_type = other DNA

SEQ ID NO: 31477 - DNA, 120 bp, synthetic construct
  source 1..120: mol_type = other DNA
cctcaggtccttcctcaggacggctctaacactcagttactcaggccccaagaagcaggaccaagcctgctactgagcacatactccatgactggctctgactctgcaggcccaggtgcc

SEQ ID NO: 31478 - DNA, 120 bp, synthetic construct
  source 1..120: mol_type = other DNA
gtttttccttcgcatatactggatatattctgtggctttgtctaggatttgggcccgggatgcctgtggcaatatgagaaaaagcacaggggacaaaataaaaacccaatccaggcagtg

SEQ ID NO: 31479 - DNA, 120 bp, synthetic construct
  source 1..120: mol_type = other DNA
tttttgagacagagtttcgctcttgttgcccaagctggagtgcaacagcgtgatcttggctgacagcaacctccgcctcctgggttcaagtgattctcctgcctcagcctcctgagtagc

SEQ ID NO: 31480 - DNA, 120 bp, synthetic construct; identical to SEQ ID NO: 9316
  source 1..120: mol_type = other DNA

SEQ ID NO: 31481 - DNA, 120 bp, synthetic construct
  source 1..120: mol_type = other DNA
taatttttacatttttaataaagatggggtttcaccatgttggccagactggtctcaaactcctcacctcaggtgatccacctacctcggcctcccaaactgctgggattacaggcgtga

SEQ ID NO: 31482 - DNA, 120 bp, synthetic construct
  source 1..120: mol_type = other DNA
caccgctttattcaaaatcaccagctgcacagtagcatggcctggctttaaactcagagccatccgactcctgaactgtactcctcccatctcctctggttctttaggttgctttaaagt

SEQ ID NO: 31483 - DNA, 120 bp, synthetic construct
  source 1..120: mol_type = other DNA
agattccagccaaactctgaaaccactgttaactattccgaactgaacaatgctgctgtgtcactacttcagccttcctggctaaagagactttcataaaaagctgtcggtgcttgatgt

SEQ ID NO: 31484 - DNA, 120 bp, synthetic construct
  source 1..120: mol_type = other DNA
atgttactgtgcccctagacatcaaacttgtctgggagattctctccaggctacaaacatagtcagagttacttatggccaggcagccagccaaactggtagaatagtacaaagccaagc

SEQ ID NO: 31485 - DNA, 120 bp, synthetic construct; identical to SEQ ID NO: 9317
  source 1..120: mol_type = other DNA

SEQ ID NO: 31486 - DNA, 120 bp, synthetic construct
  source 1..120: mol_type = other DNA
agtttgggctgagtttcagaaaggtttgtaaggcccgtgcttattcataagtcctcacaagtactagaatttccaggctttcctctttagcacccttaaggtaatttcctcaaggaaatt

SEQ ID NO: 31487 - DNA, 120 bp, synthetic construct
  source 1..120: mol_type = other DNA
tgaggagataaatatgtctatacatggaaatatcacagggcagtgctgacaagcgtaacctgactagcagagactagagacaccacgggaaagatggcttctggctggggtgattaccta

SEQ ID NO: 31488 - DNA, 120 bp, synthetic construct; identical to SEQ ID NO: 9318
  source 1..120: mol_type = other DNA

SEQ ID NO: 31489 - DNA, 120 bp, synthetic construct
  source 1..120: mol_type = other DNA
gaggtggtagagtggcaaggaagaatttgggaattagaggacagaggagtgctctgcatgcttgtcattaatgggttctgtagctgcagacacatttctcaccttgcctattcctcatct

SEQ ID NO: 31490 - DNA, 120 bp, synthetic construct
  source 1..120: mol_type = other DNA
tcccagaaggcaacattagctcttaactacccatgtgcatccgggacaagggaaaaaatgcacaatctctgaaaccagagagcacttgcaaatgttcagtgataacttttaatgaatgac

SEQ ID NO: 31491 - DNA, 120 bp, synthetic construct
  source 1..120: mol_type = other DNA
gagaaaaagatctgtgagggatggcagtttccatttcagggtaatttttggatgaagataaaattcatagatgttcagaacatagtgtcttgggaacaacaggagtccaaagaaggctgg

SEQ ID NO: 31492 - DNA, 120 bp, synthetic construct
  source 1..120: mol_type = other DNA
agaatggttcagagttaactttattttactcttcccagggtacccaacaagaattaaggcccaacaagaaaaaaatttaaagcacaaaatacagaaataccccaaatttgcatgtgcatg

SEQ ID NO: 31493 - DNA, 120 bp, synthetic construct; identical to SEQ ID NO: 9319
  source 1..120: mol_type = other DNA

SEQ ID NO: 31494 - DNA, 120 bp, synthetic construct
  source 1..120: mol_type = other DNA
aaaagcctgaaaatttttttcctgatagtttttataattagcagaatcataattttgagtctgtctttgtgaacagaaatggctctttaaatggcttggatggagccctgagacagggtg

SEQ ID NO: 31495 - DNA, 120 bp, synthetic construct
  source 1..120: mol_type = other DNA
gccttgcgagatcttgctccaaagccatggctgcacatagcaacacaagtgacaatgatgatgggggtggtaacaatggcagcactaacacttactgagtacttactaagtgtcaggcat

SEQ ID NO: 31496 - DNA, 120 bp, synthetic construct; identical to SEQ ID NO: 2209
  source 1..120: mol_type = other DNA

SEQ ID NO: 31497 - DNA, 120 bp, synthetic construct; identical to SEQ ID NO: 9320
  source 1..120: mol_type = other DNA

SEQ ID NO: 31498 - DNA, 120 bp, synthetic construct
  source 1..120: mol_type = other DNA
gaaaacacagcaagacacttgggctctataaaaaaatcaaaagattagctgggcatggtggtacacgaatgtggtcccagctacttgggaggcaaaggtgggaggatctcttgagcccat

SEQ ID NO: 31499 - DNA, 120 bp, synthetic construct
  source 1..120: mol_type = other DNA
cattgaaggaaggttatttttctttctattttaaagacaggtgagaactaaacaggcttctagcagaaacacattgaaaggaaaagcctcaagatgcaagcgagcttgagagaactgacc

SEQ ID NO: 31500 - DNA, 120 bp, synthetic construct
  source 1..120: mol_type = other DNA
cctcttggcagcccagaaggataaaagcaaaatgaataatgtagaagggacccagggtgtggcagagggtctgccaggttcctgtccctcctactgtttatgctgcagctacgtgtccat

SEQ ID NO: 31501 - DNA, 120 bp, synthetic construct; identical to SEQ ID NO: 9321
  source 1..120: mol_type = other DNA

SEQ ID NO: 31502 - DNA, 120 bp, synthetic construct
  source 1..120: mol_type = other DNA
aaattttatcacagtaacttggatttctgtaaaacttcaagttgttttagaaagtgggtggggagaggtgaggaaaagaatagtagtgctagattgttaacattaggaacaccactgccc

SEQ ID NO: 31503 - DNA, 120 bp, synthetic construct
  source 1..120: mol_type = other DNA
gatgccagtgggctgatgttacagctgtcttgttcccctaagaaccaaaatgccatatctggagggatgaaaaaagaggtactgctggactcaacaactgacatctgttttattttgtac

SEQ ID NO: 31504 - DNA, 120 bp, synthetic construct; identical to SEQ ID NO: 9322
  source 1..120: mol_type = other DNA

SEQ ID NO: 31505 - DNA, 120 bp, synthetic construct
  source 1..120: mol_type = other DNA
aagccaggagtaagacatttgtgtaaggggtcaaaacaatcattttttaaatcttgcattcttttttcttgtgcacttggtagcttgaaatgaaggtgtggcatttctgcatcaaacttt

SEQ ID NO: 31506 - DNA, 120 bp, synthetic construct
  source 1..120: mol_type = other DNA
tactgaattagttaccctcttccaaaaaaaaaaattccagtgataatgaaactggtactctcaaaacactaccaaaagactactctttagaatttgcttgaaaaaaagaaagaaatggaa

SEQ ID NO: 31507 - DNA, 120 bp, synthetic construct
  source 1..120: mol_type = other DNA
tatacagagatgtccatattataattataaattttaaattttaaaaattgaatgcaaccccaattgcccaaaagaaacatgcctaatgactaaacatgagcacactgtatgacctagcga

SEQ ID NO: 31508 - DNA, 120 bp, synthetic construct; identical to SEQ ID NO: 9323
  source 1..120: mol_type = other DNA

SEQ ID NO: 31509 - DNA, 120 bp, synthetic construct
  source 1..120: mol_type = other DNA
aaatgtgagtactctgaattgagatgtgctgttaagttgaatttaaagacttggtgaataaataattttaaatatattgattacatgttgagatcatacttacttttgaatattaggcta

SEQ ID NO: 31510 - DNA, 120 bp, synthetic construct
  source 1..120: mol_type = other DNA
gcagcatttgtcatagccaaagggaaggctgtagttgtgttagaggaaggagggattcatgttttttcttcttcccatttttctaaagtttttgcaattttgttggagaaaacaaaaatg

SEQ ID NO: 31511 - DNA, 120 bp, synthetic construct
  source 1..120: mol_type = other DNA
tctcccagaaggaataattagatttctgccctacaggagcataccatttaattaggtgataagttaatcacagaaattagggagactgaggagaggtcccacaaaaggccacagaggttc

SEQ ID NO: 31512 - DNA, 120 bp, synthetic construct
  source 1..120: mol_type = other DNA
agggctcatcaatatggaacccccaagtcacctgggcagtgtggctggggttggaccttgagaaaagcaaagcactcagataagctgagaatgaaattcctgggcaaacagaagaggggt

SEQ ID NO: 31513 - DNA, 120 bp, synthetic construct; identical to SEQ ID NO: 9324
  source 1..120: mol_type = other DNA

SEQ ID NO: 31514 - DNA, 120 bp, synthetic construct
  source 1..120: mol_type = other DNA
aatgcagtaaattggtaccagtagagtagggcactgctgaaaagatacctgaaaatgtggaagcaactttggaactaggtaacaggcagaggttggaacaatttgaagggctcagaagaa

SEQ ID NO: 31515 - DNA, 120 bp, synthetic construct
  source 1..120: mol_type = other DNA
gaacttgttgagaactagagcaaaggtgactcctgttacgtttcagcaaagagattggcagcattttgcccctacgctagagataagtggaactttgaacttcacagagatgatttaggg

SEQ ID NO: 31516 - DNA, 120 bp, synthetic construct
  source 1..120: mol_type = other DNA
aatgtgatagaaaagaaaatcccattttctgagaagaaattcaagccagctgcagagatttgcataagtaatgagaagccgaatgttaatccccaagacaatggggaaaatgtctccagg

SEQ ID NO: 31517 - DNA, 120 bp, synthetic construct; identical to SEQ ID NO: 9325
  source 1..120: mol_type = other DNA

SEQ ID NO: 31518 - DNA, 120 bp, synthetic construct
  source 1..120: mol_type = other DNA
tctgctacggcagtgcagacaggaaatgtggggtcagagcccccacacagtctctactggggccctctctagtggagctgtgagaagagtgccaccatcctgcagaccccagaatggtag

SEQ ID NO: 31519 - DNA, 120 bp, synthetic construct
  source 1..120: mol_type = other DNA
agaccaaaggaacccaccttttgtatcagcatgacctctatgtgagacatggagtcaaaggagatcattacagggcttttagatttgactgccctgctggattttggacttgcatgaggc

SEQ ID NO: 31520 - DNA, 120 bp, synthetic construct; identical to SEQ ID NO: 9326
  source 1..120: mol_type = other DNA

SEQ ID NO: 31521 - DNA, 120 bp, synthetic construct
  source 1..120: mol_type = other DNA
tcccatgctgttctcgtgatagtgaataagtcttgcaagatctgatggttttaaaaacaggagtttccctgcacaagctctctctctttgcctgctgccatccatgtaagacatgacttg

SEQ ID NO: 31522 - DNA, 120 bp, synthetic construct
  source 1..120: mol_type = other DNA
aaaacggactaatacaagggtgtatagtaactggaaggttaatgtcaggaaggaggcgaaaaagcaggtaggtaagctgggtatcttatttacagaacatggaataccagtccttaccta

SEQ ID NO: 31523 - DNA, 120 bp, synthetic construct
  source 1..120: mol_type = other DNA
aatttaagatgtagaaactttaaaaagataattgcccaagttggagtctgactagctaatataaccttaatgagtaatgaggagaagtggatagggctatagtttacatttcatttaaac

SEQ ID NO: 31524 - DNA, 120 bp, synthetic construct; identical to SEQ ID NO: 9327
  source 1..120: mol_type = other DNA

SEQ ID NO: 31525 - DNA, 120 bp, synthetic construct
  source 1..120: mol_type = other DNA
catgttccctgccataagggaactattatatttggtttcaacatctacctgttaagaaaaccagattttaatggaaatgaaactgagattaactcaatgtaaagctcttatctgatgctc

SEQ ID NO: 31526 - DNA, 120 bp, synthetic construct
  source 1..120: mol_type = other DNA
cttacttatatagttgagcacataatattgactgttgctgttttctttaatggctgagcaagcctgctgtttcctctggctctctctctccaccacaatttactaactgagaacctacta

SEQ ID NO: 31527 - DNA, 120 bp, synthetic construct
  source 1..120: mol_type = other DNA
ctctccccataagggagaaatgcagagctcaactgcctgagagagcaatgagtttgataacaacaggcactgagggagagacttaaaagatgagaaattactataaaccactgtagagct

SEQ ID NO: 31528 - DNA, 120 bp, synthetic construct
  source 1..120: mol_type = other DNA
actcccatgtaaaggctggctatcaggtcttgctccccaacataagtatggtgagcttagtgccagtgaaccattgtgtaacactccctagtacccaagcaaggacacttaaataatact

SEQ ID NO: 31529 - DNA, 120 bp, synthetic construct; identical to SEQ ID NO: 9328
  source 1..120: mol_type = other DNA

SEQ ID NO: 31530 - DNA, 120 bp, synthetic construct
  source 1..120: mol_type = other DNA
tgtgaactcagaaagaaattataggctttaaatgatccttaataccctgcatttcagtgttacctacatacgccacctcagaggatagcatttctgtagtagccgtggtatgacacactg

SEQ ID NO: 31531 - DNA, 120 bp, synthetic construct
  source 1..120: mol_type = other DNA
atccttaaactgcttacacatatggtataggaaaaagatggaacttgcaactggcaatcctgagttctagcccctgtcctgttacagatgggatagtgatcttgagcctgttaacaacac

SEQ ID NO: 31532 - DNA, 120 bp, synthetic construct
  source 1..120: mol_type = other DNA
caagaaaaaggtaattcttattttttatttttttgagacagggtctcactctgtcatccaggctggagcggtgccatcacagctcactgcagcctggacctcccagactcaagtgatcct

SEQ ID NO: 31533 - DNA, 120 bp, synthetic construct; identical to SEQ ID NO: 9329
  source 1..120: mol_type = other DNA

SEQ ID NO: 31534 - DNA, 120 bp, synthetic construct
  source 1..120: mol_type = other DNA
aggacgcatatgacagataatccaaatgctaagggagaagtcagctgaaacataaagatgcttaagtcaaaggagactggaacacagagagacccaaatcaaaggctttccctttaagaa

SEQ ID NO: 31535 - DNA, 120 bp, synthetic construct
  source 1..120: mol_type = other DNA
ctaagaatgagcctatttcctttagttcaaataccacacttaaaaaaacgccaggtttagtgagaactgataagtctaagggaccaaaatattctgttcgactcacggcacctatgaaac

SEQ ID NO: 31536 - DNA, 120 bp, synthetic construct
  source 1..120: mol_type = other DNA
atggtatctagtaaattctcaaattggggttttgttgactggctctagaatctggttcccctggaccactcctctctcctagtcctgctacttttctgccagcatctcctgccaccatcc

SEQ ID NO: 31537 - DNA, 120 bp, synthetic construct; identical to SEQ ID NO: 9330
  source 1..120: mol_type = other DNA

SEQ ID NO: 31538 - DNA, 120 bp, synthetic construct
  source 1..120: mol_type = other DNA
tatctaggatagtgcctggcatgtagcagaccctcagtaagtatgtgttgaatggcatgaatgagtaaataaatgagccacaacaaatgacagactattccatttgtaagactaccaaat

SEQ ID NO: 31539 - DNA, 120 bp, synthetic construct
  source 1..120: mol_type = other DNA
agttgtgatcctatgacccacctctcccaatgtattcaaacttaagaatgcctaagaatcatctgactgcttgttataaatacagattcccaggtttccatccagaaaggctgattcagt

SEQ ID NO: 31540 - DNA, 120 bp, synthetic construct
  source 1..120: mol_type = other DNA
tttaattgatactatggtacaggaataagcaccaactgtcaacaggtcaaagaagcctaagagataatctttggcatgtgtttactttgactaaaggggtgagtctgtctctagtcataa

SEQ ID NO: 31541 - DNA, 120 bp, synthetic construct; identical to SEQ ID NO: 9331
  source 1..120: mol_type = other DNA

SEQ ID NO: 31542 - DNA, 120 bp, synthetic construct
  source 1..120: mol_type = other DNA
acagaatagttccttctttataaaacactggatcactaaagcaaaaacacaggtcctcttcccagcttgccagttattccaatgaattgctacagacaactacactctctgtcaaggatg

SEQ ID NO: 31543 - DNA, 120 bp, synthetic construct
  source 1..120: mol_type = other DNA
ggaaaacactaggttccagaagggagtggggaagaatggttattttttttctgtttcacatgaacatgtctcttcactcaagtcttttgtcccacagcttaaaatgctctttatacgcct

SEQ ID NO: 31544 - DNA, 120 bp, synthetic construct
  source 1..120: mol_type = other DNA
ggaattctcatggaggtctagggtattaatgacctctggaatctttactgttatcccaaacgaactcttggccactctttatactatagtgtatagttataatttcttgaatttattaca

SEQ ID NO: 31545 - DNA, 120 bp, synthetic construct; identical to SEQ ID NO: 9332
  source 1..120: mol_type = other DNA

SEQ ID NO: 31546 - DNA, 120 bp, synthetic construct
  source 1..120: mol_type = other DNA
gcctagaagaatgggagaaagaacacattaggaatgtcactccttttgcttggtacaaggtgggtggggtacagcctggaagtacacgctgtcagcactgtccctggcgagtggactggg

SEQ ID NO: 31547 - DNA, 120 bp, synthetic construct
  source 1..120: mol_type = other DNA
gcataagtaaaataaaagttattcagggggacaaagtgtgactctcctgtaacatcagtggtcccccccaacttgcttatgtgacagaagagccaccagtctgtggttaggaagtgacta

SEQ ID NO: 31548 - DNA, 120 bp, synthetic construct; identical to SEQ ID NO: 9333
  source 1..120: mol_type = other DNA

SEQ ID NO: 31549 - DNA, 120 bp, synthetic construct
  source 1..120: mol_type = other DNA
cttctgacaccacatactcagaataaattctctcaggtacctgtggcaggtcaggctaactggcagtatctaaatatccaagtcaaagccttagcctgcttggaatcacaaagaacggtc

SEQ ID NO: 31550 - DNA, 120 bp, synthetic construct
  source 1..120: mol_type = other DNA
gggtctcccctccaaatggaacacaaacaacccaaagcaagaagaacttcatcacacctacactctaggaattacggaaattatgctctgaacattcaccttgaatgcacaacgttgcac

SEQ ID NO: 31551 - DNA, 120 bp, synthetic construct
  source 1..120: mol_type = other DNA
taatgctgcctcacattaatccttgtactagagaagatgtacagacaaaaatctatcaagagttgtgaaaacgaaaggacttgaaattctcctgttatttaatcctaaaagtcccagtca

SEQ ID NO: 31552 - DNA, 120 bp, synthetic construct; identical to SEQ ID NO: 9334
  source 1..120: mol_type = other DNA

SEQ ID NO: 31553 - DNA, 120 bp, synthetic construct
  source 1..120: mol_type = other DNA
aatagtgcgacagaattgaacctatttaagtatctagtccttttgaacttactgttgttccctctgatcatctacataaagataagttgggctgcgactatacctaaggagcttaaaggc

SEQ ID NO: 31554 - DNA, 120 bp, synthetic construct
  source 1..120: mol_type = other DNA
gtctactaaatcaccctgattcttggccctcctcccagctaagagctgtgcaccagaattacccacaatccctcttgttgatacaaataaaattctaattgtctgttttctttctgggag

SEQ ID NO: 31555 - DNA, 120 bp, synthetic construct
  source 1..120: mol_type = other DNA
taatctaacaccaaaatcatccccacaatgcactaccccctcccattcactgagctctgaaaggactcaaatggacaagtctctcggttggaggattgtaagtgaacttggctgtagatc

SEQ ID NO: 31556 - DNA, 120 bp, synthetic construct
  source 1..120: mol_type = other DNA
aagtagtggatggaatttctgtagtggttccaggcccaatttaactagcagaagagtggaatcttacaccaatccctgctgccatgtccatccctgagctactagtggagtcaattttaa

SEQ ID NO: 31557 - DNA, 120 bp, synthetic construct; identical to SEQ ID NO: 9335
  source 1..120: mol_type = other DNA

SEQ ID NO: 31558 - DNA, 120 bp, synthetic construct
  source 1..120: mol_type = other DNA
tttgagagggccaagatttcagagttgaagaagaaaaactgggtgaagactcccagtgtaaggcatctaatatcctcccccaaatgcaaaactggttttaaaaaacaagcccaaacaatt

SEQ ID NO: 31559 - DNA, 120 bp, synthetic construct
  source 1..120: mol_type = other DNA
gagaatgatgttcagtaatgaaaacaaatggtacggaaaacccccttgtggaattaattaggccctattctaggagaccacagaggtattcttggactgtacagcaggctcccaaacatc

SEQ ID NO: 31560 - DNA, 120 bp, synthetic construct; identical to SEQ ID NO: 9336
  source 1..120: mol_type = other DNA

SEQ ID NO: 31561 - DNA, 120 bp, synthetic construct
  source 1..120: mol_type = other DNA
aagttgctatgttggcaagaagtcatctaggctaaggaggtctgttcaaaattgagggaaatctcttaaaattatttccttccaacttactgcagagagactgcatctttgttcaaggca

SEQ ID NO: 31562 - DNA, 120 bp, synthetic construct
  source 1..120: mol_type = other DNA
ctgacagctaaccccacctataaggggaaccatctcaattctaatacagaaaattctcagcatatagggaattagttgcccactcaatatttactacctttacaaaatgtgaaggttgta

SEQ ID NO: 31563 - DNA, 120 bp, synthetic construct
  source 1..120: mol_type = other DNA
tagataagaacaagataggataaagctcaatttctaagcaacttaaaatattcattttaatcaacccaaaaattataacataaaataataggcaggtaggatgggataaactcaccaagc

SEQ ID NO: 31564 - DNA, 120 bp, synthetic construct
  source 1..120: mol_type = other DNA
ggtgcctaaaataactggcaaatgctataatccaaacagggcctcatactatagccatttcagagaaggatgccttggtcaggaaattttaattaaaaaccaagctgaattctttgacca

SEQ ID NO: 31565 - DNA, 120 bp, synthetic construct; identical to SEQ ID NO: 9337
  source 1..120: mol_type = other DNA

SEQ ID NO: 31566 - DNA, 120 bp, synthetic construct
  source 1..120: mol_type = other DNA
tgcaactgcaactcagtcaggtgccatcaaggatggtcactggaaaaaaaattgcatttcctgaccaacacactaacccatacatttcctgtatacttacactctttcctaaagaaattt

SEQ ID NO: 31567 - DNA, 120 bp, synthetic construct
  source 1..120: mol_type = other DNA
tgcgatgtactgaatttagtagtaagaatactctttggggttacttcctttaacaaagcttactggccattggagaagctgttttccgtttgtactgaagcaatagaaaaaaatatttgc

SEQ ID NO: 31568 - DNA, 120 bp, synthetic construct; identical to SEQ ID NO: 9338
  source 1..120: mol_type = other DNA

SEQ ID NO: 31569 - DNA, 120 bp, synthetic construct
  source 1..120: mol_type = other DNA
acacagtcacaatagttgtttgatatactataaaatttgtttataacatatctgctttttctctccatgctgttgtaattacattgtgcagagtaatatttagaaatatcaacaaataga

SEQ ID NO: 31570 - DNA, 120 bp, synthetic construct
  source 1..120: mol_type = other DNA
gcattccaggaaagcagaaacattataataatttaataacaaatttatatcaacgatcatatggatgaaaattttgaaaagcagaaagctttcaagaactgcgagccaaaatttcaccaa

SEQ ID NO: 31571 - DNA, 120 bp, synthetic construct
  source 1..120: mol_type = other DNA
gctctgatcaagccctagcacagattttacaactggagacttgcagggaaaaaaaaagttttcaacagactaggccccaaacatgaaggataaaagtaaatgtgaaaaaggaattcaatt

SEQ ID NO: 31572 - DNA, 120 bp, synthetic construct; identical to SEQ ID NO: 9339
  source 1..120: mol_type = other DNA

SEQ ID NO: 31573 - DNA, 120 bp, synthetic construct
  source 1..120: mol_type = other DNA
ttagatttctaatctttcttaaaaaataggaagatcggctgggcgtggtggctcatgcctgtaatcccagcactttgggaggccgaggctggcagatcacgaggttaagagatcgagacc

SEQ ID NO: 31574 - DNA, 120 bp, synthetic construct
  source 1..120: mol_type = other DNA
caggaggcggaggttgcagtaagccgagatagcgccattgcactccagcctggtgacagagtgagactctgtctcaaaaataaataaataaaataaaattaaaaataggaagatctggca

SEQ ID NO: 31575 - DNA, 120 bp, synthetic construct
  source 1..120: mol_type = other DNA
tcatgggcatttgaactttttacccccattctatacatttcttactgctcccaactatcaaatattagacactctgatatacttatttctcttcccctcgctgattctgatttattctgt

SEQ ID NO: 31576 - DNA, 120 bp, synthetic construct
  source 1..120: mol_type = other DNA
caaaaccctaagaaattattgataacactctatggtctcatccatcacctttcagcaaagctgtctctgcaatgccacttttcttcagctattttttaattttctttataccttttcttc

SEQ ID NO: 31577 - DNA, 120 bp, synthetic construct; identical to SEQ ID NO: 9340
  source 1..120: mol_type = other DNA

SEQ ID NO: 31578 - DNA, 120 bp, synthetic construct
  source 1..120: mol_type = other DNA
cctagaatcactgaacttatcacctgagaatctagaataatgggatttgcaacccccccaccctccagaaccaggccccacctcaccttagtggttaacattagagtttactacaatatt

SEQ ID NO: 31579 - DNA, 120 bp, synthetic construct
  source 1..120: mol_type = other DNA
tggaataagagagaaaaaaaaaaatagaaaatatagaagttatttttacacttaacattcaataataagaaagaaaatgccggcggcagaggaagcggagggtggggagtcagcccgaca

SEQ ID NO: 31580 - DNA, 120 bp, synthetic construct; identical to SEQ ID NO: 9341
  source 1..120: mol_type = other DNA

SEQ ID NO: 31581 - DNA, 120 bp, synthetic construct
  source 1..120: mol_type = other DNA
ctcccgcaagggaggaggtgggggtcccagaagccgcgtgtcttcccccaacctccagtcccaggaggccgctccggccaggagccggaggggagcgaaccgggaacgcgacggaggcac

SEQ ID NO: 31582 - DNA, 120 bp, synthetic construct
  source 1..120: mol_type = other DNA
caggactcacgtcgctctccacctcgatgtcatcgttatcgctcatttcctacggcccagggagcggccactgcagcggcggcggggaggggaaggggtgaaggggagggggaagtcacc

SEQ ID NO: 31583 - DNA, 120 bp, synthetic construct
  source 1..120: mol_type = other DNA
ggcggcacgcacgcccggtcggcccccgccacgtgaccaggctcgcagcgctggggcagccgagacttgtagttcttgtccctctaacagacggcccgggtagctccagaaaaactacaa

SEQ ID NO: 31584 - DNA, 120 bp, synthetic construct; identical to SEQ ID NO: 9342
  source 1..120: mol_type = other DNA

SEQ ID NO: 31585 - DNA, 120 bp, synthetic construct
  source 1..120: mol_type = other DNA
cagactcgggatacgaaggagaggaaactaggatttccaaattctggagcaggactgaagttatttggggcagggagcttggattcgcaagatatggaattctgaagtgcggaaatatac

SEQ ID NO: 31586 - DNA, 120 bp, synthetic construct
  source 1..120: mol_type = other DNA
ggttccgaggaggagcttgggtttctaggggctgggcctttaaagactggtaattaggacccagcgtgaggtttccattggccggctgggattctgggagaagagacctatattctaacg

SEQ ID NO: 31587 - DNA, 120 bp, synthetic construct
  source 1..120: mol_type = other DNA
agaacatgggctcagagttgggggactaagggcggagcctgggtccccacaagcggtccgaagtccccagtagttcagaggcctttgcgctgccgcttgaggaaagacagagtgtagtca

SEQ ID NO: 31588 - DNA, 120 bp, synthetic construct; identical to SEQ ID NO: 9343
  source 1..120: mol_type = other DNA

SEQ ID NO: 31589 - DNA, 120 bp, synthetic construct
  source 1..120: mol_type = other DNA
cgggcttcctcgccccacggctcctcggcctcggccgcctcggcctctcggctcactatgcgcaccttctgccgcacctgggccagtggggagagcaaggtgagagcaaggttgccggcc

SEQ ID NO: 31590 - DNA, 120 bp, synthetic construct
  source 1..120: mol_type = other DNA
cgtggctgctgtcaccacctgtagtgcccagacctctgtgcagctgtccctcacctgtccctcaaaacggcctagggactgcacaagaaaggtggcccagcccacatgcagcacaggcgt

SEQ ID NO: 31591 - DNA, 120 bp, synthetic construct
  source 1..120: mol_type = other DNA
gcacagatcagtctcttactcaccccttagcagagggcacaggccaggccccccacctaggcaaagacccctggctccagaaaaggtaagcataggttgggaacattcttagaacctctt

SEQ ID NO: 31592 - DNA, 120 bp, synthetic construct; identical to SEQ ID NO: 9344
  source 1..120: mol_type = other DNA

SEQ ID NO: 31593 - DNA, 120 bp, synthetic construct
  source 1..120: mol_type = other DNA
ggctgcctccttcagcaggttggggatgacatcattggctacttcaaagaactccttgtagatctcctcgtcttcccggcagtagttgtagctgtgagagcagtggggtctctgtagggt

SEQ ID NO: 31594 - DNA, 120 bp, synthetic construct
  source 1..120: mol_type = other DNA
gaagaaagcaagaatgaggaggggggcatggggccgagggtggaagtcccactgctggatgatggtggttaaacattggagatttgagactgttctgagaaaaaaaaaattaggaggaga

SEQ ID NO: 31595 - DNA, 120 bp, synthetic construct
  source 1..120: mol_type = other DNA
cctcagtcctggacgagggtggttggaaactgatggaggggaagaaaggacaggctgcaggccctagtagggggatcctcactcctggatgacagtggccgtgtccgcccaggcctgcag

SEQ ID NO: 31596 - DNA, 120 bp, synthetic construct
  source 1..120: mol_type = other DNA
gatcctcagggaggcagccccagctgccctgctggcacaaatgccccaccagggcacacccagaaggggccacaggaagatcccagggagtcctctccatctccactcccacctccactc

SEQ ID NO: 31597 - DNA, 120 bp, synthetic construct; identical to SEQ ID NO: 9345
  source 1..120: mol_type = other DNA

SEQ ID NO: 31598 - DNA, 120 bp, synthetic construct
  source 1..120: mol_type = other DNA
tgaactgattctgcacacagttgacacaaagtgagactggatgggcgataccccccaacacacaaagttctcttctcatctgcccagatgagggcccctgcctcagccactgttagggtc

SEQ ID NO: 31599 - DNA, 120 bp, synthetic construct
  source 1..120: mol_type = other DNA
taggaaaggatcataattcaggctgccacccagccccccggcctcaccaggcgcagcctggccacttccctctactgacctttccagatgtcccaggtcatagagcagccagagcagctt

SEQ ID NO: 31600 - DNA, 120 bp, synthetic construct; identical to SEQ ID NO: 9346
  source 1..120: mol_type = other DNA

SEQ ID NO: 31601 - DNA, 120 bp, synthetic construct
  source 1..120: mol_type = other DNA
ggtcaatggaagggttgatggcacacaccatgaacgccacctccatcttgcggtcacagcgcatgtatgatcctttcaggtacagccagctcttagggggggatgagatcattatgtctc

SEQ ID NO: 31602 - DNA, 120 bp, synthetic construct
  source 1..120: mol_type = other DNA
ccttgggtggcttgggctactacagtatgaaggggacaaggctggggggagggaacaatacccgctcagccacaccggcattgactgtctggcccctgcggtcctcgttgcccttgccgt

SEQ ID NO: 31603 - DNA, 120 bp, synthetic construct
  source 1..120: mol_type = other DNA
aggccacaccggagctgtccaatttggtgcctgtggaagggggaggtaatgaaagagggtcctctgtgctttaacatggggaaagggggccaggtagtgatgggccacactccctcccac

SEQ ID NO: 31604 - DNA, 120 bp, synthetic construct; identical to SEQ ID NO: 9347
  source 1..120: mol_type = other DNA

SEQ ID NO: 31605 - DNA, 120 bp, synthetic construct
  source 1..120: mol_type = other DNA
atatggcacaccaggatgggattgccagtcaaccgggcttggtgcaaagctctttgcaagccctgactcttaagccttttgaggtcaagccccttctctgtctcaaacatttttgaccag

SEQ ID NO: 31606 - DNA, 120 bp, synthetic construct
  source 1..120: mol_type = other DNA
aaaaaaaaattagccaggcatggtggcaggctcctgtagtcccagctactcaggaggctgaggcaggaggcaggagaatggcatgaaagcaggaggcagagcttgcagtgagccgagatt

SEQ ID NO: 31607 - DNA, 120 bp, synthetic construct
  source 1..120: mol_type = other DNA
ggcgggcagatcacttgagcccaagagttcaagaccagtctgggccacatagtgagacaccatctctacaaaaaaaatacaaaaaattaaccagcaccacggtgcatgcctgtactctca

SEQ ID NO: 31608 - DNA, 120 bp, synthetic construct; identical to SEQ ID NO: 9348
  source 1..120: mol_type = other DNA

SEQ ID NO: 31609 - DNA, 120 bp, synthetic construct
  source 1..120: mol_type = other DNA
tttcccctctctgggcttcagtttcccaactgcaaagaggaaaataacacctgccgaacctcacaaggcttacagttcttaaaagggttctgtaaaccatggagggttttgaagaagtgg

SEQ ID NO: 31610 - DNA, 120 bp, synthetic construct
  source 1..120: mol_type = other DNA
ttccatatgacatcggagaccttcttcaccagctcacggctggagacacccccttctcgaggatagagggacaggtcgacggcgcctcggatctgggcggtgaagcgggcatagagggcg

SEQ ID NO: 31611 - DNA, 120 bp, synthetic construct
  source 1..120: mol_type = other DNA
aaatgctccacgaagcccagcaccaaggaaaggagcaccaggtccggctcctctcggcccagctcggcagcaaacaggcgcaccacgtcgtcgatggagcgcagcgggaacagcgtcttc

SEQ ID NO: 31612 - DNA, 120 bp, synthetic construct; identical to SEQ ID NO: 9349
  source 1..120: mol_type = other DNA

SEQ ID NO: 31613 - DNA, 120 bp, synthetic construct
  source 1..120: mol_type = other DNA
aagcgcacccaggtcaagcccccaaaccccaaggagagtcctggcctcggtccccctcgcccacctccgcgcttacatcccacactaggcaccgcggcgcacgccgcccggagcctgctg

SEQ ID NO: 31614 - DNA, 120 bp, synthetic construct
  source 1..120: mol_type = other DNA
atctctaggtccgcggctccggacacctccttcccgagatactcagggattggcccttcccttcaggccgaccaggcaggaagcgtgcccgcagtgccttctggaaaatgtagtccgggg

SEQ ID NO: 31615 - DNA, 120 bp, synthetic construct
  source 1..120: mol_type = other DNA
aaacaatatgagaaaaacagatacttttaaacactgccagagagtaaatgtgttcagccgctttagctgggtatcagtgtctgttaacatataaagatgcctactctgtgtgcagcactc

SEQ ID NO: 31616 - DNA, 120 bp, synthetic construct; identical to SEQ ID NO: 9350
  source 1..120: mol_type = other DNA

SEQ ID NO: 31617 - DNA, 120 bp, synthetic construct
  source 1..120: mol_type = other DNA
gaagagacccagcaacccacagagttgagaaatttgactggcattcaagctgtccaatcaatagctgccgctgaagggtggggctggatggcgtaagctacagctgaaggaagaacgtga

SEQ ID NO: 31618 - DNA, 120 bp, synthetic construct
  source 1..120: mol_type = other DNA
gtggtgaaccgcatcgcggcgggggaagttatccagcggccagctaatgctatcaaagagatgattgagaactggtacggagggagtcgagccgggctcacttaagggctacgacttaac

SEQ ID NO: 31619 - DNA, 120 bp, synthetic construct; identical to SEQ ID NO: 9351
  source 1..120: mol_type = other DNA

SEQ ID NO: 31620 - DNA, 120 bp, synthetic construct
  source 1..120: mol_type = other DNA
attccagaaatcatctgttcacatccaaaggcacaattcattttgagtttctttcaaaacaaatcgtttgtagttttaggacaggctgatgcactttgggcttgacttctgattacccta

SEQ ID NO: 31621 - DNA, 120 bp, synthetic construct
  source 1..120: mol_type = other DNA
tgtgaagggaagagatttgaaacatgtggaaggaaaagtgagtgcagactataaacttccaaaaagacaagcccaaaatacacctaaacgttatgtcagattattttgttaaaatcagtt

SEQ ID NO: 31622 - DNA, 120 bp, synthetic construct
  source 1..120: mol_type = other DNA
gtagaaaggaccactgaaggaaaggaagagaattggaaggtagatgaaagaaggagcaagaacctggggatgttttttccttttcacttgtaatagtagtaacagaagcaatggcagact

SEQ ID NO: 31623 - DNA, 120 bp, synthetic construct; identical to SEQ ID NO: 9352
  source 1..120: mol_type = other DNA

SEQ ID NO: 31624 - DNA, 120 bp, synthetic construct
  source 1..120: mol_type = other DNA
aaaactctcgatctcaggtgaaccgcctgcctcagccttccaaagtgctgggattacaggcgtgagccaccgcgccctgcagttttttgtatttttaatagagacagggtttcaccatgt

SEQ ID NO: 31625 - DNA, 120 bp, synthetic construct
  source 1..120: mol_type = other DNA
gccaccgcgcccggctcaagtggagatttttatatggagtccagttatactctttttaatatataagttgagatgactaatacaacttcaatacaggggctcatgagaaatgtctgtaat

SEQ ID NO: 31626 - DNA, 120 bp, synthetic construct
  source 1..120: mol_type = other DNA
tgatcttggctcagggcaacctctgcctcctggtttcaagcgatcttcctgcctcagcctcccgagtagctgggagtacaggcgtgcatgaccacacccggctaatttttttatttttag

SEQ ID NO: 31627 - DNA, 120 bp, synthetic construct; identical to SEQ ID NO: 9353
  source 1..120: mol_type = other DNA

SEQ ID NO: 31628 - DNA, 120 bp, synthetic construct
  source 1..120: mol_type = other DNA
acctcctgggttcaagtgattctcctgccttagcctcctgagtagctgggattacaggcatgcgtcaccatgcctggctaattttgtatttttagtacaaatggggtttctccatgttgg

SEQ ID NO: 31629 - DNA, 120 bp, synthetic construct
  source 1..120: mol_type = other DNA
attgcgcctggccagaaaattcattgacttcctaaagatttattaactttctgcattacttttttttttcccctccatcgtaaatataaaagggaatagtagagaaaatcattcagaatt

SEQ ID NO: 31630 - DNA, 120 bp, synthetic construct
  source 1..120: mol_type = other DNA
tttttaacttcacttgctgtctttcctagaggaacagaaatagtgctgaatgtcctattagaaatgatggttgctctgcccgtctcttccctctctctcacacaatatgtaaactcatac

SEQ ID NO: 31631 - DNA, 120 bp, synthetic construct
  source 1..120: mol_type = other DNA
gataaattattttctgtttgatttgccagtttagatgcaaaatccacaagtattcaagtgattgttaaagagggaggcctgaagttgattcagatccaagacaatggcaccgggatcagg

SEQ ID NO: 31632 - DNA, 120 bp, synthetic construct; identical to SEQ ID NO: 9354
  source 1..120: mol_type = other DNA

SEQ ID NO: 31633 - DNA, 120 bp, synthetic construct
  source 1..120: mol_type = other DNA
aatgggtataataaatattatattagatagcattaagtgctgtggagaaaactaaagcagggaggaagataggagtgtgcaagccagaaaggttgcaattaaattgagtagttcaggaag

SEQ ID NO: 31634 - DNA, 120 bp, synthetic construct
  source 1..120: mol_type = other DNA
acctgacatgttaaaggactatcaaggaggccagtttgtctagaggctgaaaaggaaagagtaataggagatgaggtctgagtgaaaacacgtaaatccttgtgggccaaggtaaaatct

SEQ ID NO: 31635 - DNA, 120 bp, synthetic construct; identical to SEQ ID NO: 9355
  source 1..120: mol_type = other DNA

SEQ ID NO: 31636 - DNA, 120 bp, synthetic construct
  source 1..120: mol_type = other DNA
catgttcaatttaagatgcctgttagttggatgtttatgtgagtttggaatgcagggtagagatttagggatgaatatttggtagttgtctgcattttaatggtattaaaagccacgaga

SEQ ID NO: 31637 - DNA, 120 bp, synthetic construct
  source 1..120: mol_type = other DNA
taaaaatatataattagccgggcgtggtggcacatgcctgtaatcccagctactcgggaggctgaggcaggagaatcgcttgaacctgggaggtggaggttgcgatgagccgagatcgca

SEQ ID NO: 31638 - DNA, 120 bp, synthetic construct
  source 1..120: mol_type = other DNA
aatgaaaaccacaatgagataccacttcacacctattaggatggctattatcaaaaacaaaaacaagtgtttgcaaggatgtagagattggaattcttgtgtattgctagagggaatgta

SEQ ID NO: 31639 - DNA, 120 bp, synthetic construct
  source 1..120: mol_type = other DNA
tgtacactcatattcatggcagcattatttacagtagccaaaaggtgaaagcaacctaagtgtccgtcagtggatgaatggataaacaaaatggaataatttcagccttaaatagaaata

SEQ ID NO: 31640 - DNA, 120 bp, synthetic construct; identical to SEQ ID NO: 9356
  source 1..120: mol_type = other DNA

SEQ ID NO: 31641 - DNA, 120 bp, synthetic construct
  source 1..120: mol_type = other DNA
tattattatactttaagttttagggtacatgtgcacaacatgcaggtttgttacatatgtatacatgtgccatgttggtgtgctgcacccattaagtcatcatttagcattaggtatatc

SEQ ID NO: 31642 - DNA, 120 bp, synthetic construct
  source 1..120: mol_type = other DNA
gtttggttttttgtccttgtgatagtttgctgagaatgatggtttccagcttcatccatgtccctgcaaaggacatgaactcatcattttttgtggctgcatagtattccatggtgtata

SEQ ID NO: 31643 - DNA, 120 bp, synthetic construct
  source 1..120: mol_type = other DNA
atttataatcctttgggtatatacccagtaatgggatggctgggtcaaatggtatttctagttctagatccctgaggaattgccacactgacttccacaatggttgaactagtttacagt

SEQ ID NO: 31644 - DNA, 120 bp, synthetic construct
  source 1..120: mol_type = other DNA
ttgcatttctctgatggccagtgatgatgagcatttcttcatgtgttttttggctgcataaatgtcttctttcgagaagtgtctgttcatatccttcactcactttttgatggggttgtt

SEQ ID NO: 31645 - DNA, 120 bp, synthetic construct; identical to SEQ ID NO: 9357
  source 1..120: mol_type = other DNA

SEQ ID NO: 31646 - DNA, 120 bp, synthetic construct
  source 1..120: mol_type = other DNA
tgtcaattaaacaaacaacaaaaagccctgagactgaatgagataatcaagagagtatgtgtagatagagaagaggtccaaggaaggagtcttgggtgactctgatgtcaagtgaggaca

SEQ ID NO: 31647 - DNA, 120 bp, synthetic construct
  source 1..120: mol_type = other DNA
ggctgggcatggtggctcacacctgtagtcccagcacttcgggaggctgaggtaggtaaatcacttgagctcatgtgtttgagaccagcttgggcaacatggtgaaacctcatctctact

SEQ ID NO: 31648 - DNA, 120 bp, synthetic construct; identical to SEQ ID NO: 9358
  source 1..120: mol_type = other DNA

SEQ ID NO: 31649 - DNA, 120 bp, synthetic construct
  source 1..120: mol_type = other DNA
gcaagactctgtctcaaaaaaaaaaaaaacaaaaaccaagaaaagaaaaaaaaactcttctaagaggatttttttttcctggattaaatcaagaaaatgggaattcaaagagatttggaa

SEQ ID NO: 31650 - DNA, 120 bp, synthetic construct
  source 1..120: mol_type = other DNA
tctacctatggctttcgaggtgaggtaagctaaagattcaagaaatgtgtaaaatatcctcctgtgatgacattgtctgtcatttgttagtatgtatttctcaacatagataaataaggt

SEQ ID NO: 31651 - DNA, 120 bp, synthetic construct
  source 1..120: mol_type = other DNA
tttcttgatggaagtacccagtaccacctatgaagttttcttgtcaaaaaatcaaatgtgaatctgatcattacttagatctaagtaccaatatatgaaaaatataggagacaaggaagc

SEQ ID NO: 31652 - DNA, 120 bp, synthetic construct; identical to SEQ ID NO: 9359
  source 1..120: mol_type = other DNA

SEQ ID NO: 31653 - DNA, 120 bp, synthetic construct
  source 1..120: mol_type = other DNA
aggatcttatattttgtgactcacttcctgttggatatctttctacccagtaaatatagtcctatctaggttttaatggctacatgtatgtactgtagtttgtttaaatggtttcctatt

SEQ ID NO: 31654 - DNA, 120 bp, synthetic construct
  source 1..120: mol_type = other DNA
gctcactgcaacctctgccttctgggttcaagctattctcctgcctcagcctcctgaatagctgtgattacaggcgtgcaccactatgcccagctaatttttgtattttgggtagagaca

SEQ ID NO: 31655 - DNA, 120 bp, synthetic construct; identical to SEQ ID NO: 9360
  source 1..120: mol_type = other DNA

SEQ ID NO: 31656 - DNA, 120 bp, synthetic construct
  source 1..120: mol_type = other DNA
tttggcagggctgtgttcctctatggaggttccaagggaccagagaaactactttacagtagttattttaagggaatgaaagtgaagatggggttgggcagtcaaagaggctgttacttt

SEQ ID NO: 31657 - DNA, 120 bp, synthetic construct
  source 1..120: mol_type = other DNA
tagggtggtctcatgtgttgtcttgctcacagtgaccactagattattccaagaagggacaatttccaagacttggtttacactgagacggctcctgattttaaggataccttagatcaa

SEQ ID NO: 31658 - DNA, 120 bp, synthetic construct
  source 1..120: mol_type = other DNA
tatacaggaagatttattgagggatttctgtgtaccagccgtggttctcagcactttgtatactttgtattaactctgactcctgacagtaactctacagaggttctgctgttacccagt

SEQ ID NO: 31659 - DNA, 120 bp, synthetic construct; identical to SEQ ID NO: 9361
  source 1..120: mol_type = other DNA

SEQ ID NO: 31660 - DNA, 120 bp, synthetic construct
  source 1..120: mol_type = other DNA
gctagcaaatttttgtatttttagtagagattggtgtttcaccatgttggccaggctgttcttgaactcctgacctcaggtgatccacccacctaggcctcccaaagtgctgggattaca

SEQ ID NO: 31661 - DNA, 120 bp, synthetic construct
  source 1..120: mol_type = other DNA
tgaactgaacttgccacagctgtatttactgtctactgagatgctgtcacacagaccccgtcatagcacagttcctgagttacatctttacatactgtagtatccttcttgtgaaaaaag

SEQ ID NO: 31662 - DNA, 120 bp, synthetic construct
  source 1..120: mol_type = other DNA
gcttatataaagcagttttgattaacaatataaaacactatctatttggagtgattcctttacccatttctgaaggcaagttttaaaaattactagaagacacttcattgagaatattat

SEQ ID NO: 31663 - DNA, 120 bp, synthetic construct; identical to SEQ ID NO: 9362
  source 1..120: mol_type = other DNA

SEQ ID NO: 31664 - DNA, 120 bp, synthetic construct
  source 1..120: mol_type = other DNA
tacaggtatagtgctgacttcttttactcatatatattcattctgaaatgtattttttgcctaggtctcagagtaatcctgtctcaacaccagtgttatcttttttggcagagatcttga

SEQ ID NO: 31665 - DNA, 120 bp, synthetic construct
  source 1..120: mol_type = other DNA
gtgtctgttacacgtaggtattttaagtaaatggtagctgctgatgtaatttctgcccctttgcccttcagttggggtattgctttggaccgattagagggctgtggctgggatgctaaa

SEQ ID NO: 31666 - DNA, 120 bp, synthetic construct
  source 1..120: mol_type = other DNA
aactgatgaatggcctttgaacagaacaaaaatgagattcagaataacaaaattgcacctttgtttttataagcactggccattcactagttgaagactggtaggaatacctaattcatg

SEQ ID NO: 31667 - DNA, 120 bp, synthetic construct
  source 1..120: mol_type = other DNA
gtcaggagtttgagaccagcctgggaaacagagcaagaccccgtctctacagaaaatttttaaaaaattagctgggcatggtgatgcatatctgtagtcttagctactccggaggtggga

SEQ ID NO: 31668 - DNA, 120 bp, synthetic construct; identical to SEQ ID NO: 9363
  source 1..120: mol_type = other DNA

SEQ ID NO: 31669 - DNA, 120 bp, synthetic construct
  source 1..120: mol_type = other DNA
gcaggatgaaatagagtcattatcttggcaaccagcccctgccaatgtgctctcagtctgcctttccagccccttctctctacctattcccagctgccatgtattctaaagcctctatgc

SEQ ID NO: 31670 - DNA, 120 bp, synthetic construct
  source 1..120: mol_type = other DNA
cacctcaggctgaatggacccttctctagatcgcttagcatattgttctacagttaggtaaaaagtctacctatcactagatcaagagctttgtttttttttattaatttaattttcttt

SEQ ID NO: 31671 - DNA, 120 bp, synthetic construct
  source 1..120: mol_type = other DNA
ccagctaattttttgtatttttagtagagacggggtttcaccatgttagttagccaggatggtctcgatctcctgacctcgtgatccacccacctcggcctcccaaagcactgggattac

SEQ ID NO: 31672 - DNA, 120 bp, synthetic construct; identical to SEQ ID NO: 9364
  source 1..120: mol_type = other DNA

SEQ ID NO: 31673 - DNA, 120 bp, synthetic construct
  source 1..120: mol_type = other DNA
agaatcgcttgaacctggtaggcggaggttgtagtgagctgagattgtgccattgctctccagcctgggaaacaagagcaaaactccgtctcaaaaaaaaaaaaaatccaattcaaatga

SEQ ID NO: 31674 - DNA, 120 bp, synthetic construct
  source 1..120: mol_type = other DNA
atctctctactggatattaatttgttatattttctcattagagcaagttactcagatggaaaactgaaagcccctcctaaaccatgtgctggcaatcaagggacccagatcacggtaaga

SEQ ID NO: 31675 - DNA, 120 bp, synthetic construct; identical to SEQ ID NO: 9365
  source 1..120: mol_type = other DNA

SEQ ID NO: 31676 - DNA, 120 bp, synthetic construct
  source 1..120: mol_type = other DNA
ttttctcatctgtcaaatgaagcaaagaatacttgccctcttgacttaaagggtgtctgatgagacatatgactgtatcattagctgggagaaagtccatcgtgctgcctatgtatagtg

SEQ ID NO: 31677 - DNA, 120 bp, synthetic construct
  source 1..120: mol_type = other DNA
gtcccatctagagcacatcttcttgaagtccactgtaacctgcctaatcctggatgtgacgagccaggcaggaggcagaaaagaatgtgtgttttgcaatacatgttaagagacatcttg

SEQ ID NO: 31678 - DNA, 120 bp, synthetic construct
  source 1..120: mol_type = other DNA
aaaaatacaaaattagccaggcgtgatggcgcatgcctgtaatcccagctactcaggaaggctgaggcaggagaattgcttgaacccgggaggcagaggttgtggtgagttgagatcatg

SEQ ID NO: 31679 - DNA, 120 bp, synthetic construct; identical to SEQ ID NO: 9366
  source 1..120: mol_type = other DNA

SEQ ID NO: 31680 - DNA, 120 bp, synthetic construct
  source 1..120: mol_type = other DNA
caggctggtctcgaactcctgacctcaggtgacccacccaccttggcctcccaaagttctgggattacagacgtgagccactgcacccagcctgaaaaatatctttgaatgccatgtgat

SEQ ID NO: 31681 - DNA, 120 bp, synthetic construct
  source 1..120: mol_type = other DNA
tgcatagttgagaaatcagtgaatgaatgtgggaggcaggaaaaatgtcctttaattcttctgttaatgctgtcttatccctggccccagtcagtgcttagaactgtgctgttggtaaat

SEQ ID NO: 31682 - DNA, 120 bp, synthetic construct
  source 1..120: mol_type = other DNA
acaacatagccacgaggagaaaagctttaaaaaatccaagtgaagaatatgggaaaattttggaagttgttggcaggtacagtccaaaatctgggagtgggtctctgagatttgtcatca

SEQ ID NO: 31683 - DNA, 120 bp, synthetic construct; identical to SEQ ID NO: 9367
  source 1..120: mol_type = other DNA

SEQ ID NO: 31684 - DNA, 120 bp, synthetic construct
  source 1..120: mol_type = other DNA
ttgttttcattcttttcctgactttgctctagagtcagtttcctaacagagtacattcgatgatcatgtgcccatatctgtggggagaagatttcttgattggcagtcttactaagggtg

SEQ ID NO: 31685 - DNA, 120 bp, synthetic construct
  source 1..120: mol_type = other DNA
gacagatgaaaacaacgttatatccatgatagacttacgctgctggtacagatggtacaggtggcttcagtataggctctccgaacccacatatcattgattatgatagggatatgttaa

SEQ ID NO: 31686 - DNA, 120 bp, synthetic construct
  source 1..120: mol_type = other DNA
gtatatgtatatatttatatatgtatatgtatatatatttatatatgtatatgtgtgtatatatatatttatatatatgtatatgtgtgtatatatatatatttttttttgaaacggaat

SEQ ID NO: 31687 - DNA, 120 bp, synthetic construct
  source 1..120: mol_type = other DNA
ttgccaccatgcccggcaattttttttttgtttttttttagtagagagggggtttaatcattttggccaggctggtcttgaactcctgacctcaggtgatctgcctgccttggcctccta

SEQ ID NO: 31688 - DNA, 120 bp, synthetic construct; identical to SEQ ID NO: 9368
  source 1..120: mol_type = other DNA

SEQ ID NO: 31689 - DNA, 120 bp, synthetic construct
  source 1..120: mol_type = other DNA
tggcccatttttcagtatttctaaaaaaaatctaaagtgggtcaaacatttcaccttaatagaatgacaggtttgtacatcaagtttctttgctttttcttggaattttatacttttttt

SEQ ID NO: 31690 - DNA, 120 bp, synthetic construct
  source 1..120: mol_type = other DNA
gctgggattacaggcacatgccaccacacccggctaattttttttttttttttgtatttttagtagagacagggtttcaccatgttgtccaggctggtctcgaactcctgacctcaggtg

SEQ ID NO: 31691 - DNA, 120 bp, synthetic construct
  source 1..120: mol_type = other DNA
agttctagttggctgttttgattctaggtgtggtaaagtgaaatattgttacttaataaatgcattttgctagacacaatccttcggttcacgagctctgtagagaaaagagaaataacc

SEQ ID NO: 31692 - DNA, 120 bp, synthetic construct; identical to SEQ ID NO: 9369
  source 1..120: mol_type = other DNA

SEQ ID NO: 31693 - DNA, 120 bp, synthetic construct
  source 1..120: mol_type = other DNA
cagcctggccaacatggcgaaacgccatctctactaaaaatacaaaaaaaattagctgggcctggtggcaggcgcctataatcccagctactcgggaggctgaggcgggagaatcgcttg

SEQ ID NO: 31694 - DNA, 120 bp, synthetic construct
  source 1..120: mol_type = other DNA
gatatccttgattctatcagcaacctataaaagtagagaggagtctgtgttttgattcagtcacctttagcatttttatttccatgaagtttctgctggtttatttttctgtgggtaaaa

SEQ ID NO: 31695 - DNA, 120 bp, synthetic construct
  source 1..120: mol_type = other DNA
aaagggggctctgacatctagtgtgtgtttttggcaactcttttcttactcttttgtttttcttttccaggtattcagtacacaatgcaggcattagtttctcagttaaaaaagtaagtt

SEQ ID NO: 31696 - DNA, 120 bp, synthetic construct; identical to SEQ ID NO: 9370
  source 1..120: mol_type = other DNA

SEQ ID NO: 31697 - DNA, 120 bp, synthetic construct
  source 1..120: mol_type = other DNA
gttttatgcttcagatttgttaatggagttcttatttcacgtaatcaacactttctaggtgtatgtaatctcctagattctgtggcgtgaatcatgtgttctttcaaggtcttagtcttg

SEQ ID NO: 31698 - DNA, 120 bp, synthetic construct
  source 1..120: mol_type = other DNA
tcatattccaggctttgtgctagaagttagggatataaagacaaataagatatttcctgcccttaaagactagattcgtgttgctaagtcttcattatcaagaaaagcataagtggggaa

SEQ ID NO: 31699 - DNA, 120 bp, synthetic construct; identical to SEQ ID NO: 9371
  source 1..120: mol_type = other DNA

SEQ ID NO: 31700 - DNA, 120 bp, synthetic construct
  source 1..120: mol_type = other DNA
ctgaaaagcagcagcagtcattccagagcccagtttctactttgaagggcagattatttattctttgagctaacctgactgaggaacaattagtttgcttttaatttactattttctttt

SEQ ID NO: 31701 - DNA, 120 bp, synthetic construct
  source 1..120: mol_type = other DNA
cagctaattttttgtattttttagtagagacggggtttcatcgtgttagccaggatgatctcgatctccagacctcgtgatccacccacctcggcctcccaaagtgctgggattacaggc

SEQ ID NO: 31702 - DNA, 120 bp, synthetic construct
  source 1..120: mol_type = other DNA
aactagattttaagatcagaattagttgttgtgaaatcttagggactgtacaagattagaaatcctctatagcagcatttcccaaagcaggcttccagaacactagcctcatgaggcatt

SEQ ID NO: 31703 - DNA, 120 bp, synthetic construct; identical to SEQ ID NO: 9372
  source 1..120: mol_type = other DNA

SEQ ID NO: 31704 - DNA, 120 bp, synthetic construct
  source 1..120: mol_type = other DNA
ttgaaatatgaaggataaataggaattaactaggtaccaataggttaggagtagagctttccagacagagggactagttcttgggaaggtctccagacagaaataagtgtggcttgtctg

SEQ ID NO: 31705 - DNA, 120 bp, synthetic construct
  source 1..120: mol_type = other DNA
cttggaatctcatctttgggatttagttactaagatacattcaagtttgagcaaaataaggtctcagagcttggattcattgttctgttccagcaattagagcagtacctggcacatagc

SEQ ID NO: 31706 - DNA, 120 bp, synthetic construct
  source 1..120: mol_type = other DNA
gaatggacaggcacaggaggacctcaaatggaccaagtcttcggggccctcatttcacaaagttagtttatgggaaggaaccttgtgtttttaaattctgattcttttgtaatgtttgag

SEQ ID NO: 31707 - DNA, 120 bp, synthetic construct
  source 1..120: mol_type = other DNA
agtgaagaagtgcatcttcttactcttcatcaaccgtaagttaaaaagaaccacatgggaaatccactcacaggaaacacccacagggaattttatgggaccatggaaaaatttctgatc

SEQ ID NO: 31708 - DNA, 120 bp, synthetic construct; identical to SEQ ID NO: 9373
  source 1..120: mol_type = other DNA

SEQ ID NO: 31709 - DNA, 120 bp, synthetic construct
  source 1..120: mol_type = other DNA
aagagatcaagggccactgtttgaaattgcacagcaggatacggaaaaggggtaccttaggtataggcattgtcattaaagaaattgctaagatacttgagattttcctgtttaaggaat

SEQ ID NO: 31710 - DNA, 120 bp, synthetic construct
  source 1..120: mol_type = other DNA
tgttatttactaaacaaatgctattttgtattgtgctccttataacttaattgtttattacaaggttttgatggtgacctaccaacaacaagtaatcccaaacacagtctgaattttttg

SEQ ID NO: 31711 - DNA, 120 bp, synthetic construct
  source 1..120: mol_type = other DNA
tttgtttgcttgtttgctgttggaaatggaatattccctccttccatttagactgctaaccagctgtaaatgtttcaaaatatgcatgttttacagcagttgttcaaagcaatacaggaa

SEQ ID NO: 31712 - DNA, 120 bp, synthetic construct; identical to SEQ ID NO: 9374
  source 1..120: mol_type = other DNA

SEQ ID NO: 31713 - DNA, 120 bp, synthetic construct
  source 1..120: mol_type = other DNA
ccagtagcaaagaaaggtcaagctcttacgcatgccattcatttatctacactgtgcaggcgcactcaggtggcagggacaaagaccactcctttggcgcatctcaagttcagaattctc

SEQ ID NO: 31714 - DNA, 120 bp, synthetic construct
  source 1..120: mol_type = other DNA
ctcagaggatgttagtctcttcattgataaagtcacaaccacttttcctgttggaaataaaaagatttgacgtatccttgtctacagcaacacaggacaacagataatcagcaggtcatc

SEQ ID NO: 31715 - DNA, 120 bp, synthetic construct; identical to SEQ ID NO: 9375
  source 1..120: mol_type = other DNA

SEQ ID NO: 31716 - DNA, 120 bp, synthetic construct
  source 1..120: mol_type = other DNA
gcagagatatctactctgaagcctttgtaggggcctgggcacctttgggagcctgagctggaactgaaggtggagctgcagcctgggccttggtttgatccttggccttggcctttggcc

SEQ ID NO: 31717 - DNA, 120 bp, synthetic construct
  source 1..120: mol_type = other DNA
ccttgggctttacgagggccttgatagcctcggcacgtgcactcatggccttggcattgttggcctgcatcttctttaggcccttcttgttgtgcttcttggcaaagtgcatgttcctca

SEQ ID NO: 31718 - DNA, 120 bp, synthetic construct
  source 1..120: mol_type = other DNA
ctacaccttaagccgcggctcccgaagcacctagaaccggaagagttggctcactatttagcacacacacacgtctataatagtgctggccacttggggttggaattagtttatttatca

SEQ ID NO: 31719 - DNA, 120 bp, synthetic construct
  source 1..120: mol_type = other DNA
agctaatgggggcaaagggaagtgaggagggagaatgtactgccttatcatgttttctattacttggctgaagtaaaacagtcccaagccgatagtaagatagtgggctggaaagtggcg

SEQ ID NO: 31720 - DNA, 120 bp, synthetic construct; identical to SEQ ID NO: 9376
  source 1..120: mol_type = other DNA

SEQ ID NO: 31721 - DNA, 120 bp, synthetic construct
  source 1..120: mol_type = other DNA
atacaccactggcaaaaggatgttctgtcccttcttacaggtacaaggcacagttttccttcatttattcactaatttagcagaacctcactaagagcctcctatatgccaggctctgcg

SEQ ID NO: 31722 - DNA, 120 bp, synthetic construct
  source 1..120: mol_type = other DNA
agccacaacagctactgttcatcttccataaaagacaatcagccgggcacagtggctcacacctgtaaatcccagcactttgggaggctgaggtgggtggatcacaaggtcaggtgtttg

SEQ ID NO: 31723 - DNA, 120 bp, synthetic construct
  source 1..120: mol_type = other DNA
gaacctaggaggtggaggttgcagtgagctgagactgtaccactgcactccagcctgggcgacagagcgagactccatctcaaaaaaaaaaaaaaaaagactgggttctgttctgtggag

SEQ ID NO: 31724 - DNA, 120 bp, synthetic construct; identical to SEQ ID NO: 9377
  source 1..120: mol_type = other DNA

SEQ ID NO: 31725 - DNA, 120 bp, synthetic construct
  source 1..120: mol_type = other DNA
ctcatctcattgcaacctccacctcccgcgttcaagcaattctcctgcctcagcctcccgagtagctgggattacaggtgtgcaccaccacgcccagctaatttttgtatttttagtaga

SEQ ID NO: 31726 - DNA, 120 bp, synthetic construct
  source 1..120: mol_type = other DNA
agttttagattaagtgttttcatgttttcccttgcaaagtaataaactggtcaagttatcaccttgttccatctccatattaatcagggtccaaacaggagatagaaaccatgcaacaat

SEQ ID NO: 31727 - DNA, 120 bp, synthetic construct
  source 1..120: mol_type = other DNA
taccatcccctcaccacactcccccacctactcactgagatgcagaccttattgaagagaatgtaactggcttgctgcgaggtaaagtcaatgaggcgctccccagtaccactctgaggg

SEQ ID NO: 31728 - DNA, 120 bp, synthetic construct; identical to SEQ ID NO: 9378
  source 1..120: mol_type = other DNA

SEQ ID NO: 31729 - DNA, 120 bp, synthetic construct
  source 1..120: mol_type = other DNA
cttgcccaaggtcacacaaagaattccactagttctaaaatgacagtaattacagttaacatacattgtatgtggcagatacatataaagcacatggcattaatttttttttttgagatg

SEQ ID NO: 31730 - DNA, 120 bp, synthetic construct
  source 1..120: mol_type = other DNA
atgcgccaccacgcccagctaatttttgtatttttagtagagacgtggtttcatcatgttggccaggatggtctcgatctcctgaccttgtgatccacccgcctcggcctccccaaatgc

SEQ ID NO: 31731 - DNA, 120 bp, synthetic construct
  source 1..120: mol_type = other DNA
gaaagatgatgtaacttacgcaaagctacacagctcttaagtagcagtgccaatatttgaacacactcagactcgatcctgaggttttgaccactgtgtcatctggcctcaaatcttctg

SEQ ID NO: 31732 - DNA, 120 bp, synthetic construct; identical to SEQ ID NO: 9379
  source 1..120: mol_type = other DNA

SEQ ID NO: 31733 - DNA, 120 bp, synthetic construct
  source 1..120: mol_type = other DNA
tgcccggccagacgtgagagcccagatttttgcctgttatttaggaactttctttgcaagtattacctggatagttttaacattttcttctttgaacctagttataaaggtattgtgctg

SEQ ID NO: 31734 - DNA, 120 bp, synthetic construct
  source 1..120: mol_type = other DNA
aatgtgctcttcactggagatgttcaggaggaggctactcccacctacacagggtgcagtggagggtctgggccccagggaggcagcaggaagagtggaaagagcggaggctctactgtt

SEQ ID NO: 31735 - DNA, 120 bp, synthetic construct
  source 1..120: mol_type = other DNA
agtgtctggtacaggttctaagtgcttattattctaagtcacttcacttacctgagttctcagttttcctatctataagataagcaggttggataaaatgttctccaatatactcctggt

SEQ ID NO: 31736 - DNA, 120 bp, synthetic construct; identical to SEQ ID NO: 9380
  source 1..120: mol_type = other DNA

SEQ ID NO: 31737 - DNA, 120 bp, synthetic construct
  source 1..120: mol_type = other DNA
tgcagagagaaaggttcctactggtgagacctgaaagggatatgtggcaggtgggaggaagaagttctgtctggaaaccaacccttgttcctccgttattgattgactcctggtaccaac

SEQ ID NO: 31738 - DNA, 120 bp, synthetic construct
  source 1..120: mol_type = other DNA
actatgatacacaggaaatgcccagtaactcttagttggtttgatatctgttcccattgctcacttaagctcagtgcccctttactgatccttttattctgcctccctctgcacatgtgc

SEQ ID NO: 31739 - DNA, 120 bp, synthetic construct
  source 1..120: mol_type = other DNA
ctcatggtctgctagagaatatatcccatgggagagaaaaacagactcgggagaatatagcaggggcccttgtcctggactttggcagttaggaaagggagggaagagacatggaggctg

SEQ ID NO: 31740 - DNA, 120 bp, synthetic construct; identical to SEQ ID NO: 9381
  source 1..120: mol_type = other DNA

SEQ ID NO: 31741 - DNA, 120 bp, synthetic construct
  source 1..120: mol_type = other DNA
gagttgaggctgcagaattcaggccaaatagagaggttttcatcaggatattaaagagtttagatttcaatttggtgggaatggatgggatcttatttgcattttatgaagagctccctg

SEQ ID NO: 31742 - DNA, 120 bp, synthetic construct
  source 1..120: mol_type = other DNA
acaggaagtagccccattcactaatagttgagtatgtagatttgctaggacctggaaatggtttggctggtggggagtgggaagaaaggcccaaagtgtgaaatgaagatggagagcaca

SEQ ID NO: 31743 - DNA, 120 bp, synthetic construct; identical to SEQ ID NO: 9382
  source 1..120: mol_type = other DNA

SEQ ID NO: 31744 - DNA, 120 bp, synthetic construct
  source 1..120: mol_type = other DNA
atctttctgcttcttagattgtgccttgtactccactgatcatggccagtacatcagaagccctggtttgcagtgaatgcatttgatatggaaatcaggaaccctggggataccactcat

SEQ ID NO: 31745 - DNA, 120 bp, synthetic construct
  source 1..120: mol_type = other DNA
gagtggacagcagctggtctcctccaatttaattccaacactgtctacttggagatagcattagatcccacaggttgagggtgcagtcccctagactgcccccagtctcctgcttcagac

SEQ ID NO: 31746 - DNA, 120 bp, synthetic construct; identical to SEQ ID NO: 2268
  source 1..120: mol_type = other DNA

SEQ ID NO: 31747 - DNA, 120 bp, synthetic construct; identical to SEQ ID NO: 9383
  source 1..120: mol_type = other DNA

SEQ ID NO: 31748 - DNA, 120 bp, synthetic construct
  source 1..120: mol_type = other DNA
gaggcctaaagcaccccaacattataacagaagacgataacaggactatgggagttatgagctgggaaccttggacaaaaatatatacatattaaataaatattaagtgtatatatatac

SEQ ID NO: 31749 - DNA, 120 bp, synthetic construct
  source 1..120: mol_type = other DNA
tagaaaagtcactgtacctttttgtttccattggccctgtacttcttattataccccagcaggaggagcataatgtgttgttatatcattctggtgataagattcataagtgggttcagc

SEQ ID NO: 31750 - DNA, 120 bp, synthetic construct
  source 1..120: mol_type = other DNA
tggtgacagcctgattccctcattgtaaacttatccatcaacatgtagcttaatcgtttcaccttttgtgatgaccattacctgaatcagttatttcattagattgcaagattatgcttt

SEQ ID NO: 31751 - DNA, 120 bp, synthetic construct
  source 1..120: mol_type = other DNA
tgaattatatccctctagctatcaattttcgaaggaatgaatggtgtcctagtaatttccagtggtgtttaattacgttttcccttctctttctccttctcttattccctccctctccat

SEQ ID NO: 31752 - DNA, 120 bp, synthetic construct; identical to SEQ ID NO: 9384
  source 1..120: mol_type = other DNA

SEQ ID NO: 31753 - DNA, 120 bp, synthetic construct
  source 1..120: mol_type = other DNA
atctgggatctgggagtcctcattgctactgagtagtcattacttttaggcttttccagtggtcagagctaggaaatatgtatatttaaaaatggacagttgaatggttgttgccaggag

SEQ ID NO: 31754 - DNA, 120 bp, synthetic construct
  source 1..120: mol_type = other DNA
ctggtggtgatggttgcgcaacaatgtaaatgccactgagctctcatttaaaaatggttaaaatggtaaattttatatatattttaccacaataaaaaaaagtcttcttctgggagcacc

SEQ ID NO: 31755 - DNA, 120 bp, synthetic construct; identical to SEQ ID NO: 9385
  source 1..120: mol_type = other DNA

SEQ ID NO: 31756 - DNA, 120 bp, synthetic construct
  source 1..120: mol_type = other DNA
cttctggaagtagtgataaggtctatgcccaccagatggttcgtacagattcccgggaacagaagcttgatgcatttctgcagcctctgagcaaacccctgtccagtcagccccaggcca

SEQ ID NO: 31757 - DNA, 120 bp, synthetic construct
  source 1..120: mol_type = other DNA
caacaaaggggacttcagaaatgtcagagaagagaggacctacttccagcaaccccaggtatggccttttgggaaaagtacagcctacctcctttattctgtaataaaactgccttctaa

SEQ ID NO: 31758 - DNA, 120 bp, synthetic construct
  source 1..120: mol_type = other DNA
caccatagtgtcctttgaaataacttaaatgtccacagttccaagcatgagttaaaaacacttcagaatgtagagtagttgttcaattgaataaacacacacaccagaaaaaaaagcaag

SEQ ID NO: 31759 - DNA, 120 bp, synthetic construct; identical to SEQ ID NO: 9386
  source 1..120: mol_type = other DNA

SEQ ID NO: 31760 - DNA, 120 bp, synthetic construct
  source 1..120: mol_type = other DNA
tgacttgaacccgggaggcggaggttgcagtgagccgagatcgcgccattgcactccagcctgggcaacaagagcgaaactccgtctcaaaacaaacgaacaaacaaaaaccccaaaaat

SEQ ID NO: 31761 - DNA, 120 bp, synthetic construct
  source 1..120: mol_type = other DNA
gcaggtactctaagacattacctcactgaaatctctaaggtagatattctttatttaaagtgtacttgtatgaaacctggagctcaaggtgaaggaatttgcccaaggctgcacttgcac

SEQ ID NO: 31762 - DNA, 120 bp, synthetic construct
  source 1..120: mol_type = other DNA
cccagcacttcgagaggccaaggtggaagggtcacttgagtctaggagttacacacaacacacacacacacacacacacacacactagccaggcatggtggcaaatgcctgtagtctcag

SEQ ID NO: 31763 - DNA, 120 bp, synthetic construct; identical to SEQ ID NO: 9387
  source 1..120: mol_type = other DNA

SEQ ID NO: 31764 - DNA, 120 bp, synthetic construct
  source 1..120: mol_type = other DNA
cccttgctccaaccctccactttccttctcccatgtggtgatttggccatacagctcttgtggctgatctgaactgactgagctttttacccttttgctcttgctgttcttacagcctgg

SEQ ID NO: 31765 - DNA, 120 bp, synthetic construct
  source 1..120: mol_type = other DNA
tgccagtggcctttgtccattgagtctgaagttctttctcctctcatttccccatcattctattatgctaccttgttttattttcttcattgtgtttattgatacttaaaatgatctctt

SEQ ID NO: 31766 - DNA, 120 bp, synthetic construct
  source 1..120: mol_type = other DNA
ttcgagaccagcctggccaacacggtgaaaccccatctctactaaaaatacaaaaaatagctgggtatggtggctcgtacctgtaatcccagctactcaggaggctgagacatgagactc

SEQ ID NO: 31767 - DNA, 120 bp, synthetic construct; identical to SEQ ID NO: 9388
  source 1..120: mol_type = other DNA

SEQ ID NO: 31768 - DNA, 120 bp, synthetic construct
  source 1..120: mol_type = other DNA
tcttgttggccttctgccagcacaggggttcattcacagctctgtagaaccagcacagagaagttgcttgctcctccaaaatgcaacccacaaaatttggctaagtttaaaaacaagaat

SEQ ID NO: 31769 - DNA, 120 bp, synthetic construct
  source 1..120: mol_type = other DNA
aataatgatctgcacttccttttcttcattgcagaaagagacatcgggaagattctgatgtggaaatggtggaagatgattcccgaaaggaaatgactgcagcttgtaccccccggagaa

SEQ ID NO: 31770 - DNA, 120 bp, synthetic construct
  source 1..120: mol_type = other DNA
gaaatggagaaagcagtcatgttgtcagagtggccactacagttttgctgggcaagctcctcttcctttactaacccacaatagcatcagcttaaagacaatttttgattgggagaaaag

SEQ ID NO: 31771 - DNA, 120 bp, synthetic construct; identical to SEQ ID NO: 9389
  source 1..120: mol_type = other DNA

SEQ ID NO: 31772 - DNA, 120 bp, synthetic construct
  source 1..120: mol_type = other DNA
acagagcaaggagttgacacttttatattctgaagacaaagtggtaaatcattatcatctatgtcagaaatagcttttgagaatacctgagtatagaactatcttgatccctgttacttc

SEQ ID NO: 31773 - DNA, 120 bp, synthetic construct
  source 1..120: mol_type = other DNA
tttatgagtgagactatgagtaatggtctaagtgtagacatcattgtccagggctccagtaggcagctctgtacttgagaatttagcagtgacccttctatttttcatctattatacctt

SEQ ID NO: 31774 - DNA, 120 bp, synthetic construct
  source 1..120: mol_type = other DNA
tcctgagtagctgtaattacaggcatgtgccatcatgcccagctaatttttcttttcttagaggtggggttttgccatgtttcccaggctggtcttgaactcctaggctctcacctctgt

SEQ ID NO: 31775 - DNA, 120 bp, synthetic construct; identical to SEQ ID NO: 9390
  source 1..120: mol_type = other DNA

SEQ ID NO: 31776 - DNA, 120 bp, synthetic construct
  source 1..120: mol_type = other DNA
atcctggctaacacagtgaaaccctgtctctactaaaaatagaaaaaaatagctgggcggggtggcggatgcctatagtcccagctactcgggaggctgaggcaggagaatggcatgaac

SEQ ID NO: 31777 - DNA, 120 bp, synthetic construct
  source 1..120: mol_type = other DNA
aggaaaaaaaaaaaaaaaacccatctgcttttgattcagtggcttctttaattttgtcggtctcagtcaccatttgtctaagcaaattcaggcaggcttcaccttgcctttctacatttg

SEQ ID NO: 31778 - DNA, 120 bp, synthetic construct
  source 1..120: mol_type = other DNA
ctgccaattggcttctggtttttatttccatgatttgctccagtggctcttcccttccatcattgttagctttcaagctaggaacttttaaaatgcttttaaataaaagtgagctgttac

SEQ ID NO: 31779 - DNA, 120 bp, synthetic construct
  source 1..120: mol_type = other DNA
ggtttgtctccctcatgtatagcaggctgttgaaagttacaatgtcaataactttctgaatagtatcaaactgttttcagtgcagtgtattaacaaaactaacctgcctcaagtttggtc

SEQ ID NO: 31780 - DNA, 120 bp, synthetic construct; identical to SEQ ID NO: 9391
  source 1..120: mol_type = other DNA

SEQ ID NO: 31781 - DNA, 120 bp, synthetic construct
  source 1..120: mol_type = other DNA
aatgtgctcttgctttggagccagaactcctctgaagctcccaccacctacaccattcagaggccagacagaaatttgttcaccattttgggcatgattttcgtgcttttgtaaaatgtg

SEQ ID NO: 31782 - DNA, 120 bp, synthetic construct
  source 1..120: mol_type = other DNA
tatctggttgacatccaaagccccagcctgggagaagctgattctctagttgaatgctgtatagggatttgactgaggctcagatttggtgaggaagaccactaaccttaacagaccaac

SEQ ID NO: 31783 - DNA, 120 bp, synthetic construct
  source 1..120: mol_type = other DNA
gaagtaagagatacattccttgtaacagctttcttagttgcacctgtatgattatttgatcagtgtgttgtctgtgcagggatcatgtctgtggagctcaccacctcgtcctcggtgctg

SEQ ID NO: 31784 - DNA, 120 bp, synthetic construct; identical to SEQ ID NO: 9392
  source 1..120: mol_type = other DNA

SEQ ID NO: 31785 - DNA, 120 bp, synthetic construct
  source 1..120: mol_type = other DNA
aatacccttaacgttttttgcctccagatatccacacttaatttcattttcttgctctttggtgaacagtcctgggtctgaatgtatatatccatggtttgtcactaggtgacaggtttt

SEQ ID NO: 31786 - DNA, 120 bp, synthetic construct
  source 1..120: mol_type = other DNA
ggaagtgaaatggataaactatgacccctgccttaaagaacaccatggtgttgtatgggaattgtttaggtagaatgaaagaaatcctctaatagagatatgaggccagttcagcagaaa

SEQ ID NO: 31787 - DNA, 120 bp, synthetic construct
  source 1..120: mol_type = other DNA
ttgcaagtgagcattaggaactagaggactgattgccctttcttcagctttggtttcccttgctgcagaaaaagatgctgagactcatggcctcggttatgaactcagatatgtggtttg

SEQ ID NO: 31788 - DNA, 120 bp, synthetic construct; identical to SEQ ID NO: 9393
  source 1..120: mol_type = other DNA

SEQ ID NO: 31789 - DNA, 120 bp, synthetic construct
  source 1..120: mol_type = other DNA
gtggattacactgctctccctttcctccagtgcctcgttattcagtattatttgatgttctccagcttttaaaataatcattttccgcctacgcagaacatcctgtagagacgttgaggt

SEQ ID NO: 31790 - DNA, 120 bp, synthetic construct
  source 1..120: mol_type = other DNA
aagcttaaaaaaaaagtatagtaaaaacataatgtataggcttattgctgtgctatgacccatgccccgttttctccaacctctcttgtcctcactcttcctttttgctggtgatatttt

SEQ ID NO: 31791 - DNA, 120 bp, synthetic construct; identical to SEQ ID NO: 9394
  source 1..120: mol_type = other DNA

SEQ ID NO: 31792 - DNA, 120 bp, synthetic construct
  source 1..120: mol_type = other DNA
acttttgcaagctttagattttataaaagtagaattacactgtaagtttaatttttctgtaatttatatatagctacacatatattcctaagattcatccatcttgttacatatagctct

SEQ ID NO: 31793 - DNA, 120 bp, synthetic construct
  source 1..120: mol_type = other DNA
ctgcttcccagcctcatatgagttgattggtggcctggcatactggatgagaagctctaggtcatatatttaagagagttattgctgggtcataaaatgacagattgttttccagagggg

SEQ ID NO: 31794 - DNA, 120 bp, synthetic construct
  source 1..120: mol_type = other DNA
tagtttttatttgcattttcttggttgaaataaagttgtgtatttcagccaggtgcgttggctcatgcctataatcccagcactttaggaggccaaggtgggcagatcacttgaggccag

SEQ ID NO: 31795 - DNA, 120 bp, synthetic construct; identical to SEQ ID NO: 9395
  source 1..120: mol_type = other DNA

SEQ ID NO: 31796 - DNA, 120 bp, synthetic construct
  source 1..120: mol_type = other DNA
atatccctagtttagggatcctctagtaactttttaaaatgaatacttgttttaggaacagaaattcttagatttaatgtaggcagattttatcaattgttctttacagattggctttgt

SEQ ID NO: 31797 - DNA, 120 bp, synthetic construct
  source 1..120: mol_type = other DNA
tctagcccacctggaattgattttcacagatactacattttttactagttatagattggccccttcgtagagcaagtccgatagctgccatttttatggcagcatgtgctcacttagtgt

SEQ ID NO: 31798 - DNA, 120 bp, synthetic construct
  source 1..120: mol_type = other DNA
taagctcactgtcttatgtgggcataaaccatgcccacataagacagtgagcttaattaataaatgtgtgtgctcagacccctccactgactgggtgttcacatgtcttccttactctcc

SEQ ID NO: 31799 - DNA, 120 bp, synthetic construct
  source 1..120: mol_type = other DNA
tcacaaatgagcccatgctcatttgccattccaaaaatcccagggcccttaagaattatgctaactctactctgcctctgctctataaatggaacaacaaagcctagatgacagcacatc

SEQ ID NO: 31800 - DNA, 120 bp, synthetic construct; identical to SEQ ID NO: 9396
  source 1..120: mol_type = other DNA

SEQ ID NO: 31801 - DNA, 120 bp, synthetic construct
  source 1..120: mol_type = other DNA
aactgaaaggaagagcttaatgagaaaggcatattaaaagccagtataggttgaaagctaggcctcttgtgcaagttagccaagttatacatgaatggtaaagcaaaacagctttattgc

SEQ ID NO: 31802 - DNA, 120 bp, synthetic construct
  source 1..120: mol_type = other DNA
gggtgaggaagctacagaagaaaacttggaagccagcagagattgatgaggtttaagggaagaagccacaagtgctgatgtagaagctgtagcaagttatccaaaagatctaattgatga

SEQ ID NO: 31803 - DNA, 120 bp, synthetic construct
  source 1..120: mol_type = other DNA
aagacaggttgactctaataggtactaatgcatctggtgactttaagttgaagccagtgctcatttgctattccaaaaatcccagggcccttaagaattatgctaactctactctgcctg

SEQ ID NO: 31804 - DNA, 120 bp, synthetic construct; identical to SEQ ID NO: 9397
  source 1..120: mol_type = other DNA

SEQ ID NO: 31805 - DNA, 120 bp, synthetic construct
  source 1..120: mol_type = other DNA
tgagaaacattcgagattcctgggaagaagtcaaaatatcaacattaacaggagtttggaagaaattgcatccagccctcatggataactttgaggggttcaagacttcagtggaggaag

SEQ ID NO: 31806 - DNA, 120 bp, synthetic construct
  source 1..120: mol_type = other DNA
atgagcatagaaagtagtttcttgagaaagaacttaattctggtgaagatgctgttaatattgttgaaatggcaacaaaggatttagaatattatataaacttggtaaagcagcagcagg

SEQ ID NO: 31807 - DNA, 120 bp, synthetic construct; identical to SEQ ID NO: 9398
  source 1..120: mol_type = other DNA

SEQ ID NO: 31808 - DNA, 120 bp, synthetic construct
  source 1..120: mol_type = other DNA
cagctcactgcaaccaccacctcccaggttcaagtgactcttgtgcctcagcctcccaagtagctgggattataagcatgtgccaccacgcctggccaatttttgtatttttagtagagg

SEQ ID NO: 31809 - DNA, 120 bp, synthetic construct
  source 1..120: mol_type = other DNA
agtgtttttaaattaagctacctacgttgattttagacataatgctatttgcacacttaatagattacagtgtggtgtaaacataagttttatatgcactgaaaaacaaaaaatttcaca

SEQ ID NO: 31810 - DNA, 120 bp, synthetic construct
  source 1..120: mol_type = other DNA
tttaccacatattatttgatcataattctttcctgtagatgttttatggtctgcctaaacctttagtggggcctttgatggcttagtcctttcaggcttaagacaatagaagtttatttc

SEQ ID NO: 31811 - DNA, 120 bp, synthetic construct; identical to SEQ ID NO: 9399
  source 1..120: mol_type = other DNA

SEQ ID NO: 31812 - DNA, 120 bp, synthetic construct
  source 1..120: mol_type = other DNA
gtaattattttttcttagtgcattgaaggtaatagtgtatcattttctgatttctactcttgctcttgaaaattcagctatcaatcttaaaatttattacctgttgaaaatccagctacc

SEQ ID NO: 31813 - DNA, 120 bp, synthetic construct
  source 1..120: mol_type = other DNA
tgagacttgacagttttcatcacttctgggatattctcaggtattttgtcttcaaagtcttcagatattgtcctcttcctgccctctctccgactccttctggaacatgagttatgtatt

SEQ ID NO: 31814 - DNA, 120 bp, synthetic construct
  source 1..120: mol_type = other DNA
ttgtatttttcatttttaaaaactttatgtgctcttttggaaatcttgatcccaggagatagtggatagtgtcctgctgcttactcatggttttaatagttcttgagcatgctgaacata

SEQ ID NO: 31815 - DNA, 120 bp, synthetic construct
  source 1..120: mol_type = other DNA
ctttatctgtggggaattacttgaagcctgggttgacaatgaaattctgcagagagaatttgcatttgattctactggaggaacagtcagccccgatatcagtttaaattaaaatctctg

SEQ ID NO: 31816 - DNA, 120 bp, synthetic construct; identical to SEQ ID NO: 9400
  source 1..120: mol_type = other DNA

SEQ ID NO: 31817 - DNA, 120 bp, synthetic construct
  source 1..120: mol_type = other DNA
cagcccttggagtctcagcttaatgtgttggggaagtggtctcctattagactctccatttcaaaccattccatgattttgtcctccttttgccaccttccgagcctgtaaaaactaatg

SEQ ID NO: 31818 - DNA, 120 bp, synthetic construct
  source 1..120: mol_type = other DNA
gcaattccttgttgcatgttaaaagattagttatattttattcctcatttgtgttcgttttcaccaggaggctcaattcaggcttctttgcttacttggtgtctctagttctggtgcctg

SEQ ID NO: 31819 - DNA, 120 bp, synthetic construct
  source 1..120: mol_type = other DNA
aatcctcagtgggccttggcacagcatcaaaccaagttataccttctcaacaccaccaagcttaggtaaatcagctgagtgtgtgaacaagcagagctactacaacaatggtccagggag

SEQ ID NO: 31820 - DNA, 120 bp, synthetic construct; identical to SEQ ID NO: 9401
  source 1..120: mol_type = other DNA

SEQ ID NO: 31821 - DNA, 120 bp, synthetic construct
  source 1..120: mol_type = other DNA
agaagcctagtccttggtagttgctcagtgccctataaatgttgtgaaccaggtggtgagggtttggtgctgctagagaattctggtatctgctctgtgcaacagagtactgtaggtgat

SEQ ID NO: 31822 - DNA, 120 bp, synthetic construct
  source 1..120: mol_type = other DNA
tttcatttgactattgcatggctggcaacatttctattgattgtttccagggaccttggcggatgagctcctgttgagtctagcatctctgttaaatctgttctcaaataggtaatgcat

SEQ ID NO: 31823 - DNA, 120 bp, synthetic construct
  source 1..120: mol_type = other DNA
acattgcatggagttggtacatgagatagaaacctattcgccatcccttgaaactgccccagtccagaagcttcctgttagcacatgtacctccttgtatgtattcagaactcattccat

SEQ ID NO: 31824 - DNA, 120 bp, synthetic construct; identical to SEQ ID NO: 9402
  source 1..120: mol_type = other DNA

SEQ ID NO: 31825 - DNA, 120 bp, synthetic construct
  source 1..120: mol_type = other DNA
cttcctttagcactttactaactgatgtagaataagtcagctactcaataggtgcctcagtttccccaccaaaatgcagacatagaaggtgctttgtctgctttgatgagaagtctttaa

SEQ ID NO: 31826 - DNA, 120 bp, synthetic construct
  source 1..120: mol_type = other DNA
taccatataaatgtggcctttattcccattgtgttcttggaagtaattcaatatagtgtgtacttcatagctgcttttggactattgccagccagtgtatcatcctaaactacatgtcag

SEQ ID NO: 31827 - DNA, 120 bp, synthetic construct; identical to SEQ ID NO: 9403
  source 1..120: mol_type = other DNA

SEQ ID NO: 31828 - DNA, 120 bp, synthetic construct
  source 1..120: mol_type = other DNA
cagaactatttctgtctcatccatgtttcagggattacttctcccattttgtcccaactggttgtatctcaagcatgaattcagcttttccttaaagtcacttcatttttattttcagtg

SEQ ID NO: 31829 - DNA, 120 bp, synthetic construct
  source 1..120: mol_type = other DNA
ctctccactaatatcttatttgtagtatgttaaatttttctaaaacttctaaggatagttgctgtattgtatgatttgcatatggaggtatctataagaagttttatactttttagcaaa

SEQ ID NO: 31830 - DNA, 120 bp, synthetic construct
  source 1..120: mol_type = other DNA
gcgggcagatcatttgaggtcaggagttcaagaccagcctgaccaatatgatgaaaccctgtctctactaaattacaaatattagcagggtatggtggtgggcgcctgtaatcccagcta

SEQ ID NO: 31831 - DNA, 120 bp, synthetic construct; identical to SEQ ID NO: 9404
  source 1..120: mol_type = other DNA

SEQ ID NO: 31832 - DNA, 120 bp, synthetic construct
  source 1..120: mol_type = other DNA
tttcatatccacttttttcatgtgatatactctacaaaaagcctgctgagattttgattgggattatgttgaatctagatcaatttagggtgaaaaacttttgttagataaatcccttag

SEQ ID NO: 31833 - DNA, 120 bp, synthetic construct
  source 1..120: mol_type = other DNA
ctgcaacctccgcctcctgggttcaagcgattctcaaactgcctcagcctcccaagtagctgggattacaggcatgtgccaccatgcccggctaattttttaaactatttatagtagaga

SEQ ID NO: 31834 - DNA, 120 bp, synthetic construct
  source 1..120: mol_type = other DNA
tttttttttttttttttaagagacaggggtctcactcttgcctaggctggagtgcagtggcgtgatcataggtcactgaagctttgaactcctaggctcaagtagctaggaatacaagtg

SEQ ID NO: 31835 - DNA, 120 bp, synthetic construct; identical to SEQ ID NO: 9405
  source 1..120: mol_type = other DNA

SEQ ID NO: 31836 - DNA, 120 bp, synthetic construct
  source 1..120: mol_type = other DNA
gagaataaagaaacttttacttcttgctgtgcaaactgaacaccttttctttctttctttctttttttaagacggagttttgctcttgtcacccaggctggagtgcagtggctggatctc

SEQ ID NO: 31837 - DNA, 120 bp, synthetic construct
  source 1..120: mol_type = other DNA
atggggtttcaccatgtggccgagctggtcttgaactcctgacctcaggtaatctgcttgtctcggcctcccaaagtgctgggattacaggcgtgaattactgcgcccggctgcctttta

SEQ ID NO: 31838 - DNA, 120 bp, synthetic construct
  source 1..120: mol_type = other DNA
gtgggcaggttacttgaggccaggagtttgagatcagcctggcgaacatggtgaaactctgtctctattaaaaatacaaaatatagttgggtgtggcagttcacgtctgtaatcccagct

SEQ ID NO: 31839 - DNA, 120 bp, synthetic construct; identical to SEQ ID NO: 9406
  source 1..120: mol_type = other DNA

SEQ ID NO: 31840 - DNA, 120 bp, synthetic construct
  source 1..120: mol_type = other DNA
tagtgaattacattgattttcttatgttaaaccaatctttgcattcctgggatgaactctgcttggttataatatataatcctttttatttattatgggatttgatttgctaaaattttt

SEQ ID NO: 31841 - DNA, 120 bp, synthetic construct
  source 1..120: mol_type = other DNA
ttccattttctgaaagagttttgtgtagaattgatgttaaaattattgcttaatgtttggcagaactcaacagtgaagccatctgggcttggagattttcttcatgggaaggtttttaac

SEQ ID NO: 31842 - DNA, 120 bp, synthetic construct
  source 1..120: mol_type = other DNA
actgacataaagttatttataatatttcttattcttttattatctatggatctcttggtgacataacctctctcattcctaatattggtaatttcaggcttttctttttaacttggtcag

SEQ ID NO: 31843 - DNA, 120 bp, synthetic construct; identical to SEQ ID NO: 9407
  source 1..120: mol_type = other DNA

SEQ ID NO: 31844 - DNA, 120 bp, synthetic construct
  source 1..120: mol_type = other DNA
tgttggccaggctggtctcaaactcctgacctcaggtgatccacctgccttggcctcccagagtgctgggattacaggtgtgagccactgtggctggcctgtttcacatttcttaaggta

SEQ ID NO: 31845 - DNA, 120 bp, synthetic construct
  source 1..120: mol_type = other DNA
ttcattcagttcaaaataccttctaatttcccttttgatttcgtctttgacctacaggttttttagaactgtgttatttagtttccaatctcttgaggatttttaaaacaatatgttatt

SEQ ID NO: 31846 - DNA, 120 bp, synthetic construct
  source 1..120: mol_type = other DNA
aaaataatttgtattctgatctcattgagttgaatgttctaggtatatcaagttgatagtgatgcccaagtctcctgtatctttactgattttctgcctgttctgttattgagaaagggg

SEQ ID NO: 31847 - DNA, 120 bp, synthetic construct
  source 1..120: mol_type = other DNA
ggagtcttgctctgttgcccaggctggagtgcagtggtgtgatcttggctcactgcaagctccgcctcccaggttcacgccattctcctgcctcagcctcccgaatagctgggactacag

SEQ ID NO: 31848 - DNA, 120 bp, synthetic construct; identical to SEQ ID NO: 9408
  source 1..120: mol_type = other DNA

SEQ ID NO: 31849 - DNA, 120 bp, synthetic construct
  source 1..120: mol_type = other DNA
tagatgatttacctgaaatgtcattcaatttaacttactctccatcctcacccgcccagctttggttatgaggcagtagaaagaaatgatctgcctgtggttttctagaaatacgaaagt

SEQ ID NO: 31850 - DNA, 120 bp, synthetic construct
  source 1..120: mol_type = other DNA
aaaggggttttgttgtggattgttcaggcacttcctttggggtatatgggggatgagtgttacatttatggtttctcacctgccattctgatagtggattcttgggaattcaggcttcat

SEQ ID NO: 31851 - DNA, 120 bp, synthetic construct; identical to SEQ ID NO: 9409
  source 1..120: mol_type = other DNA

SEQ ID NO: 31852 - DNA, 120 bp, synthetic construct
  source 1..120: mol_type = other DNA
catgatgaaaccccgtctctactaaaaaaatagaaaaattagccaggcgtggtggcgggtacctgtaatccaagctgctcaggaggctgaggcagaagaatcacttaaacccaagaggta

SEQ ID NO: 31853 - DNA, 120 bp, synthetic construct
  source 1..120: mol_type = other DNA
gcaagtgacatatgtgacatcctctccactccctatttgcatttctaggttatataactgtactactatccatgcatgcctactcttgttcccagggtgaaggacccagacatggagagc

SEQ ID NO: 31854 - DNA, 120 bp, synthetic construct
  source 1..120: mol_type = other DNA
cgaatccctgcaggccattataaatgagattatgccatttgctcccatttcttcttattctttcatttttggggctctccatcttgatgtgttctttggatcgtgaacagatccaaagaa

SEQ ID NO: 31855 - DNA, 120 bp, synthetic construct
  source 1..120: mol_type = other DNA
aggcctgggaaagcactggagaaatgggatttgtttaaactatgacagcattatttcttgttcccttgtcctttttcctgcaagcaggaagggaacctgattggattaccccttctgatt

SEQ ID NO: 31856 - DNA, 120 bp, synthetic construct; identical to SEQ ID NO: 9410
  source 1..120: mol_type = other DNA

SEQ ID NO: 31857 - DNA, 120 bp, synthetic construct
  source 1..120: mol_type = other DNA
acctattttgaggtattgaatttctttggaccaggtgaattgggacgaagaaaaggaatgttttgaaagcctcagtaaagaatgcgctatgttctattccatccggaagcagtacatatc

SEQ ID NO: 31858 - DNA, 120 bp, synthetic construct
  source 1..120: mol_type = other DNA
atctttaggagatgaaacttgcccatctctaaaatttcgggatttctttgtacccaacaaggttcaaacacaacagtcagcttttattcatgatttttacttccatctgctgatgtagaa

SEQ ID NO: 31859 - DNA, 120 bp, synthetic construct
  source 1..120: mol_type = other DNA
ttgtctaaggctggagagtccatatactcccactgttagctctgaagtgtgtagccagtcttcagattctgggtcagttgcctcagtctctcttagcttttgccttactctttatccgac

SEQ ID NO: 31860 - DNA, 120 bp, synthetic construct; identical to SEQ ID NO: 9411
  source 1..120: mol_type = other DNA

SEQ ID NO: 31861 - DNA, 120 bp, synthetic construct
  source 1..120: mol_type = other DNA
agatttagtcctgttggccaaagcctctagggaatttctcactccagtggagaaggcaacacacttaccaaactgtgtggaaactatctcatttgattagaaattttacctcaagaagag

SEQ ID NO: 31862 - DNA, 120 bp, synthetic construct
  source 1..120: mol_type = other DNA
aactactttcagacccgattttaatggtaagttaggtacttcctacagttgccatccaaatatcagtcaggatcagacatgatgttagctcctgctacaataaaaccattttctccctga

SEQ ID NO: 31863 - DNA, 120 bp, synthetic construct
  source 1..120: mol_type = other DNA
ctgaggtgggaagatggcttaagcccaggagtttgaggctgtagagctatgatcacaccactgcccttcagcctgggtgacagagcaagaccttgtctctaaataaacaaacaaacaaaa

SEQ ID NO: 31864 - DNA, 120 bp, synthetic construct; identical to SEQ ID NO: 9412
  source 1..120: mol_type = other DNA

SEQ ID NO: 31865 - DNA, 120 bp, synthetic construct
  source 1..120: mol_type = other DNA
actgtgggatgtgttcttctttctctgtattccgatacaaagtgttgtatcaaagtgtgatatacaaagtgtaccaacataagtgttggtagcacttaagacttatacttgccttctgat

SEQ ID NO: 31866 - DNA, 120 bp, synthetic construct
  source 1..120: mol_type = other DNA
tggggtcgcgcattttcttcaaccaggaggtgaggaggtttcgacatggcggtgcagccgaaggagacgctgcagttggagagcgcggccgaggtcggcttcgtgcgcttctttcagggc

SEQ ID NO: 31867 - DNA, 120 bp, synthetic construct
  source 1..120: mol_type = other DNA
tacatggggccggcaggtgagggccgggacggcgcgtgctggggagggacccggggccttgtggcgcggctcctttcccgcctcagagagtgggcggtgagcagcctctccagtgcggag

SEQ ID NO: 31868 - DNA, 120 bp, synthetic construct; identical to SEQ ID NO: 9413
  source 1..120: mol_type = other DNA

SEQ ID NO: 31869 - DNA, 120 bp, synthetic construct
  source 1..120: mol_type = other DNA
gctaagggtctggtaatggagcgccgttgaagagcagtatgatgaagtggtcaggaccaacggactctggagctgggctgcttgggatcaagtcgctgcccctctgcttattaacgtgtg

SEQ ID NO: 31870 - DNA, 120 bp, synthetic construct
  source 1..120: mol_type = other DNA
ggccaaatgttctggataggcctagttaacctcttctctccctgttttctttgcgctttcttgcagctatgtagttatgctaatgaaaagagcatcctagggggagcagagttgtggatt

SEQ ID NO: 31871 - DNA, 120 bp, synthetic construct
  source 1..120: mol_type = other DNA
tttcatagagatcactattggacagcaaggcagaaataattacaattcaagttggaggcttatggaggtgagcttgtaagaggttacaagaggcgccaaggcaggatcgccaaagacgga

SEQ ID NO: 31872 - DNA, 120 bp, synthetic construct; identical to SEQ ID NO: 9414
  source 1..120: mol_type = other DNA

SEQ ID NO: 31873 - DNA, 120 bp, synthetic construct
  source 1..120: mol_type = other DNA
ccaccggagtagctgggattacaggcacgtgccaccacgcctagctaatttttgtatttttagtagagatggggtttcaccatgttggccaggctggtctcaaactcctgacctcaagtg

SEQ ID NO: 31874 - DNA, 120 bp, synthetic construct
  source 1..120: mol_type = other DNA
cccagcactttgggaggctgaggtgggcggatcacaaggtcaggagatcaagaccatcctggctaacatggtgaaaccctgtctacactaaaaatacaaaaatcccagcactttgggagg

SEQ ID NO: 31875 - DNA, 120 bp, synthetic construct
  source 1..120: mol_type = other DNA
agctacttgggaggctgaggcaggagaatggtgtgaacccggaaggcagagcttgcagtgagccgagattgtgccactgcactccagcctgggcaacagagcgagactccatctcaaaaa

SEQ ID NO: 31876 - DNA, 120 bp, synthetic construct
  source 1..120: mol_type = other DNA
agactagcctgtgtaacatagcgagacccatctctacaaaaaaattaaaaagttacctttagaacttacgatttttatgtgtagactccatataagcagagggtctatgcttattcacta

SEQ ID NO: 31877 - DNA, 120 bp, synthetic construct; identical to SEQ ID NO: 9415
  source 1..120: mol_type = other DNA

SEQ ID NO: 31878 - DNA, 120 bp, synthetic construct
  source 1..120: mol_type = other DNA
ttgtgaggcctcctcagccatgtggaactggctgcagagtcattaaacttcgttcttttgtaaattgcccagtctcaggtatgtctttttttatttttttttgagacagagtctggctct

SEQ ID NO: 31879 - DNA, 120 bp, synthetic construct; identical to SEQ ID NO: 9416
  source 1..120: mol_type = other DNA

SEQ ID NO: 31880 - DNA, 120 bp, synthetic construct
  source 1..120: mol_type = other DNA
taacaggcagaggtcagagcagtttagagggctcagaagaagaccagaaaatgtgggaaagtttggaacttcctagagacttgttcaatggctttgaccaaaatcctgataatgatatgg

SEQ ID NO: 31881 - DNA, 120 bp, synthetic construct
  source 1..120: mol_type = other DNA
agatttgtggagctttgaacttgagagaaatgattttgggtatctggtgggagaaatttctaagcagcaaagcattcaagaggtgacttgggtgctgttaaaggcattcagttttaaaag

SEQ ID NO: 31882 - DNA, 120 bp, synthetic construct; identical to SEQ ID NO: 9417
  source 1..120: mol_type = other DNA

SEQ ID NO: 31883 - DNA, 120 bp, synthetic construct
  source 1..120: mol_type = other DNA
accttgacagcttccaggtggtgttgagcctgcaggtgcacagaaatcaataattgaggtttgagaatctctgcctaggtttcaaagatgtatggaaacgcctgcatgtccaggcagaag

SEQ ID NO: 31884 - DNA, 120 bp, synthetic construct; identical to SEQ ID NO: 9418
  source 1..120: mol_type = other DNA

SEQ ID NO: 31885 - DNA, 120 bp, synthetic construct
  source 1..120: mol_type = other DNA
tgccatgctggattttggacttgcatggggcctgtagcccctttgttttggccaatttctcccatttggaatggctgtatttacccaattcctataccccattgtatctgggaagtaact

SEQ ID NO: 31886 - DNA, 120 bp, synthetic construct
  source 1..120: mol_type = other DNA
aatgcatgattggttttgaaatgtgaggacatgagatttgggaggggtcatggcagaatgatatggtttggctatgtccccacctaaatcccatcttgaattcccatgtattgtgggagg

SEQ ID NO: 31887 - DNA, 120 bp, synthetic construct
  source 1..120: mol_type = other DNA
tttgcctgctgccatccatgtaagacatgacttgttcctccttgccttctgccatgattgtgagacctccccagccatgtggaactataagtccagtaagcctctttttcttcccagtct

SEQ ID NO: 31888 - DNA, 120 bp, synthetic construct
  source 1..120: mol_type = other DNA
cttagtaaaatgaattttgaatcttttgtaaaagatcttcttctggttcgtcagtatagagttgaagtttataagaatagagctggaaataaggcatccaaggagaatgattggtatttg

SEQ ID NO: 31889 - DNA, 120 bp, synthetic construct; identical to SEQ ID NO: 9419
  source 1..120: mol_type = other DNA

SEQ ID NO: 31890 - DNA, 120 bp, synthetic construct
  source 1..120: mol_type = other DNA
gggctattggcacacacctgtggtcccagctaatcaagaggatgaggttagaggatcacttgagcccaggaggttgaggttacagtttaactttcagaggccaaggcaggaggattgctt

SEQ ID NO: 31891 - DNA, 120 bp, synthetic construct
  source 1..120: mol_type = other DNA
aggggaggggagggcagggccagcagtaaggtcataatagagacatgtatctgtaagatccttataataggtgaggatggccacaaattagcgccacagatttgtatttttagtagagac

SEQ ID NO: 31892 - DNA, 120 bp, synthetic construct; identical to SEQ ID NO: 9420
  source 1..120: mol_type = other DNA

SEQ ID NO: 31893 - DNA, 120 bp, synthetic construct
  source 1..120: mol_type = other DNA
ctcctgacctcgtgatccgcctgccttggcctcccaaagtgttgggattacaggcgtgagccacagcactcagccagttatttttttataagaaaacattttactggccaggcctggtgg

SEQ ID NO: 31894 - DNA, 120 bp, synthetic construct
  source 1..120: mol_type = other DNA
ccaggcgtggtggtgtgcgcctgtattcccagctactggggaggctgaagcaggagaatcgattgaacccttgaggcagaggttgcagtgagttgagatcgcaccattgcactctagcct

SEQ ID NO: 31895 - DNA, 120 bp, synthetic construct
  source 1..120: mol_type = other DNA
aatttttaaaattttatttttacttaggcttctcctggcaatctctctcagtttgaagacattctctttggtaacaatgatatgtcagcttccattggtgttgtgggtgttaaaatgtcc

SEQ ID NO: 31896 - DNA, 120 bp, synthetic construct; identical to SEQ ID NO: 9421
  source 1..120: mol_type = other DNA

SEQ ID NO: 31897 - DNA, 120 bp, synthetic construct
  source 1..120: mol_type = other DNA
atgtttacagaaactttgtatatttaattggacattagaacaagctgtttgttgtgtaagatttattttacctcagatcttttctcccccctttcctttctgtcttgtgttccaaaagag

SEQ ID NO: 31898 - DNA, 120 bp, synthetic construct
  source 1..120: mol_type = other DNA
actaaattctgattgtgtcattttttttttttttttttgggaccgagtctcgctctgtcgcccaggctggagtgcagtggtgcgatctcggctcactgcaacctctgcctcccaggttca

SEQ ID NO: 31899 - DNA, 120 bp, synthetic construct
  source 1..120: mol_type = other DNA
gaactcctcacctcgtgatccacccacctgggcctcccaaagtgctgggattacagccatgagccaccatgctcggctttgattgtgtcatttgtataggcatgtggtttattatttagt

SEQ ID NO: 31900 - DNA, 120 bp, synthetic construct
  source 1..120: mol_type = other DNA
gcaggagtagcttgggattacaggcatgccccaccacacctggccaattttgtgtttttagtagagacagggttccaccatgttggtcaggctggtcttgaactcctgacctcaggtgat

SEQ ID NO: 31901 - DNA, 120 bp, synthetic construct; identical to SEQ ID NO: 9422
  source 1..120: mol_type = other DNA

SEQ ID NO: 31902 - DNA, 120 bp, synthetic construct
  source 1..120: mol_type = other DNA
caggcctagatgtttcttaaggtatgtatctcccaaagattctttttgtggtcctcaagtaccataagcaccgctggagataacacatgtgatgggcatttttagcatagattgtatcta

SEQ ID NO: 31903 - DNA, 120 bp, synthetic construct
  source 1..120: mol_type = other DNA
attcgagaccagcctgtccaatgtgctgaaaccctgtctctactaaaaatgcaaagaaaaaaaaaatctagccaagcatggtggcttgctcctgtaatcctagctacttgggaggctgag

SEQ ID NO: 31904 - DNA, 120 bp, synthetic construct
  source 1..120: mol_type = other DNA
gggactattttttgaaagctttatgtgaacgtaattttatattttgatgaaaatttagtttattgatgtaaaaagtgtatcagtacatcatatcagtgtcttgcacattgtataaacatt

SEQ ID NO: 31905 - DNA, 120 bp, synthetic construct; identical to SEQ ID NO: 9423
  source 1..120: mol_type = other DNA

SEQ ID NO: 31906 - DNA, 120 bp, synthetic construct
  source 1..120: mol_type = other DNA
atttatctcaaaacctaaactgtgtatcaatgatattaagcttttttttttttttgagacagagtttcacttttgttgcccaggctggagtacaatggcgcgatcttggctcaccacatc

SEQ ID NO: 31907 - DNA, 120 bp, synthetic construct
  source 1..120: mol_type = other DNA
gctcatcttttttgtatttttagtagagatggggtttctctatgttggtcaggctggtctcaaactcctgaacctcaggtgatccgcccgcctcgggcttccaaagcgctgagattgcag

SEQ ID NO: 31908 - DNA, 120 bp, synthetic construct; identical to SEQ ID NO: 9424
  source 1..120: mol_type = other DNA

SEQ ID NO: 31909 - DNA, 120 bp, synthetic construct
  source 1..120: mol_type = other DNA
cagctgcacgccaccatgcctggctaatttttgtattttcagtagaggggattttgctatgttggccaggctggtcttgaactcctgacctcaggtgatccacccaccttggcctgccag

SEQ ID NO: 31910 - DNA, 120 bp, synthetic construct
  source 1..120: mol_type = other DNA
agtttttttttttttttttttttttttttttttttgaggtgagtttcgctcttgttgctcaggctggagtgcagtggtgcgatctcagcccactgcaaccttcaccttctggattcaagc

SEQ ID NO: 31911 - DNA, 120 bp, synthetic construct
  source 1..120: mol_type = other DNA
ggctgatctgttgtctggtgagggcccacttgttcatagataaccattttctcactctaacctcacaaggttgaaagggcctaatttttgtgtttttagtagagacggggtttcactatg

SEQ ID NO: 31912 - DNA, 120 bp, synthetic construct
  source 1..120: mol_type = other DNA
tgggtaattttcttttttggctattctaaataatgctgcaattactgttaattttcaccttgtaaaaaccattttcaaatctcaagagattaacctttagttttcttggtttggattggg

SEQ ID NO: 31913 - DNA, 120 bp, synthetic construct; identical to SEQ ID NO: 9425
  source 1..120: mol_type = other DNA

SEQ ID NO: 31914 - DNA, 120 bp, synthetic construct
  source 1..120: mol_type = other DNA
taaaggagctaaaatattttgaaatattattatacttggattagataactagctttaaatggctgtatttttctctcccctcctccactccactttttaacttttttttttttaagtcag

SEQ ID NO: 31915 - DNA, 120 bp, synthetic construct
  source 1..120: mol_type = other DNA
tacagttgcctgccaccatgcctggttaatttttatatttttagtagggttgcggggacagggtttcaccatgttggccaggttggtctcaaacttctgaccttaggtgatcctcccacc

SEQ ID NO: 31916 - DNA, 120 bp, synthetic construct
  source 1..120: mol_type = other DNA
aactcctgggctcaagcgatcttcctgcttcaacctcatgagtagctgggtctacaggcacaagccaccatgcttgcctaattttaaaatttttgcagagttggagtttcacagtgttgc

SEQ ID NO: 31917 - DNA, 120 bp, synthetic construct; identical to SEQ ID NO: 9426
  source 1..120: mol_type = other DNA

SEQ ID NO: 31918 - DNA, 120 bp, synthetic construct
  source 1..120: mol_type = other DNA
ctcattgtgccttgctctcgaattgctttttttttttttttctggtttcaagctatctatgtggtattagtcctcactttatgaataattttgtatactactaatagcaatttttttttt

SEQ ID NO: 31919 - DNA, 120 bp, synthetic construct
  source 1..120: mol_type = other DNA
ctgccaccatgcccagctaatttttgtatttttagtagacatggggtttcatcttgttggctaggctggactctaactccaggtgatctgcctgcctcggcctcccaaattgatgggatt

SEQ ID NO: 31920 - DNA, 120 bp, synthetic construct
  source 1..120: mol_type = other DNA
ggagtccagggtgggaggatgacttgaggccaggagttgagaccagcctgggcaacatagtgagactctgtctctacaaaagaaaaaattagcggggcttagtggcgtgcgcctgtagtc

SEQ ID NO: 31921 - DNA, 120 bp, synthetic construct; identical to SEQ ID NO: 9427
  source 1..120: mol_type = other DNA

SEQ ID NO: 31922 - DNA, 120 bp, synthetic construct
  source 1..120: mol_type = other DNA
ttctttctattttattttttgtttactagggttctgttgaagataccactggctctcagtctctggctgccttgctgaataagtgtaaaacccctcaaggacaaagacttgttaaccagt

SEQ ID NO: 31923 - DNA, 120 bp, synthetic construct
  source 1..120: mol_type = other DNA
tgcagttttggaagtatatgttaccatttaactgtacagagtacatagtaatagagtggtaattatttagattgattaaagaactcatttttttaaataagttttttttttttcactata

SEQ ID NO: 31924 - DNA, 120 bp, synthetic construct
  source 1..120: mol_type = other DNA
agctacttaataggattataagcatgagatgatttaatatacataaaatacttacagtctgatatataggaagcacttaactctttatcctagaaaagatttaaggtgaccttaacatat

SEQ ID NO: 31925 - DNA, 120 bp, synthetic construct; identical to SEQ ID NO: 9428
  source 1..120: mol_type = other DNA

SEQ ID NO: 31926 - DNA, 120 bp, synthetic construct
  source 1..120: mol_type = other DNA
aaaaaaaaaaattagctcagtgtggtgacatgtacctgtagcccgagctactcgggaggctgaggtgggaatatcaccctggcccagaagtttgaggctgcagtgggctatgattgtgcc

SEQ ID NO: 31927 - DNA, 120 bp, synthetic construct
  source 1..120: mol_type = other DNA
gataattgcttgagcccaggagtttgagaccagtctgggcaacaaaatgacaccccatttctaccaaaaaaaaaattgtttaaaattagctgggcatggtggcatgtgcctgtggtccca

SEQ ID NO: 31928 - DNA, 120 bp, synthetic construct
  source 1..120: mol_type = other DNA
aatcaacaggccagatgcagtggctcacccctgtaatcccaacactttgggaggccgaggtgggtggattacttgaggtcaagagttcgagaccagcccggccaacatggcgaaacccca

SEQ ID NO: 31929 - DNA, 120 bp, synthetic construct; identical to SEQ ID NO: 9429
  source 1..120: mol_type = other DNA

SEQ ID NO: 31930 - DNA, 120 bp, synthetic construct
  source 1..120: mol_type = other DNA
aagagattggaaggactgggtaatttgcaagtaattaaggcaatttacaatttttaatttttatttgtgaataagtagttatacgtgtcaaaattcaaaaaggacaggtggatatacagt

SEQ ID NO: 31931 - DNA, 120 bp, synthetic construct
  source 1..120: mol_type = other DNA
ttttgccaccacctgccctgggagcaacagtgttagtttcttgaacatccttccaagcagagtctgggcctacacaagcaaaacaagtatgtctattctctctcctctttaattttttta

SEQ ID NO: 31932 - DNA, 120 bp, synthetic construct
  source 1..120: mol_type = other DNA
agtgtcagtgatccccttctggtttaagaactggaggatgcatgtgtttagaccctttagaaacctgaaatgtcacctaatataattatcagagtaacactttttagtaagcaagctatc

SEQ ID NO: 31933 - DNA, 120 bp, synthetic construct; identical to SEQ ID NO: 9430
  source 1..120: mol_type = other DNA

SEQ ID NO: 31934 - DNA, 120 bp, synthetic construct
  source 1..120: mol_type = other DNA
ttttgtagagatgaggtctcactatgttgcccaggctggtctctcttttttttttgagcccgagtttcactcttgacgcccaggctggagtgcagtggtgtgattttggctcaccgcaac

SEQ ID NO: 31935 - DNA, 120 bp, synthetic construct
  source 1..120: mol_type = other DNA
ggctaattttgtatttttagtagagatgggtttctccatgtgggtcaggctgctctcgaactcccggcctcggatgatccacttgcctcggcctcccacagtgctgggattacaggcgtg

SEQ ID NO: 31936 - DNA, 120 bp, synthetic construct; identical to SEQ ID NO: 9431
  source 1..120: mol_type = other DNA

SEQ ID NO: 31937 - DNA, 120 bp, synthetic construct
  source 1..120: mol_type = other DNA
tactgttcctctttccattcactaaaacctacttgcaactatgagcatatgttattgccatctagaaatgagtttctagggacttgttcctttttgtactttatttaaacagtcgaatta

SEQ ID NO: 31938 - DNA, 120 bp, synthetic construct
  source 1..120: mol_type = other DNA
accaccacacctggctaatttttatattcttaatagaaacagggtttcactattttggccaggctggtctcgaactcctgacctcagatgatccactcaccttggcctcccaaagtactg

SEQ ID NO: 31939 - DNA, 120 bp, synthetic construct; identical to SEQ ID NO: 9432
  source 1..120: mol_type = other DNA

SEQ ID NO: 31940 - DNA, 120 bp, synthetic construct
  source 1..120: mol_type = other DNA
acacttaaaacctcaaaatttatctgtacttccactcttttactctctggctctttctcagaagaagaaataacacttttatttcttttcaaagccaacctttccatactttacttggag

SEQ ID NO: 31941 - DNA, 120 bp, synthetic construct
  source 1..120: mol_type = other DNA
tcctgcctcagcctgctgagtacctgggcttacaggttagcacaccacacccggccaagttttgggtttttagtagagacagggttttgccgtgttggccaggctggtctctaactcctg

SEQ ID NO: 31942 - DNA, 120 bp, synthetic construct
  source 1..120: mol_type = other DNA
ggaggccaaggcaggcagatcacctgaggtcaggagttcaagaccagcctgaccaacatggagaaaccctgtctctattaaaaatacaaaattagctgggtgtggtggcatatgcctgta

SEQ ID NO: 31943 - DNA, 120 bp, synthetic construct; identical to SEQ ID NO: 9433
  source 1..120: mol_type = other DNA

SEQ ID NO: 31944 - DNA, 120 bp, synthetic construct
  source 1..120: mol_type = other DNA
tcactacgttggccaggctggtcttgaactcctgaccttgtgatttgcccacctcagcctcccaaagtgctgggattacaggcgtgagccaccgtgcctggcttatgttaatcttatttt

SEQ ID NO: 31945 - DNA, 120 bp, synthetic construct
  source 1..120: mol_type = other DNA
tccttacagaattctgacattaaaaatgaaaaattaccaaagcttcagatgaatctataaatggacaaaagaaaaagcttaaaaggataaagagcaacactccaagtgcatgtataaaca

SEQ ID NO: 31946 - DNA, 120 bp, synthetic construct
  source 1..120: mol_type = other DNA
agaattatagacttgtaattacagttctttaggaaccatatttgctctcagccttttaaatacgctgtcaggcaattccagtcagcacttttgaaaaaaacctacctacctacctaccta

SEQ ID NO: 31947 - DNA, 120 bp, synthetic construct; identical to SEQ ID NO: 9434
  source 1..120: mol_type = other DNA

SEQ ID NO: 31948 - DNA, 120 bp, synthetic construct
  source 1..120: mol_type = other DNA
cggtgaaaccccttctctagtaaaatacaaaaaattagctgcatgtggcggcgtgcacctgtggtcccagttacttgggaggctgaggcaggagaattgcttgaacctgggaggcagagg

SEQ ID NO: 31949 - DNA, 120 bp, synthetic construct
  source 1..120: mol_type = other DNA
gatccccaaaatgactcagctgtatgcaatttaatgcaatattaattcgcatgttgactctcagaattgcatacagctgagtcattttattgagtaggattgataagtatactatgttat

SEQ ID NO: 31950 - DNA, 120 bp, synthetic construct
  source 1..120: mol_type = other DNA
taattattactgcaatcgtatgttgaatagacttgtgaaactagcaatttattaggcttttaatgatatctggaccaaaggctgagggagctgtgctgtgtgtatgttgctttgtgcttt

SEQ ID NO: 31951 - DNA, 120 bp, synthetic construct
  source 1..120: mol_type = other DNA
gcctcctgggttcactccattctcctgcttcagcctcccaagtagctgggactacaggcgcccaccaccacgcccggctaattttctgtattttttagtagagatggggtttcaccatgt

SEQ ID NO: 31952 - DNA, 120 bp, synthetic construct; identical to SEQ ID NO: 9435
  source 1..120: mol_type = other DNA

SEQ ID NO: 31953 - DNA, 120 bp, synthetic construct
  source 1..120: mol_type = other DNA
tgaactgctgacctcaggtgatctgtctgcctcagcctcccaaagtgctgggattacaggtgtgagccactgcacccagtccttaatgctactttataggtgaaaattgtgaaataactt

SEQ ID NO: 31954 - DNA, 120 bp, synthetic construct
  source 1..120: mol_type = other DNA
atttgggtttaaattggggggcttaggaaggaaagaagcctgatggttgtttctgaattttctgaaaattatgtttgatatgctgtatatgaaatccagcttggagagaatatgtccatt

SEQ ID NO: 31955 - DNA, 120 bp, synthetic construct; identical to SEQ ID NO: 9436
  source 1..120: mol_type = other DNA

SEQ ID NO: 31956 - DNA, 120 bp, synthetic construct
  source 1..120: mol_type = other DNA
agtagctgggattacaggcgtgtgccaccacgtcgccaccacgtctggctaatttttgtatttttagtagagacagggtttcgccatgttggccaggctggtcatgaactcctgacctca

SEQ ID NO: 31957 - DNA, 120 bp, synthetic construct
  source 1..120: mol_type = other DNA
aaactcctgaccatgcgatccgcctgcctcggcctcccaaagtgctgagattacaggcgagagccaccgtgcccggcctgtttgagtatcttttaaaaccagtaaggacaaactagaggt

SEQ ID NO: 31958 - DNA, 120 bp, synthetic construct
  source 1..120: mol_type = other DNA
gaggtcaggagtcaagaccagagccattgcactccagcctgggcaacaagagcacaactttatctcaaaaaaaaaaaaaccaaaaaagaaacaggaaagagatgttttgattttttaagt

SEQ ID NO: 31959 - DNA, 120 bp, synthetic construct
  source 1..120: mol_type = other DNA
tcctttgtaagatgtgaaagggatatgaagagcaaataggaagtgttactcttgctgcttgagagaaagctgttttacaatttgttggcaaacaatttgtaaaagtacaacaaaagtgtg

SEQ ID NO: 31960 - DNA, 120 bp, synthetic construct; identical to SEQ ID NO: 9437
  source 1..120: mol_type = other DNA

SEQ ID NO: 31961 - DNA, 120 bp, synthetic construct
  source 1..120: mol_type = other DNA
agacatcatatagtataaaattcagtagaaaatcagtttttcagaggtacaaaattggctgactttgcacagactcctttcatttcacaggtagggatgcacagccacctcttccaccga

SEQ ID NO: 31962 - DNA, 120 bp, synthetic construct; identical to SEQ ID NO: 9438
  source 1..120: mol_type = other DNA

SEQ ID NO: 31963 - DNA, 120 bp, synthetic construct
  source 1..120: mol_type = other DNA
ctgcctcagcctcccgagtagctgggactacaggcgcccgccaccacgccctgctaattttttttttgtatttttagtagagacagggtttcaccatgttagccaggatggtctcgattt

SEQ ID NO: 31964 - DNA, 120 bp, synthetic construct
  source 1..120: mol_type = other DNA
tttttttttttttttttttgagacagagtcttgctctgtcgcccaggctgaagtgcagtggcgcgatctcggcttgctgcaagctccgcctcccaggttcacgccattctcctgcctcag

SEQ ID NO: 31965 - DNA, 120 bp, synthetic construct
  source 1..120: mol_type = other DNA
attctcttgcctcagcctccagagtagctgggactacaggtgtgcgccgctacgcccagctaatttttgtatttttagtagagatagggtttcgccatgttggttggccaggatggtctc

SEQ ID NO: 31966 - DNA, 120 bp, synthetic construct; identical to SEQ ID NO: 9439
  source 1..120: mol_type = other DNA

SEQ ID NO: 31967 - DNA, 120 bp, synthetic construct
  source 1..120: mol_type = other DNA
tatatgccacaaaaatattttccgtagcagtaggcatcctaattaatctcgatgtttgtttatagccccattgatggggctataaacttggcagcaaattgttttcccactaatttggca

SEQ ID NO: 31968 - DNA, 120 bp, synthetic construct; identical to SEQ ID NO: 9440
  source 1..120: mol_type = other DNA

SEQ ID NO: 31969 - DNA, 120 bp, synthetic construct
  source 1..120: mol_type = other DNA
ccccttacaacaaaaaattatgtagcctaaaatggcagtgttgccaagattgagaaattatgctttaaatgtgtttttatatatggccattttgtgtttactctggagataacatgcttt

SEQ ID NO: 31970 - DNA, 120 bp, synthetic construct
  source 1..120: mol_type = other DNA
actttgggaggccgaggcgggtggatcccgaggtcaggagatcgagaccatcctggctaacatggtgaaaccccgtctctactaaaaatacaaaaaaatgagccgggtgtggtggcaggc

SEQ ID NO: 31971 - DNA, 120 bp, synthetic construct; identical to SEQ ID NO: 9441
  source 1..120: mol_type = other DNA

SEQ ID NO: 31972 - DNA, 120 bp, synthetic construct
  source 1..120: mol_type = other DNA
ttagtaacatcttcaacattgtttttcaaactgcaaggtgtgacccagtagtgggtcgttaaattagtaggtgacagagcatttttgaagaattaaatacaatagaacatagcagagtgg

SEQ ID NO: 31973 - DNA, 120 bp, synthetic construct
  source 1..120: mol_type = other DNA
taatagtacaaaaaattagcggggtgtggtggcatgcgtctctagtcccagctactcaggaggctgaggcacgagaatcacttgaatccgggagctggaggttgcagtgagccgagattg

SEQ ID NO: 31974 - DNA, 120 bp, synthetic construct
  source 1..120: mol_type = other DNA
tttgtgaaacctattttaatcatagatctatgtatgtatgtgctggattgtgatgtaaagacatttcttgctgtggttacactgaaaaaaatgaaaagtcactgatttccaataacttac

SEQ ID NO: 31975 - DNA, 120 bp, synthetic construct
  source 1..120: mol_type = other DNA
gaggtaattttagaaagcattctaaaaatgtaagtactggatttggcaacattcttgaactgtaattctgtttcgttaaacatcactatttacatgtgcaacagcgtgtctgtaacaatg

SEQ ID NO: 31976 - DNA, 120 bp, synthetic construct; identical to SEQ ID NO: 9442
  source 1..120: mol_type = other DNA

SEQ ID NO: 31977 - DNA, 120 bp, synthetic construct
  source 1..120: mol_type = other DNA
caattctcctgcctcagcctcccgagtagccggggttacaggcgtgcgccaccatgcccagctaatttttttgtatttttagtagagacagggtttcaccatgctgggtggccaggcggg

SEQ ID NO: 31978 - DNA, 120 bp, synthetic construct
  source 1..120: mol_type = other DNA
cagagtcttgctcttgttgcccaggctggagtgccatggcatgatctcagtgcaccacaatctctgcttcccaggtttaagcgattctcctgcctcagcctcccaagtagatgggatcac

SEQ ID NO: 31979 - DNA, 120 bp, synthetic construct
  source 1..120: mol_type = other DNA
agtgctgggattacaggtgtgagccactgcgcccagcagattcaagctttttaaatggaattttgagctgatttagttgagacttacgtgcttagttgataaattttaattttatactaa

SEQ ID NO: 31980 - DNA, 120 bp, synthetic construct; identical to SEQ ID NO: 9443
  source 1..120: mol_type = other DNA

SEQ ID NO: 31981 - DNA, 120 bp, synthetic construct
  source 1..120: mol_type = other DNA
tttttttgagaaggagtcttgctccgttgccaaggctagagtgcagtggcacaatctcagctcactgcaacctctgcctcctgggttcaagcgattctcctgcctcagcttcctgagtgg

SEQ ID NO: 31982 - DNA, 120 bp, synthetic construct
  source 1..120: mol_type = other DNA
gttcagacttctaataacaggtttgtattgactcttagcctcatggcagaagccaagagacatgagacagcttagaaatttttgctttttggaaatgaatgttagagttactggtttgtg

SEQ ID NO: 31983 - DNA, 120 bp, synthetic construct
  source 1..120: mol_type = other DNA
ggttatgcatctacagtttattacaggagaaggatacaatccagtagcaggattatggtaaggatatgcatcacagtcaaaggctgtcatagcaagtcatccagagagttcgggtgcaag

SEQ ID NO: 31984 - DNA, 120 bp, synthetic construct; identical to SEQ ID NO: 9444
  source 1..120: mol_type = other DNA

SEQ ID NO: 31985 - DNA, 120 bp, synthetic construct
  source 1..120: mol_type = other DNA
gctaataatagaattgttggaattaactcacacagcacacctatgagagagagttaagatagagggtcttggtggtctctaacagttgaattcaaagtgaagttaccagagtaaagtgag

SEQ ID NO: 31986 - DNA, 120 bp, synthetic construct
  source 1..120: mol_type = other DNA
acataaagcattttttacttttttaaaaaatttttaggcaatgtggggtccaaagtaattaaaaaaaaatttttttaacataaagcatcttaaaattttacttaatcatgatcacttaga

SEQ ID NO: 31987 - DNA, 120 bp, synthetic construct; identical to SEQ ID NO: 9445
  source 1..120: mol_type = other DNA

SEQ ID NO: 31988 - DNA, 120 bp, synthetic construct
  source 1..120: mol_type = other DNA
cattctggctaacatggtgaaaccctgtctctaccaaaaatacaaaaaattagctgacatggtggtgcgcacctgtagtcccagcttctcaggtggctgaggcaggagaatcgcttgaac

SEQ ID NO: 31989 - DNA, 120 bp, synthetic construct
  source 1..120: mol_type = other DNA
acacctgtaatcccagcactttgggagaccgagacgggcagatcacctgaggtcgggcattcgagaccagcctgaccaatatggagaaaccccatttgtactaaaaatacaaaattagcg

SEQ ID NO: 31990 - DNA, 120 bp, synthetic construct
  source 1..120: mol_type = other DNA
gagtctatactttgctgttttcatactctcttagtgtggtgtaggcagccatgtatcccccttgtgcctctatttctccattctgtgaatgagtgtcttccactgctgtgcttttctgat

SEQ ID NO: 31991 - DNA, 120 bp, synthetic construct; identical to SEQ ID NO: 9446
  source 1..120: mol_type = other DNA

SEQ ID NO: 31992 - DNA, 120 bp, synthetic construct
  source 1..120: mol_type = other DNA
acaggatcccaaggcagaataatttttcgtagtacagaacaaaatgaaaagtctcccacgtctacctctttctacacagacacggcaaccatccgatttctcaatcttttccccaccttt

SEQ ID NO: 31993 - DNA, 120 bp, synthetic construct
  source 1..120: mol_type = other DNA
gcggccgggcagaggcgcccctcacctcccggacggggcggctggccgggcggggggctgaccccccccccccgcctccctcccggacggggcggctggccaggcggggggctgacctcc

SEQ ID NO: 31994 - DNA, 120 bp, synthetic construct
  source 1..120: mol_type = other DNA
cagaggcgcccctcacctcccggatggggcggctggccgggcggggggctgacccccccacctgcctccaggacggggcggctggccgggcagagcggctcctcacttcccagtaggggc

SEQ ID NO: 31995 - DNA, 120 bp, synthetic construct
  source 1..120: mol_type = other DNA
gccgggcggggggctgacccccccacatccttcccggacggggcggctggccgggcagagggtctcctcacttcccagtaggggcggccgggcagaggcgcccctcacctcccggacggg

SEQ ID NO: 31996 - DNA, 120 bp, synthetic construct; identical to SEQ ID NO: 9447
  source 1..120: mol_type = other DNA

SEQ ID NO: 31997 - DNA, 120 bp, synthetic construct
  source 1..120: mol_type = other DNA
ctccccacatctcagacgatgggcggcctggtagagacgctcctcacttcctagatgggatggcggccgggcagagacgctcctcactttccagactgggcagccaggcagagaggctcc

SEQ ID NO: 31998 - DNA, 120 bp, synthetic construct
  source 1..120: mol_type = other DNA
ctcggcactttgcggggccaaggcaggcagctgggaggtggaggttgtagcgaactgagatcacgccactgcaccccagcctgggcaccattgagcactgagtgaacgcgactccgtctg

SEQ ID NO: 31999 - DNA, 120 bp, synthetic construct
  source 1..120: mol_type = other DNA
aaccccgtctccaccaaaaaaataccaaaaccagtcaggcgtggcggcgcgcacctgcaatcgcaggcactcggcaggctgaggcaggagaatcaggcagggaggttgtagtgagccgag

SEQ ID NO: 32000 - DNA, 120 bp, synthetic construct; identical to SEQ ID NO: 9448
  source 1..120: mol_type = other DNA

SEQ ID NO: 32001 - DNA, 120 bp, synthetic construct
  source 1..120: mol_type = other DNA
taggaactctcttaatttttttcccccatcatcccacccgcacttcttactccttacttcctacttgcttttattctttactggctctttaccactgcgtatttttaggtgcatacatct

SEQ ID NO: 32002 - DNA, 120 bp, synthetic construct
  source 1..120: mol_type = other DNA
cattcatctggtttccagccctgaccacagtactgaaatggcatttgctaggtgacctttatttttttttaaatccagtgaatgcggtatagtccccccgcttttttctttctttttttt

SEQ ID NO: 32003 - DNA, 120 bp, synthetic construct
  source 1..120: mol_type = other DNA
cctgcttcagcctcccaagtagctggattacaggcacctgccaccacagctggctaattttgtatttttagtagagatgggttttctcgatgttggtcaggctggtttcgaactcccgac

SEQ ID NO: 32004 - DNA, 120 bp, synthetic construct
  source 1..120: mol_type = other DNA
aactcttttttttttttttttttttttttttgagatggagtcttgctctgtcacccaggctggagtgcagtggcacaatctcagctcactgcaacctccacctcccaggttcaagcgatt

SEQ ID NO: 32005 - DNA, 120 bp, synthetic construct; identical to SEQ ID NO: 9449
  source 1..120: mol_type = other DNA

SEQ ID NO: 32006 - DNA, 120 bp, synthetic construct
  source 1..120: mol_type = other DNA
tgcccaggctggagtgcagtggtgcgatctcagctcactccaacctccgccttctgggttcaagcgattcttgtgcctcagcctcctgtgtagctgggattgcaggcatgtgccaccacg

SEQ ID NO: 32007 - DNA, 120 bp, synthetic construct; identical to SEQ ID NO: 9450
  source 1..120: mol_type = other DNA

SEQ ID NO: 32008 - DNA, 120 bp, synthetic construct
  source 1..120: mol_type = other DNA
aattacaggcatgtgctaccacacctggctaattttgtatttttagtagagacagggtttcattatgttggccaggctgggaatttgtaactttcatcagatatcccaagggatatatgt

SEQ ID NO: 32009 - DNA, 120 bp, synthetic construct
  source 1..120: mol_type = other DNA
aaggaagttagggattggggttgagggtaacttggcatccttccccaacctccctgtataggcacagtctaatatacttgatgacagtttgcaacaagtcaacaatttcctacttttctg

SEQ ID NO: 32010 - DNA, 120 bp, synthetic construct
  source 1..120: mol_type = other DNA
aatgttacaggggaaaatctgctttccatgtgttatgctcagagctgtgttcttttcttttacacaatatgtttgacatttgttgaattttaggtgtaccctggtcattaggaactccct

SEQ ID NO: 32011 - DNA, 120 bp, synthetic construct
  source 1..120: mol_type = other DNA
ttttgcaattagtctcccaagtttctttacaagaaaatagaccaaaggtactatgtttaaaagcaaaatcatggcttaaaagtttttctttttcttaatatattaatatattgctataaa

SEQ ID NO: 32012 - DNA, 120 bp, synthetic construct; identical to SEQ ID NO: 9451
  source 1..120: mol_type = other DNA

SEQ ID NO: 32013 - DNA, 120 bp, synthetic construct
  source 1..120: mol_type = other DNA
actgcttaaaacaatttaccgaggtatctttatttttttttgagacagggtttcactctgtcacccaggctggagtgctggagccttgacctcctgggctcagctcaagtgttcctctca

SEQ ID NO: 32014 - DNA, 120 bp, synthetic construct
  source 1..120: mol_type = other DNA
ctcaagcaatctgcccacctcgtcctcccgaagtacagggttataggcatgagccaccactcccagcctcagatttttttattgatgaattttattataacagctacaatactgagatgc

SEQ ID NO: 32015 - DNA, 120 bp, synthetic construct
  source 1..120: mol_type = other DNA
gtagtagtctttgttagctcatctggtcatgtcatcaattcagagcacattacctctttagttcagaacacattaattgcttcccataatcttcaggacacggccccatttcttcacgtg

SEQ ID NO: 32016 - DNA, 120 bp, synthetic construct; identical to SEQ ID NO: 9452
  source 1..120: mol_type = other DNA

SEQ ID NO: 32017 - DNA, 120 bp, synthetic construct
  source 1..120: mol_type = other DNA
tggagaataagaatataaaagtgatttatttggcatttctgcaaagggagatgataaaaagaatctgcgttacttagcctttttaaaaaacccttagcctatgaaggctactatttaagg

SEQ ID NO: 32018 - DNA, 120 bp, synthetic construct
  source 1..120: mol_type = other DNA
ttgatataggttgtttcagtctttaaaccaaattatacactgttccgctgtaactcttgttttgaaaacagatttgttccaatgtgggtggtatattagggaacaatttgagcataatgt

SEQ ID NO: 32019 - DNA, 120 bp, synthetic construct
  source 1..120: mol_type = other DNA
aatacctaccttattttcctgtatgtgttatgaaccatacccattcacatctggtattacaactttgccacccatttcagacagtattcctttgaccattctgcagtaactcagaagctg

SEQ ID NO: 32020 - DNA, 120 bp, synthetic construct
  source 1..120: mol_type = other DNA
ggtcaggagatcaagaccatcctggctaacacggtgaaaccccgtctctactaaaaaaaaatagaaaaacctagccgggcgtggtggtgggcatttgtggtcccagctactcgggaggcc

SEQ ID NO: 32021 - DNA, 120 bp, synthetic construct; identical to SEQ ID NO: 9453
  source 1..120: mol_type = other DNA

SEQ ID NO: 32022 - DNA, 120 bp, synthetic construct
  source 1..120: mol_type = other DNA
cccaggctggagtgcagtggtgtggtctcggctttctgcagccttggcctcccagcttaagctatcctcccacctcaagctatcctcccacctcagcctcccaaatagctgggactgcag

SEQ ID NO: 32023 - DNA, 120 bp, synthetic construct
  source 1..120: mol_type = other DNA
ggattacaggtgtgtcctaccacacccagacggctctggtatttactgcatagtgttctgatttttaggaatacatacgttgcattatatagcagaactggctgtattcaaaagtctaat

SEQ ID NO: 32024 - DNA, 120 bp, synthetic construct; identical to SEQ ID NO: 9454
  source 1..120: mol_type = other DNA

SEQ ID NO: 32025 - DNA, 120 bp, synthetic construct
  source 1..120: mol_type = other DNA
ctgatttttgtatttttaatagagatggggtttcaccatgttggtcaggctggtcttgaactcctgacctcgtgatcctcctgtgtcagcctcccaaagtgctgtgggtacaggcgtgag

SEQ ID NO: 32026 - DNA, 120 bp, synthetic construct
  source 1..120: mol_type = other DNA
aggtctgtgtacttctctggtgttttgattttttttttttctttttctgtgagtaattttctaaaactggtttctaggccaggctatttatgtcttgctttttattttttttggcgatgg

SEQ ID NO: 32027 - DNA, 120 bp, synthetic construct
  source 1..120: mol_type = other DNA
acatgccaccacgcctggctagttttttgtatttttagtagaggtggagtttcaccgtgttgcccaggctggtctggaacttctgagctcaggcagtctgcctgccttggcctcccaaag

SEQ ID NO: 32028 - DNA, 120 bp, synthetic construct; identical to SEQ ID NO: 9455
  source 1..120: mol_type = other DNA

SEQ ID NO: 32029 - DNA, 120 bp, synthetic construct
  source 1..120: mol_type = other DNA
tgggttcagatgattctcgtgccttagcctcccgagtagctggaattacaggtccgtgccacgatgcccggctaatttttgtattttcagtagaggtggagtttcgccatgttggccagg

SEQ ID NO: 32030 - DNA, 120 bp, synthetic construct
  source 1..120: mol_type = other DNA
tgtaaaaagaagtcaactcccagtttaactctagcagagtaaccagtgttaatttttttttttttttttttgagacggagtcttgctctatttcccaggctggagtgcagtgatgccatc

SEQ ID NO: 32031 - DNA, 120 bp, synthetic construct; identical to SEQ ID NO: 9456
  source 1..120: mol_type = other DNA

SEQ ID NO: 32032 - DNA, 120 bp, synthetic construct
  source 1..120: mol_type = other DNA
atatgtggtatgtatatatatgtggtatatatatgtggtatgtgtatatatatatgtggtatgtgtatatatatatgtatatatgtgtgtatatatgtggtatgtatatatatatgtata

SEQ ID NO: 32033 - DNA, 120 bp, synthetic construct; identical to SEQ ID NO: 9457
  source 1..120: mol_type = other DNA

SEQ ID NO: 32034 - DNA, 120 bp, synthetic construct
  source 1..120: mol_type = other DNA
acttttaaggaatctccacactgttttccttagtggttatactggtttacattcccaccagaagtgtagaagtgttccctgttcactgcatccacaccaacatctatttttgattttttg

SEQ ID NO: 32035 - DNA, 120 bp, synthetic construct
  source 1..120: mol_type = other DNA
agaattgtctattcatgtccttagcccattttttgataggattgtttgttttttttcttgctagtttgtttgagcttgttgtagattctggttattagtcctttgtcagatttatagatt

SEQ ID NO: 32036 - DNA, 120 bp, synthetic construct
  source 1..120: mol_type = other DNA
gctggtaacaaagacacaggtactggtaataactgccatggcttattgcctacattaatgatgaaagcaaatgctaaatttcagctagaggctagagaaaataagcctggaattttcttt

SEQ ID NO: 32037 - DNA, 120 bp, synthetic construct; identical to SEQ ID NO: 9458
  source 1..120: mol_type = other DNA

SEQ ID NO: 32038 - DNA, 120 bp, synthetic construct
  source 1..120: mol_type = other DNA
gacataggttctgaagttcgtacagatacttatgcagtatggattcttggaaaaccttctttagtcatgtgatagaaaaataacagcttatggaaaaaacagggttgaggcagacctgaa

SEQ ID NO: 32039 - DNA, 120 bp, synthetic construct
  source 1..120: mol_type = other DNA
cccaaacaacagcattagccaactctttgaagccttagatctgtggctcttgttttctcctttgaggtgtaggtccttgagggcatttgcttctaatagaggctagtttcatcagaatta

SEQ ID NO: 32040 - DNA, 120 bp, synthetic construct
  source 1..120: mol_type = other DNA
tttcttttttgaaaacactggcaaatgttttgtatccttgagctttcccacatatcttaacatagtgagtggaaagtacagtggctgttaagccaactactctgaggtcttcactgctaa

SEQ ID NO: 32041 - DNA, 120 bp, synthetic construct; identical to SEQ ID NO: 9459
  source 1..120: mol_type = other DNA

SEQ ID NO: 32042 - DNA, 120 bp, synthetic construct
  source 1..120: mol_type = other DNA
tttcaccgttttttcagtagctgctaaaatttctggagaagtttgggaactattgttttggagtgaaatgcagtgtgttagatatcacttgcagaattcttctaagggtatttattggcg

SEQ ID NO: 32043 - DNA, 120 bp, synthetic construct
  source 1..120: mol_type = other DNA
agctattgttattattacttcgtacaaaaagggaaaaggaggctcaaagtatcatgctccagataacagagccagtaggtagcagagctgggattgctacccaggtctctagtcctgctt

SEQ ID NO: 32044 - DNA, 120 bp, synthetic construct
  source 1..120: mol_type = other DNA
ggcaggcagtagtgtgatcttgggctaactgcaacctccatctcctgcattcaagcagttctcctgcttcaacctcctgagtagctgagattataagcctatgctaccacgcctggctaa

SEQ ID NO: 32045 - DNA, 120 bp, synthetic construct; identical to SEQ ID NO: 9460
  source 1..120: mol_type = other DNA

SEQ ID NO: 32046 - DNA, 120 bp, synthetic construct
  source 1..120: mol_type = other DNA
gacgaggtagtgtattattagtgggaagctttgagtgctacatcatctccctttctataaaataaattgagtacgaaacaatttgaattaaaacacctgagtaaatagtaactttggaga

SEQ ID NO: 32047 - DNA, 120 bp, synthetic construct
  source 1..120: mol_type = other DNA
ggaaaacaccagaaattattgttggcagtttttgtgactcctcttactgatcttcgttctgacttctccaagtttcaggaaatgatagaaacaactttagatatggatcaggtatgcaat

SEQ ID NO: 32048 - DNA, 120 bp, synthetic construct
  source 1..120: mol_type = other DNA
agtgacagatgggaaaaggatttttaaaaaaatagcaactgtttcagtggatgaaataaagattattagcagagaaaatgaatattgggcataactgtcctggtgaaagacaatctcata

SEQ ID NO: 32049 - DNA, 120 bp, synthetic construct; identical to SEQ ID NO: 9461
  source 1..120: mol_type = other DNA

SEQ ID NO: 32050 - DNA, 120 bp, synthetic construct
  source 1..120: mol_type = other DNA
aaaatgctggggtttcagtagaagccaccatgccgggccacttctgtttcttttccatgtagagttctttgcaggaggaggttagaataggtgtgcatctcctaaatagttgtcgaatat

SEQ ID NO: 32051 - DNA, 120 bp, synthetic construct
  source 1..120: mol_type = other DNA
gtaaagtaagaacagtttgtgaaatagttgaaaatatccttacatgaaagtgaattttaaagcacagtttatgtaatgttaatgttttgttttgtatctgttaaaaatttgtttatatga

SEQ ID NO: 32052 - DNA, 120 bp, synthetic construct
  source 1..120: mol_type = other DNA
atcttggctcactgcaacctctgcctcctgggttcaagcgattctcctgccttagcctcccgagtagctgggattataggcacctgtcaccaaacccggctaagttttgtatttttggta

SEQ ID NO: 32053 - DNA, 120 bp, synthetic construct; identical to SEQ ID NO: 9462
  source 1..120: mol_type = other DNA

SEQ ID NO: 32054 - DNA, 120 bp, synthetic construct
  source 1..120: mol_type = other DNA
tcctgggttcaagcgattctcctgcctcagcctcccaagtagctggaattacaggaatacgccaccaagcccggctaattttgtatttttagtagagatggggtttctccatgttggtca

SEQ ID NO: 32055 - DNA, 120 bp, synthetic construct
  source 1..120: mol_type = other DNA
acccttttaaaaaaatgagacagagttttattctgtcacccagggtggagtgcagtggtgcgatcatggttcaccgcagccttgaatctgggctcaagtgatcctcccacttcagcctcc

SEQ ID NO: 32056 - DNA, 120 bp, synthetic construct
  source 1..120: mol_type = other DNA
ctgcctcagcctcccagagtgctgagatgatagacatgggccactgcccctggccgcatttttcttttcttttcctttctttttttttttttttttttgaaacggagttttgccattgtc

SEQ ID NO: 32057 - DNA, 120 bp, synthetic construct
  source 1..120: mol_type = other DNA
ccagctaatttttgtatttttagtagaaacagggtttctctatgttggtcaggcttgtcccaaactcctgacctcagatgatccacctgcgtctgcctcccaaagtgctgggattatagg

SEQ ID NO: 32058 - DNA, 120 bp, synthetic construct; identical to SEQ ID NO: 9463
  source 1..120: mol_type = other DNA

SEQ ID NO: 32059 - DNA, 120 bp, synthetic construct; identical to SEQ ID NO: 2341
  source 1..120: mol_type = other DNA

SEQ ID NO: 32060 - DNA, 120 bp, synthetic construct
  source 1..120: mol_type = other DNA
tgatggttaacaaaaactatgagtataatagagcctagtccctattacggactggtattgatctggtgtgggaagagtattgagcttttcagtgtcacctacctgtattcccttgaaggg

SEQ ID NO: 32061 - DNA, 120 bp, synthetic construct
  source 1..120: mol_type = other DNA
gccaacatggtgaaaccctgtctctactaaaaatacaaaaattagctgggtgtggtggtgcatgcctgtaatcccagctatctgggaggctgaggcaagagaattgcttgaacccaggag

SEQ ID NO: 32062 - DNA, 120 bp, synthetic construct; identical to SEQ ID NO: 9464
  source 1..120: mol_type = other DNA

SEQ ID NO: 32063 - DNA, 120 bp, synthetic construct
  source 1..120: mol_type = other DNA
gggctggggaatttgcatttctaacacacaagtttgttgatgctgtttgtctggggtccacgcttgcctaacttctgatgtgatttatttctgccagtttctttttttgttgttgtttta

SEQ ID NO: 32064 - DNA, 120 bp, synthetic construct
  source 1..120: mol_type = other DNA
ctgggttcaagcgattctcctgcctcagcctcctgagtagctggggttataggcacactgcaccacacccagctaatttttgtatttttcgtagagacagggtttcaccatgttggccag

SEQ ID NO: 32065 - DNA, 120 bp, synthetic construct; identical to SEQ ID NO: 9465
  source 1..120: mol_type = other DNA

SEQ ID NO: 32066 - DNA, 120 bp, synthetic construct
  source 1..120: mol_type = other DNA
tcttccacctccccactacctctccttccctacttttggactgtaaaagctgtctttctgcagttaattgttttattctttgtaggttctactcgttgataatgttatctactgctataa

SEQ ID NO: 32067 - DNA, 120 bp, synthetic construct
  source 1..120: mol_type = other DNA
gtctctgcttgacagcaaataagcctaacgttccctaacaaatgatgatgtcccattaatgatttgatgacttcctgtttgtagtttttatttagagtgcttgtgggtagtttttcataa

SEQ ID NO: 32068 - DNA, 120 bp, synthetic construct
  source 1..120: mol_type = other DNA
aggagttcaacaccagcctggccaacagggcgacaccccatttctactaaaaatacaaaaattaggccgggtgcggtggctcacacctgtaatcccagcactttgggaggccgaggcagg

SEQ ID NO: 32069 - DNA, 120 bp, synthetic construct
  source 1..120: mol_type = other DNA
aaggctgaggcaggagaatggcttgaacccaggaggtggagcttgcagtgagccgagatggcgctgctgcactccaacctgggcgagagtgcgagactctgtctcaaaaaaataaacaaa

SEQ ID NO: 32070 - DNA, 120 bp, synthetic construct; identical to SEQ ID NO: 9466
  source 1..120: mol_type = other DNA

SEQ ID NO: 32071 - DNA, 120 bp, synthetic construct
  source 1..120: mol_type = other DNA
agaaaagttttatttcaagtacacatgagagcttcatagaaaagaagtgaagacctaaagaaacagactggagagttcatatgccattttaataaaggataatgtattagtctgttctca

SEQ ID NO: 32072 - DNA, 120 bp, synthetic construct
  source 1..120: mol_type = other DNA
aaaggcacatattacatggtgtcaggcaagagagtgtgtgcaggggaactgccctttataaaaccatcagatctcgagagacttattcaccatcacaagaacggcatgggaaaaacctgc

SEQ ID NO: 32073 - DNA, 120 bp, synthetic construct; identical to SEQ ID NO: 9467
  source 1..120: mol_type = other DNA

SEQ ID NO: 32074 - DNA, 120 bp, synthetic construct
  source 1..120: mol_type = other DNA
aggggtggtaaattgtgggaaggtaattatttggggcaaactaatggcacataaggattgttttagtaaggcttgttatgcatacccaaaacaagtgccatctccagtaatttaagagtc

SEQ ID NO: 32075 - DNA, 120 bp, synthetic construct
  source 1..120: mol_type = other DNA
tactgtttcttcattatcttcctctcaaaagaatacttaggctaaagtggcatgatttggggtgacattctgatcctcttcagtgacaatccttgatatttttccttctttctctccagg

SEQ ID NO: 32076 - DNA, 120 bp, synthetic construct
  source 1..120: mol_type = other DNA
actctgactgtaaaatagtggtcagtgttacttctttaatgatgctgtgggattaaaggattttattataaatgctgggaagagcctggatttgaggaaggtaagcagtgcagttaggtg

SEQ ID NO: 32077 - DNA, 120 bp, synthetic construct
  source 1..120: mol_type = other DNA
gtgcagtggcgcaatctcacctcactgcaagctctgccccccgggttcatgccattcttctgcgtcagcctcccgagtagctggaactacaggcgcctgccaccatgcccagctaatttt

SEQ ID NO: 32078 - DNA, 120 bp, synthetic construct; identical to SEQ ID NO: 9468
  source 1..120: mol_type = other DNA

SEQ ID NO: 32079 - DNA, 120 bp, synthetic construct
  source 1..120: mol_type = other DNA
cccttaagagaatagatgagaaatatgaaggttttgtgacaatgtctgtttaggtggttacttctcttcttgttatgagagtcagtcttctggttgctggaaactgctaggagatttata

SEQ ID NO: 32080 - DNA, 120 bp, synthetic construct
  source 1..120: mol_type = other DNA
cacacacacacacacacttacgacacagttaagtactgtgccagtaagatgtgagttgtgcatttcttttttttctctgagtagactgtttgaggttatttatatcaggacttgttatgc

SEQ ID NO: 32081 - DNA, 120 bp, synthetic construct
  source 1..120: mol_type = other DNA
atcctgtagatctcttctaccttttgtaattttaatttcaaccaaggatggttccctttttggccctaggaccagttagcagttggggcaccattccaagcaagagtcctgcagtttgta

SEQ ID NO: 32082 - DNA, 120 bp, synthetic construct; identical to SEQ ID NO: 9469
  source 1..120: mol_type = other DNA

SEQ ID NO: 32083 - DNA, 120 bp, synthetic construct
  source 1..120: mol_type = other DNA
gggggttgacctcatatagtatcttctttttctttggttacaaacttttaaacttgtctgaggttataaggtgaattcaactgtccactgtcaatgtagatatttttaatggatttaggg

SEQ ID NO: 32084 - DNA, 120 bp, synthetic construct
  source 1..120: mol_type = other DNA
ctgttttctaggtgtgcacttaattcatgtgatgaagggaacagtatttacatgagtggtttggttaatttttcccctcctaagcttagctttgtgtatcgtgcgtgcttccagtgtttt

SEQ ID NO: 32085 - DNA, 120 bp, synthetic construct
  source 1..120: mol_type = other DNA
tatttagcttgggactttaaatgatatgtcttaaatgtaaacatttctatactgcattttggccatcttttgatactagttttcagatgcatattgttatttcatttattattggaaaag

SEQ ID NO: 32086 - DNA, 120 bp, synthetic construct
  source 1..120: mol_type = other DNA
gaccatcctggctaacacggtgaaaccccgtctgtactaaaaatacaaaaaaattagccgggcatggtggcaggtccctgtagtcccagctactcaggaggctgaggcaggagcatggca

SEQ ID NO: 32087 - DNA, 120 bp, synthetic construct; identical to SEQ ID NO: 9470
  source 1..120: mol_type = other DNA

SEQ ID NO: 32088 - DNA, 120 bp, synthetic construct
  source 1..120: mol_type = other DNA
ctttaagttctagggtacatgtgtacaatgtgcaggtttgttacatatgtatacatgtgacatgttggtgtgttgcacccattaactcgtcatttacattaggtatatctcctgatgcta

SEQ ID NO: 32089 - DNA, 120 bp, synthetic construct
  source 1..120: mol_type = other DNA
ttgcgatagtttgctgagaatgatagtttccagcttcatccatttccctacaaaggacatgaactcatcattttttatggctgcatagtattccatggtgtatatgtgccacattttctt

SEQ ID NO: 32090 - DNA, 120 bp, synthetic construct
  source 1..120: mol_type = other DNA
gtatatacccagtaatgggatggctgggtccaatggtatttctacttctagatccctgaggaatcgccacagtcttccacaatggttgaactagtttacagtcccaccaacagtgtaaaa

SEQ ID NO: 32091 - DNA, 120 bp, synthetic construct; identical to SEQ ID NO: 9471
  source 1..120: mol_type = other DNA

SEQ ID NO: 32092 - DNA, 120 bp, synthetic construct
  source 1..120: mol_type = other DNA
agttcatccgtaaagaactgagggtactagaaattttaccatgtcaatgcagtctctttacattactaactaaagaaaaataggtgctctttaaagatcttttaagattaggaacaaaaa

SEQ ID NO: 32093 - DNA, 120 bp, synthetic construct
  source 1..120: mol_type = other DNA
atgatgctttccctggcatttttctgcaaaaacttgggataactttctcaaaacactctaataataagcagagcttatgttctttatccccccagaacatcagcaagcaaaatgcctgaa

SEQ ID NO: 32094 - DNA, 120 bp, synthetic construct; identical to SEQ ID NO: 9472
  source 1..120: mol_type = other DNA

SEQ ID NO: 32095 - DNA, 120 bp, synthetic construct
  source 1..120: mol_type = other DNA
gttctcttcaattagggaatgaacaaaattaatttttcctgaaaaattgatgtggatggtctgccgctgtgggcttcatcttcgacatggtctcatcccttgttagaacaagttatccgt

SEQ ID NO: 32096 - DNA, 120 bp, synthetic construct
  source 1..120: mol_type = other DNA
ttagcagaactcatactgctctgacatctaaactgatgtcttagccttcatagtgtctctgactagatcctattcagacgtgttatagcaaattagtaaagtttattttggtgccaaaaa

SEQ ID NO: 32097 - DNA, 120 bp, synthetic construct
  source 1..120: mol_type = other DNA
ctgttaacattaagtctgttctcaactctaggcattattgagggttttgaggacaggtcttgaaaatttctatggctaccttttactgggtggagactagcatgtatagttgaccgcata

SEQ ID NO: 32098 - DNA, 120 bp, synthetic construct; identical to SEQ ID NO: 9473
  source 1..120: mol_type = other DNA

SEQ ID NO: 32099 - DNA, 120 bp, synthetic construct
  source 1..120: mol_type = other DNA
aaatagctgagactgagtaatttataaagaaaagaggtttaattggctcatggttctgcaggccgtacaggaagcatgatgatggcacctgctcagcttctggggaggcctcaggaaatt

SEQ ID NO: 32100 - DNA, 120 bp, synthetic construct
  source 1..120: mol_type = other DNA
atgagaacagcacccaggggaaaccgccctcacgatccagtcacctctcaccaggctccacctccagcactggggattccagttccaattcaacatgatacttgggtgggggcacatatc

SEQ ID NO: 32101 - DNA, 120 bp, synthetic construct
  source 1..120: mol_type = other DNA
tttgagcatagctcactgcaggccttgaattcctgggctccagtgatcctcccacctcagcctcctgcgtacctgagattataggtgtgtgccaccacacctggctaattttttttattt

SEQ ID NO: 32102 - DNA, 120 bp, synthetic construct
  source 1..120: mol_type = other DNA
ataatttcttactcaacttcaagtattttatttctcttatcatttgttgtttggtttgttaattatttggaagtatatttttaaatttccaagcttagtgtgtgtcagtttcataaaagt

SEQ ID NO: 32103 - DNA, 120 bp, synthetic construct; identical to SEQ ID NO: 2351
  source 1..120: mol_type = other DNA

SEQ ID NO: 32104 - DNA, 120 bp, synthetic construct
  source 1..120: mol_type = other DNA
ttttttaaccgtaagtttaagcaaaataaagcttaataactggattttatttagttttaaatttaatttgatttttttttttttgagactaagtctcactctgtcgcccaggctggggtg

SEQ ID NO: 32105 - DNA, 120 bp, synthetic construct
  source 1..120: mol_type = other DNA
atttttagtagaggcgggctttcaccatgttggccagtctggtctcgaactcctgacctcaggtgatccacctgcctcagcctcccaaagtgctgggattacaggcatgagccaacactc

SEQ ID NO: 32106 - DNA, 120 bp, synthetic construct
  source 1..120: mol_type = other DNA
cacttacacattaaaaaaaaaaacaaaaaaaacttagaatagagatggtgtctcactatgttgttcaggctgctctcaaactccagggctcaagttatcctcctgccttggcctcccaaa

SEQ ID NO: 32107 - DNA, 120 bp, synthetic construct; identical to SEQ ID NO: 9475
  source 1..120: mol_type = other DNA

SEQ ID NO: 32108 - DNA, 120 bp, synthetic construct
  source 1..120: mol_type = other DNA
tgcatacgagtttctttggtattcaatacttcctgtatatttttaagaagttcctttgttggaggtctgttaggttttatttgtttgaaaatgtctgtatttcacccttgttcttgaagg

SEQ ID NO: 32109 - DNA, 120 bp, synthetic construct
  source 1..120: mol_type = other DNA
aagtgattctcctgcttcagcctctcgagtagctgggattacaggtgcccaccatcacacctggctaatttttggtatttttagtagacggggtttcaccatgctggccaggctggtctt

SEQ ID NO: 32110 - DNA, 120 bp, synthetic construct
  source 1..120: mol_type = other DNA
ttggtttcatcatcccattttttagtttcttttcagtctccttttgtgtagcctgaagcaataactgtgtttctgatgcctaggtaagtatactgtaggtaggctgatactgttcagcta

SEQ ID NO: 32111 - DNA, 120 bp, synthetic construct; identical to SEQ ID NO: 9476
  source 1..120: mol_type = other DNA

SEQ ID NO: 32112 - DNA, 120 bp, synthetic construct
  source 1..120: mol_type = other DNA
tgaggataggaacttggcctggtttggctcacctctcagattcattggaagaggcaagttcattagcacagtttcagtccaccattacagcatttttttcctgaattattataagtctta

SEQ ID NO: 32113 - DNA, 120 bp, synthetic construct
  source 1..120: mol_type = other DNA
cttctgttgcattgtttcctcagattgaatttctaggagtagaattgctatgtcaaagagaataacaagtatctctgagccttgccgcatactgcttttttcatttttaaaggttatacc

SEQ ID NO: 32114 - DNA, 120 bp, synthetic construct
  source 1..120: mol_type = other DNA
tattcttacagcatttcctgtggattagttcactacttattttcttatctgtgagttgtaagtgcttacacatgcccacttgatgaccttgatgttttcttacacatggaagcaagtgct

SEQ ID NO: 32115 - DNA, 120 bp, synthetic construct; identical to SEQ ID NO: 9477
  source 1..120: mol_type = other DNA

SEQ ID NO: 32116 - DNA, 120 bp, synthetic construct
  source 1..120: mol_type = other DNA
ctgtaatgcctagtaaggatacacttcattctttttttagatgttctttcacaatttcatgtaaattttagttgttttgtttcaaaaaacaattcctattgaacaatctctaggaataga

SEQ ID NO: 32117 - DNA, 120 bp, synthetic construct
  source 1..120: mol_type = other DNA
gtggtgcgatctctgctcacagcaagctccgcctcccaggttcgcgccattctcctgcctcagcctcccaactagctgggactacaggtgccccccaccactcctggctaattttttttt

SEQ ID NO: 32118 - DNA, 120 bp, synthetic construct
  source 1..120: mol_type = other DNA
aggcgtgagccaccgcgcccagcctctgtctctcttttctttttctttttcttttcttttcttttcttttcttttcttttcttttcttttcttttcttttctttcctttcctttcctttc

SEQ ID NO: 32119 - DNA, 120 bp, synthetic construct; identical to SEQ ID NO: 9478
  source 1..120: mol_type = other DNA

SEQ ID NO: 32120 - DNA, 120 bp, synthetic construct
  source 1..120: mol_type = other DNA
cagtccaattcttgtgtagttttttaatcagctgaatttaacattcaaattcttcttttaaatcttccaataggcagttatctttataaagatcctatataatcaagactttgtttctga

SEQ ID NO: 32121 - DNA, 120 bp, synthetic construct
  source 1..120: mol_type = other DNA
agattttgatgaacttttaagaaataaaattctttagtttcttagagctttttgagatttctaaggtagatccttggtttgggcaacatataactattacaagttttgcacattgaacgt

SEQ ID NO: 32122 - DNA, 120 bp, synthetic construct
  source 1..120: mol_type = other DNA
acatcatcagcactgtaactgtttcatatgaatcatttttgtacatatagaactctaaagtcctaatgaacagaattttacatttctataaatagaaagtccttaatagttgtgactgaa

SEQ ID NO: 32123 - DNA, 120 bp, synthetic construct
  source 1..120: mol_type = other DNA
gcaggtggaaaaccatgaattccttgtaaaaccttcatttgatcctaatctcagtgaattaagagaaataatgaatgacttggaaaagaagatgcagtcaacattaataagtgcagccag

SEQ ID NO: 32124 - DNA, 120 bp, synthetic construct; identical to SEQ ID NO: 2356
  source 1..120: mol_type = other DNA

SEQ ID NO: 32125 - DNA, 120 bp, synthetic construct
  source 1..120: mol_type = other DNA
ttcttctaggagtagtgcattgattaggctttggggtttccaagcagttcattaatgtcacttttggaaaaagtctgtctttcataccagcttattaattccctatgggttcacacggtt

SEQ ID NO: 32126 - DNA, 120 bp, synthetic construct
  source 1..120: mol_type = other DNA
tacatatataaaaaatttgcaaatagttctgtagagagtccaaacatggagtagatccctaattaagagcctttgcattaaagtccaccttcctcatttcatagctaaggatattgaggc

SEQ ID NO: 32127 - DNA, 120 bp, synthetic construct; identical to SEQ ID NO: 9480
  source 1..120: mol_type = other DNA

SEQ ID NO: 32128 - DNA, 120 bp, synthetic construct
  source 1..120: mol_type = other DNA
ccatacatggtggcacgcacctgtggtcccagctactcaggaggctgaggtgagaggatcacttgagccagggaggttgaggctataatgagccataattgcactactgcactccagcct

SEQ ID NO: 32129 - DNA, 120 bp, synthetic construct
  source 1..120: mol_type = other DNA
gactagcctgtgccacatagaccacatttctaccaaaaatcaaaaggaaaaaacttgctgggtgtggtgatgcacacctgtggtcccagctactcgggaggctgaggtgagaggattgct

SEQ ID NO: 32130 - DNA, 120 bp, synthetic construct
  source 1..120: mol_type = other DNA
agtatatattaaattattgcctatttttttatctattttattgagtgctaataagaaaattaatggcaaaaacttgttttttacagtataaattaagtttaatttcattttaaaattaag

SEQ ID NO: 32131 - DNA, 120 bp, synthetic construct
  source 1..120: mol_type = other DNA
tgcagcttggaaactttttctgaagctctttacaaattacttaatttctctggttttcaccacattgttctatagcattaacatgttggattcattgctttaattcttagacctacgtgt

SEQ ID NO: 32132 - DNA, 120 bp, synthetic construct; identical to SEQ ID NO: 9481
  source 1..120: mol_type = other DNA

SEQ ID NO: 32133 - DNA, 120 bp, synthetic construct
  source 1..120: mol_type = other DNA
tctgtctaattgtttgctactactaacatttgatggccacgcttcagcaagtacatttgtagattctctctctctgtctctcttaatttgtggtctagagatcatattggttaatgaaat

SEQ ID NO: 32134 - DNA, 120 bp, synthetic construct
  source 1..120: mol_type = other DNA
taaggatgcatccatgacatagtctcacaaggttctaatgacacatgcgcaaggtggttagggtacagcttggttttatacattttagggagacatgagacatcagtcaacatgtgtaag

SEQ ID NO: 32135 - DNA, 120 bp, synthetic construct; identical to SEQ ID NO: 9482
  source 1..120: mol_type = other DNA

SEQ ID NO: 32136 - DNA, 120 bp, synthetic construct
  source 1..120: mol_type = other DNA
tagtttttaaatctttgtcgctatcttatttagaaataagatggaaggcaggtttgtctgacatagttcccagcttgacttttccctcggcttagtgattttgcggttccgagatttatt

SEQ ID NO: 32137 - DNA, 120 bp, synthetic construct
  source 1..120: mol_type = other DNA
gtatttggtcacattaattatactctatgttagttccaaagaaatacctttggttaagaaaagaattctcatgcataactcctcgagggtggggttacaccttaatccatcctcaggtgc

SEQ ID NO: 32138 - DNA, 120 bp, synthetic construct
  source 1..120: mol_type = other DNA
tctgcagccttggatgggtttacccagaaagcagctttcaagtcagaaactaacattcataagggagttaaggattttataaatagatatccataattcatgtagttttcaagtaagtag

SEQ ID NO: 32139 - DNA, 120 bp, synthetic construct
  source 1..120: mol_type = other DNA
aatactttttcttttcttcttgattatcaaggcttggaccctggcaaacagattaaactggattccagtgcacagtttggatattactttcgtgtaacctgtaaggaagaaaaagtcctt

SEQ ID NO: 32140 - DNA, 120 bp, synthetic construct; identical to SEQ ID NO: 9483
  source 1..120: mol_type = other DNA

SEQ ID NO: 32141 - DNA, 120 bp, synthetic construct
  source 1..120: mol_type = other DNA
gttccccctcatatctctgctttagttattttcacatgtttcttttatcttttttttttttggagatggagtctcgctctgttgcccaggctggagtgcagtggcatgatctcggctcac

SEQ ID NO: 32142 - DNA, 120 bp, synthetic construct
  source 1..120: mol_type = other DNA
tcaccgtggtctcgatctcctgacctcgtgatccgcctgcctctgcctcccaaagtactgggattacaggtgtgagccaccgcgcccagccttatcttttttttttttccccctgagaca

SEQ ID NO: 32143 - DNA, 120 bp, synthetic construct
  source 1..120: mol_type = other DNA
ggcatgcaccaccacgcctagttcatttttgtatttttagtagagatgggttttcaccatgttggacaggctggtctcggactcctggcctcaagtgatccacctgcctcagcttcccaa

SEQ ID NO: 32144 - DNA, 120 bp, synthetic construct; identical to SEQ ID NO: 9484
  source 1..120: mol_type = other DNA

SEQ ID NO: 32145 - DNA, 120 bp, synthetic construct
  source 1..120: mol_type = other DNA
gaaactatggcctgttctactccctcccctcctgaattttcccagaactttacaggtagcttttatatatatgatcccctgtcgtctgtttaacaagtactttgagtgtctattatatgc

SEQ ID NO: 32146 - DNA, 120 bp, synthetic construct
  source 1..120: mol_type = other DNA
tagacagctagtgctggtgggtgcctaaacttagatcttccattgccaaatctaggtgtgttgtttttccagcacactagaatcctcctggttcaagaaatgtatatattttagcttgga

SEQ ID NO: 32147 - DNA, 120 bp, synthetic construct; identical to SEQ ID NO: 9485
  source 1..120: mol_type = other DNA

SEQ ID NO: 32148 - DNA, 120 bp, synthetic construct
  source 1..120: mol_type = other DNA
atcttgatgaactgattttctcccactgctgataattacttctctctcctttctttctcctttacatcacctctttttgttcttaatttcattccctccttgatgccagtgagtattttt

SEQ ID NO: 32149 - DNA, 120 bp, synthetic construct
  source 1..120: mol_type = other DNA
ccactgcaacctccacctcctgggctcaagccatcccacctcagccacccaagtagctgggactacaggtgttgcccactgctttgtatttttaatagacacaggatttccccatgttgc

SEQ ID NO: 32150 - DNA, 120 bp, synthetic construct
  source 1..120: mol_type = other DNA
aaattgttcaataagatttagtttcaagacattttcctggccgggcatggtggcttacgcctataatttcaacactttgggaggccgaggcaggtggatcacttgaggtcaagagttcaa

SEQ ID NO: 32151 - DNA, 120 bp, synthetic construct; identical to SEQ ID NO: 9486
  source 1..120: mol_type = other DNA

SEQ ID NO: 32152 - DNA, 120 bp, synthetic construct
  source 1..120: mol_type = other DNA
cgtagtggttggtgcctgtagtcccagctactcaggaggctgaggcaggagaatggtgtgaagccgggaggcagaggttgcagtgagcctagatcgcgccactgcactttagcctgggtg

SEQ ID NO: 32153 - DNA, 120 bp, synthetic construct
  source 1..120: mol_type = other DNA
ttttttttttgtttttttctttctctctctctcttttttttttttttgacagagttttgctcctgttgtccaggctggagtgcagtggtgctatctcgactcaccacaacctctgcctcc

SEQ ID NO: 32154 - DNA, 120 bp, synthetic construct
  source 1..120: mol_type = other DNA
cttgaactcctgacctcaggtgatccacctgcctcggcctcccaaagtgctgggattacaggcaccctgcctgtgtttgtgttttaaaaggggtaatagcttcagtcttttttttctttc

SEQ ID NO: 32155 - DNA, 120 bp, synthetic construct
  source 1..120: mol_type = other DNA
ggattacaagcacgcgccaccatgctgggctaatttttgtatttttagtagagacggggtttctccatgttggtcaggctggtctcgaactcctgacctcaggcaatccaccgacctcag

SEQ ID NO: 32156 - DNA, 120 bp, synthetic construct; identical to SEQ ID NO: 9487
  source 1..120: mol_type = other DNA

SEQ ID NO: 32157 - DNA, 120 bp, synthetic construct
  source 1..120: mol_type = other DNA
tgttatttcgatttgcagcaaattgacttctttaaatgaagagtataccaaaaataaaacagaatatgaagaagcccaggatgccattgttaaagaaattgtcaatatttcttcaggtaa

SEQ ID NO: 32158 - DNA, 120 bp, synthetic construct
  source 1..120: mol_type = other DNA
gttaggtttcctatataaaataaggcatggtatgttacagtaggacacataactggaagttactcttgcacatagaaacaaaaaatggcagaaaagcacaaaacttactatagttgtaac

SEQ ID NO: 32159 - DNA, 120 bp, synthetic construct
  source 1..120: mol_type = other DNA
aagcctttttgagttctgtatgtcattttgtagattttgagttcattctagtggcaccatttgagatcattttcatgtaattaaaggaacacagcaacctggcactgtgttattgccctt

SEQ ID NO: 32160 - DNA, 120 bp, synthetic construct; identical to SEQ ID NO: 9488
  source 1..120: mol_type = other DNA

SEQ ID NO: 32161 - DNA, 120 bp, synthetic construct
  source 1..120: mol_type = other DNA
ttaaagagacagggcaaccaaacgcagtaggcagtagttgattagatcccaatttagaggttggagttggggaatagctatagaggacactattggggcgaattgagaaagtttaatatg

SEQ ID NO: 32162 - DNA, 120 bp, synthetic construct
  source 1..120: mol_type = other DNA
gttatgtgcatgagtaattctataaattgtgttgctattatgaattgtcatggtaaatcaaaaggaaacataaaactcaaaaggttttattttaatacactttatgtattgaaatgaatg

SEQ ID NO: 32163 - DNA, 120 bp, synthetic construct
  source 1..120: mol_type = other DNA
tttatttgaactgtggatcttccttaaaaaataatatttattaagcacctagcagggtaaagtttttagattttaacatttaaattgaaggttttatattagaagtcaacctgaatttaa

SEQ ID NO: 32164 - DNA, 120 bp, synthetic construct; identical to SEQ ID NO: 9489
  source 1..120: mol_type = other DNA

SEQ ID NO: 32165 - DNA, 120 bp, synthetic construct
  source 1..120: mol_type = other DNA
aatggatcactttaataattttctatcatacaattaagtcataaaaggtcatgctattaagagccagttatgtgacatgccaagtatagactcttaattaagatgctttggtttgctttt

SEQ ID NO: 32166 - DNA, 120 bp, synthetic construct
  source 1..120: mol_type = other DNA
agcctcaacctcctaggttcaagggattctccccacttagcctcccaagtagcttgggactactacatgtagtagtgccaccacacctggttaatttttttttaattatcttttgtggag

SEQ ID NO: 32167 - DNA, 120 bp, synthetic construct
  source 1..120: mol_type = other DNA
aaacttattcttgtcagtatgctagcaattttacaagttttaaagtagttatagcaagtacttcactcatgtttaattcttaaaggcttctattgctatataatagggtagtctgaattc

SEQ ID NO: 32168 - DNA, 120 bp, synthetic construct
  source 1..120: mol_type = other DNA
ctgaggtcaggagttcgaaactggcctaaccaacatgttgaaaccctgtctttactaaaagtacaaaaattagctgggtatggtggcaggtgcctgtaatcccagctactcaggaggctg

SEQ ID NO: 32169 - DNA, 120 bp, synthetic construct; identical to SEQ ID NO: 9490
  source 1..120: mol_type = other DNA

SEQ ID NO: 32170 - DNA, 120 bp, synthetic construct
  source 1..120: mol_type = other DNA
cttttgacatgattgatagctgtatgatagtctgaatgacatgtgggtcatgcaccagcccctccaacctgttaacatttagaatctattcagaaaaatttaagcattgttaatttcctt

SEQ ID NO: 32171 - DNA, 120 bp, synthetic construct
  source 1..120: mol_type = other DNA
tatgctgacatcctctgcatgtgatactgatgaggaaagaaagccaaactgtcttacggtcagttcgtacaatataccaggccttgatggtcacatttcaacttgctacctttttgctta

SEQ ID NO: 32172 - DNA, 120 bp, synthetic construct
  source 1..120: mol_type = other DNA
catttttcttatggtgattttgaggtgtcattctggtttctcagatacttaaaatataggaaaaggtgtgtcttaaaattgagagaatgtcttggataagcagctgtgtagttttatatt

SEQ ID NO: 32173 - DNA, 120 bp, synthetic construct; identical to SEQ ID NO: 9491
  source 1..120: mol_type = other DNA

SEQ ID NO: 32174 - DNA, 120 bp, synthetic construct
  source 1..120: mol_type = other DNA
tttgatagctattcacaatgggaaaggatgtagcaacacattttaaccctatgttgagttttaggtgggttcctttgaaattttgttaaggctaacttttgttaatttttttaaaaaagt

SEQ ID NO: 32175 - DNA, 120 bp, synthetic construct
  source 1..120: mol_type = other DNA
tattcctgtgtacattttctgtttttatttttatacaggctatgtagaaccaatgcagacactcaatgatgtgttagctcagctagatgctgttgtcagctttgctcacgtgtcaaatgg

SEQ ID NO: 32176 - DNA, 120 bp, synthetic construct
  source 1..120: mol_type = other DNA
gtgttgaagttcaagatgaaattgcatttattcctaatgacgtatactttgaaaaagataaacagatgttccacatcattactggtaaaaaacctggtttttgggctttgtgggggtaac

SEQ ID NO: 32177 - DNA, 120 bp, synthetic construct; identical to SEQ ID NO: 9492
  source 1..120: mol_type = other DNA

SEQ ID NO: 32178 - DNA, 120 bp, synthetic construct
  source 1..120: mol_type = other DNA
atgtgaaactcgcaaaaactagccttgcatataggctcatgtatcatgtctcagctgagatgtttgagagatcttaactagattctagaaaacaaaaaaggaagtagttttggggcaaat

SEQ ID NO: 32179 - DNA, 120 bp, synthetic construct
  source 1..120: mol_type = other DNA
tttgtgtggggtttaaatgattcgaaagatttgaccatactgatacattcactagtaaccttagttactaatgagtaatggttttgagttaatcagttaggcctgaactacttttctgga

SEQ ID NO: 32180 - DNA, 120 bp, synthetic construct; identical to SEQ ID NO: 9493
  source 1..120: mol_type = other DNA

SEQ ID NO: 32181 - DNA, 120 bp, synthetic construct
  source 1..120: mol_type = other DNA
tgatataatttgttttgtaggccccaatatgggaggtaaatcaacatatattcgacaaactggggtgatagtactcatggcccaaattgggtgttttgtgccatgtgagtcagcagaagt

SEQ ID NO: 32182 - DNA, 120 bp, synthetic construct
  source 1..120: mol_type = other DNA
tgttggaaactgcttctatcctcaggtaagtgcatctcctagtcccttgaagatagaaatgtatgtctctgtcctgtgagaaggaaaagtatatttgcagattctcatgtaaaaacatct

SEQ ID NO: 32183 - DNA, 120 bp, synthetic construct
  source 1..120: mol_type = other DNA
gtagacaatttataagctactggtacgagttcaccttataaatctccactaccatgtttttgcttggactgttcacacttcctggaatggtccttcttgccgtttatccaacttctttct

SEQ ID NO: 32184 - DNA, 120 bp, synthetic construct; identical to SEQ ID NO: 9494
  source 1..120: mol_type = other DNA

SEQ ID NO: 32185 - DNA, 120 bp, synthetic construct
  source 1..120: mol_type = other DNA
tccttatttcttagtatcttctaaagaacattaaatatagtaggtgcctagtaaattatgtattgatttaacttctttgaggttctgttgtttgtgaagaattataaaagcaatacaaat

SEQ ID NO: 32186 - DNA, 120 bp, synthetic construct
  source 1..120: mol_type = other DNA
acatgaaaaattagcaaaagtttcacccctttacatatatttggttaaaattgagaaaagaatagtaatagatggtattggtaggactgtggcaggcacacaatttacatgaccaccaaa

SEQ ID NO: 32187 - DNA, 120 bp, synthetic construct
  source 1..120: mol_type = other DNA
ttcctttgattactactagtgtgcttgataatgtaaaacaatattcaaaatctgtttttcctttcatccgttgtttgttcatgttcatgacctttttttttttttcctattctcctccct

SEQ ID NO: 32188 - DNA, 120 bp, synthetic construct
  source 1..120: mol_type = other DNA
ttagaggcaaggtctcactatgttgctcaggctggtctgggctcaagtgatcctcccacctccgccttccaaagtgctgggattacagacgtgagccatcatgcctggcccttgcccatt

SEQ ID NO: 32189 - DNA, 120 bp, synthetic construct; identical to SEQ ID NO: 9495
  source 1..120: mol_type = other DNA

SEQ ID NO: 32190 - DNA, 120 bp, synthetic construct
  source 1..120: mol_type = other DNA
ccttggccaatcagataccaactgttaataatctacatgtcacagcactcaccactgaagagaccttaactatgctttatcaggtgaagaaaggtatgtactattggagtactctaaatt

SEQ ID NO: 32191 - DNA, 120 bp, synthetic construct
  source 1..120: mol_type = other DNA
ttgttatagaacccatttaccccttaattcacagtctgggggtaggaacatgtacatcatatttctgtatctcatagtaggaccactcattctaaagcattcacagaaagaattatctgt

SEQ ID NO: 32192 - DNA, 120 bp, synthetic construct
  source 1..120: mol_type = other DNA
tcaagcgattctcctgcctcagcttcccgagtagctgggattacaggcgcctgccaccacacctggctaatttttatatttttagtagagacggggtttcaccatgctggccaggctggt

SEQ ID NO: 32193 - DNA, 120 bp, synthetic construct; identical to SEQ ID NO: 9496
  source 1..120: mol_type = other DNA

SEQ ID NO: 32194 - DNA, 120 bp, synthetic construct
  source 1..120: mol_type = other DNA
aaagctgggggttccagaaatcttgaaatagtagttatcacatgcagagtgacttatctgttgttgtttcatcctttcaggaaagtttgtcattcgtgggcttgggatctagtcagatcc

SEQ ID NO: 32195 - DNA, 120 bp, synthetic construct
  source 1..120: mol_type = other DNA
cagaataactttttcagatagcgctctgattttccacgaacacgtttttctgcatcagttggttgcacatgagtgagataatcttggttctttatcctttgttatttgtacttcattggg

SEQ ID NO: 32196 - DNA, 120 bp, synthetic construct
  source 1..120: mol_type = other DNA
tagaaatgggttcagaatattttttaaaaggccagatgaagtgtgaagatagaaaaacttcatccttcactgtgaatgtttaacaaacatttgcttctactttatttttgtttgcttcct

SEQ ID NO: 32197 - DNA, 120 bp, synthetic construct; identical to SEQ ID NO: 9497
  source 1..120: mol_type = other DNA

SEQ ID NO: 32198 - DNA, 120 bp, synthetic construct
  source 1..120: mol_type = other DNA
catcccccatcccttcccttcccccatccctttcctttccccttcccttccctcctcttcctccttcccttcccccttcctccttcccttcccccttcctccttccctttcctcttccct

SEQ ID NO: 32199 - DNA, 120 bp, synthetic construct
  source 1..120: mol_type = other DNA
aatttttctttagattaagatatttgtctaagcctttaaggtttatctattgagcttttttgtctcctatttttatttttcctactatgtttgtcgaggataaaatacagcactgtgtgc

SEQ ID NO: 32200 - DNA, 120 bp, synthetic construct; identical to SEQ ID NO: 9498
  source 1..120: mol_type = other DNA

SEQ ID NO: 32201 - DNA, 120 bp, synthetic construct
  source 1..120: mol_type = other DNA
gagaggtttgtcagtttgttttcatagtttaacttagcttctctattattacataaacaggacactaagatgaaggttttttgttgttgtttgttttcctctgtgtttctagtgcttatt

SEQ ID NO: 32202 - DNA, 120 bp, synthetic construct
  source 1..120: mol_type = other DNA
aacctaggtttaaaattagtcatttcactaaaattagttattatggacgatagatgtctaggtatatctttgttcataaacgaatatatcaagttcagttattaaattacacattaggta

SEQ ID NO: 32203 - DNA, 120 bp, synthetic construct
  source 1..120: mol_type = other DNA
atatttattcaagaaagctatatgtggacgggatgtttcagttctcatgggagaagtggattttatggtgcctttgagtaatgggtcatatttgggcgttcacacagaaagacccaagca

SEQ ID NO: 32204 - DNA, 120 bp, synthetic construct
  source 1..120: mol_type = other DNA
cctcctgggttcacaccattctcctgcctcaggctcccgagcagctgggactacaggcgcctgccaccacgcccggctaaattttttgtattttttagtagagatggggtttcaccgtgt

SEQ ID NO: 32205 - DNA, 120 bp, synthetic construct; identical to SEQ ID NO: 9499
  source 1..120: mol_type = other DNA

SEQ ID NO: 32206 - DNA, 120 bp, synthetic construct
  source 1..120: mol_type = other DNA
aagcaggagaaatataacttgttaataattttaggtatggcaggctgccatcctaaatatgaagtggtctttgtatttgcactttaatgtgttgaaatcatagctttcagtgatccagga

SEQ ID NO: 32207 - DNA, 120 bp, synthetic construct
  source 1..120: mol_type = other DNA
atgaatgaggaatgtgtgttaaggagtttgcccaagagtcacatagcaagtcatagtcatgctctctgaagcagcaataacttggcaataaaataaaaatgaagcatcttctgtatgtgt

SEQ ID NO: 32208 - DNA, 120 bp, synthetic construct; identical to SEQ ID NO: 9500
  source 1..120: mol_type = other DNA

SEQ ID NO: 32209 - DNA, 120 bp, synthetic construct
  source 1..120: mol_type = other DNA
aattactaatgggacattcacatgtgtttcagcaaggtgaaaaaattattcaggagttcctgtccaaggtgaaacaaatgccctttactgaaatgtcagaagaaaacatcacaataaagt

SEQ ID NO: 32210 - DNA, 120 bp, synthetic construct
  source 1..120: mol_type = other DNA
ctattgtctgtaatagttttatattgttttatattaaccctttttccatagtgttaactgtcagtgcccatgggctatcaacttaataagatatttagtaatattttactttgaggacat

SEQ ID NO: 32211 - DNA, 120 bp, synthetic construct
  source 1..120: mol_type = other DNA
gagatgcattgtagttcttcgcagtgtgacttcaaatattttggaagaaacaaatagctcagagacctcgtaaaatatcttaaactggagggctccatggagatcattgcgagtgactcc

SEQ ID NO: 32212 - DNA, 120 bp, synthetic construct; identical to SEQ ID NO: 9501
  source 1..120: mol_type = other DNA

SEQ ID NO: 32213 - DNA, 120 bp, synthetic construct
  source 1..120: mol_type = other DNA
tgcggcgggctggtggggtatccatataggaagaaatgacattggacccctactccatgtcatatataaaaacctccactttgggaggcgaagcaggcaatcacttgaactcaggagatc

SEQ ID NO: 32214 - DNA, 120 bp, synthetic construct
  source 1..120: mol_type = other DNA
acgtgatctgggagaggttgaggttacagtgagctgcactccatcctgggtaatacagtgataactgtgtctcaaacaaaacaaaacaaatcaccttcagtgatttttagaccaaatgta

SEQ ID NO: 32215 - DNA, 120 bp, synthetic construct
  source 1..120: mol_type = other DNA
tttgacttatttagctatttgaaattaacaacttctattaaaaggcaccacaagtgaaaagacatgaatcgtaatggaagaacatactggtacgttataaaatatcaaagagttgggcat

SEQ ID NO: 32216 - DNA, 120 bp, synthetic construct
  source 1..120: mol_type = other DNA
cttttcttcttcttttttaatacctggaataaagaactcctataaaatcactaagaaaaggggtcacttaagaatctcattaacaaaaagaatttgaatatttttccaaggaagatatgc

SEQ ID NO: 32217 - DNA, 120 bp, synthetic construct; identical to SEQ ID NO: 9502
  source 1..120: mol_type = other DNA

SEQ ID NO: 32218 - DNA, 120 bp, synthetic construct
  source 1..120: mol_type = other DNA
caacccgaatgtccatcagcagatgaatgcataaatgaaacgtggtctatccatacaatggagtatattattgagccattaaaggaatgaagtactggtacatggtgcagcttagatgaa

SEQ ID NO: 32219 - DNA, 120 bp, synthetic construct
  source 1..120: mol_type = other DNA
tagagacagcagtagagacaaagtagcagttcagggttggtgccagggaatagggggtaggtggggtgaaagctaaaggatacggtgtttctttgtgagatggaaattctaaaataggtg

SEQ ID NO: 32220 - DNA, 120 bp, synthetic construct; identical to SEQ ID NO: 9503
  source 1..120: mol_type = other DNA

SEQ ID NO: 32221 - DNA, 120 bp, synthetic construct
  source 1..120: mol_type = other DNA
gacccagcaattctgctcttaagtgcatactctggagatgcttttgcccattgtgctgcgagatgtatacaagaatgttcctaatacctccacactggaaacaactcatcagtgaaaatg

SEQ ID NO: 32222 - DNA, 120 bp, synthetic construct
  source 1..120: mol_type = other DNA
tttcatttatgtgaagtttaagaataggtggtattgtttagggatgcagtctttgggatggcaactgtaaagaaaaagtgattgtgttaatcagagtgattgtctttagggaaatggagt

SEQ ID NO: 32223 - DNA, 120 bp, synthetic construct
  source 1..120: mol_type = other DNA
taaagtttggtatgagaacaaatgtatgaccgatgagtcctttcagtttaccaagttctttttcgtcatcgttaatttagagtgggttacatcagtttttcttttctggctgccaaaggc

SEQ ID NO: 32224 - DNA, 120 bp, synthetic construct; identical to SEQ ID NO: 9504
  source 1..120: mol_type = other DNA

SEQ ID NO: 32225 - DNA, 120 bp, synthetic construct
  source 1..120: mol_type = other DNA
tcaaacttaatctgtgcttattacatgaatatgctaatgtaaaaccaggccttcagttagtgtttccttccttttagaatggtgtatgtaaagcaaaatataaactaatttctgacctgt

SEQ ID NO: 32226 - DNA, 120 bp, synthetic construct
  source 1..120: mol_type = other DNA
actctgttgttaagaaatctgttgaccacataaccatgtttctgagaaaatacatgattttttgcatctttaaaaaaaattagcactaagaagctaagatgaagttgtttttgtaatttg

SEQ ID NO: 32227 - DNA, 120 bp, synthetic construct
  source 1..120: mol_type = other DNA
gactagggtagatgtatttaaagaataacttttcccccttaaaatctcaatattccacatcctgttagacttcttgagtattaaatacatcttctatccttggtctttctgcatttagct

SEQ ID NO: 32228 - DNA, 120 bp, synthetic construct
  source 1..120: mol_type = other DNA
aaaaccagtccctggtctgaaataaacaatgttaattagcttatggggaagaacaaatgagtaaggagaattttcatatacaaaggaaatctctgattgtctttctggactcagtgtgtt

SEQ ID NO: 32229 - DNA, 120 bp, synthetic construct; identical to SEQ ID NO: 9505
  source 1..120: mol_type = other DNA

SEQ ID NO: 32230 - DNA, 120 bp, synthetic construct
  source 1..120: mol_type = other DNA
ttgctacagccgtttccttgacctccctggaagaacagtatttcatggtgtcagacaacattcagaacatgctcaaattaaatgtatgtcagtatgcatttgctttggtgtgtggtttgt

SEQ ID NO: 32231 - DNA, 120 bp, synthetic construct
  source 1..120: mol_type = other DNA
ctggatttggtgagtagaagatcacactgttgcttgctgccctgggttcacctcaaagagggaaagaagaattagcaacttaaatggttaaatttagaaacaagaaaaagttctgtcagt

SEQ ID NO: 32232 - DNA, 120 bp, synthetic construct
  source 1..120: mol_type = other DNA
agcaattaacctatcactatcacgattgtttatttcctggaattttgttgacagaattagtccaataaatgttatgaataataattttatgaatagagataggttaatgccaaattaagt

SEQ ID NO: 32233 - DNA, 120 bp, synthetic construct; identical to SEQ ID NO: 9506
  source 1..120: mol_type = other DNA

SEQ ID NO: 32234 - DNA, 120 bp, synthetic construct
  source 1..120: mol_type = other DNA
agaccatcctggctaacacggtgaaaacccgtctctactaaaaatacaaaaagccatgcatggtggcgggtgcctgtagtcccagctacttgggtggctgaggcaggagaatggcatgaa

SEQ ID NO: 32235 - DNA, 120 bp, synthetic construct
  source 1..120: mol_type = other DNA
ttaaatactttgtcagtatctgaaaagtgcaaagtactgtgcttggctccccaaaggctcctcttaatcctgaaaggcaggtgcttttattatcttttatcttattatctacattttcca

SEQ ID NO: 32236 - DNA, 120 bp, synthetic construct
  source 1..120: mol_type = other DNA
ccagtaccctatctccagcgaatctgagatgtacatgtgataaatttaatctttctcaataaattattaagtgtcaaagcaagtggtatgggcaatgcaccaggattaagaaaaacagtg

SEQ ID NO: 32237 - DNA, 120 bp, synthetic construct; identical to SEQ ID NO: 9507
  source 1..120: mol_type = other DNA

SEQ ID NO: 32238 - DNA, 120 bp, synthetic construct
  source 1..120: mol_type = other DNA
tgaaatccggtcacttggaggatgtatatgttccatcaggggccggaaatgttttatccaagctttagggaataaccctggagattctcttcgttactctactgttaagtacgtgcttac

SEQ ID NO: 32239 - DNA, 120 bp, synthetic construct
  source 1..120: mol_type = other DNA
aagactgcttgacttgggttctaatccttgcttcaccacctagctgtgtgactttaaacatcactgtttttcctcctgccttccttctgtaacttaagggggttggattattagagttct

SEQ ID NO: 32240 - DNA, 120 bp, synthetic construct; identical to SEQ ID NO: 9508
  source 1..120: mol_type = other DNA

SEQ ID NO: 32241 - DNA, 120 bp, synthetic construct
  source 1..120: mol_type = other DNA
ctttattttttattgttaggggtgatcttagcagcccaagtatgctaagtcttagaaatattcatcagtgatgtttttccctgaagctcgtttggtgactgctaaactagaaccagaatt

SEQ ID NO: 32242 - DNA, 120 bp, synthetic construct
  source 1..120: mol_type = other DNA
aaaggcaaggtggttggatgaaagcaacacttccaagccttttccagcttaacgaacataagtctaggttttggggagagcctatcttagtgagagtgaacaaataaagtaggctgtatc

SEQ ID NO: 32243 - DNA, 120 bp, synthetic construct
  source 1..120: mol_type = other DNA
cctccacctcctgggttcaagtgattctccggcctcagcctcccgactaactgggattataggcgcccaccagcacgcccagctaatttttgtagttttagtagagacagagctttacca

SEQ ID NO: 32244 - DNA, 120 bp, synthetic construct
  source 1..120: mol_type = other DNA
ataatagtagcttgaagcaagtctagagacgagccagctggaggacagggccagcaggaaggaggtatgcaaggaaaaacctgcaatgaatggacctactgtgtttgagggtactgagag

SEQ ID NO: 32245 - DNA, 120 bp, synthetic construct; identical to SEQ ID NO: 9509
  source 1..120: mol_type = other DNA

SEQ ID NO: 32246 - DNA, 120 bp, synthetic construct
  source 1..120: mol_type = other DNA
gagacggagtctcgctctgtcgcccaggctggagtgcagtggcgggatctcggctcactgcaagctccgcctcccgggttcacgccattctcctgcctcagcctcccaagtagctggcac

SEQ ID NO: 32247 - DNA, 120 bp, synthetic construct
  source 1..120: mol_type = other DNA
caaagtgctgggattacaggcgtgagctactacacccagccaattgtaaattttattcatttaaacaccaacaagtgatttaagaacaataataaaataactgtagctggtatgatggct

SEQ ID NO: 32248 - DNA, 120 bp, synthetic construct
  source 1..120: mol_type = other DNA
aaaaaaaaaataactgggcatggtggtagtcccagctacttgggaggctgaggtggggaggtttgcttgagcccaagagttaaggctacagtgagctgtgatcactgcactccagcctgg

SEQ ID NO: 32249 - DNA, 120 bp, synthetic construct; identical to SEQ ID NO: 9510
  source 1..120: mol_type = other DNA

SEQ ID NO: 32250 - DNA, 120 bp, synthetic construct
  source 1..120: mol_type = other DNA
atatttaaacagtgacattcactttgcacattgacaccttaagataaatccaatgcaatgtcatactcttaccccaaataagttgcattgtaatgtaaggtcattctcttggggagaatc

SEQ ID NO: 32251 - DNA, 120 bp, synthetic construct
  source 1..120: mol_type = other DNA
cacaaagtacttcaagcaccctttaaattgtgattaaagataatttgttgtttagaaatatatatacctaggtctggggaggaatagaagggaaatggagagtgactgttaaggtttctt

SEQ ID NO: 32252 - DNA, 120 bp, synthetic construct
  source 1..120: mol_type = other DNA
cagtaaagctgtttaaaaaatagtagcataaataagatgtaataatagccaacatttgttgggagccaatagcctgagtgaccagctcagcattcttgataaccacccccttctccctat

SEQ ID NO: 32253 - DNA, 120 bp, synthetic construct
  source 1..120: mol_type = other DNA
tcatcctcctttgttcagtccagcatggtctgtggcaaacattcaacaatctctaaggtagataatattatcccattttataaatgaaacgggcctagaggagctaaatgactttcttaa

SEQ ID NO: 32254 - DNA, 120 bp, synthetic construct; identical to SEQ ID NO: 9511
  source 1..120: mol_type = other DNA

SEQ ID NO: 32255 - DNA, 120 bp, synthetic construct
  source 1..120: mol_type = other DNA
atgcttatcccacctttaaagaaacaaaagtacacagcttccacttgcatcttccatgggagaactgagtcacacatctatgctgttggagcctaggaaatggagtcttcactcccaaaa

SEQ ID NO: 32256 - DNA, 120 bp, synthetic construct; identical to SEQ ID NO: 2386
  source 1..120: mol_type = other DNA

SEQ ID NO: 32257 - DNA, 120 bp, synthetic construct
  source 1..120: mol_type = other DNA
atgtgaattatcaacacccttgagcatggctggaacgaatcgcccctcccgaggacagacaggtagagccagagtgcagggcagtctcccagctcgctggaggcagagctggcctggagc

SEQ ID NO: 32258 - DNA, 120 bp, synthetic construct
  source 1..120: mol_type = other DNA
ttatgtatgcagaaattgtttctctcctcccctcctcttggggttgattaacttagctggaagtaatgaacctgaactgattttttgagcaccagatctaagtggtaattactgagttgg

SEQ ID NO: 32259 - DNA, 120 bp, synthetic construct
  source 1..120: mol_type = other DNA
aggagagagccctttcttttttttctaggagttgtgtcatatttctaaagggcagcactgtaagtactctgctcccttcagggaagaaattgtgcttccaggacccctcactgagagcaa

SEQ ID NO: 32260 - DNA, 120 bp, synthetic construct; identical to SEQ ID NO: 9513
  source 1..120: mol_type = other DNA

SEQ ID NO: 32261 - DNA, 120 bp, synthetic construct
  source 1..120: mol_type = other DNA
ttctgtggtcaccagaggtttcaggtgatggttcagagagggcaccgtttcccgggaggcttggggacttggcaattcatgggctttatattctcttgtatatcccacctgggccctgga

SEQ ID NO: 32262 - DNA, 120 bp, synthetic construct
  source 1..120: mol_type = other DNA
gctgagttctgtgacagcaccctcaccacttcaaatatgctgacatcggttcttcaggcctgggccactcactgagcaatttgatcttccatttatgcctctgcccagctgcgtcctgat

SEQ ID NO: 32263 - DNA, 120 bp, synthetic construct; identical to SEQ ID NO: 9514
  source 1..120: mol_type = other DNA

SEQ ID NO: 32264 - DNA, 120 bp, synthetic construct
  source 1..120: mol_type = other DNA
cttccacaaactcaaatctgctttgacagtgaggagatacctgatgtcttgtttgttccccagtccctccctgtctttgctggttgctgctgctaccaatcacatggcccgttgtcctgc

SEQ ID NO: 32265 - DNA, 120 bp, synthetic construct
  source 1..120: mol_type = other DNA
ccacctctacctcttctcatctttgtgtaccctacccagccatcccggggagcctatcagcagtgggaaagaatgagatcaacatagacgaactattccatgttgatggggaaaggggca

SEQ ID NO: 32266 - DNA, 120 bp, synthetic construct
  source 1..120: mol_type = other DNA
gttcctttttggcttaagctgctctcttattctcctacaccaactgggtatccaacaatgcaacccaatcctgacaataactatccggacggcataggttaagggcttggtcccacaaga

SEQ ID NO: 32267 - DNA, 120 bp, synthetic construct; identical to SEQ ID NO: 9515
  source 1..120: mol_type = other DNA

SEQ ID NO: 32268 - DNA, 120 bp, synthetic construct
  source 1..120: mol_type = other DNA
ccattaagtaggcatgattgatgaaatcactggccattagtgattgaactcacactccagactaggtgtggtggctcccatgtgtaatcccagaactttgggaggctaaggcaggaggat

SEQ ID NO: 32269 - DNA, 120 bp, synthetic construct
  source 1..120: mol_type = other DNA
gcggaggtgggaggagccaaggaggttgttctctcttgagattggagggtggggctgaaaattccaaccctctacacacagggttagttctggctaccaaaccctgtcttgaagctatct

SEQ ID NO: 32270 - DNA, 120 bp, synthetic construct
  source 1..120: mol_type = other DNA
agacaaacaccaaacaaattttatataccagaaatgctataagtgcagtttctgttgcctgtgaccaaagggtccctggatggttcaggcactgatggagccagaatgaaaacccatgac

SEQ ID NO: 32271 - DNA, 120 bp, synthetic construct; identical to SEQ ID NO: 9516
  source 1..120: mol_type = other DNA

SEQ ID NO: 32272 - DNA, 120 bp, synthetic construct
  source 1..120: mol_type = other DNA
tacctatctactaataatcagaactcttttgctttcaggtgagagaaatgcaacccataccaccttctaccctaagaaccatctgaggttaggggtgctgatcccaggcccagctgggtt

SEQ ID NO: 32273 - DNA, 120 bp, synthetic construct
  source 1..120: mol_type = other DNA
tcagatccttacagtatcttctttttcttttcttttttttttttgagatggagtctcacactgtcacctgggctggagtgcagtggcacgatctcggctcactgcaacctccgcctcctg

SEQ ID NO: 32274 - DNA, 120 bp, synthetic construct
  source 1..120: mol_type = other DNA
agagtgcagtggtgcgatcttggctcactgcaacttctgcctcccgggttcaaataattctcctgcctcagcctcctgagtagctgggattacaggcgcctgccaccatgcctggctaat

SEQ ID NO: 32275 - DNA, 120 bp, synthetic construct; identical to SEQ ID NO: 9517
  source 1..120: mol_type = other DNA

SEQ ID NO: 32276 - DNA, 120 bp, synthetic construct; identical to SEQ ID NO: 2391
  source 1..120: mol_type = other DNA

SEQ ID NO: 32277 - DNA, 120 bp, synthetic construct
  source 1..120: mol_type = other DNA
tggctccccttgtgtagtctgccttactatccataacaagtgtcatgaataattttttctttaacaatacccccctccaggctgggcacggtggctcacacctgtaatcccagaactttg

SEQ ID NO: 32278 - DNA, 120 bp, synthetic construct
  source 1..120: mol_type = other DNA
ccagctactcgggaggctgaggtaggaggatcacctgagcccagaaatttgaggctgcagtgagctgtgatcatgccactgaactccagcctgggtgacaagagtgagaccctgtcccaa

SEQ ID NO: 32279 - DNA, 120 bp, synthetic construct; identical to SEQ ID NO: 9518
  source 1..120: mol_type = other DNA

SEQ ID NO: 32280 - DNA, 120 bp, synthetic construct
  source 1..120: mol_type = other DNA
tatgagccaccacactcagccatctgcacatttctttataggagacttgtgaggattctaggagagaaggcatgaggaaagctgagtacagtgtccagctcccagcaaatcctcaaccaa

SEQ ID NO: 32281 - DNA, 120 bp, synthetic construct
  source 1..120: mol_type = other DNA
tgcactccagcctgcaagctgctacatgccagggtgtgtgtggtttgtctgctcagaggggtgccttgttctacttcatgctaaggcactgcaggagctctcaatggtcctgggaaaaag

SEQ ID NO: 32282 - DNA, 120 bp, synthetic construct
  source 1..120: mol_type = other DNA
atggtgtagtgaaatgagaaaggttttggaaaatcatttccaaggccccagaagctgctgagcctggatggctttctaagtgggaactgaaactggcccagttgtcctatagaactgatg

SEQ ID NO: 32283 - DNA, 120 bp, synthetic construct; identical to SEQ ID NO: 9519
  source 1..120: mol_type = other DNA

SEQ ID NO: 32284 - DNA, 120 bp, synthetic construct
  source 1..120: mol_type = other DNA
ccatctccttggctgcagcacccaaataaagccttcttccctagcaatgttccttgtctcagagatcagctttctgtgcggtgagcagcaggacctagactgaagccctggtgtttcggc

SEQ ID NO: 32285 - DNA, 120 bp, synthetic construct
  source 1..120: mol_type = other DNA
tgaggacggcaaacatctctcagaagggaactaaaatctattgcacacttggtttgtggtctacactctgcatggatgatctaatttcatctgtacacaaccggtaatgctcacagacaa

SEQ ID NO: 32286 - DNA, 120 bp, synthetic construct
  source 1..120: mol_type = other DNA
tgcctcctcacctcctgggagtggctcacagaacagtcacgatcactgtcactctggcactcagacaagctggttgtgtaggcaaggtgtgtgaagtcctcacagccaagtaagataata

SEQ ID NO: 32287 - DNA, 120 bp, synthetic construct; identical to SEQ ID NO: 9520
  source 1..120: mol_type = other DNA

SEQ ID NO: 32288 - DNA, 120 bp, synthetic construct
  source 1..120: mol_type = other DNA
ggctaatttttgtatttttagtagagatggggtttcaccgtgttagccaggctggtctcaaactcctgacctcaggcaatccacctgcctcaacctcccaaagtgctggaattacaggca

SEQ ID NO: 32289 - DNA, 120 bp, synthetic construct
  source 1..120: mol_type = other DNA
gttcgtgtgattctcctgcctcagcctcctgaatagctgggcctacaggcatgtgccaccatgcctgtctaatttttgtatttttcgtagagacggggttttgccatgttggccaggctg

SEQ ID NO: 32290 - DNA, 120 bp, synthetic construct
  source 1..120: mol_type = other DNA
aaactcacacacttgagaagtggcagagttgggtcttctgtctctaaatctaccacaccaaacaactcaactggcagcattttctcagcaacatctttgcaggaaccttgtggtcaattc

SEQ ID NO: 32291 - DNA, 120 bp, synthetic construct
  source 1..120: mol_type = other DNA
ctgtggcaacaaaaggtgtgagatttttgtctttcatcagctacaaactacactgttggtcaggcacttttactgggagatgtttttcccccgattcttcctggggtgacttgaaatgtg

SEQ ID NO: 32292 - DNA, 120 bp, synthetic construct; identical to SEQ ID NO: 9521
  source 1..120: mol_type = other DNA

SEQ ID NO: 32293 - DNA, 120 bp, synthetic construct
  source 1..120: mol_type = other DNA
ttgagtcaccttcctgtgtaaaaggaaacaaacattctgatggtcttcatcagggaaagagaaatgttttatcaaataaagtgtaatcctggcagttggcttcaactgaggcttgaagag

SEQ ID NO: 32294 - DNA, 120 bp, synthetic construct
  source 1..120: mol_type = other DNA
tcttttatgacacttttcactttttgccaagttatttataccatagcctttatagttaatttttgcttctagattatatatttccacttctgtggacaacttgcagcagtttgtgcatag

SEQ ID NO: 32295 - DNA, 120 bp, synthetic construct
  source 1..120: mol_type = other DNA
atggatgggtggatggatgtatggatggatggatggatggatggatggatggatggatggatggataaatggatggatggatggatggatgagtggatggatggatggatgagtggatgg

SEQ ID NO: 32296 - DNA, 120 bp, synthetic construct; identical to SEQ ID NO: 9522
  source 1..120: mol_type = other DNA

SEQ ID NO: 32297 - DNA, 120 bp, synthetic construct
  source 1..120: mol_type = other DNA
aagaactaccagactcttaaagtcagcctagcaccaagtagacactaaaacattgatttttgtgatgttgtttcccagaaacattgagtcagaaagcatgtggatgcagattaaagtgga

SEQ ID NO: 32298 - DNA, 120 bp, synthetic construct
  source 1..120: mol_type = other DNA
gtttgaggacagttgtggttgaacccccagcaaaactattccaaaacgccgtgtgctggggcaggtggggcctaggccaaggccatttggccctgcctgctgtggcccttctcccctccc

SEQ ID NO: 32299 - DNA, 120 bp, synthetic construct
  source 1..120: mol_type = other DNA
gaaggggagagaagaggcctcactgtgggagctgggggctcccaggagccacatttgccaggcttggcttcaagctgacatcactatcagagaagacaggtctggggaatgagagggccc

SEQ ID NO: 32300 - DNA, 120 bp, synthetic construct; identical to SEQ ID NO: 9523
  source 1..120: mol_type = other DNA

SEQ ID NO: 32301 - DNA, 120 bp, synthetic construct
  source 1..120: mol_type = other DNA
caagagttccgttaccagtcatttgcattgtagtataagtggaaaccacagaatcgccttcctccccagttatttatacttcaagtcatattgtagagagaaaatttctgtcagcaaaaa

SEQ ID NO: 32302 - DNA, 120 bp, synthetic construct
  source 1..120: mol_type = other DNA
tctcaggaatcctcctcatttctatttgtatggctttcaatcgttgacatgattttttcacatatgtcatcttctggggatggattcgtataaccctgcttcacttgcttccctgtggga

SEQ ID NO: 32303 - DNA, 120 bp, synthetic construct
  source 1..120: mol_type = other DNA
agggctgagattgccccttcccatccaccagggagttgacaagggggagaagaaacttcttgtgagcttgcgatgacttgtggcacttgcatcagaccttggagttccctggggagaggc

SEQ ID NO: 32304 - DNA, 120 bp, synthetic construct; identical to SEQ ID NO: 9524
  source 1..120: mol_type = other DNA

SEQ ID NO: 32305 - DNA, 120 bp, synthetic construct
  source 1..120: mol_type = other DNA
aggttgggtctttgggtctgggaactttggtgcttgttctggtgggaagggcagggagtcaagaccagctgtgtcttccactgctcttcttgtccactttggttactggcctctgttggc

SEQ ID NO: 32306 - DNA, 120 bp, synthetic construct
  source 1..120: mol_type = other DNA
ggccctcagcctgagcctccgaaataatctctaagcccttagaataccctgctttgtattcaaagagtatctttgaatgctgaacttagaaccactctagaaaatgtatgctaacaatgc

SEQ ID NO: 32307 - DNA, 120 bp, synthetic construct; identical to SEQ ID NO: 9525
  source 1..120: mol_type = other DNA

SEQ ID NO: 32308 - DNA, 120 bp, synthetic construct
  source 1..120: mol_type = other DNA
ctcctggattctgctctgtacgcctttttcccttgttaattttaatctgtattctttcactgtagtaatctacaactataagcagaatagcttttctgagttctgtgagtctttctagtg

SEQ ID NO: 32309 - DNA, 120 bp, synthetic construct
  source 1..120: mol_type = other DNA
gtggagagtgggttagtttaaaaatgaaactggggagagagatgaagccgggggaagatgccgtgaaatctcaccttataggcagcctctgattcacctgagggtttttccttgaatact

SEQ ID NO: 32310 - DNA, 120 bp, synthetic construct
  source 1..120: mol_type = other DNA
gggagtaaagggatttaaaactttgaaaaactgagctgtttccatgatttgtctcttttgattctcacaaaacctttatgaaatatgtgctgacattttaagctctcacttatagtgaga

SEQ ID NO: 32311 - DNA, 120 bp, synthetic construct; identical to SEQ ID NO: 9526
  source 1..120: mol_type = other DNA

SEQ ID NO: 32312 - DNA, 120 bp, synthetic construct
  source 1..120: mol_type = other DNA
ccttgaagtcggtaatggagaggacatgttagaagagaaggaacttacaagcagtgggagtgcagcgcccttttgtggataggggtcaaggcaatgctttccaaggctatgacttggtgt

SEQ ID NO: 32313 - DNA, 120 bp, synthetic construct
  source 1..120: mol_type = other DNA
gagatgccagtggagcttggcttgctccttctgtggccagctggcttgttttaccactgcctttggggtacagtggcagctgtggcaaatctctctggagtttctctagcgggagcgaag

SEQ ID NO: 32314 - DNA, 120 bp, synthetic construct
  source 1..120: mol_type = other DNA
gagagggccttaatgccttcagggaaaggagtcaaagaggaatacccaggagacaactagactttagaattcttggggccagaaacttgattccacctctagtgctttcttttagatttc

SEQ ID NO: 32315 - DNA, 120 bp, synthetic construct
  source 1..120: mol_type = other DNA
ctccctctctctctctctctcctttctctctctctcttcttaagactgggtctcgcagttgggcacagtggctcatacctgtaatcccagcactttaggaggctgaggtgggtacatcac

SEQ ID NO: 32316 - DNA, 120 bp, synthetic construct; identical to SEQ ID NO: 9527
  source 1..120: mol_type = other DNA

SEQ ID NO: 32317 - DNA, 120 bp, synthetic construct
  source 1..120: mol_type = other DNA
gtacctgggaccacaggcatgtgccaccatgcctggctaatttttaaattttttgtagagatgaggtcttgatacgttgtccaggctggtcttgaactcctgggcccaagcagtcctccc

SEQ ID NO: 32318 - DNA, 120 bp, synthetic construct
  source 1..120: mol_type = other DNA
tttcctttttattgttttgattttttagccaatgagaaggaaaattccttattagggagggcgagggtgaggatatgtggggtggggagaagcgaacgttccaagtttcgaaaacagcga

SEQ ID NO: 32319 - DNA, 120 bp, synthetic construct; identical to SEQ ID NO: 9528
  source 1..120: mol_type = other DNA

SEQ ID NO: 32320 - DNA, 120 bp, synthetic construct
  source 1..120: mol_type = other DNA
tatgttcagcctccatcctctgaaggcaaaagttagcaaagttgatgtatggcgttgctttttctgggaactttatctcgtttggtggggttcccatctctgtctcccaggagccaagac

SEQ ID NO: 32321 - DNA, 120 bp, synthetic construct
  source 1..120: mol_type = other DNA
tgaacttttctgtgaaagttactgtcactgtgaaaggcagttcagcccccagggattgaaaaaggaaatcattttgggtaaggggacagttagtccagattttttcagttgcaagtaaac

SEQ ID NO: 32322 - DNA, 120 bp, synthetic construct
  source 1..120: mol_type = other DNA
ggctcaggaccaggcagatgccctgcctctgcttcccttggcacagtggcctccttctcccttcaagtaggcagatgctgcctgtggcagaggacagcagctgattggcagcccagcagg

SEQ ID NO: 32323 - DNA, 120 bp, synthetic construct; identical to SEQ ID NO: 9529
  source 1..120: mol_type = other DNA

SEQ ID NO: 32324 - DNA, 120 bp, synthetic construct
  source 1..120: mol_type = other DNA
caaactagagctcaaccctagagtctcttcaggcttcccaggggtgggggtgcatttaacagtccaagttaaagagaaaataaaggccattaaagaccaaacattgagcactgagtgaaa

SEQ ID NO: 32325 - DNA, 120 bp, synthetic construct
  source 1..120: mol_type = other DNA
ggggtaggtctttgaaaaccaacagattgcaaattctctgtcccatagcaggaaaccacagtctctgatgtcagctggctgccaacacgtcagttgtatcagcattagctggctggaggt

SEQ ID NO: 32326 - DNA, 120 bp, synthetic construct
  source 1..120: mol_type = other DNA
cagtcaggtcatcagtgtcagagagctaggtggccaggttggagttgattgccaatgataggtctttttctgcttaaatcagctggactggattctattgcattaacttgaccctgactc

SEQ ID NO: 32327 - DNA, 120 bp, synthetic construct
  source 1..120: mol_type = other DNA
atcaatggctgtttctctgagaatgcggaaccgtgattaatccagccttgatggggaggcagcaggaactgtaggcattctcacttcacacccatcccaatcccctcccccttgctgtcc

SEQ ID NO: 32328 - DNA, 120 bp, synthetic construct; identical to SEQ ID NO: 9530
  source 1..120: mol_type = other DNA

SEQ ID NO: 32329 - DNA, 120 bp, synthetic construct
  source 1..120: mol_type = other DNA
tattccttaaaactacccttcaatgggttttctgttcattacagttgaatgctttcataactgatacaggagggaccctgtgattggcagttccactagactgcatggagatgggtggag

SEQ ID NO: 32330 - DNA, 120 bp, synthetic construct
  source 1..120: mol_type = other DNA
ccgcacgtatttggtcagctatgaatatgaccaactctcgtcgtttatctctattcagtggaacacagcagcactgtgacctgcccacgagaagaaggatttttagaacttatcttaggg

SEQ ID NO: 32331 - DNA, 120 bp, synthetic construct
  source 1..120: mol_type = other DNA
cccagaataaatgaagaatagcttattctttgccaggttgaagatagaaaaggaatgaagggccggagaagtacagctgggtgaagcacagagcagcctagtgcttggcatgggactcag

SEQ ID NO: 32332 - DNA, 120 bp, synthetic construct; identical to SEQ ID NO: 9531
  source 1..120: mol_type = other DNA

SEQ ID NO: 32333 - DNA, 120 bp, synthetic construct
  source 1..120: mol_type = other DNA
ttcccctgctgccagagcatggcagagtaaatgtgtgagttgaagggagcaacctcatgaggttttgctttgtgtcttaattacagccatttgtggaattaggcttttaatataaatatt

SEQ ID NO: 32334 - DNA, 120 bp, synthetic construct
  source 1..120: mol_type = other DNA
agaaccccagcatctgtggtgtctgtggtgggaggggcttccatattacagagagatgcccacagtgcatgacgttacccgcacaggtgtgacatcacagggtaaccaaatgcttttgcc

SEQ ID NO: 32335 - DNA, 120 bp, synthetic construct; identical to SEQ ID NO: 9532
  source 1..120: mol_type = other DNA

SEQ ID NO: 32336 - DNA, 120 bp, synthetic construct
  source 1..120: mol_type = other DNA
tggcttgtggctgcctattggactgtgcagttctggagaatggtactttacttgtccttggggaagcagaaacaaatgaaaacgaggatctggagctcatgaagtttctcatggggtggg

SEQ ID NO: 32337 - DNA, 120 bp, synthetic construct
  source 1..120: mol_type = other DNA
attgaacaaactgtctaagctgggtcaggtactctgcagatgtttgctgagtatcgttcttgatggaaatccccgtggaactcctacattttctcctctcttctccttcctttcagaacc

SEQ ID NO: 32338 - DNA, 120 bp, synthetic construct
  source 1..120: mol_type = other DNA
tctcatgacctggtgtctgttgccttctggttaagtttttcatttgtaattctacaaacatcccttctgtaaacatttccctcaaaatggagcaggaagctctcaaaaatggaccagaaa

SEQ ID NO: 32339 - DNA, 120 bp, synthetic construct; identical to SEQ ID NO: 9533
  source 1..120: mol_type = other DNA

SEQ ID NO: 32340 - DNA, 120 bp, synthetic construct
  source 1..120: mol_type = other DNA
tctaaatcaatccactatcaacaggtagctatcatactaccctcattgtcacccctcagaggtcccactgcagctgcataatgtcccctcagtggcctgaacatgagatgaacaacactc

SEQ ID NO: 32341 - DNA, 120 bp, synthetic construct
  source 1..120: mol_type = other DNA
tagaagtgtctgatactacatagattatgcttgcactcactcttaagagagagacatgaacttttaccaacggaagccagtattattttgaacctctgttagagtggcttgaatctgtat

SEQ ID NO: 32342 - DNA, 120 bp, synthetic construct
  source 1..120: mol_type = other DNA
gctgcttctgccaaggtcactgatatttccctttgctaaatcttgtgggtgttttcttcagtccttgtcttaatcactcagtggcacttggcacttattccttcttgaaacccttgtttc

SEQ ID NO: 32343 - DNA, 120 bp, synthetic construct; identical to SEQ ID NO: 9534
  source 1..120: mol_type = other DNA

SEQ ID NO: 32344 - DNA, 120 bp, synthetic construct
  source 1..120: mol_type = other DNA
cctggctgcttagcctgagacctggctccgtcccaattcctctctctcagtcttatcatccccatccaggcaaatcattgattctgtggacctactctttcgggtgtccctcaaatctct

SEQ ID NO: 32345 - DNA, 120 bp, synthetic construct
  source 1..120: mol_type = other DNA
cttgccagtgtcctcaggattaggcgaaaagtctttgctttgttttacaaggcccttcgctatctggccccctcattacctcccttgctctgcatgctccagtcctgcagaactacacac

SEQ ID NO: 32346 - DNA, 120 bp, synthetic construct
  source 1..120: mol_type = other DNA
gagagccttctctgcctacccaggctgggtggctgcctctctttggtgtgcccatggcagcccagaatgcctggtggacagggagccctcagcaggccgtactgcagcgccctgcccccg

SEQ ID NO: 32347 - DNA, 120 bp, synthetic construct; identical to SEQ ID NO: 9535
  source 1..120: mol_type = other DNA

SEQ ID NO: 32348 - DNA, 120 bp, synthetic construct
  source 1..120: mol_type = other DNA
ctcaggcgatcctcccacctcagccccctgagtctcttggactccaggcgtgcaccaccatgactggctaattttttgtatttttagtaaagacagggtttcgacatgttgcctaggctg

SEQ ID NO: 32349 - DNA, 120 bp, synthetic construct
  source 1..120: mol_type = other DNA
cagctaaaagttcctttttaaaatctgcttgttagatacactcatagaaaggtaactggccacagaagggagaggaatggcagtccatccagggatcactggagtgtcatatgaaatgtt

SEQ ID NO: 32350 - DNA, 120 bp, synthetic construct
  source 1..120: mol_type = other DNA
cagtccatccagggatcactggagtgtcatatgaaatgttataggaatcacaggccttagaacttgaaaggaacccaaggatcatctaggctactttatgcaggtaaaacagccacctgt

SEQ ID NO: 32351 - DNA, 120 bp, synthetic construct
  source 1..120: mol_type = other DNA
aggaaggcctctttccagaaacactgtaagccagtgtttctcagattgctgggtgtaattcataggcagatcatgaaatcagtttaatagctttgaccagcattaacctatttatgccta

SEQ ID NO: 32352 - DNA, 120 bp, synthetic construct; identical to SEQ ID NO: 9536
  source 1..120: mol_type = other DNA

SEQ ID NO: 32353 - DNA, 120 bp, synthetic construct
  source 1..120: mol_type = other DNA
ttctagggaaaattgaaggaaaagaaggagggggatgtggaggggagagaaggcctcagtagagtttgcactattattagggcaagtaagctgcttctgaaaagaaggggtttgcaaagc

SEQ ID NO: 32354 - DNA, 120 bp, synthetic construct
  source 1..120: mol_type = other DNA
ggcagcctggtcccatatcctcatgaaatgcctcttataattgtgacatcttgcaattgtggaggactttacacttttcggagttcctagcccctcacttatttctcgtaagaccgctgg

SEQ ID NO: 32355 - DNA, 120 bp, synthetic construct
  source 1..120: mol_type = other DNA
tttctacaccaccataatgtgagtgttctgtgtttacagggtgtattcaagtccatgactgcccattagaatccccccaaaaaattccaggactggcctgagttgctccttagaccaatg

SEQ ID NO: 32356 - DNA, 120 bp, synthetic construct
  source 1..120: mol_type = other DNA
caagctgcccaggaggtcccttggtgccctgggctctgtttcactgttgttttgtagagcaacttcccagtgatgctgccactgggccccatcctaacagtgaagtcccccgggccctcc

SEQ ID NO: 32357 - DNA, 120 bp, synthetic construct; identical to SEQ ID NO: 9537
  source 1..120: mol_type = other DNA

SEQ ID NO: 32358 - DNA, 120 bp, synthetic construct
  source 1..120: mol_type = other DNA
ctgaaagtgccagagctgcttcaggggcaagagtccaggccccaagtccatgctgatgagcccaccctgggggtcaggaatggcctcagcaggccctccctccctccctctccaccctac

SEQ ID NO: 32359 - DNA, 120 bp, synthetic construct
  source 1..120: mol_type = other DNA
tttccagacagtgtgtatgtggaattgtgctttttgttttttaagaatgtaaaaagttacagtaagatcgaaccacagggcccgtcgctcctatggtctctgcctgactgggctgccgtc

SEQ ID NO: 32360 - DNA, 120 bp, synthetic construct; identical to SEQ ID NO: 9538
  source 1..120: mol_type = other DNA

SEQ ID NO: 32361 - DNA, 120 bp, synthetic construct
  source 1..120: mol_type = other DNA
tgtatatatatatacatatatgcatgatgctgtgcaaatgcccagggctgtctggcattttccacaaaatgagagcctgagattgcctaagccttctgatgccttctccaggcctggagg

SEQ ID NO: 32362 - DNA, 120 bp, synthetic construct
  source 1..120: mol_type = other DNA
ttcattcaaactttaagggagccccacagcaccggcatgatgggtaagtccaggcctaaggttaggaagcaaatcctggagcatgaggaaattgtaggctacagtgagctaccagtggtg

SEQ ID NO: 32363 - DNA, 120 bp, synthetic construct
  source 1..120: mol_type = other DNA
tgttcctgaaatgatgggagaaccacatccctgcttcagggaagcagtccctgtcgtctggggcgctgagccctttggcctgagatgaaggatgatggtgtgatgtatcatggcagtgtg

SEQ ID NO: 32364 - DNA, 120 bp, synthetic construct; identical to SEQ ID NO: 9539
  source 1..120: mol_type = other DNA

SEQ ID NO: 32365 - DNA, 120 bp, synthetic construct
  source 1..120: mol_type = other DNA
catggagaccacgattctgtgtagtcctgcacgctgggcgggggattgcctggaggtttctttagacctgtctagctcacacagtcttgatgcctgggttttaggctgctgtactgttgc

SEQ ID NO: 32366 - DNA, 120 bp, synthetic construct
  source 1..120: mol_type = other DNA
tttcctgttgcctaggtaacacctctaattggatgccttttaatcgttcccttttttaaagggataaatgtggattttatttccaggtcctgtcagagggccctgccctagagaacacgt

SEQ ID NO: 32367 - DNA, 120 bp, synthetic construct
  source 1..120: mol_type = other DNA
ccttcaggatttagcaagactgacgtctctcctggccagcgctgcttcactggcttcaccccagattagggcctgtgtttaaaaaccaatcccaactcaaatcagaaattacccaaaata

SEQ ID NO: 32368 - DNA, 120 bp, synthetic construct; identical to SEQ ID NO: 9540
  source 1..120: mol_type = other DNA

SEQ ID NO: 32369 - DNA, 120 bp, synthetic construct
  source 1..120: mol_type = other DNA
ggtgcttttctaagacttcctatcagaagctgtgcatactggtgggtcacgccgtgcctgtataaactctggcacctgtccttgccctcatcatatatgagaaaaatgggcagagagagt

SEQ ID NO: 32370 - DNA, 120 bp, synthetic construct
  source 1..120: mol_type = other DNA
agagcaaaactgtaatcctaacattacttccatccaccagtttcaccagctacctccctcctgccttcctctgcctccaataggctgtgcatggagaagacaaatcctcttgataaacaa

SEQ ID NO: 32371 - DNA, 120 bp, synthetic construct
  source 1..120: mol_type = other DNA
tatttagaaagggattctatctttcctgaccccaaacacatcatggcctctggagccaaataccctgacatttgcaagatggcttcttttgggttcctggtgctgcaggccctggttccc

SEQ ID NO: 32372 - DNA, 120 bp, synthetic construct; identical to SEQ ID NO: 9541
  source 1..120: mol_type = other DNA

SEQ ID NO: 32373 - DNA, 120 bp, synthetic construct
  source 1..120: mol_type = other DNA
tgtgctctgtgctaaatggactaactctgagctgagaaaggccagctaagcccctcaccactgcaatttccaaatctgggggaaatgccacagtccgcaagttggtgctatgtttcatct

SEQ ID NO: 32374 - DNA, 120 bp, synthetic construct
  source 1..120: mol_type = other DNA
aacccccacctgtcaaaactgtgactatatcacttctgacgaccagaaggaagctgctaggctgggccaggattctaaatgctgaggaggtaattcagagccacgaaaagttgcaccata

SEQ ID NO: 32375 - DNA, 120 bp, synthetic construct
  source 1..120: mol_type = other DNA
aaggagaatctgctgggggccacggttctccaagaggggactcacaaggaacacaggcgtccccaaaacctgcccttgataacatcaggcctggccaaatagtatttctttaaaaaaatt

SEQ ID NO: 32376 - DNA, 120 bp, synthetic construct; identical to SEQ ID NO: 9542
  source 1..120: mol_type = other DNA

SEQ ID NO: 32377 - DNA, 120 bp, synthetic construct
  source 1..120: mol_type = other DNA
gtcggcaccgagcgcggccaggcggcggcgcagccgggagcctggggtgatggcattgcgccgggccaggggcgcgccaggagccgggcagcagcgcgcgcagcagcggcagctcagctt

SEQ ID NO: 32378 - DNA, 120 bp, synthetic construct
  source 1..120: mol_type = other DNA
ccggtaggcggcgtgctggctgctcaccaggtccccgaagccgatggtgctgaaggtgacgaagcagaagtagagcgagtccacgtagtcccagccctccacgctggtgtacatggccga

SEQ ID NO: 32379 - DNA, 120 bp, synthetic construct
  source 1..120: mol_type = other DNA
gggcagcaggccgctgcggcgcagctggcgctcccggcaggcgcgcatgatgaaggccagcagcgagatgatgcgctccaggaagaggttgaagaacaggatggtcccagcgcagccgaa

SEQ ID NO: 32380 - DNA, 120 bp, synthetic construct
  source 1..120: mol_type = other DNA
gagggtggggggtgtgggggcgggggcatgcaggtgcttgcgcggctcctatctcgagtggcaccactcaggtggaggaagaacagcacttagtcatttatctcccttggtggcacttaa

SEQ ID NO: 32381 - DNA, 120 bp, synthetic construct; identical to SEQ ID NO: 9543
  source 1..120: mol_type = other DNA

SEQ ID NO: 32382 - DNA, 120 bp, synthetic construct
  source 1..120: mol_type = other DNA
gcactttttataccagtcttgttacttggaaactccactgcctacttgagaatggtgaaaaaagccaagtaatcttagtgctgtgactaattttcactttacaggcacttcgaaaaggcc

SEQ ID NO: 32383 - DNA, 120 bp, synthetic construct
  source 1..120: mol_type = other DNA
cctacttgagaatggtgaaaaaagccaagtaatcttagtgctgtgactaattttcactttacaggcacttcgaaaaggcctttggtcaaacgatcatattttcttttttggggggatagg

SEQ ID NO: 32384 - DNA, 120 bp, synthetic construct
  source 1..120: mol_type = other DNA
accatgtccagtgaattctttgttattttttctaatggcagagaaaggaccatattttcttagtctgccaacatttcatgcctctggaattgggcctaaggccaagtgggtagtccgtca

SEQ ID NO: 32385 - DNA, 120 bp, synthetic construct
  source 1..120: mol_type = other DNA
ttacatactagaatagcagacttttctgttcaaagggcagtttttaaagagttgtcatatgtgcccaattttttttcccaagtgtgccatagattttcggtccctccctgttattaaaaa

SEQ ID NO: 32386 - DNA, 120 bp, synthetic construct; identical to SEQ ID NO: 9544
  source 1..120: mol_type = other DNA

SEQ ID NO: 32387 - DNA, 120 bp, synthetic construct
  source 1..120: mol_type = other DNA
agctagagttaatggtctctgaaaagagctttgtgaggctgacaaaaggattgcttgagagtagtccacccacacccttcagagactgagcatggctctgccattgggtgccggctcctt

SEQ ID NO: 32388 - DNA, 120 bp, synthetic construct
  source 1..120: mol_type = other DNA
actgcgtattgcttcaggcccttatcgttgttaacttaccacttgttcaaagcacaggctttaagggtgtctttatcaattgatttctgcagaaggtgtggctgcctgccagtgtgctcg

SEQ ID NO: 32389 - DNA, 120 bp, synthetic construct
  source 1..120: mol_type = other DNA
catctcttggtggaaagattcacttactgcttggagtctgagctgaaaaaatggatcatttgagcagcaccatgatactgttcagcaagtctggcagcgatcaggggcatccctgtttaa

SEQ ID NO: 32390 - DNA, 120 bp, synthetic construct; identical to SEQ ID NO: 9545
  source 1..120: mol_type = other DNA

SEQ ID NO: 32391 - DNA, 120 bp, synthetic construct
  source 1..120: mol_type = other DNA
tttgctacattttaaagccacactcaagttcttgagtttataaagaaatcagctctgaatttacatggctataagtggagtgggagtatatgtgtatatttataaaacgttttagaccag

SEQ ID NO: 32392 - DNA, 120 bp, synthetic construct
  source 1..120: mol_type = other DNA
gaatgtggaacaaaataagctggacacaaaataatacattctgcattattccattaacataaaattcaaaatcaggccaaactacagccttttttagggatgcatgcatggttggtaaaa

SEQ ID NO: 32393 - DNA, 120 bp, synthetic construct; identical to SEQ ID NO: 9546
  source 1..120: mol_type = other DNA

SEQ ID NO: 32394 - DNA, 120 bp, synthetic construct
  source 1..120: mol_type = other DNA
ttggggacagactcccacctctttgtcctggcttcaagcctggtgcatagatcggtatacagaacactgcatctactcactgagggaacacaaagtctcttatagaaggataactctgtt

SEQ ID NO: 32395 - DNA, 120 bp, synthetic construct
  source 1..120: mol_type = other DNA
cagctaaagcctcaaagctgagaacagtatgtgtacatttctccccattctaaagagaagttccagacacatccatgctggacttaataaaacagcaaaacaggtctggggctagcaacc

SEQ ID NO: 32396 - DNA, 120 bp, synthetic construct
  source 1..120: mol_type = other DNA
cacccccaggccaggggatggttggagcagggaaggtcaagaggacttatggagtgtcagcaagagcccggcagctcacttcctagctggctgggcacagccgctcacaggcctacccag

SEQ ID NO: 32397 - DNA, 120 bp, synthetic construct; identical to SEQ ID NO: 9547
  source 1..120: mol_type = other DNA

SEQ ID NO: 32398 - DNA, 120 bp, synthetic construct
  source 1..120: mol_type = other DNA
gggaatggggcagggagtggtccctgtgcagggctcccaaggacccataaatagatgccgtgaaagcacatatgcctgttctaacagggagccttgcagccccaccagcaaaagttaaga

SEQ ID NO: 32399 - DNA, 120 bp, synthetic construct
  source 1..120: mol_type = other DNA
agagctagagggggaggctaaataagctctgattagaagtgaatttgaagatttgattaaacaactgagaacgagtctcaatcttaaaactggtacttaattaacaacaacaacaacaac

SEQ ID NO: 32400 - DNA, 120 bp, synthetic construct
  source 1..120: mol_type = other DNA
gagttcaagaccagcctgaccaatatgcaaaaaccccgtctctcctaaaaatacaaaaaaaaaaaaaaaattagccaggtgtggcggcgggtgcctgtagtcccagctactcgggaggct

SEQ ID NO: 32401 - DNA, 120 bp, synthetic construct; identical to SEQ ID NO: 9548
  source 1..120: mol_type = other DNA

SEQ ID NO: 32402 - DNA, 120 bp, synthetic construct
  source 1..120: mol_type = other DNA
ggaggctaagccaggagaatcgcttgaatccgggaggcagaggttgcagtgagccaagatcgcgccactgccttccagcctgggcgacagagcgaaactccgtctcaaaaacaaacaaaa

SEQ ID NO: 32403 - DNA, 120 bp, synthetic construct
  source 1..120: mol_type = other DNA
ttcttaaagacaatagatgagacaaagccatttccagtgtcggcccatttaataaactggttccacctggattttctcttcattgtggtgaaagccaccacctaacaatgctggccctgc

SEQ ID NO: 32404 - DNA, 120 bp, synthetic construct
  source 1..120: mol_type = other DNA
ggagccgagactgaaacccaggtgtgctagcatctaaagttcatgctctttccaccacattagactgtattctgagggcaccaaggaagctccatttttcttaagaaaccaaattgcagt

SEQ ID NO: 32405 - DNA, 120 bp, synthetic construct; identical to SEQ ID NO: 9549
  source 1..120: mol_type = other DNA

SEQ ID NO: 32406 - DNA, 120 bp, synthetic construct
  source 1..120: mol_type = other DNA
tgcctgacctactcttgtgaggccaaggccatctcctccactctctgggggcctcttctgactcctccaaactcttccatgtctggactcctggcttctgcccaaggccatctattggag

SEQ ID NO: 32407 - DNA, 120 bp, synthetic construct
  source 1..120: mol_type = other DNA
acaccagacatgaagctggtaagaccaacatccacctattcattccttcagcaaacatttactgtggacagcatcaggttggcagtatcatgcaaggctcagaaatatggtggaaaacca

SEQ ID NO: 32408 - DNA, 120 bp, synthetic construct
  source 1..120: mol_type = other DNA
agggcgcatatagtctgggccagaacttgtcctggggtcttcttacggccctggttcagcttgcattcagcataacaacttagctagggagtgctgcaggccccaaatgatgctaaatac

SEQ ID NO: 32409 - DNA, 120 bp, synthetic construct; identical to SEQ ID NO: 9550
  source 1..120: mol_type = other DNA

SEQ ID NO: 32410 - DNA, 120 bp, synthetic construct
  source 1..120: mol_type = other DNA
tttgtggggagccaagctgctctggagaggggcctcaaagcttcagccagagaaaaggcaaacccagccaccctgagaatctcctcctccccctcaatcacaccctgcagaggcgtgatc

SEQ ID NO: 32411 - DNA, 120 bp, synthetic construct
  source 1..120: mol_type = other DNA
ctcgttcccacagcctgtctggtgccgccttcgcaaatggggccctggtgatggggccttcggagttcagctcagagagcatggaagtgagatggagaggccagcactgatctgtatcgt

SEQ ID NO: 32412 - DNA, 120 bp, synthetic construct
  source 1..120: mol_type = other DNA
gaggggaagcattcactgaagttagtttgtacgtggctgagctggccctgaagcccatgccctttccacttgccagacagatgggaagtcttgactcattacccgctggagacttttcct

SEQ ID NO: 32413 - DNA, 120 bp, synthetic construct
  source 1..120: mol_type = other DNA
aaccagggctgttccaagcaactgggacacatgattaaaatgcagattccatggcaggtcccgctcagaggtttatttagtgggtcagaaaatgggcccaggaatttcattttaacaaat

SEQ ID NO: 32414 - DNA, 120 bp, synthetic construct; identical to SEQ ID NO: 9551
  source 1..120: mol_type = other DNA

SEQ ID NO: 32415 - DNA, 120 bp, synthetic construct
  source 1..120: mol_type = other DNA
agagaaaccatgggaaggctgaggcgtggactcagtgggcagggatggaaaaagactcagaaatactgggcatggcccatggctcattagggttgccaggtaaaatacagaacacccagt

SEQ ID NO: 32416 - DNA, 120 bp, synthetic construct
  source 1..120: mol_type = other DNA
tgctgtctttttatttcctaaacctggcaaccctactcatgactccacttgtcagcttggtacactcctctgagaagcttctcccaatattcccatctcatttgatccttcctgactggc

SEQ ID NO: 32417 - DNA, 120 bp, synthetic construct
  source 1..120: mol_type = other DNA
gagtgggagatgggggagggctgtgggatggagggcggggctgccaacagcctgctccgtggctggaactgcgacatcgcctctctgggagtaggagtgggcttctggccagactcagtg

SEQ ID NO: 32418 - DNA, 120 bp, synthetic construct; identical to SEQ ID NO: 9552
  source 1..120: mol_type = other DNA

SEQ ID NO: 32419 - DNA, 120 bp, synthetic construct
  source 1..120: mol_type = other DNA
tcatgttaacatctctaaaatcgtgcatcttacagtcaatggcctgatagtttatttggcagtattttaaattcctaatggtacgtaccatgatggtgtgttcataaccaatagtgtctt

SEQ ID NO: 32420 - DNA, 120 bp, synthetic construct
  source 1..120: mol_type = other DNA
cacatggcagagatttgaaactagaggaaggagcttgcaatgtgataaagcagcaaatgtacaagagtttggaagaaggagaggtaggttgcttttggcaagagcagcaattctcaattc

SEQ ID NO: 32421 - DNA, 120 bp, synthetic construct
  source 1..120: mol_type = other DNA
tatggaagaagagatatttgtgttcagtcttaacaactgggtggggccgggcacggtggctcacacctgtaatcccagcactttaggaggctgaggcggttggatcgcttgagcccagga

SEQ ID NO: 32422 - DNA, 120 bp, synthetic construct; identical to SEQ ID NO: 9553
  source 1..120: mol_type = other DNA

SEQ ID NO: 32423 - DNA, 120 bp, synthetic construct
  source 1..120: mol_type = other DNA
aacgtccagtgactctggctgatggagcaggggaatctgtggaagaaggcaagggacaatgctggtgaggcaggagaagagggaattggggtaaccaaaggttaaggcgtaaaaacagtg

SEQ ID NO: 32424 - DNA, 120 bp, synthetic construct
  source 1..120: mol_type = other DNA
ctgattggtcacaggccagtccttcatggggtgtaactaaccctaggcctctaaagggcacctaggggtgctagcaaattcttttagctttataaaaaccctggggagaggcagaggttg

SEQ ID NO: 32425 - DNA, 120 bp, synthetic construct
  source 1..120: mol_type = other DNA
acggtgtagcaggctgtcataggcattagggatacagctttaaacaaaacagacaacattgactatcctggagcacacattctagtaacaataagcaaacaaacaaatttgtaaatagca

SEQ ID NO: 32426 - DNA, 120 bp, synthetic construct; identical to SEQ ID NO: 9554
  source 1..120: mol_type = other DNA

SEQ ID NO: 32427 - DNA, 120 bp, synthetic construct
  source 1..120: mol_type = other DNA
tcctcctgcctcagcctccagagtagctgggactacaggcacccaccaccacacctggcaaccgttcttttgttgctttgtctttcattgctttattcttttgttgctttgtaagggttt

SEQ ID NO: 32428 - DNA, 120 bp, synthetic construct
  source 1..120: mol_type = other DNA
tgaagtgagcattgcctggcacttttaggtgccagcatccaagcctagcacctggcattgtgccctgctctgtagaaacttctaggatctggtaagcctcatgttcagaagacaaactca

SEQ ID NO: 32429 - DNA, 120 bp, synthetic construct; identical to SEQ ID NO: 2426
  source 1..120: mol_type = other DNA

SEQ ID NO: 32430 - DNA, 120 bp, synthetic construct
  source 1..120: mol_type = other DNA
actacaggtgcgtgccaccacatctggctaatttttgtatttttagtagagacggggttttaccatgttggccaggctggtctccaactcctgacctcaggtgatctgcccaccttggcc

SEQ ID NO: 32431 - DNA, 120 bp, synthetic construct
  source 1..120: mol_type = other DNA
acatagtaagctccccaaaagcaccaagcttagctgggaagcacgatgggtgaggcatggaccttatttcacagcaaagtggctcaggtgaggcaggcaaggaatgggcaaatcacgaca

SEQ ID NO: 32432 - DNA, 120 bp, synthetic construct
  source 1..120: mol_type = other DNA
cctgctttggcccctacgctgggtaggaggcccggctagaggttaggcaccatcttttccagtccccaaagtgagagtgtgtgtgtgtgggagagatatttttaaatggggctgttgtgg

SEQ ID NO: 32433 - DNA, 120 bp, synthetic construct
  source 1..120: mol_type = other DNA
cgtggggtgggagcatccagtgcacccctcttgcattgggtgcgcagtgatccggacagagaggctccagtcagccaggcacagagaaaatggccctctgcccctgttctgcttgttttt

SEQ ID NO: 32434 - DNA, 120 bp, synthetic construct; identical to SEQ ID NO: 9556
  source 1..120: mol_type = other DNA

SEQ ID NO: 32435 - DNA, 120 bp, synthetic construct
  source 1..120: mol_type = other DNA
ttaacaacctctcctggggagcagctgtcaagctcggccctgagctggcgggaagatgactcatttacatacagcccgtctccaggccccccccaccgccaccccaagatctgtccctgt

SEQ ID NO: 32436 - DNA, 120 bp, synthetic construct
  source 1..120: mol_type = other DNA
aatccaagaccaagggaggcctttgatgggacaaagacgtgactgatgaacccggagtgaggagcaatgagatgaagaaagctctgcccacctaccccgtccctcactcctccctcccac

SEQ ID NO: 32437 - DNA, 120 bp, synthetic construct; identical to SEQ ID NO: 9557
  source 1..120: mol_type = other DNA

SEQ ID NO: 32438 - DNA, 120 bp, synthetic construct
  source 1..120: mol_type = other DNA
gacgactcaatgcacagaggccactccttaagggcccggctccctcaaactgaggtgtccccatgcttggtcttcccacagaagccagcctggttggctgcttcaaaggaggaataaaga

SEQ ID NO: 32439 - DNA, 120 bp, synthetic construct
  source 1..120: mol_type = other DNA
ggtaaaggggctgcccacagcacctcagcacatgggtctctctctcttttcatccagcccaaaatgtcaaagcacaagggtctctgtcagggcctggctgtggtcactggactgcggctg

SEQ ID NO: 32440 - DNA, 120 bp, synthetic construct
  source 1..120: mol_type = other DNA
gcacacaggaagtgagggatggtggggactgaatttatggagcccctatcccagaccaagcactctgctggtactttcacaggtgtaatccccagagcagctcctgggggaggtgtcatt

SEQ ID NO: 32441 - DNA, 120 bp, synthetic construct; identical to SEQ ID NO: 9558
  source 1..120: mol_type = other DNA

SEQ ID NO: 32442 - DNA, 120 bp, synthetic construct
  source 1..120: mol_type = other DNA
ctaccttcctgccacctccttgccttgcctattgtccccctcccttcatatgacctgggacccagactccctggttttctggaaatattctctctccttttggctcattctgtgcactgt

SEQ ID NO: 32443 - DNA, 120 bp, synthetic construct
  source 1..120: mol_type = other DNA
ctgaatcctcgccatcatctgacagcactttcagctcaccaggcatttaactgtgtgctgtcttgtgacagcccctgtcctgaccattgtcccagagatttaaccctttgtgtttttcta

SEQ ID NO: 32444 - DNA, 120 bp, synthetic construct
  source 1..120: mol_type = other DNA
gctaaattcccaacagaactgacagtttgtccagtgatcaccagcagacactgtaccagaaacattgtctccatcttagtttcagttaactcaacatgtttttgagacctgctgtgtgcc

SEQ ID NO: 32445 - DNA, 120 bp, synthetic construct
  source 1..120: mol_type = other DNA
caccatggattctggggcatctcagtcagagggtatcaaagagggctaattctaggagttgggcttgagttcttgagttaggtgatttatggaggacttaaggaagcaggcttcgctctg

SEQ ID NO: 32446 - DNA, 120 bp, synthetic construct; identical to SEQ ID NO: 9559
  source 1..120: mol_type = other DNA

SEQ ID NO: 32447 - DNA, 120 bp, synthetic construct
  source 1..120: mol_type = other DNA
ctcaaaatgctgctgtgctttgcagcccataatagcattttactggatgccattcattattttttgtaaatgaaattctttccaagtgttccaatttacttggctatatatgtgcatgtg

SEQ ID NO: 32448 - DNA, 120 bp, synthetic construct
  source 1..120: mol_type = other DNA
ctggcgcgatctcagctctctgcaacctccgcctcccgggttcaagtgattctcctgcctcagcctcctgagtagctgggattacaggcgcccaccacgacgcccagctaatttttatat

SEQ ID NO: 32449 - DNA, 120 bp, synthetic construct
  source 1..120: mol_type = other DNA
ctgtgattttcattttaagtttcttctatttgcttttataaatatttcacattttctgtggtgcaaataggatagttgctacttttgaaaccgtaagttcactcccaacaagcactgtta

SEQ ID NO: 32450 - DNA, 120 bp, synthetic construct; identical to SEQ ID NO: 9560
  source 1..120: mol_type = other DNA

SEQ ID NO: 32451 - DNA, 120 bp, synthetic construct
  source 1..120: mol_type = other DNA
gtcatgtggataagactttccagggagcacgtgtggtatgagaatgaaggcccctgaggaacttcagtatctaaagggcagaagaggagtctatgaaggagaccacattcattcaacaaa

SEQ ID NO: 32452 - DNA, 120 bp, synthetic construct
  source 1..120: mol_type = other DNA
ataaactacaaacaattacgtggcctgtgagaaagtggcaagtactacaaaaaataaaaaatagagcaggctaagagggtgaggagtgtgcgggcagggaggaggcaggtcatggtttta

SEQ ID NO: 32453 - DNA, 120 bp, synthetic construct
  source 1..120: mol_type = other DNA
atgtctgtaatcccagcactttgggaggctgagacaggtggatcacttgaggtcaggagtttgagaccagcctggccaacatggtgaaaccccgtctctactaaaaatacaaaaattagc

SEQ ID NO: 32454 - DNA, 120 bp, synthetic construct; identical to SEQ ID NO: 9561
  source 1..120: mol_type = other DNA

SEQ ID NO: 32455 - DNA, 120 bp, synthetic construct
  source 1..120: mol_type = other DNA
tctctgtcagcagagtctcatgcaattttaaaaggaaattcgatgaaacgaacacccatcaacatctttaatagctgcaagcaatgtggagcaaattttttgtcttatttaatgtggtca

SEQ ID NO: 32456 - DNA, 120 bp, synthetic construct
  source 1..120: mol_type = other DNA
gcttgcatgacaccaatcttcctcaagtctgagccagaatttatatctcccatttctcaacctcatctctcaagcctataatctttcagttataagaagggaaacacttgagggtgtatc

SEQ ID NO: 32457 - DNA, 120 bp, synthetic construct; identical to SEQ ID NO: 9562
  source 1..120: mol_type = other DNA

SEQ ID NO: 32458 - DNA, 120 bp, synthetic construct
  source 1..120: mol_type = other DNA
ggatgaaggtgctgaagctagaggccattcaggaaggaaggaatgacggggcaaggggtcagaaatttctagaagaatctagtaagatggaaacctaacagtcctactgggatttggcaa

SEQ ID NO: 32459 - DNA, 120 bp, synthetic construct
  source 1..120: mol_type = other DNA
gttaaagccgcttcccggggaggccaaggacatccacagctgaagtgctcaggaccatccacagctgaagtgctcagacactgcgttttctttatctcagagaggctgtgtgacttgccc

SEQ ID NO: 32460 - DNA, 120 bp, synthetic construct
  source 1..120: mol_type = other DNA
tcaagtagacagcactgccttacagatggttgtggggatcagaggggaggggacagctggcggatttagcagagtacgtggcacagaggaaacactaaatatgcttcttcagctccttat

SEQ ID NO: 32461 - DNA, 120 bp, synthetic construct
  source 1..120: mol_type = other DNA
atgtgtgtactcacagctactcactttcctactctgtgccagccatgaggtgtagtcactgtgccagggggctgagtgtccggcctgggacgtgagagggcatgggctcacctgctcagg

SEQ ID NO: 32462 - DNA, 120 bp, synthetic construct; identical to SEQ ID NO: 9563
  source 1..120: mol_type = other DNA

SEQ ID NO: 32463 - DNA, 120 bp, synthetic construct
  source 1..120: mol_type = other DNA
gagactccatccctagaaacaattaaaaacaaacaaacaaacaaacaaacaaaagcaagctgggcatggtggctcacacctgtagttccagctactcaggaggctgaggcaggattgttt

SEQ ID NO: 32464 - DNA, 120 bp, synthetic construct
  source 1..120: mol_type = other DNA
ctacataaatcagtaagatccatctgtgcaattccttcctcctagaattcagaatctgaggtgctggtttcctgaggacacttgtgacttgctgccttttattgaactctgagtgcccta

SEQ ID NO: 32465 - DNA, 120 bp, synthetic construct
  source 1..120: mol_type = other DNA
atacatccctcacccttttccaattgatttttagcttccttcatccctccctctttcccttgtcctcttcgtgtccacaggaagcctgttgggagcctgctatggcaagtgctgtgctag

SEQ ID NO: 32466 - DNA, 120 bp, synthetic construct; identical to SEQ ID NO: 9564
  source 1..120: mol_type = other DNA

SEQ ID NO: 32467 - DNA, 120 bp, synthetic construct
  source 1..120: mol_type = other DNA
aaaagggaatcaaggtaaaacgaggccattagggtgagccctaatccaatatggctggtgtcctcacaggaagagtgtattaagatacagacatacacaaggaaaaccacgtgaagatat

SEQ ID NO: 32468 - DNA, 120 bp, synthetic construct
  source 1..120: mol_type = other DNA
gtcccccagtccgtggtactttgttatggcagccggaaggagactggggccgcctgtttgcttggctgcagaagccccacgtggctgcaccctggctcattctgttttctgtagcagcag

SEQ ID NO: 32469 - DNA, 120 bp, synthetic construct
  source 1..120: mol_type = other DNA
aacctcctgggcaggataggggcagccaaggaaccagctgcttccatcaggcctgctgggctcctccaggttctcatcataccacttctgtcgaggctctctctgacgcagctctcctca

SEQ ID NO: 32470 - DNA, 120 bp, synthetic construct; identical to SEQ ID NO: 9565
  source 1..120: mol_type = other DNA

SEQ ID NO: 32471 - DNA, 120 bp, synthetic construct
  source 1..120: mol_type = other DNA
cagccaggttgggctttcaggagcctatatttcatctgggccccagtcacactacatagatttttgttttatcacagaaatcactgccacactgtgacccttaaggtcctcagcagggat

SEQ ID NO: 32472 - DNA, 120 bp, synthetic construct
  source 1..120: mol_type = other DNA
cacagcgacaagcaagaaagacatgggaaactgacaggttttcatcactggctagtgaaaacacattttatacttctgggccaacaaatacttgggtcaattcacacattggcttgagaa

SEQ ID NO: 32473 - DNA, 120 bp, synthetic construct
  source 1..120: mol_type = other DNA
ctgtaggtgtgcactactgtgcttggccaacgtgttcttttttgaggtgggaactttaatttacttgagcagatgtatcaacgtagctgtgaataaggagctaccagggcattagactgc

SEQ ID NO: 32474 - DNA, 120 bp, synthetic construct; identical to SEQ ID NO: 9566
  source 1..120: mol_type = other DNA

SEQ ID NO: 32475 - DNA, 120 bp, synthetic construct
  source 1..120: mol_type = other DNA
gaaacccgtgggaagctctgctgtattgctgggtgctcctgttctgtggcaagacaacctagaaggtgatagggggtcttctccgagacatgtgctctgctggctctttggcagaaaggg

SEQ ID NO: 32476 - DNA, 120 bp, synthetic construct
  source 1..120: mol_type = other DNA
tataattctggagatctgtaaaaggatgtttaacatgtttaaagtctttgtttcccatccttctgccaaggattgagacatcgcccacccagcttcaatcctcatagctacttctgccac

SEQ ID NO: 32477 - DNA, 120 bp, synthetic construct; identical to SEQ ID NO: 9567
  source 1..120: mol_type = other DNA

SEQ ID NO: 32478 - DNA, 120 bp, synthetic construct
  source 1..120: mol_type = other DNA
gcttggtacagtctcagcctgtaacgcttccctttcgaagagctgtccctccagcaaggcctcataacccagggaacccctggcatctctgccgagggcataaaccatattagctctgaa

SEQ ID NO: 32479 - DNA, 120 bp, synthetic construct
  source 1..120: mol_type = other DNA
ggtcgtgtgtactttcttgtctaactcatagattgcaaaagctataatttcatgggatttgttttaagcgcccttttctggcagatgtaggctcagtatgagcactctgtaattttccag

SEQ ID NO: 32480 - DNA, 120 bp, synthetic construct
  source 1..120: mol_type = other DNA
aggctaggtcctgtgggggatgcagttgcacttataacaaaccatggcacatcctttctgaggaatactatgcatccaacaagagggatgcttagaaagttgattctgacatcacatacc

SEQ ID NO: 32481 - DNA, 120 bp, synthetic construct; identical to SEQ ID NO: 9568
  source 1..120: mol_type = other DNA

SEQ ID NO: 32482 - DNA, 120 bp, synthetic construct
  source 1..120: mol_type = other DNA
tagatacatgaagggtaaaggacaggcagggatgctccaggcagggagaatgctatgaatgaagactggagggacagttcagggtcttgctgactagtttggctggaggaaaggctgcag

SEQ ID NO: 32483 - DNA, 120 bp, synthetic construct
  source 1..120: mol_type = other DNA
ggatacagatggatgtcttttcccaattcagtcatttataagtagctcatatgtctctcaattcctcatcattttcgcagcaccaactttgtgggggagtagggggactagctgtggagt

SEQ ID NO: 32484 - DNA, 120 bp, synthetic construct
  source 1..120: mol_type = other DNA
tcaatttcctcatctgtaaatgagatgtgagctgtgctcacctccacaggatgctgatgaggattaaatgagaagaagtgtgtaaaatgctcagcatagtgctaatagcatgaccacctc

SEQ ID NO: 32485 - DNA, 120 bp, synthetic construct; identical to SEQ ID NO: 9569
  source 1..120: mol_type = other DNA

SEQ ID NO: 32486 - DNA, 120 bp, synthetic construct
  source 1..120: mol_type = other DNA
atcaggcttggaatcctttgggaactctgcagttattgcaaaggcatatcaatctacttggtcaccaattgttgtttgcaaccttaactttctcctacatggttatgctattactttcca

SEQ ID NO: 32487 - DNA, 120 bp, synthetic construct
  source 1..120: mol_type = other DNA
gcattttccctattaattaacggatactgaaagtacatgtaacttccatcatacaggtgctgtgaaactattcctcgcatttaaagcgattctcatgtttaaaaagttggaagcagccta

SEQ ID NO: 32488 - DNA, 120 bp, synthetic construct
  source 1..120: mol_type = other DNA
gttgaggctgcagtaagctgtgatcatgccactgcactccagcctgggtgacagagagagactctcagtgtcaaaaaaatagttgggagacttctggttcaagatgattatttaattacc

SEQ ID NO: 32489 - DNA, 120 bp, synthetic construct
  source 1..120: mol_type = other DNA
tttcaacatgcttgtgcaagatggacagcttgagagagctgtaactgatgaaggcaggtggagaaacccacagctcagagggagtacagctgagaaggggagggagggaggggaactgcc

SEQ ID NO: 32490 - DNA, 120 bp, synthetic construct; identical to SEQ ID NO: 9570
  source 1..120: mol_type = other DNA

SEQ ID NO: 32491 - DNA, 120 bp, synthetic construct
  source 1..120: mol_type = other DNA
tgacagcaactgaaattactctcatgaggagttttacaaaatgctaattcataagcccccacttccagagagaatgatacagttggttagggcacaacctgggcatcaaggcttaaaaac

SEQ ID NO: 32492 - DNA, 120 bp, synthetic construct
  source 1..120: mol_type = other DNA
tagctcactgcatccttgaattcctggcctcaagtgatcctcccacctcagcttccagagccccctagctgacattggcagggctttatttatttatttatttacttttgagatggagtc

SEQ ID NO: 32493 - DNA, 120 bp, synthetic construct; identical to SEQ ID NO: 9571
  source 1..120: mol_type = other DNA

SEQ ID NO: 32494 - DNA, 120 bp, synthetic construct
  source 1..120: mol_type = other DNA
tctcatgatagtaagttctcatgagatctggttgtttaaaagtgtgtagcaccttcccctttgctctcttcctcctgctccagccatgaaggacgtgtctgcttcctctttgccttctga

SEQ ID NO: 32495 - DNA, 120 bp, synthetic construct
  source 1..120: mol_type = other DNA
ataacattgctttagccagggttaagaaccagtggtctataggctggcaaatcccaaatttgtatctcaaacccaacctgtcccttgagttctagactggcctatccactatctaactgg

SEQ ID NO: 32496 - DNA, 120 bp, synthetic construct
  source 1..120: mol_type = other DNA
cctccttgattccacttcagccttccctatctcagtaaatggcaaatccatccttgcagttgctaagggcaaaagtcttagagcccttttttattcttttgctttctctcacaccctaca

SEQ ID NO: 32497 - DNA, 120 bp, synthetic construct; identical to SEQ ID NO: 9572
  source 1..120: mol_type = other DNA

SEQ ID NO: 32498 - DNA, 120 bp, synthetic construct
  source 1..120: mol_type = other DNA
ggagagaaattcaggttcagggaggataaagcagctgtcactgcttaactgctgtaactactgtggagcactggagaggaaggaaccatcaagaaaaaggactccagaaatctactaggg

SEQ ID NO: 32499 - DNA, 120 bp, synthetic construct
  source 1..120: mol_type = other DNA
aaaccaaacaatttccagagccctcacaaagccaggaatcacctgagttcctatcagtcaaaggaggaaaggtttcactgaatccacaaggcattcagtagagaccccaaaaaggttatt

SEQ ID NO: 32500 - DNA, 120 bp, synthetic construct
  source 1..120: mol_type = other DNA
agtccaaccctgcttgaaagagtacaaaacaatcaagcatcaacaatgtaaaattcatgatgttctgatctctaataaaaaatcagatatgcaaagaagcaggaagatgtgacccagaaa

SEQ ID NO: 32501 - DNA, 120 bp, synthetic construct; identical to SEQ ID NO: 9573
  source 1..120: mol_type = other DNA

SEQ ID NO: 32502 - DNA, 120 bp, synthetic construct
  source 1..120: mol_type = other DNA
agccaggcgcagtggcgggcgcctgtaattctagctactcaggaggctgaggcaggagaattgcttgaacccaggaggcagaggttgcagtgagctgagatcgcaccactgcactccagc

SEQ ID NO: 32503 - DNA, 120 bp, synthetic construct
  source 1..120: mol_type = other DNA
ttgaagacatagcaatagaactattcaaaataaagcactgtaaccaaaaaaagactgaaaagagcctcagctacctgcagaacaatgtaaattaagactaacatatgtgcagttggagtt

SEQ ID NO: 32504 - DNA, 120 bp, synthetic construct
  source 1..120: mol_type = other DNA
acgcagatccaaggagctctataaacacaaaggaaactacacaaaggcacatcaaaatcaacttgttgaaagtcaggaatgaagagaaatcttaacagcagccaaagaaaggaggcacaa

SEQ ID NO: 32505 - DNA, 120 bp, synthetic construct
  source 1..120: mol_type = other DNA
ctgcctcccgggttcaagtgattctcctgcctcagcctcccgagtagctgggattacaagcgtgtcccaccatgcccggctaatttttgtacttttagtagagacagggtttcaccatgc

SEQ ID NO: 32506 - DNA, 120 bp, synthetic construct; identical to SEQ ID NO: 9574
  source 1..120: mol_type = other DNA

SEQ ID NO: 32507 - DNA, 120 bp, synthetic construct
  source 1..120: mol_type = other DNA
agtggtcttagaaatcagatcatgttatgcctcttttgtctccctgctttttttaacctaagttttgcctcaggatctaatcatgcttcttctcaaaatcctcccgtggctccccatttc

SEQ ID NO: 32508 - DNA, 120 bp, synthetic construct
  source 1..120: mol_type = other DNA
gacacactggcttccttgcggctcctccagcaaaccctgcaagctcctcctaagggaccctggcactggctggagccctcttcctccaggcagccacatggctcactcccttacctcatt

SEQ ID NO: 32509 - DNA, 120 bp, synthetic construct
  source 1..120: mol_type = other DNA
tttgtatgtttattttctatctcccccaactagaatgttagctccataagctagggactttgtctacttgttcactgctgtatccctggggattttcagttgctggcacatagtggagcg

SEQ ID NO: 32510 - DNA, 120 bp, synthetic construct; identical to SEQ ID NO: 9575
  source 1..120: mol_type = other DNA

SEQ ID NO: 32511 - DNA, 120 bp, synthetic construct
  source 1..120: mol_type = other DNA
tgtagatactggctcattcaatcctgcaacccagaggagctgggcctcctcctgaagggcctgcatcacctccttccttcttgtttggccctggggacgaccggtggtggggaggtgggg

SEQ ID NO: 32512 - DNA, 120 bp, synthetic construct
  source 1..120: mol_type = other DNA
aataaagcaagaatgtagatggaagtgaaggggactctagggacaaaaatgctatgaattaaggtcattgccacacaccaacctctgctgcacccccgcctccaccaatggtagtgcctt

SEQ ID NO: 32513 - DNA, 120 bp, synthetic construct; identical to SEQ ID NO: 9576
  source 1..120: mol_type = other DNA

SEQ ID NO: 32514 - DNA, 120 bp, synthetic construct
  source 1..120: mol_type = other DNA
gcatggtggtgcatgtctgtaatcccagctactcaggaggctgaggcacaagaaccacttgaacccaggaggcagaggttgcagtgagcagggatcgcaccactccactccagcctggat

SEQ ID NO: 32515 - DNA, 120 bp, synthetic construct
  source 1..120: mol_type = other DNA
aatggagagcaagaagacccaagatcagcagaggtcttgttgagtcttgttgagtgccgataaccaaattctgtctttggctcctgaaaatatctcttaccccttttcttttgctccttt

SEQ ID NO: 32516 - DNA, 120 bp, synthetic construct
  source 1..120: mol_type = other DNA
ggctgccatataaacaaatgaacaaacatttactggttctcaggctatgcaagggtcctccccatgaccctgtgaggtagacctcattgcaagagtatatagctcttcagtccaatgtga

SEQ ID NO: 32517 - DNA, 120 bp, synthetic construct; identical to SEQ ID NO: 9577
  source 1..120: mol_type = other DNA

SEQ ID NO: 32518 - DNA, 120 bp, synthetic construct
  source 1..120: mol_type = other DNA
ttaatgtttgaggtgaacagccaaaacaagggacttcacaattatctggttgtttgaaggtagttctagagactaacagtttagactaacgaggttgcctgacttaacggcataactata

SEQ ID NO: 32519 - DNA, 120 bp, synthetic construct
  source 1..120: mol_type = other DNA
tcaaagccctccaatatgaccttaacctattgaagcagtttcacctgtcattgttccttaacttgcttaaggcaggctggtcctgacctcactcacactgttctttcaaacctgcctacc

SEQ ID NO: 32520 - DNA, 120 bp, synthetic construct
  source 1..120: mol_type = other DNA
aaaaatataagcccacattaaagtgcttatgaaataccagggccagactaagtacctgcattcattgtctcatataattctcccaaccaccacatgatacaggtgttattatgattccca

SEQ ID NO: 32521 - DNA, 120 bp, synthetic construct; identical to SEQ ID NO: 9578
  source 1..120: mol_type = other DNA

SEQ ID NO: 32522 - DNA, 120 bp, synthetic construct
  source 1..120: mol_type = other DNA
tagatatgaggcttgaatgtggttaagagaagtcagccatgccgtgactcacagagcagtgcgccaggcagcaggaacagcaagtgttaagtgcccagaagtctgatctgggtaagtcca

SEQ ID NO: 32523 - DNA, 120 bp, synthetic construct
  source 1..120: mol_type = other DNA
ttgagtgtcatggtgaagagtcagattttttgcaacaggaagtcactgaaggatttcaaacaagcaaaggacttggcctgacttccgcttttaaagatctctttggctgtgtgtgaagaa

SEQ ID NO: 32524 - DNA, 120 bp, synthetic construct
  source 1..120: mol_type = other DNA
cagctggagtagactggtcgtgatgggcagcgagacaagtggatggaatcagaatgtattatgcggattgagctgacaagagttgatgatgaattggatatgaaagtttaggaaaaaaag

SEQ ID NO: 32525 - DNA, 120 bp, synthetic construct; identical to SEQ ID NO: 9579
  source 1..120: mol_type = other DNA

SEQ ID NO: 32526 - DNA, 120 bp, synthetic construct
  source 1..120: mol_type = other DNA
atcagagtatgccatccccaaatatgtcactttagcacaaggattgttttgagctgcaggcaatttggaagcagcagatgcaaagaaagctccttatcctcccctatctgcctaaaggca

SEQ ID NO: 32527 - DNA, 120 bp, synthetic construct
  source 1..120: mol_type = other DNA
gagattttacaagattgagtctgcataacaaaccttactaaaaccaaagcttattctccattagtttccctcctatatttatcttcccataatttaccacttctagaagtccaaactcct

SEQ ID NO: 32528 - DNA, 120 bp, synthetic construct
  source 1..120: mol_type = other DNA
ttaatctgtcttttaattcagggccctagcggctgaaaataagaaaatgtaggggaaaagcttttcctctacaggtgagagattgtttggagacagtccagagtgaggactgagcatggg

SEQ ID NO: 32529 - DNA, 120 bp, synthetic construct
  source 1..120: mol_type = other DNA
gatgttctggaagccaagagaaaagaggagtttgaggataaatggtcagccatgtcaaatgttgctgagatgctgaggacaggcaagtcatcactggatttttttaggaagggggccact

SEQ ID NO: 32530 - DNA, 120 bp, synthetic construct; identical to SEQ ID NO: 9580
  source 1..120: mol_type = other DNA

SEQ ID NO: 32531 - DNA, 120 bp, synthetic construct
  source 1..120: mol_type = other DNA
taggggtgtgaagattacttctgattacttttattacctcaatggagtgtgaaagaaaggtagttagcagagagtgaggggaatgggaggctaaagatggaagagggaggataagtggtg

SEQ ID NO: 32532 - DNA, 120 bp, synthetic construct
  source 1..120: mol_type = other DNA
tattcagctgcttgagggcagatgaagaatacgtgggaagttggtattttgataggggtacaacatagggagagaggggcaaggaagttaagggtctctgaaaagggaatgaatccaagc

SEQ ID NO: 32533 - DNA, 120 bp, synthetic construct; identical to SEQ ID NO: 9581
  source 1..120: mol_type = other DNA

SEQ ID NO: 32534 - DNA, 120 bp, synthetic construct
  source 1..120: mol_type = other DNA
tcagtgaatgggcaggagatgcatgctggcaaccccaatgacagagcttgctatggtttgaatgtctcctccaaaacttacgttgaaatccaatggctattgtaagacttttaagaggtg

SEQ ID NO: 32535 - DNA, 120 bp, synthetic construct
  source 1..120: mol_type = other DNA
ctgattctgtcctgcacttgctcaccatgtgatgccttccacatggatgactcttgccagatgccagagccctctatcataaacttcccagcctccagaatggtgagtgaaatcaacttt

SEQ ID NO: 32536 - DNA, 120 bp, synthetic construct
  source 1..120: mol_type = other DNA
aaattcatacccaagaccagggcccccagcattctctccctaaccactacattgtactgcaaattgtcacttggcaatgcagatttcttcattcttaaaatggatacatgaataatgcat

SEQ ID NO: 32537 - DNA, 120 bp, synthetic construct; identical to SEQ ID NO: 9582
  source 1..120: mol_type = other DNA

SEQ ID NO: 32538 - DNA, 120 bp, synthetic construct
  source 1..120: mol_type = other DNA
ccctttgagaagcaaagccttcttttacaaagcaggtcatcatctgatcatcatattttactttttataaaacaggtgcctaggtagagttgggaatcttggaaacggccattcattcaa

SEQ ID NO: 32539 - DNA, 120 bp, synthetic construct
  source 1..120: mol_type = other DNA
aatggaggagatagcgttctcatcttccaggaacccagaatctggcaagagaagcagatgctaagcacacagtcacacaagtgattccatgccaaaccagcaggaagtgtggggagtgac

SEQ ID NO: 32540 - DNA, 120 bp, synthetic construct
  source 1..120: mol_type = other DNA
cagctttctttcccgaccttccattttagaagagaacccagcaatccaaacctgcatggcctccaaaatgcaccccgcccctaggaaatgccaacacactcagcacaggcagaggcccgt

SEQ ID NO: 32541 - DNA, 120 bp, synthetic construct; identical to SEQ ID NO: 9583
  source 1..120: mol_type = other DNA

SEQ ID NO: 32542 - DNA, 120 bp, synthetic construct
  source 1..120: mol_type = other DNA
tcattactgattaaacttccgtcaaatgtgtgaagcaacctccagtttctaaggaatgtgtcctgggcaggtgaagagaaaaggcagaaccactggactgagaggtggaattgagcaggg

SEQ ID NO: 32543 - DNA, 120 bp, synthetic construct
  source 1..120: mol_type = other DNA
gggtaacaagggctgaggcttagaattgtctagtttggtttcagtccagggcagggtcaggataaggacccagctgactcagagagccatggaaacgcactgccagggaggggagctcca

SEQ ID NO: 32544 - DNA, 120 bp, synthetic construct
  source 1..120: mol_type = other DNA
gggaggccctgggaggttctggaaacgtggtctgggcccagcttgctcagtttttattttttgttgttaatttccagcagtccagggttttcagttactcattcattccatccactcaac

SEQ ID NO: 32545 - DNA, 120 bp, synthetic construct; identical to SEQ ID NO: 9584
  source 1..120: mol_type = other DNA

SEQ ID NO: 32546 - DNA, 120 bp, synthetic construct
  source 1..120: mol_type = other DNA
accatttgagctggatcttgaagactgatttcacctggtagaaaacagggaggaagggaagggcattccaggtggagagtacagcatatgtaacagcctagaggcttaaagtgcgaggta

SEQ ID NO: 32547 - DNA, 120 bp, synthetic construct
  source 1..120: mol_type = other DNA
acccttcaggaggcgagttctgagctggctatgtccccaggctttccttgctggtgtgcttaagggaggccctcctgtttttttggttttctgtcccgcctgtccatgcccactgcagct

SEQ ID NO: 32548 - DNA, 120 bp, synthetic construct
  source 1..120: mol_type = other DNA
ggcagcctccttcacagagaggtactaggtggcgaaggatgggaagcaggcagccctcgctttagtgtagccactgacactgccagaagcacagcacagccaaatcccagagtccccaaa

SEQ ID NO: 32549 - DNA, 120 bp, synthetic construct
  source 1..120: mol_type = other DNA
ttcttccccctctgtggaactgcacaattcagagacagcagagatcttgagcagtcaggagccgtggatcctctattctgccattgactgacttgctgtgtgatgccaagaaagttgctt

SEQ ID NO: 32550 - DNA, 120 bp, synthetic construct; identical to SEQ ID NO: 9585
  source 1..120: mol_type = other DNA

SEQ ID NO: 32551 - DNA, 120 bp, synthetic construct
  source 1..120: mol_type = other DNA
ctctgtggcctcccctggccccagatcctgtcctgctccgggaggcttctgcctgggaagggggtcccggtgcttcctccacccaccagggagtcatggtagccctggggtgcagggagc

SEQ ID NO: 32552 - DNA, 120 bp, synthetic construct
  source 1..120: mol_type = other DNA
gcatctggcttccctgctactcttcaactccatgacctcctcctcagcctaagcactgccaagaggcctcagcacacctggaaacaaggagggtggccaggattgtggctgcccagggct

SEQ ID NO: 32553 - DNA, 120 bp, synthetic construct; identical to SEQ ID NO: 9586
  source 1..120: mol_type = other DNA

SEQ ID NO: 32554 - DNA, 120 bp, synthetic construct
  source 1..120: mol_type = other DNA
ctacagggaaggaaatgtgccttggcctcccctccttcacagagaggcagggcagggctcaccaacagggttgccgagatctggggagcagatgctactcatggttaccaggcactgcac

SEQ ID NO: 32555 - DNA, 120 bp, synthetic construct
  source 1..120: mol_type = other DNA
agtttgaatacttaagaattaggacgtgaatccaggcaagcaggctggctgcagtgctggtgtgtttagagtcgacactaaactatactggaaggaaggatatgagccaatagtcttccc

SEQ ID NO: 32556 - DNA, 120 bp, synthetic construct
  source 1..120: mol_type = other DNA
ttagtggcagagccaggtctagactcctagtgcctgactcaccgctgttctctctaccctagcgactccaagtgcatcagcataggcattgccaggagctcatgaggaatgcagactgtc

SEQ ID NO: 32557 - DNA, 120 bp, synthetic construct; identical to SEQ ID NO: 9587
  source 1..120: mol_type = other DNA

SEQ ID NO: 32558 - DNA, 120 bp, synthetic construct
  source 1..120: mol_type = other DNA
gcagcactcacaagacagagtccggagcattctccaccacagccagtggccacttggagaggggacctagagtcccctggtaggtggctagggaatggcagggtttggggtagaacttcc

SEQ ID NO: 32559 - DNA, 120 bp, synthetic construct
  source 1..120: mol_type = other DNA
ttcctgcagtttcaagcccctccaccccctgttcctcaccaactctccccgtgtagaaactctgcagagagtatgaccgtgtctcttaaaaaaactttggtgaggatcagaggctggact

SEQ ID NO: 32560 - DNA, 120 bp, synthetic construct
  source 1..120: mol_type = other DNA
aaacttggggaggactccagagctgggggtgacacaggaatagaccaacggccttttgttgtttccaagatcctctgaatctgaggcagccaaacaaggcatgggagtgctgctccaggt

SEQ ID NO: 32561 - DNA, 120 bp, synthetic construct
  source 1..120: mol_type = other DNA
gatacccacccttctctccagctcctcccctctgtgcgtagcgcaacactcaccccttctgggaagccttggtgccctctcagaactgtactggattctctacttgtctatgtgagcagt

SEQ ID NO: 32562 - DNA, 120 bp, synthetic construct; identical to SEQ ID NO: 9588
  source 1..120: mol_type = other DNA

SEQ ID NO: 32563 - DNA, 120 bp, synthetic construct
  source 1..120: mol_type = other DNA
ctataatgggctgattgttggcttttgttgacaaaatggtctacatgcctggggaaagttatgaaggatctttgtggtgcttccagctagaatactctaggagtgtacctttgctccatt

SEQ ID NO: 32564 - DNA, 120 bp, synthetic construct
  source 1..120: mol_type = other DNA
ggggagagcagggggatccaggtacctttcttgtctcagtttttgatggcctggcagtgcccccacctgttttttcttcttacctttctccactctcccagaacttcccaaaggaagctg

SEQ ID NO: 32565 - DNA, 120 bp, synthetic construct
  source 1..120: mol_type = other DNA
cagtcctggagaaaaccaagtggatgtgcggcccctttccatggagcaattaggtggataactgtccagtcgctcctaggctttgtagaggcataggctcagatacaaagagaccagaca

SEQ ID NO: 32566 - DNA, 120 bp, synthetic construct; identical to SEQ ID NO: 9589
  source 1..120: mol_type = other DNA

SEQ ID NO: 32567 - DNA, 120 bp, synthetic construct
  source 1..120: mol_type = other DNA
gttagtttcctttctttttcctacaaaaggcatgacaaggaactgcaggggaacgtgcagacatgaagagttgtgttagtgcagtggtatcatgaatgacttgttctcttattcatataa

SEQ ID NO: 32568 - DNA, 120 bp, synthetic construct
  source 1..120: mol_type = other DNA
cacccagagtttcaaatttaaggagatattttcttcctaaatgtccttcaaagctgtcacagcatcatctttcaataaaaaatagttgatgagactgggcatggtggctggtggctcccg

SEQ ID NO: 32569 - DNA, 120 bp, synthetic construct
  source 1..120: mol_type = other DNA
gcgaggccctgtctcttaaaaaaaaaaaaaagtagccaggtgtggtgatgtgtgcctgtgatcccagcttcttgggaggctgcggtggaaagattgcttgtgcccaggaggttgaggcta

SEQ ID NO: 32570 - DNA, 120 bp, synthetic construct; identical to SEQ ID NO: 9590
  source 1..120: mol_type = other DNA

SEQ ID NO: 32571 - DNA, 120 bp, synthetic construct
  source 1..120: mol_type = other DNA
agtgtgcctaattctgaaagtagcaagctaaattatgcagtgccaaaagtgacaactcttatacctacaccatcccgtctacagcggcatgattttagctttatagctaaaaaacgctgc

SEQ ID NO: 32572 - DNA, 120 bp, synthetic construct
  source 1..120: mol_type = other DNA
cccagtggagagtttccatttaatcttttcaaagttaactgataaacatcctttaggatgtgaagtgatgggttaattctgtttggattgtttggaatatctctgagctggaatactgtc

SEQ ID NO: 32573 - DNA, 120 bp, synthetic construct
  source 1..120: mol_type = other DNA
agacaacatgccaaaggccacacatgcatctatgatgagtgatgcttgtcttagatgttttttaattggcagaatgaataaatggatacattcacattaaaacaaacttgatttcaaccc

SEQ ID NO: 32574 - DNA, 120 bp, synthetic construct; identical to SEQ ID NO: 9591
  source 1..120: mol_type = other DNA

SEQ ID NO: 32575 - DNA, 120 bp, synthetic construct
  source 1..120: mol_type = other DNA
attctacttcattgtggtgttccatgtaaccttgagtacacacagccatacctgaacctttcattacgtcttccaccaggtgaaagcccattcctgctccttcttcccctcctctataca

SEQ ID NO: 32576 - DNA, 120 bp, synthetic construct
  source 1..120: mol_type = other DNA
ccagaagttctcctacttgctagtaccccatctctgccctttaggctggcttttgcctgtctagctaactaagacctgccagatgcttctaacttgtctggcctgtaaatctgtcttgtc

SEQ ID NO: 32577 - DNA, 120 bp, synthetic construct; identical to SEQ ID NO: 9592
  source 1..120: mol_type = other DNA

SEQ ID NO: 32578 - DNA, 120 bp, synthetic construct
  source 1..120: mol_type = other DNA
ggaatatgccttaatctctgccatgcagagtaagctttaacctttcaaaatacagcctgatacatacaatcatgttacggaatgaatggaaggaaagatttccaatactaaagtctagat

SEQ ID NO: 32579 - DNA, 120 bp, synthetic construct
  source 1..120: mol_type = other DNA
atatacactgtgatactcactcatcaaataaaactgagtatgtgctaattttcctcttcattggataaagagtcagataaagaatcctgactgcccattttttgtggactgaggttttgc

SEQ ID NO: 32580 - DNA, 120 bp, synthetic construct
  source 1..120: mol_type = other DNA
tttacttaaacctcatccaaatgcattttgcaaagagaaagctgaaatgccaattatgctacttggggattcagcagaacttatctgactgatggaagtgaccaatttgaaccactgacc

SEQ ID NO: 32581 - DNA, 120 bp, synthetic construct; identical to SEQ ID NO: 9593
  source 1..120: mol_type = other DNA

SEQ ID NO: 32582 - DNA, 120 bp, synthetic construct
  source 1..120: mol_type = other DNA
tgtggctgggctcagaatcagtgcctccaaaggagcaccgaatgacagattgatggagctcatcagagaggcacagagaccacaggccattggaatggggccttatttggatggactcat

SEQ ID NO: 32583 - DNA, 120 bp, synthetic construct
  source 1..120: mol_type = other DNA
tctaggtggaagaaagggaaagggcgtgtttacaagaagaagagcacaagtcaacaatgagctatggatgcatgatgtcatcctctaggactaagcatccttagtacttttaaagcactt

SEQ ID NO: 32584 - DNA, 120 bp, synthetic construct
  source 1..120: mol_type = other DNA
gtatttttatccaatttgtgtgtgccttggacttgggccatatttgccttttctatttaaaataatcagatcaagcatgacacatgaaaaatcattgaaggcaaggaagtgctttcatag

SEQ ID NO: 32585 - DNA, 120 bp, synthetic construct; identical to SEQ ID NO: 9594
  source 1..120: mol_type = other DNA

SEQ ID NO: 32586 - DNA, 120 bp, synthetic construct
  source 1..120: mol_type = other DNA
cttgtcaaggtgataagcatgcgtttctgctgcactctatacaggtgagtaaccgagggtgggggctttgtttcacatgacacccagggcccagggaaagtgggggatgggaaaagtgag

SEQ ID NO: 32587 - DNA, 120 bp, synthetic construct
  source 1..120: mol_type = other DNA
ggagtattgacacagcattcttcataaggttgagaaaacgtgaactgtttatatccaaaaaaagagagaagagatgatggaaagaataggggaactatccctgctcccagctaccccttg

SEQ ID NO: 32588 - DNA, 120 bp, synthetic construct
  source 1..120: mol_type = other DNA
gaacacaaggaagggaggcagaacaacagcagctgaagtcctggcctcaggctaacgggctttactttggggggcggtatagactgtaggagaagcaagtgggaaggagatgtagggaaa

SEQ ID NO: 32589 - DNA, 120 bp, synthetic construct; identical to SEQ ID NO: 9595
  source 1..120: mol_type = other DNA

SEQ ID NO: 32590 - DNA, 120 bp, synthetic construct
  source 1..120: mol_type = other DNA
ccctcactgaaagccgggagggagagagagagagagaacgggggccggcggagaagagggcgagacgaaagtaagcaaagggacattagaagggaaggcagagccgagggacgcggaccg

SEQ ID NO: 32591 - DNA, 120 bp, synthetic construct
  source 1..120: mol_type = other DNA
gtcccagcgcgggcgcagcgcgtcggcgcggacgccggcggccagcgcggcctcgtagtgccggaggaaggcgcgcagctctggctcggccacgccgtgcgcagcgctgaagttgcgcag

SEQ ID NO: 32592 - DNA, 120 bp, synthetic construct
  source 1..120: mol_type = other DNA
gtcctcgttgaggtgcgaacggcggcagcagcagcagcagcaggaggggcgcggcaggcggcggcggctacggcggggcgggggccgggggctgcgggaggacatggtccggagctcagc

SEQ ID NO: 32593 - DNA, 120 bp, synthetic construct; identical to SEQ ID NO: 9596
  source 1..120: mol_type = other DNA

SEQ ID NO: 32594 - DNA, 120 bp, synthetic construct
  source 1..120: mol_type = other DNA
ccagacaggccgcgggctgcgggcggggtgggccgtggatcccgggcgcctaggaccgggacgcggcagcaaggcgtggagagagcccccgggggcgtcccatgaggcgttcgggatcgg

SEQ ID NO: 32595 - DNA, 120 bp, synthetic construct
  source 1..120: mol_type = other DNA
cagccgaagagccgcccggcagggagaggcggagtcactggcgcccggggcggggtgttggggaggggtgagtagggacaggagggagggggtggagagttgggctgctgcgacgcctcc

SEQ ID NO: 32596 - DNA, 120 bp, synthetic construct
  source 1..120: mol_type = other DNA
ccttatctcatgccgcggtgaaactttgctcaagttggtggtgctctgaggtctccagggctggaggccgcgcgacgcgaatcgccgacactggattctcgggcgttagtccgaagttta

SEQ ID NO: 32597 - DNA, 120 bp, synthetic construct
  source 1..120: mol_type = other DNA
gggcgtttgctccccctcccgaccgagcgggcggccggcgtcagcaccgcggacagcgcatcggtgccgcagccgcgggcgggcgccgctagggctgccaggggtccgaggcgcgggcaa

SEQ ID NO: 32598 - DNA, 120 bp, synthetic construct; identical to SEQ ID NO: 9597
  source 1..120: mol_type = other DNA

SEQ ID NO: 32599 - DNA, 120 bp, synthetic construct
  source 1..120: mol_type = other DNA
tgtgctatggaacgcccctgggaaatggtcgcccccctacgccccaccgcggcaggaaaagacgacggatgccccgcgcggctgcgggtgctcctctgctggacacaagccggctttgcc

SEQ ID NO: 32600 - DNA, 120 bp, synthetic construct
  source 1..120: mol_type = other DNA
tgatgatatgatggcagaaaataaaaataataatggtgactgtacttagatatcccaggtgggtgagcggtggcaaaaagcagacccctgccccctgccctaccgcccatttccaatccc

SEQ ID NO: 32601 - DNA, 120 bp, synthetic construct
  source 1..120: mol_type = other DNA
gacaggagagctgctgaaagctgaaaggcatttgacttggggtgttgattgtcccaaaccagggtgctctggagatttggttcttcccagatatgctgcctcagtttatagatggagcca

SEQ ID NO: 32602 - DNA, 120 bp, synthetic construct; identical to SEQ ID NO: 9598
  source 1..120: mol_type = other DNA

SEQ ID NO: 32603 - DNA, 120 bp, synthetic construct
  source 1..120: mol_type = other DNA
cagtgaggacagccctgtcatggacctctggggctggattccgcttggctggtcagctcttgacagaagccctgagatgtgtcattctaggagttgccctggagactccagatgtaactg

SEQ ID NO: 32604 - DNA, 120 bp, synthetic construct
  source 1..120: mol_type = other DNA
ctgtcttgtcctccaacttgctattctagcttgattagcagcaaatctctggcatcaatctcagctccgaatgacctaatcaatttgtgtaatagggaaatgatgagttccctgcacata

SEQ ID NO: 32605 - DNA, 120 bp, synthetic construct
  source 1..120: mol_type = other DNA
gcttttgcccactaaatcaatatttaagctactgacttccagctggctatgctcagagcctttacctcagccctgaattgctgcaatagactcctaaggacaagggcttgcttagtgtct

SEQ ID NO: 32606 - DNA, 120 bp, synthetic construct; identical to SEQ ID NO: 9599
  source 1..120: mol_type = other DNA

SEQ ID NO: 32607 - DNA, 120 bp, synthetic construct
  source 1..120: mol_type = other DNA
tttcctttgtaggatgttttgagccaatcactttgatgccatcttttcaactccatgattattgaatctgctatgcatgcaaaaatttcagataagacacgcaaataggtacggcctctc

SEQ ID NO: 32608 - DNA, 120 bp, synthetic construct
  source 1..120: mol_type = other DNA
ttaggtaaggtcaaatggaaccagttggcaactccactcctaggtatatacccaagaagataaacaaaaatgtaccttcacaaaaacttgtacatgaatattcatagcagcaccattcat

SEQ ID NO: 32609 - DNA, 120 bp, synthetic construct
  source 1..120: mol_type = other DNA
tacaatgtgcataaatcttgaaaacatactaaatgaaagaagccagtcacaaaggaccacatactgtatgattccgtttgtataaaatatccagaatagacaaatctataaagacaaaac

SEQ ID NO: 32610 - DNA, 120 bp, synthetic construct; identical to SEQ ID NO: 9600
  source 1..120: mol_type = other DNA

SEQ ID NO: 32611 - DNA, 120 bp, synthetic construct
  source 1..120: mol_type = other DNA
ctggacttggtggcaggcacctgtaatcccagctactcaggagactgaggcagaggaattgcttgaacctgggagtcaaaggttgcagtgagccgagatcgcaccactgcaccactgtac

SEQ ID NO: 32612 - DNA, 120 bp, synthetic construct
  source 1..120: mol_type = other DNA
ggaggccgggtgcggtggctcatgcctgtaatcccagcactttgggaggccgaggcgggcggatcacgaggtcaggagattgagaccatcctggctaacacggtgaaaccccgtctctac

SEQ ID NO: 32613 - DNA, 120 bp, synthetic construct
  source 1..120: mol_type = other DNA
ggccactgcactccagcctgggcgacagagtgagactccatctcaaaaaaaaaaaaaaagaaagaaatttatcccaaggaaaataattgcttttagaaatgagaaaatttgaaacaattt

SEQ ID NO: 32614 - DNA, 120 bp, synthetic construct
  source 1..120: mol_type = other DNA
tagtagcagattcaaaatgttctggttgccttcaaacctctttgatcttcttgttctcagaactcctctagtactcattgtctgcattacttattggcaattagctgtgtaacgggatac

SEQ ID NO: 32615 - DNA, 120 bp, synthetic construct; identical to SEQ ID NO: 9601
  source 1..120: mol_type = other DNA

SEQ ID NO: 32616 - DNA, 120 bp, synthetic construct
  source 1..120: mol_type = other DNA
aggacctgggagaaaggccccttgaaataaaattattctggggaagcaggagtctgactggaggcttagacaagggtctaagtgctttggtgacacaggatgtaactgatgctggatgcc

SEQ ID NO: 32617 - DNA, 120 bp, synthetic construct
  source 1..120: mol_type = other DNA
tgagtggtaataggcaagaaatgtctcaaatggtacagcagcacttaacgataacatttgtaatagcacttacaatactgtcctccttttctttccattggcatttggaggacagggttc

SEQ ID NO: 32618 - DNA, 120 bp, synthetic construct; identical to SEQ ID NO: 9602
  source 1..120: mol_type = other DNA

SEQ ID NO: 32619 - DNA, 120 bp, synthetic construct
  source 1..120: mol_type = other DNA
tgtgtagtagtcaataaattacattaagatactcaacactttagtatacaataagctttgtgttagattattttgcccaattgtaagctaatatacattttggacttaggatattttcaa

SEQ ID NO: 32620 - DNA, 120 bp, synthetic construct
  source 1..120: mol_type = other DNA
tgtaaccctatcataatttgcggagcatctgtatatgatgtccttttttggtctcttataataaattttctttttcagacagggtctcactccattgcccagacagaagtgcagtggcac

SEQ ID NO: 32621 - DNA, 120 bp, synthetic construct
  source 1..120: mol_type = other DNA
agagatagggtctcactatgttgtccaggcttggtctctcaaagtgctaggattacaagcatgagccaccacaactggcctacaacaatttttggcttacagtccattttttctagtatt

SEQ ID NO: 32622 - DNA, 120 bp, synthetic construct
  source 1..120: mol_type = other DNA
gggtcttgagactatcttataactcaacttgttaaaaatttgtgactgttcagctgctctctggttatttccaaataactgatgaacagatttttattgagaacctaccaggtataaagc

SEQ ID NO: 32623 - DNA, 120 bp, synthetic construct; identical to SEQ ID NO: 9603
  source 1..120: mol_type = other DNA

SEQ ID NO: 32624 - DNA, 120 bp, synthetic construct
  source 1..120: mol_type = other DNA
ccaggagtattgacctgggtgcaaatatagaagcaagaaaaaacatattgcgttcaaggaactatggtgggcgcgtgttgagtatgggtgagaggagagggaagagtctgtttcttataa

SEQ ID NO: 32625 - DNA, 120 bp, synthetic construct
  source 1..120: mol_type = other DNA
atatgtggactctggcttgatgaagccaattttatggcaaactttgttttcccacaaacatggccacactgaaaggcacaagctatgtctgcaggggaaaaggaagacaaattgggaaca

SEQ ID NO: 32626 - DNA, 120 bp, synthetic construct; identical to SEQ ID NO: 9604
  source 1..120: mol_type = other DNA

SEQ ID NO: 32627 - DNA, 120 bp, synthetic construct
  source 1..120: mol_type = other DNA
aaaatctaatccagatttttttgttctctaggtaaggccattcatgtgttgatttttgtctcaaatggattttgatataactttttaagactgtataagtaatgcataattaaattctga

SEQ ID NO: 32628 - DNA, 120 bp, synthetic construct
  source 1..120: mol_type = other DNA
aataagaattacccccaattctatcacattatgcacagaaaattactgttatcaatcattttaatgatcttactgcctggttggttggctctatctgtctatctatctacatatacatac

SEQ ID NO: 32629 - DNA, 120 bp, synthetic construct
  source 1..120: mol_type = other DNA
actatgtgccaagcactgttcaaggtacctgagattgttcagtgaacatggagtttatattactttcatgtcaataaatacatatgaagtatcatttgttggcatagtgtactctaaaat

SEQ ID NO: 32630 - DNA, 120 bp, synthetic construct; identical to SEQ ID NO: 9605
  source 1..120: mol_type = other DNA

SEQ ID NO: 32631 - DNA, 120 bp, synthetic construct
  source 1..120: mol_type = other DNA
tttgcccttctgccatttctccttcctcagtcatgcttcctagaatatagatgtgatgactgggactccagctgccatcttgaatcatgaggtgactttgaggatggaagccacagtgtg

SEQ ID NO: 32632 - DNA, 120 bp, synthetic construct
  source 1..120: mol_type = other DNA
ccctcttctctcaggtatttgtaccttgtgttctcatcatggttgactttcctgtgggatttttccctccacttggttcctctatattcttgcaattgggagagatgaaatgtcaataac

SEQ ID NO: 32633 - DNA, 120 bp, synthetic construct
  source 1..120: mol_type = other DNA
caggactctatgaatattgaactgatcgttttagagagttagaatatttgttttagctaggcaactctaaaaaggggatgagacccagaggaggaaagaatggaaggtggcattggaagt

SEQ ID NO: 32634 - DNA, 120 bp, synthetic construct; identical to SEQ ID NO: 9606
  source 1..120: mol_type = other DNA

SEQ ID NO: 32635 - DNA, 120 bp, synthetic construct
  source 1..120: mol_type = other DNA
gtcttggggatgcctttccaggtattacatgggtcaatagggcttctagggggaggaatgtttcttgtgaatagaaggtcttctttatagttgagcacatgagtgtggtcagtcagcttc

SEQ ID NO: 32636 - DNA, 120 bp, synthetic construct
  source 1..120: mol_type = other DNA
gtggtgcaatctcggctcactgcaagctctgcatcccaggttcacgccattctcctgcttcagcctcccaagtagctaggactacaggtgcccaccaccacgcctggctaattttttgta

SEQ ID NO: 32637 - DNA, 120 bp, synthetic construct
  source 1..120: mol_type = other DNA
atcctaactcatttaaaattgcctatatattaatgactgggtaggagggagggtgggagtaccattaggggctgttggaatagcagataaagaaactaaggccctgaagggcagtcagag

SEQ ID NO: 32638 - DNA, 120 bp, synthetic construct
  source 1..120: mol_type = other DNA
cttggggctcttattgaatatgcaggcctttctgttcagcatattcagcaactcagagcctcatagtagaacaattggaggagaattgtcagatggtgatgagggagaatgaaaggggag

SEQ ID NO: 32639 - DNA, 120 bp, synthetic construct; identical to SEQ ID NO: 9607
  source 1..120: mol_type = other DNA

SEQ ID NO: 32640 - DNA, 120 bp, synthetic construct
  source 1..120: mol_type = other DNA
cccggttctcttaacagaagctatatcacaaagggccccaggctcattggaaggatcccagtttggtttgctcatttctttctccatcaagtattatggaacaccaattaaatactagat

SEQ ID NO: 32641 - DNA, 120 bp, synthetic construct
  source 1..120: mol_type = other DNA
atgtggctagatgctggatacaagagccaaaattgacttggtttctgcctcattcagcttcaggatcaaaagttacacaagtcaatgaaaaatgaccatggtgacaatggctgtgaagaa

SEQ ID NO: 32642 - DNA, 120 bp, synthetic construct; identical to SEQ ID NO: 9608
  source 1..120: mol_type = other DNA

SEQ ID NO: 32643 - DNA, 120 bp, synthetic construct
  source 1..120: mol_type = other DNA
agtttattaagaaagtaaaggaataaagaatggctactccatagacagagcagccccgggggctgctggttgcccatttttatggttatttcttgattgtatgctaaacaaggggtgaat

SEQ ID NO: 32644 - DNA, 120 bp, synthetic construct
  source 1..120: mol_type = other DNA
gccatcttggttttggtgggttttagccagcttctttactgcaagctgttttaccagcaaggtctttatgacctgtatcttgtgccgatctcctgtctcaacttgtgacttagaatgcct

SEQ ID NO: 32645 - DNA, 120 bp, synthetic construct
  source 1..120: mol_type = other DNA
gaagccatggtgttctaagcagagggtgatggactcaccagctacttctgcctcacccaaggtctcattgtgcatcaggagaaggctgttcagagccttgactccctctctcttgcactt

SEQ ID NO: 32646 - DNA, 120 bp, synthetic construct; identical to SEQ ID NO: 9609
  source 1..120: mol_type = other DNA

SEQ ID NO: 32647 - DNA, 120 bp, synthetic construct
  source 1..120: mol_type = other DNA
gtcaaaaagtcaattgatcagttacggtgggacaggaacaaatcacaatggtggaatgtcatcagttaaggcaggaactggctattttcacttcttttgtggatcttcagttgcttcagg

SEQ ID NO: 32648 - DNA, 120 bp, synthetic construct
  source 1..120: mol_type = other DNA
tggggcggcaaaaattttggggggtgctatggagatataatgggcgatgtttctcagggctgcttcaagcgggattaggggtggcgtgggaacctagagtgggagagattaaactgaaga

SEQ ID NO: 32649 - DNA, 120 bp, synthetic construct
  source 1..120: mol_type = other DNA
aggtccaaataaaagatgaagaaaaataggtattaaagggctaagaagtgggagtacccaggacatccaattagagagtgtccaagggggttcagcataattatttgcttggttggtgag

SEQ ID NO: 32650 - DNA, 120 bp, synthetic construct; identical to SEQ ID NO: 9610
  source 1..120: mol_type = other DNA

SEQ ID NO: 32651 - DNA, 120 bp, synthetic construct
  source 1..120: mol_type = other DNA
tgtcatgagagggacaagcagttgttcattcccatctgcaaactggattttgggggtaaggaagactagagtacatgtgcccatccatttggcaggtaggcacatgtaggtggaagagcc

SEQ ID NO: 32652 - DNA, 120 bp, synthetic construct
  source 1..120: mol_type = other DNA
cattagaggttataatggggattgatggtgcaactgcatagagggagaggtttggttttcgtggtatatgagaaagtgcatagtgtctatgactaacctttcactgctattcatggggct

SEQ ID NO: 32653 - DNA, 120 bp, synthetic construct
  source 1..120: mol_type = other DNA
ttttagtttgttaataatgatagagggcttatcagtaatgtgaagttggaacgctcccatctctttgataatgtgtgtggctgggttctggagataaagagtaaaggaacgtttggacgg

SEQ ID NO: 32654 - DNA, 120 bp, synthetic construct; identical to SEQ ID NO: 9611
  source 1..120: mol_type = other DNA

SEQ ID NO: 32655 - DNA, 120 bp, synthetic construct
  source 1..120: mol_type = other DNA
caattatttgctagagaaggattggaggcagtgaggagagagtgggtgagattgatagtgtgctggaggtaactagggagaggtagagagtgactggagaatgggggcaaggataagagt

SEQ ID NO: 32656 - DNA, 120 bp, synthetic construct
  source 1..120: mol_type = other DNA
accaggagatatcagttatgatggtttggaggaaaagtgtggtatttacgattagttgagaatggtgaataggagtgtgactagacagaagatagtagggatgacaagtttttggggtgc

SEQ ID NO: 32657 - DNA, 120 bp, synthetic construct
  source 1..120: mol_type = other DNA
atgcgagtgagtttaagggaagtaggggagagtacttgcaatttccagggggaagaggagagatcaggctggctgtctgatgggcacagctttattctggaatggtgaacccaatgggga

SEQ ID NO: 32658 - DNA, 120 bp, synthetic construct; identical to SEQ ID NO: 9612
  source 1..120: mol_type = other DNA

SEQ ID NO: 32659 - DNA, 120 bp, synthetic construct
  source 1..120: mol_type = other DNA
ttaaattggaggctgagcttggtgaggtgtgtctttaaaagaccgttagtccattctacctttcctgaagattgaggacagtaaggggtatgaagattccactgaataccaagagcctga

SEQ ID NO: 32660 - DNA, 120 bp, synthetic construct
  source 1..120: mol_type = other DNA
tcagaccctgtgggaaagacctctacccatccagtgaaagtgtctacccagaccaagaggtattttagtttcctgactcggggcatgtgagtaaagtcaatttgccagtcctgggcaggg

SEQ ID NO: 32661 - DNA, 120 bp, synthetic construct
  source 1..120: mol_type = other DNA
tagatttccatgaaagaaaggaaatgagatattctaagaggtgggctagcggcttgtaacctacatggaagaggttatgaaatgacggcagaatagaatgggcctttgaggctggaagga

SEQ ID NO: 32662 - DNA, 120 bp, synthetic construct
  source 1..120: mol_type = other DNA
cagaagttgtaatgctcgctgcttctttagctaccttatcagcataagcgttgccctgagtgatgggatctgatgccttttgatggcccttgcagtgaatgactccagcttcctttggaa

SEQ ID NO: 32663 - DNA, 120 bp, synthetic construct; identical to SEQ ID NO: 9613
  source 1..120: mol_type = other DNA

SEQ ID NO: 32664 - DNA, 120 bp, synthetic construct
  source 1..120: mol_type = other DNA
ggaaatggagtgaatggcaggtggatcagagagatacagtcatgggggtcagatgtggtatccggaataatgtgggaggccggattgaagtccaggccaggaacaatggtaattgtggga

SEQ ID NO: 32665 - DNA, 120 bp, synthetic construct
  source 1..120: mol_type = other DNA
tttgtgattttgagggcctctaaaagtattagggtggcggcagctactgcatggagacatgatggccagcctaaaacagtagggtcaagttgtttggatgaaaggctacagggcatggtc

SEQ ID NO: 32666 - DNA, 120 bp, synthetic construct; identical to SEQ ID NO: 9614
  source 1..120: mol_type = other DNA

SEQ ID NO: 32667 - DNA, 120 bp, synthetic construct
  source 1..120: mol_type = other DNA
gaattatgccgaggtaggtaatggatggagaagaaatttgagctttggagggggatacctaatatcccttggagaataaatattaaaggagcaggagggtgtcttgttgagaagattcaa

SEQ ID NO: 32668 - DNA, 120 bp, synthetic construct
  source 1..120: mol_type = other DNA
cttgtggcggcagtacagcccaggtaagctgctgggactgatgggtgtcagggtcagtccaggtaaaagcaaagagaggctgggatgaggggtgcaggggaatagtgaaaaaagcgtctt

SEQ ID NO: 32669 - DNA, 120 bp, synthetic construct
  source 1..120: mol_type = other DNA
ctaacccgtaagacttgtccggtttttggacaggtaaaatgggggaattgtaaggagagtttataggctttagaagcccatgctgtagcaggcaagtgataacaggcttcagtcccctta

SEQ ID NO: 32670 - DNA, 120 bp, synthetic construct
  source 1..120: mol_type = other DNA
gggttaaggtggggggatacaagagaaagacacaaaggaagctttgggttggggagaagggcagcaatgagatgtggttgtagtccagggatagtcagggagcagataattttgttaaaa

SEQ ID NO: 32671 - DNA, 120 bp, synthetic construct; identical to SEQ ID NO: 9615
  source 1..120: mol_type = other DNA

SEQ ID NO: 32672 - DNA, 120 bp, synthetic construct
  source 1..120: mol_type = other DNA
ctagaggctctgggagtggctgccaggtgagttggacagtccaatttccagtggggtcctgcacagatgggacacagcttaggaggaatcccaggctgtgggcattccttgcaccagtga

SEQ ID NO: 32673 - DNA, 120 bp, synthetic construct
  source 1..120: mol_type = other DNA
acagtgaaggcaagtaattgcaattcagaaatatgttgctgcttggctgcctcttctctattattgtacaccttgaaggcaaggttaattaagtcctgttgtggggtttgagggccggag

SEQ ID NO: 32674 - DNA, 120 bp, synthetic construct; identical to SEQ ID NO: 9616
  source 1..120: mol_type = other DNA

SEQ ID NO: 32675 - DNA, 120 bp, synthetic construct
  source 1..120: mol_type = other DNA
gtgagattgggctagagaagaaactctttcctgttcatctggggagagagtagaagttaggatgacatttaaatcactccaggttaaattgtaggacagagttagatattggaattcctg

SEQ ID NO: 32676 - DNA, 120 bp, synthetic construct
  source 1..120: mol_type = other DNA
gaaatttttgggcaggtggggaagagctagtcatggaacgaaactgtaagccagaccaggtgtgaggaggagaggtgatagaagggttgtagagtgggggagcagaggctgaagaagagt

SEQ ID NO: 32677 - DNA, 120 bp, synthetic construct
  source 1..120: mol_type = other DNA
gtactgaagggacaggtgggagggaaagaaggaggatttgggatgagttgcattgggaacagagactagggagggaacaaagtgtgaaaaatgcctggacataaggcacctcagaccact

SEQ ID NO: 32678 - DNA, 120 bp, synthetic construct
  source 1..120: mol_type = other DNA
aaataatatgcttaggttttaggtcagacgagagttgaagaggttttaaattcttgagaacacaggctaagggagaagaaggaggaatgtagggtggaaggttgcccatagtgagggagg

SEQ ID NO: 32679 - DNA, 120 bp, synthetic construct; identical to SEQ ID NO: 9617
  source 1..120: mol_type = other DNA

SEQ ID NO: 32680 - DNA, 120 bp, synthetic construct
  source 1..120: mol_type = other DNA
aaaagaccgcttacccgatttgaaattggtgagatgttccttgggctggctggtctgaggacccgaggtcataggtggatcttctcacagagtgagggcgaggacagggtactggtctcc

SEQ ID NO: 32681 - DNA, 120 bp, synthetic construct
  source 1..120: mol_type = other DNA
ctaagtccgaaaagagagtcagcaaaaggtggtgggattatcattagttcttataggtttgggatgggtggtggaattaggagcaatgtttttcaggcagggtgtggatcttacaaagta

SEQ ID NO: 32682 - DNA, 120 bp, synthetic construct; identical to SEQ ID NO: 9618
  source 1..120: mol_type = other DNA

SEQ ID NO: 32683 - DNA, 120 bp, synthetic construct
  source 1..120: mol_type = other DNA
ttgggctcagaggcctgacagtgtttattcagccttagaaattcctctcaaatggatgtttccttcttcctgagcctactgcctctgcaagagtgggaggcctagcctttccaaacctgg

SEQ ID NO: 32684 - DNA, 120 bp, synthetic construct
  source 1..120: mol_type = other DNA
aatcccagtctcatttaaggagccctcaaggctctgctttttctgacctaacttacctgttgccttgtctcctttttccccaaaatcttcctaccttccctgtacatctgatgctttagc

SEQ ID NO: 32685 - DNA, 120 bp, synthetic construct
  source 1..120: mol_type = other DNA
actggaaaactgtaaccataataggtccattgtctgttgtgtacagcaaatcaatacaccaagatactgggatgcagcagagataagagatttaatcatagagttgcccagaaaagagat

SEQ ID NO: 32686 - DNA, 120 bp, synthetic construct; identical to SEQ ID NO: 9619
  source 1..120: mol_type = other DNA

SEQ ID NO: 32687 - DNA, 120 bp, synthetic construct
  source 1..120: mol_type = other DNA
aattcttgttaaccatgtgaggatggcgtcaactccttttcctctgtcaacatagcaaaggaaatgccagaacactattggctgtcccaggcagggtaattctgctgctgcaggtccttt

SEQ ID NO: 32688 - DNA, 120 bp, synthetic construct
  source 1..120: mol_type = other DNA
tccagagtaaacaaatgtgtagagacagaaaatagattagtggttgccaggggatagggggaggagggaactggaaggtatgaggtttctttctggggtaatgaaaatagtctggaatta

SEQ ID NO: 32689 - DNA, 120 bp, synthetic construct
  source 1..120: mol_type = other DNA
actgagctcctgcactaggcccctgtaggccaagccaaaatggaatcccttgtgctaaagtctcacatcaccaaactgaaactaaattgtttatcttaccttgcaaggaatcaggagaaa

SEQ ID NO: 32690 - DNA, 120 bp, synthetic construct; identical to SEQ ID NO: 9620
  source 1..120: mol_type = other DNA

SEQ ID NO: 32691 - DNA, 120 bp, synthetic construct
  source 1..120: mol_type = other DNA
ttttatcccagaccctttttgtcattcttcagctactcccccatgtggaactattataatctaaatgaaagtgtttactcaatcacagaccacatctgaattataatcaaataccaatta

SEQ ID NO: 32692 - DNA, 120 bp, synthetic construct
  source 1..120: mol_type = other DNA
tgtctaccttgctagagaccaaacttggactaatccctgcaaaagaaaaaccagcaaggagaaaaggcatcattaggaatgtagtttgtgacaaaaatagctcttcagagcttttcacac

SEQ ID NO: 32693 - DNA, 120 bp, synthetic construct
  source 1..120: mol_type = other DNA
gctcttctgacctgttggttatttctgcaggataaggagagagaatgtgttgagctttctctgagtgaggcttgtgcctgttactctcattatttcacgagtagagcccagtctgcctgg

SEQ ID NO: 32694 - DNA, 120 bp, synthetic construct; identical to SEQ ID NO: 9621
  source 1..120: mol_type = other DNA

SEQ ID NO: 32695 - DNA, 120 bp, synthetic construct
  source 1..120: mol_type = other DNA
ggattaataagaaaatctccgctcatattacacaaagataatttcaaccccattatagacacatgatgttattatttgtggtaagccaacattttcatggcacatgcgatgttgccagtg

SEQ ID NO: 32696 - DNA, 120 bp, synthetic construct
  source 1..120: mol_type = other DNA
aaaccacaactgacatctctgaccagaaacattccaaccctaagataaacccctccccgaccaaggacatgccagcgccaagataacctcccctttgaccggagaaatgtcagccccaag

SEQ ID NO: 32697 - DNA, 120 bp, synthetic construct; identical to SEQ ID NO: 9622
  source 1..120: mol_type = other DNA

SEQ ID NO: 32698 - DNA, 120 bp, synthetic construct
  source 1..120: mol_type = other DNA
ttgcccaaggttacacaactagcaaatggcagagctggaatttgaactcaggccacctgggtccagagtccattcaacaaacagagctcacagggttgtgtggttagtgagatgggcaat

SEQ ID NO: 32699 - DNA, 120 bp, synthetic construct
  source 1..120: mol_type = other DNA
tgtgcagtttttgttttttttttcccccagagaggaaacagattacatggactattttcatatgtttgtgaactggccatttgggccagattaaggggtcaggcattggtggggaaggga

SEQ ID NO: 32700 - DNA, 120 bp, synthetic construct
  source 1..120: mol_type = other DNA
aatatttctgtccagaattcttgttaaccctgtgaggatggcttcaactactcttcctttgtcaacatagcgaaggaaatgccagaacaccattggctctcccaggcagagtgtttctgc

SEQ ID NO: 32701 - DNA, 120 bp, synthetic construct
  source 1..120: mol_type = other DNA
tggattcctttcacattcaaaaagacctcacatcacctccctgttctctagagagaagtgccctgtttcttaagcaaagtgctaaacagagatagttaaataaattttcaagtaagtaag

SEQ ID NO: 32702 - DNA, 120 bp, synthetic construct; identical to SEQ ID NO: 9623
  source 1..120: mol_type = other DNA

SEQ ID NO: 32703 - DNA, 120 bp, synthetic construct
  source 1..120: mol_type = other DNA
cctgggatgggtcattcccaactgcagaggacagaagccttctggaataaaagccttctgccaggcatacccctttggtcaatccatcaccaagtctataatcaacactaaagtggtcct

SEQ ID NO: 32704 - DNA, 120 bp, synthetic construct
  source 1..120: mol_type = other DNA
gggaaggggcatgttttctctttcttaccagctgtattctcctgatccaaaatcattattcatcatcaaaataaaattccagagggccagcttgttctggcatggcaaggacagtcagat

SEQ ID NO: 32705 - DNA, 120 bp, synthetic construct; identical to SEQ ID NO: 9624
  source 1..120: mol_type = other DNA

SEQ ID NO: 32706 - DNA, 120 bp, synthetic construct
  source 1..120: mol_type = other DNA
ctgcctggcctcagggactggctcaggcaaatgagactcaaattaggggcttttgatgaatccactgggaaaagtgaagctttccttcagtggggatcactagctctagggataatgtct

SEQ ID NO: 32707 - DNA, 120 bp, synthetic construct
  source 1..120: mol_type = other DNA
agggagcagcattgaaggatggagggagagagaccaagtcctgatgagatccttcaagtgcctagatttggagggcatggaagcccacaaattcatttttttttaaattaaccatcttaa

SEQ ID NO: 32708 - DNA, 120 bp, synthetic construct
  source 1..120: mol_type = other DNA
tctgcctccccccagccctggcaaccaccagcctactttctacttctacgagtttacctgttctggatatttcacataaacggaatcatacaacatgtgatcttttgtgactggcttctt

SEQ ID NO: 32709 - DNA, 120 bp, synthetic construct
  source 1..120: mol_type = other DNA
atttataaagaaaagaggtttaagtggctcacggttccacaggctgtacagaaaacatgacgctggcatctgcttggcttctggggaggcctcaggaaacttacagtcatggcagaaggt

SEQ ID NO: 32710 - DNA, 120 bp, synthetic construct; identical to SEQ ID NO: 9625
  source 1..120: mol_type = other DNA

SEQ ID NO: 32711 - DNA, 120 bp, synthetic construct
  source 1..120: mol_type = other DNA
ttgcctaatttaaaaaaacttttctttgtagagacaagggtcttgctatgttgcccaggctggtcttgaactcctggcctcaagcagtcctcctgctttgggctcccaaactgctgggat

SEQ ID NO: 32712 - DNA, 120 bp, synthetic construct
  source 1..120: mol_type = other DNA
tcatatacgagtatttgtctgaacacctgttttcacttttggggggtatatatctaggaatggaatttctggatcacgtggtaattctgtgtttaactttttgaagaactgccagactct

SEQ ID NO: 32713 - DNA, 120 bp, synthetic construct
  source 1..120: mol_type = other DNA
tggaattgttcctgggctggtgactgtgatggtgcaatccatagcccaggaatgaccacagctaagaagccttgccccaaaacagcccctttgcagctgctgggggaggcctgtctggcc

SEQ ID NO: 32714 - DNA, 120 bp, synthetic construct; identical to SEQ ID NO: 9626
  source 1..120: mol_type = other DNA

SEQ ID NO: 32715 - DNA, 120 bp, synthetic construct
  source 1..120: mol_type = other DNA
tgcctcttccaccatgtgagaaggtgccacctatgacaatgggatccctcaccagctaccaaatctgccagtgccttgatcttggacttcccagcctccatgatggtaagaagtaaattt

SEQ ID NO: 32716 - DNA, 120 bp, synthetic construct
  source 1..120: mol_type = other DNA
acctatccagtatatggcattgaggaagtcactttctgtctctgggtttcagtttctcaagtgacaaatgagagggacctattaaatgatgacattgacagtctctggtcctgggtgcat

SEQ ID NO: 32717 - DNA, 120 bp, synthetic construct
  source 1..120: mol_type = other DNA
atctctcagagctcgcatgctggccgctgtgtgccaggcagctcctggagggcattcatgatcagcaccagcatcttcctgtggctgtcccagcagataaagcagttattactgatggag

SEQ ID NO: 32718 - DNA, 120 bp, synthetic construct; identical to SEQ ID NO: 9627
  source 1..120: mol_type = other DNA

SEQ ID NO: 32719 - DNA, 120 bp, synthetic construct
  source 1..120: mol_type = other DNA
atgctatcacagagtaaggtgctttgttattattgctattataattgcccaatccttataaatccaaaagatacaaatgacaacctcctaattgcaatttcaagaggagtctcagtacca

SEQ ID NO: 32720 - DNA, 120 bp, synthetic construct
  source 1..120: mol_type = other DNA
gaacatcctgttcatgtcatggacccctgctttttgaagggccactcaattgccttattgaaagatgggtgctgtatgatccctggggctccatgccccatccctaggtgtcctctcaag

SEQ ID NO: 32721 - DNA, 120 bp, synthetic construct
  source 1..120: mol_type = other DNA
agtggcgttcctgctttttaagtgctgctgatgttggcaaggggaggaaggcaacggatgaggatgggataggggcaggatgcgatgaaacgacccctaagtagttcctaccccgagatc

SEQ ID NO: 32722 - DNA, 120 bp, synthetic construct; identical to SEQ ID NO: 9628
  source 1..120: mol_type = other DNA

SEQ ID NO: 32723 - DNA, 120 bp, synthetic construct
  source 1..120: mol_type = other DNA
ggggacatccatccatcaatccagtcagaccagggcaggctcttccttgggccccttctgttctgtcccttaggccaggaatatggaatggccaggaatatagactggccagggccaccg

SEQ ID NO: 32724 - DNA, 120 bp, synthetic construct
  source 1..120: mol_type = other DNA
agacagctgcctgtgtggtagatagtgaaaatcagaaaagactccagtgccccctcaatgtagttctcctttgtgcctgatatcccctcatcagcagttctcacctttgagttttaatgg

SEQ ID NO: 32725 - DNA, 120 bp, synthetic construct
  source 1..120: mol_type = other DNA
cctagagcgtggtaggggcagggtgcctcagtgggacagatgtgtagaagtccaaccttcttgacttccttgctttgctgtgagcatcacagcagtgcgcgaaggagggggcaggcaggg

SEQ ID NO: 32726 - DNA, 120 bp, synthetic construct; identical to SEQ ID NO: 9629
  source 1..120: mol_type = other DNA

SEQ ID NO: 32727 - DNA, 120 bp, synthetic construct
  source 1..120: mol_type = other DNA
caccagtgaactaaccatagaaaggggttaccattctccactcaaactctgagcaagagcattgccttccctcacataccaccttactctttctaaacagctttattgaggtacaactta

SEQ ID NO: 32728 - DNA, 120 bp, synthetic construct
  source 1..120: mol_type = other DNA
accagcctggccaacatggtgaaaccgtgtctctactaaaaatacaaaaacttagccaggagtggtggcaggtgcctataatcccagctactcgggaggctgagacaggagagttacttg

SEQ ID NO: 32729 - DNA, 120 bp, synthetic construct; identical to SEQ ID NO: 9630
  source 1..120: mol_type = other DNA

SEQ ID NO: 32730 - DNA, 120 bp, synthetic construct
  source 1..120: mol_type = other DNA
cataatgttttcaaggttcatttatgttttggcatgtatcgttaattcctttttatggctaaataatattccactgtatggatatactacgttttgtttatcggttcatcagttactggg

SEQ ID NO: 32731 - DNA, 120 bp, synthetic construct
  source 1..120: mol_type = other DNA
tgtttaatcatttgaggagttccttcttgctctttttaaaaaaactattattttttttttccaggacacagagatgccagagaaatgcggtcagttcttcctcctcctcgttcttaacaa

SEQ ID NO: 32732 - DNA, 120 bp, synthetic construct
  source 1..120: mol_type = other DNA
tgaatggtgagtcagcgatgttgcttcaccactatgaggactttggcttttaccctgaataggatgcaaataacttggaggtttgttttttctgtacaggtttattgagatataattgac

SEQ ID NO: 32733 - DNA, 120 bp, synthetic construct; identical to SEQ ID NO: 9631
  source 1..120: mol_type = other DNA

SEQ ID NO: 32734 - DNA, 120 bp, synthetic construct
  source 1..120: mol_type = other DNA
tgttgactagtagttcattctatggatgtgccgcaatttgtctatccattccccagttgatggacattagggttcttccatgtgggatcttatggcagatgtatgtttaagtttataaga

SEQ ID NO: 32735 - DNA, 120 bp, synthetic construct
  source 1..120: mol_type = other DNA
ttttttccaacacttggaatggcccatcttttaaattgtaaccattctaataggtatgtaatgatatctcatcatgatttaaatttgcatttctcagtgactggtgatgttgagcatctt

SEQ ID NO: 32736 - DNA, 120 bp, synthetic construct
  source 1..120: mol_type = other DNA
ggtttcatgttttcttattatcgaattcagagagttctttattaagagtcctctcaacaatgttttgtagtttccagcatgcatctctataggatatctgtgctcccacataccctggtg

SEQ ID NO: 32737 - DNA, 120 bp, synthetic construct
  source 1..120: mol_type = other DNA
cgggagttaaagaccagcctgaccaacatggagaaacttcgtctctactgaaaatacaaaattagccaggtgtggtggcgcatgcttgtaatcccagctactcaggaggctgaggcagga

SEQ ID NO: 32738 - DNA, 120 bp, synthetic construct; identical to SEQ ID NO: 9632
  source 1..120: mol_type = other DNA

SEQ ID NO: 32739 - DNA, 120 bp, synthetic construct
  source 1..120: mol_type = other DNA
aattccaagtagcaaggttaaccctataggagaggaatagcttttcctcacccattgctaggttcacagctgaggtcccgataacaaaagatagatcaacaagagatctatcagatcaac

SEQ ID NO: 32740 - DNA, 120 bp, synthetic construct
  source 1..120: mol_type = other DNA
gaagacacaaagaaacagtaaaacctgtggatttttaatgctaggtttgatgaagaagtgaatgacggcggtgaagtatgattggattagaagtatgatctaatgctaacaaactagggg

SEQ ID NO: 32741 - DNA, 120 bp, synthetic construct
  source 1..120: mol_type = other DNA
gagggtcttctgatccgctgtaggggagggcagaaaaatctttcctagatcagatggcctgcttcaggggagaagaggggaaggtgaaagtgatcttcctacttccactgttttgcaaat

SEQ ID NO: 32742 - DNA, 120 bp, synthetic construct; identical to SEQ ID NO: 9633
  source 1..120: mol_type = other DNA

SEQ ID NO: 32743 - DNA, 120 bp, synthetic construct
  source 1..120: mol_type = other DNA
atgccccattatctcatgctgggttaaaaccatagatgccaggctcatctccttgcctctagactcttatctttaagcattgctgcacagtatgggccagattcattctcttctgttaca

SEQ ID NO: 32744 - DNA, 120 bp, synthetic construct
  source 1..120: mol_type = other DNA
aaatgagcctgaccaacatggtgaaaccctgcctctactaaaaatacaaaaaaattaaccaggcatggtggcaggcacctgtaatcccagctacttgggaggctgaggtaggagaattgc

SEQ ID NO: 32745 - DNA, 120 bp, synthetic construct
  source 1..120: mol_type = other DNA
actcctctgtgccctcaggatgagttctaaactcttggcctcatgttcaagaaagcccaacacctggtccttccctgtgtgtcccaaatactctgctccagccagcccagttttcttgca

SEQ ID NO: 32746 - DNA, 120 bp, synthetic construct; identical to SEQ ID NO: 9634
  source 1..120: mol_type = other DNA

SEQ ID NO: 32747 - DNA, 120 bp, synthetic construct
  source 1..120: mol_type = other DNA
tttttgcttggtttatacatgttggttcctcataagagttgttctaactcaaacagcaaaagtctggactcccagaaactctgtttgtagatgccaacatggggattcagagagcccagg

SEQ ID NO: 32748 - DNA, 120 bp, synthetic construct
  source 1..120: mol_type = other DNA
cgagctgcaggggaagagaactgaagcacagagaggttgctcccttcaaggacacatgggagcaaatggcaaccaaacgtggaaagtgggtccattttaaaaagaattatagaaaaacac

SEQ ID NO: 32749 - DNA, 120 bp, synthetic construct
  source 1..120: mol_type = other DNA
aaacgttgtacccattaagcagtccctccctgttacctcctcccccagcccctcataaccatgaatctgcctgtgtctctgtgtatgtgcccattctggacatctcaaagaagtgaaatc

SEQ ID NO: 32750 - DNA, 120 bp, synthetic construct; identical to SEQ ID NO: 9635
  source 1..120: mol_type = other DNA

SEQ ID NO: 32751 - DNA, 120 bp, synthetic construct
  source 1..120: mol_type = other DNA
cagagctgggcatgtgtgggctctcactagcgctggctgaactgcctgcaccggcagggcatctggcctccttcagcggagagggcccagcaagcaggactccgaccgcctccactactc

SEQ ID NO: 32752 - DNA, 120 bp, synthetic construct
  source 1..120: mol_type = other DNA
caccctgaattggggttttccagctagaagaatccctccacagaagcttgaattttccttctgttctctcctttgctctgtacttctcagcaaaaagcatcacctataaatgtgaaggct

SEQ ID NO: 32753 - DNA, 120 bp, synthetic construct; identical to SEQ ID NO: 9636
  source 1..120: mol_type = other DNA

SEQ ID NO: 32754 - DNA, 120 bp, synthetic construct
  source 1..120: mol_type = other DNA
attagagagtctctttggtggagcaaggcagtaccctctctatgcttttttagtgtctggtagaggcagtgccaaggggtggctgggaggatggttagctaccagctccatttctttttt

SEQ ID NO: 32755 - DNA, 120 bp, synthetic construct
  source 1..120: mol_type = other DNA
cccaggtagctgggatcacaggcacctgccaccgtgcctggctaatttttgtagtttttagtagagatggggtttcaccatcttggccaagctggtcttgaactcctgacctcgtgatcc

SEQ ID NO: 32756 - DNA, 120 bp, synthetic construct
  source 1..120: mol_type = other DNA
cactttataatgctagcactgtttccacccaaatctgccatcgtccttcttccaaccaattgccctccctaaatcctttctagatagacattccgtagtcacaccacccctcgtatgaat

SEQ ID NO: 32757 - DNA, 120 bp, synthetic construct; identical to SEQ ID NO: 9637
  source 1..120: mol_type = other DNA

SEQ ID NO: 32758 - DNA, 120 bp, synthetic construct
  source 1..120: mol_type = other DNA
tctttttttttttcggggtcttgctctattatccaggctggagtgcactggcaccattatagctcactccagccttgaattcctgggctcaagctcctcctgcctcagcttcctgagtag

SEQ ID NO: 32759 - DNA, 120 bp, synthetic construct
  source 1..120: mol_type = other DNA
aggctgttacaaaagatgctacaatgatcatctttgtgccttccatctgtcattgaagtaacctcaatgggagccatgcagacagggaaggatgttcagaatccagttggatttaaatat

SEQ ID NO: 32760 - DNA, 120 bp, synthetic construct
  source 1..120: mol_type = other DNA
ggttttgtaaactcaaatcaggcttgataattggggaagatataaaaggtaaggaagatataacccagagcacaggctgtgagaccaccccatttggagggtttgaactgggaatcacaa

SEQ ID NO: 32761 - DNA, 120 bp, synthetic construct; identical to SEQ ID NO: 9638
  source 1..120: mol_type = other DNA

SEQ ID NO: 32762 - DNA, 120 bp, synthetic construct
  source 1..120: mol_type = other DNA
aaacccctgtctcaactaaaaatacaaaaattagccgggcatggcggcatgttcctgtaatcccagctactcaggaggctgaggcaggagaattgcctgaacccaggaggtagaggttgc

SEQ ID NO: 32763 - DNA, 120 bp, synthetic construct
  source 1..120: mol_type = other DNA
ctagttttttaaaaattaagtttaggaataatccatgtatatttggtgttcttaaagtgcttgttaagagtaattaataagttagcctcatgagatggtcttttcctacccctcccctac

SEQ ID NO: 32764 - DNA, 120 bp, synthetic construct
  source 1..120: mol_type = other DNA
agtgcttaaaacaataacagcattaattttgctctctttacgtagcaaaattgaggcctgcccaatttcaaggggaagagaaataaagccccacttcttcttagggggcaggcaatattg

SEQ ID NO: 32765 - DNA, 120 bp, synthetic construct; identical to SEQ ID NO: 9639
  source 1..120: mol_type = other DNA

SEQ ID NO: 32766 - DNA, 120 bp, synthetic construct
  source 1..120: mol_type = other DNA
gcagctggtcctggctgtggactggagccttagctggggccttagccagcaaatctatacctaccttccccatgtggcctgggcttcctcacaccatggtggctgggttccaagggcatg

SEQ ID NO: 32767 - DNA, 120 bp, synthetic construct
  source 1..120: mol_type = other DNA
aaggagggaaaacagactctgccttttggttgggaagcagcagtgttctagaagaacacgtgggaccaagatgtggccattttgagaaattgtaatctgtcacaattttgtacaggtctg

SEQ ID NO: 32768 - DNA, 120 bp, synthetic construct
  source 1..120: mol_type = other DNA
atctgcagtaactgaaaggttatcttcttaagatagtcactggtatggggtgttcataataaaggcatatagaagttgaggaagagatgctcagaaatactcaagggtaggtttagggct

SEQ ID NO: 32769 - DNA, 120 bp, synthetic construct
  source 1..120: mol_type = other DNA
tcaggagttccagaccagcctggccaacatggcagaaccccgtctctactaaaattacaaaaattagccaggcatggtggtgggcacctgtagtcccagctactcagggggctgaggcag

SEQ ID NO: 32770 - DNA, 120 bp, synthetic construct; identical to SEQ ID NO: 9640
  source 1..120: mol_type = other DNA

SEQ ID NO: 32771 - DNA, 120 bp, synthetic construct
  source 1..120: mol_type = other DNA
tctagcctggatgacagagtgagagcttgattctacaaaaaaaaaaaaaaaaaaaaaagtcagggtgaattatattccctcatgtgatcacagaaggcagagaagagggaacccgacatc

SEQ ID NO: 32772 - DNA, 120 bp, synthetic construct
  source 1..120: mol_type = other DNA
tcccactgaagggatggaccagtggctctccactaaatcatgccatcattttgtcataacttgttttgatccaacatagagtgtaaatcaatcattttgtttttacacatggtcccatat

SEQ ID NO: 32773 - DNA, 120 bp, synthetic construct
  source 1..120: mol_type = other DNA
tgggatactaagactgtagcattttgggtatggtgaactagcttctctgagaaaacaataggcaagatcttttttctaagggtgagtgggtggaaggacggaaggtgggcatgaagtagc

SEQ ID NO: 32774 - DNA, 120 bp, synthetic construct; identical to SEQ ID NO: 9641
  source 1..120: mol_type = other DNA

SEQ ID NO: 32775 - DNA, 120 bp, synthetic construct
  source 1..120: mol_type = other DNA
cctgccaagctgcctcagtttcctcaatgcaatggtgacgtgactggtctgaagagacacttagtggggaaggaacactcaaggatcacttgtgcttggctgtttaatttgcgaaccaca

SEQ ID NO: 32776 - DNA, 120 bp, synthetic construct
  source 1..120: mol_type = other DNA
ggctgtgacctccatggctagatgctgcctatttctcttctagatcaaggctttcttctcctggtccatctcagaatctttaatggagataatgtaatatacaaagtaccttctttgaga

SEQ ID NO: 32777 - DNA, 120 bp, synthetic construct; identical to SEQ ID NO: 9642
  source 1..120: mol_type = other DNA

SEQ ID NO: 32778 - DNA, 120 bp, synthetic construct
  source 1..120: mol_type = other DNA
gatttgttgctacagctgtctcctagagcaatggaaaatgaaccagatttggaaatgcaagacctggggacaggccccaactcccctcttactagctatgtaactggggcaaatccctta

SEQ ID NO: 32779 - DNA, 120 bp, synthetic construct
  source 1..120: mol_type = other DNA
tgtaatcccagcattctgggaggccaagctggatggattgcttgaggccaggagtttgagaccatcctggccaacatggtgaaaccctgtctctactaaaaatacaaaaattagccgggc

SEQ ID NO: 32780 - DNA, 120 bp, synthetic construct
  source 1..120: mol_type = other DNA
cgtaagtggcactggctcagcacaaggcttcaggttcctcaatttggaacattgaacagatcaggttctgagtcctctgcaggatcttgaagacagaattgactattctcagttgacccc

SEQ ID NO: 32781 - DNA, 120 bp, synthetic construct; identical to SEQ ID NO: 9643
  source 1..120: mol_type = other DNA

SEQ ID NO: 32782 - DNA, 120 bp, synthetic construct
  source 1..120: mol_type = other DNA
gcctgctgtcagccagtaacttccatctttgatatcagtggaagttacttgacccttctcctgtgggtgtctgcactcccaatgcagaatggaaggcattggtcccaagttgaggaccat

SEQ ID NO: 32783 - DNA, 120 bp, synthetic construct
  source 1..120: mol_type = other DNA
gctgtgaaacgtctcagggattactttccactttcggatgaaataaacaaatatagagaagtgtcatctcctccaccactataaaaatggggagccacccagccccccagggctcatctg

SEQ ID NO: 32784 - DNA, 120 bp, synthetic construct
  source 1..120: mol_type = other DNA
caatgtgcggtgtgatttcaggggctgggaaggaagcctcctctccccaccaccaaacttgaaaaaaaaaatagttctaatctgatccttgggctgtgtttaaaatgcaaattcccctgg

SEQ ID NO: 32785 - DNA, 120 bp, synthetic construct; identical to SEQ ID NO: 9644
  source 1..120: mol_type = other DNA

SEQ ID NO: 32786 - DNA, 120 bp, synthetic construct
  source 1..120: mol_type = other DNA
tcctctaaggcagaggagaggagggtgctgatagtatcagaagggaagaatgggatccaaacagcagatgaaacatcatcaggctgtgagcctcctaatgcacagctccagggcttcaag

SEQ ID NO: 32787 - DNA, 120 bp, synthetic construct
  source 1..120: mol_type = other DNA
cttgtggacacacacattgctgggccccatccccagaatttctgactcagtaggtccaaagggaagggtcaaatttgcaatttacacaatatcccaggcgatgctaaccctgctgatctg

SEQ ID NO: 32788 - DNA, 120 bp, synthetic construct
  source 1..120: mol_type = other DNA
gctgtaataaagagaccctacaataaatcagtggcttaaagaagatcaaagtttctcccttaggtgacagtctgcagtggatgttgtggtgcaccacccagaccctttcttcatccattt

SEQ ID NO: 32789 - DNA, 120 bp, synthetic construct
  source 1..120: mol_type = other DNA
gcctcacccaagttgtgccccttttgggagcagcctttatccaaaaaggactagtaggtatggcgtaaaaagtttccatccccatgcctcagtctaggacatcttggaagggccatccca

SEQ ID NO: 32790 - DNA, 120 bp, synthetic construct; identical to SEQ ID NO: 9645
  source 1..120: mol_type = other DNA

SEQ ID NO: 32791 - DNA, 120 bp, synthetic construct
  source 1..120: mol_type = other DNA
ggcacacatcgcttctaccacttcactgtttcttaaaacatagtcacggggctccacacaaggaggctaggaagcacccagcagctgggcagcctggtaggctacgcctgctactttgga

SEQ ID NO: 32792 - DNA, 120 bp, synthetic construct
  source 1..120: mol_type = other DNA
gccatttactgggcacaaagacccctacagcactgtcattcatgtggacaaaaatttctagagctacttaggcattgctcactagggactctccataaaaagcagcactgcaggttttgc

SEQ ID NO: 32793 - DNA, 120 bp, synthetic construct; identical to SEQ ID NO: 9646
  source 1..120: mol_type = other DNA

SEQ ID NO: 32794 - DNA, 120 bp, synthetic construct
  source 1..120: mol_type = other DNA
cggaagtcttgtcaaaggcccaagcaaagggtcacatcatactgaccctaccatccccctggcttagagttcacagtccgtctttgttataactttgctgcaaacaccctcaacttgttt

SEQ ID NO: 32795 - DNA, 120 bp, synthetic construct; identical to SEQ ID NO: 2511
  source 1..120: mol_type = other DNA

SEQ ID NO: 32796 - DNA, 120 bp, synthetic construct
  source 1..120: mol_type = other DNA
actccttctccaatctctcaccaataccaccagtgcccactgcacctcaccccagtctctagtttctgtctaaggccaacccctcctcttggtctataaatcttatccccaagtcctgag

SEQ ID NO: 32797 - DNA, 120 bp, synthetic construct; identical to SEQ ID NO: 9647
  source 1..120: mol_type = other DNA

SEQ ID NO: 32798 - DNA, 120 bp, synthetic construct
  source 1..120: mol_type = other DNA
gaggcccaagccgtgccagggaaaatttgctgacaggcctgtgtcccggtgtcccttctggggaagggaagggaggcaccagctgggtgaggagggagtgctctcgcagaggagcccctc

SEQ ID NO: 32799 - DNA, 120 bp, synthetic construct
  source 1..120: mol_type = other DNA
cctgtcctctctccgactccccacactgtccaactggtttgttccttggccagcatctgggagccaatttattcagccctgaggtttgttttgttaaggactttaaaatgtattaagaaa

SEQ ID NO: 32800 - DNA, 120 bp, synthetic construct
  source 1..120: mol_type = other DNA
gaggtttgttttgttaaggactttaaaatgtattaagaaatgcgcgaagagctttgtcatcacttttccctttctaacgtacctgagcaattggatcaggaagtccttgcctgcctgtcc

SEQ ID NO: 32801 - DNA, 120 bp, synthetic construct
  source 1..120: mol_type = other DNA
ggtgttcatggaggagggtgtgatggctcgtggctgtaatcccagcactttgggaggccaaggtgggtggatcacctgaggtcaggagtttgagaccagcttggccaccatgccgaaacc

SEQ ID NO: 32802 - DNA, 120 bp, synthetic construct; identical to SEQ ID NO: 9648
  source 1..120: mol_type = other DNA

SEQ ID NO: 32803 - DNA, 120 bp, synthetic construct
  source 1..120: mol_type = other DNA
gttggaggaagggtccctaatttaatgtgagtggtatctatttttttttttttttttggcatggtctcaccgtgtcacccaggctggagtgtagtagtgtgatcatagctcactgcagcc

SEQ ID NO: 32804 - DNA, 120 bp, synthetic construct
  source 1..120: mol_type = other DNA
atgttgtccaggctggtctcaaattcctggctcaagcagtcctccaccttggcctcccaaagtactgggattacagatgtgagctactgtgcccagcctaatgtgactggtatttttaaa

SEQ ID NO: 32805 - DNA, 120 bp, synthetic construct
  source 1..120: mol_type = other DNA
ccatctctactaaaaatacaaaaattaaccgggcatggtggtgcatgcctgtaatcccaactactcaggaagctgaggcaggagaatcgcttgaacctggggggcggaggttgcagtgag

SEQ ID NO: 32806 - DNA, 120 bp, synthetic construct; identical to SEQ ID NO: 9649
  source 1..120: mol_type = other DNA

SEQ ID NO: 32807 - DNA, 120 bp, synthetic construct
  source 1..120: mol_type = other DNA
gcagccctagaaaactaatacagagttgaaagcagcttcactccgcagcacccatttaaacaggatttatgtcgtctgtgcacagccagttaatggtccaacacatcctggaggttcatc

SEQ ID NO: 32808 - DNA, 120 bp, synthetic construct
  source 1..120: mol_type = other DNA
gttaatagacctggaccctaatccaggctttcaatatgtgttctgcaaagccacattaagggccaaccctgggaaatctataagatgcactgtcttactcaaagttaatgtgcttcagat

SEQ ID NO: 32809 - DNA, 120 bp, synthetic construct; identical to SEQ ID NO: 9650
  source 1..120: mol_type = other DNA

SEQ ID NO: 32810 - DNA, 120 bp, synthetic construct
  source 1..120: mol_type = other DNA
tgagaaacaaattcaggtcctcagtaatagtaacacgccccatttgttcacctcctataccctgctccaggcagcattccattttatcctcacaataactctgtgaagtggcctgttatc

SEQ ID NO: 32811 - DNA, 120 bp, synthetic construct
  source 1..120: mol_type = other DNA
tgtctccactctgtcctgatgggagggtcactctgccctcctcccaggagagctgcctacttcccgacagaggccttttacaaaatcataatccttgagaattttaggcaatgtgacgtg

SEQ ID NO: 32812 - DNA, 120 bp, synthetic construct
  source 1..120: mol_type = other DNA
ccatggttggaaaccattggagaggcaagtccttctagggcagtatttatgcctatgaattcaggaaagtctcaatgctcagttctgggtctatttttagctcctctccatcttgccact

SEQ ID NO: 32813 - DNA, 120 bp, synthetic construct; identical to SEQ ID NO: 9651
  source 1..120: mol_type = other DNA

SEQ ID NO: 32814 - DNA, 120 bp, synthetic construct
  source 1..120: mol_type = other DNA
acatgaaaaggtgtttatactacattgtggagtaacaaaaactgtgtgtagtataatccattttgtatttcttttatctacttatctgttttttttttaatcctaacttttctcccaaat

SEQ ID NO: 32815 - DNA, 120 bp, synthetic construct
  source 1..120: mol_type = other DNA
ttaagtgtggagctgtaacagcaaaccctggccctgaatttcagtggatactggtctctcaatcagttacaataaacttaacatttgaataaatttctgtgcggacccatattctattta

SEQ ID NO: 32816 - DNA, 120 bp, synthetic construct
  source 1..120: mol_type = other DNA
ctcagcctcccaagtagctgggattacaggcacctgccaccacacccagctaattttctgtatttttaatagagacggagtttcgccatgttggcctggctgatctcaaactcctgacct

SEQ ID NO: 32817 - DNA, 120 bp, synthetic construct; identical to SEQ ID NO: 9652
  source 1..120: mol_type = other DNA

SEQ ID NO: 32818 - DNA, 120 bp, synthetic construct
  source 1..120: mol_type = other DNA
taaattttgaatttttgtgggtatataatatgtgtatatatttatggggtacataagatattttgatacatacatgcaatgcattataatcatatcatgggaaatggggtatccatcaac

SEQ ID NO: 32819 - DNA, 120 bp, synthetic construct
  source 1..120: mol_type = other DNA
tcattctaactatttttttctgtacccattaatcatcctgatctatcccctatacccgcaccactagccttcccagcctctagtaaccatccttcccttctctatatccatgagttcaat

SEQ ID NO: 32820 - DNA, 120 bp, synthetic construct
  source 1..120: mol_type = other DNA
gacaggattaattctttttttatgactgaatagtactccactgtgtatatgtagcatattttcttcatctattcatctgttgatggacaccaagggtgcttccaaatcttggctattgtg

SEQ ID NO: 32821 - DNA, 120 bp, synthetic construct; identical to SEQ ID NO: 9653
  source 1..120: mol_type = other DNA

SEQ ID NO: 32822 - DNA, 120 bp, synthetic construct
  source 1..120: mol_type = other DNA
cactgcaacctccacctcctgggttcaatgattctcctgcctcagcctcccaagtagctgggattataggtgcccaccacgcccagctaatttttgtgtttttagtagagacggggtttc

SEQ ID NO: 32823 - DNA, 120 bp, synthetic construct
  source 1..120: mol_type = other DNA
atttgcatttctctgatgatcagtgatggggaacaccttttcatatgcctgtttgctattgtatgtcttcttttgagaaatgtctattcaaatcttttgcccatttttttagttagatta

SEQ ID NO: 32824 - DNA, 120 bp, synthetic construct
  source 1..120: mol_type = other DNA
attgtttccttcactatgcagaagctttttaacttgatgtgatcccatttgtccatttttgatttggttgcctatgcttgtggggtattactcaagaaatttttgcccagaccaatgtcc

SEQ ID NO: 32825 - DNA, 120 bp, synthetic construct
  source 1..120: mol_type = other DNA
gcatatagatattcagttttcccagcaccatttattgaagagactgtcttttccccagtatatgttcttggcacctttgttgaaaatgagttcactgtgggtgtgtggatttgtttctgg

SEQ ID NO: 32826 - DNA, 120 bp, synthetic construct; identical to SEQ ID NO: 9654
  source 1..120: mol_type = other DNA

SEQ ID NO: 32827 - DNA, 120 bp, synthetic construct
  source 1..120: mol_type = other DNA
attgtagagatttttcatttctttggttaattcctagctacttaattttatttgtggctactttaatggaattttttttttcatttctttttcagattgttcgttgttggcatatagaaa

SEQ ID NO: 32828 - DNA, 120 bp, synthetic construct
  source 1..120: mol_type = other DNA
acataaagatagtttgacttcttcctttccagcctgggtgccctttatttcttcctcttgtctgattgctctagctaggacttccagtactatgttgaataacagtggtgaaagtgggca

SEQ ID NO: 32829 - DNA, 120 bp, synthetic construct
  source 1..120: mol_type = other DNA
ccctgcccctgcctccctcatcccctcccaaacttctagtggtcactattctactgtctacttctatgagatcaacttctttagattccaaatctgagtgagatcatgtgatatgtgtct

SEQ ID NO: 32830 - DNA, 120 bp, synthetic construct; identical to SEQ ID NO: 9655
  source 1..120: mol_type = other DNA

SEQ ID NO: 32831 - DNA, 120 bp, synthetic construct
  source 1..120: mol_type = other DNA
cagcgtaggagggttcccctttctccacatttgtatcatttgctgtcttgttttttgatagcagcaattttaacaagtgagagataatacctcactgtgattttgatatgaatttcccca

SEQ ID NO: 32832 - DNA, 120 bp, synthetic construct
  source 1..120: mol_type = other DNA
tgattttctctttagaaaaacttaaaacccacagaaaaattgcaagaatggtgtaccattacaatcaatacccaaatttctttcacctagttggattgactaggatcattttgccacatg

SEQ ID NO: 32833 - DNA, 120 bp, synthetic construct; identical to SEQ ID NO: 9656
  source 1..120: mol_type = other DNA

SEQ ID NO: 32834 - DNA, 120 bp, synthetic construct
  source 1..120: mol_type = other DNA
ggctcagagggtggccagtgcagaacttcaaggaggatatagatctggccaacaggatgtgagagggaaggtggagatgagcccggaactggggagattcccaaaagtctcagctacaac

SEQ ID NO: 32835 - DNA, 120 bp, synthetic construct
  source 1..120: mol_type = other DNA
gggtagagttctgataaaggggttggcaccatcctcttggtgctgttcttataatagtgagttcttgtgagagctggttgtttaaaagtgtgtggcacctctctgcccccctctcttcct

SEQ ID NO: 32836 - DNA, 120 bp, synthetic construct
  source 1..120: mol_type = other DNA
tgtgaaccaattaaacctcttttctttgtaaattacccagtttcaggtatttccttatagcagtgcaagaacagactaataatacagggagccactgaaaggagtaacgtgagcagtttt

SEQ ID NO: 32837 - DNA, 120 bp, synthetic construct
  source 1..120: mol_type = other DNA
aggcgtgatcttggcttattgcaacctccgcctctgggggttcaagcaattctcatgcttcagccttccgagcagctgggatcacaggcaaatgtaaccatgtccagctaatttttgtgt

SEQ ID NO: 32838 - DNA, 120 bp, synthetic construct; identical to SEQ ID NO: 9657
  source 1..120: mol_type = other DNA

SEQ ID NO: 32839 - DNA, 120 bp, synthetic construct
  source 1..120: mol_type = other DNA
gtgctgtttctccagatgggcaatacagaggagaagccagtggtgagggagtggggagtgaaggaggcactgacttcagtttttgatgcatggaagctgagtggcctataagacatttaa

SEQ ID NO: 32840 - DNA, 120 bp, synthetic construct
  source 1..120: mol_type = other DNA
taagagacttatggataggatgaccgccatcctggatggcaggtgcagcccctgttcatgcctatgttccagcatatttattaattgttccctctttcacttttccagtttgagcaatat

SEQ ID NO: 32841 - DNA, 120 bp, synthetic construct
  source 1..120: mol_type = other DNA
tttgaacaataattaatacagtcaccctaaaaagggtagatcagtcactccctgtattcacctaacacttgccacccctggcctggcatggttctgtgggtgtttcatgctgtatgtggt

SEQ ID NO: 32842 - DNA, 120 bp, synthetic construct; identical to SEQ ID NO: 9658
  source 1..120: mol_type = other DNA

SEQ ID NO: 32843 - DNA, 120 bp, synthetic construct
  source 1..120: mol_type = other DNA
cttggaccaagtccctactacatatgggatttaggaaatgtagagagaaacagggaatctaaaacattccctgttttcataactggcccgtgctgctccgcttccttcaccccttgcgtg

SEQ ID NO: 32844 - DNA, 120 bp, synthetic construct
  source 1..120: mol_type = other DNA
cctgaccgtccttggacaagccctgtccacctccaccttctgctgttcccctccatgtggcctttgctccagccacattctgaacatatcctgaccatgtttgcctttgggaccagtaaa

SEQ ID NO: 32845 - DNA, 120 bp, synthetic construct
  source 1..120: mol_type = other DNA
ctgaggtgggtggatcacaaggtcagaagatcgagaacatcttggccaacatggtgaaaccccatctctgctaaaaatacaaaaattagccaggtgtggtggtgcatacctgtaatccca

SEQ ID NO: 32846 - DNA, 120 bp, synthetic construct
  source 1..120: mol_type = other DNA
aaaaaaaaaaaaaatctacccactcttcagagctgactcaaacatgacctggtgcctaggagactgtcctggattctccctgctggaggcaaggctcccttcatccagaacgccactgtg

SEQ ID NO: 32847 - DNA, 120 bp, synthetic construct; identical to SEQ ID NO: 9659
  source 1..120: mol_type = other DNA

SEQ ID NO: 32848 - DNA, 120 bp, synthetic construct
  source 1..120: mol_type = other DNA
acatgtaaacaaagagtcaccaaacaatgcaataagcaccataaaacagcaaggccaagtgcacagatggaggaacccattctgtctcatggagtctggtagcgtttcaccagaaaagta

SEQ ID NO: 32849 - DNA, 120 bp, synthetic construct
  source 1..120: mol_type = other DNA
tggactggaaggcattcactggggaagaggagaagacaataagcatgagggtaggggaggcaagggaatgccaggagatgaagcaagggagggagaaaggagcctgacattgcaggcaga

SEQ ID NO: 32850 - DNA, 120 bp, synthetic construct
  source 1..120: mol_type = other DNA
gccttgccaagtttgaacaataattaatacagtcaccctaaaaacggtagatcagtcactccctgtattcacctaacacttacacagagtggaagagagatacggtcctgagcacacagc

SEQ ID NO: 32851 - DNA, 120 bp, synthetic construct; identical to SEQ ID NO: 9660
  source 1..120: mol_type = other DNA

SEQ ID NO: 32852 - DNA, 120 bp, synthetic construct
  source 1..120: mol_type = other DNA
tgttcttgcagatgaaactagcagaaggaaggagcttgctgccagttggctccctaattttttttaaatcacaactttgatgtttcctagtctgctgggtgacaccagttgtccttgttt

SEQ ID NO: 32853 - DNA, 120 bp, synthetic construct
  source 1..120: mol_type = other DNA
gttgtgaatgtttacacaaatggaaaatgtcagtgtttaatctgtaaagggagcccagattgcaaagctccaaaaagaaacatctaaaggtgagcatccttcctctaggtgtgggacatt

SEQ ID NO: 32854 - DNA, 120 bp, synthetic construct; identical to SEQ ID NO: 9661
  source 1..120: mol_type = other DNA

SEQ ID NO: 32855 - DNA, 120 bp, synthetic construct
  source 1..120: mol_type = other DNA
cgtctctactaaaaatacaaaaattagccaggcctggtggtgcatgcctataatcccagatacttgggaggctaaagcagggagaatcgcttgaacctgggaggcagagattgcagtgag

SEQ ID NO: 32856 - DNA, 120 bp, synthetic construct
  source 1..120: mol_type = other DNA
ggagatgcttccaggaggaaaaggacatgagaggtggtgaggaaatttcatgctagagtaatgatagaaccagaaggctgaggggagagctcaggaacatagatgatgggcaagcctgag

SEQ ID NO: 32857 - DNA, 120 bp, synthetic construct
  source 1..120: mol_type = other DNA
ttctccctctgggtcagatgaggggggtggatcacagcaaaggttcccaaccaggaggacaggggtgctttacacatgcgcgcgtgcgcgcacacacacacacacacacacgcatgcatc

SEQ ID NO: 32858 - DNA, 120 bp, synthetic construct; identical to SEQ ID NO: 9662
  source 1..120: mol_type = other DNA

SEQ ID NO: 32859 - DNA, 120 bp, synthetic construct
  source 1..120: mol_type = other DNA
tctcagcatgccccagggtgggtggtgggagcccattagtcatggggtgggctgaggcgaggtggctgaggaacagggaataaataaaaggagtgagcagccatgtctcaagcaggcctg

SEQ ID NO: 32860 - DNA, 120 bp, synthetic construct
  source 1..120: mol_type = other DNA
ggagttctgaatgtcaggattgcctcttgctgtatccttgggcttgagatctttgtcatcccttatcaccaccctttgcaaagctacatggtggggacacctctgttcatagctcttctg

SEQ ID NO: 32861 - DNA, 120 bp, synthetic construct
  source 1..120: mol_type = other DNA
gtaaccagagcattctgacctttagagctgccctatgtgaccattctctgttttagacagccggcctggtgtgtgaatgggagggaggaatgagctttgttactaccttctcagcaacct

SEQ ID NO: 32862 - DNA, 120 bp, synthetic construct; identical to SEQ ID NO: 9663
  source 1..120: mol_type = other DNA

SEQ ID NO: 32863 - DNA, 120 bp, synthetic construct
  source 1..120: mol_type = other DNA
ccaagggagccagcctgaggcttgcatcactgtttggtctcctcctacccttccagatcttcctggtgctggagttagtgcccccttttttctcagctgagtcatgaccctcacccagcc

SEQ ID NO: 32864 - DNA, 120 bp, synthetic construct
  source 1..120: mol_type = other DNA
aagctgagattggatgtcatttgtcaaccttggcagagaagtactgaatgcgtcaaaataattgaaggttatttggtgcctgtgggagggatttttattcccaaggattctgctggacca

SEQ ID NO: 32865 - DNA, 120 bp, synthetic construct
  source 1..120: mol_type = other DNA
tttggggcagccctgtttggctagctgagggttcctatgttttccaacaattggatgtttacagtatctgtgctcttgctttttaaaaatgtcctcatttagaatagcttccttttttta

SEQ ID NO: 32866 - DNA, 120 bp, synthetic construct
  source 1..120: mol_type = other DNA
taatccttccagagctatagagctgagcttgtattcaagccacagacagggcccttgaccttgaaccagacaaggctgacagccccggagcaggagcgctgctgtgaaataactcggaga

SEQ ID NO: 32867 - DNA, 120 bp, synthetic construct; identical to SEQ ID NO: 9664
  source 1..120: mol_type = other DNA

SEQ ID NO: 32868 - DNA, 120 bp, synthetic construct
  source 1..120: mol_type = other DNA
tcttggcaggatttatgggtcccctttacgctgagctgtctacccctgttgcctaaatgcctttcctacctaacagtagctgttcagtgggtgcattggccctacagactctcccaagct

SEQ ID NO: 32869 - DNA, 120 bp, synthetic construct
  source 1..120: mol_type = other DNA
ctagcaacctaagatttgctgcccaaactaatgcttctccctgtccagtggacacttctcaactaggctgcccttctgtgtcactgctgctacttagtcactcgttgactttggaagaag

SEQ ID NO: 32870 - DNA, 120 bp, synthetic construct; identical to SEQ ID NO: 9665
  source 1..120: mol_type = other DNA

SEQ ID NO: 32871 - DNA, 120 bp, synthetic construct
  source 1..120: mol_type = other DNA
aaatacaaaaattagccgggtgtggtggcgtgagcctgtagccccagctactcaggaggctgagacaggagaattgcttgaacctgggaggcagaggtttcagtgagccgagatcgcacc

SEQ ID NO: 32872 - DNA, 120 bp, synthetic construct
  source 1..120: mol_type = other DNA
gaggtggagtctactgaatttgagacccactgcaaatgaggaagccacacaggaagcaccttgggagtccttggaaactagaaatcaaccccctttgcattctaaggtctctggtttatt

SEQ ID NO: 32873 - DNA, 120 bp, synthetic construct
  source 1..120: mol_type = other DNA
cacaggtgcatacacatatccacatgcacacactactctctcaggaggtctgctgggaaaccaatacactttcagaaaagcctgttccaaccctggcttcgtggggcatggtgagctcct

SEQ ID NO: 32874 - DNA, 120 bp, synthetic construct
  source 1..120: mol_type = other DNA
atttaatatctaggtttgacatgacatgggagccttcagaaatgaagacccaaagaaacaggaaaacctgtgtgtttttatgcttaggtttgataaagagtggacagtcgtgcagatgtg

SEQ ID NO: 32875 - DNA, 120 bp, synthetic construct; identical to SEQ ID NO: 9666
  source 1..120: mol_type = other DNA

SEQ ID NO: 32876 - DNA, 120 bp, synthetic construct
  source 1..120: mol_type = other DNA
tctttactctaaatcggtgttttgaaatcttttttaacccttgccccactttggtgaacacaaaagtctgtctctgggattttaatatgccactttcttctctcttcatatcctccccaa

SEQ ID NO: 32877 - DNA, 120 bp, synthetic construct
  source 1..120: mol_type = other DNA
tattttccaaatataaaattatatgcacacaatacttgaaagagtataaaggtagagtatattgctagaaagaaagtcatactgctagactctagcatgagcctgcatcagaatcacctc

SEQ ID NO: 32878 - DNA, 120 bp, synthetic construct
  source 1..120: mol_type = other DNA
acactttgagaatcactgctctagaatgatgatacacactccctagggccagaagaaaggccaagcctttaatacaacagacaccagatcatctcatggggctcccgtctctctctgtgc

SEQ ID NO: 32879 - DNA, 120 bp, synthetic construct; identical to SEQ ID NO: 9667
  source 1..120: mol_type = other DNA

SEQ ID NO: 32880 - DNA, 120 bp, synthetic construct
  source 1..120: mol_type = other DNA
cacatgagacacacatatatgttttttgttcctgcgatttctgggcaccatgtgcagtaaccaaagcagaatattcatcctgtgaatctgaacagcattaatgaagaatgtaggtctcct

SEQ ID NO: 32881 - DNA, 120 bp, synthetic construct
  source 1..120: mol_type = other DNA
ctgtgtttataggtttcagctgttcccaaaccatccatcttgagctctcaccgtaaagcaggcaaacagccctttgacgcgcacatcttgaaagttttacactatttattttttcctctg

SEQ ID NO: 32882 - DNA, 120 bp, synthetic construct
  source 1..120: mol_type = other DNA
aatgaaaaatctcttagcaacaaccgagcagggctcatctgtcctccctgtcctgatgctgcctcctgtttagtatttatcactaaacagggatagtgataaatggctcagctggtccct

SEQ ID NO: 32883 - DNA, 120 bp, synthetic construct; identical to SEQ ID NO: 9668
  source 1..120: mol_type = other DNA

SEQ ID NO: 32884 - DNA, 120 bp, synthetic construct
  source 1..120: mol_type = other DNA
ctcaagtgtatatgcctagcccagatcacttttctaaaatgagagcttggatattcagctgcctactcacgtctccacttgctgtctctctgacatctccaacttcatatgtgtaaaagt

SEQ ID NO: 32885 - DNA, 120 bp, synthetic construct
  source 1..120: mol_type = other DNA
tttccttctcattcacacctcacatccaatccatcaccaagttctgtttattccacctccaaaatattcattgagctcctctattcctctccaccttcatatccaccaccctcattgaag

SEQ ID NO: 32886 - DNA, 120 bp, synthetic construct; identical to SEQ ID NO: 9669
  source 1..120: mol_type = other DNA

SEQ ID NO: 32887 - DNA, 120 bp, synthetic construct
  source 1..120: mol_type = other DNA
atctctcttccctcatctggtaccaccctccccactgctctacacgggagccacactggccttttcagctcttcaaatgtaccgagctccttcctgacacctctgccttgatttgccgtc

SEQ ID NO: 32888 - DNA, 120 bp, synthetic construct
  source 1..120: mol_type = other DNA
aaacaacaaccatcttatttcttgtaattctgtgagttgcctggggcttagcgggatggttcttctgctgatcttgcctgtcaggtgttcacagtgagatggcacctggggcagaaacat

SEQ ID NO: 32889 - DNA, 120 bp, synthetic construct
  source 1..120: mol_type = other DNA
gtcaccacagggctcactctcccagtggattcttcatatgatctctcccaacaagatgaccacactgatttggggctggaattatcccattaaaaactttgttagaatagagagctgtgg

SEQ ID NO: 32890 - DNA, 120 bp, synthetic construct; identical to SEQ ID NO: 9670
  source 1..120: mol_type = other DNA

SEQ ID NO: 32891 - DNA, 120 bp, synthetic construct
  source 1..120: mol_type = other DNA
agagatttaccaggagggattggcacacacaattatgaaggctgagaaatctcacaatctgccatctgtaagctggaggcccaggaacagcagtggtgcaattccagtccaaaccccaaa

SEQ ID NO: 32892 - DNA, 120 bp, synthetic construct
  source 1..120: mol_type = other DNA
tgtctcggctcagacagcaagaaaatatacacttcccctgcttttttattccattcaggccctcagcagatttgattgtgcccacctgcactggcaaggacgatcttccttagtcagtct

SEQ ID NO: 32893 - DNA, 120 bp, synthetic construct
  source 1..120: mol_type = other DNA
atggaagggttgacaaccatgactcagcagtaggagccttttttccagagtgttgctactaacctttctcaaccttaatgatttctgtgtctctctctcattctttaaagtctttttttt

SEQ ID NO: 32894 - DNA, 120 bp, synthetic construct
  source 1..120: mol_type = other DNA
ccttcacctcctgggttcaagcaattctcctgcctcagcctcctgagtagctgggattacaggtgcctgccaccacgcccggctaattttgtatttttagtagagacggggtttcaccat

SEQ ID NO: 32895 - DNA, 120 bp, synthetic construct; identical to SEQ ID NO: 9671
  source 1..120: mol_type = other DNA

SEQ ID NO: 32896 - DNA, 120 bp, synthetic construct
  source 1..120: mol_type = other DNA
tgaggcaggagaatcacttgaacctgaaaggtggaggttgcagtgagctgagattttgctactgcactccagcctgagcaacaagaacaaaactctgcctcaaaaaaaaaaaaaaaaaaa

SEQ ID NO: 32897 - DNA, 120 bp, synthetic construct
  source 1..120: mol_type = other DNA
ggggaacccaagatgggtcaactacactaggtcaagttactggtaagcctcagttttcttacatataaggtaggataatctacttcttaaagttattgtaaggattaatcaaaataatgt

SEQ ID NO: 32898 - DNA, 120 bp, synthetic construct
  source 1..120: mol_type = other DNA
caggctggtctcaaactcctggactcaagcgatcctcccacctcagcttcccaaagtgctgggaaaaataattttaatactggtgaagaactgaatgaactagtaatagcttcaaaacat

SEQ ID NO: 32899 - DNA, 120 bp, synthetic construct; identical to SEQ ID NO: 9672
  source 1..120: mol_type = other DNA

SEQ ID NO: 32900 - DNA, 120 bp, synthetic construct
  source 1..120: mol_type = other DNA
cacacacattatttggcattgatgggcgttcatttccctccagcagagtaagacagagaagatgcagcctgagtggtttcccttctttaaaaaaaaaaaatctgttggtgaaagctgctt

SEQ ID NO: 32901 - DNA, 120 bp, synthetic construct
  source 1..120: mol_type = other DNA
agttcgagcatcttttcagagacttaaagctggttgtatttctctttccttgagtggttggtgcacaatctttacccatgtttttattggcttattgttcttttattcttgttattatcg

SEQ ID NO: 32902 - DNA, 120 bp, synthetic construct
  source 1..120: mol_type = other DNA
cttatctattgacttttttgaagatagtttgccatgcagatagtctttgttatataatcacatgtaccactgttttatagctttctaggttgttttacaccaacaaaagattactaaaat

SEQ ID NO: 32903 - DNA, 120 bp, synthetic construct; identical to SEQ ID NO: 9673
  source 1..120: mol_type = other DNA

SEQ ID NO: 32904 - DNA, 120 bp, synthetic construct
  source 1..120: mol_type = other DNA
ttttccttctctgtcccacgctgatttcatcggcttcagggcttccatatcagcttgggctgaaactaatgtggcatttgtatctctagcctggcaccctctcctgaactacagactcat

SEQ ID NO: 32905 - DNA, 120 bp, synthetic construct
  source 1..120: mol_type = other DNA
aacagtagctccgttctctctatagctcgagtcagaactccatgtctttgatgactcctctctctctctcttttttttttttttgagacggagtttcactcttgtcacccaggctggagg

SEQ ID NO: 32906 - DNA, 120 bp, synthetic construct
  source 1..120: mol_type = other DNA
tatttttagtacagacggggtttcgccacgttggccaggctggtctagaactcctgacctcaggtgatcagccagtcttaggcttccaaaatgttgggattacaggcgtgagccactgca

SEQ ID NO: 32907 - DNA, 120 bp, synthetic construct
  source 1..120: mol_type = other DNA
tggaaatagctcctaatccatctttccatggcatccctggtttcaccccctgaccccaggtccactctcctctcatcagccagagcgatgctcttaaaatgtaagtctgatcatgtcctc

SEQ ID NO: 32908 - DNA, 120 bp, synthetic construct; identical to SEQ ID NO: 9674
  source 1..120: mol_type = other DNA

SEQ ID NO: 32909 - DNA, 120 bp, synthetic construct
  source 1..120: mol_type = other DNA
gaaaatagaaaaattagcccggctggtggtgcgcacctgcaatcccagctgaggttgaggcatgaggaccgcttgagtgtgggaggtggaggttacaacgagctgagattgcaccactgc

SEQ ID NO: 32910 - DNA, 120 bp, synthetic construct
  source 1..120: mol_type = other DNA
tctgaatcttattttgattctgaccattgatgttcttgtttttccaaacaacattgttctctgtgccttcaagagtgctcgtttgatggtacagcattttttaaaagagtgccctactat

SEQ ID NO: 32911 - DNA, 120 bp, synthetic construct
  source 1..120: mol_type = other DNA
ttcagagatgtgtaattgtaaaaacaacaacaacaacaacaaacaggaaacagaatcagtgaattatggtactctctggttgggctaattccctctacttactcttcttttccacaattt

SEQ ID NO: 32912 - DNA, 120 bp, synthetic construct; identical to SEQ ID NO: 9675
  source 1..120: mol_type = other DNA

SEQ ID NO: 32913 - DNA, 120 bp, synthetic construct
  source 1..120: mol_type = other DNA
acagtcacccaaggcatgtggatatgaaaagtagagaagtctaaatctgttatcagttcttcaacaatgcaggatgcatcactacccttcctttgggacaaatcatatccctgtatcaac

SEQ ID NO: 32914 - DNA, 120 bp, synthetic construct
  source 1..120: mol_type = other DNA
gtcgagtcatgcaagactcctctttagcaaagcagaaaggccagctatttttagttctacagtgttctcttttcccagcctgaagtgttcagcacctccgcttaggctccgattcacatt

SEQ ID NO: 32915 - DNA, 120 bp, synthetic construct
  source 1..120: mol_type = other DNA
gggcatcttgttgcaatgcagactgtggttgggtaagcccggagttgggcttggtaatgctggttcaaagaccagagaagcaaggtgctaagtatatttgtcagctcataacaaaatacc

SEQ ID NO: 32916 - DNA, 120 bp, synthetic construct; identical to SEQ ID NO: 9676
  source 1..120: mol_type = other DNA

SEQ ID NO: 32917 - DNA, 120 bp, synthetic construct
  source 1..120: mol_type = other DNA
tcccagtgggaggacacagtcagtccataactaaggaacagaacactggggagaaaaatcctactttgttgggacactggaaaatgcgagtattctctggacacctacaccagcctctcc

SEQ ID NO: 32918 - DNA, 120 bp, synthetic construct
  source 1..120: mol_type = other DNA
gaagccagttctcaattcgttttaacagagcttctctctgtagcagttccagccaaataagccaactctgcaggttccaggcaaagaagggtttgttatgggctatatttagtgcccagg

SEQ ID NO: 32919 - DNA, 120 bp, synthetic construct; identical to SEQ ID NO: 9677
  source 1..120: mol_type = other DNA

SEQ ID NO: 32920 - DNA, 120 bp, synthetic construct
  source 1..120: mol_type = other DNA
ccagcactttgggaggctgaggcgggcagatcacttgagatcaggagttcgagaccagcctggccaacatggtgaaactctatctctactaaaaatacaaaaattagccaggctggtggc

SEQ ID NO: 32921 - DNA, 120 bp, synthetic construct
  source 1..120: mol_type = other DNA
gactccatctcaaaaaataataataaaaaaataaaaaataaaaataaataggccgggcacggtggctcacgcctgtaatcccagcactttgggaagccgaggcaggcagatcatgaggtc

SEQ ID NO: 32922 - DNA, 120 bp, synthetic construct
  source 1..120: mol_type = other DNA
agaatggcgtgaacctgggaggcagagcttgcagtgagccaagatcgcgccactgcactccagcctgggtgacagagcgagactccatctcaaaataaataaataaataaaatttaaaaa

SEQ ID NO: 32923 - DNA, 120 bp, synthetic construct; identical to SEQ ID NO: 9678
  source 1..120: mol_type = other DNA

SEQ ID NO: 32924 - DNA, 120 bp, synthetic construct
  source 1..120: mol_type = other DNA
caacgtctaccttctgggttcaagtgattctgctacctcagcttcccaagtagctgggattacaggcctgtgccaccacacctggctaattttgtatttttaatagagatggggtttcac

SEQ ID NO: 32925 - DNA, 120 bp, synthetic construct
  source 1..120: mol_type = other DNA
ctgcctcgtggggcacacagaagtcaggcacagctgctaagcagatgttaacaggaccacttggaaccagtgggagttgctgagaagtagaggtggggttattggtcacaggaaggggta

SEQ ID NO: 32926 - DNA, 120 bp, synthetic construct
  source 1..120: mol_type = other DNA
aattctggaggctgggaagtccaaggtttaggggcttacatctggcaagtgccttcttgctgcattataacatagcagaaggcatcacgttgcgggtggggaacatccacttccaagatg

SEQ ID NO: 32927 - DNA, 120 bp, synthetic construct; identical to SEQ ID NO: 2541
  source 1..120: mol_type = other DNA

SEQ ID NO: 32928 - DNA, 120 bp, synthetic construct
  source 1..120: mol_type = other DNA
ggctcaggtgtcatgctctgtatgtaagtatgaattcagaggagggaacagtctctgggataactaggattggtttaatgaaagaggttgacttgctctgtatcctgaagggtaagtagc

SEQ ID NO: 32929 - DNA, 120 bp, synthetic construct
  source 1..120: mol_type = other DNA
ggcatcgtgaattgtgaatcagagaggagagtggaatggctggagcagcaagtgcacgtagtaaagtaaaggtaataacacaatggagttgggtgacatcaaagttaagagggctttgga

SEQ ID NO: 32930 - DNA, 120 bp, synthetic construct
  source 1..120: mol_type = other DNA
tgcttcaggaagcataatctagggacagcatatagacacctcagcctggggagagactaaaggcagaggcaggagccttgaccttatgagaagctgaattaagatactggaattaagaat

SEQ ID NO: 32931 - DNA, 120 bp, synthetic construct
  source 1..120: mol_type = other DNA
aggaattcaagaccagcctggccaacatgttgaaatcccatctctactaaaactacaaaaatcagctgagcgtggtggtgggtgcctgtagttccagcaactagggagcctgaggcatga

SEQ ID NO: 32932 - DNA, 120 bp, synthetic construct; identical to SEQ ID NO: 9680
  source 1..120: mol_type = other DNA

SEQ ID NO: 32933 - DNA, 120 bp, synthetic construct
  source 1..120: mol_type = other DNA
agaagttttaaacaccaaagggattattgttatatgaatgatccacttgtagatagtacttattttaggactgagggaggtaaggtttggggaagaatagggcatatctgtgaacatgtc

SEQ ID NO: 32934 - DNA, 120 bp, synthetic construct
  source 1..120: mol_type = other DNA
cctgactccaggtatcttagggatctgaaatgttctttttcactctactctactacaagcacacaatagtcagaagactgtgccagggagtgtgtttgccctggctagctctggccagtt

SEQ ID NO: 32935 - DNA, 120 bp, synthetic construct; identical to SEQ ID NO: 9681
  source 1..120: mol_type = other DNA

SEQ ID NO: 32936 - DNA, 120 bp, synthetic construct
  source 1..120: mol_type = other DNA
tgaaattggtggccctatagaagagaccccagagagctccctcacctccctccaccatgtgaggacacagtgcaaagacagccgtctatgaactaggttacaggccctcaccagacactg

SEQ ID NO: 32937 - DNA, 120 bp, synthetic construct
  source 1..120: mol_type = other DNA
ctgttaaccatgatgagattctggatttatactgccctcgtcatttccaatactttcacaaacattatcatgagggcgtgtatagcaaaggttagcactgttatgcatgggttgaaatcc

SEQ ID NO: 32938 - DNA, 120 bp, synthetic construct
  source 1..120: mol_type = other DNA
tcatttccaatactttcacaaacattatcatgagggcgtgtatagcaaaggttagcactgttatgcatgggttgaaatcccagcttcccaacttgccaaccaattactttgttctgcagg

SEQ ID NO: 32939 - DNA, 120 bp, synthetic construct
  source 1..120: mol_type = other DNA
cactcaaagtgcctgtaggctggttggagagatgtgtgaaaagaaaaaagttggcttttttgggctgcctgggcttttgttaataaatttccagtgggacgtttccgcacttgccttttt

SEQ ID NO: 32940 - DNA, 120 bp, synthetic construct
  source 1..120: mol_type = other DNA
tcctagcgacagggccgcacacctttcttggtgcagcaaaacgcacaccttccccggtggagaaaaacattccctaggcaactgcagggaaggctcttgcgcagggaactgggaaggagc

SEQ ID NO: 32941 - DNA, 120 bp, synthetic construct; identical to SEQ ID NO: 9682
  source 1..120: mol_type = other DNA

SEQ ID NO: 32942 - DNA, 120 bp, synthetic construct
  source 1..120: mol_type = other DNA
ggctccaccaatccttggggctccctagcctgaaggtacatcgttccagtctcctccagcatcacgtgcctttactctctgtgtctcctgtcctgtctctctctctctgtcttttttttt

SEQ ID NO: 32943 - DNA, 120 bp, synthetic construct
  source 1..120: mol_type = other DNA
agctgggattacaggcacatgccaccatgcccagctaatttttgtgtttttagtagaaatggggttttgccatgttggacaggctggtctcaagctcctgtcctaaggtgatccacccgc

SEQ ID NO: 32944 - DNA, 120 bp, synthetic construct; identical to SEQ ID NO: 9683
  source 1..120: mol_type = other DNA

SEQ ID NO: 32945 - DNA, 120 bp, synthetic construct
  source 1..120: mol_type = other DNA
acccacttggtagagtattaggtatggtgatattttctggctggtgccttcctggttatcttgctgctcatagagaaccagccatgccctgtgcagctgtgtaaacaggagagggtcacc

SEQ ID NO: 32946 - DNA, 120 bp, synthetic construct
  source 1..120: mol_type = other DNA
ggcccacttggaattgggtgtgtaaggggctctggaaaggactgctgctcttgaccttcccatttgctgacaagacagcagcctgcaaatccaagtgggtccccagttccccaaatatcc

SEQ ID NO: 32947 - DNA, 120 bp, synthetic construct
  source 1..120: mol_type = other DNA
atgatcacatgtgtttatttttatttgaacaggtattacattcttatagttccagattcaaaaggaacaaaaggatattctgtgaaaattctccctcccactcctgtctctcaaccacct

SEQ ID NO: 32948 - DNA, 120 bp, synthetic construct; identical to SEQ ID NO: 9684
  source 1..120: mol_type = other DNA

SEQ ID NO: 32949 - DNA, 120 bp, synthetic construct
  source 1..120: mol_type = other DNA
tgatggatacatagactgtttccctatgttccctgcggcaatgaataactatatatgctcaggtcatgcatgtgtgggaataaatctataaggataattgctagaagtggcatatctggg

SEQ ID NO: 32950 - DNA, 120 bp, synthetic construct
  source 1..120: mol_type = other DNA
gatgatacgtgcttgatagtgcatgaaggtggaaatgtgaaacccactttgatgtggtagttaccattgcggcgcattaacgctgatgtgattcaaaagaccatataatttttatgctgc

SEQ ID NO: 32951 - DNA, 120 bp, synthetic construct
  source 1..120: mol_type = other DNA
cagggccaagtcactcacccttcctgagacagtatgttaatcccttgcagagcttactgcaagccatgcccctagtagcaatcacattgcatttattaatagagcagggtggacagatct

SEQ ID NO: 32952 - DNA, 120 bp, synthetic construct; identical to SEQ ID NO: 9685
  source 1..120: mol_type = other DNA

SEQ ID NO: 32953 - DNA, 120 bp, synthetic construct
  source 1..120: mol_type = other DNA
aaggtgaggaccacacagcttcagacgctggatcttaccatgggcagcctggccacatcccatgctggatacctgtcaacgccagatgacctgtcaccgcaaactgtcatcccgttgccc

SEQ ID NO: 32954 - DNA, 120 bp, synthetic construct
  source 1..120: mol_type = other DNA
ccttgactatcagggaggtggaaaaaagtgggtgtccttttcagcctacaatgtgcccataaagagttctagagaaggaatcttcaatcctatggaagttggattggatgtagggcagaa

SEQ ID NO: 32955 - DNA, 120 bp, synthetic construct
  source 1..120: mol_type = other DNA
tctttatatcgggacctctgtgcagctctgtcctgacaacgtcacttattgctcacgattggcataccattaggggattgttggccatcccctcttccctccattctttcctatggggct

SEQ ID NO: 32956 - DNA, 120 bp, synthetic construct; identical to SEQ ID NO: 9686
  source 1..120: mol_type = other DNA

SEQ ID NO: 32957 - DNA, 120 bp, synthetic construct
  source 1..120: mol_type = other DNA
ctagttcagagcctggctgcacatagtaggccctcaatgagaggtgatgatgatggtggtggtgacggcagagcgaggactcactttgtccaacgactacatattacagatgtcaggttc

SEQ ID NO: 32958 - DNA, 120 bp, synthetic construct
  source 1..120: mol_type = other DNA
tctcacactgtctgccttgtctgggctgcttcagctggcagctcccacatacagctgtgtgaccggctctcccctgccttcagggtcagcagcttaactctttcactctctgggcactag

SEQ ID NO: 32959 - DNA, 120 bp, synthetic construct
  source 1..120: mol_type = other DNA
cagacaatagtggcatagagccaagtgatgacgttcccacgttatagctacatggctgtgataacaagtggagttatacgcctgcggtctatgctgagtcacgtgggatgtaaacatcct

SEQ ID NO: 32960 - DNA, 120 bp, synthetic construct
  source 1..120: mol_type = other DNA
ttaaatcgtggcccaacacgcttgccactgcagctagatgctgacacaggtgatggtaacaaggccctagaactctaacgggaagatgagtcatcggggggggggtcattaaaatgcagg

SEQ ID NO: 32961 - DNA, 120 bp, synthetic construct; identical to SEQ ID NO: 9687
  source 1..120: mol_type = other DNA

SEQ ID NO: 32962 - DNA, 120 bp, synthetic construct
  source 1..120: mol_type = other DNA
gctctcagtccgcagttccagctaagtttaaatatgcaaatacctccgaaatggcaaaggtgagggcttctctgaagcgtggctcctcacagcagggccttccacaatgaagggaaagtg

SEQ ID NO: 32963 - DNA, 120 bp, synthetic construct
  source 1..120: mol_type = other DNA
tgaggtttgataccagaaggctggagaaggggtgctggcacagaaaagatgcaacgaaggagactccccaggtagtcctgtctctggttccttgagttctacctttccctcaagggcctc

SEQ ID NO: 32964 - DNA, 120 bp, synthetic construct; identical to SEQ ID NO: 9688
  source 1..120: mol_type = other DNA

SEQ ID NO: 32965 - DNA, 120 bp, synthetic construct
  source 1..120: mol_type = other DNA
cacactagtgtcgccgagttcatttggccacggaaccctcttatggcagaataactctttatgtctgcaaggcctgctttggaattgtggatctactttcctggaggctcagcaacaaga

SEQ ID NO: 32966 - DNA, 120 bp, synthetic construct
  source 1..120: mol_type = other DNA
caaaaaagtatagggcgcaggaatggagcgtccactccaccgctcttatatctgactgaggtgttaagagtatgagctgtgtcatcagggaccaggcttcaagtcctggctgtactgctt

SEQ ID NO: 32967 - DNA, 120 bp, synthetic construct
  source 1..120: mol_type = other DNA
agtacttagcacactgcctagcagataacagttcataaaatgtttttctaaaatgttttgtttgaccaaagtagttggcatgaaaaaaaaaacttttgttgtgccagtctctccccatgc

SEQ ID NO: 32968 - DNA, 120 bp, synthetic construct
  source 1..120: mol_type = other DNA
acccttctctgtgcatttgaccatgctctgccttgctcctgggccatctccctgagggtgaggggccatgctagaggaagtctaggctgcataaatgccgaaacagtggtggatctagca

SEQ ID NO: 32969 - DNA, 120 bp, synthetic construct; identical to SEQ ID NO: 9689
  source 1..120: mol_type = other DNA

SEQ ID NO: 32970 - DNA, 120 bp, synthetic construct
  source 1..120: mol_type = other DNA
tccatcatgcctggctaacatatttatattctgtttgtttgtttgttttttagagacagggtctcactctattgcccaggctgatctcgcactcctaggctcaagcaattctcctgcctt

SEQ ID NO: 32971 - DNA, 120 bp, synthetic construct
  source 1..120: mol_type = other DNA
tggatgaccaggtgctctcagagactacatttttgtagcctgaagtcagtatttatggtttccgtataaggaggctttggagagacactaaaagacaaaagtcaaagccctgaatgctga

SEQ ID NO: 32972 - DNA, 120 bp, synthetic construct; identical to SEQ ID NO: 9690
  source 1..120: mol_type = other DNA

SEQ ID NO: 32973 - DNA, 120 bp, synthetic construct
  source 1..120: mol_type = other DNA
aggcaaagattcactaagtgggatccagcaactcagccacacccagaggcttccatggctcctatattccacagggctgccagggcaccaggggagaaggggaatcctgatctgagacct

SEQ ID NO: 32974 - DNA, 120 bp, synthetic construct
  source 1..120: mol_type = other DNA
tcatgaacagaggaattgtgaaacctggtgactcccagggaggtcaaatgttttgccccaaagcctcagctcgttaagggaactagtggggttggaactcaagtctcccaaacatttggg

SEQ ID NO: 32975 - DNA, 120 bp, synthetic construct
  source 1..120: mol_type = other DNA
cagacctggagtccacatgttaggtatgaatacccacatatgtgcacatgtgcacatttctttcttctctgctttcaaacagcagagtttgagaaatggaaaccaaggaactgctttggt

SEQ ID NO: 32976 - DNA, 120 bp, synthetic construct; identical to SEQ ID NO: 9691
  source 1..120: mol_type = other DNA

SEQ ID NO: 32977 - DNA, 120 bp, synthetic construct
  source 1..120: mol_type = other DNA
cttttggccgataaggggagctcagagaacgcctctgcctgcatctgctgtctcccacgtgcccttggttgcaagcaatcaacataccaaagtggcatattttggggtggcatttccttt

SEQ ID NO: 32978 - DNA, 120 bp, synthetic construct
  source 1..120: mol_type = other DNA
agaggacacccctacccagacctccagtcccagcctgacgtcagaggggatccggtcagagagacctagtgccgagaggagcagagagccccgagggaaggctccagggcccaggcaaag

SEQ ID NO: 32979 - DNA, 120 bp, synthetic construct
  source 1..120: mol_type = other DNA
tgtagcctagagcaaggccaggttgtgatagtcctgaaacttcaccattagtgcttctagaggcacatcttcaccccagactgtaaatgcacacccatagtcagacaaaataaggagtgt

SEQ ID NO: 32980 - DNA, 120 bp, synthetic construct
  source 1..120: mol_type = other DNA
gagcatttttttttttttttttttgagacgaagtcttgctctgtcccccaggctggagtgcagtggtgggatctcagctcactgtaatctccacctcctgcctccacctctaattcttgt

SEQ ID NO: 32981 - DNA, 120 bp, synthetic construct; identical to SEQ ID NO: 9692
  source 1..120: mol_type = other DNA

SEQ ID NO: 32982 - DNA, 120 bp, synthetic construct
  source 1..120: mol_type = other DNA
tcaccacacgtggcttgcaggtcatacatcattgccttctgttctgtttccctttgaaaaggtctatcttttcgcttggctgggataactgtctccttatttttgtcaactcctggaact

SEQ ID NO: 32983 - DNA, 120 bp, synthetic construct
  source 1..120: mol_type = other DNA
tgggataactgtctccttatttttgtcaactcctggaactttttttcctgtggctctaactttgccgttgtggcctgacacagaaatgtttcatcttgaaggtctagaaaaagcaatgtt

SEQ ID NO: 32984 - DNA, 120 bp, synthetic construct; identical to SEQ ID NO: 9693
  source 1..120: mol_type = other DNA

SEQ ID NO: 32985 - DNA, 120 bp, synthetic construct
  source 1..120: mol_type = other DNA
ttattaggttgagtacttagaaaagctgacctgtaaaagggttaaggtttttacatccatgtaactttctgtattgtttttaaggtcttttgatgatcactctggttaaacaaataagta

SEQ ID NO: 32986 - DNA, 120 bp, synthetic construct
  source 1..120: mol_type = other DNA
ggcattttcaagttaggcccctggaaatcttcaaagaatgtatctctcatcctgtagagatattaaatgattagacttatttggtaaattgtatggaatacagattattttttctttttc

SEQ ID NO: 32987 - DNA, 120 bp, synthetic construct
  source 1..120: mol_type = other DNA
ctcccaagtagctgggaccacagactcatgccaccatgcctggctaaggtaaattgtatgggaggaaattgtcaaatgataattgatgctagatcttctttcagttacatttattgatat

SEQ ID NO: 32988 - DNA, 120 bp, synthetic construct
  source 1..120: mol_type = other DNA
aatgattatattaaatttatcaaagtcttgacgatcctgatgtgatatggtcagtcataattctggttgttatcttaaaatgctgcacataatagaaataattaaatttctttgtcagtt

SEQ ID NO: 32989 - DNA, 120 bp, synthetic construct; identical to SEQ ID NO: 9694
  source 1..120: mol_type = other DNA

SEQ ID NO: 32990 - DNA, 120 bp, synthetic construct
  source 1..120: mol_type = other DNA
agttctgggattacaggacaggtatgagccaccatgcctggcctgtcattcatgctattgttttaaattcttctctaaaagcatttgcagtgatctatagtcctaaattgattttcatga

SEQ ID NO: 32991 - DNA, 120 bp, synthetic construct
  source 1..120: mol_type = other DNA
ggaggccaaggagggtggatcacctgaggtcaggagttcaagaccagcctggccaacatggtgaaaccctgccttactaaaagaaatacaaaaaaaattagccaggtgtggtggcacgca

SEQ ID NO: 32992 - DNA, 120 bp, synthetic construct
  source 1..120: mol_type = other DNA
cacacacacacacacacacacacacacacaaaatcgagaggatatttcctgtcatagttgaagtgtgcactggctttaagttccctgcctctagaccctattttcctgcctcacctcctc

SEQ ID NO: 32993 - DNA, 120 bp, synthetic construct; identical to SEQ ID NO: 9695
  source 1..120: mol_type = other DNA

SEQ ID NO: 32994 - DNA, 120 bp, synthetic construct
  source 1..120: mol_type = other DNA
catctttttgagatgcaaattttggggagaagatgctcagaagaaggtgggggaggggagaaagctatttagaaaccaactggcatttttaaaaatttcaagtctttaccacaagtagta

SEQ ID NO: 32995 - DNA, 120 bp, synthetic construct
  source 1..120: mol_type = other DNA
taaaatttttaaataaaaacttgaagatttctgtttgcatctatctgtttatgtatatctgtgtatgtatagtatgcatatgtggtgttttctctacctctggatggtactgccaaatac

SEQ ID NO: 32996 - DNA, 120 bp, synthetic construct; identical to SEQ ID NO: 9696
  source 1..120: mol_type = other DNA

SEQ ID NO: 32997 - DNA, 120 bp, synthetic construct
  source 1..120: mol_type = other DNA
ctaattttttttttttttgtattttttagtagagatggggtttcgccatgttagccaggatggtctggatctcctgacctcgtgatccgcccgcctgtgcctcccaaagtgttgggatta

SEQ ID NO: 32998 - DNA, 120 bp, synthetic construct
  source 1..120: mol_type = other DNA
catcgggtcccgagttcccatgactgcagcttccagaagagcagagctttggtatcctactcacagcgccaaaactgcaggggccaaggtaaaacttgccctttaccctctgaaggtttg

SEQ ID NO: 32999 - DNA, 120 bp, synthetic construct
  source 1..120: mol_type = other DNA
gtatgtcatcttgaggttccagaaagaatgggggctttggttgtggcaaaacaggttctgggagggggaggaggcctgactagcaaaggtggtcttgttatgcagatgaaacctcacagg

SEQ ID NO: 33000 - DNA, 120 bp, synthetic construct; identical to SEQ ID NO: 9697
  source 1..120: mol_type = other DNA

SEQ ID NO: 33001 - DNA, 120 bp, synthetic construct
  source 1..120: mol_type = other DNA
ataacatcactattacttttaatcgcaaaaactgcaattattttgcaccaacctaatagaacctaagattggtcttttgttgttgttttgtttttgtttttgagacagagtttcgctcat

SEQ ID NO: 33002 - DNA, 120 bp, synthetic construct
  source 1..120: mol_type = other DNA
tgcccggctaattttgtatttttagtaggctaatactaattttagtattttggtcaggctggtctcgaattcctgacctcaggtgatcctcccaccttggcctcccaaagtgctgggatt

SEQ ID NO: 33003 - DNA, 120 bp, synthetic construct; identical to SEQ ID NO: 9698
  source 1..120: mol_type = other DNA

SEQ ID NO: 33004 - DNA, 120 bp, synthetic construct
  source 1..120: mol_type = other DNA
aggtgtcagactgaaactgttgtacttgagcgagttagagaaaacgccacacttgtagacgaattaagagtctgtttatttagccagcggccaagagacggctaacgctcaaagttcttt

SEQ ID NO: 33005 - DNA, 120 bp, synthetic construct
  source 1..120: mol_type = other DNA
acaggaaagtaaacagttccaggtgcaggggctttaagactattacaaggtgatagacgcggggctttgggcgttattaatcgggcgttattaatgggacgaattcctgggaactgcgga

SEQ ID NO: 33006 - DNA, 120 bp, synthetic construct; identical to SEQ ID NO: 9699
  source 1..120: mol_type = other DNA

SEQ ID NO: 33007 - DNA, 120 bp, synthetic construct
  source 1..120: mol_type = other DNA
aaggaatttagtttatagtttaaactctgaaccaacaaaattgacaatagcactttctggaaaaaaacccttgcttgcgtggagaccagtctgtctttgtaggactaactttcatgcacg

SEQ ID NO: 33008 - DNA, 120 bp, synthetic construct
  source 1..120: mol_type = other DNA
ataggatttgggtaggtaaaggaaaaaggggggttgttctctggcgggctggagtgggggtcacaaggtactcagtgggggggcttttgagccaggatgagccaggagaaggaatttcac

SEQ ID NO: 33009 - DNA, 120 bp, synthetic construct
  source 1..120: mol_type = other DNA
atggcttggcttgggctcagaggcctgacataattagccacaagattagaaattatgatttaggagccatgcagtctctggctggaagagtctcaacctccccaaattgcttctgggaat

SEQ ID NO: 33010 - DNA, 120 bp, synthetic construct; identical to SEQ ID NO: 9700
  source 1..120: mol_type = other DNA

SEQ ID NO: 33011 - DNA, 120 bp, synthetic construct
  source 1..120: mol_type = other DNA
gtctaggcagtgaacaaggtgaacccactgggtggttacaagactctcagttaatctttcctagattcagagaagggaaggctttagaggaaagagaaaatgcagagaaaaatggctgca

SEQ ID NO: 33012 - DNA, 120 bp, synthetic construct
  source 1..120: mol_type = other DNA
gggtgagatattttaatttccttcctatacatgggaaatagcccagagaaaatgtgtaactctccaagaggtagcttagaattcaggcttatattgcatcttcagctaaaaatcaaagga

SEQ ID NO: 33013 - DNA, 120 bp, synthetic construct; identical to SEQ ID NO: 9701
  source 1..120: mol_type = other DNA

SEQ ID NO: 33014 - DNA, 120 bp, synthetic construct
  source 1..120: mol_type = other DNA
tctcctacactacccatttaaatattgtcctttacctcccattatagccttcattttttgtattaaatatatttacttttatggagatagtagatggtataaattttctgtttttacttg

SEQ ID NO: 33015 - DNA, 120 bp, synthetic construct; identical to SEQ ID NO: 2561
  source 1..120: mol_type = other DNA

SEQ ID NO: 33016 - DNA, 120 bp, synthetic construct
  source 1..120: mol_type = other DNA
gcctcctgggttcaagcgattctcctgcatcaacctcccaagtagctgagattacaggcacccactaccatgcccagctgatttttgtatttttagtagagatgggttttcaccatcttt

SEQ ID NO: 33017 - DNA, 120 bp, synthetic construct
  source 1..120: mol_type = other DNA
gacactgtgccagtgaaaactggcttatagtctacattaactgtcacctttgggattgtcttctctaaaggacagaaataatcagcatctgtataggacaaaattaatttaaattcctac

SEQ ID NO: 33018 - DNA, 120 bp, synthetic construct; identical to SEQ ID NO: 9702
  source 1..120: mol_type = other DNA

SEQ ID NO: 33019 - DNA, 120 bp, synthetic construct
  source 1..120: mol_type = other DNA
attgaagaaaaataaaagtagctgggcatggtggtacatacctgtaatcctagttatttgggaagctgaggcaggaggataacttgagcccaggagtttgagaccagactgaacaataga

SEQ ID NO: 33020 - DNA, 120 bp, synthetic construct
  source 1..120: mol_type = other DNA
ccaggctggagtgcagtggcgtgacgccagctcactgcaacctccgctttctgggttccatgcccggctaatttttttgtatttttttttttttagtagagatagggtttcaccaggttg

SEQ ID NO: 33021 - DNA, 120 bp, synthetic construct; identical to SEQ ID NO: 9703
  source 1..120: mol_type = other DNA

SEQ ID NO: 33022 - DNA, 120 bp, synthetic construct
  source 1..120: mol_type = other DNA
ggatcatgaggtcaggagatcgagaccgtcctggctaacatggtgaaaccccgtctctactaaaaatacaaaaaattagccgggcgtggtggtgggcgtctataggcccagctattctgg

SEQ ID NO: 33023 - DNA, 120 bp, synthetic construct
  source 1..120: mol_type = other DNA
gactttctagtcttcttcctggattgagatctccaggccccagtttatcctgctaaggcagctcatactgacttagacactgacttaagggatttactggcaaaacctcaaaagaaatgg

SEQ ID NO: 33024 - DNA, 120 bp, synthetic construct
  source 1..120: mol_type = other DNA
tcaggtgagatccttaagatagtaggggtaaacttaacttttgaaaacatggagctttcaaagcagcctattgggcttagagaatttaaaaggaaagcatttcccttaaggacctagtcc

SEQ ID NO: 33025 - DNA, 120 bp, synthetic construct; identical to SEQ ID NO: 9704
  source 1..120: mol_type = other DNA

SEQ ID NO: 33026 - DNA, 120 bp, synthetic construct
  source 1..120: mol_type = other DNA
ccaccccaaaatgcgtctctttgacataaggactatttacagctgatatttttgagaaacagcagacacaggaaaaggtctgaaaacagtaaaaattgctcttttgtaagggaaatttac

SEQ ID NO: 33027 - DNA, 120 bp, synthetic construct
  source 1..120: mol_type = other DNA
tttttttcggctgggcacagaggctcacacctgtaatcccagcactttgggaggctgaggcgggtgggtcacctgatgtcaggagtttgagaccagtctggccaacatggtgaaacccca

SEQ ID NO: 33028 - DNA, 120 bp, synthetic construct
  source 1..120: mol_type = other DNA
ccgagcatgccactgcactccagcctgggcaacagagtgagactccacgtcaggaaaaaaaaaaaaaagtttttgtcaaagataaacatcaaaacattcctcaaaatcaaactctgtctt

SEQ ID NO: 33029 - DNA, 120 bp, synthetic construct
  source 1..120: mol_type = other DNA
gagttcaagaccagcctggccaacatggtgaaacctgtctctactaaaaatacaaaaactagccaggcttggtggtgcatgcctgtaatcccagctacttgggaggctgaggcagaagaa

SEQ ID NO: 33030 - DNA, 120 bp, synthetic construct; identical to SEQ ID NO: 9705
  source 1..120: mol_type = other DNA

SEQ ID NO: 33031 - DNA, 120 bp, synthetic construct
  source 1..120: mol_type = other DNA
tattcctggctactagattgactgtgattaatttataacctggtaggacccacgatggcaccaaccccttcaccagaaggaacaataattcaagatgagccatgggagcaaatcacacag

SEQ ID NO: 33032 - DNA, 120 bp, synthetic construct
  source 1..120: mol_type = other DNA
aagagtggaattttttttcacctgctcttcctcttgctggcacagatcataaagtcttgctctctttctatcacatctcattattattttggcttctttctacaagcaaggagcagcagg

SEQ ID NO: 33033 - DNA, 120 bp, synthetic construct; identical to SEQ ID NO: 9706
  source 1..120: mol_type = other DNA

SEQ ID NO: 33034 - DNA, 120 bp, synthetic construct
  source 1..120: mol_type = other DNA
acttttcctggtcatcttcccataaccagtcatcaacagatgatagtacttaagcttgaattctaaatcacctctaaatcaatctaaatgaaatgagatttcatcatttttctgggtgtc

SEQ ID NO: 33035 - DNA, 120 bp, synthetic construct
  source 1..120: mol_type = other DNA
gtcctacattatgctgtccagtaagatagccactcaccacatgtggctgttgagtgcttggaacgtggccagtacaaaatatacaaagtgtaaaatacacatcagatttcaaagccttac

SEQ ID NO: 33036 - DNA, 120 bp, synthetic construct
  source 1..120: mol_type = other DNA
ttttactctgtctcccaggctggagtgcaatggtgcaatctcggctcactgcaacctctgcctcctgggttcaagtgattctcctgcctcagcctcccaagtagctgggattacaggcac

SEQ ID NO: 33037 - DNA, 120 bp, synthetic construct; identical to SEQ ID NO: 9707
  source 1..120: mol_type = other DNA

SEQ ID NO: 33038 - DNA, 120 bp, synthetic construct
  source 1..120: mol_type = other DNA
aggctaaggcaggagaattgcttgaatctgggagacagaggttgcggtgggccaagatagcgccactgcactccagccttagcaacaagagcacaactccatctcaaaataataataata

SEQ ID NO: 33039 - DNA, 120 bp, synthetic construct
  source 1..120: mol_type = other DNA
aatcatcaaatactctgagcagaagggattctacctggtgaccatgaagttccttcgggcctctgagaaacccctgaagtagcactacactaacctgaaagaccacccattcttcccgga

SEQ ID NO: 33040 - DNA, 120 bp, synthetic construct
  source 1..120: mol_type = other DNA
caatataagtgaagtacatgaactcagggcaggttgtggccatggtcctggaggggctgaatgtggcaaagacagggctaaggatgcttggggagaccaattcattgggctctatgctag

SEQ ID NO: 33041 - DNA, 120 bp, synthetic construct; identical to SEQ ID NO: 9708
  source 1..120: mol_type = other DNA

SEQ ID NO: 33042 - DNA, 120 bp, synthetic construct
  source 1..120: mol_type = other DNA
aacttactttgtttctttctacttttaaaaatgtgtgtactggaaatgttaaaatgacacaagtggctggcattaccttcctgttggacagtgctggaccactatcatctgctggcttcc

SEQ ID NO: 33043 - DNA, 120 bp, synthetic construct
  source 1..120: mol_type = other DNA
aggatggatgtctgttgtcccaggtagtggttactccattcatctccatccatgctctgtgcaatcagtgatacgggaacacactgtggaactggggaatcagggacttggaatttaatc

SEQ ID NO: 33044 - DNA, 120 bp, synthetic construct
  source 1..120: mol_type = other DNA
cttaaccaacccccacccaaccctgctgttttaccttccccactttaattatatagcctgagtgagaccaactccaatatcccttcctgctctagaggttctgtttttcccttttttttt

SEQ ID NO: 33045 - DNA, 120 bp, synthetic construct; identical to SEQ ID NO: 9709
  source 1..120: mol_type = other DNA

SEQ ID NO: 33046 - DNA, 120 bp, synthetic construct
  source 1..120: mol_type = other DNA
tgggctcagtagctcacacctgtaatcccaaccctttggaggctgaggcgggcatatcatctgaggtcaggagttcaagaccagcctggccaacatggtgaaatccgcctctactaaaaa

SEQ ID NO: 33047 - DNA, 120 bp, synthetic construct
  source 1..120: mol_type = other DNA
acagtgagccaagatcatgtcactgcaccccagcctgggtgacagagcaagagactctgtctcaaaaaaaaaaaaaaagttattcttggctggccacggtggctcgtgcttataatccca

SEQ ID NO: 33048 - DNA, 120 bp, synthetic construct
  source 1..120: mol_type = other DNA
aaaattatgattgttatttggcgacctgtatcctttgtctagataagcaactggaggaggtacaccaggcctgtctttttgaccctgggcccgaatggtgacttttaagcttgctgcatt

SEQ ID NO: 33049 - DNA, 120 bp, synthetic construct; identical to SEQ ID NO: 9710
  source 1..120: mol_type = other DNA

SEQ ID NO: 33050 - DNA, 120 bp, synthetic construct
  source 1..120: mol_type = other DNA
gtgtttcgtggggtaggtgggagttagccagctgaagagaagtgggagagggaaggcattccaggcagtgggaacagcttgagcaaagacacagaagcaaggcacagcttggtgtgggcc

SEQ ID NO: 33051 - DNA, 120 bp, synthetic construct
  source 1..120: mol_type = other DNA
cccactgcctggttcattttccctacctcttgccttcttttttcctggtttaggaaagatacaaaattcttgtgtgcagcctcttttggactccagctcttgttctctcgctgaatccca

SEQ ID NO: 33052 - DNA, 120 bp, synthetic construct
  source 1..120: mol_type = other DNA
cagggctggcagtattccttctgttctggtggctcgatcttcattgctttcctctggacttgtaagttattccaacaaaccccagctgctctgcagtgaaatgttccaaataattaatat

SEQ ID NO: 33053 - DNA, 120 bp, synthetic construct; identical to SEQ ID NO: 9711
  source 1..120: mol_type = other DNA

SEQ ID NO: 33054 - DNA, 120 bp, synthetic construct
  source 1..120: mol_type = other DNA
gccatggacagatctgctgacgctaaagtttatagacagctgaggtgcaacccatataatcacccagatgttattaggccatgatcattctgtagtaagctacctcccttctgtgtttcc

SEQ ID NO: 33055 - DNA, 120 bp, synthetic construct
  source 1..120: mol_type = other DNA
gccaagggaaatacccaacaatcattctcagtgtgcacagatttaccttcagcttttttggttatattgtcattattattttctttgtccagtgggagagttaaggggcctgctatggac

SEQ ID NO: 33056 - DNA, 120 bp, synthetic construct
  source 1..120: mol_type = other DNA
gatagaactggtgtccttacaagaagaggaagaggctgagtgcagtggctcaagcctataatcccagcactttgggaagctgaggcaggaggtacgcttgggcccaggagttcaagacca

SEQ ID NO: 33057 - DNA, 120 bp, synthetic construct
  source 1..120: mol_type = other DNA
ctgggaggtcaaggttgcagtgagctgtgatagcactgcactccagcctgggtaacagagcaagaccctgtccctccccacaccaccccaactccccccaaaaaggaagagataccagag

SEQ ID NO: 33058 - DNA, 120 bp, synthetic construct; identical to SEQ ID NO: 9712
  source 1..120: mol_type = other DNA

SEQ ID NO: 33059 - DNA, 120 bp, synthetic construct
  source 1..120: mol_type = other DNA
tgtaggtatttctgtgaaagatgagcatttaatcagtagactaagtaaagatctgtcctcactaatgagattaggcatcatccaattcatagggagcctaaataagacaaaaagttggcg

SEQ ID NO: 33060 - DNA, 120 bp, synthetic construct
  source 1..120: mol_type = other DNA
ccccactgtctttatatccccaaactcctggctagtgtgcaacagtgtggcatggactactctattccttgctttaacaattgagtttactgcagaggtgtaaaatattcatgctgagaa

SEQ ID NO: 33061 - DNA, 120 bp, synthetic construct
  source 1..120: mol_type = other DNA
tcctcctccttctgtgaagcagtgctgggagaagcacatagttctcaagagaacacagtggcctgagcatgctctgagcagtggttcccaaaggagggtttaggaaaaagccgagtcggg

SEQ ID NO: 33062 - DNA, 120 bp, synthetic construct; identical to SEQ ID NO: 9713
  source 1..120: mol_type = other DNA

SEQ ID NO: 33063 - DNA, 120 bp, synthetic construct
  source 1..120: mol_type = other DNA
tagtggaagagcacactgcaccaaactggttgtccagcaagaggggactgaattaataatctgtgatctgtctataccgagtaataccaagaaactgttgaaaaaaataaggcattgctt

SEQ ID NO: 33064 - DNA, 120 bp, synthetic construct
  source 1..120: mol_type = other DNA
cctcatacgtgccctgtgcatttcgtcatctaaatctttaaggacaaagcaaaaaaactgcctgacttcttggctgacaatttgggctggatactggtttcttcctattataataattat

SEQ ID NO: 33065 - DNA, 120 bp, synthetic construct
  source 1..120: mol_type = other DNA
acatggcaaaaccccatctctacaagaaatacaaaaattagctgggcatggtgacacgcacctgtagtcccagctacttgggaggctgaggtgggagaattgcttgagcccaggaggttg

SEQ ID NO: 33066 - DNA, 120 bp, synthetic construct; identical to SEQ ID NO: 9714
  source 1..120: mol_type = other DNA

SEQ ID NO: 33067 - DNA, 120 bp, synthetic construct
  source 1..120: mol_type = other DNA
tgagacatgattgtgccactgtactccagcctaggtgacagagcaagaccctatctcaaaaaataaataaatacatatatatatatatataaaataaaaattttaaaatgagaaaatcta

SEQ ID NO: 33068 - DNA, 120 bp, synthetic construct
  source 1..120: mol_type = other DNA
cactttgggaggccaaggcaggcagatcacaaggtcaggagtttgagaccagccttgccaacatggtgaaaccccatctctactaaaaatataaaaattagctgggcgtggtggtgtgtg

SEQ ID NO: 33069 - DNA, 120 bp, synthetic construct; identical to SEQ ID NO: 9715
  source 1..120: mol_type = other DNA

SEQ ID NO: 33070 - DNA, 120 bp, synthetic construct
  source 1..120: mol_type = other DNA
acaccatgagcccactggctggcagagcagcctgaggcctaggatgcatggcatccactttggaaggactgcagtgaggtggttaccaggctggagccagcaagctcactgaggaacttt

SEQ ID NO: 33071 - DNA, 120 bp, synthetic construct
  source 1..120: mol_type = other DNA
gaagcaggaggatcactcaaggccaggagtttgagacctgcccaaacaacacagtgggattctgtctctaaagtaaaaagtaaaaaaaagccgggcacggtggctcatgcctataatcgc

SEQ ID NO: 33072 - DNA, 120 bp, synthetic construct
  source 1..120: mol_type = other DNA
cttgtaatcccagctactcgggaggctgaaggctgaggctggagactcgctggaacccgagaagcagagattgcagtgagacaagatcacgccattgcattccagcctgggcaacaagag

SEQ ID NO: 33073 - DNA, 120 bp, synthetic construct; identical to SEQ ID NO: 9716
  source 1..120: mol_type = other DNA

SEQ ID NO: 33074 - DNA, 120 bp, synthetic construct
  source 1..120: mol_type = other DNA
gcttaaaagatccagttcattatcacagaggcagattatgaaaggttgatttagcacttagacacaataaattgatacctaagtagcacagcagtcaaggactttaaaatagctattatg

SEQ ID NO: 33075 - DNA, 120 bp, synthetic construct
  source 1..120: mol_type = other DNA
aaaaatacaaaaattagccaggcatggtggcgcgcacctgtagtcccagctacttgggaggctgaggcacaagaatcgcttaaacctggaagggggaggttgcagtgagtccagcctggg

SEQ ID NO: 33076 - DNA, 120 bp, synthetic construct
  source 1..120: mol_type = other DNA
tagcagagaaatgaaaactataaaaaaggaccaaagagagttaggtttctagatgggaatagttagttgatttttgacaaaggattcagagcaattcaataaggaaataaaagttttcaa

SEQ ID NO: 33077 - DNA, 120 bp, synthetic construct; identical to SEQ ID NO: 9717
  source 1..120: mol_type = other DNA

SEQ ID NO: 33078 - DNA, 120 bp, synthetic construct
  source 1..120: mol_type = other DNA
tgatttcatcaaaattaaaaacttcagttcatcaaaagacatcaagaaaatgaaaagagctgggcatggtggctcacacctgtaatctcaacacattgggaagccaaggcaggaggatca

SEQ ID NO: 33079 - DNA, 120 bp, synthetic construct
  source 1..120: mol_type = other DNA
tggaatgcagtggcaagatgtcgactcaacacaacctctgcttcccgggttcaagcaattctcctgcctcagcctcccaagtagctgggattacgggggcccaccaccatgcccagctaa

SEQ ID NO: 33080 - DNA, 120 bp, synthetic construct
  source 1..120: mol_type = other DNA
cgtgcccagctgaaaattttttttaaattagccagcagtggtggtatgtgcctgtagttctagctacttgggaggctgaggtgggaggattgcttgagctcaggagtttgaggctgcagt

SEQ ID NO: 33081 - DNA, 120 bp, synthetic construct
  source 1..120: mol_type = other DNA
agccataggctaggatgtgcctatatcccatgccatatttgtaactcatatttctgacaaataacttgtatccagattatgtaaagaattcatacagcaattttaaagaaacaacacaat

SEQ ID NO: 33082 - DNA, 120 bp, synthetic construct; identical to SEQ ID NO: 9718
  source 1..120: mol_type = other DNA

SEQ ID NO: 33083 - DNA, 120 bp, synthetic construct
  source 1..120: mol_type = other DNA
gttactcctcagacaaataaacattaaaaccgcaatgaactatataccattttgcaccgctataatgactaaaattcaaaagacagacgataacaaatgttagcaaagatgtacagcagt

SEQ ID NO: 33084 - DNA, 120 bp, synthetic construct
  source 1..120: mol_type = other DNA
ccacttttaagtatttaccaagataaatgaaactatccacaaaaatacttgtgtccaaatgttcatagtaaccttatttctactagaccaaactgggaaacaacccaactgtccttaaac

SEQ ID NO: 33085 - DNA, 120 bp, synthetic construct; identical to SEQ ID NO: 9719
  source 1..120: mol_type = other DNA

SEQ ID NO: 33086 - DNA, 120 bp, synthetic construct
  source 1..120: mol_type = other DNA
taatcattagtttgtagcaattactctttattccaatattttaataatccttgctctataatcataacttaggaaaaaccaggccatacagagataggagctgaggggacatagtgagaa

SEQ ID NO: 33087 - DNA, 120 bp, synthetic construct
  source 1..120: mol_type = other DNA
ctagcagtagcgtcagtgccaaggaaaaacacccactacttagcagaccaggaaagggagtctccctttccccgggggagtttagagaagactctactcctccacctcttgtggagggcc

SEQ ID NO: 33088 - DNA, 120 bp, synthetic construct
  source 1..120: mol_type = other DNA
cttttagatagcagtagcaaaattagtgaaagtactaaaagtctctgatatgcagaaataatggtgtaagctgtctctccctctctctctctctgtctctctgcctcggatgcctggcag

SEQ ID NO: 33089 - DNA, 120 bp, synthetic construct
  source 1..120: mol_type = other DNA
attcggggccactaccggtctctgcgtcttggtggtagtggtcccctgggcccagctgtcttgtcttttatctttttatcttgtgtctgtatttttacaatctctcatttctgcacatgg

SEQ ID NO: 33090 - DNA, 120 bp, synthetic construct; identical to SEQ ID NO: 9720
  source 1..120: mol_type = other DNA

SEQ ID NO: 33091 - DNA, 120 bp, synthetic construct
  source 1..120: mol_type = other DNA
ttgcaccactgcactccagcctgagtgacagagcaagatcctgtctccaaagagaaaaaaaaccaactcattgagctatctagtttaaatatgcagtttattgtttgtaaattatatctg

SEQ ID NO: 33092 - DNA, 120 bp, synthetic construct
  source 1..120: mol_type = other DNA
tcttacctcagcctcccaagttgctgggaccacaggcatccaccaccatgcccagctaatttttaaattatctgtagagatgaggttgcactatgttgcccaggctgatctcaaactcct

SEQ ID NO: 33093 - DNA, 120 bp, synthetic construct; identical to SEQ ID NO: 9721
  source 1..120: mol_type = other DNA

SEQ ID NO: 33094 - DNA, 120 bp, synthetic construct
  source 1..120: mol_type = other DNA
gcactctgggcagctgagatgagaagattgcttgaggccaggagttcaacaccagcctgagcaacatagtgagacctcatctctatttaatttaatgtatatatgaccgtcaggccatgc

SEQ ID NO: 33095 - DNA, 120 bp, synthetic construct
  source 1..120: mol_type = other DNA
cgggcatggtggctcatgcctgtaaccccagcactttgggaggccaaggcggatcagctgaggtcaggagtttgagacaagcctgggccaacatggtaaaaccccgtctctactaagaat

SEQ ID NO: 33096 - DNA, 120 bp, synthetic construct
  source 1..120: mol_type = other DNA
cactccagcctgggcaacagagcaagactccatctcaaaaaaaaaaaaaaaaaaaaaaaaaagtttggggagtttaaagcaggtggcatgaaagaaaaaaatggttagagttggaggcat

SEQ ID NO: 33097 - DNA, 120 bp, synthetic construct; identical to SEQ ID NO: 9722
  source 1..120: mol_type = other DNA

SEQ ID NO: 33098 - DNA, 120 bp, synthetic construct
  source 1..120: mol_type = other DNA
atacagctctgtatcctcccacttcagcagcaaacgtcacactgcatctttaagtcgataacctaaatatatatctcacaccctttagtccacagtttcacttttaagaatttattctta

SEQ ID NO: 33099 - DNA, 120 bp, synthetic construct
  source 1..120: mol_type = other DNA
acttctgtgcaatggcatgccattgcattcatcacaacaacaggaaaatgatttgggtactgatatgaacttattttaaaaatgtattacttagcctgggcaccatagggagactatgtc

SEQ ID NO: 33100 - DNA, 120 bp, synthetic construct
  source 1..120: mol_type = other DNA
tgggcttcagagtgataacctgtatcaaaaaaaaaaaaaaaaaaaaaggaaagaaaaaagaaatgtattgcttacagtgaaaatgaaaatagggcacagaacaggggcaatggtgtttta

SEQ ID NO: 33101 - DNA, 120 bp, synthetic construct
  source 1..120: mol_type = other DNA
agtgagagagagaggaagagagacttcacttgttagtttctggagggacagggaaaagtacgacctacaaaatgaagctctaatggtggaatttcaggacttgaaccccccggcatccct

SEQ ID NO: 33102 - DNA, 120 bp, synthetic construct; identical to SEQ ID NO: 9723
  source 1..120: mol_type = other DNA

SEQ ID NO: 33103 - DNA, 120 bp, synthetic construct
  source 1..120: mol_type = other DNA
tagctggcaccacaagcatgtgccaccagacccagctaattttttttcttttctcttttttgagatgagttctcaccatgttgtccaggctggtcttgaactcctggcttcaagtgatcc

SEQ ID NO: 33104 - DNA, 120 bp, synthetic construct
  source 1..120: mol_type = other DNA
ctgaagtgttaccatagatgatactgaaactcatacatttccttgctcctcagtcagagcccatgttccccttctggggatccacttggccctccagaataagtgtgaagattattttaa

SEQ ID NO: 33105 - DNA, 120 bp, synthetic construct
  source 1..120: mol_type = other DNA
tcactcccaggaagaacaccaaccactcatgtagacaaacataaacatcagcaacaaactcccatctcttccatttgtttctctaaaagtccatttgtctttcctcaaatgtccatgtgt

SEQ ID NO: 33106 - DNA, 120 bp, synthetic construct; identical to SEQ ID NO: 9724
  source 1..120: mol_type = other DNA

SEQ ID NO: 33107 - DNA, 120 bp, synthetic construct
  source 1..120: mol_type = other DNA
acctaccgggttcaagcaattctctgcctcagcctccctagtagctgggattataggcgcccgccaccacgcctggctaatttttttgtatttttagtagaggcggggtttcatcatgtt

SEQ ID NO: 33108 - DNA, 120 bp, synthetic construct
  source 1..120: mol_type = other DNA
gtggcacaatcatggctcgctgcagcctcaacctcctgggcttaagcaatccttctaccgcagcatcctgcatagctgacactacagacgcatgccaccatgcctggctaattatgggat

SEQ ID NO: 33109 - DNA, 120 bp, synthetic construct; identical to SEQ ID NO: 9725
  source 1..120: mol_type = other DNA

SEQ ID NO: 33110 - DNA, 120 bp, synthetic construct
  source 1..120: mol_type = other DNA
taaacaagtgaacaaaggtctctggttttcctaggcagaggaccctgcggccttccgcagtgtttgtgtccctgggtatttgagattagggagtggtgatgactcttaacgagcatgctg

SEQ ID NO: 33111 - DNA, 120 bp, synthetic construct
  source 1..120: mol_type = other DNA
ggaaaacagcaaattacaaggggagaaagagatgatttcaggcagaagccttccttcaacttcattgtgacggatgacaacctagcgttggaaggagagaaaaaaaaatccatttaaaaa

SEQ ID NO: 33112 - DNA, 120 bp, synthetic construct
  source 1..120: mol_type = other DNA
tactaaaaatacaaaaattagctgggcatggtggtgcgtgcctgtaatcccagctactgaggaggctgatgtgcgagaatcgcttgaacccaggaggtagaggttgcaatgagctgagat

SEQ ID NO: 33113 - DNA, 120 bp, synthetic construct; identical to SEQ ID NO: 9726
  source 1..120: mol_type = other DNA

SEQ ID NO: 33114 - DNA, 120 bp, synthetic construct
  source 1..120: mol_type = other DNA
aaaataagaacttccaagaagtccagaatctgccattctgcatgccttcttggatgtcatgagagcattagagttgcctcacaatccaggtattttcttaattacaaaagactttaaacc

SEQ ID NO: 33115 - DNA, 120 bp, synthetic construct
  source 1..120: mol_type = other DNA
ccatgatccttcaagctaacaagaaacaacaaacagctggggaatatgtctcttcaacctgcttctttgactttaacagagcctcacctgtagagaagtggggccttgggatctgggagc

SEQ ID NO: 33116 - DNA, 120 bp, synthetic construct
  source 1..120: mol_type = other DNA
ccaagggaccactcagtcctgctgactctatcctccgaagcttcttggatcagcccctcccaccaacccttctgctatttccatgtttcagaccttcagatgttctacctccagctagag

SEQ ID NO: 33117 - DNA, 120 bp, synthetic construct
  source 1..120: mol_type = other DNA
cattcatggcccttcatggagctctcctggcctgcctgacctctcaccacctcctgccttgcacttcactgcgtacagtcactacactgtctaatatggtagccaccagctgcaagcagc

SEQ ID NO: 33118 - DNA, 120 bp, synthetic construct; identical to SEQ ID NO: 9727
  source 1..120: mol_type = other DNA

SEQ ID NO: 33119 - DNA, 120 bp, synthetic construct
  source 1..120: mol_type = other DNA
tttcaagtgcttactagctagagattgcatactggacagcatagaaatagaacattcccatcaacacagacttttactagacagcattcctctagaaacacccaagtgtttttatttttt

SEQ ID NO: 33120 - DNA, 120 bp, synthetic construct
  source 1..120: mol_type = other DNA
gaagacttattcgaatctccaggctggggcaagtgcttggttcctgtgttctaatagttccttgtgttaactaatctctatctgaccacttagcatttgctgatacttctgtctcctcca

SEQ ID NO: 33121 - DNA, 120 bp, synthetic construct
  source 1..120: mol_type = other DNA
gtgcatgaccatagaacagtacaagtttaattgtgtattagtaaagactcctatgtagagagaaacaacctcaactcaaaccagtcaagagaaaagaggaagtaatggttcaataattgg

SEQ ID NO: 33122 - DNA, 120 bp, synthetic construct; identical to SEQ ID NO: 9728
  source 1..120: mol_type = other DNA

SEQ ID NO: 33123 - DNA, 120 bp, synthetic construct
  source 1..120: mol_type = other DNA
atatacgagcatcatgattgacagcttcacaggccacctggaaaaagaaggcgttacccaaaggaaccagaagaatagattgcaggaatagtgggagataggggctttacctcccacagg

SEQ ID NO: 33124 - DNA, 120 bp, synthetic construct
  source 1..120: mol_type = other DNA
agatttcaagccaccaatcagcaggctgcaaaggatcttgaatttagaagattttgctggcccggaaatacatagtgatggagctttgaaagacaatgggccgggcatagtggcttaggc

SEQ ID NO: 33125 - DNA, 120 bp, synthetic construct
  source 1..120: mol_type = other DNA
tggcgcatgcctgtaatccccagctcttggctctgttgactgccctgtaacatccctctcaggcaagatgaacacgagtactgttggtccttagtatctccaatttagcaacctcaggag

SEQ ID NO: 33126 - DNA, 120 bp, synthetic construct; identical to SEQ ID NO: 2587
  source 1..120: mol_type = other DNA

SEQ ID NO: 33127 - DNA, 120 bp, synthetic construct
  source 1..120: mol_type = other DNA
tttattaaccaggcatggtggagtgggcctgtaatcctagctgcccaggagactgaggcgggagtatttctcaagcccagggattcaaggctacagtgagctatgattgcatcactacac

SEQ ID NO: 33128 - DNA, 120 bp, synthetic construct
  source 1..120: mol_type = other DNA
gactatagtcatccaccgcagtcaagatgtaaatcagttccctcagccacagttccctgggcccagttatagccaaactttccccaggccctgtccctggcaactactgatctgttttct

SEQ ID NO: 33129 - DNA, 120 bp, synthetic construct; identical to SEQ ID NO: 9730
  source 1..120: mol_type = other DNA

SEQ ID NO: 33130 - DNA, 120 bp, synthetic construct
  source 1..120: mol_type = other DNA
tccctatagttttaacttttccaaaatatataaatggaaacataaggtatgaaggttttgagtttagcttctttcatttagcataagacaattgatacatgtccatgatgctctatacat

SEQ ID NO: 33131 - DNA, 120 bp, synthetic construct
  source 1..120: mol_type = other DNA
tgctataaacatagattttctcttttaaaaaattgttttggggacagggactggtctcactatgttgctcaggctgatccgaaactcctggactcaagcaattctcccacctcagcctcc

SEQ ID NO: 33132 - DNA, 120 bp, synthetic construct
  source 1..120: mol_type = other DNA
actgccaaattgtttcccaaagagactatattattctgtatggctactacattatatgagcattgcagtcactgtgcattcttgccagaacttgggtttgttggttttttttttttttaa

SEQ ID NO: 33133 - DNA, 120 bp, synthetic construct
  source 1..120: mol_type = other DNA
ctttaggaggttaagccagatggatcacttaagcccaaaaatttaagaccagcttgggcaacatagtgagaccccatctctcaaaaaaaattaaaaattaactgggcatggtggtatgca

SEQ ID NO: 33134 - DNA, 120 bp, synthetic construct; identical to SEQ ID NO: 9731
  source 1..120: mol_type = other DNA

SEQ ID NO: 33135 - DNA, 120 bp, synthetic construct
  source 1..120: mol_type = other DNA
aaagcaagtttattcagaaagtaaaggaataaaagaatggctactccagaggcagagcagccccaagggctgctggttgcccatttttatggttatttctcgattacatgctaaataagt

SEQ ID NO: 33136 - DNA, 120 bp, synthetic construct
  source 1..120: mol_type = other DNA
ctcttgtagccttcttggttttggtgggttttagccagcttctttactgcgacctgttttagcagcaaggtctttatcacctgtatcttgtgctgatctcctatcttatcctgtgactta

SEQ ID NO: 33137 - DNA, 120 bp, synthetic construct
  source 1..120: mol_type = other DNA
gcatcagaaagtggttgacttgcaggttggtaagaagaatctactgacagcagaatagatttgaaaagtcaagttttattagatagaaagtacactgcagaaaagtgcagccaggcgcat

SEQ ID NO: 33138 - DNA, 120 bp, synthetic construct; identical to SEQ ID NO: 9732
  source 1..120: mol_type = other DNA

SEQ ID NO: 33139 - DNA, 120 bp, synthetic construct
  source 1..120: mol_type = other DNA
gaaattctagttatttataaattttggggaaagaggcctggaaccagatgctgactttaggtaacagggaaggctaattacttctaaattcctcagataaggagttttgtctctggatgg

SEQ ID NO: 33140 - DNA, 120 bp, synthetic construct
  source 1..120: mol_type = other DNA
gcatgtgccaccatattttttgtggagacgggatgtcgccatgttgcccaagctggtcttgaattcctgggctcaagcaatctgcctgccttggcctcccaaaatgttaatattataggt

SEQ ID NO: 33141 - DNA, 120 bp, synthetic construct
  source 1..120: mol_type = other DNA
aaaaaaaaaaaaaagcgtctctccatttgtggcttttctttttgttctttcaacagtgtcttttgaagagaagttcttcaagttcttttgaagagaagtccaagttattgattttttctt

SEQ ID NO: 33142 - DNA, 120 bp, synthetic construct; identical to SEQ ID NO: 9733
  source 1..120: mol_type = other DNA

SEQ ID NO: 33143 - DNA, 120 bp, synthetic construct
  source 1..120: mol_type = other DNA
ataattccaaagcgccaaacaaggaaacaggaggaattctcaagcctcaaatccattttctctaggttttctgggcaaaggtttttaaggggatcatggagggtgaagggctagaaaact

SEQ ID NO: 33144 - DNA, 120 bp, synthetic construct
  source 1..120: mol_type = other DNA
tcaggagttcaagacctgcctggactacatggtgaaaccccatctctactaaaaatacaaaagttagctgggcatggtggcgcatgcctatagatccagttactcaggaggctgaggcag

SEQ ID NO: 33145 - DNA, 120 bp, synthetic construct
  source 1..120: mol_type = other DNA
ttctgctgggcccctcagaacagctggtatgggtagttttgttgtatgcaaaacccaaaggagaaactccatgggaaacttagcatctcacaaggccttagatttcatctacagaatgga

SEQ ID NO: 33146 - DNA, 120 bp, synthetic construct; identical to SEQ ID NO: 9734
  source 1..120: mol_type = other DNA

SEQ ID NO: 33147 - DNA, 120 bp, synthetic construct
  source 1..120: mol_type = other DNA
tttcaaaattgttttaactattctagttcttttgccttttgcctttttttttttttttttaattattattatttgagacaaggtctggctctgtcatccaggctggagtggggtggctca

SEQ ID NO: 33148 - DNA, 120 bp, synthetic construct
  source 1..120: mol_type = other DNA
tggagtgcaatgcctcgatctcagctcaccacaacctccgcctcctgggtttaagcgattctcctgcctcagcctactgtgtaggtgggattacaggcatgcgccaccatgcccagctaa

SEQ ID NO: 33149 - DNA, 120 bp, synthetic construct
  source 1..120: mol_type = other DNA
tgtgcctggccttttttttttttttttttttttgaggcagagtctcactctgtcacccaagcaggaatgcagtggtgtgttcttgggtcactgcagcctccgcctcccaggttcaagtgg

SEQ ID NO: 33150 - DNA, 120 bp, synthetic construct; identical to SEQ ID NO: 9735
  source 1..120: mol_type = other DNA

SEQ ID NO: 33151 - DNA, 120 bp, synthetic construct
  source 1..120: mol_type = other DNA
atgacactgcagaggaatcaattctttctgtagatgttcaagagaaaggccttttgagaaatgtgcaagttccttttgtacatttacaaaagctttatttactctgttagctttttcatc

SEQ ID NO: 33152 - DNA, 120 bp, synthetic construct
  source 1..120: mol_type = other DNA
ggctggccaacctggtgaaatcccatctctactaaaaatacaaaaattagccaggcattatggcaggtgcctataatcccagctacaaagaaggctgaggcaggagaatcgcttgaaccc

SEQ ID NO: 33153 - DNA, 120 bp, synthetic construct
  source 1..120: mol_type = other DNA
agattagtggtaactggttttgctttgtttttagccccaaagttttttttcgctggctatgtgaaatacattcctggatttctgccctcttaatttgttcttggcccttgtcaggaattt

SEQ ID NO: 33154 - DNA, 120 bp, synthetic construct; identical to SEQ ID NO: 9736
  source 1..120: mol_type = other DNA

SEQ ID NO: 33155 - DNA, 120 bp, synthetic construct
  source 1..120: mol_type = other DNA
ctggcccaatctatattttagaatcagcataccgactccatttttctgtaagggaccacaggcttacaggggctccctgattagaatccacaccagtgttcacgatttatccagaggtag

SEQ ID NO: 33156 - DNA, 120 bp, synthetic construct
  source 1..120: mol_type = other DNA
tggggaaaatttgcatctgtagagaatctctactaatgcagccaggccttccttttctacaaattttccatatctaagagagattaactgagtctgacaccttgaaaggtctgaaaaaag

SEQ ID NO: 33157 - DNA, 120 bp, synthetic construct; identical to SEQ ID NO: 9737
  source 1..120: mol_type = other DNA

SEQ ID NO: 33158 - DNA, 120 bp, synthetic construct
  source 1..120: mol_type = other DNA
gggtagggagagcattaggaaaaatagctaatgcatgctgagctgagtagctatgtgatgggttgatctgtgcagcaaaccacgatggcacacatttacctatgtaacaaacctgcacat

SEQ ID NO: 33159 - DNA, 120 bp, synthetic construct
  source 1..120: mol_type = other DNA
tgaggactgctacctatgaggcctcatctatataacaaagccatctttgcaagccaggcctctttctttctccctttcacaccatgtcttgctactaaacatgatttaccaacgtaaact

SEQ ID NO: 33160 - DNA, 120 bp, synthetic construct
  source 1..120: mol_type = other DNA
aaatttatatgtctttccttctattaataaatttgcctcatgtcagtagtttttcagtgaacttttaggggccaatggtcatgacccccacaagggtgatgggcaagtgcacgattctag

SEQ ID NO: 33161 - DNA, 120 bp, synthetic construct
  source 1..120: mol_type = other DNA
tttcctgttctgtaaaatggagaaaatgtaatacctatttcataggatctttgtgaggactgcagtaacgcatgaaaaacagaacagagcctggcatgtagtaagcccttgataagtgtc

SEQ ID NO: 33162 - DNA, 120 bp, synthetic construct; identical to SEQ ID NO: 9738
  source 1..120: mol_type = other DNA

SEQ ID NO: 33163 - DNA, 120 bp, synthetic construct
  source 1..120: mol_type = other DNA
atcacgagggtaaacaactggtaccctacagtgtactgtgttcccagtgtttggggatattgtgttttatgctttcacgtctcattatgtctgcaaaatgcccatttgtgtctcctgcct

SEQ ID NO: 33164 - DNA, 120 bp, synthetic construct
  source 1..120: mol_type = other DNA
atggccatctcaggcaagttaggactttcacattccataatttccaccttcttaaaggaaagaagtgcataagtgatgtagtgaaatgatcagccttggttaaatccactgtcatcacaa

SEQ ID NO: 33165 - DNA, 120 bp, synthetic construct; identical to SEQ ID NO: 9739
  source 1..120: mol_type = other DNA

SEQ ID NO: 33166 - DNA, 120 bp, synthetic construct
  source 1..120: mol_type = other DNA
tgagagcaaatatttaatgccaatgaaacaagcttattctggaagcgtatcctagagcatccatacattcatcaagagtacaggaagatgccaggattcaaggcattcaaagaccttata

SEQ ID NO: 33167 - DNA, 120 bp, synthetic construct
  source 1..120: mol_type = other DNA
gcctggattacaagccttgaaaacaagtcagcactgttttcagactactttttgaactgtgttacgctattgacaagaggatattgtaggcaaaacagcatctgattcaagattcttctg

SEQ ID NO: 33168 - DNA, 120 bp, synthetic construct
  source 1..120: mol_type = other DNA
ctgcattcaaagcatactatttatgccaaacgttcacataggctgttgaagcagtggaatctggccagactctccaagagttttggaaaggttttaacattctaaatactatctggaaca

SEQ ID NO: 33169 - DNA, 120 bp, synthetic construct; identical to SEQ ID NO: 9740
  source 1..120: mol_type = other DNA

SEQ ID NO: 33170 - DNA, 120 bp, synthetic construct
  source 1..120: mol_type = other DNA
accttagaagaaatggatatcactggatccattttccacacaatctttactgaagatttgtaagaactgacagggagttacaacatgctctagcttgctatacagaaatacgtaatgaaa

SEQ ID NO: 33171 - DNA, 120 bp, synthetic construct
  source 1..120: mol_type = other DNA
aagagagagaaatttatcaccttgtcactgtagcatccctatcatccagcaattaattttagttcaatgcttcaaacattcttcaagcccaatgtgctttcagttatgcacattaatggt

SEQ ID NO: 33172 - DNA, 120 bp, synthetic construct
  source 1..120: mol_type = other DNA
gatcacttgaggccaggagttcgagactagcctggccaacatggggaaaacctatctctactaaaaatacaaaaataagctgggcataatggtgtgttcctgtaatcccagctacttggg

SEQ ID NO: 33173 - DNA, 120 bp, synthetic construct
  source 1..120: mol_type = other DNA
ataaaaaattacaggagatattcacactttattataaaataggctttgcatttcatgatattggccaactataggataatatctgagcacagttaaggcaagcaggctaagctatgatgt

SEQ ID NO: 33174 - DNA, 120 bp, synthetic construct; identical to SEQ ID NO: 9741
  source 1..120: mol_type = other DNA

SEQ ID NO: 33175 - DNA, 120 bp, synthetic construct
  source 1..120: mol_type = other DNA
tcaggaaatcctcaatattggaaactccttctttcataggaccaggagttgtccaagagtaaggtctcagtgcttcaaatccatcagagatttcccagagaggtatttctatctgtccac

SEQ ID NO: 33176 - DNA, 120 bp, synthetic construct
  source 1..120: mol_type = other DNA
tggaatgggatcattgaagagtgggggctatgtctactccgaggctgaatactttttttctaaatactttaatatttttaccactgtcaacagaaaacaatcaagaggctcagactctaa

SEQ ID NO: 33177 - DNA, 120 bp, synthetic construct
  source 1..120: mol_type = other DNA
aaagtttagggaaacttaacagaatttcaacatctttctgtttttgttttgttttgtttagaaacaccctgttgcccaggctggagtgcagtgatgcaatcatagctcacaatggcctcg

SEQ ID NO: 33178 - DNA, 120 bp, synthetic construct; identical to SEQ ID NO: 9742
  source 1..120: mol_type = other DNA

SEQ ID NO: 33179 - DNA, 120 bp, synthetic construct
  source 1..120: mol_type = other DNA
aagaaacagaatggtaatcatgctatgtgactcagtctccagggcttatggcaaaataaatttaggtggccctgaaactttattttcttttacaccatcatagttctaaaatggattgct

SEQ ID NO: 33180 - DNA, 120 bp, synthetic construct
  source 1..120: mol_type = other DNA
cctgcctcagcctcctgagtagctgggattataggtgcccaccaacacacccagctaatttttgtatttttagtagagatggggttttgccatgttggccaggctggtctcaaactcctg

SEQ ID NO: 33181 - DNA, 120 bp, synthetic construct; identical to SEQ ID NO: 9743
  source 1..120: mol_type = other DNA

SEQ ID NO: 33182 - DNA, 120 bp, synthetic construct
  source 1..120: mol_type = other DNA
gtgaagtaaacagcagatgcgaacaggctttctctgaagcccccttatccgaatttaggaaaggctgactcacaggaaaaggagagcaaaggtctggcagacaccttaccccaggctgcc

SEQ ID NO: 33183 - DNA, 120 bp, synthetic construct
  source 1..120: mol_type = other DNA
gagtccccaaacccctatcatttctgtaatctctgaatggtattaaaacttcagccatctgacccctcctttgagtctcatactgtgtgtatagctcctatgatcatatgcacattaagt

SEQ ID NO: 33184 - DNA, 120 bp, synthetic construct
  source 1..120: mol_type = other DNA
gaaaataaatttcttttttcttttttctttcttttttttttttttttaagacggagtctcgttctgtcacccaggcaagagcgcaatggcacaatcttggctcattgcaacctccacatc

SEQ ID NO: 33185 - DNA, 120 bp, synthetic construct
  source 1..120: mol_type = other DNA
tgtatttttagcagagacgaggtttcaccatgttggctgggctggtctcaaactcctgacctcaagtgatccactgccttggcctcccaaaatgctgggattacaggtgtgaaccactgt

SEQ ID NO: 33186 - DNA, 120 bp, synthetic construct; identical to SEQ ID NO: 9744
  source 1..120: mol_type = other DNA

SEQ ID NO: 33187 - DNA, 120 bp, synthetic construct
  source 1..120: mol_type = other DNA
agaccccgtctctattaaaaatacaaaagttagctgggcatggtggcaggtgcctgtaatcccagctacttgggaggctgaagcatgagaatcacttgaacccaggaggtggaggttgca

SEQ ID NO: 33188 - DNA, 120 bp, synthetic construct
  source 1..120: mol_type = other DNA
atatataaaaaagaggtttaatttgctcatggttctgtaggctgtacaagcatggcaccaacatctgctgagcttctagggaggccttggggagcttttactcatgacagaaggcaaagc

SEQ ID NO: 33189 - DNA, 120 bp, synthetic construct
  source 1..120: mol_type = other DNA
aagccatgagggatccacccccaagacccaaatgcctcccaccaggcccgacttccaacattggtgattatatctcaacctgagattttgggggacaaatatccaaactatttcaacccc

SEQ ID NO: 33190 - DNA, 120 bp, synthetic construct; identical to SEQ ID NO: 9745
  source 1..120: mol_type = other DNA

SEQ ID NO: 33191 - DNA, 120 bp, synthetic construct
  source 1..120: mol_type = other DNA
ccaaaatattccagtccaaaatacacttctttggcatatttccttttttttttttttttttgaggtggagtttcactcttgttgcccaggctggagtgcaatggtgccatcccggctcac

SEQ ID NO: 33192 - DNA, 120 bp, synthetic construct
  source 1..120: mol_type = other DNA
cgcccagctgaattttttcatttttagtagagagggggtttcaccaggttggccaggctggtctcgaactcctgacctcaggtgatccgcctgcctcggcctcccaaagtactgggatta

SEQ ID NO: 33193 - DNA, 120 bp, synthetic construct
  source 1..120: mol_type = other DNA
agaatctgcattgatgccaccaggctgtttctgaagccctcccctatctggatctgggcaagattagaaagtctgacaccttaaaagtctgaaagaaacatctaccttctattctttctg

SEQ ID NO: 33194 - DNA, 120 bp, synthetic construct; identical to SEQ ID NO: 9746
  source 1..120: mol_type = other DNA

SEQ ID NO: 33195 - DNA, 120 bp, synthetic construct
  source 1..120: mol_type = other DNA
tgtgcacattaataaatctgtacgtcatttcttctgagaaaagaaaaacagctgacagaagtctgagctgtgtgagatatgcaggtccagagagacacgagtatgggacttcagtcacac

SEQ ID NO: 33196 - DNA, 120 bp, synthetic construct
  source 1..120: mol_type = other DNA
tatgttatttaaatgtaaattcttggtaaagaatttaggaactgcctcttcttttcctttaaaaatcaactcgtatctgttgctaatcagagggcaacttgaatctatgctcccaggttg

SEQ ID NO: 33197 - DNA, 120 bp, synthetic construct
  source 1..120: mol_type = other DNA
tgtgtttctctctgaaagtgatactgggtaccagcatgaacattccctccagtgtcccatctgatgttttgggtgagttctcctgaattagaacctcccactctttgattgaaggtccaa

SEQ ID NO: 33198 - DNA, 120 bp, synthetic construct
  source 1..120: mol_type = other DNA
tgggatcaggggttctggtcaaagtttttctacccctgtgacacagcagaatttttgatcaaaagattgacagttaggtactggtggtttcattttgttggggctcagaaaccaataccc

SEQ ID NO: 33199 - DNA, 120 bp, synthetic construct; identical to SEQ ID NO: 9747
  source 1..120: mol_type = other DNA

SEQ ID NO: 33200 - DNA, 120 bp, synthetic construct
  source 1..120: mol_type = other DNA
aggatcgaagtccccattctttctgtaacctcaagatggcatataaccttccatttgtggagagttcttagcatgagagagagagagaaaaataagatggtatctgagcttctgtactca

SEQ ID NO: 33201 - DNA, 120 bp, synthetic construct
  source 1..120: mol_type = other DNA
gaccaagggctttggcccccatagtttcatagagcatgcttttaagattgcagctcagccaggcacggtgcctcacatctgaaatcccagcactttgggaggccaaagtgggaggattgc

SEQ ID NO: 33202 - DNA, 120 bp, synthetic construct
  source 1..120: mol_type = other DNA
catcacttgaaaatgtggacttagcctttcatttgtgaccagttcctgttagttcctaactgaaacgtgtaccccctttttgctcttctggacacgtataacacgtctggtttcccatgc

SEQ ID NO: 33203 - DNA, 120 bp, synthetic construct; identical to SEQ ID NO: 9748
  source 1..120: mol_type = other DNA

SEQ ID NO: 33204 - DNA, 120 bp, synthetic construct
  source 1..120: mol_type = other DNA
ttgagaccatcctgggcaacatagtgagaccttttctctacaaaaaataaaaaaataagtgggaggatcacttgagccccacaggtcgaggctgcaataagccgtgatcacaccactgca

SEQ ID NO: 33205 - DNA, 120 bp, synthetic construct
  source 1..120: mol_type = other DNA
acctaatttatgtttttcctggctgaaatctgataataagagattcaaaaagattctttttgagagttctatgggaagaagtcatcttcactaaaagttgatatttagtactgggagcag

SEQ ID NO: 33206 - DNA, 120 bp, synthetic construct
  source 1..120: mol_type = other DNA
aaagcctgaaagccaagctacaagtcaagtctacagactgggttgggaatctctcttcccatttggtgcactttcctctgtttgatcctcaccgttcacctattttacatatcctaccct

SEQ ID NO: 33207 - DNA, 120 bp, synthetic construct
  source 1..120: mol_type = other DNA
accacacacaagaacctgggacccaccaaacagtaggggatgaaaggagctgtaagctgtagccctcccatcctttgccagtgccaggcagctgccccacatgatgggaagcggcttgca

SEQ ID NO: 33208 - DNA, 120 bp, synthetic construct; identical to SEQ ID NO: 9749
  source 1..120: mol_type = other DNA

SEQ ID NO: 33209 - DNA, 120 bp, synthetic construct
  source 1..120: mol_type = other DNA
ttcaaggtttcaatgagctggagatcgttgagcccaggagttcaaggtttcaatgagctggattatgccactgctttcagtctgggtgacagagcaagaccttgtctcaaaaaaaaaaaa

SEQ ID NO: 33210 - DNA, 120 bp, synthetic construct
  source 1..120: mol_type = other DNA
aatgtgtttgatcccactgtttgcttcctatcttattggcatgatttttgctgagaaaaatgtaaaacttcattggcctttttgaaagcggaaaatcttcccaaattggctcctctaaga

SEQ ID NO: 33211 - DNA, 120 bp, synthetic construct; identical to SEQ ID NO: 9750
  source 1..120: mol_type = other DNA

SEQ ID NO: 33212 - DNA, 120 bp, synthetic construct
  source 1..120: mol_type = other DNA
aaggctgcagttttggaaatggctgacaggggatacaatgaatggttgctactgcaggcagggcacacttttctttgtgcatttagatgagaaaggcatcatttgaacacttcaaaggtg

SEQ ID NO: 33213 - DNA, 120 bp, synthetic construct
  source 1..120: mol_type = other DNA
agtaaaaatgggacccttgatttttaaaaatttcgatgccctgccttccagttgtgcctgcttttcacatttaaatatttgaccctgaagactacaaatgcttcccttgccctattcact

SEQ ID NO: 33214 - DNA, 120 bp, synthetic construct
  source 1..120: mol_type = other DNA
gtatttaaaataagacctgtggcatttagctggctattttgtaacactttgtaaaataaatatctgtaaaggaaatctcaatttttaagagcatcgtcctacactcaagccacaagaaaa

SEQ ID NO: 33215 - DNA, 120 bp, synthetic construct; identical to SEQ ID NO: 9751
  source 1..120: mol_type = other DNA

SEQ ID NO: 33216 - DNA, 120 bp, synthetic construct
  source 1..120: mol_type = other DNA
tgtaagtccaagagagccatgttaggcttatctggtatgttaaaagtgtacaggaaacactgtcaagtaagaaatatttgtataactatgttattgatatgttaatatactttggatcag

SEQ ID NO: 33217 - DNA, 120 bp, synthetic construct
  source 1..120: mol_type = other DNA
ctattcctgtgatagtgagtgagttatcatcagatctggttgttaaaagtttgtagcaacccccacccttcctactccagccatgcaagatgtgcctgcttccccttcaccttccaccat

SEQ ID NO: 33218 - DNA, 120 bp, synthetic construct
  source 1..120: mol_type = other DNA
tttatagcccataatggactaattggtactgaggagtaggtcattgctataaagacacctgaaaatgcagaagcagctttggaactgggtaacaaacaggggttggaacagttttgaggg

SEQ ID NO: 33219 - DNA, 120 bp, synthetic construct; identical to SEQ ID NO: 9752
  source 1..120: mol_type = other DNA

SEQ ID NO: 33220 - DNA, 120 bp, synthetic construct
  source 1..120: mol_type = other DNA
tatattgaaaagggaagcaggatgggcacagtggctcatgcgtgtaatcctagaattttgggaggccaaggcagacagatcacttgagcccaggagttcaagactagcctgggcaacatg

SEQ ID NO: 33221 - DNA, 120 bp, synthetic construct
  source 1..120: mol_type = other DNA
attgtgccactgcactctagcctgagtgacagagaccctgtctcaaaactaaataaataaaaagtaaaagggaagcaaagcataaaagcttgaaaaatttggagcctggccatgtggtag

SEQ ID NO: 33222 - DNA, 120 bp, synthetic construct
  source 1..120: mol_type = other DNA
accccgtctctactaaaaatacaaaaattagctgggtgtggtggcacatgcctataatcccagctcctcaagaggctgaggcaggagaatcatttgaaccgaggaggtgaagattgcagt

SEQ ID NO: 33223 - DNA, 120 bp, synthetic construct; identical to SEQ ID NO: 9753
  source 1..120: mol_type = other DNA

SEQ ID NO: 33224 - DNA, 120 bp, synthetic construct
  source 1..120: mol_type = other DNA
gtacagcgtgggttactacttcagagagtgcaagccagaagccttggtggtttccacagagtgttaagcatccaggtgtgcagagtgcaagagctgaggcttgggagcctctgcctagat

SEQ ID NO: 33225 - DNA, 120 bp, synthetic construct
  source 1..120: mol_type = other DNA
cacagagcccccattgggcacttccctgtagagctgtgagaagaggaccaatatcctccagaccccagaatggtagatccactgacagcttgcaccctgcacttggaaaagctgcaggca

SEQ ID NO: 33226 - DNA, 120 bp, synthetic construct
  source 1..120: mol_type = other DNA
tattttggagctttaagatttaatgaccaccctgctggatttcaaacttgcatgaggcctgtagcccctttcttttgacccatttctcccttttggaatgggagcatttatccaatgcct

SEQ ID NO: 33227 - DNA, 120 bp, synthetic construct; identical to SEQ ID NO: 9754
  source 1..120: mol_type = other DNA

SEQ ID NO: 33228 - DNA, 120 bp, synthetic construct
  source 1..120: mol_type = other DNA
cattggattaagttaaaactttcagaattctaataaactgatgcatcattcatgaatattgctaacccaacatcaagcagaacaggaatcaattatatggaactgatctgataaagggat

SEQ ID NO: 33229 - DNA, 120 bp, synthetic construct
  source 1..120: mol_type = other DNA
atacatttattagcaaaatggaaacatttacctgtctctctctacctgatttctccaaagtttaaaaattattcatgagtattcttattttatggcaatctagttattagcataagttta

SEQ ID NO: 33230 - DNA, 120 bp, synthetic construct; identical to SEQ ID NO: 2611
  source 1..120: mol_type = other DNA

SEQ ID NO: 33231 - DNA, 120 bp, synthetic construct; identical to SEQ ID NO: 9755
  source 1..120: mol_type = other DNA

SEQ ID NO: 33232 - DNA, 120 bp, synthetic construct
  source 1..120: mol_type = other DNA
ttatggacacctggagaaaagaggaaatcacccaatttgtacatatattacaggttcagtctaatggtgaatccttggcttggcttcaaagtcttgaagcttttaaaagtctaatttgaa

SEQ ID NO: 33233 - DNA, 120 bp, synthetic construct
  source 1..120: mol_type = other DNA
gaatgcttgagctcagaagttcaagatcagcctgggaaacatggtaaaaccctgtctctacaaaaaatacaaaaattagctgggcatgttggtgcatgcctgtaatctcagctactcaga

SEQ ID NO: 33234 - DNA, 120 bp, synthetic construct
  source 1..120: mol_type = other DNA
aggtaaggtaaggtaaggtaagttagttccagcaaagccaacttaaaagagcctgtatggccattactattcttgttgtaccttatcaggcaacatataatactaaaacttgcttttgag

SEQ ID NO: 33235 - DNA, 120 bp, synthetic construct
  source 1..120: mol_type = other DNA
aggtgcacgtcaccacatccagctaattttcgtatctttagcagagacagggttttgccatgttggccaggctggttttgaactcctgacctcagatgatctgcccaccttggcctccca

SEQ ID NO: 33236 - DNA, 120 bp, synthetic construct; identical to SEQ ID NO: 9756
  source 1..120: mol_type = other DNA

SEQ ID NO: 33237 - DNA, 120 bp, synthetic construct
  source 1..120: mol_type = other DNA
tttgagaccagcctggccaacatggtgaaaccccatctctactaaaaatacaaaaattagctgggcgtggtggcagctgcctgtaatcccagctactctggaagctgaggcaggagaatc

SEQ ID NO: 33238 - DNA, 120 bp, synthetic construct
  source 1..120: mol_type = other DNA
acaaacaaaaataataattttgcctcaggttcctctttttaggttgacatatctgttaatctaccttttgtgagttgacttgtcagaaggggacggggaagttttttttggcccacatgt

SEQ ID NO: 33239 - DNA, 120 bp, synthetic construct; identical to SEQ ID NO: 9757
  source 1..120: mol_type = other DNA

SEQ ID NO: 33240 - DNA, 120 bp, synthetic construct
  source 1..120: mol_type = other DNA
gccgatcacctgtttcggtgttttctatctattaggagactgtgcttccctggcgctggctgtgaccaattattattttagagagacaggttgacaactgcctgaccatcacgatggtca

SEQ ID NO: 33241 - DNA, 120 bp, synthetic construct; identical to SEQ ID NO: 9758
  source 1..120: mol_type = other DNA

SEQ ID NO: 33242 - DNA, 120 bp, synthetic construct
  source 1..120: mol_type = other DNA
tcacaacacagaccaaacaagaacattgcccaaaccacaaaaatgaacaaaagtccctgtttctgtctcataggagtgagtggtgcttctttttcaattacagctttagcctcagtttgt

SEQ ID NO: 33243 - DNA, 120 bp, synthetic construct
  source 1..120: mol_type = other DNA
aaatgaacaaaagtccctgtttctgtctcataggagtgagtggtgcttctttttcaattacagctttagcctcagtttgttcttctagataagaaatattaagattccagctgagccggg

SEQ ID NO: 33244 - DNA, 120 bp, synthetic construct
  source 1..120: mol_type = other DNA
caaaattagccgggtgtggtggctcatgcctgtaatcccagctactcgggagcctgaggcaggagaatcggttgaacccgggaggcggagtttgcagtgagccgagattgcgccattgca

SEQ ID NO: 33245 - DNA, 120 bp, synthetic construct; identical to SEQ ID NO: 9759
  source 1..120: mol_type = other DNA

SEQ ID NO: 33246 - DNA, 120 bp, synthetic construct
  source 1..120: mol_type = other DNA
tgagaccctgtctctataaaaacaaaaaacataagatcacgccactgcactccagcctgggtgacagagcgagacttgtctcaaacaaacaaacaaacaaaaccctgtagtctcagctac

SEQ ID NO: 33247 - DNA, 120 bp, synthetic construct
  source 1..120: mol_type = other DNA
acaatctaggctcactgcaacctctgcctcccaggctcaagggatcctcccacctcagcctcccaagcagctgggaacacaggcgtgtgccatcacacccagctaatatttttttttttt

SEQ ID NO: 33248 - DNA, 120 bp, synthetic construct
  source 1..120: mol_type = other DNA
gagccctgccaaaaagattcttaatagaattacacccactttctgacagtatctaatccagagcaaagcctgtttctttgatcactcctcaaaatcacataacagaagcccaaattctta

SEQ ID NO: 33249 - DNA, 120 bp, synthetic construct; identical to SEQ ID NO: 9760
  source 1..120: mol_type = other DNA

SEQ ID NO: 33250 - DNA, 120 bp, synthetic construct
  source 1..120: mol_type = other DNA
aaactgctccaagaattattagtagagcaatgtctgccaataatgattgcttcaataatggagcccaaaatagaatggacaaaaaataaagctgttgagacgtctacaggtttggtttca

SEQ ID NO: 33251 - DNA, 120 bp, synthetic construct
  source 1..120: mol_type = other DNA
atttatcatttaacccatttcctttcctttattaaacacaaaggctggacccagtggctcatatctgtaatcccagcactctgggaggctgaggcagaaggattgcctgagcccaggagt

SEQ ID NO: 33252 - DNA, 120 bp, synthetic construct; identical to SEQ ID NO: 9761
  source 1..120: mol_type = other DNA

SEQ ID NO: 33253 - DNA, 120 bp, synthetic construct
  source 1..120: mol_type = other DNA
ttttttttttttttttgagacacggtttccctcggttgcccaggttggagtgtagtggtgccatcacagttcactgcagcctcaacctcccaggctcaagcaatcttcccatttcagcct

SEQ ID NO: 33254 - DNA, 120 bp, synthetic construct
  source 1..120: mol_type = other DNA
ccttctgcctgggattcccatagtgctgggattacaggcatgaaccaccaagcccaacctgattttttaattttaatttttcttttcttttgcagaggtggggggggtgggggggcggtt

SEQ ID NO: 33255 - DNA, 120 bp, synthetic construct
  source 1..120: mol_type = other DNA
aatgtaaaataagagtattgatagtccagacgttgtgttgcattttattcttctgtgcccatggtcatttcagaaggaacttacggttccttgaagcagaaagtaaatttgcatttcata

SEQ ID NO: 33256 - DNA, 120 bp, synthetic construct
  source 1..120: mol_type = other DNA
aattttccattctcctggagacagtattccttgttgctatgcctctataatgccccatatctgcctacgagcagaaggaaataattattttcttctctatggcagtgttttggttttcat

SEQ ID NO: 33257 - DNA, 120 bp, synthetic construct; identical to SEQ ID NO: 9762
  source 1..120: mol_type = other DNA

SEQ ID NO: 33258 - DNA, 120 bp, synthetic construct
  source 1..120: mol_type = other DNA
ttaactgctaactgactagagctctggaaaaccacagtgggagggtttgcaattaaagatatcagaaaaacttgtgagaatcaaagagctgcagtattgtggtgggattataggcaggga

SEQ ID NO: 33259 - DNA, 120 bp, synthetic construct
  source 1..120: mol_type = other DNA
tattcattttttttttttttttggacacagtgtctcactctgttgcccaggctggggtgtagtggtgtgatcatggctcactacagcctcgacttccccaagcccagatgatcctcccac

SEQ ID NO: 33260 - DNA, 120 bp, synthetic construct
  source 1..120: mol_type = other DNA
tttttttccagagacggagtcttgctctgtcacccaggctggagtgcagtggtgcgatcgcagctctctgtaacctctgtctccctggttcaagtgattcttctgcctcagcctcccaag

SEQ ID NO: 33261 - DNA, 120 bp, synthetic construct; identical to SEQ ID NO: 9763
  source 1..120: mol_type = other DNA

SEQ ID NO: 33262 - DNA, 120 bp, synthetic construct
  source 1..120: mol_type = other DNA
cactcggctaatttttgtatttttagtagagacagggtttcaccatgttgaccaggctggtctcgaactcctgacctcaagtgatccacctgctttggccttccaaagtgctgggattac

SEQ ID NO: 33263 - DNA, 120 bp, synthetic construct
  source 1..120: mol_type = other DNA
ctccgcctcccagattcaagctattctcctgcctcagcctcccaagtagctggaactacaggcgcccaccaccacacccagctagtttttgtatttttagtagagatggagtttcaccat

SEQ ID NO: 33264 - DNA, 120 bp, synthetic construct
  source 1..120: mol_type = other DNA
aggatctcctatgtttcccaggctgttcttaaactcctgggctcaagtaatcctcctaccttcaccccacaaagtggtgggattacaggtgtgagccactgcacctggccttctgaagcg

SEQ ID NO: 33265 - DNA, 120 bp, synthetic construct; identical to SEQ ID NO: 9764
  source 1..120: mol_type = other DNA

SEQ ID NO: 33266 - DNA, 120 bp, synthetic construct
  source 1..120: mol_type = other DNA
accaccatgcccagctaatttttgtattttagtagagatggggtttcaccatgttggccaggctggtctcaaattcctgacctcaagcaatccgcccaccaaggcctcccaaagtgctgg

SEQ ID NO: 33267 - DNA, 120 bp, synthetic construct
  source 1..120: mol_type = other DNA
agagcaatatgacagaatccctgctttattaccctgacccaatcaaagctcacagatcagaagaactgggaagaaactcaaagaccatttaattaggggctctcaattcggttgctcatt

SEQ ID NO: 33268 - DNA, 120 bp, synthetic construct; identical to SEQ ID NO: 9765
  source 1..120: mol_type = other DNA

SEQ ID NO: 33269 - DNA, 120 bp, synthetic construct
  source 1..120: mol_type = other DNA
aaaaaaagaaagtaagaaaattagctgagcatggtggtgtgcactttgggaggctgaggagggaggattgcttgagcccaagagttcaagaccagcctgggcaacatagtgggaccctgt

SEQ ID NO: 33270 - DNA, 120 bp, synthetic construct
  source 1..120: mol_type = other DNA
agtcttttccccttgtcttgttgcttctctaaaaatttatcgttctttgttgaagatgttatataagctggaattgaaagccacctctcggcatggtggctcaaacctataatcccagca

SEQ ID NO: 33271 - DNA, 120 bp, synthetic construct
  source 1..120: mol_type = other DNA
aataaaagtcttgtagcaataggagagtatggcttgtggcagctgtaggggaggaaaattatttttttcctcaactcccataggttcttggttggaatggacccctgtaatgaaagacag

SEQ ID NO: 33272 - DNA, 120 bp, synthetic construct
  source 1..120: mol_type = other DNA
cttcaacaaagaatggtaaattttgggccaggcatgctggctcacccctgtaatcccagcactttgagaggccaaggtgggcggatcacttgaggataggagttcgagaccagcctggcc

SEQ ID NO: 33273 - DNA, 120 bp, synthetic construct; identical to SEQ ID NO: 9766
  source 1..120: mol_type = other DNA

SEQ ID NO: 33274 - DNA, 120 bp, synthetic construct
  source 1..120: mol_type = other DNA
aaaaaaaaaaaaaaggattggtaaatttatttttagagagacaacaagataaggggaaaagactttgagtctccaggggttacaacttaggggaaggcaaataaatggcagataaagata

SEQ ID NO: 33275 - DNA, 120 bp, synthetic construct
  source 1..120: mol_type = other DNA
acgttttgtctctgtctatgtacatcctgcttttcagtaaacacaaggagggcagagagttctcctgcatctgctactttcttgccttcagctcaacaatccttctgtgaaagaggcata

SEQ ID NO: 33276 - DNA, 120 bp, synthetic construct; identical to SEQ ID NO: 9767
  source 1..120: mol_type = other DNA

SEQ ID NO: 33277 - DNA, 120 bp, synthetic construct
  source 1..120: mol_type = other DNA
atctcagctcacagcaacctccgcctctcgggttcaagcgattctcctgcgtcagcctcccgagtagctgggattacaggcatgtgccaccacaccctactaattttgtatttttagtag

SEQ ID NO: 33278 - DNA, 120 bp, synthetic construct
  source 1..120: mol_type = other DNA
atatttataatagtggaaaacagaaaacaattgttcagtagtgtaaaagttttttttttttttgagatggagtctcgctctgttgcccaggctggagcgcagtggtgcaatctcggctca

SEQ ID NO: 33279 - DNA, 120 bp, synthetic construct
  source 1..120: mol_type = other DNA
gggtttcgctgtgttggccaggctggtctggaactccgacctgagatgatccacctgcctcgacctcccaaagtgctaggattacaggcatgagccatcacgcccagaccagaaatttct

SEQ ID NO: 33280 - DNA, 120 bp, synthetic construct
  source 1..120: mol_type = other DNA
atcccagcactttggggaggccgagggaggcagatgacttgaggttaggagtttgagaccagtctggccaacacagtgaaaccccatctctactaaaaatacaaaaattagacaggcgtg

SEQ ID NO: 33281 - DNA, 120 bp, synthetic construct; identical to SEQ ID NO: 9768
  source 1..120: mol_type = other DNA

SEQ ID NO: 33282 - DNA, 120 bp, synthetic construct
  source 1..120: mol_type = other DNA
tcaagtgattctcatgcctcagcctccccagtagctgggattacaggtgtgcgccgccacaccagggctaatttttgtatttttagtagaggcagggtttcacattgttggccaggctgg

SEQ ID NO: 33283 - DNA, 120 bp, synthetic construct
  source 1..120: mol_type = other DNA
tgctaagcaaggggtagattatttatgagttttccaggaaaggggtggggaatttccagaacagagggtttctcttccttttagaccatgtagagtaacttcgagtcattgccatagcat

SEQ ID NO: 33284 - DNA, 120 bp, synthetic construct; identical to SEQ ID NO: 9769
  source 1..120: mol_type = other DNA

SEQ ID NO: 33285 - DNA, 120 bp, synthetic construct
  source 1..120: mol_type = other DNA
gattttaatatcacaaggaaatgccctcactgtaagtagagaaatcagatatgaaattgtacataagctatgatcctaagttagatgcacagacaaaaaggctaaaacacaccaaaatgt

SEQ ID NO: 33286 - DNA, 120 bp, synthetic construct
  source 1..120: mol_type = other DNA
acagaactaataggacatatatatacatatatgtataggagtttattaagtattaacttacatgatcacaagatcccataataggctgtctgcaagttgaggagcaaggatagctacgcc

SEQ ID NO: 33287 - DNA, 120 bp, synthetic construct
  source 1..120: mol_type = other DNA
tgttttatattcactggcaactgattagattgtgcccaccagattaagggtgagtctgccttccccagcctactgactcaaatgttaatctcttttggcaacaccctcacagacacaccc

SEQ ID NO: 33288 - DNA, 120 bp, synthetic construct
  source 1..120: mol_type = other DNA
gtggtgagaacatggctcactgcagcctcggactgctgtgctcaagtgattctcccacctaagttttcaagtatctgggaccacaggtgcatgccaccacacttggctaatttttaaaaa

SEQ ID NO: 33289 - DNA, 120 bp, synthetic construct; identical to SEQ ID NO: 9770
  source 1..120: mol_type = other DNA

SEQ ID NO: 33290 - DNA, 120 bp, synthetic construct
  source 1..120: mol_type = other DNA
caccctcccaggcaggaatggagactggtgagctgcacaccttccaacgaagtgatgcagggacgtgcctgtaggggatgggctccttgaaattatcaccaaaacaggctgggcgcagtg

SEQ ID NO: 33291 - DNA, 120 bp, synthetic construct
  source 1..120: mol_type = other DNA
ttagccagatatggtggtgggcgcctgtagtcccagctactcgagaagctgatgtaggagaattgcttgaaccctggaggcagaggttgcagttagccgagatcacaccactgcactcca

SEQ ID NO: 33292 - DNA, 120 bp, synthetic construct; identical to SEQ ID NO: 9771
  source 1..120: mol_type = other DNA

SEQ ID NO: 33293 - DNA, 120 bp, synthetic construct
  source 1..120: mol_type = other DNA
tctggtttaaggtgggcatttcaacgcacagacttcattaaaattgggtgagaagcatcttacaatagtttagattaatggatacagcaaagcaagggtttagaggcaaggatattgaag

SEQ ID NO: 33294 - DNA, 120 bp, synthetic construct
  source 1..120: mol_type = other DNA
aggtcaggagtttgagaccagcctggtcaacatggtgaaaccccgtctctactaaaaatacaaaaattagctgggcttggtggcgcatgcctgtaatcccagctacttgggaccctgagg

SEQ ID NO: 33295 - DNA, 120 bp, synthetic construct
  source 1..120: mol_type = other DNA
caaataatcgaacactttgatgttcatgtaaatcaggatttttccatctcagcccttttgatatttggggctaaataattctttgtgggggtggggggtgctctcctgtgcattgcagaa

SEQ ID NO: 33296 - DNA, 120 bp, synthetic construct
  source 1..120: mol_type = other DNA
tctccaaatgtcccgggagaggggggtgcatttagattttaatgtctttcaggaagttcctggaatgaataaagtcatttgcaacttttatcgttcttgccaagagtttcctataatagt

SEQ ID NO: 33297 - DNA, 120 bp, synthetic construct
  source 1..120: mol_type = other DNA
ctcccagtcctgtggggtttggacttctgtctcctagtctcctattcatggtcagctttgtcctagaagagattacatctctaaagtccacaaccaggctgggcaccggtggctcacgtc

SEQ ID NO: 33298 - DNA, 120 bp, synthetic construct; identical to SEQ ID NO: 9772
  source 1..120: mol_type = other DNA

SEQ ID NO: 33299 - DNA, 120 bp, synthetic construct
  source 1..120: mol_type = other DNA
ttaggcaaactttattaaaggagggactaggaagatagctatagaaaccactgcaatgggctgctgaagttggggagagattgggagactgagctcaactccaaacacagcactgcaagt

SEQ ID NO: 33300 - DNA, 120 bp, synthetic construct
  source 1..120: mol_type = other DNA
aggcaagcagggtgatcagacattacccagagtgcggcggaggatgaggaacctcattagatattgtcaacctaaaaggaagaggctgaggcacaaaatataaagagtttacttgagcca

SEQ ID NO: 33301 - DNA, 120 bp, synthetic construct
  source 1..120: mol_type = other DNA
caaagttgtttgtgggccaggcccagtggctcatgcctgtaatcccagcactttgggaggccgaggagggcagaacatcaggtcaagagatcgagaccatcctggccaacacggtgaaac

SEQ ID NO: 33302 - DNA, 120 bp, synthetic construct; identical to SEQ ID NO: 9773
  source 1..120: mol_type = other DNA

SEQ ID NO: 33303 - DNA, 120 bp, synthetic construct
  source 1..120: mol_type = other DNA
tttcaagagatgaaggcatagctcaaagagggtagttagggcatgattgcttgtctcattttagagtctctctgggagtgataatttaaaagaactcacctcctaaaataaaagtgatca

SEQ ID NO: 33304 - DNA, 120 bp, synthetic construct
  source 1..120: mol_type = other DNA
taaaaatacaaaaatattaactgggcctggtggcgtgtgcctgtaatcccagctactcggaaggctgaggcaggagaatcacttgaacctggcaggcggaggttgcggtgagccgagatc

SEQ ID NO: 33305 - DNA, 120 bp, synthetic construct; identical to SEQ ID NO: 9774
  source 1..120: mol_type = other DNA

SEQ ID NO: 33306 - DNA, 120 bp, synthetic construct
  source 1..120: mol_type = other DNA
ctgtctgaaaaaaaaaaaaagtgatcagatatcaaaggtagggaattcttgctcaactgacttaggattcttgtaaaaattggatgatgcaagccgggcaccatggccaaagcagaagga

SEQ ID NO: 33307 - DNA, 120 bp, synthetic construct
  source 1..120: mol_type = other DNA
ttcgggaggctggggtgggaggatcccttgagcccaggggtttgaggttgcagagataacacagaaacccaaaagtcaagcctagctggaaaagagctcagaagtgcctgagtagagttt

SEQ ID NO: 33308 - DNA, 120 bp, synthetic construct
  source 1..120: mol_type = other DNA
tacctttccacaaaagatggtggcctagggaaaaaaatactatttgtttatctgaaattcaaatttaagtacatgtctcttttcaatactccttctctgaccttgcgtggtgcttgcctt

SEQ ID NO: 33309 - DNA, 120 bp, synthetic construct
  source 1..120: mol_type = other DNA
cttgttccggcgcctggtcaagagtgccctctggtggccacacggcgccctgcacccgcaaccagcgcagcccaagcagtggggacccggcctctgaggcggacacctgttcttggttct

SEQ ID NO: 33310 - DNA, 120 bp, synthetic construct; identical to SEQ ID NO: 9775
  source 1..120: mol_type = other DNA

SEQ ID NO: 33311 - DNA, 120 bp, synthetic construct
  source 1..120: mol_type = other DNA
aggagtgggaaagaggtgggaatcgcttgaccccaggacttccagactgcccagcgctgtgatcaggcctgtgaacagctactgtactccagcctgggcaaagcagcaggaccctgtttc

SEQ ID NO: 33312 - DNA, 120 bp, synthetic construct
  source 1..120: mol_type = other DNA
tttgagaccagcctgcacaacatagcaaaaccctgtctctactaaaaatacgaaaattagcctggtgtgttggcatgcgcctgtagtcccagctacccgggaagctgaggcagaagaatc

SEQ ID NO: 33313 - DNA, 120 bp, synthetic construct; identical to SEQ ID NO: 9776
  source 1..120: mol_type = other DNA

SEQ ID NO: 33314 - DNA, 120 bp, synthetic construct
  source 1..120: mol_type = other DNA
ggagagaaaggcgaatgggagaaaggaagtcaggagttcagagaaaacttattgcttctgcagccctctcaatctcctgaagctcaaaataccctgcattccaaggtgccatactttggg

SEQ ID NO: 33315 - DNA, 120 bp, synthetic construct
  source 1..120: mol_type = other DNA
cgtaatcctggcactttgggaggccgaggtgggcagattgcgtaagctcaggagttcaagaccagctttgggcaacatggcaaaaacccatctctacaaaaaatacaaaaattagttcgg

SEQ ID NO: 33316 - DNA, 120 bp, synthetic construct
  source 1..120: mol_type = other DNA
gtgagaccctgtctcaaatcaaaaacaaaaacagttacacagcacagagtgccaaagaggcatgtcccacctcccaccccagggcctaaggaaacccacctgctggccctttcctctgag

SEQ ID NO: 33317 - DNA, 120 bp, synthetic construct; identical to SEQ ID NO: 9777
  source 1..120: mol_type = other DNA

SEQ ID NO: 33318 - DNA, 120 bp, synthetic construct
  source 1..120: mol_type = other DNA
ctcactgcaagctctgcctcctgggttcatgccattctcctgcctcagcctcccgagtagctgggactacaggcgcccgccaccatgcccagctaattttttgtatttttagtagagacg

SEQ ID NO: 33319 - DNA, 120 bp, synthetic construct
  source 1..120: mol_type = other DNA
taaaagggcttgacagagggaattcatctctttttgctcttccacattccttcatgtgaggacagtgttcctcccttgtggaggatgcagtgttccaggcaccatctcagaagcagagat

SEQ ID NO: 33320 - DNA, 120 bp, synthetic construct
  source 1..120: mol_type = other DNA
gtagcataaaatggactaagacatagtggcctaaaataataatatttattgttgtgcataattctgtaggttggctttacggttcctctggtctcaggttggtttgtttgtttttttgag

SEQ ID NO: 33321 - DNA, 120 bp, synthetic construct; identical to SEQ ID NO: 9778
  source 1..120: mol_type = other DNA

SEQ ID NO: 33322 - DNA, 120 bp, synthetic construct
  source 1..120: mol_type = other DNA
tcctggcctcaagtgatcctccttcttcagcttcccaaagtgctgggatcacaggtgtgagctaccacacccagctgtcaggtttcttatttatgtgtctcagctgcaggtcaggcagat

SEQ ID NO: 33323 - DNA, 120 bp, synthetic construct
  source 1..120: mol_type = other DNA
gactagctggtgtgctctcatgacagtggcaggaggccaagaaaaaacaagcccaattgtgtgggaaggcaagaggaagctcccatgtgcttttcaaacctctgctaacatcttattggc

SEQ ID NO: 33324 - DNA, 120 bp, synthetic construct
  source 1..120: mol_type = other DNA
tacacaggcattgttcttgagtgttgagtgtacagtggtaaacaagcctttaacacctgaagtgcagtggagaagagcaatacataaataactaagcaaaattaggaagttgattccatg

SEQ ID NO: 33325 - DNA, 120 bp, synthetic construct
  source 1..120: mol_type = other DNA
atttgcagaccagcctggccaacatggtgaaaccccgtctctactacaaatagaaaaattagctgggcatagtggtgggtgcctgtaatcccagctactagggaggcttaggcaggagaa

SEQ ID NO: 33326 - DNA, 120 bp, synthetic construct; identical to SEQ ID NO: 9779
  source 1..120: mol_type = other DNA

SEQ ID NO: 33327 - DNA, 120 bp, synthetic construct
  source 1..120: mol_type = other DNA
aagtgaaggcataaaataagactggagaagtaacagggaccagcagtaaggcgtttggattgtattccttatgtgatgggtgggaatccactgggaagttctaatgggagaggcaagtga

SEQ ID NO: 33328 - DNA, 120 bp, synthetic construct
  source 1..120: mol_type = other DNA
agttcgagatcagcctgggcaacatagtgagaccctgcttctacaaagaatttaaaacctagccaggcatggtggcttgtgcctgtagtgccactacttgggaggctgagacaggaggaa

SEQ ID NO: 33329 - DNA, 120 bp, synthetic construct
  source 1..120: mol_type = other DNA
tgcctgtaatcccagcacttggggaggccgaagtgggtggatcacttaaggtcaggagttcgagaccatcctggtgaaaccaacatggtgaaaccccatctctactaaaaatagaaaaat

SEQ ID NO: 33330 - DNA, 120 bp, synthetic construct; identical to SEQ ID NO: 9780
  source 1..120: mol_type = other DNA

SEQ ID NO: 33331 - DNA, 120 bp, synthetic construct
  source 1..120: mol_type = other DNA
ctacttgagcaactggatgaatagaggtgtgtcactccctaaaatggagaagatggtggaggacagattagaggaggggagatcaagagttcatcttaagggcaggtgcagtagctcaca

SEQ ID NO: 33332 - DNA, 120 bp, synthetic construct
  source 1..120: mol_type = other DNA
atgaaaccctgtctctacaaaaaatataaaaactagccaggagtggtggcatgcagctgtggtcccagctacttgggaggttgtggtgggaggattgcttgagcctgggaggcagagatt

SEQ ID NO: 33333 - DNA, 120 bp, synthetic construct; identical to SEQ ID NO: 9781
  source 1..120: mol_type = other DNA

SEQ ID NO: 33334 - DNA, 120 bp, synthetic construct
  source 1..120: mol_type = other DNA
tcttgatgagctgttagtcttgataggtaaactgtttagttagtttacaaacttctctttcaggagcagatatttcctggagcaagcaggcaaattatttttgtttggtcttaagtgtta

SEQ ID NO: 33335 - DNA, 120 bp, synthetic construct
  source 1..120: mol_type = other DNA
ctgcaacctctgcctctggggttcaagcaattctcatgcctcagcctcctgagtagctgggattacaggtgcgcaccaccacgtctggctaatttttgtattttttttttttttaataga

SEQ ID NO: 33336 - DNA, 120 bp, synthetic construct
  source 1..120: mol_type = other DNA
cagttccaagcttcattaactaagtgttctcaggcaagaatctttccttcaggcaagcaccctttaataataaaaataatgattatacagtgcttactctatgtccaacagctctgagca

SEQ ID NO: 33337 - DNA, 120 bp, synthetic construct
  source 1..120: mol_type = other DNA
caactagtaagtgggaaatctgggcccctacatccaaactctgaatccctccctccctcacttagctgcttaacttctcattttctccttatattgaaggggttggcccagaggataagg

SEQ ID NO: 33338 - DNA, 120 bp, synthetic construct; identical to SEQ ID NO: 9782
  source 1..120: mol_type = other DNA

SEQ ID NO: 33339 - DNA, 120 bp, synthetic construct
  source 1..120: mol_type = other DNA
tctattatatcttcatagccatgaaactcccctggagagggaatctgaagtaggtttactcttggtctctttcctggtagcttctggaagaagaaatacatagcagtcttcatttctcaa

SEQ ID NO: 33340 - DNA, 120 bp, synthetic construct
  source 1..120: mol_type = other DNA
ggccgaggcaggtggatcacttgaggccaggagtttgagaccagcctgaccaacatggcaaaattccatctctactaaaaataccaaaaatgagatgggtgtggtggtgggcgcctataa

SEQ ID NO: 33341 - DNA, 120 bp, synthetic construct
  source 1..120: mol_type = other DNA
aataaacaaacaaacaaaaattagtctgcacctgtacctctggctattgggggtggaggtggggtgccgaagtgggaggatggcttgagcctaggaagtcgagactgcaatgagcaatga

SEQ ID NO: 33342 - DNA, 120 bp, synthetic construct; identical to SEQ ID NO: 9783
  source 1..120: mol_type = other DNA

SEQ ID NO: 33343 - DNA, 120 bp, synthetic construct
  source 1..120: mol_type = other DNA
ctcattccatcctcccaatacctccataagcaaatattagtgaatccccatttatcagattaggagaccaaggctcaagtgcaaaaaatttacccagggtgcccaacctgtacctgaggt

SEQ ID NO: 33344 - DNA, 120 bp, synthetic construct
  source 1..120: mol_type = other DNA
agtcagttgggaagcaagactggggccagactttggagatcagaggctgagaccatattagaaaagtacctggcaattccacctaggatggctttggagagctagagaaatactggtgct

SEQ ID NO: 33345 - DNA, 120 bp, synthetic construct; identical to SEQ ID NO: 9784
  source 1..120: mol_type = other DNA

SEQ ID NO: 33346 - DNA, 120 bp, synthetic construct
  source 1..120: mol_type = other DNA
ttagtcacaggatggagaagatagctggagtgggggaagggagtgcctccaggctatggaagccctcaggcccatctttcctctctccaagtggactctgggtctgtcttccccagccat

SEQ ID NO: 33347 - DNA, 120 bp, synthetic construct
  source 1..120: mol_type = other DNA
ggcagagtgcaagtgctatttctttccacctgacttgcacaaagtttctcccctcctttttcctgagaattgagaaagttaaaataagcaaggaatgagaaatctgaaacattccaggcc

SEQ ID NO: 33348 - DNA, 120 bp, synthetic construct
  source 1..120: mol_type = other DNA
attcatctggctgggataacaaagataaagtcagctacaaagttaaacaggaaacacaatctgtcccaaggataaactgccatcccaaagtagcataaggaaaacttttttttactcttg

SEQ ID NO: 33349 - DNA, 120 bp, synthetic construct
  source 1..120: mol_type = other DNA
caatggtgcgatcacggttcactgcagcctcggcctcacgggttcaagtgattcttccacaacatcgccagtagttgagactataggcatgcatcaccatgcccagctggtttattttta

SEQ ID NO: 33350 - DNA, 120 bp, synthetic construct; identical to SEQ ID NO: 9785
  source 1..120: mol_type = other DNA

SEQ ID NO: 33351 - DNA, 120 bp, synthetic construct; identical to SEQ ID NO: 2639
  source 1..120: mol_type = other DNA

SEQ ID NO: 33352 - DNA, 120 bp, synthetic construct
  source 1..120: mol_type = other DNA
cacaaaacatgcccctcctttcttcatccttgactttatctcccaaggcccaggacaaagacgtagattgctgggtcacgctgttccttggacgggcaaaggggggaacacagggcactg

SEQ ID NO: 33353 - DNA, 120 bp, synthetic construct
  source 1..120: mol_type = other DNA
ctgcaacctcaagctcctgggatcaagcaatcttcctgccttgagcctcccgagtagagagtagttaggactataggcacgtgccaccactcctggctaaattttttaaatgtttttgta

SEQ ID NO: 33354 - DNA, 120 bp, synthetic construct; identical to SEQ ID NO: 9786
  source 1..120: mol_type = other DNA

SEQ ID NO: 33355 - DNA, 120 bp, synthetic construct
  source 1..120: mol_type = other DNA
acagagctcttaaccagtaggccagaggttcccaaacacctagtatatttactaccttagtactttcctgccacatctcctaggccaaaacaactccattgattgttatgcaatttacta

SEQ ID NO: 33356 - DNA, 120 bp, synthetic construct
  source 1..120: mol_type = other DNA
tttagggccgggcacggtggctcaggcctgtaatcctagcactttgggaggccaagtagagagaagggcttgagcccaagagttggagaccggcctgggcaacatagcaagacccagtct

SEQ ID NO: 33357 - DNA, 120 bp, synthetic construct
  source 1..120: mol_type = other DNA
aaaaaaaagacagacttttattcagatatgcatgcaggagttcacagaaaaaaaaagtgagtccaggaggctgttatttggcatttatacaactttttttttcttgaatctcgaaatcta

SEQ ID NO: 33358 - DNA, 120 bp, synthetic construct; identical to SEQ ID NO: 9787
  source 1..120: mol_type = other DNA

SEQ ID NO: 33359 - DNA, 120 bp, synthetic construct
  source 1..120: mol_type = other DNA
tgtgttctcttgtcttttaatgaagtttgtgggaggcatctaactgtagcctccaaaatttggcccataggtactactgtccttatcaaagacgaggaaacaagttcagaaaagtattaa

SEQ ID NO: 33360 - DNA, 120 bp, synthetic construct
  source 1..120: mol_type = other DNA
ccttatcaaagacgaggaaacaagttcagaaaagtattaattgctccgagttatctgcttggctagctaggatcagagctcagttctccatttaacccaaagcccaggctcttaacctct

SEQ ID NO: 33361 - DNA, 120 bp, synthetic construct
  source 1..120: mol_type = other DNA
gaggtcaggagtttgagaccagcctggccaacatggtgaaaccccatctctactaaaaatacaaaacttagctgggtgtgttggtgcctgtaaccccagctactcaggagactgaggcag

SEQ ID NO: 33362 - DNA, 120 bp, synthetic construct; identical to SEQ ID NO: 9788
  source 1..120: mol_type = other DNA

SEQ ID NO: 33363 - DNA, 120 bp, synthetic construct
  source 1..120: mol_type = other DNA
cagctattcaggaggctgaggaaggagaattgcttgagcttgggaggtgaaagttgtggtgagctgagactgcactactgcacaccagtctgggagacagagtaagaccctgtctcaaaa

SEQ ID NO: 33364 - DNA, 120 bp, synthetic construct
  source 1..120: mol_type = other DNA
gcactttgggaggctgaggcaggcgggtcacttgtggtcaggagtttgggatcaggcaggccaacatggtgaaaccgtgtctctactaaaaaacaaaaattagctgggcatggtggtagg

SEQ ID NO: 33365 - DNA, 120 bp, synthetic construct
  source 1..120: mol_type = other DNA
cctcaattaaaaaaaaaaaaaattagctgggcatggtgttgcgggcctgtggtcccaggtactcaggaggctgaggtgagaggattacttaagcctgggaggttgaggctacagtaagcc

SEQ ID NO: 33366 - DNA, 120 bp, synthetic construct; identical to SEQ ID NO: 9789
  source 1..120: mol_type = other DNA

SEQ ID NO: 33367 - DNA, 120 bp, synthetic construct
  source 1..120: mol_type = other DNA
tgggggtaaactcatttggtagcaaattttgacctgaggctatttatagtctatattctgtattctttctacttagtatgaataagcatgtaagttttactgcatgtttgatttcagcat

SEQ ID NO: 33368 - DNA, 120 bp, synthetic construct
  source 1..120: mol_type = other DNA
tggaatgacccctgcacagggatgaaatgcaaattcgtgaagcatactgtatttttcttagcacataccacctttggcaatattctttttttttttttgagagggagtcttgctctgtcg

SEQ ID NO: 33369 - DNA, 120 bp, synthetic construct
  source 1..120: mol_type = other DNA
aggctaattttttgtatttttagtagaggcggggtttcactgtgttagccaggatggtctcgatctcctgacctcgtgatccgcccacctccgccccccccccgaagtgccgagtgctgg

SEQ ID NO: 33370 - DNA, 120 bp, synthetic construct; identical to SEQ ID NO: 9790
  source 1..120: mol_type = other DNA

SEQ ID NO: 33371 - DNA, 120 bp, synthetic construct
  source 1..120: mol_type = other DNA
cgctgcctcccaggttcaagttattctcctgcctcagcctcccaagtagctgggattacaggcgcatgccaccacgcccggctaatttttggatttttagtagagacgggggtttcacca

SEQ ID NO: 33372 - DNA, 120 bp, synthetic construct
  source 1..120: mol_type = other DNA
taaaatttgaaaaatcctgtaaagacacacctgggtcaaagggctcagataacggactgtggcccttaagtacttacgtcacaggttattgagaggatcgatttagttaccagatgtaaa

SEQ ID NO: 33373 - DNA, 120 bp, synthetic construct
  source 1..120: mol_type = other DNA
gctattacaatattcatttagcgtttaccaagtgcctactctatacaaatcttgagaatacaacgtgaaggtgaactgctgactaaagtttggtccctttcgctccgtctccttgcgaaa

SEQ ID NO: 33374 - DNA, 120 bp, synthetic construct; identical to SEQ ID NO: 9791
  source 1..120: mol_type = other DNA

SEQ ID NO: 33375 - DNA, 120 bp, synthetic construct
  source 1..120: mol_type = other DNA
ggggcggggcctggcgcgcaccgcccgcgcacggcgaggcgcctgttgattggccactggggcccgggttcctccggcggagcgcgcctccccccagatttcccgccagcaggagccgcg

SEQ ID NO: 33376 - DNA, 120 bp, synthetic construct
  source 1..120: mol_type = other DNA
tgccaacaaggcctcggccagggcctcacgcgaaggcggccgtgccgccgctgcccccggggcctctccttccccaggcggggatgcggcctggagcgaggctgggcctgggcccaggcc

SEQ ID NO: 33377 - DNA, 120 bp, synthetic construct; identical to SEQ ID NO: 2645
  source 1..120: mol_type = other DNA

SEQ ID NO: 33378 - DNA, 120 bp, synthetic construct
  source 1..120: mol_type = other DNA
tcccgccaggtgggggtgctgggctaaggaaggggcgacgcgcgcagctccgggtggggagggggcctgggaggtgggagcactgggggtggggcgagaaggggaaggcgcccggcccac

SEQ ID NO: 33379 - DNA, 120 bp, synthetic construct; identical to SEQ ID NO: 9792
  source 1..120: mol_type = other DNA

SEQ ID NO: 33380 - DNA, 120 bp, synthetic construct
  source 1..120: mol_type = other DNA
gcacgtgcaccgagacgaagatagaatattttgacgtatgtggaaattcgtgtcgagtggaaaatattttattttatgaaatagtgtaatttttatggggcaccactgggcttttagagg

SEQ ID NO: 33381 - DNA, 120 bp, synthetic construct
  source 1..120: mol_type = other DNA
agtttcgctcaagtccaggctggagtgcaatggcgcgatctcagctcaccgcaatctccgcgtcccggcttcaagcgattccccagcttcagcctcccgagtagtcgggattacaggaat

SEQ ID NO: 33382 - DNA, 120 bp, synthetic construct
  source 1..120: mol_type = other DNA
ggattacaggcgctagccaccgcgcccggtctgtttagggctttttatccgggcagctggcgacattttgaaaagcttgcttttgctgtttgccagatacatatatatgtattttgagac

SEQ ID NO: 33383 - DNA, 120 bp, synthetic construct
  source 1..120: mol_type = other DNA
gcgccccaccacgcctggctaatttttgtatttttagtagagacgggtttcactatgttggccaggctggtatcgaactcctgacctcttgatcggcccgcattggcctaccaaagtgct

SEQ ID NO: 33384 - DNA, 120 bp, synthetic construct; identical to SEQ ID NO: 9793
  source 1..120: mol_type = other DNA

SEQ ID NO: 33385 - DNA, 120 bp, synthetic construct
  source 1..120: mol_type = other DNA
tcaagtggtccacccacttcagcctcccaaagtgctgggattacaggtgtgagccaccgtgcccggccgctagttagtggttttgagtaatggatttcaaatccatttaaatccagttta

SEQ ID NO: 33386 - DNA, 120 bp, synthetic construct
  source 1..120: mol_type = other DNA
ggaacagagccagcatccgcaataacaaactcctggttagaaaagcatgacgtattgtttacttgagcatgaattgattgttgaatccaaaccaaacgggtgtatttattgtaaggatgt

SEQ ID NO: 33387 - DNA, 120 bp, synthetic construct; identical to SEQ ID NO: 9794
  source 1..120: mol_type = other DNA

SEQ ID NO: 33388 - DNA, 120 bp, synthetic construct
  source 1..120: mol_type = other DNA
aagctggttcaggaagaggaaggtctgcaaattgtgggtaggatgaaaggaggaggagggagcattggagaagttaagcagagatccaatcatgaacagtctgatgagctacagagacat

SEQ ID NO: 33389 - DNA, 120 bp, synthetic construct
  source 1..120: mol_type = other DNA
ctgcaacctccgcctcctgggttccagcgattctcctgcctcatcctctcaagtacctggtattacaggtgcctgccaccacgcccagctaatttttgtgtttatagtagagacgggttt

SEQ ID NO: 33390 - DNA, 120 bp, synthetic construct
  source 1..120: mol_type = other DNA
gtccgagcatcttttaatgtttgtcatttagatttcttcttgtgctgaagtgtttgtcttttgctgtttcttttttttttcctagttctttgtcatttgtgtgtgatataaatgtcttct

SEQ ID NO: 33391 - DNA, 120 bp, synthetic construct; identical to SEQ ID NO: 9795
  source 1..120: mol_type = other DNA

SEQ ID NO: 33392 - DNA, 120 bp, synthetic construct
  source 1..120: mol_type = other DNA
tcccagcttcttgggagactgagatgggaggatcgcttgagtccaggaggttgaggctgcagtaagccaagagatcatgccatgcactccagcctgggtggcagagtcagaccctgtctg

SEQ ID NO: 33393 - DNA, 120 bp, synthetic construct
  source 1..120: mol_type = other DNA
tcaaaagatctgtttagcgtatgtttagacaaagccattacttattatatcaaagttttaacatttattttgtgagctgtcagcttttcctcttaacatttttccccaccgtcttaaaaa

SEQ ID NO: 33394 - DNA, 120 bp, synthetic construct
  source 1..120: mol_type = other DNA
tttttggagggcaggagcaatggtggcaggcagtgttttgctttgttgcccaggctgaagtacagtggcagatctcggttcactgcaccctcgacctattcggctcaagtgatcctccca

SEQ ID NO: 33395 - DNA, 120 bp, synthetic construct; identical to SEQ ID NO: 9796
  source 1..120: mol_type = other DNA

SEQ ID NO: 33396 - DNA, 120 bp, synthetic construct
  source 1..120: mol_type = other DNA
cttttttgactcagaaaccagtttcctgggtccaggatgtttagtggtactctttttcttcaagctttttagcattggaggaactgcatattagtaaaatttttagtcttagcattttat

SEQ ID NO: 33397 - DNA, 120 bp, synthetic construct
  source 1..120: mol_type = other DNA
ctgcaacctctgccttccaggttcaaatgattctcctgcttcagcctcccgagtagctgggattacagatgcccgccaccatgcccagctaatttttatttttttagtagagatggggtt

SEQ ID NO: 33398 - DNA, 120 bp, synthetic construct
  source 1..120: mol_type = other DNA
ctttttttttttttttttgagacggagtcttgctctgttacccaggctggagtgtagtggcatgatctgggctcactgcaacctccacctcccgggttcaagggagtctcctgcttcagc

SEQ ID NO: 33399 - DNA, 120 bp, synthetic construct; identical to SEQ ID NO: 9797
  source 1..120: mol_type = other DNA

SEQ ID NO: 33400 - DNA, 120 bp, synthetic construct
  source 1..120: mol_type = other DNA
caagtagctgggattataggcctctgccactgcacttggctaatttttgtatttttggtagagacggggtttcaccatcttggccaggctggtcttgaactcctgacctcgtgatccacc

SEQ ID NO: 33401 - DNA, 120 bp, synthetic construct
  source 1..120: mol_type = other DNA
ggataaaatgatgttgaaaaacaaaattttttgtttaaatgcttatgtttctaatattttatttcagaaaggaatttatttcaaaactgataatggttggatccagcttttcacacaaac

SEQ ID NO: 33402 - DNA, 120 bp, synthetic construct
  source 1..120: mol_type = other DNA
catacatcatttaaaacaatttatactgtattttacacatgacaaagttctaaggtaacagcccttttctaagactaaagttacagtcctccctttgtatctgagggggattggttgcag

SEQ ID NO: 33403 - DNA, 120 bp, synthetic construct; identical to SEQ ID NO: 9798
  source 1..120: mol_type = other DNA

SEQ ID NO: 33404 - DNA, 120 bp, synthetic construct
  source 1..120: mol_type = other DNA
ccatcatacctggtcactgttttttattggttttaaatttttgatttaaaatttttaatctaggttggttgaatctggactggaacccaaggatatgtttgttgagcatactgtatttac

SEQ ID NO: 33405 - DNA, 120 bp, synthetic construct
  source 1..120: mol_type = other DNA
ccagcactttgagaggccaaggcgggtgaatcatttgaggtcaggagtttaagacgagcctggccaacatggcaaaaccctgactctacaaaaaaaaggtaaaaataagccaggtgtgat

SEQ ID NO: 33406 - DNA, 120 bp, synthetic construct
  source 1..120: mol_type = other DNA
gttgttgacttgagtttttccgtagtttgtagggggagggtaatagagtattaggtagcttttggaatacataggagtgtaactggaaaaagattccaagcaagtctaatgaattagata

SEQ ID NO: 33407 - DNA, 120 bp, synthetic construct
  source 1..120: mol_type = other DNA
agtgagtccatgcctttttcctgccatcagcattataccaaaattctgccatggtttttaaactttgattctgagaaagtttctcaccctaataacataactatatttgtgtttgtcttc

SEQ ID NO: 33408 - DNA, 120 bp, synthetic construct; identical to SEQ ID NO: 9799
  source 1..120: mol_type = other DNA

SEQ ID NO: 33409 - DNA, 120 bp, synthetic construct
  source 1..120: mol_type = other DNA
ttgatggaacattcatccgcgagaaagggaaatcagtccgtgttcatgtacagttttttgatgacagcccaacaaggggctgggttagcaaaaggcttttaaagccatatacaggtaaga

SEQ ID NO: 33410 - DNA, 120 bp, synthetic construct
  source 1..120: mol_type = other DNA
ggggtggcagttgtgaaagcttctggcatgggaaagggatgtaacatggtctttagctggtttgttttgtggaatggaatttttatttctgtcctttgagtgacttacagcaatattata

SEQ ID NO: 33411 - DNA, 120 bp, synthetic construct; identical to SEQ ID NO: 9800
  source 1..120: mol_type = other DNA

SEQ ID NO: 33412 - DNA, 120 bp, synthetic construct
  source 1..120: mol_type = other DNA
ctgggttcaagagtttcctacctcagcctcccgagtagcttgggattataggcacacgccacgttgcctggctatatatatatattttttttttgagacggagttttgctcttttggccc

SEQ ID NO: 33413 - DNA, 120 bp, synthetic construct
  source 1..120: mol_type = other DNA
ctaattttttatttctagtagagatggggtttcaccatgttggccaagctggtcttgaactgctgacctccagtaatccacccacctccccctaccaaagtgctgggattataggcgtga

SEQ ID NO: 33414 - DNA, 120 bp, synthetic construct
  source 1..120: mol_type = other DNA
agagtctccagtctagtacgttgtcgtactcggtgttgtaaaatccaaacaagggtcagtttcccaggtaactgggaaattcccagaatcacactctttcgtcatagtgctcatcctaca

SEQ ID NO: 33415 - DNA, 120 bp, synthetic construct; identical to SEQ ID NO: 9801
  source 1..120: mol_type = other DNA

SEQ ID NO: 33416 - DNA, 120 bp, synthetic construct
  source 1..120: mol_type = other DNA
ctgggctcggccaactttttcgttttcttttcaagagatgggggtctcactctgtcacccagcctggagtatagtgttgggatcatagctcactggagccttgaactcctgggctcaagt

SEQ ID NO: 33417 - DNA, 120 bp, synthetic construct
  source 1..120: mol_type = other DNA
tatgttgcccccagggtggtcttgaattcttggcctccagtgatccttctgcatcaggctcccaagtagttgggtgatctggctaaagtaacttattttctgatactgtttacttatatt

SEQ ID NO: 33418 - DNA, 120 bp, synthetic construct
  source 1..120: mol_type = other DNA
ggcaaacatggtgaaatcccgtctctactaaaaatacaaaaattagctgggcatggtggcacatgcctgtaatcccagctacttgggaggctgaggcaagagaatcgcttgaatctagga

SEQ ID NO: 33419 - DNA, 120 bp, synthetic construct; identical to SEQ ID NO: 9802
  source 1..120: mol_type = other DNA

SEQ ID NO: 33420 - DNA, 120 bp, synthetic construct
  source 1..120: mol_type = other DNA
aaagtaaaaagatctctcattgaaccagatgatatatgaagtctcttttaggaccaatttcgagatttaaaaaatttggcagaattactttttttttttgcagcggagtccagctttatc

SEQ ID NO: 33421 - DNA, 120 bp, synthetic construct
  source 1..120: mol_type = other DNA
ccagctgatttttgtatttttcagtagagttgaggtttcaccacgttgtccaggctggtctcaaactcctgaccttaagtgatccgtccaccttggcctcccaaagtgctgggattaggt

SEQ ID NO: 33422 - DNA, 120 bp, synthetic construct
  source 1..120: mol_type = other DNA
caggagttgcagacaagcctggccaacatggtgaaaccctgtctctactaaaaatacaaaaattagccaggcatggtgacacatgcctgtaatctcagctactcaggagggtgaggcaga

SEQ ID NO: 33423 - DNA, 120 bp, synthetic construct; identical to SEQ ID NO: 9803
  source 1..120: mol_type = other DNA

SEQ ID NO: 33424 - DNA, 120 bp, synthetic construct
  source 1..120: mol_type = other DNA
ataaattttaacgcgttgagtctgaactgggctgccctttcaaaatgtgaaggccccttaaagtagcacattggttggttattcttttatttatttagatatatctgatctagttgtctt

SEQ ID NO: 33425 - DNA, 120 bp, synthetic construct
  source 1..120: mol_type = other DNA
agtggtgcgatcttggctcactgcaacctctgcctcccgggttcaagtgattctccttcctcagcctcccgagtagctaggactacaggcatgtgccaccacacccagctaatttttgta

SEQ ID NO: 33426 - DNA, 120 bp, synthetic construct
  source 1..120: mol_type = other DNA
gctagtaagtttttaagaaagattctcaaacctcttttaaatcgtctgcctcacttgaagaggtatgccctacctgtttagggctgtagacccaggtcattagaagacagactaagtagt

SEQ ID NO: 33427 - DNA, 120 bp, synthetic construct; identical to SEQ ID NO: 9804
  source 1..120: mol_type = other DNA

SEQ ID NO: 33428 - DNA, 120 bp, synthetic construct
  source 1..120: mol_type = other DNA
cgcacaccaccacccttggctaatttttgtattttttttttggtagagatggggtttcaccacattgcccaggctggtcttgaattcctgacctcaagtagtccgcccacctaagcctcc

SEQ ID NO: 33429 - DNA, 120 bp, synthetic construct
  source 1..120: mol_type = other DNA
ctctgcacccggcccttattgtttataaatacatttctttctaggttcaaaatcaaaggaagcccagaagggaggtcatttttacagtgcaaagcctgaaatactgagagcaatgcaacg

SEQ ID NO: 33430 - DNA, 120 bp, synthetic construct
  source 1..120: mol_type = other DNA
aagaagagatggaggtgggacacggcaagcattcagttgttatttatgttagggtgatgggggaagaaagggggagggtgtattaacaagataccttgttttatatatgtgtgtgtatat

SEQ ID NO: 33431 - DNA, 120 bp, synthetic construct; identical to SEQ ID NO: 9805
  source 1..120: mol_type = other DNA

SEQ ID NO: 33432 - DNA, 120 bp, synthetic construct
  source 1..120: mol_type = other DNA
cagcacccagccccagctttatgcttttaattctaaaactttttttgttgtattttgcattcataagaatagatgttaaataaaccttgaaatacaaccttggctcaaacgttaatggtc

SEQ ID NO: 33433 - DNA, 120 bp, synthetic construct
  source 1..120: mol_type = other DNA
ggccaacacagtgaaaccctgtttctataaaaaatacaaaaattagctgggcgtggtggcacacacctgtagtcccaaccacttgggaggctgaggcatgagaattgcttgaacttggga

SEQ ID NO: 33434 - DNA, 120 bp, synthetic construct
  source 1..120: mol_type = other DNA
gactgtcaacaacaacaaaaaatgttatagaagtgaaaaaaattgattaatttagaacaagcttgtccagtctgtggcccaggatggcgtttaaatcagcccaacacaaatttgtaaact

SEQ ID NO: 33435 - DNA, 120 bp, synthetic construct
  source 1..120: mol_type = other DNA
cattatcctctgatctatcatattaatgagctgcatcctaaaagacattcatctataactaagctcagtttcatgttttgttcctttttcaatagataagatagggaatgagcaagttaa

SEQ ID NO: 33436 - DNA, 120 bp, synthetic construct; identical to SEQ ID NO: 9806
  source 1..120: mol_type = other DNA

SEQ ID NO: 33437 - DNA, 120 bp, synthetic construct
  source 1..120: mol_type = other DNA
aacttctgggctcagcgattttctccacaggcacctgctactgtgctcggtgcagcactttgtgtttttgaacataacctcaagatgttattgtcttcatagtaaaacaaaagatgaggc

SEQ ID NO: 33438 - DNA, 120 bp, synthetic construct
  source 1..120: mol_type = other DNA
ccagttcaaaatgcttgcatctcttaatagctagcattcccttggattttgcacatgagctcaaactcaagcctcagcacaatcttttttatagttttagtcttttagccagagtcgact

SEQ ID NO: 33439 - DNA, 120 bp, synthetic construct
  source 1..120: mol_type = other DNA
ctttgtggggttggtgtctgctacacttacagcaagtccagagattttttttccaccacgtttgcaggagaactattggcatggaaaatgacaattgttttaatgtcaagtgaaactgaa

SEQ ID NO: 33440 - DNA, 120 bp, synthetic construct; identical to SEQ ID NO: 9807
  source 1..120: mol_type = other DNA

SEQ ID NO: 33441 - DNA, 120 bp, synthetic construct
  source 1..120: mol_type = other DNA
aaaaatcataagttgaactgtcttacattatggttttccaaattttgatttgtttttaaatactctttccttgcctggcaggtaggcacaacttacgtaacagataagagtgaagaagat

SEQ ID NO: 33442 - DNA, 120 bp, synthetic construct
  source 1..120: mol_type = other DNA
ggtcatatcagattctgagagtgacattggtggctctgatgtggaatttaagccagacactaaggaggaaggaagcagtgatgaaataagcagtggagtgggggatagtgagagtgaagg

SEQ ID NO: 33443 - DNA, 120 bp, synthetic construct
  source 1..120: mol_type = other DNA
ttcatcagaaaccaagaatactttgagagctttctctgcccctcaaaattctgaatcccaagcccacgttagtggaggtggtgatgacagtagtcgccctactgtttggtatcatgaaac

SEQ ID NO: 33444 - DNA, 120 bp, synthetic construct; identical to SEQ ID NO: 9808
  source 1..120: mol_type = other DNA

SEQ ID NO: 33445 - DNA, 120 bp, synthetic construct
  source 1..120: mol_type = other DNA
gaaattgcatttggccgttattcagattccctggtgcagaagggctataaagtagcacgagtggaacagactgagactccagaaatgatggaggcacgatgtagaaagatggcacatata

SEQ ID NO: 33446 - DNA, 120 bp, synthetic construct
  source 1..120: mol_type = other DNA
aaagaaaaagaggaagattcttctggccatactcgtgcatatggtgtgtgctttgttgatacttcactgggaaagtttttcataggtcagttttcagatgatcgccattgttcgagattt

SEQ ID NO: 33447 - DNA, 120 bp, synthetic construct
  source 1..120: mol_type = other DNA
cccggctcccagttttgggatgcatccaaaactttgagaactctccttgaggaagaatattttagggaaaagctaagtgatggcattggggtgatgttaccccaggtgcttaaaggtatg

SEQ ID NO: 33448 - DNA, 120 bp, synthetic construct; identical to SEQ ID NO: 9809
  source 1..120: mol_type = other DNA

SEQ ID NO: 33449 - DNA, 120 bp, synthetic construct
  source 1..120: mol_type = other DNA
tgtaaccattatgctattaatgatcgtctagatgccatagaagacctcatggttgtgcctgacaaaatctccgaagttgtagagcttctaaagaagcttccagatcttgagaggctactc

SEQ ID NO: 33450 - DNA, 120 bp, synthetic construct
  source 1..120: mol_type = other DNA
gaaggattcaaagtaatgtgtaaaattatagggatcatggaagaagttgctgatggttttaagtctaaaatccttaagcaggtcatctctctgcagacaaaaaatcctgaaggtcgtttt

SEQ ID NO: 33451 - DNA, 120 bp, synthetic construct; identical to SEQ ID NO: 9810
  source 1..120: mol_type = other DNA

SEQ ID NO: 33452 - DNA, 120 bp, synthetic construct
  source 1..120: mol_type = other DNA
aactattgaaaagaagttggctaatctcataaatgctgaagaacggagggatgtatcattgaaggactgcatgcggcgactgttctataactttgataaaaattacaaggactggcagtc

SEQ ID NO: 33453 - DNA, 120 bp, synthetic construct
  source 1..120: mol_type = other DNA
ggtacatattttgacatgcatatacatatttgcatcctgactaggctgcccacagcaatttaagttacttgaaactcgcttttatcttagtagccctttggcctttcttcagtttttttt

SEQ ID NO: 33454 - DNA, 120 bp, synthetic construct
  source 1..120: mol_type = other DNA
cccaagtagctgagattacagatatgcaccaccatgcatggctaatatttaaatgtttgtagagagatggggtctcactgtgttgccaggactggtcttgaactcctgggctcaagtgat

SEQ ID NO: 33455 - DNA, 120 bp, synthetic construct; identical to SEQ ID NO: 9811
  source 1..120: mol_type = other DNA

SEQ ID NO: 33456 - DNA, 120 bp, synthetic construct
  source 1..120: mol_type = other DNA
tcatgagacaggctttattttagatcgaattttatttatcaataaaaagttgagctttttattatttggtgaatactgtttcaaggtgctttgttacactatctgttgatccaacattta

SEQ ID NO: 33457 - DNA, 120 bp, synthetic construct
  source 1..120: mol_type = other DNA
aagccctgagttaggaatttacaatttggcaaccatctcaacttcataagcaattttgttctttaaatgtcacggccaacattacctggaaccattgctgttttatagtttaggtttatg

SEQ ID NO: 33458 - DNA, 120 bp, synthetic construct
  source 1..120: mol_type = other DNA
ctggctaatttttgtatttttggtagagacagggtttttcccgtgttggccaggctgttcttgaattcctgacctcaaagcgatctgcccgccttgatctccgaaagagctgggattaca

SEQ ID NO: 33459 - DNA, 120 bp, synthetic construct; identical to SEQ ID NO: 9812
  source 1..120: mol_type = other DNA

SEQ ID NO: 33460 - DNA, 120 bp, synthetic construct
  source 1..120: mol_type = other DNA
ggtgcgatcttggctcattgcaacctctgcctcccaggttcaagtgattctcctgcctcagcctcctgcgtagctgggattacaggcatatgccacgtgtattaggcactgctaatttct

SEQ ID NO: 33461 - DNA, 120 bp, synthetic construct
  source 1..120: mol_type = other DNA
gcctggcctctgctctatcttttagctttcccttggcacttctatggtccagatgttagagggtaagtattttgatgggggagatcgttggactgtaattgaaagttatgtcttataatg

SEQ ID NO: 33462 - DNA, 120 bp, synthetic construct
  source 1..120: mol_type = other DNA
gataaaacccccaaacgatgaagcctcacttttaccctctcttttaacagatgttttactgtgcctggctaactatagtcgagggggtgatggtcctatgtgtcgcccagtaattctgtt

SEQ ID NO: 33463 - DNA, 120 bp, synthetic construct; identical to SEQ ID NO: 9813
  source 1..120: mol_type = other DNA

SEQ ID NO: 33464 - DNA, 120 bp, synthetic construct
  source 1..120: mol_type = other DNA
agctgaaacatcgatgcttaatgttaaggggaatatatgttaaaaaggggaaggaggtcagtcattcaggtcatgaggccctttgacttgaattcatttcctcagaaggtaggtatattc

SEQ ID NO: 33465 - DNA, 120 bp, synthetic construct
  source 1..120: mol_type = other DNA
tagcaactgttgaaaactgctctttagggatgacatgctggcccttttttttttgttgttgccaaggctgaagtgcagtggcaccatcacagctcactgcagcctcgaactcccaggttc

SEQ ID NO: 33466 - DNA, 120 bp, synthetic construct
  source 1..120: mol_type = other DNA
ggttgaccagccacagaacttgtaaagttttttatatttttaaaaggttgtaagaaatagtagtagttggctggtccccgctgctctcctgcattatagtatacttctgttcacctagtt

SEQ ID NO: 33467 - DNA, 120 bp, synthetic construct
  source 1..120: mol_type = other DNA
acgtgtaaaaaaaaaaaaaaaggtgcagagattccatcctgacatggattcacttgattggaattgattctaggcatctcagtagttttaaagagctcctaggtgattctattctggcca

SEQ ID NO: 33468 - DNA, 120 bp, synthetic construct; identical to SEQ ID NO: 9814
  source 1..120: mol_type = other DNA

SEQ ID NO: 33469 - DNA, 120 bp, synthetic construct
  source 1..120: mol_type = other DNA
ctcacaccaattgatagagtgtttactagacttggtgcctcagacagaataatgtcaggtgagttttttgtttcccacttaagttctcattcagtcatttagatgtgataaaagatattt

SEQ ID NO: 33470 - DNA, 120 bp, synthetic construct
  source 1..120: mol_type = other DNA
atagtctctctctcttttttttttttttgagatggagtttccctcttgttgcccaagctggagtgcaatggcacgatcttggctcactgcaacctctgcttccaggttcaagtgattctc

SEQ ID NO: 33471 - DNA, 120 bp, synthetic construct
  source 1..120: mol_type = other DNA
tcaggtgatctgcttgcctcggcctcccaaagtgctgggattacaggcgtgagccaccgtgcccggccaataattgcatagtctcttaatgagatttaatcttttataccaatatgtgta

SEQ ID NO: 33472 - DNA, 120 bp, synthetic construct; identical to SEQ ID NO: 9815
  source 1..120: mol_type = other DNA

SEQ ID NO: 33473 - DNA, 120 bp, synthetic construct
  source 1..120: mol_type = other DNA
aatgtttttagagcacgcactcaccattgtggcacagaccgatagttggagataaaaggtgatattgtgaaaggtttttgattacccattaattattaggccttacactgtttagttgta

SEQ ID NO: 33474 - DNA, 120 bp, synthetic construct
  source 1..120: mol_type = other DNA
agactcgtgtagctaaacaaggcctatttatagaatgcttttagacgtggatgtactaaccgatgttgcttttctgtcctagcatttttgttttaattccttttttgttttaattccttt

SEQ ID NO: 33475 - DNA, 120 bp, synthetic construct
  source 1..120: mol_type = other DNA
ttttcaactcactaccattcattagtagaagattattctcaaaatgttgctgtgcgcctaggacatatggtatgtgcaaattgtttttttccacaaattcggttttttgagagggcactt

SEQ ID NO: 33476 - DNA, 120 bp, synthetic construct; identical to SEQ ID NO: 9816
  source 1..120: mol_type = other DNA

SEQ ID NO: 33477 - DNA, 120 bp, synthetic construct
  source 1..120: mol_type = other DNA
aattttaagggaagtttgcctggctagtgaaaggtcaactgtagatgctgaagctgtccataaattgctgactttgattaaggaattatagactgactacattggaagctttgagttgac

SEQ ID NO: 33478 - DNA, 120 bp, synthetic construct
  source 1..120: mol_type = other DNA
tacataatggttattgaatactccacaatatattaagtctagatgttatggtacatgcatacactttcaggctgttttatacccactgtcaccaatacacataaatgggggaggaaaagc

SEQ ID NO: 33479 - DNA, 120 bp, synthetic construct
  source 1..120: mol_type = other DNA
gactgtttgttttgaagagactttctaaagtgtacttaaaacatagtagttttttacctttcacaaaactgagttacaagaatacttttgttttacagtgcatcccttcctaggaagtct

SEQ ID NO: 33480 - DNA, 120 bp, synthetic construct; identical to SEQ ID NO: 9817
  source 1..120: mol_type = other DNA

SEQ ID NO: 33481 - DNA, 120 bp, synthetic construct
  source 1..120: mol_type = other DNA
cgcagaagtgctagctcacatttttaccatattacaaaagcaattggtacccatgtccataaaggcagcaacaaagctgcttgtctattgaagattactactgcaaattggactgcattc

SEQ ID NO: 33482 - DNA, 120 bp, synthetic construct
  source 1..120: mol_type = other DNA
ttcaagtctttacacagtaatgctaaaacacccagctttgagatcctgagtcaatatattgccactttctttttggtagcttgagcttcatagtgtcaactgaccttgtgtatccatttt

SEQ ID NO: 33483 - DNA, 120 bp, synthetic construct; identical to SEQ ID NO: 9818
  source 1..120: mol_type = other DNA

SEQ ID NO: 33484 - DNA, 120 bp, synthetic construct
  source 1..120: mol_type = other DNA
aagtaattgggtaatatatcaagcaagtgtgctacatacctatcatgtctaataaactctacatcatgtccctgatggcacttcttaatgcagttcacacatatggcatttcgatctgtg

SEQ ID NO: 33485 - DNA, 120 bp, synthetic construct
  source 1..120: mol_type = other DNA
tgtttatatattactatgacctttggctttaagaggaccaaaacaaaattctttgtggctccagcccagattaattctgaaaaggaactttaatggagtaagtgattttcctgtcatctg

SEQ ID NO: 33486 - DNA, 120 bp, synthetic construct
  source 1..120: mol_type = other DNA
gggctgaaaacaatttttggaggcgtgaagagtcaaaactgtcacagtgactgggatatatcaaacacttaaccccgacatctttaccttgaaatttctaggaaaacattacacaacatg

SEQ ID NO: 33487 - DNA, 120 bp, synthetic construct; identical to SEQ ID NO: 9819
  source 1..120: mol_type = other DNA

SEQ ID NO: 33488 - DNA, 120 bp, synthetic construct
  source 1..120: mol_type = other DNA
tcaggactcaaatatatttctaagttacctgtagaaatcatgcatgggatagctggtataacttgatattttatataaacattggcctctactaacagccttttctatggcatcttgatt

SEQ ID NO: 33489 - DNA, 120 bp, synthetic construct
  source 1..120: mol_type = other DNA
tataggattattctaacagaagagccactatttttaagagctttaaatgaagctaaccaatgaagtaattgtaagaaatcagctaagaatagaattttccttgtataagatactccaacc

SEQ ID NO: 33490 - DNA, 120 bp, synthetic construct; identical to SEQ ID NO: 2671
  source 1..120: mol_type = other DNA

SEQ ID NO: 33491 - DNA, 120 bp, synthetic construct; identical to SEQ ID NO: 9820
  source 1..120: mol_type = other DNA

SEQ ID NO: 33492 - DNA, 120 bp, synthetic construct
  source 1..120: mol_type = other DNA
cttaaagtttaaatacatgatacttggatttcatttgcatccattttaacatctctttttctgttgcagatttaaactggtaaattcatctgaggaattgaatctatctgtattcctagt

SEQ ID NO: 33493 - DNA, 120 bp, synthetic construct; identical to SEQ ID NO: 9821
  source 1..120: mol_type = other DNA

SEQ ID NO: 33494 - DNA, 120 bp, synthetic construct
  source 1..120: mol_type = other DNA
accgaaagaaattatccaggacttgctggcccatgcggggctttttccgactgcacggagaggacacctgggaccttttggaaccctgtgaaaaaatggaaggagggaggccttgtagtt

SEQ ID NO: 33495 - DNA, 120 bp, synthetic construct
  source 1..120: mol_type = other DNA
atcaatcaaccctccaaaaggctgcctgagggaatcgaattgtcctaaaaatgcaaatctgactcctctctcctccacctaaaatgagtcagcagcctagggctcacaccctgactgacc

SEQ ID NO: 33496 - DNA, 120 bp, synthetic construct; identical to SEQ ID NO: 2672
  source 1..120: mol_type = other DNA

SEQ ID NO: 33497 - DNA, 120 bp, synthetic construct
  source 1..120: mol_type = other DNA
tgaaaccctgtctctactaaaaatacaaaaattagttgggtgtggtagcaggcacctgtaatcccagctacttgggagactgaggcaggagaatcgctttaatccagttgtgggagattg

SEQ ID NO: 33498 - DNA, 120 bp, synthetic construct; identical to SEQ ID NO: 9822
  source 1..120: mol_type = other DNA

SEQ ID NO: 33499 - DNA, 120 bp, synthetic construct
  source 1..120: mol_type = other DNA
aaaacctagacaagaagacagggaggtgagggctggcactttttgcaaaagagataaaccggtgttctgcccttaacttcatgtcccagtacttttgtttaaaatatgcttttttggcca

SEQ ID NO: 33500 - DNA, 120 bp, synthetic construct
  source 1..120: mol_type = other DNA
ccagcattctgggaggctgaggcgggcggatcacttgaggtcaagagttggagaccagcctggccagcatggtgaaacctcatctctactaaaaatacaaaaattagccaggcatggtgg

SEQ ID NO: 33501 - DNA, 120 bp, synthetic construct
  source 1..120: mol_type = other DNA
attctccgtctcaaaaaaaaatgctttttttcctgtttacacagtaatatattcatgtagaacatgtaggaaacacaaggaagtacaacaaagacaacaaaggtagtgcctttttcatgg

SEQ ID NO: 33502 - DNA, 120 bp, synthetic construct; identical to SEQ ID NO: 9823
  source 1..120: mol_type = other DNA

SEQ ID NO: 33503 - DNA, 120 bp, synthetic construct
  source 1..120: mol_type = other DNA
actcccacagtcctgccagcagacctgagagggagggcagccaggcaggggtcaggcctcagctgccgattccctccattctctcttgttactcatgccactgccctccacgcccagtat

SEQ ID NO: 33504 - DNA, 120 bp, synthetic construct
  source 1..120: mol_type = other DNA
gaagttgaccactcccagggtctggtcccagggctccgagggaggcaggcacaggtggcactgtccagtgttgggagctgggaacggagatccccgaaccctactcaagccaagagggct

SEQ ID NO: 33505 - DNA, 120 bp, synthetic construct
  source 1..120: mol_type = other DNA
tggtgctcaccacactcctccacgtcaggactgcccgacaggctccctgaggctaagagctgttcctgctccacctgagaggcacagggttgagtgtcatagggcagagtcactccttag

SEQ ID NO: 33506 - DNA, 120 bp, synthetic construct; identical to SEQ ID NO: 9824
  source 1..120: mol_type = other DNA

SEQ ID NO: 33507 - DNA, 120 bp, synthetic construct
  source 1..120: mol_type = other DNA
ggttgcctggcacagaggggccaaagagttagcctgggctgggaggaaggaggctgggcacgcacaaagtgggggtgggctgtgagatcacctggccaaaggcgatagaggcaatggccc

SEQ ID NO: 33508 - DNA, 120 bp, synthetic construct
  source 1..120: mol_type = other DNA
tataagacacccaagactcctgggttcctaccctcctgccatccccttaccttccgagctccctcctgcagccgccggccacgagaatagtagcccaggccagcccagagttgattcacc

SEQ ID NO: 33509 - DNA, 120 bp, synthetic construct
  source 1..120: mol_type = other DNA
tgcagtgtaggccacttctatagccacaggcaggcagaaagagacaaggtcaagggtgaaggtggtagaggaagccttctctacacccaccccaaagtagaggctctcatctggggtctg

SEQ ID NO: 33510 - DNA, 120 bp, synthetic construct
  source 1..120: mol_type = other DNA
gggggaaaggggttggcatgaggacactgctgacctgcccctacctggcccacagcccccagacccaagggcctcgaggcaaagtggccctgctctcaggagatgtactgaccagcatat

SEQ ID NO: 33511 - DNA, 120 bp, synthetic construct; identical to SEQ ID NO: 9825
  source 1..120: mol_type = other DNA

SEQ ID NO: 33512 - DNA, 120 bp, synthetic construct
  source 1..120: mol_type = other DNA
tatgctcccacttagggcttcccccaactaacccccttaagctttggagctggagtcagaccagagttatgtaattgtgtgtagctgtggctaagtttctggccttaattttctcagggt

SEQ ID NO: 33513 - DNA, 120 bp, synthetic construct
  source 1..120: mol_type = other DNA
gtatactggtgcaggaccttcctattcacaaaacactttcaggctcataaactcatttggtcccatgaaagccacatgagggaggaaatgctgaactactgctccattttactggtaaga

SEQ ID NO: 33514 - DNA, 120 bp, synthetic construct
  source 1..120: mol_type = other DNA
ctgaaatgcagttgcattatcttgactcagtgcaacttctgccttccaggctcaagcgatcctgtcacctcagcttcccgagtagctgggactacagacgctcaccaccacgcgagcata

SEQ ID NO: 33515 - DNA, 120 bp, synthetic construct; identical to SEQ ID NO: 9826
  source 1..120: mol_type = other DNA

SEQ ID NO: 33516 - DNA, 120 bp, synthetic construct
  source 1..120: mol_type = other DNA
tgaaacaaaaagacccagccaaagcagtcagtcacaatgaggccaaattttgaggccttccaagggtgatagctatctccctctcatccaccattcacatggggtccagcttctctcaag

SEQ ID NO: 33517 - DNA, 120 bp, synthetic construct
  source 1..120: mol_type = other DNA
tgcaaagactgtgaggccagggctgggatgggtcaaggatgaaagcctcctgtttgggagcatttgtgtatctctgatgcttactgtgactgtgtgtgtggataggggttgtttaggtgt

SEQ ID NO: 33518 - DNA, 120 bp, synthetic construct
  source 1..120: mol_type = other DNA
agaaaccaaggatcagagggacaaaagatctgtctgagaacagatggcaaatcagtgggagaacagagattagctatttttattcctaatctagtaaaccataggtggctgaccatcaac

SEQ ID NO: 33519 - DNA, 120 bp, synthetic construct; identical to SEQ ID NO: 9827
  source 1..120: mol_type = other DNA

SEQ ID NO: 33520 - DNA, 120 bp, synthetic construct
  source 1..120: mol_type = other DNA
ctcattttcatcaaaagagcttgcctcctccttcagaaaaaaaaaaaccaacttcaaatctacctccatttgcactgtcttaccctcctcctcttcagggtcctgctcctccaatcccgt

SEQ ID NO: 33521 - DNA, 120 bp, synthetic construct
  source 1..120: mol_type = other DNA
tcgagaccagcctggccaacatggcgaaaccccatctctactaaaaatccaaaaaaattagccagacgtgctcgcttgaacccaggaggcagagcttgcagtgagctgagatcatgccac

SEQ ID NO: 33522 - DNA, 120 bp, synthetic construct; identical to SEQ ID NO: 9828
  source 1..120: mol_type = other DNA

SEQ ID NO: 33523 - DNA, 120 bp, synthetic construct
  source 1..120: mol_type = other DNA
ctattaacaagtcaacctctgtccccattccattctctctagtaatcctttattgcccttcaacagaatctccttctggccaaagttcggtttatttaaaaacaaatagagctggacatg

SEQ ID NO: 33524 - DNA, 120 bp, synthetic construct
  source 1..120: mol_type = other DNA
tctctacaaaaacagaaaaacagaatttctcttctaccccttgtcaggcctctgagcccaagctaagccatcatatcctcagtaacctgcacttatacatccagatggcctgaagcaact

SEQ ID NO: 33525 - DNA, 120 bp, synthetic construct
  source 1..120: mol_type = other DNA
cttaagaaggttctttataatctccccacccttgagaatgtactttgtgagatccaccccctgcccccaaaacattgctcttaactccaatgcctatcccaaaacctataagaactaatg

SEQ ID NO: 33526 - DNA, 120 bp, synthetic construct; identical to SEQ ID NO: 9829
  source 1..120: mol_type = other DNA

SEQ ID NO: 33527 - DNA, 120 bp, synthetic construct
  source 1..120: mol_type = other DNA
cccttcatagccaaacttccttcaccaaacctgcttacttccacattcattctacaatctattctccaaagagcaaaggaatcttttccagatcacgtcacttccttccttataaccttc

SEQ ID NO: 33528 - DNA, 120 bp, synthetic construct
  source 1..120: mol_type = other DNA
cccaccccaataccccaccccaactccaagcagctgggaccacaggcgcacaccaccaccacatccagctaatttttgtatttttgttagagacagggtttcaccatgttgcccaggcta

SEQ ID NO: 33529 - DNA, 120 bp, synthetic construct
  source 1..120: mol_type = other DNA
ctttttttctccctccctctttccttccttccttttttcctttttctttcttttttaaatactgtaggcctttactatgggtcattaaattcttgagcaagctggttgtggtggctcaac

SEQ ID NO: 33530 - DNA, 120 bp, synthetic construct
  source 1..120: mol_type = other DNA
cttaaagaaaaaaaaagattgagcaaatatttatagagccccctaatatgtgccaagcagttttaggcacttggcatacttcagtaaataaaacatcaaaagttcctgccctcagggagc

SEQ ID NO: 33531 - DNA, 120 bp, synthetic construct; identical to SEQ ID NO: 9830
  source 1..120: mol_type = other DNA

SEQ ID NO: 33532 - DNA, 120 bp, synthetic construct
  source 1..120: mol_type = other DNA
agatgaggtggggagaggagggtcacaaagtaccttataggccattggagggatttggctgccacacccttgctcttagaaggcagtcctcttactacagccttgcaggtccagtgatcc

SEQ ID NO: 33533 - DNA, 120 bp, synthetic construct
  source 1..120: mol_type = other DNA
tcctctgtttggactcttttatgcttttacctaacaccttatcatttttcaagtcttgactgaaatgtccaaatcaggtcccctcatcttatcctatcacatatttctgccttgtagctc

SEQ ID NO: 33534 - DNA, 120 bp, synthetic construct; identical to SEQ ID NO: 9831
  source 1..120: mol_type = other DNA

SEQ ID NO: 33535 - DNA, 120 bp, synthetic construct
  source 1..120: mol_type = other DNA
cctcctgggctcaagccatcctctcacctcagcctcctgtagctgggactacaggtgcgcaccaccatgcccaactaatttttaattttctttttgtagagacaaggtttcactatgttg

SEQ ID NO: 33536 - DNA, 120 bp, synthetic construct; identical to SEQ ID NO: 2682
  source 1..120: mol_type = other DNA

SEQ ID NO: 33537 - DNA, 120 bp, synthetic construct
  source 1..120: mol_type = other DNA
ctcccaagtagtgggattacaggcgcccgcaccatacccagctaattttttttgtacttttagtagagacggggtttcaccatgttggccaggctggttttgaactccggacctcaggta

SEQ ID NO: 33538 - DNA, 120 bp, synthetic construct; identical to SEQ ID NO: 9832
  source 1..120: mol_type = other DNA

SEQ ID NO: 33539 - DNA, 120 bp, synthetic construct
  source 1..120: mol_type = other DNA
ctctcctagtctaactcctgggcgtgctttaagctcagctcaggcagcgtcaccttctctggaaagcccaaacccagccaccccactacccgctacccgcggcccacgctgatgaagaca

SEQ ID NO: 33540 - DNA, 120 bp, synthetic construct
  source 1..120: mol_type = other DNA
gtccacccgggctgcgagccggcagcacaggccaataggcaattagcgcgcgccaggctgccttccccgcgccggacccgggacgtctgaacggaagttcgacccatcggcgacccgacg

SEQ ID NO: 33541 - DNA, 120 bp, synthetic construct
  source 1..120: mol_type = other DNA
acagtgacgatggcgcagtttcagctcccgcagcttccgacggtgagcggcttcccagaggtagccttcaaagcctctgcgctctgggagaggggaaggcctcgggctcatagttctaga

SEQ ID NO: 33542 - DNA, 120 bp, synthetic construct
  source 1..120: mol_type = other DNA
atggaggcatggcgggagatgtagtctggagctcataacggttagtagtaatagttgtgattcagttcagtggagtggattgagcgttgtgatccaaaggaaggtaggacgtattgggag

SEQ ID NO: 33543 - DNA, 120 bp, synthetic construct; identical to SEQ ID NO: 9833
  source 1..120: mol_type = other DNA

SEQ ID NO: 33544 - DNA, 120 bp, synthetic construct; identical to SEQ ID NO: 9834
  source 1..120: mol_type = other DNA

SEQ ID NO: 33545 - DNA, 120 bp, synthetic construct
  source 1..120: mol_type = other DNA
atccaacagtagggaggggtttccccaacttccctccaggctcctggcacggggctggcatccggttgtacctgcaacacaggttatcttacgagtgaatggagggcccctacagcctcc

SEQ ID NO: 33546 - DNA, 120 bp, synthetic construct
  source 1..120: mol_type = other DNA
agaagaggaggccatgtcactgtgtcctcccagccttctggaagctattgcccatctgggcgtggcagggtccgtgcccttgcagccagggcaggtgcttggccgaggacaacggagcaa

SEQ ID NO: 33547 - DNA, 120 bp, synthetic construct
  source 1..120: mol_type = other DNA
agggctttctaatctccagagtcaacactccctgcttgctgaacatgcggaagcgggcgtcttctcccaggtccaggccattcttgaaccaggaaatcttgggctataaataaggtaaag

SEQ ID NO: 33548 - DNA, 120 bp, synthetic construct; identical to SEQ ID NO: 9835
  source 1..120: mol_type = other DNA

SEQ ID NO: 33549 - DNA, 120 bp, synthetic construct
  source 1..120: mol_type = other DNA
gttcaccaggggctgggtgaagcttggggcctcggagaagtccagggccttatagttgggtggctcataggtgatgcctgttggtgacaggacttggtaccgagagggccacacaaagct

SEQ ID NO: 33550 - DNA, 120 bp, synthetic construct
  source 1..120: mol_type = other DNA
tgtcactaaagccaaccatattctggctgaagacgcggaagtagtagccattgccaatgatgagctctggcaccacgcagtgggtgcggcggtaatgctccaagacggtgaaccactcct

SEQ ID NO: 33551 - DNA, 120 bp, synthetic construct
  source 1..120: mol_type = other DNA
gcagagggagggtgaggggtccacggtgaggacagtgaagggtagctgcggcctgggtctgccgggcctaggcagggtgcacgtggggaccccagaccctgggctcaccatggtcttctt

SEQ ID NO: 33552 - DNA, 120 bp, synthetic construct
  source 1..120: mol_type = other DNA
ggggaggacttggcttgtctgcgggagacagacccagttgggtcaccacgcctcctgacagtgagcagggggtcactggctccagggaccaccccacccctgccaaccagggccaggcct

SEQ ID NO: 33553 - DNA, 120 bp, synthetic construct; identical to SEQ ID NO: 9836
  source 1..120: mol_type = other DNA

SEQ ID NO: 33554 - DNA, 120 bp, synthetic construct
  source 1..120: mol_type = other DNA
ctgaacctggatcactccaagggccggccgccaccccagcctctggtacctcagatcaggccagccctgagacatcagtccactggatgggaacaacacactatagcctctctcccctgg

SEQ ID NO: 33555 - DNA, 120 bp, synthetic construct
  source 1..120: mol_type = other DNA
ccgttctgtgggtatagagtgggtagctaagtgagggcccgccacagctctgaggggctccacagctccaacctcccttgagacaaggcccagagagctgcagctaagaaaaaagctgcc

SEQ ID NO: 33556 - DNA, 120 bp, synthetic construct
  source 1..120: mol_type = other DNA
tgactgaagtcacacagctagtaagtcatagaccagggtgtaagcctgggctttgacaccctatgccctgtgttgttaccacctgagtttgctgcctcgttccagctttgagaaccaatc

SEQ ID NO: 33557 - DNA, 120 bp, synthetic construct; identical to SEQ ID NO: 9837
  source 1..120: mol_type = other DNA

SEQ ID NO: 33558 - DNA, 120 bp, synthetic construct
  source 1..120: mol_type = other DNA
gggactacaggcacgcgccaccacacctggctagtttttgtatttttagtagagacagggtttcactatgttggccaggctggtctcaaactcctgacctcaagtgatctgcctgccttg

SEQ ID NO: 33559 - DNA, 120 bp, synthetic construct
  source 1..120: mol_type = other DNA
tgcccagcgttctgggcagagcattctgggcctccccaactgtccccacctccactggacaccaagggcctggggtgtcaatggcgggtcttgtgactgcacaaaggggcactcacgcag

SEQ ID NO: 33560 - DNA, 120 bp, synthetic construct; identical to SEQ ID NO: 9838
  source 1..120: mol_type = other DNA

SEQ ID NO: 33561 - DNA, 120 bp, synthetic construct
  source 1..120: mol_type = other DNA
ggcatgatcttggctcaccgcaacttctgcctcccgagttcaagtgattctcctgcctcagcctcccgcgtagctgggatcacaggtgcccaccaccacacccggctaattttgtatttt

SEQ ID NO: 33562 - DNA, 120 bp, synthetic construct
  source 1..120: mol_type = other DNA
cgcgcctggccttaaatatgtttttaaaatgtagttgctgatttcgcactgctcaaagaagtgttacagtcagctttactctgcatttgtttttcactaggcaagcttttttacttctga

SEQ ID NO: 33563 - DNA, 120 bp, synthetic construct
  source 1..120: mol_type = other DNA
ggggaggggggttgggggcggggacactcacagccctctgggcagtactccacgctgtagccatccaggcctcctgctcccacgcgctctgggggccgccacttgagggagaccgtggtg

SEQ ID NO: 33564 - DNA, 120 bp, synthetic construct; identical to SEQ ID NO: 9839
  source 1..120: mol_type = other DNA

SEQ ID NO: 33565 - DNA, 120 bp, synthetic construct
  source 1..120: mol_type = other DNA
aagaccagcctggccaacatggtgaaactccgtctctacaaaaatacaaaaattagctgggcatggtggtggatgcctgtaatcccagctactcagaaggctgaggtgggagaattgctt

SEQ ID NO: 33566 - DNA, 120 bp, synthetic construct
  source 1..120: mol_type = other DNA
aaaactaaaactacagaaaacatgggaatttcctggcacgtatgattaggtgagttgactaagaactgaacaaaccaggaatcagtccctaaaacgagaggcctggacccttctccccac

SEQ ID NO: 33567 - DNA, 120 bp, synthetic construct
  source 1..120: mol_type = other DNA
ctcctgagccctgccacagtctcaacacctgttctgcccactcagaccccattatacagatgaggaagctgaggcttcagggagggatgactccagttggccccccggggaccatggagc

SEQ ID NO: 33568 - DNA, 120 bp, synthetic construct; identical to SEQ ID NO: 9840
  source 1..120: mol_type = other DNA
